(19) United States
(12) Patent Application Publication
(10) Pub. No.: US 2023/0330270 A1
(43) Pub. Date: Oct. 19, 2023

(54) MATERIALS AND METHODS FOR TREATMENT OF FRIEDREICH ATAXIA AND OTHER RELATED DISORDERS

(71) Applicant: CRISPR Therapeutics AG, Zug (CH)

(72) Inventors: Ante Sven Lundberg, South Boston, MA (US); Samarth Kulkarni, South Boston, MA (US); Lawrence Klein, South Boston, MA (US); Hari Kumar Padmanabhan, South Boston, MA (US)

(21) Appl. No.: 18/161,090

(22) Filed: Jan. 30, 2023

Related U.S. Application Data
(62) Division of application No. 16/312,630, filed on Dec. 21, 2018, now Pat. No. 11,564,997.
(60) Provisional application No. 62/355,930, filed on Jun. 29, 2016.
(60) Provisional application No. 62/461,821, filed on Feb. 22, 2017.

(51) Int. Cl. A61K 48/00; C07K 14/47; C12N 9/22; C12N 15/90; C12N 15/113; A61P 25/28; A61K 35/30; C12N 5/0793; C12N 5/079; C12N 15/11

(52) U.S. Cl. CPC A61K 48/0066; C07K 14/47; C12N 9/22; C12N 15/907; A61K 48/005; C12N 15/113; A61K 48/0058; A61P 25/28; A61K 35/30; C12N 5/0619; C12N 5/0622; C12N 15/11; C12Y 301/21001; C12N 2310/20; C12N 2800/80

(57) ABSTRACT

The present application provides materials and methods for treating a patient with one or more condition associated with FXN whether ex vivo or in vivo. In addition, the present application provides materials and methods for editing and/or modulating the expression of FXN gene in a cell by genome editing.

### RELATED APPLICATIONS

[0001] This application is a divisional application of U.S. application Ser. No. 16/312,630, filed Dec. 21, 2018, now issued as 11,564,997, which is the U.S. National Phase under 35 U.S.C. § 371 of International Application No. PCT/M2017/053742, filed Jun. 22, 2017, which claims the benefit of U.S. Provisional Application No. 62/355,930 filed Jun. 29, 2016, and U.S. Provisional Application No. 62/461,821 filed Feb. 22, 2017, both of which are incorporated herein in their entirety by reference.

### FIELD

[0002] The present disclosure relates to the field of gene editing and specifically to the alteration of the Frataxin (FXN) gene.

### INCORPORATION BY REFERENCE OF SEQUENCE LISTING

[0003] The present application is being filed along with a Sequence Listing in electronic format. The Sequence Listing is provided as a file entitled 80EM-341740-US2_SequenceListing, created May 28, 2023, which is 62,864,584 bytes in size. The information in the electronic format of the Sequence Listing is incorporated herein by reference in its entirety.

### BACKGROUND

[0004] Genome engineering refers to the strategies and techniques for the targeted, specific modification of the genetic information (genome) of living organisms. Genome engineering is a very active field of research because of the wide range of possible applications, particularly in the areas of human health. For example, genome engineering can be used to alter (e.g., correct or knock-out) a gene carrying a harmful mutation or to explore the function of a gene. Early technologies developed to insert a transgene into a living cell were often limited by the random nature of the insertion of the new sequence into the genome. Random insertions into the genome may result in disrupting normal regulation of neighboring genes leading to severe unwanted effects. Furthermore, random integration technologies offer little reproducibility, as there is no guarantee that the sequence would be inserted at the same place in two different cells. Recent genome engineering strategies, such as zinc finger nucleases (ZFNs), transcription activator like effector nucleases (TALENs), homing endonucleases (HEs) and MegaTALs, enable a specific area of the DNA to be modified, thereby increasing the precision of the alteration compared to early technologies. These newer platforms offer a much larger degree of reproducibility, but still have their limitations.

[0005] Despite efforts from researchers and medical professionals worldwide who have been trying to address genetic disorders, and despite the promise of genome engineering approaches, there still remains a critical need for developing safe and effective treatments involving FXN related indications.

[0006] By using genome engineering tools to create permanent changes to the genome that can address the FXN related disorders or conditions with as few as a single treatment, the resulting therapy may completely remedy certain FXN related indications and/or diseases.

### SUMMARY

[0007] Provided herein are cellular, ex vivo and in vivo methods for creating permanent changes to the genome by deleting and/or correcting the trinucleotide repeat expansion or replacing one or more nucleotide bases, or one or more exons and/or introns within or near the Frataxin (FXN) gene, or otherwise introducing insertions, deletions or mutations of at least one nucleotide within or near the FXN gene or other DNA sequences that encode regulatory elements of the FXN gene by genome editing. Such methods can reduce or eliminate the expression or function of aberrant FXN gene products and/or restore the wild-type FXN protein activity, which can be used to treat a FXN related condition or disorder such as Friedreich's Ataxia. Also provided herein are components and compositions, and vectors for performing such methods.

[0008] Provided herein is a method for editing a Frataxin (FXN) gene in a cell by genome editing comprising the step of introducing into the cell one or more deoxyribonucleic acid (DNA) endonucleases to effect one or more single-strand breaks (SSBs) or double-strand breaks (DSBs) within or near the FXN gene that results in permanent deletion of the expanded trinucleotide repeat or replacement of one or more nucleotide bases, or one or more exons and/or introns within or near the FXN gene, thereby restoring the FXN gene function.

[0009] Also provided herein is a method for editing a Frataxin (FXN) gene in a cell by genome editing comprising the step of introducing into the cell one or more deoxyribonucleic acid (DNA) endonucleases to effect one or more single-strand breaks (SSBs) or double-strand breaks (DSBs) within or near the FXN gene or FXN regulatory elements that results in one or more permanent insertion, deletion or mutation of at least one nucleotide within or near the FXN gene, thereby reducing or eliminating the expression or function of aberrant FXN gene products.

[0010] Also provided herein is an ex vivo method for treating a patient having a FXN related condition or disorder comprising the steps of: creating a patient specific induced pluripotent stem cell (iPSC); editing within or near a Frataxin (FXN) gene or other DNA sequences that encode regulatory elements of the FXN gene of the iPSC; differentiating the genome-edited iPSC into a neuron or glial cell of the Central Nervous System (CNS); and implanting the neuron or glial cell of the Central Nervous System (CNS) into the patient.

[0011] In some aspects, the editing step comprises: introducing into the iPSC one or more deoxyribonucleic acid (DNA) endonucleases to effect one or more single-strand breaks (SSBs) or double-strand breaks (DSBs) within or near the FXN gene that results in permanent deletion of the expanded trinucleotide repeat or replacement of one or more nucleotide bases, or one or more exons and/or introns within or near the FXN gene, thereby restoring the FXN gene function.

[0012] In some aspects, the editing step comprises: introducing into the iPSC one or more deoxyribonucleic acid (DNA) endonucleases to effect one or more single-strand breaks (SSBs) or double-strand breaks (DSBs) within or near the FXN gene or FXN regulatory elements that results in one or more permanent insertion, deletion or mutation of at least one nucleotide within or near the FXN gene, thereby reducing or eliminating the expression or function of aberrant FXN gene products.

[0013] Also provided herein is an ex vivo method for treating a patient having a FXN related condition or disorder comprising: isolating a mesenchymal stem cell from the patient; editing within or near a Frataxin (FXN) gene or other DNA sequences that encode regulatory elements of the FXN gene of the mesenchymal stem cell; differentiating the genome-edited mesenchymal stem cell into a neuron or glial cell of the Central Nervous System (CNS); and implanting the neuron or glial cell of the Central Nervous System (CNS) into the patient.

[0014] In some aspects, the editing step comprises: introducing into the mesenchymal stem cell one or more deoxyribonucleic acid (DNA) endonucleases to effect one or more single-strand breaks (SSBs) or double-strand breaks (DSBs) within or near the FXN gene that results in permanent deletion of the expanded trinucleotide repeat or replacement of one or more nucleotide bases, or one or more exons and/or introns within or near the FXN gene, thereby restoring the FXN gene function.

[0015] In some aspects, the editing step comprises: introducing into the mesenchymal stem cell one or more deoxyribonucleic acid (DNA) endonucleases to effect one or more single-strand breaks (SSBs) or double-strand breaks (DSBs) within or near the FXN gene or FXN regulatory elements that results in one or more permanent insertion, deletion or mutation of at least one nucleotide within or near the FXN gene, thereby reducing or eliminating the expression or function of aberrant FXN gene products.

[0016] Also provided herein is an in vivo method for treating a patient with a FXN related disorder comprising: editing the Frataxin (FXN) gene in a cell of the patient.

[0017] In some aspects, the editing step comprises: introducing into the cell one or more deoxyribonucleic acid (DNA) endonucleases to effect one or more single-strand breaks (SSBs) or double-strand breaks (DSBs) within or near the FXN gene that results in permanent deletion of the expanded trinucleotide repeat or replacement of one or more nucleotide bases, or one or more exons and/or introns within or near the FXN gene, thereby restoring the FXN gene function.

[0018] In some aspects, the editing step comprises: introducing into the cell one or more deoxyribonucleic acid (DNA) endonucleases to effect one or more single-strand breaks (SSBs) or double-strand breaks (DSBs) within or near the FXN gene or FXN regulatory elements that results in one or more permanent insertion, deletion or mutation of at least one nucleotide within or near the FXN gene, thereby reducing or eliminating the expression or function of aberrant FXN gene products.

[0019] In some aspects, the cell is a cell of the Central Nervous System (CNS). In some aspects, the cell of the Central Nervous System (CNS) is a neuron. In some aspects, the cell of the Central Nervous System (CNS) is a glial cell. In some aspects, the one or more deoxyribonucleic acid (DNA) endonuclease is delivered to the cell of the Central Nervous System (CNS) via intraparenchymal, intravenous, intra-arterial, intracerebroventricular, intracisternal, intrathecal, intracranial or intraperitoneal administration routes.

[0020] Also provided herein is a method of altering the contiguous genomic sequence of a FXN gene in a cell comprising: contacting the cell with one or more deoxyribonucleic acid (DNA) endonuclease to effect one or more single-strand breaks (SSBs) or double-strand breaks (DSBs). In some aspects, the alteration of the contiguous genomic sequence occurs in the first intron of the FXN gene. In some aspects, the alteration of the contiguous genomic sequence occurs in one or more exons of the FXN gene.

[0021] In some aspects, the one or more deoxyribonucleic acid (DNA) endonuclease is selected from any of those sequences in SEQ ID NOs: 1-620 and variants having at least 90% homology to any of the sequences listed in SEQ ID NOs: 1-620.

[0022] In some aspects, the one or more deoxyribonucleic acid (DNA) endonuclease is one or more protein or polypeptide. In some aspects, the one or more deoxyribonucleic acid (DNA) endonuclease is one or more polynucleotide encoding the one or more DNA endonuclease. In some aspects, the one or more deoxyribonucleic acid (DNA) endonuclease is one or more ribonucleic acid (RNA) encoding the one or more DNA endonuclease. In some aspects, the one or more ribonucleic acid (RNA) is one or more chemically modified RNA. In some aspects, the one or more ribonucleic acid (RNA) is chemically modified in the coding region. In some aspects, the one or more polynucleotide or one or more ribonucleic acid (RNA) is codon optimized.

[0023] In some aspects, the methods further comprise introducing one or more gRNA or one or more sgRNA. In some aspects, the one or more gRNA or one or more sgRNA comprises a spacer sequence that is complementary to a sequence within or near the expanded trinucleotide repeat in the FXN gene. In some aspects, the one or more gRNA or one or more sgRNA comprises a spacer sequence that is complementary to a DNA sequence within or near the FXN gene. In some aspects, the one or more gRNA or one or more sgRNA comprises a spacer sequence that is complementary to a sequence flanking the FXN gene or other sequence that encodes a regulatory element of the FXN gene. In some aspects, the one or more gRNA or one or more sgRNA is chemically modified.

[0024] In some aspects, the one or more gRNA or one or more sgRNA is pre-complexed with the one or more deoxyribonucleic acid (DNA) endonuclease. In some aspects, the pre-complexing involves a covalent attachment of the one or more gRNA or one or more sgRNA to the one or more deoxyribonucleic acid (DNA) endonuclease.

[0025] In some aspects, the one or more deoxyribonucleic acid (DNA) endonuclease is formulated in a liposome or lipid nanoparticle. In some aspects, the one or more deoxyribonucleic acid (DNA) endonuclease is formulated in a liposome or a lipid nanoparticle, which also comprises the one or more gRNA or one or more sgRNA.

[0026] In some aspects, the one or more deoxyribonucleic acid (DNA) endonuclease is encoded in an AAV vector particle. In some aspects, the one or more gRNA or one or more sgRNA is encoded in an AAV vector particle. In some aspects, the one or more deoxyribonucleic acid (DNA) endonuclease is encoded in an AAV vector particle, which also encodes the one or more gRNA or one or more sgRNA. In some aspects, the AAV vector particle is selected from the group consisting of any of those disclosed in SEQ ID NOs: 4734-5302 and Table 2.

[0027] In some aspects, the methods further comprises introducing into the cell a donor template comprising at least a portion of the wild-type FXN gene. In some aspects, at least a portion of the wild-type FXN gene comprises one or more sequences selected from a FXN exon, a FXN intron, and a sequence comprising an exon:intron junction of FXN. In some aspects, the donor template comprises homologous arms to the genomic locus of the FXN gene. In some aspects, the donor template is either a single or double stranded polynucleotide.

[0028] In some aspects, the donor template is encoded in an AAV vector particle, where the AAV vector serotype is selected from any of those listed in SEQ ID NOs: 4734-5302 and Table 2. In some aspects, the one or more polynucleotide encoding one or more deoxyribonucleic acid (DNA) endonuclease is formulated into a lipid nanoparticle, and the one or more gRNA or one or more sgRNA is delivered to the cell ex vivo by electroporation and the donor template is delivered to the cell by an adeno-associated virus (AAV) vector. In some aspects, the one or more polynucleotide encoding one or more deoxyribonucleic acid (DNA) endonuclease is formulated into a liposome or lipid nanoparticle, which also comprises the one or more gRNA or one or more sgRNA and the donor template.

[0029] Also provided herein is a single-molecule guide RNA comprising: at least a spacer sequence that is an RNA sequence corresponding to any of SEQ ID NOs: 5305-37514 and 37549. In some aspects, the single-molecule guide polynucleotide further comprises a spacer extension region. In some aspects, the single-molecule guide RNA further comprises a tracrRNA extension region. In some aspects, the single-molecule guide RNA is chemically modified.

[0030] In some aspects, the single-molecule guide RNA is pre-complexed with a DNA endonuclease. In some aspects, the DNA endonuclease is a Cas9 or CPf1 endonuclease. In some aspects, the Cas9 or Cpf1 endonuclease is selected from the group consisting of: S. pyogenes Cas9, S. aureus Cas9, N. meningitides Cas9, S. thermophilus CRISPR1 Cas9, S. thermophilus CRISPR 3 Cas9, T. denticola Cas9, L. bacterium ND2006 Cpf1 and Acidaminococcus sp. BV3L6 Cpf1, and variants having at least 90% homology to these endonucleases. In some aspects, the Cas9 or Cpf1 endonuclease comprises one or more nuclear localization signals (NLSs). In some aspects, at least one NLS is at or within 50 amino acids of the amino-terminus of the Cas9 or Cpf1 endonuclease and/or at least one NLS is at or within 50 amino acids of the carboxy-terminus of the Cas9 or Cpf1 endonuclease.

[0031] Also provided herein is a non-naturally occurring CRISPR/Cas system comprising a polynucleotide encoding a Cas9 or Cpf1 enzyme and at least one single-molecule guide RNA described herein. In some aspects, the polynucleotide encoding a Cas9 or Cpf1 enzyme is selected from the group consisting of: S. pyogenes Cas9, S. aureus Cas9, N. meningitides Cas9, S. thermophilus CRISPR1 Cas9, S. thermophilus CRISPR 3 Cas9, T. denticola Cas9, L. bacterium ND2006 Cpf1 and Acidaminococcus sp. BV3L6 Cpf1, and variants having at least 90% homology to these endonucleases. In some aspects, the polynucleotide encoding a Cas9 or Cpf1 endonuclease comprises one or more nuclear localization signals (NLSs). In some aspects, at least one NLS is at or within 50 amino acids of the amino-terminus of the polynucleotide encoding a Cas9 or Cpf1 endonuclease and/or at least one NLS is at or within 50 amino acids of the carboxy-terminus of the polynucleotide encoding a Cas9 or Cpf1 endonuclease. In some aspects, polynucleotide encoding a Cas9 or Cpf1 endonuclease is codon optimized for expression in a eukaryotic cell.

[0032] Also provided herein is RNA encoding the single-molecule guide RNA described herein.

[0033] Also provided herein is RNA encoding the CRISPR/Cas system described herein.

[0034] Also provided herein is a DNA encoding the single-molecule guide RNA described herein.

[0035] Also provided herein is a DNA encoding the CRISPR/Cas system described herein.

[0036] Also provided herein is a vector comprising a DNA encoding the single-molecule guide RNA and CRISPR/Cas system. In some aspects, the vector is a plasmid. In some aspects, the vector is an AAV vector particle, wherein the AAV vector particle is selected from those listed in SEQ ID NOs: 4734-5302 or Table 2.

### BRIEF DESCRIPTION OF THE DRAWINGS

[0037] Various aspects of materials and methods disclosed and described in this specification can be better understood by reference to the accompanying figures, in which:

[0038] FIGS. 1A-B depict the type II CRISPR/Cas system;

[0039] FIG. 1A is a depiction of the type II CRISPR/Cas system including gRNA;

[0040] FIG. 1B is another depiction of the type II CRISPR/Cas system including sgRNA;

[0041] FIGS. 2A-E describe the cutting efficiencies of S. pyogenes gRNAs selected via an in-vitro transcribed (IVT) gRNA screen in HEK293T cells;

[0042] FIG. 2A describes the cutting efficiencies in the range of 81.2-97.6% of S. pyogenes gRNAs selected via an in-vitro transcribed (IVT) gRNA screen in HEK293T cells;

[0043] FIG. 2B describes the cutting efficiencies in the range of 72.6-81.2% of S. pyogenes gRNAs selected via an in-vitro transcribed (IVT) gRNA screen in HEK293T cells;

[0044] FIG. 2C describes the cutting efficiencies in the range of 59.2-72.3% of S. pyogenes gRNAs selected via an in-vitro transcribed (IVT) gRNA screen in HEK293T cells;

[0045] FIG. 2D describes the cutting efficiencies in the range of 32.3-59.0% of S. pyogenes gRNAs selected via an in-vitro transcribed (IVT) gRNA screen in HEK293T cells;

[0046] FIG. 2E describes the cutting efficiencies in the range of 0-32.1% of S. pyogenes gRNAs selected via an in-vitro transcribed (IVT) gRNA screen in HEK293T cells;

[0047] FIGS. 3A-C describe the cutting efficiency of S. pyogenes gRNAs in HEK293T cells;

[0048] FIG. 3A describes the cutting efficiency in the range of 74.3-97.6% of S. pyogenes gRNAs in HEK293T cells;

[0049] FIG. 3B describes the cutting efficiency in the range of 53.9-74.1% of S. pyogenes gRNAs in HEK293T cells;

[0050] FIG. 3C describes the cutting efficiency in the range of 0-53.4% of S. pyogenes gRNAs in HEK293T cells;

[0051] FIGS. 4A-C describe the cutting efficiencies of S. aureus gRNAs selected via an in-vitro transcribed (IVT) gRNA screen in HEK293T cells;

[0052] FIG. 4A describes the cutting efficiencies in the range of 26.4-50.5% of S. aureus gRNAs selected via an in-vitro transcribed (IVT) gRNA screen in HEK293T cells;

[0053] FIG. 4B describes the cutting efficiencies in the range of 3.6-25.8% of S. aureus gRNAs selected via an in-vitro transcribed (IVT) gRNA screen in HEK293T cells;

[0054] FIG. 4C describes the cutting efficiencies in the range of 0-3.3% of S. aureus gRNAs selected via an in-vitro transcribed (IVT) gRNA screen in HEK293T cells; and

[0055] FIG. 5 describes the cutting efficiency in the range of 0-50.5% of S. aureus gRNAs in HEK293T cells.

### BRIEF DESCRIPTION OF SEQUENCE LISTING

[0056] SEQ ID NOs: 1-620 are Cas endonuclease ortholog sequences.

[0057] SEQ ID NOs: 621-631 do not include sequences.

[0058] SEQ ID NOs: 632-4715 are microRNA sequences.

[0059] SEQ ID NOs: 4716-4733 do not include sequences.

[0060] SEQ ID NOs: 4734-5302 are AAV serotype sequences.

[0061] SEQ ID NO: 5303 is a FXN nucleotide sequence.

[0062] SEQ ID NO: 5304 is a gene sequence including 1-5 kilobase pairs upstream and/or downstream of the FXN gene.

[0063] SEQ ID NOs: 5305-5474 are 20 bp spacer sequences for targeting within or near a FXN gene or other DNA sequence that encodes a regulatory element of the FXN gene with a T denticola Cas9 endonuclease.

[0064] SEQ ID NOs: 5475-5827 are 20 bp spacer sequences for targeting within or near a FXN gene or other DNA sequence that encodes a regulatory element of the FXN gene with a S. thermophilus Cas9 endonuclease.

[0065] SEQ ID NOs: 5828-7262 are 20 bp spacer sequences for targeting within or near a FXN gene or other DNA sequence that encodes a regulatory element of the FXN gene with a S. aureus Cas9 endonuclease.

[0066] SEQ ID NOs: 7263-8441 are 20 bp spacer sequences for targeting within or near a FXN gene or other DNA sequence that encodes a regulatory element of the FXN gene with a N. meningitides Cas9 endonuclease.

[0067] SEQ ID NOs: 8442-22079 are 20 bp spacer sequences for targeting within or near a FXN gene or other DNA sequence that encodes a regulatory element of the FXN gene with a S. pyogenes Cas9 endonuclease.

[0068] SEQ ID NOs: 22080-37514 are 20 bp spacer sequences for targeting within or near a FXN gene or other DNA sequence that encodes a regulatory element of the FXN gene with an Acidaminococcus, a Lachnospiraceae, and a Franciscella Novicida Cpf1 endonuclease.

[0069] SEQ ID NOs: 37515-37544 do not include sequences.

[0070] SEQ ID NO: 37545 is a sample guide RNA (gRNA) for a S. pyogenes Cas9 endonuclease.

[0071] SEQ ID NOs: 37546-37548 show sample sgRNA sequences.

[0072] SEQ ID NO: 37549 is a 20 bp spacer sequence for targeting within or near a FXN gene or other DNA sequence that encodes a regulatory element of the FXN gene with a S. pyogenes Cas9 endonuclease.

### DETAILED DESCRIPTION

### I. Introduction

[0073] Genome Editing

[0074] The present disclosure provides strategies and techniques for the targeted, specific alteration of the genetic information (genome) of living organisms. As used herein, the term “alteration” or “alteration of genetic information” refers to any change in the genome of a cell. In the context of treating genetic disorders, alterations may include, but are not limited to, insertion, deletion and correction. As used herein, the term “insertion” refers to an addition of one or more nucleotides in a DNA sequence. Insertions can range from small insertions of a few nucleotides to insertions of large segments such as a cDNA or a gene. The term “deletion” refers to a loss or removal of one or more nucleotides in a DNA sequence or a loss or removal of the function of a gene. In some cases, a deletion can include, for example, a loss of a few nucleotides, an exon, an intron, a gene segment, or the entire sequence of a gene. In some cases, deletion of a gene refers to the elimination or reduction of the function or expression of a gene or its gene product. This can result from not only a deletion of sequences within or near the gene, but also other events (e.g., insertion, nonsense mutation) that disrupt the expression of the gene. The term “correction”, as used herein, refers to a change of one or more nucleotides of a genome in a cell, whether by insertion, deletion or substitution. Such correction may result in a more favorable genotypic or phenotypic outcome, whether in structure or function, to the genomic site which was corrected. One non-limiting example of a “correction” includes the correction of a mutant or defective sequence to a wild-type sequence which restores structure or function to a gene or its gene product(s). Depending on the nature of the mutation, correction may be achieved via various strategies disclosed herein. In one non-limiting example, a missense mutation may be corrected by replacing the region containing the mutation with its wild-type counterpart. As another example, duplication mutations (e.g., repeat expansions) in a gene may be corrected by removing the extra sequences.

[0075] In some aspects, alterations may also include a gene knock-in, knock-out or knock-down. As used herein, the term “knock-in” refers to an addition of a DNA sequence, or fragment thereof into a genome. Such DNA sequences to be knocked-in may include an entire gene or genes, may include regulatory sequences associated with a gene or any portion or fragment of the foregoing. For example, a cDNA encoding the wild-type protein may be inserted into the genome of a cell carrying a mutant gene. Knock-in strategies need not replace the defective gene, in whole or in part. In some cases, a knock-in strategy may further involve substitution of an existing sequence with the provided sequence, e.g., substitution of a mutant allele with a wild-type copy. On the other hand, the term “knock-out” refers to the elimination of a gene or the expression of a gene. For example, a gene can be knocked out by either a deletion or an addition of a nucleotide sequence that leads to a disruption of the reading frame. As another example, a gene may be knocked out by replacing a part of the gene with an irrelevant sequence. Finally, the term “knock-down” as used herein refers to reduction in the expression of a gene or its gene product(s). As a result of a gene knock-down, the protein activity or function may be attenuated or the protein levels may be reduced or eliminated.

[0076] Genome editing generally refers to the process of modifying the nucleotide sequence of a genome, preferably in a precise or pre-determined manner. Examples of methods of genome editing described herein include methods of using site-directed nucleases to cut deoxyribonucleic acid (DNA) at precise target locations in the genome, thereby creating single-strand or double-strand DNA breaks at particular locations within the genome. Such breaks can be and regularly are repaired by natural, endogenous cellular processes, such as homology-directed repair (HDR) and non-homologous end joining (NHEJ), as reviewed in Cox et al., Nature Medicine 21(2), 121-31 (2015). These two main DNA repair processes consist of a family of alternative pathways. NHEJ directly joins the DNA ends resulting from a double-strand break, sometimes with the loss or addition of a nucleotide sequence, which may disrupt or enhance gene expression. HDR utilizes a homologous sequence, or donor sequence, as a template for inserting a defined DNA sequence at the break point. The homologous sequence can be in the endogenous genome, such as a sister chromatid. Alternatively, the donor can be an exogenous nucleic acid, such as a plasmid, a single-strand oligonucleotide, a double-stranded oligonucleotide, a duplex oligonucleotide or a virus, that has regions of high homology with the nuclease-cleaved locus, but which can also contain additional sequence or sequence changes including deletions that can be incorporated into the cleaved target locus. A third repair mechanism can be microhomology-mediated end joining (MMEJ), also referred to as “Alternative NHEJ”, in which the genetic outcome is similar to NHEJ in that small deletions and insertions can occur at the cleavage site. MMEJ can make use of homologous sequences of a few base pairs flanking the DNA break site to drive a more favored DNA end joining repair outcome, and recent reports have further elucidated the molecular mechanism of this process; see, e.g., Cho and Greenberg, Nature 518, 174-76 (2015); Kent et al., Nature Structural and Molecular Biology, Adv. Online doi:10.1038/nsmb.2961(2015); Mateos-Gomez et al., Nature 518, 254-57 (2015); Ceccaldi et al., Nature 528, 258-62 (2015). In some instances, it may be possible to predict likely repair outcomes based on analysis of potential microhomologies at the site of the DNA break.

[0077] Each of these genome editing mechanisms can be used to create desired genomic alterations. A step in the genome editing process can be to create one or two DNA breaks, the latter as double-strand breaks or as two single-stranded breaks, in the target locus as near the site of intended mutation. This can be achieved via the use of site-directed polypeptides, as described and illustrated herein.

[0078] CRISPR Endonuclease System

[0079] A CRISPR(Clustered Regularly Interspaced Short Palindromic Repeats) genomic locus can be found in the genomes of many prokaryotes (e.g., bacteria and archaea). In prokaryotes, the CRISPR locus encodes products that function as a type of immune system to help defend the prokaryotes against foreign invaders, such as virus and phage. There are three stages of CRISPR locus function: integration of new sequences into the CRISPR locus, expression of CRISPR RNA (crRNA), and silencing of foreign invader nucleic acid. Five types of CRISPR systems (e.g., Type I, Type II, Type III, Type U, and Type V) have been identified.

[0080] A CRISPR locus includes a number of short repeating sequences referred to as “repeats.” When expressed, the repeats can form secondary structures (e.g., hairpins) and/or comprise unstructured single-stranded sequences. The repeats usually occur in clusters and frequently diverge between species. The repeats are regularly interspaced with unique intervening sequences referred to as “spacers,” resulting in a repeat-spacer-repeat locus architecture. The spacers are identical to or have high homology with known foreign invader sequences. A spacer-repeat unit encodes a crisprRNA (crRNA), which is processed into a mature form of the spacer-repeat unit. A crRNA comprises a “seed” or spacer sequence that is involved in targeting a target nucleic acid (in the naturally occurring form in prokaryotes, the spacer sequence targets the foreign invader nucleic acid). A spacer sequence is located at the 5′ or 3′ end of the crRNA.

[0081] A CRISPR locus also comprises polynucleotide sequences encoding CRISPR Associated (Cas) genes. Cas genes encode endonucleases involved in the biogenesis and the interference stages of crRNA function in prokaryotes. Some Cas genes comprise homologous secondary and/or tertiary structures.

[0082] Type II CRISPR Systems

[0083] crRNA biogenesis in a Type II CRISPR system in nature requires a trans-activating CRISPR RNA (tracrRNA). Non-limiting examples of Type II CRISPR systems are shown in FIGS. 1A and 1B. The tracrRNA can be modified by endogenous RNaseIII, and then hybridizes to a crRNA repeat in the pre-crRNA array. Endogenous RNaseIII can be recruited to cleave the pre-crRNA. Cleaved crRNAs can be subjected to exoribonuclease trimming to produce the mature crRNA form (e.g., 5′ trimming). The tracrRNA can remain hybridized to the crRNA, and the tracrRNA and the crRNA associate with a site-directed polypeptide (e.g., Cas9). The crRNA of the crRNA-tracrRNA-Cas9 complex can guide the complex to a target nucleic acid to which the crRNA can hybridize. Hybridization of the crRNA to the target nucleic acid can activate Cas9 for targeted nucleic acid cleavage. The target nucleic acid in a Type II CRISPR system is referred to as a protospacer adjacent motif (PAM). In nature, the PAM is essential to facilitate binding of a site-directed polypeptide (e.g., Cas9) to the target nucleic acid. Type II systems (also referred to as Nmeni or CASS4) are further subdivided into Type II-A (CASS4) and II-B (CASS4a). Jinek et al., Science, 337(6096):816-821 (2012) showed that the CRISPR/Cas9 system is useful for RNA-programmable genome editing, and international patent application publication number WO2013/176772 provides numerous examples and applications of the CRISPR/Cas endonuclease system for site-specific gene editing.

[0084] Type V CRISPR Systems

[0085] Type V CRISPR systems have several important differences from Type II systems. For example, Cpf1 is a single RNA-guided endonuclease that, in contrast to Type II systems, lacks tracrRNA. In fact, Cpf1-associated CRISPR arrays can be processed into mature crRNAs without the requirement of an additional trans-activating tracrRNA. The Type V CRISPR array can be processed into short mature crRNAs of 42-44 nucleotides in length, with each mature crRNA beginning with 19 nucleotides of direct repeat followed by 23-25 nucleotides of spacer sequence. In contrast, mature crRNAs in Type II systems can start with 20-24 nucleotides of spacer sequence followed by about 22 nucleotides of direct repeat. Also, Cpf1 can utilize a T-rich protospacer-adjacent motif such that Cpf1-crRNA complexes efficiently cleave target DNA preceded by a short T-rich PAM, which is in contrast to the G-rich PAM following the target DNA for Type II systems. Thus, Type V systems cleave at a point that is distant from the PAM, while Type II systems cleave at a point that is adjacent to the PAM. In addition, in contrast to Type II systems, Cpf1 cleaves DNA via a staggered DNA double-stranded break with a 4 or 5 nucleotide 5′ overhang. Type II systems cleave via a blunt double-stranded break. Similar to Type II systems, Cpf1 contains a predicted RuvC-like endonuclease domain, but lacks a second HNH endonuclease domain, which is in contrast to Type II systems.

[0086] Cas Genes/Polypeptides and Protospacer Adjacent Motifs

[0087] Exemplary CRISPR/Cas polypeptides include the Cas9 polypeptides as published in Fonfara et al., Nucleic Acids Research, 42: 2577-2590 (2014). The CRISPR/Cas gene naming system has undergone extensive rewriting since the Cas genes were discovered. Fonfara et al., also provides PAM sequences for the Cas9 polypeptides from various species (see also SEQ ID NOs: 1-37).

### II. Compositions and Methods of the Disclosure

[0088] Provided herein are cellular, ex vivo and in vivo methods for using genome engineering tools to create permanent changes to the genome by: 1) deleting the abnormal repeat expansion within the FXN gene, by inducing two double-stranded DNA breaks at both sides of the expanded region, and replacing with a corrected sequence; 2) deleting the abnormal repeat expansion within the FXN gene, by inducing one double-stranded DNA break proximal to the expanded region, and replacing with a corrected sequence; 3) deleting or mutating the FXN gene by inducing one or more insertions or deletions within or near the FXN gene or other DNA sequences that encode regulatory elements of the FXN gene; or 4) deleting the mutant FXN gene and inserting a wild-type FXN gene, a cDNA or a minigene (comprised of one or more exons and introns or natural or synthetic introns) into the FXN gene locus or a safe harbor locus. Such methods use endonucleases, such as CRISPR-associated (Cas9, Cpf1 and the like) nucleases, to permanently edit within or near the genomic locus of the FXN gene or other DNA sequences that encode regulatory elements of the FXN gene. In this way, examples set forth in the present disclosure can help to restore the wild-type or similar FXN intronic sequence of, or otherwise reduce or eliminate the expression of, the FXN gene with as few as a single treatment (rather than deliver potential therapies for the lifetime of the patient).

[0089] Site-Directed Polypeptides (Endonucleases, Enzymes)

[0090] A site-directed polypeptide is a nuclease used in genome editing to cleave DNA. The site-directed polypeptide can be administered to a cell or a patient as either: one or more polypeptides, or one or more mRNAs encoding the polypeptide. Any of the enzymes or orthologs listed in SEQ ID NOs: 1-620, or disclosed herein, may be utilized in the methods herein.

[0091] In the context of a CRISPR/Cas9 or CRISPR/Cpf1 system, the site-directed polypeptide can bind to a guide RNA that, in turn, specifies the site in the target DNA to which the polypeptide is directed. In the CRISPR/Cas9 or CRISPR/Cpf1 systems disclosed herein, the site-directed polypeptide can be an endonuclease, such as a DNA endonuclease.

[0092] A site-directed polypeptide can comprise a plurality of nucleic acid-cleaving (i.e., nuclease) domains. Two or more nucleic acid-cleaving domains can be linked together via a linker. For example, the linker can comprise a flexible linker. Linkers can comprise 1, 2, 3, 4, 5, 6, 7, 8, 9, 10, 11, 12, 13, 14, 15, 16, 17, 18, 19, 20, 21, 22, 23, 24, 25, 30, 35, 40 or more amino acids in length.

[0093] Naturally-occurring wild-type Cas9 enzymes comprise two nuclease domains, a HNH nuclease domain and a RuvC domain. Herein, the term “Cas9” refers to both a naturally-occurring and a recombinant Cas9. Cas9 enzymes contemplated herein can comprise a HNH or HNH-like nuclease domain, and/or a RuvC or RuvC-like nuclease domain.

[0094] HNH or HNH-like domains comprise a McrA-like fold. HNH or HNH-like domains comprises two antiparallel β-strands and an α-helix. HNH or HNH-like domains comprises a metal binding site (e.g., a divalent cation binding site). HNH or HNH-like domains can cleave one strand of a target nucleic acid (e.g., the complementary strand of the crRNA targeted strand).

[0095] RuvC or RuvC-like domains comprise an RNaseH or RNaseH-like fold. RuvC/RNaseH domains are involved in a diverse set of nucleic acid-based functions including acting on both RNA and DNA. The RNaseH domain comprises 5 β-strands surrounded by a plurality of α-helices. RuvC/RNaseH or RuvC/RNaseH-like domains comprise a metal binding site (e.g., a divalent cation binding site). RuvC/RNaseH or RuvC/RNaseH-like domains can cleave one strand of a target nucleic acid (e.g., the non-complementary strand of a double-stranded target DNA).

[0096] Site-directed polypeptides can introduce double-strand breaks or single-strand breaks in nucleic acids, e.g., genomic DNA. The double-strand break can stimulate a cell's endogenous DNA-repair pathways (e.g., homology-dependent repair (HDR) or NHEJ or alternative non-homologous end joining (A-NHEJ) or microhomology-mediated end joining (MMEJ)). NHEJ can repair cleaved target nucleic acid without the need for a homologous template. This can sometimes result in small deletions or insertions (indels) in the target nucleic acid at the site of cleavage, and can lead to disruption or alteration of gene expression. HDR can occur when a homologous repair template, or donor, is available. The homologous donor template can comprise sequences that are homologous to sequences flanking the target nucleic acid cleavage site. The sister chromatid can be used by the cell as the repair template. However, for the purposes of genome editing, the repair template can be supplied as an exogenous nucleic acid, such as a plasmid, duplex oligonucleotide, single-strand oligonucleotide or viral nucleic acid. With exogenous donor templates, an additional nucleic acid sequence (such as a transgene) or modification (such as a single or multiple base change or a deletion) can be introduced between the flanking regions of homology so that the additional or altered nucleic acid sequence also becomes incorporated into the target locus. MMEJ can result in a genetic outcome that is similar to NHEJ in that small deletions and insertions can occur at the cleavage site. MMEJ can make use of homologous sequences of a few base pairs flanking the cleavage site to drive a favored end-joining DNA repair outcome. In some instances, it may be possible to predict likely repair outcomes based on analysis of potential microhomologies in the nuclease target regions.

[0097] Thus, in some cases, homologous recombination can be used to insert an exogenous polynucleotide sequence into the target nucleic acid cleavage site. An exogenous polynucleotide sequence is termed a “donor polynucleotide” (or donor or donor sequence) herein. The donor polynucleotide, a portion of the donor polynucleotide, a copy of the donor polynucleotide, or a portion of a copy of the donor polynucleotide can be inserted into the target nucleic acid cleavage site. The donor polynucleotide can be an exogenous polynucleotide sequence, i.e., a sequence that does not naturally occur at the target nucleic acid cleavage site.

[0098] The modifications of the target DNA due to NHEJ and/or HDR can lead to, for example, mutations, deletions, alterations, integrations, gene correction, gene replacement, gene tagging, transgene insertion, nucleotide deletion, gene disruption, translocations and/or gene mutation. The processes of deleting genomic DNA and integrating non-native nucleic acid into genomic DNA are examples of genome editing.

[0099] The site-directed polypeptide can comprise an amino acid sequence having at least 10%, at least 15%, at least 20%, at least 30%, at least 40%, at least 50%, at least 60%, at least 70%, at least 75%, at least 80%, at least 85%, at least 90%, at least 95%, at least 99%, or 100% amino acid sequence identity to a wild-type exemplary site-directed polypeptide [e.g., Cas9 from S. pyogenes, US2014/0068797 Sequence ID No. 8 or Sapranauskas et al., Nucleic Acids Res, 39(21): 9275-9282 (2011)], and various other site-directed polypeptides. The site-directed polypeptide can comprise at least 70, 75, 80, 85, 90, 95, 97, 99, or 100% identity to a wild-type site-directed polypeptide (e.g., Cas9 from S. pyogenes, supra) over 10 contiguous amino acids. The site-directed polypeptide can comprise at most: 70, 75, 80, 85, 90, 95, 97, 99, or 100% identity to a wild-type site-directed polypeptide (e.g., Cas9 from S. pyogenes, supra) over 10 contiguous amino acids. The site-directed polypeptide can comprise at least: 70, 75, 80, 85, 90, 95, 97, 99, or 100% identity to a wild-type site-directed polypeptide (e.g., Cas9 from S. pyogenes, supra) over 10 contiguous amino acids in a HNH nuclease domain of the site-directed polypeptide. The site-directed polypeptide can comprise at most: 70, 75, 80, 85, 90, 95, 97, 99, or 100% identity to a wild-type site-directed polypeptide (e.g., Cas9 from S. pyogenes, supra) over 10 contiguous amino acids in a HNH nuclease domain of the site-directed polypeptide. The site-directed polypeptide can comprise at least: 70, 75, 80, 85, 90, 95, 97, 99, or 100% identity to a wild-type site-directed polypeptide (e.g., Cas9 from S. pyogenes, supra) over 10 contiguous amino acids in a RuvC nuclease domain of the site-directed polypeptide. The site-directed polypeptide can comprise at most: 70, 75, 80, 85, 90, 95, 97, 99, or 100% identity to a wild-type site-directed polypeptide (e.g., Cas9 from S. pyogenes, supra) over 10 contiguous amino acids in a RuvC nuclease domain of the site-directed polypeptide.

[0100] The site-directed polypeptide can comprise a modified form of a wild-type exemplary site-directed polypeptide. The modified form of the wild-type exemplary site-directed polypeptide can comprise a mutation that reduces the nucleic acid-cleaving activity of the site-directed polypeptide. The modified form of the wild-type exemplary site-directed polypeptide can have less than 90%, less than 80%, less than 70%, less than 60%, less than 50%, less than 40%, less than 30%, less than 20%, less than 10%, less than 5%, or less than 1% of the nucleic acid-cleaving activity of the wild-type exemplary site-directed polypeptide (e.g., Cas9 from S. pyogenes, supra). The modified form of the site-directed polypeptide can have no substantial nucleic acid-cleaving activity. When a site-directed polypeptide is a modified form that has no substantial nucleic acid-cleaving activity, it is referred to herein as “enzymatically inactive.”

[0101] The modified form of the site-directed polypeptide can comprise a mutation such that it can induce a single-strand break (SSB) on a target nucleic acid (e.g., by cutting only one of the sugar-phosphate backbones of a double-strand target nucleic acid). In some aspects, the mutation can result in less than 90%, less than 80%, less than 70%, less than 60%, less than 50%, less than 40%, less than 30%, less than 20%, less than 10%, less than 5%, or less than 1% of the nucleic acid-cleaving activity in one or more of the plurality of nucleic acid-cleaving domains of the wild-type site directed polypeptide (e.g., Cas9 from S. pyogenes, supra). In some aspects, the mutation can result in one or more of the plurality of nucleic acid-cleaving domains retaining the ability to cleave the complementary strand of the target nucleic acid, but reducing its ability to cleave the non-complementary strand of the target nucleic acid. The mutation can result in one or more of the plurality of nucleic acid-cleaving domains retaining the ability to cleave the non-complementary strand of the target nucleic acid, but reducing its ability to cleave the complementary strand of the target nucleic acid. For example, residues in the wild-type exemplary S. pyogenes Cas9 polypeptide, such as Asp10, His840, Asn854 and Asn856, are mutated to inactivate one or more of the plurality of nucleic acid-cleaving domains (e.g., nuclease domains). The residues to be mutated can correspond to residues Asp10, His840, Asn854 and Asn856 in the wild-type exemplary S. pyogenes Cas9 polypeptide (e.g., as determined by sequence and/or structural alignment). Non-limiting examples of mutations include D10A, H840A, N854A or N856A. One skilled in the art will recognize that mutations other than alanine substitutions can be suitable.

[0102] In some aspects, a D10A mutation can be combined with one or more of H840A, N854A, or N856A mutations to produce a site-directed polypeptide substantially lacking DNA cleavage activity. A H840A mutation can be combined with one or more of D10A, N854A, or N856A mutations to produce a site-directed polypeptide substantially lacking DNA cleavage activity. A N854A mutation can be combined with one or more of H840A, D10A, or N856A mutations to produce a site-directed polypeptide substantially lacking DNA cleavage activity. A N856A mutation can be combined with one or more of H840A, N854A, or D10A mutations to produce a site-directed polypeptide substantially lacking DNA cleavage activity. Site-directed polypeptides that comprise one substantially inactive nuclease domain are referred to as “nickases.”

[0103] Nickase variants of RNA-guided endonucleases, for example Cas9, can be used to increase the specificity of CRISPR-mediated genome editing. Wild type Cas9 is typically guided by a single guide RNA designed to hybridize with a specified ˜20 nucleotide sequence in the target sequence (such as an endogenous genomic locus). However, several mismatches can be tolerated between the guide RNA and the target locus, effectively reducing the length of required homology in the target site to, for example, as little as 13 nt of homology, and thereby resulting in elevated potential for binding and double-strand nucleic acid cleavage by the CRISPR/Cas9 complex elsewhere in the target genome—also known as off-target cleavage. Because nickase variants of Cas9 each only cut one strand, in order to create a double-strand break it is necessary for a pair of nickases to bind in close proximity and on opposite strands of the target nucleic acid, thereby creating a pair of nicks, which is the equivalent of a double-strand break. This requires that two separate guide RNAs—one for each nickase—must bind in close proximity and on opposite strands of the target nucleic acid. This requirement essentially doubles the minimum length of homology needed for the double-strand break to occur, thereby reducing the likelihood that a double-strand cleavage event will occur elsewhere in the genome, where the two guide RNA sites—if they exist—are unlikely to be sufficiently close to each other to enable the double-strand break to form. As described in the art, nickases can also be used to promote HDR versus NHEJ. HDR can be used to introduce selected changes into target sites in the genome through the use of specific donor sequences that effectively mediate the desired changes.

[0104] Mutations contemplated can include substitutions, additions, and deletions, or any combination thereof. The mutation converts the mutated amino acid to alanine. The mutation converts the mutated amino acid to another amino acid (e.g., glycine, serine, threonine, cysteine, valine, leucine, isoleucine, methionine, proline, phenylalanine, tyrosine, tryptophan, aspartic acid, glutamic acid, asparagine, glutamine, histidine, lysine, or arginine). The mutation converts the mutated amino acid to a non-natural amino acid (e.g., selenomethionine). The mutation converts the mutated amino acid to amino acid mimics (e.g., phosphomimics). The mutation can be a conservative mutation. For example, the mutation converts the mutated amino acid to amino acids that resemble the size, shape, charge, polarity, conformation, and/or rotamers of the mutated amino acids (e.g., cysteine/serine mutation, lysine/asparagine mutation, histidine/phenylalanine mutation). The mutation can cause a shift in reading frame and/or the creation of a premature stop codon. Mutations can cause changes to regulatory regions of genes or loci that affect expression of one or more genes.

[0105] The site-directed polypeptide (e.g., variant, mutated, enzymatically inactive and/or conditionally enzymatically inactive site-directed polypeptide) can target nucleic acid. The site-directed polypeptide (e.g., variant, mutated, enzymatically inactive and/or conditionally enzymatically inactive endoribonuclease) can target DNA. The site-directed polypeptide (e.g., variant, mutated, enzymatically inactive and/or conditionally enzymatically inactive endoribonuclease) can target RNA.

[0106] The site-directed polypeptide can comprise one or more non-native sequences (e.g., the site-directed polypeptide is a fusion protein).

[0107] The site-directed polypeptide can comprise an amino acid sequence comprising at least 15% amino acid identity to a Cas9 from a bacterium (e.g., S. pyogenes), a nucleic acid binding domain, and two nucleic acid cleaving domains (i.e., a HNH domain and a RuvC domain).

[0108] The site-directed polypeptide can comprise an amino acid sequence comprising at least 15% amino acid identity to a Cas9 from a bacterium (e.g., S. pyogenes), and two nucleic acid cleaving domains (i.e., a HNH domain and a RuvC domain).

[0109] The site-directed polypeptide can comprise an amino acid sequence comprising at least 15% amino acid identity to a Cas9 from a bacterium (e.g., S. pyogenes), and two nucleic acid cleaving domains, wherein one or both of the nucleic acid cleaving domains comprise at least 50% amino acid identity to a nuclease domain from Cas9 from a bacterium (e.g., S. pyogenes).

[0110] The site-directed polypeptide can comprise an amino acid sequence comprising at least 15% amino acid identity to a Cas9 from a bacterium (e.g., S. pyogenes), two nucleic acid cleaving domains (i.e., a HNH domain and a RuvC domain), and a non-native sequence (for example, a nuclear localization signal) or a linker linking the site-directed polypeptide to a non-native sequence.

[0111] The site-directed polypeptide can comprise an amino acid sequence comprising at least 15% amino acid identity to a Cas9 from a bacterium (e.g., S. pyogenes), two nucleic acid cleaving domains (i.e., a HNH domain and a RuvC domain), wherein the site-directed polypeptide comprises a mutation in one or both of the nucleic acid cleaving domains that reduces the cleaving activity of the nuclease domains by at least 50%.

[0112] The site-directed polypeptide can comprise an amino acid sequence comprising at least 15% amino acid identity to a Cas9 from a bacterium (e.g., S. pyogenes), and two nucleic acid cleaving domains (i.e., a HNH domain and a RuvC domain), wherein one of the nuclease domains comprises mutation of aspartic acid 10, and/or wherein one of the nuclease domains can comprise a mutation of histidine 840, and wherein the mutation reduces the cleaving activity of the nuclease domain(s) by at least 50%.

[0113] The one or more site-directed polypeptides, e.g. DNA endonucleases, can comprise two nickases that together effect one double-strand break at a specific locus in the genome, or four nickases that together effect or cause two double-strand breaks at specific loci in the genome. Alternatively, one site-directed polypeptide, e.g. DNA endonuclease, can effect or cause one double-strand break at a specific locus in the genome.

[0114] Non-limiting examples of Cas9 orthologs from other bacterial strains include but are not limited to, Cas proteins identified in Acaryochloris marina MBIC11017; Acetohalobium arabaticum DSM 5501; Acidithiobacillus caldus; Acidithiobacillus ferrooxidans ATCC 23270; Alicyclobacillus acidocaldarius LAA1; Alicyclobacillus acidocaldarius subsp. acidocaldarius DSM 446; Allochromatium vinosum DSM 180; Ammonifex degensii KC4; Anabaena variabilis ATCC 29413; Arthrospira maxima CS-328; Arthrospira platensis str. Paraca; Arthrospira sp. PCC 8005; Bacillus pseudomycoides DSM 12442; Bacillus selenitireducens MLS10; Burkholderiales bacterium 1_1_47; Caldicelulosiruptor becscii DSM 6725; Candidatus Desulforudis audaxviator MP104C; Caldicellulosiruptor hydrothermalis 108; Clostridium phage c-st; Clostridium botulinum A3 str. Loch Maree; Clostridium botulinum Ba4 str. 657; Clostridium difficile QCD-63q42; Crocosphaera watsonii WH 8501; Cyanothece sp. ATCC 51142; Cyanothece sp. CCY0110; Cyanothece sp. PCC 7424; Cyanothece sp. PCC 7822; Exiguobacterium sibiricum 255-15; Finegoldia magna ATCC 29328; Ktedonobacter racemifer DSM 44963; Lactobacillus delbrueckii subsp. bulgaricus PB2003/044-T3-4; Lactobacillus salivarius ATCC 11741; Listeria innocua; Lyngbya sp. PCC 8106; Marinobacter sp. ELB17; Methanohalobium evestigatum Z-7303; Microcystis phage Ma-LMM01; Microcystis aeruginosa NIES-843; Microscilla marina ATCC 23134; Microcoleus chthonoplastes PCC 7420; Neisseria meningitidis; Nitrosococcus halophilus Nc4; Nocardiopsis dassonvillei subsp. dassonvillei DSM 43111; Nodularia spumigena CCY9414; Nostoc sp. PCC 7120; Oscillatoria sp. PCC 6506; Pelotomaculum_thermopropionicum_SI; Petrotoga mobilis SJ95; Polaromonas naphthalenivorans CJ2; Polaromonas sp. JS666; Pseudoalteromonas haloplanktis TAC125; Streptomyces pristinaespiralis ATCC 25486; Streptomyces pristinaespiralis ATCC 25486; Streptococcus thermophilus; Streptomyces viridochromogenes DSM 40736; Streptosporangium roseum DSM 43021; Synechococcus sp. PCC 7335; and Thermosipho africanus TCF52B (Chylinski et al., RNA Biol., 2013; 10(5): 726-737).

[0115] In addition to Cas9 orthologs, other Cas9 variants such as fusion proteins of inactive dCas9 and effector domains with different functions may be served as a platform for genetic modulation. Any of the foregoing enzymes may be useful in the present disclosure.

[0116] Further examples of endonucleases that may be utilized in the present disclosure are provided in SEQ ID NOs: 1-620. These proteins may be modified before use or may be encoded in a nucleic acid sequence such as a DNA, RNA or mRNA or within a vector construct such as the plasmids or AAV vectors taught herein. Further, they may be codon optimized.

[0117] SEQ ID NOs: 1-620 disclose a non-exhaustive listing of endonuclease sequences.

[0118] Genome-Targeting Nucleic Acid

[0119] The present disclosure provides a genome-targeting nucleic acid that can direct the activities of an associated polypeptide (e.g., a site-directed polypeptide) to a specific target sequence within a target nucleic acid. The genome-targeting nucleic acid can be an RNA. A genome-targeting RNA is referred to as a “guide RNA” or “gRNA” herein. A guide RNA can comprise at least a spacer sequence that hybridizes to a target nucleic acid sequence of interest, and a CRISPR repeat sequence. In Type II systems, the gRNA also comprises a second RNA called the tracrRNA sequence. In the Type II guide RNA (gRNA), the CRISPR repeat sequence and tracrRNA sequence hybridize to each other to form a duplex. In the Type V guide RNA (gRNA), the crRNA forms a duplex. In both systems, the duplex can bind a site-directed polypeptide, such that the guide RNA and site-direct polypeptide form a complex. The genome-targeting nucleic acid can provide target specificity to the complex by virtue of its association with the site-directed polypeptide. The genome-targeting nucleic acid thus can direct the activity of the site-directed polypeptide.

[0120] Exemplary guide RNAs include the spacer sequences in SEQ ID NOs: 5305-37514 and 37549 of the Sequence Listing. As is understood by the person of ordinary skill in the art, each guide RNA can be designed to include a spacer sequence complementary to its genomic target sequence. For example, each of the spacer sequences in SEQ ID NOs: 5305-37514 and 37549 of the Sequence Listing can be put into a single RNA chimera or a crRNA (along with a corresponding tracrRNA). See Jinek et al., Science, 337, 816-821 (2012) and Deltcheva et al., Nature, 471, 602-607 (2011).

[0121] The genome-targeting nucleic acid can be a double-molecule guide RNA. The genome-targeting nucleic acid can be a single-molecule guide RNA.

[0122] A double-molecule guide RNA can comprise two strands of RNA. The first strand comprises in the 5′ to 3′ direction, an optional spacer extension sequence, a spacer sequence and a minimum CRISPR repeat sequence. The second strand can comprise a minimum tracrRNA sequence (complementary to the minimum CRISPR repeat sequence), a 3′ tracrRNA sequence and an optional tracrRNA extension sequence.

[0123] A single-molecule guide RNA (sgRNA) in a Type II system can comprise, in the 5′ to 3′ direction, an optional spacer extension sequence, a spacer sequence, a minimum CRISPR repeat sequence, a single-molecule guide linker, a minimum tracrRNA sequence, a 3′ tracrRNA sequence and an optional tracrRNA extension sequence. The optional tracrRNA extension can comprise elements that contribute additional functionality (e.g., stability) to the guide RNA. The single-molecule guide linker can link the minimum CRISPR repeat and the minimum tracrRNA sequence to form a hairpin structure. The optional tracrRNA extension can comprise one or more hairpins.

[0124] The sgRNA can comprise a 20 nucleotide spacer sequence at the 5′ end of the sgRNA sequence. The sgRNA can comprise a less than a 20 nucleotide spacer sequence at the 5′ end of the sgRNA sequence. The sgRNA can comprise a more than 20 nucleotide spacer sequence at the 5′ end of the sgRNA sequence. The sgRNA can comprise a variable length spacer sequence with 17-30 nucleotides at the 5′ end of the sgRNA sequence (see Table 1).

[0125] The sgRNA can comprise no uracil at the 3′ end of the sgRNA sequence, such as in SEQ ID NO: 37547 of Table 1. The sgRNA can comprise one or more uracil at the 3′ end of the sgRNA sequence, such as in SEQ ID NO: 37548 in Table 1. For example, the sgRNA can comprise 1 uracil (U) at the 3′ end of the sgRNA sequence. The sgRNA can comprise 2 uracil (UU) at the 3′ end of the sgRNA sequence. The sgRNA can comprise 3 uracil (UUU) at the 3′ end of the sgRNA sequence. The sgRNA can comprise 4 uracil (UUUU) at the 3′ end of the sgRNA sequence. The sgRNA can comprise 5 uracil (UUUUU) at the 3′ end of the sgRNA sequence. The sgRNA can comprise 6 uracil (UUUUUU) at the 3′ end of the sgRNA sequence. The sgRNA can comprise 7 uracil (UUUUUUU) at the 3′ end of the sgRNA sequence. The sgRNA can comprise 8 uracil (UUUUUUUU) at the 3′ end of the sgRNA sequence.

[0126] The sgRNA can be unmodified or modified. For example, modified sgRNAs can comprise one or more 2′-O-methyl phosphorothioate nucleotides.

TABLE 1

| SEQ | |
|---|---|
| ID NO. | sgRNA sequence |
| 37546 | nnnnnnnnnnnnnnnnnnnnguuuuagagcuaga |
| | aauagcaaguuaaaauaaggcuaguccguuauca |
| | acuugaaaaaguggcaccgagucggugcuuuu |
| 37547 | nnnnnnnnnnnnnnnnnnnnguuuuagagcuaga |
| | aauagcaaguuaaaauaaggcuaguccguuauca |
| | acuugaaaaaguggcaccgagucggugc |
| 37548 | n₍₁₇₋₃₀₎guuuuagagcuagaaauagcaaguuaaaa |
| | uaaggcuaguccguuaucaacuugaaaaaguggc |
| | accgagucggugcu₍₁₋₈₎ |

[0127] A single-molecule guide RNA (sgRNA) in a Type V system can comprise, in the 5′ to 3′ direction, a minimum CRISPR repeat sequence and a spacer sequence.

[0128] By way of illustration, guide RNAs used in the CRISPR/Cas9 or CRISPR/Cpf1 system, or other smaller RNAs can be readily synthesized by chemical means, as illustrated below and described in the art. While chemical synthetic procedures are continually expanding, purifications of such RNAs by procedures such as high-performance liquid chromatography (HPLC, which avoids the use of gels such as PAGE) tends to become more challenging as polynucleotide lengths increase significantly beyond a hundred or so nucleotides. One approach used for generating RNAs of greater length is to produce two or more molecules that are ligated together. Much longer RNAs, such as those encoding a Cas9 or Cpf1 endonuclease, are more readily generated enzymatically. Various types of RNA modifications can be introduced during or after chemical synthesis and/or enzymatic generation of RNAs, e.g., modifications that enhance stability, reduce the likelihood or degree of innate immune response, and/or enhance other attributes, as described in the art.

[0129] Spacer Extension Sequence

[0130] In some examples of genome-targeting nucleic acids, a spacer extension sequence can modify activity, provide stability and/or provide a location for modifications of a genome-targeting nucleic acid. A spacer extension sequence can modify on- or off-target activity or specificity. In some examples, a spacer extension sequence can be provided. The spacer extension sequence can have a length of more than 1, 5, 10, 15, 20, 25, 30, 35, 40, 45, 50, 60, 70, 80, 90, 100, 120, 140, 160, 180, 200, 220, 240, 260, 280, 300, 320, 340, 360, 380, 400, 1000, 2000, 3000, 4000, 5000, 6000, or 7000 or more nucleotides. The spacer extension sequence can have a length of less than 1, 5, 10, 15, 20, 25, 30, 35, 40, 45, 50, 60, 70, 80, 90, 100, 120, 140, 160, 180, 200, 220, 240, 260, 280, 300, 320, 340, 360, 380, 400, 1000, 2000, 3000, 4000, 5000, 6000, 7000 or more nucleotides. The spacer extension sequence can be less than 10 nucleotides in length. The spacer extension sequence can be between 10-30 nucleotides in length. The spacer extension sequence can be between 30-70 nucleotides in length.

[0131] The spacer extension sequence can comprise another moiety (e.g., a stability control sequence, an endoribonuclease binding sequence, a ribozyme). The moiety can decrease or increase the stability of a nucleic acid targeting nucleic acid. The moiety can be a transcriptional terminator segment (i.e., a transcription termination sequence). The moiety can function in a eukaryotic cell. The moiety can function in a prokaryotic cell. The moiety can function in both eukaryotic and prokaryotic cells. Non-limiting examples of suitable moieties include: a 5′ cap (e.g., a 7-methylguanylate cap (m7 G)), a riboswitch sequence (e.g., to allow for regulated stability and/or regulated accessibility by proteins and protein complexes), a sequence that forms a dsRNA duplex (i.e., a hairpin), a sequence that targets the RNA to a subcellular location (e.g., nucleus, mitochondria, chloroplasts, and the like), a modification or sequence that provides for tracking (e.g., direct conjugation to a fluorescent molecule, conjugation to a moiety that facilitates fluorescent detection, a sequence that allows for fluorescent detection, etc.), and/or a modification or sequence that provides a binding site for proteins (e.g., proteins that act on DNA, including transcriptional activators, transcriptional repressors, DNA methyltransferases, DNA demethylases, histone acetyltransferases, histone deacetylases, and the like).

[0132] Spacer Sequence

[0133] The spacer sequence hybridizes to a sequence in a target nucleic acid of interest. The spacer of a genome-targeting nucleic acid can interact with a target nucleic acid in a sequence-specific manner via hybridization (i.e., base pairing). The nucleotide sequence of the spacer can vary depending on the sequence of the target nucleic acid of interest.

[0134] In a CRISPR/Cas system herein, the spacer sequence can be designed to hybridize to a target nucleic acid that is located 5′ of a PAM of the Cas9 enzyme used in the system. The spacer may perfectly match the target sequence or may have mismatches. Each Cas9 enzyme has a particular PAM sequence that it recognizes in a target DNA. For example, S. pyogenes recognizes in a target nucleic acid a PAM that comprises the sequence 5′-NRG-3′, where R comprises either A or G, where N is any nucleotide and N is immediately 3′ of the target nucleic acid sequence targeted by the spacer sequence.

[0135] The target nucleic acid sequence can comprise 20 nucleotides. The target nucleic acid can comprise less than 20 nucleotides. The target nucleic acid can comprise more than 20 nucleotides. The target nucleic acid can comprise at least: 5, 10, 15, 16, 17, 18, 19, 20, 21, 22, 23, 24, 25, 30 or more nucleotides. The target nucleic acid can comprise at most: 5, 10, 15, 16, 17, 18, 19, 20, 21, 22, 23, 24, 25, 30 or more nucleotides. The target nucleic acid sequence can comprise 20 bases immediately 5′ of the first nucleotide of the PAM. For example, in a sequence comprising 5′-NNNNNNNNNNNNNNNNNNNNNRG-3′ (SEQ ID NO: 37545), the target nucleic acid can comprise the sequence that corresponds to the Ns, wherein N is any nucleotide, and the underlined NRG sequence is the S. pyogenes PAM. This target nucleic acid sequence is often referred to as the PAM strand, and the complementary nucleic acid sequence is often referred to the non-PAM strand. One of skill in the art would recognize that the spacer sequence hybridizes to the non-PAM strand of the target nucleic acid (FIGS. 1A and 1B).

[0136] The spacer sequence that hybridizes to the target nucleic acid can have a length of at least about 6 nucleotides (nt). The spacer sequence can be at least about 6 nt, at least about 10 nt, at least about 15 nt, at least about 18 nt, at least about 19 nt, at least about 20 nt, at least about nt, at least about 30 nt, at least about 35 nt or at least about 40 nt, from about 6 nt to about 80 nt, from about 6 nt to about 50 nt, from about 6 nt to about 45 nt, from about 6 nt to about 40 nt, from about 6 nt to about 35 nt, from about 6 nt to about 30 nt, from about 6 nt to about 25 nt, from about 6 nt to about 20 nt, from about 6 nt to about 19 nt, from about 10 nt to about 50 nt, from about 10 nt to about 45 nt, from about 10 nt to about 40 nt, from about 10 nt to about 35 nt, from about 10 nt to about 30 nt, from about 10 nt to about 25 nt, from about 10 nt to about 20 nt, from about 10 nt to about 19 nt, from about 19 nt to about 25 nt, from about 19 nt to about 30 nt, from about 19 nt to about 35 nt, from about 19 nt to about 40 nt, from about 19 nt to about 45 nt, from about 19 nt to about 50 nt, from about 19 nt to about 60 nt, from about 20 nt to about 25 nt, from about 20 nt to about 30 nt, from about 20 nt to about 35 nt, from about 20 nt to about 40 nt, from about 20 nt to about 45 nt, from about 20 nt to about 50 nt, or from about 20 nt to about 60 nt. In some examples, the spacer sequence can comprise 20 nucleotides. In some examples, the spacer can comprise 19 nucleotides. In some examples, the spacer can comprise 18 nucleotides. In some examples, the spacer can comprise 22 nucleotides.

[0137] In some examples, the percent complementarity between the spacer sequence and the target nucleic acid is at least about 30%, at least about 40%, at least about 50%, at least about 60%, at least about 65%, at least about 70%, at least about 75%, at least about 80%, at least about 85%, at least about 90%, at least about 95%, at least about 97%, at least about 98%, at least about 99%, or 100%. In some examples, the percent complementarity between the spacer sequence and the target nucleic acid is at most about 30%, at most about 40%, at most about 50%, at most about 60%, at most about 65%, at most about 70%, at most about 75%, at most about 80%, at most about 85%, at most about 90%, at most about 95%, at most about 97%, at most about 98%, at most about 99%, or 100%. In some examples, the percent complementarity between the spacer sequence and the target nucleic acid is 100% over the six contiguous 5′-most nucleotides of the target sequence of the complementary strand of the target nucleic acid. The percent complementarity between the spacer sequence and the target nucleic acid can be at least 60% over about 20 contiguous nucleotides. The length of the spacer sequence and the target nucleic acid can differ by 1 to 6 nucleotides, which may be thought of as a bulge or bulges.

[0138] The spacer sequence can be designed or chosen using a computer program. The computer program can use variables, such as predicted melting temperature, secondary structure formation, predicted annealing temperature, sequence identity, genomic context, chromatin accessibility, % GC, frequency of genomic occurrence (e.g., of sequences that are identical or are similar but vary in one or more spots as a result of mismatch, insertion or deletion), methylation status, presence of SNPs, and the like.

[0139] Minimum CRISPR Repeat Sequence

[0140] In some aspects, a minimum CRISPR repeat sequence is a sequence with at least about 30%, about 40%, about 50%, about 60%, about 65%, about 70%, about 75%, about 80%, about 85%, about 90%, about 95%, or 100% sequence identity to a reference CRISPR repeat sequence (e.g., crRNA from S. pyogenes).

[0141] In some aspects, a minimum CRISPR repeat sequence comprises nucleotides that can hybridize to a minimum tracrRNA sequence in a cell. The minimum CRISPR repeat sequence and a minimum tracrRNA sequence can form a duplex, i.e. a base-paired double-stranded structure. Together, the minimum CRISPR repeat sequence and the minimum tracrRNA sequence can bind to the site-directed polypeptide. At least a part of the minimum CRISPR repeat sequence can hybridize to the minimum tracrRNA sequence. At least a part of the minimum CRISPR repeat sequence can comprise at least about 30%, about 40%, about 50%, about 60%, about 65%, about 70%, about 75%, about 80%, about 85%, about 90%, about 95%, or 100% complementary to the minimum tracrRNA sequence. In some aspects, at least a part of the minimum CRISPR repeat sequence comprises at most about 30%, about 40%, about 50%, about 60%, about 65%, about 70%, about 75%, about 80%, about 85%, about 90%, about 95%, or 100% complementary to the minimum tracrRNA sequence.

[0142] The minimum CRISPR repeat sequence can have a length from about 7 nucleotides to about 100 nucleotides. For example, the length of the minimum CRISPR repeat sequence is from about 7 nucleotides (nt) to about 50 nt, from about 7 nt to about 40 nt, from about 7 nt to about 30 nt, from about 7 nt to about 25 nt, from about 7 nt to about 20 nt, from about 7 nt to about 15 nt, from about 8 nt to about 40 nt, from about 8 nt to about 30 nt, from about 8 nt to about 25 nt, from about 8 nt to about 20 nt, from about 8 nt to about 15 nt, from about 15 nt to about 100 nt, from about 15 nt to about 80 nt, from about 15 nt to about 50 nt, from about 15 nt to about 40 nt, from about 15 nt to about 30 nt, or from about 15 nt to about 25 nt. In some aspects, the minimum CRISPR repeat sequence is approximately 9 nucleotides in length. In some aspects, the minimum CRISPR repeat sequence is approximately 12 nucleotides in length.

[0143] The minimum CRISPR repeat sequence can be at least about 60% identical to a reference minimum CRISPR repeat sequence (e.g., wild-type crRNA from S. pyogenes) over a stretch of at least 6, 7, or 8 contiguous nucleotides. For example, the minimum CRISPR repeat sequence can be at least about 65% identical, at least about 70% identical, at least about 75% identical, at least about 80% identical, at least about 85% identical, at least about 90% identical, at least about 95% identical, at least about 98% identical, at least about 99% identical or 100% identical to a reference minimum CRISPR repeat sequence over a stretch of at least 6, 7, or 8 contiguous nucleotides.

[0144] Minimum tracrRNA Sequence

[0145] A minimum tracrRNA sequence can be a sequence with at least about 30%, about 40%, about 50%, about 60%, about 65%, about 70%, about 75%, about 80%, about 85%, about 90%, about 95%, or 100% sequence identity to a reference tracrRNA sequence (e.g., wild type tracrRNA from S. pyogenes).

[0146] A minimum tracrRNA sequence can comprise nucleotides that hybridize to a minimum CRISPR repeat sequence in a cell. A minimum tracrRNA sequence and a minimum CRISPR repeat sequence form a duplex, i.e. a base-paired double-stranded structure. Together, the minimum tracrRNA sequence and the minimum CRISPR repeat can bind to a site-directed polypeptide. At least a part of the minimum tracrRNA sequence can hybridize to the minimum CRISPR repeat sequence. The minimum tracrRNA sequence can be at least about 30%, about 40%, about 50%, about 60%, about 65%, about 70%, about 75%, about 80%, about 85%, about 90%, about 95%, or 100% complementary to the minimum CRISPR repeat sequence.

[0147] The minimum tracrRNA sequence can have a length from about 7 nucleotides to about 100 nucleotides. For example, the minimum tracrRNA sequence can be from about 7 nucleotides (nt) to about 50 nt, from about 7 nt to about 40 nt, from about 7 nt to about 30 nt, from about 7 nt to about 25 nt, from about 7 nt to about 20 nt, from about 7 nt to about 15 nt, from about 8 nt to about 40 nt, from about 8 nt to about 30 nt, from about 8 nt to about 25 nt, from about 8 nt to about 20 nt, from about 8 nt to about 15 nt, from about 15 nt to about 100 nt, from about 15 nt to about 80 nt, from about 15 nt to about 50 nt, from about 15 nt to about 40 nt, from about 15 nt to about 30 nt or from about 15 nt to about 25 nt long. The minimum tracrRNA sequence can be approximately 9 nucleotides in length. The minimum tracrRNA sequence can be approximately 12 nucleotides. The minimum tracrRNA can consist of tracrRNA nt 23-48 described in Jinek et al., supra.

[0148] The minimum tracrRNA sequence can be at least about 60% identical to a reference minimum tracrRNA (e.g., wild type, tracrRNA from S. pyogenes) sequence over a stretch of at least 6, 7, or 8 contiguous nucleotides. For example, the minimum tracrRNA sequence can be at least about 65% identical, about 70% identical, about 75% identical, about 80% identical, about 85% identical, about 90% identical, about 95% identical, about 98% identical, about 99% identical or 100% identical to a reference minimum tracrRNA sequence over a stretch of at least 6, 7, or 8 contiguous nucleotides.

[0149] The duplex between the minimum CRISPR RNA and the minimum tracrRNA can comprise a double helix. The duplex between the minimum CRISPR RNA and the minimum tracrRNA can comprise at least about 1, 2, 3, 4, 5, 6, 7, 8, 9, or 10 or more nucleotides. The duplex between the minimum CRISPR RNA and the minimum tracrRNA can comprise at most about 1, 2, 3, 4, 5, 6, 7, 8, 9, or 10 or more nucleotides.

[0150] The duplex can comprise a mismatch (i.e., the two strands of the duplex are not 100% complementary). The duplex can comprise at least about 1, 2, 3, 4, or 5 or mismatches. The duplex can comprise at most about 1, 2, 3, 4, or 5 or mismatches. The duplex can comprise no more than 2 mismatches.

[0151] Bulges

[0152] In some cases, there can be a “bulge” in the duplex between the minimum CRISPR RNA and the minimum tracrRNA. A bulge is an unpaired region of nucleotides within the duplex. A bulge can contribute to the binding of the duplex to the site-directed polypeptide. The bulge can comprise, on one side of the duplex, an unpaired 5′-XXXY-3′ where X is any purine and Y comprises a nucleotide that can form a wobble pair with a nucleotide on the opposite strand, and an unpaired nucleotide region on the other side of the duplex. The number of unpaired nucleotides on the two sides of the duplex can be different.

[0153] In one example, the bulge can comprise an unpaired purine (e.g., adenine) on the minimum CRISPR repeat strand of the bulge. In some examples, the bulge can comprise an unpaired 5′-AAGY-3′ of the minimum tracrRNA sequence strand of the bulge, where Y comprises a nucleotide that can form a wobble pairing with a nucleotide on the minimum CRISPR repeat strand.

[0154] A bulge on the minimum CRISPR repeat side of the duplex can comprise at least 1, 2, 3, 4, or 5 or more unpaired nucleotides. A bulge on the minimum CRISPR repeat side of the duplex can comprise at most 1, 2, 3, 4, or 5 or more unpaired nucleotides. A bulge on the minimum CRISPR repeat side of the duplex can comprise 1 unpaired nucleotide.

[0155] A bulge on the minimum tracrRNA sequence side of the duplex can comprise at least 1, 2, 3, 4, 5, 6, 7, 8, 9, or 10 or more unpaired nucleotides. A bulge on the minimum tracrRNA sequence side of the duplex can comprise at most 1, 2, 3, 4, 5, 6, 7, 8, 9, or 10 or more unpaired nucleotides. A bulge on a second side of the duplex (e.g., the minimum tracrRNA sequence side of the duplex) can comprise 4 unpaired nucleotides.

[0156] A bulge can comprise at least one wobble pairing. In some examples, a bulge can comprise at most one wobble pairing. A bulge can comprise at least one purine nucleotide. A bulge can comprise at least 3 purine nucleotides. A bulge sequence can comprise at least 5 purine nucleotides. A bulge sequence can comprise at least one guanine nucleotide. In some examples, a bulge sequence can comprise at least one adenine nucleotide.

[0157] Hairpins

[0158] In various examples, one or more hairpins can be located 3′ to the minimum tracrRNA in the 3′ tracrRNA sequence.

[0159] The hairpin can start at least about 1, 2, 3, 4, 5, 6, 7, 8, 9, 10, 15, or 20 or more nucleotides 3′ from the last paired nucleotide in the minimum CRISPR repeat and minimum tracrRNA sequence duplex. The hairpin can start at most about 1, 2, 3, 4, 5, 6, 7, 8, 9 or 10 or more nucleotides 3′ of the last paired nucleotide in the minimum CRISPR repeat and minimum tracrRNA sequence duplex.

[0160] The hairpin can comprise at least about 1, 2, 3, 4, 5, 6, 7, 8, 9, 10, 15, or 20 or more consecutive nucleotides. The hairpin can comprise at most about 1, 2, 3, 4, 5, 6, 7, 8, 9, 10, 15, or more consecutive nucleotides.

[0161] The hairpin can comprise a CC dinucleotide (i.e., two consecutive cytosine nucleotides).

[0162] The hairpin can comprise duplexed nucleotides (e.g., nucleotides in a hairpin, hybridized together). For example, a hairpin can comprise a CC dinucleotide that is hybridized to a GG dinucleotide in a hairpin duplex of the 3′ tracrRNA sequence.

[0163] One or more of the hairpins can interact with guide RNA-interacting regions of a site-directed polypeptide.

[0164] In some examples, there are two or more hairpins, and in other examples there are three or more hairpins.

[0165] 3′ tracrRNA Sequence

[0166] A 3′ tracrRNA sequence can comprise a sequence with at least about 30%, about 40%, about 50%, about 60%, about 65%, about 70%, about 75%, about 80%, about 85%, about 90%, about 95%, or 100% sequence identity to a reference tracrRNA sequence (e.g., a tracrRNA from S. pyogenes).

[0167] The 3′ tracrRNA sequence can have a length from about 6 nucleotides to about 100 nucleotides. For example, the 3′ tracrRNA sequence can have a length from about 6 nucleotides (nt) to about 50 nt, from about 6 nt to about 40 nt, from about 6 nt to about 30 nt, from about 6 nt to about 25 nt, from about 6 nt to about 20 nt, from about 6 nt to about 15 nt, from about 8 nt to about 40 nt, from about 8 nt to about 30 nt, from about 8 nt to about 25 nt, from about 8 nt to about 20 nt, from about 8 nt to about 15 nt, from about 15 nt to about 100 nt, from about 15 nt to about 80 nt, from about 15 nt to about 50 nt, from about 15 nt to about 40 nt, from about 15 nt to about 30 nt, or from about 15 nt to about 25 nt. The 3′ tracrRNA sequence can have a length of approximately 14 nucleotides.

[0168] The 3′ tracrRNA sequence can be at least about 60% identical to a reference 3′ tracrRNA sequence (e.g., wild type 3′ tracrRNA sequence from S. pyogenes) over a stretch of at least 6, 7, or 8 contiguous nucleotides. For example, the 3′ tracrRNA sequence can be at least about 60% identical, about 65% identical, about 70% identical, about 75% identical, about 80% identical, about 85% identical, about 90% identical, about 95% identical, about 98% identical, about 99% identical, or 100% identical, to a reference 3′ tracrRNA sequence (e.g., wild type 3′ tracrRNA sequence from S. pyogenes) over a stretch of at least 6, 7, or 8 contiguous nucleotides.

[0169] The 3′ tracrRNA sequence can comprise more than one duplexed region (e.g., hairpin, hybridized region). The 3′ tracrRNA sequence can comprise two duplexed regions.

[0170] The 3′ tracrRNA sequence can comprise a stem loop structure. The stem loop structure in the 3′ tracrRNA can comprise at least 1, 2, 3, 4, 5, 6, 7, 8, 9, 10, 15 or 20 or more nucleotides. The stem loop structure in the 3′ tracrRNA can comprise at most 1, 2, 3, 4, 5, 6, 7, 8, 9 or 10 or more nucleotides. The stem loop structure can comprise a functional moiety. For example, the stem loop structure can comprise an aptamer, a ribozyme, a protein-interacting hairpin, a CRISPR array, an intron, or an exon. The stem loop structure can comprise at least about 1, 2, 3, 4, or 5 or more functional moieties. The stem loop structure can comprise at most about 1, 2, 3, 4, or 5 or more functional moieties.

[0171] The hairpin in the 3′ tracrRNA sequence can comprise a P-domain. In some examples, the P-domain can comprise a double-stranded region in the hairpin.

[0172] tracrRNA Extension Sequence

[0173] A tracrRNA extension sequence may be provided whether the tracrRNA is in the context of single-molecule guides or double-molecule guides. The tracrRNA extension sequence can have a length from about 1 nucleotide to about 400 nucleotides. The tracrRNA extension sequence can have a length of more than 1, 5, 10, 15, 20, 25, 30, 35, 40, 45, 50, 60, 70, 80, 90, 100, 120, 140, 160, 180, 200, 220, 240, 260, 280, 300, 320, 340, 360, 380, or 400 nucleotides. The tracrRNA extension sequence can have a length from about 20 to about 5000 or more nucleotides. The tracrRNA extension sequence can have a length of more than 1000 nucleotides. The tracrRNA extension sequence can have a length of less than 1, 5, 10, 15, 20, 25, 30, 35, 40, 45, 50, 60, 70, 80, 90, 100, 120, 140, 160, 180, 200, 220, 240, 260, 280, 300, 320, 340, 360, 380, 400 or more nucleotides. The tracrRNA extension sequence can have a length of less than 1000 nucleotides. The tracrRNA extension sequence can comprise less than 10 nucleotides in length. The tracrRNA extension sequence can be 10-30 nucleotides in length. The tracrRNA extension sequence can be 30-70 nucleotides in length.

[0174] The tracrRNA extension sequence can comprise a functional moiety (e.g., a stability control sequence, ribozyme, endoribonuclease binding sequence). The functional moiety can comprise a transcriptional terminator segment (i.e., a transcription termination sequence). The functional moiety can have a total length from about 10 nucleotides (nt) to about 100 nucleotides, from about 10 nt to about 20 nt, from about 20 nt to about 30 nt, from about 30 nt to about 40 nt, from about 40 nt to about 50 nt, from about 50 nt to about 60 nt, from about 60 nt to about 70 nt, from about 70 nt to about 80 nt, from about 80 nt to about 90 nt, or from about 90 nt to about 100 nt, from about 15 nt to about 80 nt, from about 15 nt to about 50 nt, from about 15 nt to about 40 nt, from about 15 nt to about 30 nt, or from about 15 nt to about 25 nt. The functional moiety can function in a eukaryotic cell. The functional moiety can function in a prokaryotic cell. The functional moiety can function in both eukaryotic and prokaryotic cells.

[0175] Non-limiting examples of suitable tracrRNA extension functional moieties include a 3′ poly-adenylated tail, a riboswitch sequence (e.g., to allow for regulated stability and/or regulated accessibility by proteins and protein complexes), a sequence that forms a dsRNA duplex (i.e., a hairpin), a sequence that targets the RNA to a subcellular location (e.g., nucleus, mitochondria, chloroplasts, and the like), a modification or sequence that provides for tracking (e.g., direct conjugation to a fluorescent molecule, conjugation to a moiety that facilitates fluorescent detection, a sequence that allows for fluorescent detection, etc.), and/or a modification or sequence that provides a binding site for proteins (e.g., proteins that act on DNA, including transcriptional activators, transcriptional repressors, DNA methyltransferases, DNA demethylases, histone acetyltransferases, histone deacetylases, and the like). The tracrRNA extension sequence can comprise a primer binding site or a molecular index (e.g., barcode sequence). The tracrRNA extension sequence can comprise one or more affinity tags.

[0176] Single-Molecule Guide Linker Sequence

[0177] The linker sequence of a single-molecule guide nucleic acid can have a length from about 3 nucleotides to about 100 nucleotides. In Jinek et al., supra, for example, a simple 4 nucleotide “tetraloop” (-GAAA-) was used, Science, 337(6096):816-821 (2012). An illustrative linker has a length from about 3 nucleotides (nt) to about 90 nt, from about 3 nt to about 80 nt, from about 3 nt to about 70 nt, from about 3 nt to about 60 nt, from about 3 nt to about 50 nt, from about 3 nt to about 40 nt, from about 3 nt to about 30 nt, from about 3 nt to about 20 nt, from about 3 nt to about 10 nt. For example, the linker can have a length from about 3 nt to about 5 nt, from about 5 nt to about 10 nt, from about 10 nt to about 15 nt, from about 15 nt to about 20 nt, from about 20 nt to about 25 nt, from about 25 nt to about 30 nt, from about 30 nt to about 35 nt, from about 35 nt to about 40 nt, from about 40 nt to about 50 nt, from about 50 nt to about 60 nt, from about 60 nt to about 70 nt, from about 70 nt to about 80 nt, from about 80 nt to about 90 nt, or from about 90 nt to about 100 nt. The linker of a single-molecule guide nucleic acid can be between 4 and 40 nucleotides. The linker can be at least about 100, 500, 1000, 1500, 2000, 2500, 3000, 3500, 4000, 4500, 5000, 5500, 6000, 6500, or 7000 or more nucleotides. The linker can be at most about 100, 500, 1000, 1500, 2000, 2500, 3000, 3500, 4000, 4500, 5000, 5500, 6000, 6500, or 7000 or more nucleotides.

[0178] Linkers can comprise any of a variety of sequences, although in some examples the linker will not comprise sequences that have extensive regions of homology with other portions of the guide RNA, which might cause intramolecular binding that could interfere with other functional regions of the guide. In Jinek et al., supra, a simple 4 nucleotide sequence -GAAA was used, Science, 337(6096):816-821 (2012), but numerous other sequences, including longer sequences can likewise be used.

[0179] The linker sequence can comprise a functional moiety. For example, the linker sequence can comprise one or more features, including an aptamer, a ribozyme, a protein-interacting hairpin, a protein binding site, a CRISPR array, an intron, or an exon. The linker sequence can comprise at least about 1, 2, 3, 4, or 5 or more functional moieties. In some examples, the linker sequence can comprise at most about 1, 2, 3, 4, or 5 or more functional moieties.

[0180] Nucleic Acid Modifications (Chemical and Structural Modifications)

[0181] In some aspects, polynucleotides introduced into cells can comprise one or more modifications that can be used individually or in combination, for example, to enhance activity, stability or specificity, alter delivery, reduce innate immune responses in host cells, or for other enhancements, as further described herein and known in the art.

[0182] In certain examples, modified polynucleotides can be used in the CRISPR/Cas9 or CRISPR/Cpf1 system, in which case the guide RNAs (either single-molecule guides or double-molecule guides) and/or a DNA or an RNA encoding a Cas9 or Cpf1 endonuclease introduced into a cell can be modified, as described and illustrated below. Such modified polynucleotides can be used in the CRISPR/Cas9 or CRISPR/Cpf1 system to edit any one or more genomic loci.

[0183] Using the CRISPR/Cas9 or CRISPR/Cpf1 system for purposes of non-limiting illustrations of such uses, modifications of guide RNAs can be used to enhance the formation or stability of the CRISPR/Cas9 or CRISPR/Cpf1 genome editing complex comprising guide RNAs, which can be single-molecule guides or double-molecule, and a Cas9 or Cpf1 endonuclease. Modifications of guide RNAs can also or alternatively be used to enhance the initiation, stability or kinetics of interactions between the genome editing complex with the target sequence in the genome, which can be used, for example, to enhance on-target activity. Modifications of guide RNAs can also or alternatively be used to enhance specificity, e.g., the relative rates of genome editing at the on-target site as compared to effects at other (off-target) sites.

[0184] Modifications can also or alternatively be used to increase the stability of a guide RNA, e.g., by increasing its resistance to degradation by ribonucleases (RNases) present in a cell, thereby causing its half-life in the cell to be increased. Modifications enhancing guide RNA half-life can be particularly useful in aspects in which a Cas9 or Cpf1 endonuclease is introduced into the cell to be edited via an RNA that needs to be translated in order to generate endonuclease, because increasing the half-life of guide RNAs introduced at the same time as the RNA encoding the endonuclease can be used to increase the time that the guide RNAs and the encoded Cas9 or Cpf1 endonuclease co-exist in the cell.

[0185] Modifications can also or alternatively be used to decrease the likelihood or degree to which RNAs introduced into cells elicit innate immune responses. Such responses, which have been well characterized in the context of RNA interference (RNAi), including small-interfering RNAs (siRNAs), as described below and in the art, tend to be associated with reduced half-life of the RNA and/or the elicitation of cytokines or other factors associated with immune responses.

[0186] One or more types of modifications can also be made to RNAs encoding an endonuclease that are introduced into a cell, including, without limitation, modifications that enhance the stability of the RNA (such as by increasing its degradation by RNases present in the cell), modifications that enhance translation of the resulting product (i.e. the endonuclease), and/or modifications that decrease the likelihood or degree to which the RNAs introduced into cells elicit innate immune responses.

[0187] Combinations of modifications, such as the foregoing and others, can likewise be used. In the case of CRISPR/Cas9 or CRISPR/Cpf1, for example, one or more types of modifications can be made to guide RNAs (including those exemplified above), and/or one or more types of modifications can be made to RNAs encoding Cas endonuclease (including those exemplified above).

[0188] By way of illustration, guide RNAs used in the CRISPR/Cas9 or CRISPR/Cpf1 system, or other smaller RNAs can be readily synthesized by chemical means, enabling a number of modifications to be readily incorporated, as illustrated below and described in the art. While chemical synthetic procedures are continually expanding, purifications of such RNAs by procedures such as high-performance liquid chromatography (HPLC, which avoids the use of gels such as PAGE) tends to become more challenging as polynucleotide lengths increase significantly beyond a hundred or so nucleotides. One approach that can be used for generating chemically-modified RNAs of greater length is to produce two or more molecules that are ligated together. Much longer RNAs, such as those encoding a Cas9 endonuclease, are more readily generated enzymatically. While fewer types of modifications are available for use in enzymatically produced RNAs, there are still modifications that can be used to, e.g., enhance stability, reduce the likelihood or degree of innate immune response, and/or enhance other attributes, as described further below and in the art; and new types of modifications are regularly being developed.

[0189] By way of illustration of various types of modifications, especially those used frequently with smaller chemically synthesized RNAs, modifications can comprise one or more nucleotides modified at the 2′ position of the sugar, in some aspects a 2′-O-alkyl, 2′-O-alkyl-O-alkyl, or 2′-fluoro-modified nucleotide. In some examples, RNA modifications include 2′-fluoro, 2′-amino or 2′-O-methyl modifications on the ribose of pyrimidines, abasic residues, or an inverted base at the 3′ end of the RNA. Such modifications are routinely incorporated into oligonucleotides and these oligonucleotides have been shown to have a higher Tm (i.e., higher target binding affinity) than 2′-deoxyoligonucleotides against a given target.

[0190] A number of nucleotide and nucleoside modifications have been shown to make the oligonucleotide into which they are incorporated more resistant to nuclease digestion than the native oligonucleotide; these modified oligos survive intact for a longer time than unmodified oligonucleotides. Specific examples of modified oligonucleotides include those comprising modified backbones, for example, phosphorothioates, phosphotriesters, methyl phosphonates, short chain alkyl or cycloalkyl intersugar linkages or short chain heteroatomic or heterocyclic intersugar linkages. Some oligonucleotides are oligonucleotides with phosphorothioate backbones and those with heteroatom backbones, particularly CH₂—NH—O—CH₂, CH,˜N(CH₃)˜O˜CH₂ (known as a methylene(methylimino) or MMI backbone), CH₂—O—N (CH₃)—CH₂, CH₂—N(CH₃)—N(CH₃)—CH₂ and O—N(CH₃)—CH₂—CH₂ backbones, wherein the native phosphodiester backbone is represented as O—P—O—CH,); amide backbones [see De Mesmaeker et al., Ace. Chem. Res., 28:366-374 (1995)]; morpholino backbone structures (see Summerton and Weller, U.S. Pat. No. 5,034,506); peptide nucleic acid (PNA) backbone (wherein the phosphodiester backbone of the oligonucleotide is replaced with a polyamide backbone, the nucleotides being bound directly or indirectly to the aza nitrogen atoms of the polyamide backbone, see Nielsen et al., Science 1991, 254, 1497). Phosphorus-containing linkages include, but are not limited to, phosphorothioates, chiral phosphorothioates, phosphorodithioates, phosphotriesters, aminoalkylphosphotriesters, methyl and other alkyl phosphonates comprising 3′alkylene phosphonates and chiral phosphonates, phosphinates, phosphoramidates comprising 3′-amino phosphoramidate and aminoalkylphosphoramidates, thionophosphoramidates, thionoalkylphosphonates, thionoalkylphosphotriesters, and boranophosphates having normal 3′-5′ linkages, 2′-5′ linked analogs of these, and those having inverted polarity wherein the adjacent pairs of nucleoside units are linked 3′-5′ to 5′-3′ or 2′-5′ to 5′-2′; see U.S. Pat. Nos. 3,687,808; 4,469,863; 4,476,301; 5,023,243; 5,177,196; 5,188,897; 5,264,423; 5,276,019; 5,278,302; 5,286,717; 5,321,131; 5,399,676; 5,405,939; 5,453,496; 5,455,233; 5,466,677; 5,476,925; 5,519,126; 5,536,821; 5,541,306; 5,550,111; 5,563,253; 5,571,799; 5,587,361; and 5,625,050.

[0191] Morpholino-based oligomeric compounds are described in Braasch and David Corey, Biochemistry, 41(14): 4503-4510 (2002); Genesis, Volume 30, Issue 3, (2001); Heasman, Dev. Biol., 243: 209-214 (2002); Nasevicius et al., Nat. Genet., 26:216-220 (2000); Lacerra et al., Proc. Natl. Acad. Sci., 97: 9591-9596 (2000); and U.S. Pat. No. 5,034,506, issued Jul. 23, 1991.

[0192] Cyclohexenyl nucleic acid oligonucleotide mimetics are described in Wang et al., J. Am. Chem. Soc., 122: 8595-8602 (2000).

[0193] Modified oligonucleotide backbones that do not include a phosphorus atom therein have backbones that are formed by short chain alkyl or cycloalkyl internucleoside linkages, mixed heteroatom and alkyl or cycloalkyl internucleoside linkages, or one or more short chain heteroatomic or heterocyclic internucleoside linkages. These comprise those having morpholino linkages (formed in part from the sugar portion of a nucleoside); siloxane backbones; sulfide, sulfoxide and sulfone backbones; formacetyl and thioformacetyl backbones; methylene formacetyl and thioformacetyl backbones; alkene containing backbones; sulfamate backbones; methyleneimino and methylenehydrazino backbones; sulfonate and sulfonamide backbones; amide backbones; and others having mixed N, O, S, and CH₂ component parts; see U.S. Pat. Nos. 5,034,506; 5,166,315; 5,185,444; 5,214,134; 5,216,141; 5,235,033; 5,264,562; 5,264,564; 5,405,938; 5,434,257; 5,466,677; 5,470,967; 5,489,677; 5,541,307; 5,561,225; 5,596,086; 5,602,240; 5,610,289; 5,602,240; 5,608,046; 5,610,289; 5,618,704; 5,623,070; 5,663,312; 5,633,360; 5,677,437; and 5,677,439.

[0194] One or more substituted sugar moieties can also be included, e.g., one of the following at the 2′ position: OH, SH, SCH₃, F, OCN, OCH₃ OCH₃, OCH₃ O(CH₂)n CH₃, O(CH₂)n NH₂, or O(CH₂)n CH₃, where n is from 1 to about 10; C1 to C10 lower alkyl, alkoxyalkoxy, substituted lower alkyl, alkaryl or aralkyl; C1; Br; CN; CF₃; OCF₃; O—, S—, or N—alkyl; O—, S—, or N-alkenyl; SOCH₃; SO₂ CH₃; ONO₂; NO₂; N₃; NH₂; heterocycloalkyl; heterocycloalkaryl; aminoalkylamino; polyalkylamino; substituted silyl; an RNA cleaving group; a reporter group; an intercalator; a group for improving the pharmacokinetic properties of an oligonucleotide; or a group for improving the pharmacodynamic properties of an oligonucleotide and other substituents having similar properties. In some aspects, a modification includes 2′-methoxyethoxy (2′—O—CH₂CH₂OCH₃, also known as 2′—O—(2-methoxyethyl)) (Martin et al, HeIv. Chim. Acta, 1995, 78, 486). Other modifications include 2′-methoxy (2′—O—CH₃), 2′-propoxy (2′—OCH₂ CH₂CH₃) and 2′-fluoro (2′—F). Similar modifications may also be made at other positions on the oligonucleotide, particularly the 3′ position of the sugar on the 3′ terminal nucleotide and the 5′ position of 5′ terminal nucleotide. Oligonucleotides may also have sugar mimetics, such as cyclobutyls in place of the pentofuranosyl group.

[0195] In some examples, both a sugar and an internucleoside linkage, i.e., the backbone, of the nucleotide units can be replaced with novel groups. The base units can be maintained for hybridization with an appropriate nucleic acid target compound. One such oligomeric compound, an oligonucleotide mimetic that has been shown to have excellent hybridization properties, is referred to as a peptide nucleic acid (PNA). In PNA compounds, the sugar-backbone of an oligonucleotide can be replaced with an amide containing backbone, for example, an aminoethylglycine backbone. The nucleobases can be retained and bound directly or indirectly to aza nitrogen atoms of the amide portion of the backbone. Representative U.S. patents that teach the preparation of PNA compounds comprise, but are not limited to, U.S. Pat. Nos. 5,539,082; 5,714,331; and 5,719,262. Further teaching of PNA compounds can be found in Nielsen et al, Science, 254: 1497-1500 (1991).

[0196] Guide RNAs can also include, additionally or alternatively, nucleobase (often referred to in the art simply as “base”) modifications or substitutions. As used herein, “unmodified” or “natural” nucleobases include adenine (A), guanine (G), thymine (T), cytosine (C), and uracil (U). Modified nucleobases include nucleobases found only infrequently or transiently in natural nucleic acids, e.g., hypoxanthine, 6-methyladenine, 5-Me pyrimidines, particularly 5-methylcytosine (also referred to as 5-methyl-2′ deoxycytosine and often referred to in the art as 5-Me-C), 5-hydroxymethylcytosine (HMC), glycosyl HMC and gentobiosyl HMC, as well as synthetic nucleobases, e.g., 2-aminoadenine, 2-(methylamino)adenine, 2-(imidazolylalkyl)adenine, 2-(aminoalklyamino)adenine or other heterosubstituted alkyladenines, 2-thiouracil, 2-thiothymine, 5-bromouracil, 5-hydroxymethyluracil, 8-azaguanine, 7-deazaguanine, N6 (6-aminohexyl)adenine, and 2,6-diaminopurine. Kornberg, A., DNA Replication, W. H. Freeman & Co., San Francisco, pp. 75-77 (1980); Gebeyehu et al., Nucl. Acids Res. 15:4513 (1997). A “universal” base known in the art, e.g., inosine, can also be included. 5-Me-C substitutions have been shown to increase nucleic acid duplex stability by 0.6-1.2° C. (Sanghvi, Y. S., in Crooke, S. T. and Lebleu, B., eds., Antisense Research and Applications, CRC Press, Boca Raton, 1993, pp. 276-278) and are aspects of base substitutions.

[0197] Modified nucleobases can comprise other synthetic and natural nucleobases, such as 5-methylcytosine (5-me-C), 5-hydroxymethyl cytosine, xanthine, hypoxanthine, 2-aminoadenine, 6-methyl and other alkyl derivatives of adenine and guanine, 2-propyl and other alkyl derivatives of adenine and guanine, 2-thiouracil, 2-thiothymine and 2-thiocytosine, 5-halouracil and cytosine, 5-propynyl uracil and cytosine, 6-azo uracil, cytosine and thymine, 5-uracil (pseudo-uracil), 4-thiouracil, 8-halo, 8-amino, 8-thiol, 8-thioalkyl, 8-hydroxyl and other 8-substituted adenines and guanines, 5-halo particularly 5-bromo, 5-trifluoromethyl and other 5-substituted uracils and cytosines, 7-methylquanine and 7-methyladenine, 8-azaguanine and 8-azaadenine, 7-deazaguanine and 7-deazaadenine, and 3-deazaguanine and 3-deazaadenine.

[0198] Further, nucleobases can comprise those disclosed in U.S. Pat. No. 3,687,808, those disclosed in ‘The Concise Encyclopedia of Polymer Science And Engineering’, pages 858-859, Kroschwitz, J. I., ed. John Wiley & Sons, 1990, those disclosed by Englisch et al., Angewandle Chemie, International Edition′, 1991, 30, page 613, and those disclosed by Sanghvi, Y. S., Chapter 15, Antisense Research and Applications′, pages 289-302, Crooke, S. T. and Lebleu, B. ea., CRC Press, 1993. Certain of these nucleobases are particularly useful for increasing the binding affinity of the oligomeric compounds of the present disclosure. These include 5-substituted pyrimidines, 6-azapyrimidines and N-2, N-6 and 0-6 substituted purines, comprising 2-aminopropyladenine, 5-propynyluracil and 5-propynylcytosine. 5-methylcytosine substitutions have been shown to increase nucleic acid duplex stability by 0.6-1.2° C. (Sanghvi, Y. S., Crooke, S. T. and Lebleu, B., eds, ‘Antisense Research and Applications’, CRC Press, Boca Raton, 1993, pp. 276-278) and are aspects of base substitutions, even more particularly when combined with 2′-O-methoxyethyl sugar modifications. Modified nucleobases are described in U.S. Pat. No. 3,687,808, as well as U.S. Pat. Nos. 4,845,205; 5,130,302; 5,134,066; 5,175,273; 5,367,066; 5,432,272; 5,457,187; 5,459,255; 5,484,908; 5,502,177; 5,525,711; 5,552,540; 5,587,469; 5,596,091; 5,614,617; 5,681,941; 5,750,692; 5,763,588; 5,830,653; 6,005,096; and U.S. Patent Application Publication 2003/0158403.

[0199] Thus, the term “modified” refers to a non-natural sugar, phosphate, or base that is incorporated into a guide RNA, an endonuclease, or both a guide RNA and an endonuclease. It is not necessary for all positions in a given oligonucleotide to be uniformly modified, and in fact more than one of the aforementioned modifications can be incorporated in a single oligonucleotide, or even in a single nucleoside within an oligonucleotide.

[0200] The guide RNAs and/or mRNA (or DNA) encoding an endonuclease can be chemically linked to one or more moieties or conjugates that enhance the activity, cellular distribution, or cellular uptake of the oligonucleotide. Such moieties comprise, but are not limited to, lipid moieties such as a cholesterol moiety [Letsinger et al., Proc. Natl. Acad. Sci. USA, 86: 6553-6556 (1989)]; cholic acid [Manoharan et al., Bioorg. Med. Chem. Let., 4: 1053-1060 (1994)]; a thioether, e.g., hexyl-S-tritylthiol [Manoharan et al, Ann. N. Y. Acad. Sci., 660: 306-309 (1992) and Manoharan et al., Bioorg. Med. Chem. Let., 3: 2765-2770 (1993)]; a thiocholesterol [Oberhauser et al., Nucl. Acids Res., 20: 533-538 (1992)]; an aliphatic chain, e.g., dodecandiol or undecyl residues [Kabanov et al., FEBS Lett., 259: 327-330 (1990) and Svinarchuk et al., Biochimie, 75: 49-54 (1993)]; a phospholipid, e.g., di-hexadecyl-rac-glycerol or triethylammonium 1,2-di-O-hexadecyl-rac-glycero-3-H-phosphonate [Manoharan et al., Tetrahedron Lett., 36: 3651-3654 (1995) and Shea et al., Nucl. Acids Res., 18: 3777-3783 (1990)]; a polyamine or a polyethylene glycol chain [Mancharan et al., Nucleosides & Nucleotides, 14: 969-973 (1995)]; adamantane acetic acid [Manoharan et al., Tetrahedron Lett., 36: 3651-3654 (1995)]; a palmityl moiety [(Mishra et al., Biochim. Biophys. Acta, 1264: 229-237 (1995)]; or an octadecylamine or hexylamino-carbonyl-t oxycholesterol moiety [Crooke et al., J. Pharmacol. Exp. Ther., 277: 923-937 (1996)]. See also U.S. Pat. Nos. 4,828,979; 4,948,882; 5,218,105; 5,525,465; 5,541,313; 5,545,730; 5,552,538; 5,578,717, 5,580,731; 5,580,731; 5,591,584; 5,109,124; 5,118,802; 5,138,045; 5,414,077; 5,486,603; 5,512,439; 5,578,718; 5,608,046; 4,587,044; 4,605,735; 4,667,025; 4,762,779; 4,789,737; 4,824,941; 4,835,263; 4,876,335; 4,904,582; 4,958,013; 5,082,830; 5,112,963; 5,214,136; 5,082,830; 5,112,963; 5,214,136; 5,245,022; 5,254,469; 5,258,506; 5,262,536; 5,272,250; 5,292,873; 5,317,098; 5,371,241, 5,391,723; 5,416,203, 5,451,463; 5,510,475; 5,512,667; 5,514,785; 5,565,552; 5,567,810; 5,574,142; 5,585,481; 5,587,371; 5,595,726; 5,597,696; 5,599,923; 5,599, 928 and 5,688,941.

[0201] Sugars and other moieties can be used to target proteins and complexes comprising nucleotides, such as cationic polysomes and liposomes, to particular sites. For example, hepatic cell directed transfer can be mediated via asialoglycoprotein receptors (ASGPRs); see, e.g., Hu, et al., Protein Pept Lett. 21(10):1025-30 (2014). Other systems known in the art and regularly developed can be used to target biomolecules of use in the present case and/or complexes thereof to particular target cells of interest.

[0202] These targeting moieties or conjugates can include conjugate groups covalently bound to functional groups, such as primary or secondary hydroxyl groups. Conjugate groups of the present disclosure include intercalators, reporter molecules, polyamines, polyamides, polyethylene glycols, polyethers, groups that enhance the pharmacodynamic properties of oligomers, and groups that enhance the pharmacokinetic properties of oligomers. Typical conjugate groups include cholesterols, lipids, phospholipids, biotin, phenazine, folate, phenanthridine, anthraquinone, acridine, fluoresceins, rhodamines, coumarins, and dyes. Groups that enhance the pharmacodynamic properties, in the context of this disclosure, include groups that improve uptake, enhance resistance to degradation, and/or strengthen sequence-specific hybridization with the target nucleic acid. Groups that enhance the pharmacokinetic properties, in the context of this present disclosure, include groups that improve uptake, distribution, metabolism or excretion of the compounds of the present disclosure. Representative conjugate groups are disclosed in International Patent Application No. PCT/US92/09196, filed Oct. 23, 1992 (published as WO1993007883), and U.S. Pat. No. 6,287,860. Conjugate moieties include, but are not limited to, lipid moieties such as a cholesterol moiety, cholic acid, a thioether, e.g., hexyl-5-tritylthiol, a thiocholesterol, an aliphatic chain, e.g., dodecandiol or undecyl residues, a phospholipid, e.g., di-hexadecyl-rac-glycerol or triethylammonium 1,2-di-O-hexadecyl-rac-glycero-3-H-phosphonate, a polyamine or a polyethylene glycol chain, or adamantane acetic acid, a palmityl moiety, or an octadecylamine or hexylamino-carbonyl-oxy cholesterol moiety. See, e.g., U.S. Pat. Nos. 4,828,979; 4,948,882; 5,218,105; 5,525,465; 5,541,313; 5,545,730; 5,552,538; 5,578,717, 5,580,731; 5,580,731; 5,591,584; 5,109,124; 5,118,802; 5,138,045; 5,414,077; 5,486,603; 5,512,439; 5,578,718; 5,608,046; 4,587,044; 4,605,735; 4,667,025; 4,762,779; 4,789,737; 4,824,941; 4,835,263; 4,876,335; 4,904,582; 4,958,013; 5,082,830; 5,112,963; 5,214,136; 5,082,830; 5,112,963; 5,214,136; 5,245,022; 5,254,469; 5,258,506; 5,262,536; 5,272,250; 5,292,873; 5,317,098; 5,371,241, 5,391,723; 5,416,203, 5,451,463; 5,510,475; 5,512,667; 5,514,785; 5,565,552; 5,567,810; 5,574,142; 5,585,481; 5,587,371; 5,595,726; 5,597,696; 5,599,923; 5,599,928 and 5,688,941.

[0203] Longer polynucleotides that are less amenable to chemical synthesis and are typically produced by enzymatic synthesis can also be modified by various means. Such modifications can include, for example, the introduction of certain nucleotide analogs, the incorporation of particular sequences or other moieties at the 5′ or 3′ ends of molecules, and other modifications. By way of illustration, the mRNA encoding Cas9 is approximately 4 kb in length and can be synthesized by in vitro transcription. Modifications to the mRNA can be applied to, e.g., increase its translation or stability (such as by increasing its resistance to degradation with a cell), or to reduce the tendency of the RNA to elicit an innate immune response that is often observed in cells following introduction of exogenous RNAs, particularly longer RNAs such as that encoding Cas9.

[0204] Numerous such modifications have been described in the art, such as polyA tails, 5′ cap analogs (e.g., Anti Reverse Cap Analog (ARCA) or m7G(5′)ppp(5′)G (mCAP)), modified 5′ or 3′ untranslated regions (UTRs), use of modified bases (such as Pseudo-UTP, 2-Thio-UTP, 5-Methylcytidine-5′-Triphosphate (5-Methyl-CTP) or N6-Methyl-ATP), or treatment with phosphatase to remove 5′ terminal phosphates. These and other modifications are known in the art, and new modifications of RNAs are regularly being developed.

[0205] There are numerous commercial suppliers of modified RNAs, including for example, TriLink Biotech, AxoLabs, Bio-Synthesis Inc., Dharmacon and many others. As described by TriLink, for example, 5-Methyl-CTP can be used to impart desirable characteristics, such as increased nuclease stability, increased translation or reduced interaction of innate immune receptors with in vitro transcribed RNA. 5-Methylcytidine-5′-Triphosphate (5-Methyl-CTP), N6-Methyl-ATP, as well as Pseudo-UTP and 2-Thio-UTP, have also been shown to reduce innate immune stimulation in culture and in vivo while enhancing translation, as illustrated in publications by Kormann et al. and Warren et al. referred to below.

[0206] It has been shown that chemically modified mRNA delivered in vivo can be used to achieve improved therapeutic effects; see, e.g., Kormann et al., Nature Biotechnology 29, 154-157 (2011). Such modifications can be used, for example, to increase the stability of the RNA molecule and/or reduce its immunogenicity. Using chemical modifications such as Pseudo-U, N6-Methyl-A, 2-Thio-U and 5-Methyl-C, it was found that substituting just one quarter of the uridine and cytidine residues with 2-Thio-U and 5-Methyl-C respectively resulted in a significant decrease in toll-like receptor (TLR) mediated recognition of the mRNA in mice. By reducing the activation of the innate immune system, these modifications can be used to effectively increase the stability and longevity of the mRNA in vivo; see, e.g., Kormann et al., supra.

[0207] It has also been shown that repeated administration of synthetic messenger RNAs incorporating modifications designed to bypass innate anti-viral responses can reprogram differentiated human cells to pluripotency. See, e.g., Warren, et al., Cell Stem Cell, 7(5):618-30 (2010). Such modified mRNAs that act as primary reprogramming proteins can be an efficient means of reprogramming multiple human cell types. Such cells are referred to as induced pluripotency stem cells (iPSCs), and it was found that enzymatically synthesized RNA incorporating 5-Methyl-CTP, Pseudo-UTP and an Anti Reverse Cap Analog (ARCA) could be used to effectively evade the cell's antiviral response; see, e.g., Warren et al., supra.

[0208] Other modifications of polynucleotides described in the art include, for example, the use of polyA tails, the addition of 5′ cap analogs (such as m7G(5′)ppp(5′)G (mCAP)), modifications of 5′ or 3′ untranslated regions (UTRs), or treatment with phosphatase to remove 5′ terminal phosphates—and new approaches are regularly being developed.

[0209] A number of compositions and techniques applicable to the generation of modified RNAs for use herein have been developed in connection with the modification of RNA interference (RNAi), including small-interfering RNAs (siRNAs). siRNAs present particular challenges in vivo because their effects on gene silencing via mRNA interference are generally transient, which can require repeat administration. In addition, siRNAs are double-stranded RNAs (dsRNA) and mammalian cells have immune responses that have evolved to detect and neutralize dsRNA, which is often a by-product of viral infection. Thus, there are mammalian enzymes such as PKR (dsRNA-responsive kinase), and potentially retinoic acid-inducible gene I (RIG-I), that can mediate cellular responses to dsRNA, as well as Toll-like receptors (such as TLR3, TLR7 and TLR8) that can trigger the induction of cytokines in response to such molecules; see, e.g., the reviews by Angart et al., Pharmaceuticals (Basel) 6(4): 440-468 (2013); Kanasty et al., Molecular Therapy 20(3): 513-524 (2012); Burnett et al., Biotechnol J. 6(9):1130-46 (2011); Judge and MacLachlan, Hum Gene Ther 19(2):111-24 (2008); and references cited therein.

[0210] A large variety of modifications have been developed and applied to enhance RNA stability, reduce innate immune responses, and/or achieve other benefits that can be useful in connection with the introduction of polynucleotides into human cells, as described herein; see, e.g., the reviews by Whitehead K A et al., Annual Review of Chemical and Biomolecular Engineering, 2: 77-96 (2011); Gaglione and Messere, Mini Rev Med Chem, 10(7):578-95 (2010); Chernolovskaya et al, Curr Opin Mol Ther., 12(2):158-67 (2010); Deleavey et al., Curr Protoc Nucleic Acid Chem Chapter 16:Unit 16.3 (2009); Behlke, Oligonucleotides 18(4):305-19 (2008); Fucini et al., Nucleic Acid Ther 22(3): 205-210 (2012); Bremsen et al., Front Genet 3:154 (2012).

[0211] As noted above, there are a number of commercial suppliers of modified RNAs, many of which have specialized in modifications designed to improve the effectiveness of siRNAs. A variety of approaches are offered based on various findings reported in the literature. For example, Dharmacon notes that replacement of a non-bridging oxygen with sulfur (phosphorothioate, PS) has been extensively used to improve nuclease resistance of siRNAs, as reported by Kole, Nature Reviews Drug Discovery 11:125-140 (2012). Modifications of the 2′-position of the ribose have been reported to improve nuclease resistance of the internucleotide phosphate bond while increasing duplex stability (Tm), which has also been shown to provide protection from immune activation. A combination of moderate PS backbone modifications with small, well-tolerated 2′-substitutions (2′—O-Methyl, 2′-Fluoro, 2′-Hydro) have been associated with highly stable siRNAs for applications in vivo, as reported by Soutschek et al. Nature 432:173-178 (2004); and 2′-O-Methyl modifications have been reported to be effective in improving stability as reported by Volkov, Oligonucleotides 19:191-202 (2009). With respect to decreasing the induction of innate immune responses, modifying specific sequences with 2′-O-Methyl, 2′-Fluoro, 2′-Hydro have been reported to reduce TLR7/TLR8 interaction while generally preserving silencing activity; see, e.g., Judge et al., Mol. Ther. 13:494-505 (2006); and Cekaite et al., J. Mol. Biol. 365:90-108 (2007). Additional modifications, such as 2-thiouracil, pseudouracil, 5-methylcytosine, 5-methyluracil, and N6-methyladenosine have also been shown to minimize the immune effects mediated by TLR3, TLR7, and TLR8; see, e.g., Kariko, K. et al., Immunity 23:165-175 (2005).

[0212] As is also known in the art, and commercially available, a number of conjugates can be applied to polynucleotides, such as RNAs, for use herein that can enhance their delivery and/or uptake by cells, including for example, cholesterol, tocopherol and folic acid, lipids, peptides, polymers, linkers and aptamers; see, e.g., the review by Winkler, Ther. Deliv. 4:791-809 (2013), and references cited therein.

[0213] Codon-Optimization

[0214] A polynucleotide encoding a site-directed polypeptide can be codon-optimized according to methods standard in the art for expression in the cell containing the target DNA of interest. For example, if the intended target nucleic acid is in a human cell, a human codon-optimized polynucleotide encoding Cas9 is contemplated for use for producing the Cas9 polypeptide.

[0215] Complexes of a Genome-Targeting Nucleic Acid and a Site-Directed Polypeptide

[0216] A genome-targeting nucleic acid interacts with a site-directed polypeptide (e.g., a nucleic acid-guided nuclease such as Cas9), thereby forming a complex. The genome-targeting nucleic acid guides the site-directed polypeptide to a target nucleic acid.

[0217] Ribonucleoprotein Complexes (RNPs)

[0218] The site-directed polypeptide and genome-targeting nucleic acid can each be administered separately to a cell or a patient. On the other hand, the site-directed polypeptide can be pre-complexed with one or more guide RNAs, or one or more crRNA together with a tracrRNA. The pre-complexed material can then be administered to a cell or a patient. Such pre-complexed material is known as a ribonucleoprotein particle (RNP). The site-directed polypeptide in the RNP can be, for example, a Cas9 endonuclease or a Cpf1 endonuclease. The site-directed polypeptide can be flanked at the N-terminus, the C-terminus, or both the N-terminus and C-terminus by one or more nuclear localization signals (NLSs). For example, a Cas9 endonuclease can be flanked by two NLSs, one NLS located at the N-terminus and the second NLS located at the C-terminus. The NLS can be any NLS known in the art, such as a SV40 NLS. The weight ratio of genome-targeting nucleic acid to site-directed polypeptide in the RNP can be 1:1. For example, the weight ratio of sgRNA to Cas9 endonuclease in the RNP can be 1:1.

[0219] Nucleic Acids Encoding System Components

[0220] The present disclosure provides a nucleic acid comprising a nucleotide sequence encoding a genome-targeting nucleic acid of the disclosure, a site-directed polypeptide of the disclosure, and/or any nucleic acid or proteinaceous molecule necessary to carry out the aspects of the methods of the disclosure.

[0221] The nucleic acid encoding a genome-targeting nucleic acid of the disclosure, a site-directed polypeptide of the disclosure, and/or any nucleic acid or proteinaceous molecule necessary to carry out the aspects of the methods of the disclosure can comprise a vector (e.g., a recombinant expression vector).

[0222] The term “vector” refers to a nucleic acid molecule capable of transporting another nucleic acid to which it has been linked. One type of vector is a “plasmid”, which refers to a circular double-stranded DNA loop into which additional nucleic acid segments can be ligated. Another type of vector is a viral vector, wherein additional nucleic acid segments can be ligated into the viral genome. Certain vectors are capable of autonomous replication in a host cell into which they are introduced (e.g., bacterial vectors having a bacterial origin of replication and episomal mammalian vectors). Other vectors (e.g., non-episomal mammalian vectors) are integrated into the genome of a host cell upon introduction into the host cell, and thereby are replicated along with the host genome.

[0223] In some examples, vectors can be capable of directing the expression of nucleic acids to which they are operatively linked. Such vectors are referred to herein as “recombinant expression vectors”, or more simply “expression vectors”, which serve equivalent functions.

[0224] The term “operably linked” means that the nucleotide sequence of interest is linked to regulatory sequence(s) in a manner that allows for expression of the nucleotide sequence. The term “regulatory sequence” is intended to include, for example, promoters, enhancers and other expression control elements (e.g., polyadenylation signals). Such regulatory sequences are well known in the art and are described, for example, in Goeddel; Gene Expression Technology: Methods in Enzymology 185, Academic Press, San Diego, CA (1990). Regulatory sequences include those that direct constitutive expression of a nucleotide sequence in many types of host cells, and those that direct expression of the nucleotide sequence only in certain host cells (e.g., tissue-specific regulatory sequences). It will be appreciated by those skilled in the art that the design of the expression vector can depend on such factors as the choice of the target cell, the level of expression desired, and the like.

[0225] Expression vectors contemplated include, but are not limited to, viral vectors based on vaccinia virus, poliovirus, adenovirus, adeno-associated virus, SV40, herpes simplex virus, human immunodeficiency virus, retrovirus (e.g., Murine Leukemia Virus, spleen necrosis virus, and vectors derived from retroviruses such as Rous Sarcoma Virus, Harvey Sarcoma Virus, avian leukosis virus, a lentivirus, human immunodeficiency virus, myeloproliferative sarcoma virus, and mammary tumor virus) and other recombinant vectors. Other vectors contemplated for eukaryotic target cells include, but are not limited to, the vectors pXT1, pSG5, pSVK3, pBPV, pMSG, and pSVLSV40 (Pharmacia). Other vectors can be used so long as they are compatible with the host cell.

[0226] In some examples, a vector can comprise one or more transcription and/or translation control elements. Depending on the host/vector system utilized, any of a number of suitable transcription and translation control elements, including constitutive and inducible promoters, transcription enhancer elements, transcription terminators, etc. can be used in the expression vector. The vector can be a self-inactivating vector that either inactivates the viral sequences or the components of the CRISPR machinery or other elements.

[0227] Non-limiting examples of suitable eukaryotic promoters (i.e., promoters functional in a eukaryotic cell) include those from cytomegalovirus (CMV) immediate early, herpes simplex virus (HSV) thymidine kinase, early and late SV40, long terminal repeats (LTRs) from retrovirus, human elongation factor-1 promoter (EF1), a hybrid construct comprising the cytomegalovirus (CMV) enhancer fused to the chicken beta-actin promoter (CAG), murine stem cell virus promoter (MSCV), phosphoglycerate kinase-1 locus promoter (PGK), and mouse metallothionein-I.

[0228] For expressing small RNAs, including guide RNAs used in connection with Cas endonuclease, various promoters such as RNA polymerase III promoters, including for example U6 and H1, can be advantageous. Descriptions of and parameters for enhancing the use of such promoters are known in art, and additional information and approaches are regularly being described; see, e.g., Ma, H. et al., Molecular Therapy-Nucleic Acids 3, e161 (2014) doi:10.1038/mtna.2014.12.

[0229] The expression vector can also contain a ribosome binding site for translation initiation and a transcription terminator. The expression vector can also comprise appropriate sequences for amplifying expression. The expression vector can also include nucleotide sequences encoding non-native tags (e.g., histidine tag, hemagglutinin tag, green fluorescent protein, etc.) that are fused to the site-directed polypeptide, thus resulting in a fusion protein.

[0230] A promoter can be an inducible promoter (e.g., a heat shock promoter, tetracycline-regulated promoter, steroid-regulated promoter, metal-regulated promoter, estrogen receptor-regulated promoter, etc.). The promoter can be a constitutive promoter (e.g., CMV promoter, UBC promoter). In some cases, the promoter can be a spatially restricted and/or temporally restricted promoter (e.g., a tissue specific promoter, a cell type specific promoter, etc.).

[0231] The nucleic acid encoding a genome-targeting nucleic acid of the disclosure and/or a site-directed polypeptide can be packaged into or on the surface of delivery vehicles for delivery to cells. Delivery vehicles contemplated include, but are not limited to, nanospheres, liposomes, quantum dots, nanoparticles, polyethylene glycol particles, hydrogels, and micelles. As described in the art, a variety of targeting moieties can be used to enhance the preferential interaction of such vehicles with desired cell types or locations.

[0232] Introduction of the complexes, polypeptides, and nucleic acids of the disclosure into cells can occur by viral or bacteriophage infection, transfection, conjugation, protoplast fusion, lipofection, electroporation, nucleofection, calcium phosphate precipitation, polyethyleneimine (PEI)-mediated transfection, DEAE-dextran mediated transfection, liposome-mediated transfection, particle gun technology, calcium phosphate precipitation, direct micro-injection, nanoparticle-mediated nucleic acid delivery, and the like.

[0233] Therapeutic Approach

[0234] Provided herein are methods for treating a patient with Friedreich's Ataxia. Friedreich's Ataxia is caused by abnormal expansion of a trinucleotide GAA repeat in the first intron of the FXN gene. In most people, the GAA segment is repeated fewer than 12 times. In patients with Friedreich's Ataxia, the number of GAA repeats can range from 66 to 1,000 repeats. This number can be different from one patient to another.

[0235] The term “trinucleotide repeat expansion” means a series of three bases (for example, GAA) repeated at least twice. In certain examples, the trinucleotide repeat expansion may be located in intron 1 of a FXN nucleic acid. In certain examples, a pathogenic trinucleotide repeat expansion includes at least 66 repeats of GAA in a FXN nucleic acid and is associated with disease. In other examples, a pathogenic trinucleotide repeat expansion includes at least 67, 68, 69, 70, 75, 80, 85, 90, 95, 100, 150, 200, 250, 300, 400, 500, 800, 1000 or more repeats. In certain examples, the repeats are consecutive. In certain examples, the repeats are interrupted by one or more nucleobases. In certain examples, a wild-type trinucleotide repeat expansion includes 12 or fewer repeats of GAA in a FXN nucleic acid. In other examples, a wild-type trinucleotide repeat expansion includes 11, 10, 9, 8, 7, 6, 5, 4, 3, 2, or 1 repeat. In certain examples, the entire trinucleotide repeat expansion is deleted. In other examples, a portion of the trinucleotide repeat expansion is deleted.

[0236] An aspect of such method is an ex vivo cell-based therapy. For example, a patient specific induced pluripotent stem cell (iPSC) can be created. Then, the chromosomal DNA of these iPSC cells can be edited using the materials and methods described herein. Next, the genome-edited iPSCs can be differentiated into cells which are then implanted into the patient. In certain aspects, the iPSCs can be differentiated into cells of the central nervous system (e.g., neurons, glial, or retinal cells), cells of the peripheral nervous system or other periphral cell types, including cells of the cardiovascular system (e.g.: cardiac myocytes).

[0237] Yet another aspect of such method is an ex vivo cell-based therapy. For example, a mesenchymal stem cell can be isolated from the patient, which can be isolated from the patient's bone marrow or peripheral blood. Next, the chromosomal DNA of these mesenchymal stem cells can be edited using the materials and methods described herein. Next, the genome-edited mesenchymal stem cells can be differentiated into cells of the central nervous system (e.g., neurons or glial cells). Finally, the differentiated cells, e.g., cells of the central nervous system (e.g., neurons or glial cells) are implanted into the patient.

[0238] One advantage of an ex vivo cell therapy approach is the ability to conduct a comprehensive analysis of the therapeutic prior to administration. Nuclease-based therapeutics can have some level of off-target effects. Performing gene editing ex vivo allows one to characterize the edited cell population prior to implantation. The present disclosure includes sequencing the entire genome of the edited cells to ensure that the off-target effects, if any, can be in genomic locations associated with minimal risk to the patient. Furthermore, populations of specific cells, including clonal populations, can be isolated prior to implantation.

[0239] Another advantage of ex vivo cell therapy relates to genetic modification in iPSCs compared to other primary cell sources. iPSCs are prolific, making it easy to obtain the large number of cells that will be required for a cell-based therapy. Furthermore, iPSCs are an ideal cell type for performing clonal isolations. This allows screening for the correct genomic modification, without risking a decrease in viability. In contrast, other primary cells, such as glial cells, are viable for only a few passages and difficult to clonally expand. Thus, manipulation of iPSCs for the treatment of Friedreich's Ataxia can be much easier, and can shorten the amount of time needed to make the desired genetic modification.

[0240] Methods can also include an in vivo based therapy. Chromosomal DNA of the cells in the patient is edited using the materials and methods described herein. In some aspects, the target cell in an in vivo based therapy is a cell of the central nervous system (e.g., a neuron or a glial cell).

[0241] Although certain cells present an attractive target for ex vivo treatment and therapy, increased efficacy in delivery may permit direct in vivo delivery to such cells. Ideally the targeting and editing would be directed to the relevant cells. Cleavage in other cells can also be prevented by the use of promoters only active in certain cells and or developmental stages. Additional promoters are inducible, and therefore can be temporally controlled if the nuclease is delivered as a plasmid. The amount of time that delivered RNA and protein remain in the cell can also be adjusted using treatments or domains added to change the half-life. In vivo treatment would eliminate a number of treatment steps, but a lower rate of delivery can require higher rates of editing. In vivo treatment can eliminate problems and losses from ex vivo treatment, engraftment and post-engraftment integration of neurons and glial cells appropriately into existing brain circuits.

[0242] An advantage of in vivo gene therapy can be the ease of therapeutic production and administration. The same therapeutic approach and therapy will have the potential to be used to treat more than one patient, for example a number of patients who share the same or similar genotype or allele. In contrast, ex vivo cell therapy typically requires using a patient's own cells, which are isolated, manipulated and returned to the same patient.

[0243] Also provided herein is a cellular method for editing the FXN gene in a cell by genome editing. For example, a cell can be isolated from a patient or animal. Then, the chromosomal DNA of the cell can be edited using the materials and methods described herein.

[0244] The methods provided herein, regardless of whether a cellular or ex vivo or in vivo method, can involve one or a combination of the following: 1) deleting the entire expanded trinucleotide repeat or a portion thereof in or near the FXN gene, by inducing two double-stranded DNA breaks at both sides of the expanded region; 2) deleting the entire expanded trinucleotide repeat or a portion thereof in or near the FXN gene, by inducing one double-stranded DNA break proximal to the expanded region; 3) replacing the deleted expanded trinucleotide repeat sequence with a corrected sequence; 4) inserting a wild-type FXN gene, a cDNA or a minigene (comprised of one or more exons and introns or natural or synthetic introns) into the FXN gene locus or a safe harbor locus; or 5) correcting a point mutation within or near the FXN gene.

[0245] For example, the dual DSB-induced deletion strategy can involve excising the entire abnormal repeat expansion, or a portion thereof in the FXN gene, by inducing two or more double stranded breaks at both sides of the repeat region with one or more CRISPR endonucleases and two or more sgRNAs. In certain aspects, a donor DNA containing the corrected sequence can be provided to restore the wild-type sequence. This approach can require development and optimization of sgRNAs and donor DNA molecules for the FXN gene.

[0246] For example, the single DSB-induced deletion strategy can involve deleting the entire abnormal repeat expansion or a portion thereof in the FXN gene by inducing one double stranded break at a site proximal to the repeat region with one or more CRISPR endonucleases and a gRNA (e.g., crRNA+tracrRNA, or sgRNA). In certain aspects, a donor DNA containing the corrected sequence can be provided to restore the wild-type sequence. This approach can require development and optimization of gRNAs and donor DNA molecule for the FXN gene.

[0247] For example, replacing the deleted expanded trinucleotide repeat sequence with a corrected sequence can be achieved by delivering into the cell one or more CRISPR endonucleases, a pair of gRNAs (e.g., crRNA+tracrRNA, or sgRNA) targeting upstream or downstream of the expanded trinucleotide repeat sequence, and a donor DNA that contains the desired sequence and homology arms to the flanking regions of the target locus. This approach can require development and optimization of sgRNAs for the FXN gene.

[0248] For example, the whole gene correction strategy can involve insertion of a wild-type FXN gene, a cDNA or a minigene (comprised of one or more exons and introns or natural or synthetic introns) into the locus of the FXN gene. It can be achieved by delivering into the cell one or more CRISPR endonucleases, a pair of gRNAs (e.g., crRNA+tracrRNA, or sgRNA) targeting upstream and downstream of or in the first and last exon and/or intron of the FXN gene, and a donor DNA that contains the desired sequence and homology arms to the flanking regions of the target locus. The cytogenetic location of the FXN gene is 9q21.11. Alternatively, the wild-type FXN gene, a cDNA or a minigene (comprised of one or more exons and introns or natural or synthetic introns) can be inserted into a safe harbor locus. A “safe harbor locus” refers to a region of the genome where the integrated material can be adequately expressed without perturbing endogenous gene structure or function. The safe harbor loci include but are not limited to AAVS1 (PPP1R12C), ALB, Angpt13, ApoC3, ASGR2, CCR5, FIX (F9), Gys2, HGD, Lp(a), Pcsk9, Serpina1, TF, and/or TTR. The target sites within the safe harbor loci can be selected from the group consisting of: exon 1-2 of AAVS1 (PPP1R12C), exon 1-2 of ALB, exon 1-2 of Angpt13, exon 1-2 of ApoC3, exon 1-2 of ASGR2, exon 1-2 of CCR5, exon 1-2 of FIX (F9), exon 1-2 of Gys2, exon 1-2 of HGD, exon 1-2 of Lp(a), exon 1-2 of Pcsk9, exon 1-2 of Serpina1, exon 1-2 of TF, and/or exon 1-2 of TTR.

[0249] The whole gene correction strategy may also involve deletion of the endogenous, mutated FXN gene in conjunction with insertion of the wild-type FXN gene.

[0250] The whole gene correction strategy utilizes a donor DNA template in Homology-Directed Repair (HDR). HDR may be accomplished by making one or more single-stranded breaks (SSBs) or double-stranded breaks (DSBs) at specific sites in the genome by using one or more endonucleases. The donor DNA can be single or double stranded DNA. The donor template can have homologous arms to the 9q21.11 region. The donor template can have homologous arms to a safe harbor locus. For example, the donor template can have homologous arms to an AAVS1 safe harbor locus, such as, intron 1 of the PPP1R12C gene. As another example, the donor template can have homologous arms to a CCR5 safe harbor locus.

[0251] For example, correcting a point mutation can involve replacing one or more nucleotide bases, or one or more exons and/or introns within or near the FXN gene. Correcting point mutation can involve deleting the sequence containing the mutation by inducing a double stranded break at a site proximal and a site distal to the point mutation with one or more CRISPR endonucleases and a gRNA (e.g., crRNA+tracrRNA, or sgRNA). In certain aspects, a donor DNA containing the corrected sequence can be provided to restore the wild-type sequence. This approach can require development and optimization of gRNAs and donor DNA molecule for the FXN gene.

[0252] The advantages for the above strategies are similar, including in principle both short and long term beneficial clinical and laboratory effects.

[0253] In addition to the above genome editing strategies, another strategy involves modulating expression, function, or activity of FXN by editing in the regulatory sequence.

[0254] In addition to the editing options listed above, Cas9 or similar proteins can be used to target effector domains to the same target sites that can be identified for editing, or additional target sites within range of the effector domain. A range of chromatin modifying enzymes, methylases or demethylases can be used to alter expression of the target gene. One possibility is decreasing the expression of the FXN protein if the mutation leads to undesirable activity. These types of epigenetic regulation have some advantages, particularly as they are limited in possible off-target effects.

[0255] A number of types of genomic target sites can be present in addition to the trinucleotide repeat expansion in the intronic sequence of the FXN gene.

[0256] The regulation of transcription and translation implicates a number of different classes of sites that interact with cellular proteins or nucleotides. Often the DNA binding sites of transcription factors or other proteins can be targeted for mutation or deletion to study the role of the site, though they can also be targeted to change gene expression. Sites can be added through non-homologous end joining NHEJ or direct genome editing by homology directed repair (HDR). Increased use of genome sequencing, RNA expression and genome-wide studies of transcription factor binding have increased our ability to identify how the sites lead to developmental or temporal gene regulation. These control systems can be direct or can involve extensive cooperative regulation that can require the integration of activities from multiple enhancers. Transcription factors typically bind 6-12 bp-long degenerate DNA sequences. The low level of specificity provided by individual sites suggests that complex interactions and rules are involved in binding and the functional outcome. Binding sites with less degeneracy can provide simpler means of regulation. Artificial transcription factors can be designed to specify longer sequences that have less similar sequences in the genome and have lower potential for off-target cleavage. Any of these types of binding sites can be mutated, deleted or even created to enable changes in gene regulation or expression (Canver, M. C. et al., Nature (2015)).

[0257] Another class of gene regulatory regions having these features is microRNA (miRNA) binding sites. miRNAs are non-coding RNAs that play key roles in post-transcriptional gene regulation. miRNA can regulate the expression of 30% of all mammalian protein-encoding genes. Specific and potent gene silencing by double stranded RNA (RNAi) was discovered, plus additional small non-coding RNA (Canver, M. C. et al., Nature (2015)). The largest class of non-coding RNAs important for gene silencing are miRNAs. In mammals, miRNAs are first transcribed as a long RNA transcript, which can be separate transcriptional units, part of protein introns, or other transcripts. The long transcripts are called primary miRNA (pri-miRNA) that include imperfectly base-paired hairpin structures. These pri-miRNA can be cleaved into one or more shorter precursor miRNAs (pre-miRNAs) by Microprocessor, a protein complex in the nucleus, involving Drosha.

[0258] Pre-miRNAs are short stem loops ˜70 nucleotides in length with a 2-nucleotide 3′-overhang that are exported, into the mature 19-25 nucleotide miRNA:miRNA* duplexes. The miRNA strand with lower base pairing stability (the guide strand) can be loaded onto the RNA-induced silencing complex (RISC). The passenger strand (marked with *), can be functional, but is usually degraded. The mature miRNA tethers RISC to partly complementary sequence motifs in target mRNAs predominantly found within the 3′ untranslated regions (UTRs) and induces posttranscriptional gene silencing (Bartel, D. P. Cell 136, 215-233 (2009); Saj, A. & Lai, E. C. Curr Opin Genet Dev 21, 504-510 (2011)).

[0259] miRNAs can be important in development, differentiation, cell cycle and growth control, and in virtually all biological pathways in mammals and other multicellular organisms. miRNAs can also be involved in cell cycle control, apoptosis and stem cell differentiation, hematopoiesis, hypoxia, muscle development, neurogenesis, insulin secretion, cholesterol metabolism, aging, viral replication and immune responses.

[0260] A single miRNA can target hundreds of different mRNA transcripts, while an individual miRNA transcript can be targeted by many different miRNAs. More than 28645 microRNAs have been annotated in the latest release of miRBase (v.21). Some miRNAs can be encoded by multiple loci, some of which can be expressed from tandemly co-transcribed clusters. The features allow for complex regulatory networks with multiple pathways and feedback controls. miRNAs can be integral parts of these feedback and regulatory circuits and can help regulate gene expression by keeping protein production within limits (Herranz, H. & Cohen, S. M. Genes Dev 24, 1339-1344 (2010); Posadas, D. M. & Carthew, R. W. Curr Opin Genet Dev 27, 1-6 (2014)).

[0261] miRNA can also be important in a large number of human diseases that are associated with abnormal miRNA expression. This association underscores the importance of the miRNA regulatory pathway. Recent miRNA deletion studies have linked miRNA with regulation of the immune responses (Stern-Ginossar, N. et al., Science 317, 376-381 (2007)).

[0262] miRNA also has a strong link to cancer and can play a role in different types of cancer. miRNAs have been found to be downregulated in a number of tumors. miRNA can be important in the regulation of key cancer-related pathways, such as cell cycle control and the DNA damage response, and can therefore be used in diagnosis and can be targeted clinically. MicroRNAs can delicately regulate the balance of angiogenesis, such that experiments depleting all microRNAs suppresses tumor angiogenesis (Chen, S. et al., Genes Dev 28, 1054-1067 (2014)).

[0263] As has been shown for protein coding genes, miRNA genes can also be subject to epigenetic changes occurring with cancer. Many miRNA loci can be associated with CpG islands increasing their opportunity for regulation by DNA methylation (Weber, B., Stresemann, C., Brueckner, B. & Lyko, F. Cell Cycle 6, 1001-1005 (2007)). The majority of studies have used treatment with chromatin remodeling drugs to reveal epigenetically silenced miRNAs.

[0264] In addition to their role in RNA silencing, miRNA can also activate translation (Posadas, D. M. & Carthew, R. W. Curr Opin Genet Dev 27, 1-6 (2014)). Knocking out miRNA sites may lead to decreased expression of the targeted gene, while introducing these sites may increase expression.

[0265] Individual miRNA can be knocked out most effectively by mutating the seed sequence (bases 2-8 of the microRNA), which can be important for binding specificity. Cleavage in this region, followed by mis-repair by NHEJ can effectively abolish miRNA function by blocking binding to target sites. miRNA could also be inhibited by specific targeting of the special loop region adjacent to the palindromic sequence. Catalytically inactive Cas9 can also be used to inhibit shRNA expression (Zhao, Y. et al., Sci Rep 4, 3943 (2014)). In addition to targeting the miRNA, the binding sites can also be targeted and mutated to prevent the silencing by miRNA.

[0266] According to the present disclosure, any of the microRNA (miRNA) or their binding sites may be incorporated into the compositions of the invention.

[0267] The compositions may have a region such as, but not limited to, a region comprising the sequence of any of the microRNAs listed in SEQ ID NOs: 632-4715, the reverse complement of the microRNAs listed in SEQ ID NOs: 632-4715, or the microRNA anti-seed region of any of the microRNAs listed in SEQ ID NOs: 632-4715.

[0268] The compositions of the present disclosure may comprise one or more microRNA target sequences, microRNA sequences, or microRNA seeds. Such sequences may correspond to any known microRNA such as those taught in U.S. Publication US2005/0261218 and U.S. Publication US2005/0059005. As a non-limiting example, known microRNAs, their sequences and their binding site sequences in the human genome are listed in SEQ ID NOs: 632-4715.

[0269] A microRNA sequence comprises a “seed” sequence, i.e., a sequence in the region of positions 2-8 of the mature microRNA, which sequence has perfect Watson-Crick complementarity to the miRNA target sequence. A microRNA seed may comprise positions 2-8 or 2-7 of the mature microRNA. In some aspects, a microRNA seed may comprise 7 nucleotides (e.g., nucleotides 2-8 of the mature microRNA), wherein the seed-complementary site in the corresponding miRNA target is flanked by an adenine (A) opposed to microRNA position 1. In some aspects, a microRNA seed may comprise 6 nucleotides (e.g., nucleotides 2-7 of the mature microRNA), wherein the seed-complementary site in the corresponding miRNA target is flanked by an adenine (A) opposed to microRNA position 1. See for example, Grimson A, Farh K K, Johnston W K, Garrett-Engele P, Lim L P, Bartel D P; Mol Cell. 2007 Jul. 6; 27(1):91-105. The bases of the microRNA seed have complete complementarity with the target sequence.

[0270] Identification of microRNA, microRNA target regions, and their expression patterns and role in biology have been reported (Bonauer et al., Curr Drug Targets 2010 11:943-949; Anand and Cheresh Curr Opin Hematol 2011 18:171-176; Contreras and Rao Leukemia 2012 26:404-413 (2011 Dec. 20. doi: 10.1038/1eu.2011.356); Bartel Cell 2009 136:215-233; Landgraf et al, Cell, 2007 129:1401-1414; Gentner and Naldini, Tissue Antigens. 2012 80:393-403).

[0271] For example, if the composition is not intended to be delivered to the liver but ends up there, then miR-122, a microRNA abundant in liver, can inhibit the expression of the sequence delivered if one or multiple target sites of miR-122 are engineered into the polynucleotide encoding that target sequence. Introduction of one or multiple binding sites for different microRNA can be engineered to further decrease the longevity, stability, and protein translation hence providing an additional layer of tenability.

[0272] As used herein, the term “microRNA site” refers to a microRNA target site or a microRNA recognition site, or any nucleotide sequence to which a microRNA binds or associates. It should be understood that “binding” may follow traditional Watson-Crick hybridization rules or may reflect any stable association of the microRNA with the target sequence at or adjacent to the microRNA site.

[0273] Conversely, for the purposes of the compositions of the present disclosure, microRNA binding sites can be engineered out of (i.e. removed from) sequences in which they naturally occur in order to increase protein expression in specific tissues. For example, miR-137 binding sites may be removed to improve protein expression in the brain.

[0274] Specifically, microRNAs are known to be differentially expressed in immune cells (also called hematopoietic cells), such as antigen presenting cells (APCs) (e.g. dendritic cells and macrophages), macrophages, monocytes, B lymphocytes, T lymphocytes, granulocytes, natural killer cells, etc. Immune cell specific microRNAs are involved in immunogenicity, autoimmunity, the immune-response to infection, inflammation, as well as unwanted immune response after gene therapy and tissue/organ transplantation. Immune cells specific microRNAs also regulate many aspects of development, proliferation, differentiation and apoptosis of hematopoietic cells (immune cells). For example, miR-142 and miR-146 are exclusively expressed in the immune cells, particularly abundant in myeloid dendritic cells. Introducing the miR-142 binding site into the 3′-UTR of a polypeptide of the present disclosure can selectively suppress the gene expression in the antigen presenting cells through miR-142 mediated mRNA degradation, limiting antigen presentation in professional APCs (e.g. dendritic cells) and thereby preventing antigen-mediated immune response after gene delivery (see, Annoni A et al., blood, 2009, 114, 5152-5161).

[0275] In one example, microRNAs binding sites that are known to be expressed in immune cells, in particular, the antigen presenting cells, can be engineered into the polynucleotides to suppress the expression of the polynucleotide in APCs through microRNA mediated RNA degradation, subduing the antigen-mediated immune response, while the expression of the polynucleotide is maintained in non-immune cells where the immune cell specific microRNAs are not expressed.

[0276] Many microRNA expression studies have been conducted, and are described in the art, to profile the differential expression of microRNAs in various cancer cells/tissues and other diseases. Some microRNAs are abnormally over-expressed in certain cancer cells and others are under-expressed. For example, microRNAs are differentially expressed in cancer cells (WO2008/154098, US2013/0059015, US2013/0042333, WO2011/157294); cancer stem cells (US2012/0053224); pancreatic cancers and diseases (US2009/0131348, US2011/0171646, US2010/0286232, U.S. Pat. No. 8,389,210); asthma and inflammation (US8415096); prostate cancer (US2013/0053264); hepatocellular carcinoma (WO2012/151212, US2012/0329672, WO2008/054828, U.S. Pat. No. 8,252,538); lung cancer cells (WO2011/076143, WO2013/033640, WO2009/070653, US2010/0323357); cutaneous T-cell lymphoma (WO2013/011378); colorectal cancer cells (WO2011/0281756, WO2011/076142); cancer positive lymph nodes (WO2009/100430, US2009/0263803); nasopharyngeal carcinoma (EP2112235); chronic obstructive pulmonary disease (US2012/0264626, US2013/0053263); thyroid cancer (WO2013/066678); ovarian cancer cells (US2012/0309645, WO2011/095623); breast cancer cells (WO2008/154098, WO2007/081740, US2012/0214699), leukemia and lymphoma (WO2008/073915, US2009/0092974, US2012/0316081, US2012/0283310, WO2010/018563).

[0277] Non-limiting examples of microRNA sequences and the targeted tissues and/or cells are disclosed in SEQ ID NOs: 632-4715.

[0278] Genome Engineering Strategies

[0279] The methods of the present disclosure can involve editing one or both of the mutant alleles. Gene editing to modify or correct the FXN gene has the advantage of restoration of correct expression levels or elimination of aberrant gene products and temporal control.

[0280] A step of the ex vivo methods of the present disclosure can comprise editing/correcting cells of the central nervous system (e.g., neurons or glial cells) isolated from a Friedreich's Ataxia patient using genome engineering. Alternatively, a step of the ex vivo methods of the present disclosure can comprise editing/correcting the patient specific iPSCs, or mesenchymal stem cells. Likewise, a step of the in vivo methods of the present disclosure involves editing/correcting the cells in a Friedreich's Ataxia patient using genome engineering. Similarly, a step in the cellular methods of the present disclosure can comprise editing/correcting the FXN gene in a human cell by genome engineering.

[0281] Friedreich's Ataxia patients exhibit expanded trinucleotide repeats in the FXN gene. Therefore, different patients may use similar editing strategies. Any CRISPR endonuclease may be used in the methods of the present disclosure, each CRISPR endonuclease having its own associated PAM, which may or may not be disease specific.

[0282] In one aspect, the trinucleotide repeat expansion may be excised by inducing two double stranded breaks (DSBs) upstream and downstream of the repeat region. Pairs of gRNAs have been used for this type of deletions. The CRISPR endonucleases, configured with the two gRNAs, induce two DSBs at the desired locations. After cleavage, the two ends, regardless of whether blunt or with overhangs, can be joined by NHEJ, leading to the deletion of the intervening segment. In certain aspects, the wild-type sequence can be restored by inserting a correct repeat sequence via HDR.

[0283] In another aspect, the trinucleotide repeat expansion may be deleted after inducing a single DSB near or within the repeat region. Single DSB-induced repeat loss has been reported in several studies including TALEN-cleaved short CAG/CTG repeats engineered in yeast, ZFN-cleaved CAG repeats engineered in human cells, and CRISPR/Cas9-cleaved CTG/CAG repeats engineered in human cells (Richard et al., PLoS ONE (2014), 9(4): e95611; Mittelman et al., Proc Natl Acad Sci USA (2009), 106(24):9607-12; van Agtmaal et al., Mol Ther (2016), http://dx.doi.org/10.1016/j.ymthe.2016.10.014). A DSB near the repeat region destabilizes the repeat tracts, triggering a contraction (e.g. partial deletion) or, in some cases, a complete deletion of the repeats. Additionally, work by Mittelman et al. suggested that single DSB-induced repeat loss is more effective in longer repeats. In certain aspects, the wild-type sequence can be restored by inserting a correct repeat sequence via HDR.

[0284] Alternatively, expression of the mutant FXN gene may be disrupted or eliminated by introducing random insertions or deletions (indels) that arise due to the imprecise NHEJ repair pathway. The target regions may be the coding sequence of the FXN gene (i.e., exons). Inserting or deleting nucleotides into the coding sequence of a gene may cause a “frame shift” where the normal 3-letter codon pattern is disturbed. In this way, gene expression and therefore mutant protein production can be reduced or eliminated. This approach may also be used to target any intron, intron:exon junction, or regulatory DNA element of the FXN gene where sequence alteration may interfere with the expression of the FXN gene. This approach can require development and optimization of sgRNAs for the FXN gene.

[0285] As a further alternative, the entire mutant gene can be deleted and a wild-type gene, a cDNA or a minigene (comprised of one or more exons and introns or natural or synthetic introns) can be knocked into the gene locus or a heterologous location in the genome such as a safe harbor locus. Pairs of nucleases can be used to delete mutated gene regions, and a donor is provided to restore function. In this case two gRNA and one donor sequence would be supplied. A full length cDNA can be knocked into any “safe harbor”, but must use a supplied or an endogenous promoter. If this construct is knocked into the FXN gene locus, it will have physiological control, similar to the normal gene.

[0286] Some genome engineering strategies involve correcting the repeat expansion, or inserting a wild-type FXN gene or cDNA or a minigene (comprised of one or more exons and introns or natural or synthetic introns) into the locus of the corresponding gene or a safe harbor locus by homology directed repair (HDR), which is also known as homologous recombination (HR). Homology directed repair can be one strategy for treating patients that have expanded trinucleotides in the FXN gene. These strategies can restore the FXN gene and reverse, treat, and/or mitigate the diseased state.

[0287] Homology directed repair is a cellular mechanism for repairing double-stranded breaks (DSBs). The most common form is homologous recombination. There are additional pathways for HDR, including single-strand annealing and alternative-HDR. Genome engineering tools allow researchers to manipulate the cellular homologous recombination pathways to create site-specific modifications to the genome. It has been found that cells can repair a double-stranded break using a synthetic donor molecule provided in trans. Therefore, by introducing a double-stranded break near a specific mutation and providing a suitable donor, targeted changes can be made in the genome. Specific cleavage increases the rate of HDR more than 1,000 fold above the rate of 1 in 10⁶ cells receiving a homologous donor alone. The rate of homology directed repair (HDR) at a particular nucleotide is a function of the distance to the cut site, so choosing overlapping or nearest target sites is important. Gene editing offers the advantage over gene addition, as correcting in situ leaves the rest of the genome unperturbed.

[0288] Supplied donors for editing by HDR vary markedly but can contain the intended sequence with small or large flanking homology arms to allow annealing to the genomic DNA. The homology regions flanking the introduced genetic changes can be 30 bp or smaller, or as large as a multi-kilobase cassette that can contain promoters, cDNAs, etc. Both single-stranded and double-stranded oligonucleotide donors have been used. These oligonucleotides range in size from less than 100 nt to over many kb, though longer ssDNA can also be generated and used. Double-stranded donors can be used, including PCR amplicons, plasmids, and mini-circles. In general, it has been found that an AAV vector can be a very effective means of delivery of a donor template, though the packaging limits for individual donors is <5 kb. Active transcription of the donor increased HDR three-fold, indicating the inclusion of promoter may increase conversion. Conversely, CpG methylation of the donor decreased gene expression and HDR.

[0289] In addition to wild-type endonucleases, such as Cas9, nickase variants exist that have one or the other nuclease domain inactivated resulting in cutting of only one DNA strand. HDR can be directed from individual Cas nickases or using pairs of nickases that flank the target area. Donors can be single-stranded, nicked, or dsDNA.

[0290] The donor DNA can be supplied with the nuclease or independently by a variety of different methods, for example by transfection, nano-particle, micro-injection, or viral transduction. A range of tethering options has been proposed to increase the availability of the donors for HDR. Examples include attaching the donor to the nuclease, attaching to DNA binding proteins that bind nearby, or attaching to proteins that are involved in DNA end binding or repair.

[0291] The repair pathway choice can be guided by a number of culture conditions, such as those that influence cell cycling, or by targeting of DNA repair and associated proteins. For example, to increase HDR, key NHEJ molecules can be suppressed, such as KU70, KU80 or DNA ligase IV.

[0292] Without a donor present, the ends from a DNA break or ends from different breaks can be joined using the several non-homologous repair pathways in which the DNA ends are joined with little or no base-pairing at the junction. In addition to canonical NHEJ, there are similar repair mechanisms, such as alt-NHEJ. If there are two breaks, the intervening segment can be deleted or inverted. NHEJ repair pathways can lead to insertions, deletions or mutations at the joints.

[0293] NHEJ was used to insert a 15-kb inducible gene expression cassette into a defined locus in human cell lines after nuclease cleavage. (See e.g., Maresca, M., Lin, V. G., Guo, N. & Yang, Y., Genome Res 23, 539-546 (2013); Cristea et al. Biotechnology and Bioengineering, 110 (3):871-80 (2013); Suzuki et al. Nature, 540, 144-149 (2016)).

[0294] In addition to genome editing by NHEJ or HDR, site-specific gene insertions have been conducted that use both the NHEJ pathway and HR. A combination approach may be applicable in certain settings, possibly including intron/exon borders. NHEJ may prove effective for ligation in the intron, while the error-free HDR may be better suited in the coding region.

[0295] The mutation of the FXN gene that causes Friedreich's Ataxia is a trinucleotide repeat expansion of the three letter string of nucleotides GAA. In healthy individuals, there are few repeats of this trinucleotide, typically about or fewer than 12. In people with the diseases phenotype, the repeat can occur in the order of hundreds. One or more trinucleotide repeats may be deleted or corrected in order to restore the gene to a wild-type or similar number of trinucleotide repeats. In some aspects, all of the trinucleotide repeats may be deleted. Alternatively, the mutant gene may be knocked out to eliminate toxic gene products. In addition to repeat expansion, point mutations have also been identified in patients with Friedreich's Ataxia. Any one or more of the mutations can be repaired in order to restore the inactive FXN. In some examples, one or more nucleotide bases may be replaced to correct the point mutation. In other examples, one or more exons and/or introns within or near the FXN gene may be replaced. As a further alternative, a FXN gene or cDNA can be inserted to the locus of the corresponding gene to replace the mutant gene or knocked-in to a safe harbor site, such as AAVS1. In some examples, the methods can provide one gRNA or a pair of gRNAs that can be used to facilitate incorporation of a new sequence from a polynucleotide donor template to knock-in a part of or the entire FXN gene or cDNA.

[0296] Some genome engineering strategies involves repeat deletion. Targeted deletion of trinucleotide repeats is an attractive strategy for treating a large subset of patients with a single therapeutic cocktail. Deletions can either be single trinucleotide repeat deletions or multi-trinucleotide repeat deletions. While multi-repeat deletions, including complete deletion of the expanded trinucleotide repeat, can reach a larger number of patients, for larger deletions the efficiency of deletion greatly decreases with increased size. In some aspects, the deletions range from 40 to 5,000 base pairs (bp) in size. For example, deletions may range from 40-100; 100-300; 300-500; 500-1,000; 1,000-2,000; 2,000-3,000; or 3,000-5,000 base pairs in size.

[0297] The methods can provide gRNA pairs that make a deletion by cutting the gene twice, one gRNA cutting at the 5′ end of the trinucleotide repeats and the other gRNA cutting at the 3′ end of the trinucleotide repeats. The cutting can be accomplished by a pair of DNA endonucleases that each makes a DSB in the genome, or by multiple nickases that together make a DSB in the genome.

[0298] Alternatively, the methods can provide one gRNA to make one double-strand cut around the trinucleotide repeats. The double-strand cut can be made by a single DNA endonuclease or multiple nickases that together make a DSB in the genome.

[0299] Illustrative modifications within the FXN gene include deletions within or near (proximal) to the trinucleotide repeats referred to above, such as within the region of less than 3 kb, less than 2 kb, less than 1 kb, less than 0.5 kb upstream or downstream of the specific mutation. Given the relatively wide variations of trinucleotide repeats in the FXN gene, it will be appreciated that numerous variations of the deletions referenced above (including without limitation larger as well as smaller deletions), would be expected to result in restoration of the FXN gene expression.

[0300] Such variants can include deletions that are larger in the 5′ and/or 3′ direction than the specific repeat expansion in question, or smaller in either direction. Accordingly, by “near” or “proximal” with respect to specific repeat expansion, it is intended that the SSB or DSB locus associated with a desired deletion boundary (also referred to herein as an endpoint) can be within a region that is less than about 3 kb from the reference locus noted. The SSB or DSB locus can be more proximal and within 2 kb, within 1 kb, within 0.5 kb, or within 0.1 kb. In the case of small deletion, the desired endpoint can be at or “adjacent to” the reference locus, by which it is intended that the endpoint can be within 100 bp, within 50 bp, within 25 bp, or less than about 10 bp to 5 bp from the reference locus.

[0301] In order to ensure that the pre-mRNA is properly processed following deletion, the surrounding splicing signals can be deleted. Splicing donor and acceptors are generally within 100 base pairs of the neighboring intron. Therefore, in some examples, methods can provide all gRNAs that cut approximately +/−100-3100 bp with respect to each exon/intron junction of interest.

[0302] For any of the genome editing strategies, gene editing can be confirmed by sequencing or PCR analysis.

[0303] Target Sequence Selection

[0304] Shifts in the location of the 5′ boundary and/or the 3′ boundary relative to particular reference loci can be used to facilitate or enhance particular applications of gene editing, which depend in part on the endonuclease system selected for the editing, as further described and illustrated herein.

[0305] In a first non-limiting example of such target sequence selection, many endonuclease systems have rules or criteria that can guide the initial selection of potential target sites for cleavage, such as the requirement of a PAM sequence motif in a particular position adjacent to the DNA cleavage sites in the case of CRISPR Type II or Type V endonucleases.

[0306] In another non-limiting example of target sequence selection or optimization, the frequency of off-target activity for a particular combination of target sequence and gene editing endonuclease (i.e. the frequency of DSBs occurring at sites other than the selected target sequence) can be assessed relative to the frequency of on-target activity. In some cases, cells that have been correctly edited at the desired locus can have a selective advantage relative to other cells. Illustrative, but non-limiting, examples of a selective advantage include the acquisition of attributes such as enhanced rates of replication, persistence, resistance to certain conditions, enhanced rates of successful engraftment or persistence in vivo following introduction into a patient and other attributes associated with the maintenance or increased numbers or viability of such cells. In other cases, cells that have been correctly edited at the desired locus can be positively selected for by one or more screening methods used to identify, sort or otherwise select for cells that have been correctly edited. Both selective advantage and directed selection methods can take advantage of the phenotype associated with the correction. In some cases, cells can be edited two or more times in order to create a second modification that creates a new phenotype that is used to select or purify the intended population of cells. Such a second modification could be created by adding a second gRNA enabling expression of a selectable or screenable marker. In some cases, cells can be correctly edited at the desired locus using a DNA fragment that contains the cDNA and also a selectable marker.

[0307] Whether any selective advantage is applicable or any directed selection is to be applied in a particular case, target sequence selection can also be guided by consideration of off-target frequencies in order to enhance the effectiveness of the application and/or reduce the potential for undesired alterations at sites other than the desired target. As described further and illustrated herein and in the art, the occurrence of off-target activity can be influenced by a number of factors including similarities and dissimilarities between the target site and various off-target sites, as well as the particular endonuclease used. Bioinformatics tools are available that assist in the prediction of off-target activity, and frequently such tools can also be used to identify the most likely sites of off-target activity, which can then be assessed in experimental settings to evaluate relative frequencies of off-target to on-target activity, thereby allowing the selection of sequences that have higher relative on-target activities. Illustrative examples of such techniques are provided herein, and others are known in the art.

[0308] Another aspect of target sequence selection relates to homologous recombination events. Sequences sharing regions of homology can serve as focal points for homologous recombination events that result in deletion of intervening sequences. Such recombination events occur during the normal course of replication of chromosomes and other DNA sequences, and also at other times when DNA sequences are being synthesized, such as in the case of repairs of double-strand breaks (DSBs), which occur on a regular basis during the normal cell replication cycle but can also be enhanced by the occurrence of various events (such as UV light and other inducers of DNA breakage) or the presence of certain agents (such as various chemical inducers). Many such inducers cause DSBs to occur indiscriminately in the genome, and DSBs can be regularly induced and repaired in normal cells. During repair, the original sequence can be reconstructed with complete fidelity, however, in some cases, small insertions or deletions (referred to as “indels”) are introduced at the DSB site.

[0309] DSBs can also be specifically induced at particular locations, as in the case of the endonucleases systems described herein, which can be used to cause directed or preferential gene modification events at selected chromosomal locations. The tendency for homologous sequences to be subject to recombination in the context of DNA repair (as well as replication) can be taken advantage of in a number of circumstances, and is the basis for one application of gene editing systems, such as CRISPR, in which homology directed repair is used to insert a sequence of interest, provided through use of a “donor” polynucleotide, into a desired chromosomal location.

[0310] Regions of homology between particular sequences, which can be small regions of “microhomology” that can comprise as few as ten base pairs or less, can also be used to bring about desired deletions. For example, a single DSB can be introduced at a site that exhibits microhomology with a nearby sequence. During the normal course of repair of such DSB, a result that occurs with high frequency is the deletion of the intervening sequence as a result of recombination being facilitated by the DSB and concomitant cellular repair process.

[0311] In some circumstances, however, selecting target sequences within regions of homology can also give rise to much larger deletions, including gene fusions (when the deletions are in coding regions), which may or may not be desired given the particular circumstances.

[0312] The examples provided herein further illustrate the selection of various target regions for the creation of DSBs designed to induce deletions or replacements that result in restoration of wild-type or similar levels of trinucleotide repeats in the FXN gene, as well as the selection of specific target sequences within such regions that are designed to minimize off-target events relative to on-target events.

[0313] Human Cells

[0314] For ameliorating Friedreich's Ataxia or any disorder associated with FXN, as described and illustrated herein, the principal targets for gene editing are human cells. For example, in the ex vivo methods, the human cells can be somatic cells, which after being modified using the techniques as described, can give rise to differentiated cells, e.g., neurons or progenitor cells. For example, in the in vivo methods, the human cells may be cells from the central nervous system or cells from other affected organs.

[0315] By performing gene editing in autologous cells that are derived from and therefore already completely matched with the patient in need, it is possible to generate cells that can be safely re-introduced into the patient, and effectively give rise to a population of cells that will be effective in ameliorating one or more clinical conditions associated with the patient's disease.

[0316] Stem cells are capable of both proliferation and giving rise to more progenitor cells, these in turn having the ability to generate a large number of mother cells that can in turn give rise to differentiated or differentiable daughter cells. The daughter cells themselves can be induced to proliferate and produce progeny that subsequently differentiate into one or more mature cell types, while also retaining one or more cells with parental developmental potential. The term “stem cell” refers then, to a cell with the capacity or potential, under particular circumstances, to differentiate to a more specialized or differentiated phenotype, and which retains the capacity, under certain circumstances, to proliferate without substantially differentiating. In one aspect, the term progenitor or stem cell refers to a generalized mother cell whose descendants (progeny) specialize, often in different directions, by differentiation, e.g., by acquiring completely individual characters, as occurs in progressive diversification of embryonic cells and tissues. Cellular differentiation is a complex process typically occurring through many cell divisions. A differentiated cell may derive from a multipotent cell that itself is derived from a multipotent cell, and so on. While each of these multipotent cells may be considered stem cells, the range of cell types that each can give rise to may vary considerably. Some differentiated cells also have the capacity to give rise to cells of greater developmental potential. Such capacity may be natural or may be induced artificially upon treatment with various factors. In many biological instances, stem cells can also be “multipotent” because they can produce progeny of more than one distinct cell type, but this is not required for “stem-ness.”

[0317] Self-renewal can be another important aspect of the stem cell. In theory, self-renewal can occur by either of two major mechanisms. Stem cells can divide asymmetrically, with one daughter retaining the stem state and the other daughter expressing some distinct other specific function and phenotype. Alternatively, some of the stem cells in a population can divide symmetrically into two stems, thus maintaining some stem cells in the population as a whole, while other cells in the population give rise to differentiated progeny only. Generally, “progenitor cells” have a cellular phenotype that is more primitive (i.e., is at an earlier step along a developmental pathway or progression than is a fully differentiated cell). Often, progenitor cells also have significant or very high-proliferative potential. Progenitor cells can give rise to multiple distinct differentiated cell types or to a single differentiated cell type, depending on the developmental pathway and on the environment in which the cells develop and differentiate.

[0318] In the context of cell ontogeny, the adjective “differentiated,” or “differentiating” is a relative term. A “differentiated cell” is a cell that has progressed further down the developmental pathway than the cell to which it is being compared. Thus, stem cells can differentiate into lineage-restricted precursor cells (such as a myocyte progenitor cell), which in turn can differentiate into other types of precursor cells further down the pathway (such as a myocyte precursor), and then to an end-stage differentiated cell, such as a myocyte, which plays a characteristic role in a certain tissue type, and may or may not retain the capacity to proliferate further.

[0319] Induced Pluripotent Stem Cells

[0320] The genetically engineered human cells described herein can be induced pluripotent stem cells (iPSCs). An advantage of using iPSCs is that the cells can be derived from the same subject to which the progenitor cells are to be administered. That is, a somatic cell can be obtained from a subject, reprogrammed to an induced pluripotent stem cell, and then re-differentiated into a progenitor cell to be administered to the subject (e.g., autologous cells). Because the progenitors are essentially derived from an autologous source, the risk of engraftment rejection or allergic response can be reduced compared to the use of cells from another subject or group of subjects. In addition, the use of iPSCs negates the need for cells obtained from an embryonic source. Thus, in one aspect, the stem cells used in the disclosed methods are not embryonic stem cells.

[0321] Although differentiation is generally irreversible under physiological contexts, several methods have been recently developed to reprogram somatic cells to iPSCs. Exemplary methods are known to those of skill in the art and are described briefly herein below.

[0322] The term “reprogramming” refers to a process that alters or reverses the differentiation state of a differentiated cell (e.g., a somatic cell). Stated another way, reprogramming refers to a process of driving the differentiation of a cell backwards to a more undifferentiated or more primitive type of cell. It should be noted that placing many primary cells in culture can lead to some loss of fully differentiated characteristics. Thus, simply culturing such cells included in the term differentiated cells does not render these cells non-differentiated cells (e.g., undifferentiated cells) or pluripotent cells. The transition of a differentiated cell to pluripotency requires a reprogramming stimulus beyond the stimuli that lead to partial loss of differentiated character in culture. Reprogrammed cells also have the characteristic of the capacity of extended passaging without loss of growth potential, relative to primary cell parents, which generally have capacity for only a limited number of divisions in culture.

[0323] The cell to be reprogrammed can be either partially or terminally differentiated prior to reprogramming. Reprogramming can encompass complete reversion of the differentiation state of a differentiated cell (e.g., a somatic cell) to a pluripotent state or a multipotent state. Reprogramming can encompass complete or partial reversion of the differentiation state of a differentiated cell (e.g., a somatic cell) to an undifferentiated cell (e.g., an embryonic-like cell). Reprogramming can result in expression of particular genes by the cells, the expression of which further contributes to reprogramming. In certain examples described herein, reprogramming of a differentiated cell (e.g., a somatic cell) can cause the differentiated cell to assume an undifferentiated state (e.g., is an undifferentiated cell). The resulting cells are referred to as “reprogrammed cells,” or “induced pluripotent stem cells (iPSCs or iPS cells).”

[0324] Reprogramming can involve alteration, e.g., reversal, of at least some of the heritable patterns of nucleic acid modification (e.g., methylation), chromatin condensation, epigenetic changes, genomic imprinting, etc., that occur during cellular differentiation. Reprogramming is distinct from simply maintaining the existing undifferentiated state of a cell that is already pluripotent or maintaining the existing less than fully differentiated state of a cell that is already a multipotent cell (e.g., a myogenic stem cell). Reprogramming is also distinct from promoting the self-renewal or proliferation of cells that are already pluripotent or multipotent, although the compositions and methods described herein can also be of use for such purposes, in some examples.

[0325] Many methods are known in the art that can be used to generate pluripotent stem cells from somatic cells. Any such method that reprograms a somatic cell to the pluripotent phenotype would be appropriate for use in the methods described herein.

[0326] Reprogramming methodologies for generating pluripotent cells using defined combinations of transcription factors have been described. Mouse somatic cells can be converted to ES cell-like cells with expanded developmental potential by the direct transduction of Oct4, Sox2, Klf4, and c-Myc; see, e.g., Takahashi and Yamanaka, Cell 126(4): 663-76 (2006). iPSCs resemble ES cells, as they restore the pluripotency-associated transcriptional circuitry and much of the epigenetic landscape. In addition, mouse iPSCs satisfy all the standard assays for pluripotency: specifically, in vitro differentiation into cell types of the three germ layers, teratoma formation, contribution to chimeras, germline transmission [see, e.g., Maherali and Hochedlinger, Cell Stem Cell. 3(6):595-605 (2008)], and tetraploid complementation.

[0327] Human iPSCs can be obtained using similar transduction methods, and the transcription factor trio, OCT4, SOX2, and NANOG, has been established as the core set of transcription factors that govern pluripotency; see, e.g., Budniatzky and Gepstein, Stem Cells Transl Med. 3(4):448-57 (2014); Barrett et al., Stem Cells Trans Med 3:1-6 sctm.2014-0121 (2014); Focosi et al., Blood Cancer Journal 4: e211 (2014); and references cited therein. The production of iPSCs can be achieved by the introduction of nucleic acid sequences encoding stem cell-associated genes into an adult, somatic cell, historically using viral vectors.

[0328] iPSCs can be generated or derived from terminally differentiated somatic cells, as well as from adult stem cells, or somatic stem cells. That is, a non-pluripotent progenitor cell can be rendered pluripotent or multipotent by reprogramming. In such instances, it may not be necessary to include as many reprogramming factors as required to reprogram a terminally differentiated cell. Further, reprogramming can be induced by the non-viral introduction of reprogramming factors, e.g., by introducing the proteins themselves, or by introducing nucleic acids that encode the reprogramming factors, or by introducing messenger RNAs that upon translation produce the reprogramming factors (see e.g., Warren et al., Cell Stem Cell, 7(5):618-(2010). Reprogramming can be achieved by introducing a combination of nucleic acids encoding stem cell-associated genes, including, for example, Oct-4 (also known as Oct-3/4 or Pouf51), Sox1, Sox2, Sox3, Sox 15, Sox 18, NANOG, Klf1, Klf2, Klf4, Klf5, NR5A2, c-Myc, 1-Myc, n-Myc, Rem2, Tert, and LIN28. Reprogramming using the methods and compositions described herein can further comprise introducing one or more of Oct-3/4, a member of the Sox family, a member of the Klf family, and a member of the Myc family to a somatic cell. The methods and compositions described herein can further comprise introducing one or more of each of Oct-4, Sox2, Nanog, c-MYC and Klf4 for reprogramming. As noted above, the exact method used for reprogramming is not necessarily critical to the methods and compositions described herein. However, where cells differentiated from the reprogrammed cells are to be used in, e.g., human therapy, in one aspect the reprogramming is not effected by a method that alters the genome. Thus, in such examples, reprogramming can be achieved, e.g., without the use of viral or plasmid vectors.

[0329] The efficiency of reprogramming (i.e., the number of reprogrammed cells) derived from a population of starting cells can be enhanced by the addition of various agents, e.g., small molecules, as shown by Shi et al., Cell-Stem Cell 2:525-528 (2008); Huangfu et al., Nature Biotechnology 26(7):795-797 (2008) and Marson et al., Cell-Stem Cell 3: 132-135 (2008). Thus, an agent or combination of agents that enhance the efficiency or rate of induced pluripotent stem cell production can be used in the production of patient-specific or disease-specific iPSCs. Some non-limiting examples of agents that enhance reprogramming efficiency include soluble Wnt, Wnt conditioned media, BIX-01294 (a G9a histone methyltransferase), PD0325901 (a MEK inhibitor), DNA methyltransferase inhibitors, histone deacetylase (HDAC) inhibitors, valproic acid, 5′-azacytidine, dexamethasone, suberoylanilide, hydroxamic acid (SAHA), vitamin C, and trichostatin (TSA), among others.

[0330] Other non-limiting examples of reprogramming enhancing agents include: Suberoylanilide Hydroxamic Acid (SAHA (e.g., MK0683, vorinostat) and other hydroxamic acids), BML-210, Depudecin (e.g., (−)-Depudecin), HC Toxin, Nullscript (4-(1,3-Dioxo-1H,3H-benzo[de]isoquinolin-2-yl)-N-hydroxybutanamide), Phenylbutyrate (e.g., sodium phenylbutyrate) and Valproic Acid ((VP A) and other short chain fatty acids), Scriptaid, Suramin Sodium, Trichostatin A (TSA), APHA Compound 8, Apicidin, Sodium Butyrate, pivaloyloxymethyl butyrate (Pivanex, AN-9), Trapoxin B, Chlamydocin, Depsipeptide (also known as FR901228 or FK228), benzamides (e.g., CI-994 (e.g., N-acetyl dinaline) and MS-27-275), MGCD0103, NVP-LAQ-824, CBHA (m-carboxycinnaminic acid bishydroxamic acid), JNJ16241199, Tubacin, A-161906, proxamide, oxamflatin, 3-C1-UCHA (e.g., 6-(3-chlorophenylureido) caproic hydroxamic acid), AOE (2-amino-8-oxo-9, 10-epoxydecanoic acid), CHAP31 and CHAP 50. Other reprogramming enhancing agents include, for example, dominant negative forms of the HDACs (e.g., catalytically inactive forms), siRNA inhibitors of the HDACs, and antibodies that specifically bind to the HDACs. Such inhibitors are available, e.g., from BIOMOL International, Fukasawa, Merck Biosciences, Novartis, Gloucester Pharmaceuticals, Titan Pharmaceuticals, MethylGene, and Sigma Aldrich.

[0331] To confirm the induction of pluripotent stem cells for use with the methods described herein, isolated clones can be tested for the expression of a stem cell marker. Such expression in a cell derived from a somatic cell identifies the cells as induced pluripotent stem cells. Stem cell markers can be selected from the non-limiting group including SSEA3, SSEA4, CD9, Nanog, Fbx15, Ecat1, Esg1, Eras, Gdf3, Fgf4, Cripto, Dax1, Zpf296, S1c2a3, Rex1, Utf1, and Nat1. In one case, for example, a cell that expresses Oct4 or Nanog is identified as pluripotent. Methods for detecting the expression of such markers can include, for example, RT-PCR and immunological methods that detect the presence of the encoded polypeptides, such as Western blots or flow cytometric analyses. Detection can involve not only RT-PCR, but can also include detection of protein markers. Intracellular markers may be best identified via RT-PCR, or protein detection methods such as immunocytochemistry, while cell surface markers are readily identified, e.g., by immunocytochemistry.

[0332] The pluripotent stem cell character of isolated cells can be confirmed by tests evaluating the ability of the iPSCs to differentiate into cells of each of the three germ layers. As one example, teratoma formation in nude mice can be used to evaluate the pluripotent character of the isolated clones. The cells can be introduced into nude mice and histology and/or immunohistochemistry can be performed on a tumor arising from the cells. The growth of a tumor comprising cells from all three germ layers, for example, further indicates that the cells are pluripotent stem cells.

[0333] Cells of the Central Nervous System

[0334] In some aspects, the genetically engineered human cells described herein are cells of the central nervous system. Neurons, which process information, and glial cells (or neuroglia), which provide mechanical and metabolic support to the nervous system and modulate information processed by neurons, are the two main classes of cells of the central nervous system. Non-limiting examples of neurons include sensory neurons (also referred to as afferent neurons) transfer information from the external environment to the central nervous system, motor neurons (also referred to as efferent neurons) transfer information from the central nervous system to the external environment, and interneurons (also referred to as association neurons) process information in the central nervous system and transfers the information from one neuron to the other within the central nervous system. Non-limiting examples of glial cells include astrocytes, oligodendrocytes, microglia and Schwann cells. CNS progenitor cells can be neural progenitor cells or glial progenitor cells.

[0335] The typical neuron transmits electrical signals from one cell to another. Neurons contain a cell body, dendrite, axon hillock, axon, nerve endings, neuronal synapses and neuromuscular junctions. Neurons may be named according to shape or the nature of the dendritic tree.

[0336] Neuroglia differ from neurons in several general ways in that they: do not form synapses, have essentially only one type of process, retain the ability to divide, and are less electrically excitable than neurons. Neuroglia are classified based on size and shape of their nucleus and distinguished from neurons, at the light microscopic level. Neuroglia are divided into two major categories based on size, the macroglia and the microglia. The macroglia are of ectodermal origin and consist of astrocytes, oligodendrocytes and ependymal cells. Microglia cells are probably of mesodermal origin.

[0337] Creating Patient Specific iPSCs

[0338] One step of the ex vivo methods of the present disclosure can involve creating a patient specific iPS cell, patient specific iPS cells, or a patient specific iPS cell line. There are many established methods in the art for creating patient specific iPS cells, as described in Takahashi and Yamanaka 2006; Takahashi, Tanabe et al. 2007. For example, the creating step can comprise: a) isolating a somatic cell, such as a skin cell or fibroblast, from the patient; and b) introducing a set of pluripotency-associated genes into the somatic cell in order to induce the cell to become a pluripotent stem cell. The set of pluripotency-associated genes can be one or more of the genes selected from the group consisting of OCT4, SOX1, SOX2, SOX3, SOX15, SOX18, NANOG, KLF1, KLF2, KLF4, KLF5, c-MYC, n-MYC, REM2, TERT and LIN28.

[0339] Isolating a Mesenchymal Stem Cell

[0340] Mesenchymal stem cells can be isolated according to any method known in the art, such as from a patient's bone marrow or peripheral blood. For example, marrow aspirate can be collected into a syringe with heparin. Cells can be washed and centrifuged on a Percoll. The cells can be cultured in Dulbecco's modified Eagle's medium (DMEM) (low glucose) containing 10% fetal bovine serum (FBS) (Pittinger M F, Mackay A M, Beck S C et al., Science 1999; 284:143-147).

[0341] Genetically Modified Cells

[0342] The term “genetically modified cell” refers to a cell that comprises at least one genetic modification introduced by genome editing (e.g., using the CRISPR/Cas9 or CRISPR/Cpf1 system). In some ex vivo examples herein, the genetically modified cell can be genetically modified neural progenitor cell. In some in vivo examples herein, the genetically modified cell can be a genetically modified cell of the central nervous system (e.g., a neuron or a glial cell). A genetically modified cell comprising an exogenous genome-targeting nucleic acid and/or an exogenous nucleic acid encoding a genome-targeting nucleic acid is contemplated herein.

[0343] The term “control treated population” describes a population of cells that has been treated with identical media, viral induction, nucleic acid sequences, temperature, confluency, flask size, pH, etc., with the exception of the addition of the genome editing components. Any method known in the art can be used to measure restoration of FXN gene or protein expression or activity, for example Western Blot analysis of the FXN protein or quantifying FXN mRNA.

[0344] The term “isolated cell” refers to a cell that has been removed from an organism in which it was originally found, or a descendant of such a cell. Optionally, the cell can be cultured in vitro, e.g., under defined conditions or in the presence of other cells. Optionally, the cell can be later introduced into a second organism or re-introduced into the organism from which it (or the cell from which it is descended) was isolated.

[0345] The term “isolated population” with respect to an isolated population of cells refers to a population of cells that has been removed and separated from a mixed or heterogeneous population of cells. In some cases, the isolated population can be a substantially pure population of cells, as compared to the heterogeneous population from which the cells were isolated or enriched. In some cases, the isolated population can be an isolated population of human progenitor cells, e.g., a substantially pure population of human progenitor cells, as compared to a heterogeneous population of cells comprising human progenitor cells and cells from which the human progenitor cells were derived.

[0346] The term “substantially enhanced,” with respect to a particular cell population, refers to a population of cells in which the occurrence of a particular type of cell is increased relative to pre-existing or reference levels, by at least 2-fold, at least 3-, at least 4-, at least 5-, at least 6-, at least 7-, at least 8-, at least 9, at least 10-, at least 20-, at least 50-, at least 100-, at least 400-, at least 1000-, at least 5000-, at least 20000-, at least 100000- or more fold depending, e.g., on the desired levels of such cells for ameliorating Friedreich's Ataxia.

[0347] The term “substantially enriched” with respect to a particular cell population, refers to a population of cells that is at least about 10%, about 20%, about 30%, about 40%, about 50%, about 60%, about 70% or more with respect to the cells making up a total cell population.

[0348] The term “substantially pure” with respect to a particular cell population, refers to a population of cells that is at least about 75%, at least about 85%, at least about 90%, or at least about 95% pure, with respect to the cells making up a total cell population. That is, the terms “substantially pure” or “essentially purified,” with regard to a population of progenitor cells, refers to a population of cells that contain fewer than about 20%, about 15%, about 10%, about 9%, about 8%, about 7%, about 6%, about 5%, about 4%, about 3%, about 2%, about 1%, or less than 1%, of cells that are not progenitor cells as defined by the terms herein.

[0349] Differentiation of Genome-Edited iPSCs into Cells of the Central Nervous System (CNS)

[0350] Another step of the ex vivo methods of the present disclosure can comprise differentiating the genome-edited iPSCs into cells of the central nervous system (CNS) (e.g., neurons or glial cells). The differentiating step may be performed according to any method known in the art.

[0351] Differentiation of Genome-Edited Mesenchymal Stem Cells into Cells of the Central Nervous System (CNS)

[0352] Another step of the ex vivo methods of the present disclosure can comprise differentiating the genome-edited mesenchymal stem cells into cells of the central nervous system (CNS). The differentiating step may be performed according to any method known in the art.

[0353] Implanting Cells into Patients

[0354] Another step of the ex vivo methods of the present disclosure involves implanting the cells of the central nervous system (e.g., neurons or glial cells) into patients. This implanting step may be accomplished using any method of implantation known in the art. For example, the genetically modified neurons may be administered to the patient via intraparenchymal, vascular (e.g., intravenous, intra-arterial), or ventricular (e.g., intracerebroventricular, intracisternal, intrathecal) routes or other routes such as intracranial or intraperitoneal injection.

### III. Formulations and Delivery

[0355] Pharmaceutically Acceptable Carriers

[0356] The ex vivo methods of administering progenitor cells to a subject contemplated herein involve the use of therapeutic compositions comprising progenitor cells.

[0357] Therapeutic compositions can contain a physiologically tolerable carrier together with the cell composition, and optionally at least one additional bioactive agent as described herein, dissolved or dispersed therein as an active ingredient. In some cases, the therapeutic composition is not substantially immunogenic when administered to a mammal or human patient for therapeutic purposes, unless so desired.

[0358] In general, the progenitor cells described herein can be administered as a suspension with a pharmaceutically acceptable carrier. One of skill in the art will recognize that a pharmaceutically acceptable carrier to be used in a cell composition will not include buffers, compounds, cryopreservation agents, preservatives, or other agents in amounts that substantially interfere with the viability of the cells to be delivered to the subject. A formulation comprising cells can include e.g., osmotic buffers that permit cell membrane integrity to be maintained, and optionally, nutrients to maintain cell viability or enhance engraftment upon administration. Such formulations and suspensions are known to those of skill in the art and/or can be adapted for use with the progenitor cells, as described herein, using routine experimentation.

[0359] A cell composition can also be emulsified or presented as a liposome composition, provided that the emulsification procedure does not adversely affect cell viability. The cells and any other active ingredient can be mixed with excipients that are pharmaceutically acceptable and compatible with the active ingredient, and in amounts suitable for use in the therapeutic methods described herein.

[0360] Additional agents included in a cell composition can include pharmaceutically acceptable salts of the components therein. Pharmaceutically acceptable salts include the acid addition salts (formed with the free amino groups of the polypeptide) that are formed with inorganic acids, such as, for example, hydrochloric or phosphoric acids, or such organic acids as acetic, tartaric, mandelic and the like. Salts formed with the free carboxyl groups can also be derived from inorganic bases, such as, for example, sodium, potassium, ammonium, calcium or ferric hydroxides, and such organic bases as isopropylamine, trimethylamine, 2-ethylamino ethanol, histidine, procaine and the like.

[0361] Physiologically tolerable carriers are well known in the art. Exemplary liquid carriers are sterile aqueous solutions that contain no materials in addition to the active ingredients and water, or contain a buffer such as sodium phosphate at physiological pH value, physiological saline or both, such as phosphate-buffered saline. Still further, aqueous carriers can contain more than one buffer salt, as well as salts such as sodium and potassium chlorides, dextrose, polyethylene glycol and other solutes. Liquid compositions can also contain liquid phases in addition to and to the exclusion of water. Exemplary of such additional liquid phases are glycerin, vegetable oils such as cottonseed oil, and water-oil emulsions. The amount of an active compound used in the cell compositions that is effective in the treatment of a particular disorder or condition can depend on the nature of the disorder or condition, and can be determined by standard clinical techniques.

[0362] Guide RNA Formulation

[0363] Guide RNAs of the present disclosure can be formulated with pharmaceutically acceptable excipients such as carriers, solvents, stabilizers, adjuvants, diluents, etc., depending upon the particular mode of administration and dosage form. Guide RNA compositions can be formulated to achieve a physiologically compatible pH, and range from a pH of about 3 to a pH of about 11, about pH 3 to about pH 7, depending on the formulation and route of administration. In some cases, the pH can be adjusted to a range from about pH 5.0 to about pH 8. In some cases, the compositions can comprise a therapeutically effective amount of at least one compound as described herein, together with one or more pharmaceutically acceptable excipients. Optionally, the compositions can comprise a combination of the compounds described herein, or can include a second active ingredient useful in the treatment or prevention of bacterial growth (for example and without limitation, anti-bacterial or anti-microbial agents), or can include a combination of reagents of the present disclosure.

[0364] Suitable excipients include, for example, carrier molecules that include large, slowly metabolized macromolecules such as proteins, polysaccharides, polylactic acids, polyglycolic acids, polymeric amino acids, amino acid copolymers, and inactive virus particles. Other exemplary excipients can include antioxidants (for example and without limitation, ascorbic acid), chelating agents (for example and without limitation, EDTA), carbohydrates (for example and without limitation, dextrin, hydroxyalkylcellulose, and hydroxyalkylmethylcellulose), stearic acid, liquids (for example and without limitation, oils, water, saline, glycerol and ethanol), wetting or emulsifying agents, pH buffering substances, and the like.

[0365] Delivery

[0366] Guide RNA polynucleotides and/or endonuclease polynucleotide(s) can be delivered by viral or non-viral delivery vehicles known in the art. Alternatively, endonuclease polypeptide(s) can be delivered by viral or non-viral delivery vehicles known in the art, such as electroporation or lipid nanoparticles. In further alternative aspects, the DNA endonuclease can be delivered as one or more polypeptides, either alone or pre-complexed with one or more guide RNAs, or one or more crRNA together with a tracrRNA.

[0367] Polynucleotides can be delivered by non-viral delivery vehicles including, but not limited to, nanoparticles, liposomes, ribonucleoproteins, positively charged peptides, small molecule RNA-conjugates, aptamer-RNA chimeras, and RNA-fusion protein complexes. Some exemplary non-viral delivery vehicles are described in Peer and Lieberman, Gene Therapy, 18: 1127-1133 (2011) (which focuses on non-viral delivery vehicles for siRNA that are also useful for delivery of other polynucleotides).

[0368] For polynucleotides of the present disclosure, the formulation may be selected from any of those taught, for example, in International Application PCT/US2012/069610.

[0369] Polynucleotides, such as guide RNA, sgRNA, and mRNA encoding an endonuclease, may be delivered to a cell or a patient by a lipid nanoparticle (LNP).

[0370] A LNP refers to any particle having a diameter of less than 1000 nm, 500 nm, 250 nm, 200 nm, 150 nm, 100 nm, 75 nm, 50 nm, or 25 nm. Alternatively, a nanoparticle may range in size from 1-1000 nm, 1-500 nm, 1-250 nm, 25-200 nm, 25-100 nm, 35-75 nm, or 25-60 nm.

[0371] LNPs may be made from cationic, anionic, or neutral lipids. Neutral lipids, such as the fusogenic phospholipid DOPE or the membrane component cholesterol, may be included in LNPs as ‘helper lipids’ to enhance transfection activity and nanoparticle stability. Limitations of cationic lipids include low efficacy owing to poor stability and rapid clearance, as well as the generation of inflammatory or anti-inflammatory responses.

[0372] LNPs may also be comprised of hydrophobic lipids, hydrophilic lipids, or both hydrophobic and hydrophilic lipids.

[0373] Any lipid or combination of lipids that are known in the art can be used to produce a LNP. Examples of lipids used to produce LNPs are: DOTMA, DOSPA, DOTAP, DMRIE, DC-cholesterol, DOTAP-cholesterol, GAP-DMORIE-DPyPE, and GL67A-DOPE-DMPE-polyethylene glycol (PEG). Examples of cationic lipids are: 98N12-5, C12-200, DLin-KC2-DMA (KC2), DLin-MC3-DMA (MC3), XTC, MD1, and 7C1. Examples of neutral lipids are: DPSC, DPPC, POPC, DOPE, and SM. Examples of PEG-modified lipids are: PEG-DMG, PEG-CerC14, and PEG-CerC20.

[0374] The lipids can be combined in any number of molar ratios to produce a LNP. In addition, the polynucleotide(s) can be combined with lipid(s) in a wide range of molar ratios to produce a LNP.

[0375] As stated previously, the site-directed polypeptide and genome-targeting nucleic acid can each be administered separately to a cell or a patient. On the other hand, the site-directed polypeptide can be pre-complexed with one or more guide RNAs, or one or more crRNA together with a tracrRNA. The pre-complexed material can then be administered to a cell or a patient. Such pre-complexed material is known as a ribonucleoprotein particle (RNP).

[0376] RNA is capable of forming specific interactions with RNA or DNA. While this property is exploited in many biological processes, it also comes with the risk of promiscuous interactions in a nucleic acid-rich cellular environment. One solution to this problem is the formation of ribonucleoprotein particles (RNPs), in which the RNA is pre-complexed with an endonuclease. Another benefit of the RNP is protection of the RNA from degradation.

[0377] The endonuclease in the RNP can be modified or unmodified. Likewise, the gRNA, crRNA, tracrRNA, or sgRNA can be modified or unmodified. Numerous modifications are known in the art and can be used.

[0378] The endonuclease and sgRNA can be generally combined in a 1:1 molar ratio. Alternatively, the endonuclease, crRNA and tracrRNA can be generally combined in a 1:1:1 molar ratio. However, a wide range of molar ratios can be used to produce a RNP.

[0379] AAV (Adeno Associated Virus)

[0380] A recombinant adeno-associated virus (AAV) vector can be used for delivery. Techniques to produce rAAV particles, in which an AAV genome to be packaged that includes the polynucleotide to be delivered, rep and cap genes, and helper virus functions are provided to a cell are standard in the art. Production of rAAV typically requires that the following components are present within a single cell (denoted herein as a packaging cell): a rAAV genome, AAV rep and cap genes separate from (i.e., not in) the rAAV genome, and helper virus functions. The AAV rep and cap genes may be from any AAV serotype for which recombinant virus can be derived, and may be from a different AAV serotype than the rAAV genome ITRs, including, but not limited to, AAV serotypes described herein. Production of pseudotyped rAAV is disclosed in, for example, international patent application publication number WO 01/83692.

[0381] AAV Serotypes

[0382] AAV particles packaging polynucleotides encoding compositions of the present disclosure, e.g., endonucleases, donor sequences, or RNA guide molecules, of the present disclosure may comprise or be derived from any natural or recombinant AAV serotype. According to the present disclosure, the AAV particles may utilize or be based on a serotype selected from any of the following serotypes, and variants thereof including but not limited to AAV1, AAV10, AAV106.1/hu.37, AAV11, AAV114.3/hu.40, AAV12, AAV127.2/hu.41, AAV127.5/hu.42, AAV128.1/hu.43, AAV128.3/hu.44, AAV130.4/hu.48, AAV145.1/hu.53, AAV145.5/hu.54, AAV145.6/hu.55, AAV16.12/hu.11, AAV16.3, AAV16.8/hu.10, AAV161.10/hu.60, AAV161.6/hu.61, AAV1-7/rh.48, AAV1-8/rh.49, AAV2, AAV2.5T, AAV2-15/rh.62, AAV223.1, AAV223.2, AAV223.4, AAV223.5, AAV223.6, AAV223.7, AAV2-3/rh.61, AAV24.1, AAV2-4/rh.50, AAV2-5/rh.51, AAV27.3, AAV29.3/bb.1, AAV29.5/bb.2, AAV2G9, AAV-2-pre-miRNA-101, AAV3, AAV3.1/hu.6, AAV3.1/hu.9, AAV3-11/rh.53, AAV3-3, AAV33.12/hu.17, AAV33.4/hu.15, AAV33.8/hu.16, AAV3-9/rh.52, AAV3a, AAV3b, AAV4, AAV4-19/rh.55, AAV42.12, AAV42-10, AAV42-11, AAV42-12, AAV42-13, AAV42-15, AAV42-1b, AAV42-2, AAV42-3a, AAV42-3b, AAV42-4, AAV42-5a, AAV42-5b, AAV42-6b, AAV42-8, AAV42-aa, AAV43-1, AAV43-12, AAV43-20, AAV43-21, AAV43-23, AAV43-25, AAV43-5, AAV4-4, AAV44.1, AAV44.2, AAV44.5, AAV46.2/hu.28, AAV46.6/hu.29, AAV4-8/rh.64, AAV4-8/rh.64, AAV4-9/rh.54, AAV5, AAV52.1/hu.20, AAV52/hu.19, AAV5-22/rh.58, AAV5-3/rh.57, AAV54.1/hu.21, AAV54.2/hu.22, AAV54.4R/hu.27, AAV54.5/hu.23, AAV54.7/hu.24, AAV58.2/hu.25, AAV6, AAV6.1, AAV6.1.2, AAV6.2, AAV7, AAV7.2, AAV7.3/hu.7, AAV8, AAV-8b, AAV-8h, AAV9, AAV9.11, AAV9.13, AAV9.16, AAV9.24, AAV9.45, AAV9.47, AAV9.61, AAV9.68, AAV9.84, AAV9.9, AAVA3.3, AAVA3.4, AAVA3.5, AAVA3.7, AAV-b, AAVC1, AAVC2, AAVC5, AAVCh.5, AAVCh.5R1, AAVcy.2, AAVcy.3, AAVcy.4, AAVcy.5, AAVCy.5R1, AAVCy.5R2, AAVCy.5R3, AAVCy.5R4, AAVcy.6, AAV-DJ, AAV-DJ8, AAVF3, AAVF5, AAV-h, AAVH-1/hu.1, AAVH2, AAVH-5/hu.3, AAVH6, AAVhE1.1, AAVhER1.14, AAVhEr1.16, AAVhEr1.18, AAVhER1.23, AAVhEr1.35, AAVhEr1.36, AAVhEr1.5, AAVhEr1.7, AAVhEr1.8, AAVhEr2.16, AAVhEr2.29, AAVhEr2.30, AAVhEr2.31, AAVhEr2.36, AAVhEr2.4, AAVhEr3.1, AAVhu.1, AAVhu.10, AAVhu.11, AAVhu.11, AAVhu.12, AAVhu.13, AAVhu.14/9, AAVhu.15, AAVhu.16, AAVhu.17, AAVhu.18, AAVhu.19, AAVhu.2, AAVhu.20, AAVhu.21, AAVhu.22, AAVhu.23.2, AAVhu.24, AAVhu.25, AAVhu.27, AAVhu.28, AAVhu.29, AAVhu.29R, AAVhu.3, AAVhu.31, AAVhu.32, AAVhu.34, AAVhu.35, AAVhu.37, AAVhu.39, AAVhu.4, AAVhu.40, AAVhu.41, AAVhu.42, AAVhu.43, AAVhu.44, AAVhu.44R1, AAVhu.44R2, AAVhu.44R3, AAVhu.45, AAVhu.46, AAVhu.47, AAVhu.48, AAVhu.48R1, AAVhu.48R2, AAVhu.48R3, AAVhu.49, AAVhu.5, AAVhu.51, AAVhu.52, AAVhu.53, AAVhu.54, AAVhu.55, AAVhu.56, AAVhu.57, AAVhu.58, AAVhu.6, AAVhu.60, AAVhu.61, AAVhu.63, AAVhu.64, AAVhu.66, AAVhu.67, AAVhu.7, AAVhu.8, AAVhu.9, AAVhu.t 19, AAVLG-10/rh.40, AAVLG-4/rh.38, AAVLG-9/hu.39, AAVLG-9/hu.39, AAV-LK01, AAV-LK02, AAVLK03, AAV-LK03, AAV-LK04, AAV-LK05, AAV-LK06, AAV-LK07, AAV-LK08, AAV-LK09, AAV-LK10, AAV-LK11, AAV-LK12, AAV-LK13, AAV-LK14, AAV-LK15, AAV-LK17, AAV-LK18, AAV-LK19, AAVN721-8/rh.43, AAV-PAEC, AAV-PAEC11, AAV-PAEC12, AAV-PAEC2, AAV-PAEC4, AAV-PAEC6, AAV-PAEC7, AAV-PAEC8, AAVpi.1, AAVpi.2, AAVpi.3, AAVrh.10, AAVrh.12, AAVrh.13, AAVrh.13R, AAVrh.14, AAVrh.17, AAVrh.18, AAVrh.19, AAVrh.2, AAVrh.20, AAVrh.21, AAVrh.22, AAVrh.23, AAVrh.24, AAVrh.25, AAVrh.2R, AAVrh.31, AAVrh.32, AAVrh.33, AAVrh.34, AAVrh.35, AAVrh.36, AAVrh.37, AAVrh.37R2, AAVrh.38, AAVrh.39, AAVrh.40, AAVrh.43, AAVrh.44, AAVrh.45, AAVrh.46, AAVrh.47, AAVrh.48, AAVrh.48, AAVrh.48.1, AAVrh.48.1.2, AAVrh.48.2, AAVrh.49, AAVrh.50, AAVrh.51, AAVrh.52, AAVrh.53, AAVrh.54, AAVrh.55, AAVrh.56, AAVrh.57, AAVrh.58, AAVrh.59, AAVrh.60, AAVrh.61, AAVrh.62, AAVrh.64, AAVrh.64R1, AAVrh.64R2, AAVrh.65, AAVrh.67, AAVrh.68, AAVrh.69, AAVrh.70, AAVrh.72, AAVrh.73, AAVrh.74, AAVrh.8, AAVrh.8R, AAVrh8R, AAVrh8R A586R mutant, AAVrh8R R533A mutant, BAAV, BNP61 AAV, BNP62 AAV, BNP63 AAV, bovine AAV, caprine AAV, Japanese AAV 10, true type AAV (ttAAV), UPENN AAV 10, AAV-LK16, AAAV, AAV Shuffle 100-1, AAV Shuffle 100-2, AAV Shuffle 100-3, AAV Shuffle 100-7, AAV Shuffle 10-2, AAV Shuffle 10-6, AAV Shuffle 10-8, AAV SM 100-10, AAV SM 100-3, AAV SM 10-1, AAV SM 10-2, and/or AAV SM 10-8.

[0383] In some aspects, the AAV serotype may be, or have, a mutation in the AAV9 sequence as described by N Pulicherla et al. (Molecular Therapy 19(6):1070-1078 (2011)), such as but not limited to, AAV9.9, AAV9.11, AAV9.13, AAV9.16, AAV9.24, AAV9.45, AAV9.47, AAV9.61, AAV9.68, AAV9.84.

[0384] In some aspects, the AAV serotype may be, or have, a sequence as described in U.S. Pat. No. 6,156,303, such as, but not limited to, AAV3B (SEQ ID NO: 1 and 10 of U.S. Pat. No. 6,156,303), AAV6 (SEQ ID NO: 2, 7 and 11 of U.S. Pat. No. 6,156,303), AAV2 (SEQ ID NO: 3 and 8 of U.S. Pat. No. 6,156,303), AAV3A (SEQ ID NO: 4 and 9, of U.S. Pat. No. 6,156,303), or derivatives thereof.

[0385] In some aspects, the serotype may be AAVDJ or a variant thereof, such as AAVDJ8 (or AAV-DJ8), as described by Grimm et al. (Journal of Virology 82(12): 5887-5911 (2008)). The amino acid sequence of AAVDJ8 may comprise two or more mutations in order to remove the heparin binding domain (HBD). As a non-limiting example, the AAV-DJ sequence described as SEQ ID NO: 1 in U.S. Pat. No. 7,588,772, may comprise two mutations: (1) R587Q where arginine (R; Arg) at amino acid 587 is changed to glutamine (Q; Gln) and (2) R590T where arginine (R; Arg) at amino acid 590 is changed to threonine (T; Thr). As another non-limiting example, may comprise three mutations: (1) K406R where lysine (K; Lys) at amino acid 406 is changed to arginine (R; Arg), (2) R587Q where arginine (R; Arg) at amino acid 587 is changed to glutamine (Q; Gln) and (3) R590T where arginine (R; Arg) at amino acid 590 is changed to threonine (T; Thr).

[0386] In some aspects, the AAV serotype may be, or have, a sequence as described in International Publication No. WO2015121501, such as, but not limited to, true type AAV (ttAAV) (SEQ ID NO: 2 of WO2015121501), “UPenn AAV10” (SEQ ID NO: 8 of WO2015121501), “Japanese AAV10” (SEQ ID NO: 9 of WO2015121501), or variants thereof.

[0387] According to the present disclosure, AAV capsid serotype selection or use may be from a variety of species. In one example, the AAV may be an avian AAV (AAAV). The AAAV serotype may be, or have, a sequence as described in U.S. Pat. No. 9,238,800, such as, but not limited to, AAAV (SEQ ID NO: 1, 2, 4, 6, 8, 10, 12, and 14 of U.S. Pat. No. 9,238,800), or variants thereof.

[0388] In one example, the AAV may be a bovine AAV (BAAV). The BAAV serotype may be, or have, a sequence as described in U.S. Pat. No. 9,193,769, such as, but not limited to, BAAV (SEQ ID NO: 1 and 6 of U.S. Pat. No. 9,193,769), or variants thereof. The BAAV serotype may be or have a sequence as described in U.S. Pat. No. 7,427,396, such as, but not limited to, BAAV (SEQ ID NO: 5 and 6 of U.S. Pat. No. 7,427,396), or variants thereof.

[0389] In one example, the AAV may be a caprine AAV. The caprine AAV serotype may be, or have, a sequence as described in U.S. Pat. No. 7,427,396 such as, but not limited to, caprine AAV (SEQ ID NO: 3 of U.S. Pat. No. 7,427,396), or variants thereof.

[0390] In other examples, the AAV may be engineered as a hybrid AAV from two or more parental serotypes. In one example, the AAV may be AAV2G9 which comprises sequences from AAV2 and AAV9. The AAV2G9 AAV serotype may be, or have, a sequence as described in U.S. Patent Publication No. 20160017005.

[0391] In one example, the AAV may be a serotype generated by the AAV9 capsid library with mutations in amino acids 390-627 (VP1 numbering) as described by Pulicherla et al. (Molecular Therapy 19(6):1070-1078 (2011). The serotype and corresponding nucleotide and amino acid substitutions may be, but is not limited to, AAV9.1 (G1594C; D532H), AAV6.2 (T1418A and T1436X; V473D and I479K), AAV9.3 (T1238A; F413Y), AAV9.4 (T1250C and A1617T; F417S), AAV9.5 (A1235G, A1314T, A1642G, C1760T; Q412R, T548A, A587V), AAV9.6 (T1231A; F411I), AAV9.9 (G1203A, G1785T; W595C), AAV9.10 (A1500G, T1676C; M559T), AAV9.11 (A1425T, A1702C, A1769T; T568P, Q590L), AAV9.13 (A1369C, A1720T; N457H, T574S), AAV9.14 (T1340A, T1362C, T1560C, G1713A; L447H), AAV9.16 (A1775T; Q592L), AAV9.24 (T1507C, T1521G; W503R), AAV9.26 (A1337G, A1769C; Y446C, Q590P), AAV9.33 (A1667C; D556A), AAV9.34 (A1534G, C1794T; N512D), AAV9.35 (A1289T, T1450A, C1494T, A1515T, C1794A, G1816A; Q430L, Y484N, N98K, V6061), AAV9.40 (A1694T, E565V), AAV9.41 (A1348T, T1362C; T450S), AAV9.44 (A1684C, A1701T, A1737G; N562H, K567N), AAV9.45 (A1492T, C1804T; N498Y, L602F), AAV9.46 (G1441C, T1525C, T1549G; G481R, W509R, L517V), 9.47 (G1241A, G1358A, A1669G, C1745T; S414N, G453D, K557E, T582I), AAV9.48 (C1445T, A1736T; P482L, Q579L), AAV9.50 (A1638T, C1683T, T1805A; Q546H, L602H), AAV9.53 (G1301A, A1405C, C1664T, G1811T; R134Q, 5469R, A555V, G604V), AAV9.54 (C1531A, T1609A; L511I, L537M), AAV9.55 (T1605A; F535L), AAV9.58 (C1475T, C1579A; T492I, H527N), AAV.59 (T1336C; Y446H), AAV9.61 (A1493T; N498I), AAV9.64 (C1531A, A1617T; L511I), AAV9.65 (C1335T, T1530C, C1568A; A523D), AAV9.68 (C1510A; P504T), AAV9.80 (G1441A,;G481R), AAV9.83 (C1402A, A1500T; P468T, E500D), AAV9.87 (T1464C, T1468C; S490P), AAV9.90 (A1196T; Y399F), AAV9.91 (T1316G, A1583T, C1782G, T1806C; L439R, K528I), AAV9.93 (A1273G, A1421G, A1638C, C1712T, G1732A, A1744T, A1832T; S425G, Q474R, Q546H, P571L, G578R, T582S, D611V), AAV9.94 (A1675T; M559L) and AAV9.95 (T1605A; F535L).

[0392] In one example, the AAV may be a serotype comprising at least one AAV capsid CD8+ T-cell epitope. As a non-limiting example, the serotype may be AAV1, AAV2 or AAV8.

[0393] In one example, the AAV may be a variant, such as PHP.A or PHP.B as described in Deverman. 2016. Nature Biotechnology. 34(2): 204-209.

[0394] In one example, the AAV may be a serotype selected from any of those found in SEQ ID NOs: 4734-5302 and Table 2.

[0395] In one example, the AAV may be encoded by a sequence, fragment or variant as disclosed in SEQ ID NOs: 4734-5302 and Table 2.

[0396] General principles of rAAV production are reviewed in, for example, Carter, 1992, Current Opinions in Biotechnology, 1533-539; and Muzyczka, 1992, Curr. Topics in Microbial. and Immunol., 158:97-129). Various approaches are described in Ratschin et al., Mol. Cell. Biol. 4:2072 (1984); Hermonat et al., Proc. Nat1. Acad. Sci. USA, 81:6466 (1984); Tratschin et al., Mol. Cell. Biol. 5:3251 (1985); McLaughlin et al., J. Virol., 62:1963 (1988); and Lebkowski et al., 1988 Mol. Cell. Biol., 7:349 (1988). Samulski et al. (1989, J. Virol., 63:3822-3828); U.S. Pat. No. 5,173,414; WO 95/13365 and corresponding U.S. Pat. No. 5,658,776; WO 95/13392; WO 96/17947; PCT/US98/18600; WO 97/09441 (PCT/US96/14423); WO 97/08298 (PCT/US96/13872); WO 97/21825 (PCT/US96/20777); WO 97/06243 (PCT/FR96/01064); WO 99/11764; Perrin et al. (1995) Vaccine 13:1244-1250; Paul et al. (1993) Human Gene Therapy 4:609-615; Clark et al. (1996) Gene Therapy 3:1124-1132; U.S. Pat. Nos. 5,786,211; 5,871,982; and 6,258,595.

[0397] AAV vector serotypes can be matched to target cell types. For example, the following exemplary cell types can be transduced by the indicated AAV serotypes among others.

TABLE 2
Tissue/Cell Types and Serotypes

| Tissue/Cell Type | Serotype |
|---|---|
| Liver | AAV3, AAV8, AA5, AAV9 |
| Skeletal muscle | AAV1, AAV7, AAV6, AAV8, AAV9 |
| Central nervous system | AAV5, AAV1, AAV4, AAV9 |
| RPE | AAV5, AAV4 |
| Photoreceptor cells | AAV5 |
| Lung | AAV9 |
| Heart | AAV8 |
| Pancreas | AAV8 |
| Kidney | AAV2, AA8 |
| Hematopoietic stem cells | AAV6 |

[0398] In addition to adeno-associated viral vectors, other viral vectors can be used. Such viral vectors include, but are not limited to, lentivirus, alphavirus, enterovirus, pestivirus, baculovirus, herpesvirus, Epstein Barr virus, papovavirus, poxvirus, vaccinia virus, and herpes simplex virus.

[0399] In some aspects, Cas9 mRNA, sgRNA targeting one or two sites in FXN gene, and donor DNA can each be separately formulated into lipid nanoparticles, or are all co-formulated into one lipid nanoparticle.

[0400] In some aspects, Cas9 mRNA can be formulated in a lipid nanoparticle, while sgRNA and donor DNA can be delivered in an AAV vector.

[0401] Options are available to deliver the Cas9 nuclease as a DNA plasmid, as mRNA or as a protein. The guide RNA can be expressed from the same DNA, or can also be delivered as an RNA. The RNA can be chemically modified to alter or improve its half-life, or decrease the likelihood or degree of immune response. The endonuclease protein can be complexed with the gRNA prior to delivery. Viral vectors allow efficient delivery; split versions of Cas9 and smaller orthologs of Cas9 can be packaged in AAV, as can donors for HDR. A range of non-viral delivery methods also exist that can deliver each of these components, or non-viral and viral methods can be employed in tandem. For example, nano-particles can be used to deliver the protein and guide RNA, while AAV can be used to deliver a donor DNA.

### IV. Dosing and Administration

[0402] The terms “administering,” “introducing” and “transplanting” are used interchangeably in the context of the placement of cells, e.g., progenitor cells, into a subject, by a method or route that results in at least partial localization of the introduced cells at a desired site, such as a site of injury or repair, such that a desired effect(s) is produced. The cells e.g., progenitor cells, or their differentiated progeny can be administered by any appropriate route that results in delivery to a desired location in the subject where at least a portion of the implanted cells or components of the cells remain viable. The period of viability of the cells after administration to a subject can be as short as a few hours, e.g., twenty-four hours, to a few days, to as long as several years, or even the life time of the patient, i.e., long-term engraftment. For example, in some aspects described herein, an effective amount of neural progenitor cells is administered via a systemic route of administration, such as an intraperitoneal or intravenous route.

[0403] The terms “individual,” “subject,” “host” and “patient” are used interchangeably herein and refer to any subject for whom diagnosis, treatment or therapy is desired. In some aspects, the subject is a mammal. In some aspects, the subject is a human being.

[0404] When provided prophylactically, progenitor cells described herein can be administered to a subject in advance of any symptom of Friedreich's Ataxia. Accordingly, the prophylactic administration of a progenitor cell population serves to prevent Friedreich's Ataxia.

[0405] A progenitor cell population being administered according to the methods described herein can comprise allogeneic progenitor cells obtained from one or more donors. Such progenitors may be of any cellular or tissue origin, e.g., liver, muscle, cardiac, brain, etc. “Allogeneic” refers to a progenitor cell or biological samples comprising progenitor cells obtained from one or more different donors of the same species, where the genes at one or more loci are not identical. For example, a liver progenitor cell population being administered to a subject can be derived from one more unrelated donor subjects, or from one or more non-identical siblings. In some cases, syngeneic progenitor cell populations can be used, such as those obtained from genetically identical animals, or from identical twins. The progenitor cells can be autologous cells; that is, the progenitor cells are obtained or isolated from a subject and administered to the same subject, i.e., the donor and recipient are the same.

[0406] The term “effective amount” refers to the amount of a population of progenitor cells or their progeny needed to prevent or alleviate at least one or more signs or symptoms of Friedreich's Ataxia, and relates to a sufficient amount of a composition to provide the desired effect, e.g., to treat a subject having Friedreich's Ataxia. The term “therapeutically effective amount” therefore refers to an amount of progenitor cells or a composition comprising progenitor cells that is sufficient to promote a particular effect when administered to a typical subject, such as one who has or is at risk for Friedreich's Ataxia. An effective amount would also include an amount sufficient to prevent or delay the development of a symptom of the disease, alter the course of a symptom of the disease (for example but not limited to, slow the progression of a symptom of the disease), or reverse a symptom of the disease. It is understood that for any given case, an appropriate “effective amount” can be determined by one of ordinary skill in the art using routine experimentation.

[0407] For use in the various aspects described herein, an effective amount of progenitor cells comprises at least 10² progenitor cells, at least 5×10² progenitor cells, at least 10³ progenitor cells, at least 5×10³ progenitor cells, at least 10⁴ progenitor cells, at least 5×10⁴ progenitor cells, at least 10⁵ progenitor cells, at least 2×10⁵ progenitor cells, at least 3×10⁵ progenitor cells, at least 4×10⁵ progenitor cells, at least 5×10⁵ progenitor cells, at least 6×10⁵ progenitor cells, at least 7×10⁵ progenitor cells, at least 8×10⁵ progenitor cells, at least 9×10⁵ progenitor cells, at least 1×10⁶ progenitor cells, at least 2×10⁶ progenitor cells, at least 3×10⁶ progenitor cells, at least 4×10⁶ progenitor cells, at least 5×10⁶ progenitor cells, at least 6×10⁶ progenitor cells, at least 7×10⁶ progenitor cells, at least 8×10⁶ progenitor cells, at least 9×10⁶ progenitor cells, or multiples thereof. The progenitor cells can be derived from one or more donors, or can be obtained from an autologous source. In some examples described herein, the progenitor cells can be expanded in culture prior to administration to a subject in need thereof.

[0408] In some aspects, reduction of the expanded trinucleotide repeats in the FXN gene in cells of patients having Friedreich's Ataxia can be beneficial for ameliorating one or more symptoms of the disease, for increasing long-term survival, and/or for reducing side effects associated with other treatments. Upon administration of such cells to human patients, the presence of progenitors that have wild-type or similar levels of the trinucleotide repeat in the FXN gene is beneficial. In some cases, effective treatment of a subject gives rise to at least about 3%, 5% or 7% transcripts having wild-type or similar levels of trinucleotide repeat relative to total FXN transcripts in the treated subject. In some examples, transcripts having wild-type or similar levels of trinucleotide repeat will be at least about 10% of total FXN transcripts. In some examples, transcripts having wild-type or similar levels of trinucleotide repeat will be at least about 20% to 30% of total FXN transcripts. Similarly, the introduction of even relatively limited subpopulations of cells having wild-type levels of trinucleotide repeat in the FXN gene can be beneficial in various patients because in some situations normalized cells will have a selective advantage relative to diseased cells. However, even modest levels of progenitors with wild-type or similar levels of trinucleotide repeat in the FXN gene can be beneficial for ameliorating one or more aspects of Friedreich's Ataxia in patients. In some examples, about 10%, about 20%, about 30%, about 40%, about 50%, about 60%, about 70%, about 80%, about 90% or more of the neural progenitors in patients to whom such cells are administered have wild-type or similar levels of trinucleotide repeat in the FXN gene.

[0409] “Administered” refers to the delivery of a progenitor cell composition into a subject by a method or route that results in at least partial localization of the cell composition at a desired site. A cell composition can be administered by any appropriate route that results in effective treatment in the subject, i.e. administration results in delivery to a desired location in the subject where at least a portion of the composition delivered, i.e. at least 1×10⁴ cells are delivered to the desired site for a period of time.

[0410] In one aspect of the method, the pharmaceutical composition may be administered via a route such as, but not limited to, enteral (into the intestine), gastroenteral, epidural (into the dura matter), oral (by way of the mouth), transdermal, peridural, intracerebral (into the cerebrum), intracerebroventricular (into the cerebral ventricles), epicutaneous (application onto the skin), intradermal, (into the skin itself), subcutaneous (under the skin), nasal administration (through the nose), intravenous (into a vein), intravenous bolus, intravenous drip, intraarterial (into an artery), intramuscular (into a muscle), intracardiac (into the heart), intraosseous infusion (into the bone marrow), intrathecal (into the spinal canal), intraperitoneal, (infusion or injection into the peritoneum), intravesical infusion, intravitreal, (through the eye), intracavernous injection (into a pathologic cavity) intracavitary (into the base of the penis), intravaginal administration, intrauterine, extra-amniotic administration, transdermal (diffusion through the intact skin for systemic distribution), transmucosal (diffusion through a mucous membrane), transvaginal, insufflation (snorting), sublingual, sublabial, enema, eye drops (onto the conjunctiva), in ear drops, auricular (in or by way of the ear), buccal (directed toward the cheek), conjunctival, cutaneous, dental (to a tooth or teeth), electro-osmosis, endocervical, endosinusial, endotracheal, extracorporeal, hemodialysis, infiltration, interstitial, intra-abdominal, intra-amniotic, intra-articular, intrabiliary, intrabronchial, intrabursal, intracartilaginous (within a cartilage), intracaudal (within the cauda equine), intracisternal (within the cisterna magna cerebellomedularis), intracorneal (within the cornea), dental intracornal, intracoronary (within the coronary arteries), intracorporus cavernosum (within the dilatable spaces of the corporus cavernosa of the penis), intradiscal (within a disc), intraductal (within a duct of a gland), intraduodenal (within the duodenum), intradural (within or beneath the dura), intraepidermal (to the epidermis), intraesophageal (to the esophagus), intragastric (within the stomach), intragingival (within the gingivae), intraileal (within the distal portion of the small intestine), intralesional (within or introduced directly to a localized lesion), intraluminal (within a lumen of a tube), intralymphatic (within the lymph), intramedullary (within the marrow cavity of a bone), intrameningeal (within the meninges), intramyocardial (within the myocardium), intraocular (within the eye), intraovarian (within the ovary), intrapericardial (within the pericardium), intrapleural (within the pleura), intraprostatic (within the prostate gland), intrapulmonary (within the lungs or its bronchi), intrasinal (within the nasal or periorbital sinuses), intraspinal (within the vertebral column), intrasynovial (within the synovial cavity of a joint), intratendinous (within a tendon), intratesticular (within the testicle), intrathecal (within the cerebrospinal fluid at any level of the cerebrospinal axis), intrathoracic (within the thorax), intratubular (within the tubules of an organ), intratumor (within a tumor), intratympanic (within the aurus media), intravascular (within a vessel or vessels), intraventricular (within a ventricle), iontophoresis (by means of electric current where ions of soluble salts migrate into the tissues of the body), irrigation (to bathe or flush open wounds or body cavities), laryngeal (directly upon the larynx), nasogastric (through the nose and into the stomach), occlusive dressing technique (topical route administration, which is then covered by a dressing that occludes the area), ophthalmic (to the external eye), oropharyngeal (directly to the mouth and pharynx), parenteral, percutaneous, periarticular, peridural, perineural, periodontal, rectal, respiratory (within the respiratory tract by inhaling orally or nasally for local or systemic effect), retrobulbar (behind the pons or behind the eyeball), intramyocardial (entering the myocardium), soft tissue, subarachnoid, subconjunctival, submucosal, topical, transplacental (through or across the placenta), transtracheal (through the wall of the trachea), transtympanic (across or through the tympanic cavity), ureteral (to the ureter), urethral (to the urethra), vaginal, caudal block, diagnostic, nerve block, biliary perfusion, cardiac perfusion, photopheresis and spinal.

[0411] Modes of administration include injection, infusion, instillation, and/or ingestion. “Injection” includes, without limitation, intravenous, intramuscular, intra-arterial, intrathecal, intraventricular, intracapsular, intraorbital, intracardiac, intradermal, intraperitoneal, transtracheal, subcutaneous, subcuticular, intraarticular, sub capsular, subarachnoid, intraspinal, intracerebro spinal, and intrasternal injection and infusion. In some examples, the route is intravenous. For the delivery of cells, administration by injection or infusion can be made.

[0412] The cells can be administered systemically. The phrases “systemic administration,” “administered systemically”, “peripheral administration” and “administered peripherally” refer to the administration of a population of progenitor cells other than directly into a target site, tissue, or organ, such that it enters, instead, the subject's circulatory system and, thus, is subject to metabolism and other like processes.

[0413] The efficacy of a treatment comprising a composition for the treatment of Friedreich's Ataxia can be determined by the skilled clinician. However, a treatment is considered “effective treatment,” if any one or all of the signs or symptoms of, as but one example, levels of trinucleotide repeat in the FXN gene are altered in a beneficial manner (e.g., decreased by at least 10%), or other clinically accepted symptoms or markers of disease are improved or ameliorated. Efficacy can also be measured by failure of an individual to worsen as assessed by hospitalization or need for medical interventions (e.g., progression of the disease is halted or at least slowed). Methods of measuring these indicators are known to those of skill in the art and/or described herein. Treatment includes any treatment of a disease in an individual or an animal (some non-limiting examples include a human, or a mammal) and includes: (1) inhibiting the disease, e.g., arresting, or slowing the progression of symptoms; or (2) relieving the disease, e.g., causing regression of symptoms; and (3) preventing or reducing the likelihood of the development of symptoms.

[0414] The treatment according to the present disclosure can ameliorate one or more symptoms associated with Friedreich's Ataxia by reducing the number of trinucleotide repeat in the FXN gene in the individual.

### V. Features and Properties of the Frataxin (FXN) Gene

[0415] FXN has been associated with diseases and disorders such as, but not limited to, Alzheimer's Disease, Amyotrophic Lateral Sclerosis, Apraxias, Ataxia, Ataxia Telangiectasia, Hereditary Ataxias, Bloom Syndrome, Brain Neoplasms, Malignant tumor of colon, Dilated Cardiomyopathy, Hypertrophic Cardiomyopathy, Cerebellar Ataxia, Cystic Fibrosis, Diabetes, Diabetes Mellitus, Non-Insulin-Dependent Diabetes Mellitus, Dysarthria, Dystonia, Fragile X Syndrome, Friedreich's Ataxia, Heart Diseases, Cardiomegaly, Hemochromatosis, Herpes Simplex Infections, Huntington Disease, Liver neoplasms, Machado-Joseph Disease, Metabolic Diseases, Myocardial Infarction, Myotonic Dystrophy, nervous system disorder, Neuroblastoma, Neuromuscular Diseases, Pallor, Parkinson Disease, Peripheral Neuropathy, Protein Deficiency, Restless Legs Syndrome, Schizophrenia, unspecified Scoliosis, Hereditary Spastic Paraplegia, Spinocerebellar Ataxia, Left Ventricular Hypertrophy, Sensory neuropathy, Tumor Progression, Neurologic Symptoms, Paroxysmal atrial fibrillation, Hypoalbuminemia, Impaired glucose tolerance, Iron Overload, Adenocarcinoma of colon, Depletion of mitochondrial DNA, Ventricular septal hypertrophy, Malignant neoplasm of prostate, Hereditary hemochromatosis, Dystonia Disorders, Congenital Myotonic Dystrophy, Spastic, Neurodegenerative Disorders, Congenital scoliosis, Colon Carcinoma, Central neuroblastoma, Acquired scoliosis, cardiac symptom, Appendicular Ataxia, Mitochondrial Diseases, Heredodegenerative Nervous System Disorders, Spinocerebellar Ataxia Type 1, Cardiomyopathies, Ceruloplasmin deficiency, Hypertrophic Cardiomyopathy Familial, Degenerative disorder, Head titubation, Non-Neoplastic Disorder, X-Linked Bulbo-Spinal Atrophy, Fragile X Tremor/Ataxia Syndrome, Friedreich's Ataxia With Retained Reflexes, Ataxia With Vitamin E Deficiency, Spinocerebellar Ataxia Autosomal Recessive 1, Friedreich's Ataxia 1, Hereditary Neurodegenerative Disorder, and Spastic Paraplegia Type 7. Editing the FXN gene using any of the methods described herein may be used to treat, prevent and/or mitigate the symptoms of the diseases and disorders described herein.

[0416] Frataxin is a mitochondrial iron chaperone suggested to be important for iron-sulfur processing. This protein is found throughout the human body, but is enriched in the heart, spinal cord, liver, pancreas and muscles. Expansions of a trinucleotide GAA repeat region in the FXN gene, and subsequent frataxin protein deficiency, causes Friedreich's Ataxia. The GAA repeat region is located in the middle of an Alu element in the first intron of the FXN gene. In most people, the number of GAA repeats in the FXN gene is fewer than 12. Individuals with 12-33 uninterrupted GAA repeats are said to be asymptomatic. However, as these repeats are unstable and very likely to expand during meiosis, such individuals are at risk of having affected children. In people with Friedreich's Ataxia, the GAA segment is abnormally repeated 66 to over 1,000 times. The number of repeats in the gene correlates with the age of onset and severity of the disease. People with GAA repeats fewer than 300 copies tend to have a later appearance of symptoms (after age 25) than those with larger GAA trinucleotide repeats. The abnormal repeat expansion causes RNA processing defect, which leads to dysregulation of translation and reduced amount of the FXN protein in cells.

[0417] Friedreich's Ataxia is usually diagnosed in the first or second decade and affects 1 in 50,000 people in the United States. Friedreich's Ataxia is a progressive movement disorder characterized by loss of strength and sensation, muscle stiffness and impaired speech. Individuals with Friedreich's Ataxia may also have cardiomyopathy, diabetes, vision or hearing loss, and/or scoliosis. Currently there is no treatment for Friedreich's Ataxia, only symptom management.

[0418] The FXN gene is also associated with a number of other disorders, including hereditary ataxia, X-linked sideroblastic anemia with ataxia, tabes dorsalis, spinocerebellar degeneration, tertiary neurosyphilis, a transferrinemia, spinocerebellar ataxia, scoliosis, hemochromatosis, fragile X syndrome, mitochondrial disorders and cardiomyopathy.

[0419] In one example, the target tissue for the compositions and methods described herein is central nervous system tissue.

[0420] In one example, the gene is Frataxin (FXN), which may also be referred to as Friedreich's Ataxia protein, FRDA, X25, EC 1.16.3.1, CyaY, FARR or FA. FXN has a cytogenetic location of 9q21.11 and the genomic coordinates are on Chromosome 9 on the forward strand at position 69,035,259-69,100,178. The nucleotide sequence of FXN is shown as SEQ ID NO: 5303. PIP5K1B is the gene upstream of FXN on the forward strand and TJP2 is the gene downstream of FXN on the forward strand. FXN has a NCBI gene ID of 2395, Uniprot ID of Q16595 and Ensembl Gene ID of ENSG00000165060. FXN has 3,516 SNPs, 14 introns and exons. The exon identifier from Ensembl and the start/stop sites of the introns and exons are shown in Table 3.

TABLE 3
Introns and Exons for FXN

| Exon | | | Intron | | |
|---|---|---|---|---|---|
| No. | Exon ID | Start/Stop | No. | Intron based on Exon ID | Start/Stop |
| EX1 | ENSE00001089856 | 69,053,140- | INT1 | Intron ENSE00001089856- | 69,053,261- |
| | | 69,053,260 | | ENSE00001089858 | 69,064,937 |
| EX2 | ENSE00001089858 | 69,064,938- | INT2 | Intron ENSE00001089856- | 69,053,261- |
| | | 69,065,035 | | ENSE00001524709 | 69,064,937 |
| EX3 | ENSE00001524709 | 69,064,938- | INT3 | Intron ENSE00001089858- | 69,065,036- |
| | | 69,065,043 | | ENSE00001812177 | 69,072,611 |
| EX4 | ENSE00001812177 | 69,072,612- | INT4 | Intron ENSE00001089858- | 69,065,036- |
| | | 69,073,105 | | ENSE00001865767 | 69,072,611 |
| EX5 | ENSE00001830990 | 69,035,762- | INT5 | Intron ENSE00001089858- | 69,065,036- |
| | | 69,035,947 | | ENSE00001887404 | 69,072,611 |
| EX6 | ENSE00001865767 | 69,072,612- | INT6 | Intron ENSE00001089858- | 69,065,036- |
| | | 69,074,213 | | ENSE00002223944 | 69,099,900 |
| EX7 | ENSE00001883715 | 69,046,407- | INT7 | Intron ENSE00001524709- | 69,065,044- |
| | | 69,046,482 | | ENSE00001901409 | 69,072,611 |
| EX8 | ENSE00001887404 | 69,072,612- | INT8 | Intron ENSE00001830990- | 69,035,948- |
| | | 69,072,796 | | ENSE00003532023 | 69,046,384 |
| EX9 | ENSE00001891410 | 69,036,161- | INT9 | Intron ENSE00001883715- | 69,046,483- |
| | | 69,036,205 | | ENSE00001089858 | 69,064,937 |
| EX10 | ENSE00001901409 | 69,072,612- | INT10 | Intron ENSE00001891410- | 69,036,206- |
| | | 69,073,022 | | ENSE00003573952 | 69,046,384 |
| EX11 | ENSE00001944433 | 69,035,259- | INT11 | Intron ENSE00001944433- | 69,035,948- |
| | | 69,035,947 | | ENSE00003532023 | 69,046,384 |
| EX12 | ENSE00002217291 | 69,035,563- | INT12 | Intron ENSE00002217291- | 69,035,948- |
| | | 69,035,947 | | ENSE00003532023 | 69,046,384 |
| EX13 | ENSE00002223944 | 69,099,901- | INT13 | Intron ENSE00003532023- | 69,046,483- |
| | | 69,100,178 | | ENSE00001089856 | 69,053,139 |
| EX14 | ENSE00003532023 | 69,046,385- | INT14 | Intron ENSE00003573952- | 69,046,483- |
| | | 69,046,482 | | ENSE00001089856 | 69,053,139 |
| EX15 | ENSE00003573952 | 69,046,385- | | | |
| | | 69,046,482 | | | |

[0421] Table 4 provides information on all of the transcripts for the FXN gene based on the Ensembl database. Provided in Table 4 are the transcript ID from Ensembl and corresponding NCBI RefSeq ID for the transcript, the translation ID from Ensembl and the corresponding NCBI RefSeq ID for the protein, the biotype of the transcript sequence as classified by Ensembl and the exons and introns in the transcript based on the information in Table 3.

TABLE 4
Transcript Information for FXN

| | Transcript | | Protein | | | |
|---|---|---|---|---|---|---|
| Transcript | NCBI | Translation | NCBI | Sequence | Exon ID from | Intron ID from |
| ID | RefSeq ID | ID | RefSeq ID | Biotype | Table 3 | Table 3 |
| ENST00000377270.7 | NM_000144 | ENSP00000366482 | NP_000135 | Protein | EX1, EX2, EX6, | INT1, INT4, |
| | | | | coding | EX11, EX14 | INT11, INT13 |
| ENST00000396364.7 | NM_001161706 | ENSP00000379650 | NP_001155178 | Protein | EX1, EX2, EX12, | INT1, INT6, |
| | | | | coding | EX13, EX14 | INT12, INT13 |
| ENST00000396366.6 | NM_181425 | ENSP00000379652 | NP_852090 | Protein | EX1, EX3, EX5, | INT2, INT7, |
| | | | | coding | EX10, EX14 | INT8, INT13 |
| ENST00000498653.5 | — | ENSP00000418015 | — | Protein | EX1, EX2, EX4, | INT1, INT3, |
| | | | | coding | EX9, EX15 | INT10, INT14 |
| ENST00000484259.1 | — | ENSP00000419243 | — | Protein | EX2, EX7, EX8 | INT5, INT9 |
| | | | | coding | | |

[0422] FXN has 3,516 SNPs and the NCBI rs number and/or UniProt VAR number for the SNPs of the FXN gene are rs10890, rs944348, rs953588, rs1045632, rs1052186, rs1052187, rs1052188, rs1052189, rs1052194, rs1052195, rs1052201, rs1330843, rs1411675, rs1411676, rs1544306, rs1800651, rs1800652, rs1815427, rs1888334, rs1971625, rs1984002, rs1984003, rs1984004, rs1984005, rs2309393, rs2309394, rs2481598, rs2481599, rs2481600, rs2481601, rs2498419, rs2498425, rs2498426, rs2498427, rs2498428, rs2498429, rs2498430, rs2498431, rs2498432, rs2498433, rs2498434, rs2871218, rs2871219, rs2871220, rs3066311, rs3066313, rs3793451, rs3793452, rs3793453, rs3793454, rs3793455, rs3793456, rs3793457, rs3793458, rs3793459, rs3793460, rs3793461, rs3793464, rs3793465, rs3793466, rs3793467, rs3829062, rs3829063, rs3829064, rs3838715, rs4069737, rs4304388, rs4596713, rs4744786, rs4744787, rs4744795, rs4744806, rs4744807, rs4744808, rs4744810, rs4744811, rs4745543, rs4745553, rs4745581, rs4745582, rs4745583, rs4745585, rs6560541, rs6560545, rs6560546, rs6560547, rs6560550, rs6560551, rs7020927, rs7022681, rs7868040, rs7868752, rs7870295, rs7870727, rs7871596, rs7874105, rs7874989, rs7875272, rs7875564, rs7875659, rs7875693, rs7875924, rs9314854, rs9314858, rs9314859, rs9333291, rs9410778, rs9411170, rs9411171, rs9411179, rs9411181, rs9411182, rs9411184, rs9411186, rs9645006, rs9695990, rs9775387, rs10114266, rs10116434, rs10117212, rs10120686, rs10121021, rs7866878, rs7866579, rs7866067, rs7865854, rs7865353, rs7861997, rs7860403, rs7860265, rs7859021, rs7858657, rs7858407, rs7858249, rs7857635, rs7856250, rs7855905, rs7851458, rs7849347, rs7848466, rs7847872, rs7047274, rs7043526, rs7041324, rs7039631, rs7038541, rs7035156, rs7033409, rs7030480, rs7028965, rs7028835, rs7027499, rs7027359, rs7026584, rs7026473, rs7025834, rs7024295, rs4745580, rs4745578, rs4745577, rs10123512, rs10125005, rs10126006, rs10521429, rs10684421, rs10710603, rs10719473, rs10747003, rs10781379, rs10781392, rs10781393, rs10781394, rs10781407, rs10869789, rs10869821, rs10869823, rs10869824, rs10869841, rs10869842, rs10869847, rs11144869, rs11144892, rs11144900, rs11144901, rs11144902, rs11144937, rs11144938, rs11144940, rs11144965, rs11144969, rs11144972, rs11144981, rs11145004, rs11145043, rs11145047, rs11145050, rs11145061, rs11145063, rs11145068, rs11145069, rs11145070, rs11145072, rs11145073, rs11145078, rs11145079, rs11145081, rs11145102, rs11145103, rs11145105, rs11145106, rs11145123, rs11145124, rs11145125, rs11145126, rs11145127, rs11145128, rs11145130, rs11145134, rs11145160, rs11145164, rs11145179, rs11145191, rs11145192, rs11145193, rs11145194, rs11145204, rs11145212, rs11301594, rs11310316, rs11327946, rs11394940, rs11394941, rs11420008, rs11432103, rs11789036, rs11790543, rs11791138, rs11793075, rs11793569, rs11999158, rs12000125, rs12001326, rs12001730, rs12001877, rs12003278, rs12005304, rs12115393, rs12115574, rs12171746, rs12171747, rs12238851, rs12238862, rs12338365, rs12338940, rs12341860, rs12343153, rs12346204, rs12348477, rs12376129, rs12376131, rs12377031, rs12379676, rs12380506, rs12554971, rs12555832, rs12684239, rs13284348, rs13284351, rs13284371, rs13284504, rs13284514, rs13284692, rs13286479, rs13288621, rs13289024, rs13289232, rs13292325, rs13292970, rs13297487, rs13297488, rs13297608, rs13298111, rs13298123, rs13298129, rs13298342, rs13298695, rs17060788, rs17060846, rs17061065, rs17409808, rs17847101, rs17847102, rs28439761, rs28792147, rs34084694, rs34127552, rs34185166, rs34235465, rs34267525, rs34356733, rs34694138, rs34709044, rs34709300, rs34724950, rs34732658, rs34768738, rs34769489, rs34794915, rs34831832, rs34845391, rs34933249, rs34965002, rs35067863, rs35073650, rs35104955, rs35155369, rs35159671, rs35195101, rs35230326, rs35275927, rs35312696, rs35365106, rs35366157, rs35383713, rs35395158, rs35405052, rs35455727, rs35463154, rs35464439, rs35474964, rs35492794, rs35547032, rs35651138, rs35714685, rs35739047, rs35760767, rs35803784, rs35972074, rs36033050, rs36130955, rs36187644, rs41316482, rs55681459, rs55908032, rs55962582, rs56032032, rs56073758, rs56078943, rs56102961, rs56126721, rs56180920, rs56214919, rs56272226, rs56275177, rs56275559, rs56289301, rs56405728, rs56657504, rs56827613, rs56871796, rs56909124, rs56938732, rs56938969, rs56949173, rs57101084, rs57102625, rs57110332, rs57143367, rs57215370, rs57226480, rs57287223, rs57308067, rs57561255, rs57602725, rs57777433, rs57797593, rs57964373, rs58102157, rs58150402, rs58208957, rs58486903, rs58850165, rs59044743, rs59101016, rs59377764, rs59415831, rs59524766, rs59605220, rs59907886, rs59923017, rs59987304, rs60120662, rs60242308, rs60302987, rs60353555, rs60383525, rs60428740, rs60455238, rs60695002, rs60780359, rs61030721, rs61152140, rs61159626, rs61290674, rs61315163, rs61339092, rs61708222, rs61754561, rs62570585, rs62570586, rs62570587, rs62570649, rs62570650, rs62570651, rs62570652, rs62570653, rs63389061, rs66817133, rs67054076, rs67475279, rs67787419, rs71353102, rs71354303, rs71354305, rs71354306, rs71354308, rs71500343, rs71500345, rs71500346, rs71500349, rs71500350, rs71500351, rs71503651, rs71503652, rs71507115, rs72538837, rs72580561, rs72724243, rs72724250, rs72724252, rs72724254, rs72724260, rs72724267, rs73445260, rs73445270, rs73445272, rs73447130, rs73447132, rs73447137, rs73647059, rs73647060, rs73647061, rs73647062, rs73647063, rs73647064, rs73647065, rs73647066, rs73647067, rs73647068, rs73647069, rs73647070, rs73647071, rs73647072, rs74336910, rs74384446, rs74414755, rs74478254, rs74621026, rs74700156, rs74703119, rs74765274, rs74813144, rs74928279, rs75076874, rs75161896, rs75210851, rs75301658, rs75329120, rs75487855, rs75586646, rs75590620, rs75693436, rs75725005, rs75853431, rs75991648, rs76071744, rs76333033, rs76373926, rs76383750, rs76408834, rs76470259, rs76529976, rs76551113, rs76568722, rs76613118, rs76736290, rs76751766, rs76901520, rs76940605, rs76967318, rs77364069, rs77416087, rs77510505, rs77608195, rs77612166, rs77690545, rs77781994, rs77975201, rs78126462, rs78210726, rs78305955, rs78337682, rs78464501, rs78598719, rs78606772, rs78630091, rs78719862, rs78783204, rs78899813, rs78931991, rs78998783, rs79052763, rs79081447, rs79110296, rs79152258, rs79186434, rs79194070, rs79275987, rs79412971, rs79490757, rs79499353, rs79644366, rs79687055, rs79687921, rs79695280, rs79702853, rs79714914, rs79749517, rs79926664, rs80006718, rs80012734, rs80058294, rs104894105, rs104894106, rs104894107, rs104894108, rs111321059, rs111345195, rs111431879, rs111455354, rs111488309, rs111497369, rs111582289, rs111648356, rs111673163, rs111686419, rs111757112, rs111820018, rs111928396, rs111952638, rs112046543, rs112073419, rs112218611, rs112228910, rs112240525, rs112313112, rs112322425, rs112448900, rs112449107, rs112454579, rs112461274, rs112528782, rs112558241, rs112577409, rs112585893, rs112623808, rs112722115, rs112786035, rs112810641, rs112813315, rs112826541, rs112848241, rs112898707, rs113020915, rs113108371, rs113118272, rs113169495, rs113191218, rs113196649, rs113218286, rs113265426, rs113270314, rs113346824, rs113375157, rs113446345, rs113446584, rs113457034, rs113561065, rs113569157, rs113569362, rs113592222, rs113625529, rs113675180, rs113676688, rs113677665, rs113695176, rs113752608, rs113833390, rs113836356, rs113911361, rs113921545, rs113953426, rs114061096, rs114290500, rs114389028, rs114473165, rs114511620, rs114511823, rs114514927, rs114535854, rs114541544, rs114657172, rs114858678, rs114934240, rs115046450, rs115095590, rs115111441, rs115134150, rs115239857, rs115362625, rs115452842, rs115528408, rs116053421, rs116086390, rs116141783, rs116231538, rs116361570, rs116391013, rs116401773, rs116558588, rs116577073, rs116609195, rs116807619, rs116817572, rs116859992, rs116929697, rs116943766, rs116943880, rs116944579, rs117064004, rs117140455, rs117148203, rs117232782, rs117285502, rs117302499, rs117430626, rs117521408, rs117625799, rs117714702, rs117732297, rs117839757, rs117911274, rs117950541, rs118028854, rs118122148, rs137885677, rs137981137, rs137999844, rs138023801, rs138026620, rs138034837, rs138087286, rs138119235, rs138159320, rs138172391, rs138211718, rs138342495, rs138446138, rs138471431, rs138491271, rs138503778, rs138503849, rs138580670, rs138678274, rs138695995, rs138765925, rs138837292, rs138987545, rs139068140, rs139083793, rs139086218, rs139117957, rs139156295, rs139253638, rs139258991, rs139315336, rs139402047, rs139421100, rs139485199, rs139522465, rs139616452, rs139760015, rs139796480, rs139815323, rs139838469, rs139956107, rs139980850, rs140171082, rs140256972, rs140257842, rs140281266, rs140417242, rs140465678, rs140472905, rs140500106, rs140865066, rs140905063, rs140959706, rs140987490, rs141166099, rs141219761, rs141247893, rs141291061, rs141310679, rs141361959, rs141401636, rs141403318, rs141452418, rs141487033, rs141526971, rs141535611, rs141583383, rs141876112, rs141897177, rs141935559, rs141973355, rs141988419, rs142560695, rs142587832, rs142622145, rs142624105, rs142655820, rs142662474, rs142733042, rs142799757, rs142830389, rs142911617, rs143077834, rs143232208, rs143246204, rs143269111, rs143323513, rs143396368, rs143414211, rs143416705, rs143435792, rs143455858, rs143495270, rs143794745, rs143875135, rs144041122, rs144062674, rs144178103, rs144227164, rs144227768, rs144391272, rs144412159, rs144548585, rs144565085, rs144610605, rs144615367, rs144615720, rs144650893, rs144658923, rs144878341, rs144970091, rs144973505, rs144974898, rs145006100, rs145045861, rs145061292, rs145104760, rs145105781, rs145220117, rs145262497, rs145349966, rs145356593, rs145382032, rs145627418, rs145649731, rs145715025, rs145854903, rs145860465, rs146039377, rs144104124, rs143837658, rs143771682, rs143731150, rs143564618, rs143536099, rs143408495, rs143340609, rs142985802, rs142784613, rs142635037, rs142380668, rs142255029, rs142218020, rs142195325, rs142183475, rs142157346, rs142133355, rs142088885, rs141993170, rs141858334, rs141854429, rs141819066, rs141801463, rs141798960, rs141750472, rs141644895, rs140851782, rs140777702, rs140768604, rs140671022, rs140635956, rs140599316, rs140510894, rs139917130, rs139410576, rs138487334, rs138064892, rs146044110, rs146071943, rs146125547, rs146284289, rs146365905, rs146406091, rs146436247, rs146564293, rs146574092, rs146597776, rs146650645, rs146704514, rs146716147, rs146792266, rs146799580, rs146804510, rs146818694, rs146824991, rs146837693, rs146839921, rs146948377, rs146979517, rs146988729, rs146989206, rs146998935, rs147088811, rs147094532, rs147104515, rs147141848, rs147177647, rs147211454, rs147283326, rs147292851, rs147457654, rs147493523, rs147505541, rs147553992, rs147571636, rs147638291, rs147643987, rs147724954, rs147743430, rs147752775, rs147753767, rs147849222, rs147859302, rs147867343, rs147944029, rs147964315, rs148070149, rs148163791, rs148219670, rs148260714, rs148375397, rs148443992, rs148485714, rs148566764, rs148590725, rs148596837, rs148643734, rs148652249, rs148698100, rs148756619, rs148802143, rs148837009, rs148949898, rs148956974, rs148993247, rs149043736, rs149112976, rs149166088, rs149201840, rs149220567, rs149229839, rs149284013, rs149305063, rs149335881, rs149382769, rs149400821, rs149432558, rs149474553, rs149518334, rs149527902, rs149569204, rs149664725, rs149724959, rs149786645, rs149875882, rs149882637, rs149929356, rs150039316, rs150049106, rs150103002, rs150146352, rs150169295, rs150186989, rs150333955, rs150387486, rs150401273, rs150402805, rs150449980, rs150461963, rs150667446, rs150676454, rs150704179, rs150714901, rs150912297, rs150966024, rs150986302, rs151027782, rs151081910, rs151137592, rs151145334, rs151193551, rs151198663, rs151206121, rs151240103, rs151293277, rs180718803, rs180724537, rs180725897, rs180840842, rs180842670, rs180854508, rs180917352, rs181114629, rs181177908, rs181234532, rs181253726, rs181273151, rs181275925, rs181344343, rs181365432, rs181420522, rs181501338, rs181532286, rs181554923, rs181609161, rs181610742, rs181618593, rs181661669, rs181729571, rs181742829, rs181843028, rs181855141, rs181918026, rs182016974, rs182023188, rs182028985, rs182094804, rs182219423, rs182225193, rs182247587, rs182341656, rs182344078, rs182354080, rs182374273, rs182528688, rs182547745, rs182647940, rs182650767, rs182656665, rs182659089, rs182778625, rs182780435, rs182784546, rs182802845, rs182809280, rs182929891, rs182933637, rs182945884, rs182946167, rs183073915, rs183092959, rs183145381, rs183200802, rs183211798, rs183373904, rs183391753, rs183393884, rs183406807, rs183445860, rs183497619, rs183533465, rs183580514, rs183754785, rs183761822, rs183805920, rs183811537, rs183812891, rs183848128, rs183862118, rs183893312, rs184122383, rs184128481, rs184129903, rs184141744, rs184250256, rs184295104, rs184398096, rs184401443, rs184628569, rs184724728, rs184735345, rs184760016, rs184763808, rs184794118, rs184949967, rs184983788, rs185002782, rs185018666, rs185073365, rs185079287, rs185081924, rs185106180, rs185112081, rs185116018, rs185228863, rs185351484, rs185384852, rs185513972, rs185559666, rs185563577, rs185564318, rs185601450, rs185666018, rs185749364, rs185863208, rs185874327, rs185940626, rs186001812, rs186001940, rs186006836, rs186035010, rs186080732, rs186111259, rs186121774, rs186150639, rs186151046, rs186154675, rs186174678, rs186258647, rs186284045, rs186297986, rs186391424, rs186395001, rs186514163, rs186580424, rs186675863, rs186736142, rs186756808, rs186762303, rs186770784, rs186785888, rs186868070, rs186895823, rs186952639, rs187068895, rs187176770, rs187209356, rs187213307, rs187221946, rs187245347, rs187334356, rs187347902, rs187355557, rs187376244, rs187428209, rs187483381, rs187491431, rs187492649, rs187645943, rs187706841, rs187766971, rs187836959, rs187851695, rs187957568, rs187972949, rs187981328, rs187981647, rs187987913, rs187990542, rs188000318, rs188003440, rs188068471, rs188138273, rs188272571, rs188279964, rs188329483, rs188391059, rs188407567, rs188427449, rs188626252, rs188633215, rs188633706, rs188639732, rs188642891, rs188793209, rs188860092, rs188899351, rs188913810, rs188915860, rs189061831, rs189074418, rs189137145, rs189183435, rs189253680, rs189264349, rs189278002, rs189293764, rs189356250, rs189408822, rs189558054, rs189578579, rs189643573, rs189654961, rs189667925, rs189727700, rs189826057, rs189868401, rs189887697, rs189899104, rs189908213, rs189937288, rs189961904, rs190043772, rs190108568, rs190125024, rs190176506, rs190176540, rs190178615, rs190315513, rs190338865, rs190346927, rs190358333, rs190376474, rs190440685, rs190627423, rs190812576, rs190829555, rs190835508, rs190837595, rs190844766, rs190859346, rs190949580, rs190956441, rs190970016, rs191087783, rs191129842, rs191149024, rs191179332, rs191200493, rs191330402, rs191387735, rs191395561, rs191455272, rs191472730, rs191591474, rs191593935, rs191604465, rs191650252, rs191661356, rs191747835, rs191960522, rs191963668, rs192020247, rs192077498, rs192126341, rs192129932, rs192132322, rs192205557, rs192217050, rs192261472, rs192332165, rs192349480, rs192365477, rs192369635, rs192442203, rs192451134, rs192507473, rs192514228, rs192576719, rs192623890, rs192735426, rs192831377, rs192852063, rs192866002, rs192927751, rs193039039, rs193047484, rs193057504, rs193194975, rs193233550, rs193239271, rs199530539, rs199646962, rs199653475, rs199749133, rs199795784, rs199846335, rs199872351, rs199920284, rs199926447, rs199965660, rs200002860, rs200139767, rs200173130, rs200175861, rs200188677, rs200232902, rs200367487, rs200393001, rs200415008, rs200462660, rs200482881, rs200511919, rs200532520, rs200543562, rs200662493, rs200696343, rs200713454, rs200760810, rs200801809, rs200821946, rs200881094, rs200894709, rs200900853, rs200913963, rs200917296, rs200968334, rs200982562, rs201005872, rs201044395, rs201069085, rs201151484, rs201174065, rs201306556, rs201416604, rs201425763, rs201483490, rs201496405, rs201529320, rs201564965, rs201602277, rs201663824, rs201691311, rs201746880, rs201811413, rs201819464, rs201825172, rs201863916, rs201884500, rs201893192, rs201897501, rs201898657, rs201904147, rs201908335, rs201971361, rs201978351, rs201988758, rs202010287, rs202011522, rs202031471, rs202038201, rs202080760, rs267602259, rs367743241, rs367857662, rs367866592, rs367869318, rs367878111, rs367940220, rs367974156, rs368044395, rs368172212, rs368297728, rs368376761, rs368384282, rs368475716, rs368482972, rs368537566, rs368614175, rs368626116, rs368738876, rs369369091, rs369558568, rs369586554, rs369774109, rs369885697, rs369886813, rs369909648, rs369921239, rs370004570, rs370043348, rs370051686, rs370094900, rs370197247, rs370206375, rs370447117, rs370579006, rs370655328, rs370853196, rs370860173, rs370878136, rs370961065, rs370984034, rs370990714, rs371078773, rs371114988, rs371117763, rs371159899, rs371179094, rs371188913, rs371256127, rs371343550, rs371640567, rs369352212, rs369291394, rs369226651, rs369206017, rs369200526, rs369184667, rs369007939, rs369002228, rs368943513, rs368826214, rs368805006, rs368768079, rs368723703, rs368476956, rs371658388, rs371751976, rs371819863, rs371861796, rs371939673, rs371940589, rs371946658, rs371987766, rs372043754, rs372057538, rs372226897, rs372248201, rs372289645, rs372408983, rs372429189, rs372471079, rs372578434, rs372604803, rs372670824, rs372692496, rs372701788, rs372710793, rs372744040, rs372755395, rs372775073, rs372789004, rs372796403, rs372821941, rs372905498, rs372927277, rs372947132, rs373014645, rs373138697, rs373149287, rs373186279, rs373383077, rs373395409, rs373425425, rs373473532, rs373490410, rs373494668, rs373519193, rs373578238, rs373600092, rs373668521, rs373672305, rs373843077, rs373846820, rs373852796, rs373864593, rs373873733, rs373916791, rs373971864, rs373988153, rs374022699, rs374156472, rs374187627, rs374234870, rs374258421, rs374263152, rs374267887, rs374278258, rs374278433, rs374295966, rs374359316, rs374359984, rs374371388, rs374387253, rs374411489, rs374447272, rs374578407, rs374581672, rs374583986, rs374661295, rs374668858, rs374700296, rs374835348, rs374847776, rs374876788, rs374964384, rs375032232, rs375095858, rs375162393, rs375215705, rs375359929, rs375500744, rs375501362, rs375519394, rs375553565, rs375573220, rs375606001, rs375795061, rs375940598, rs375947143, rs376157942, rs376163764, rs376339868, rs376425450, rs376500042, rs376625936, rs376651219, rs376738967, rs376824535, rs376897759, rs377020703, rs377054064, rs377126197, rs377126891, rs377183209, rs377191388, rs377244551, rs377254294, rs377312254, rs377350163, rs377573092, rs377603187, rs377613528, rs377625209, rs377632126, rs377725001, rs377735578, rs377762602, rs386361262, rs386414980, rs386414981, rs386414982, rs386734760, rs398010802, rs398010803, rs398068616, rs398113497, rs527247667, rs527255339, rs527262091, rs527287577, rs527289277, rs527325266, rs527334193, rs527370523, rs527381060, rs527424013, rs527435648, rs527521799, rs527568755, rs527595350, rs527613682, rs527687242, rs527775906, rs527777620, rs527814760, rs527817446, rs527919047, rs527924412, rs527954089, rs528004415, rs528023316, rs528061059, rs528136450, rs528166715, rs528219713, rs528270465, rs528315477, rs528336113, rs528339107, rs528345140, rs528372208, rs528388277, rs528409501, rs528443899, rs528457311, rs528532999, rs528626546, rs528649721, rs528662486, rs528732811, rs528760446, rs528769415, rs528782201, rs528806116, rs528855150, rs528867343, rs528935765, rs528972646, rs528995704, rs529117554, rs529121579, rs529126514, rs529161286, rs529175496, rs529180817, rs529209812, rs529317691, rs529328411, rs529506847, rs529513580, rs529576956, rs529587391, rs529602339, rs529622891, rs529755661, rs529761386, rs529810877, rs529813990, rs529819843, rs529904234, rs529911504, rs529977725, rs529979967, rs529990371, rs530011520, rs530032798, rs530046730, rs530070988, rs530112108, rs530122515, rs530136145, rs530185678, rs530319968, rs530462965, rs530503975, rs530504064, rs530564724, rs530590398, rs530611378, rs530625591, rs530765661, rs530784319, rs530794227, rs530802574, rs530803786, rs530834138, rs530843434, rs530922580, rs530943238, rs530983444, rs531020453, rs531080693, rs531144244, rs531277847, rs531328680, rs531364065, rs531449750, rs531477846, rs531497769, rs531694871, rs531874171, rs531893442, rs532013726, rs532022063, rs532025093, rs532035664, rs532052178, rs532086919, rs532087875, rs532121972, rs532168017, rs532203331, rs532256191, rs532288408, rs532344572, rs532384045, rs532407080, rs532408055, rs532503149, rs532551843, rs532658302, rs532692709, rs532720265, rs532730659, rs532796689, rs532830645, rs532918032, rs532921602, rs533003127, rs533025860, rs533055077, rs533058886, rs533060558, rs533097971, rs533224981, rs533288035, rs533457862, rs533494714, rs533533018, rs533550829, rs533553259, rs533617809, rs533651277, rs533683264, rs533685331, rs533751112, rs533787738, rs533944219, rs533947511, rs533955158, rs533971803, rs534021420, rs534151741, rs534622561, rs534771399, rs534824699, rs534842570, rs534852544, rs534853635, rs534891550, rs534903139, rs534906378, rs534914330, rs535070921, rs535085527, rs535206010, rs535247242, rs535269548, rs535285154, rs535349636, rs535398320, rs535404223, rs535457119, rs535497390, rs535529497, rs535536634, rs535541342, rs535641990, rs535643828, rs535649816, rs535657333, rs535682802, rs535697375, rs535783929, rs535840469, rs535864033, rs535877226, rs535960912, rs536114810, rs536118023, rs536120131, rs536130997, rs536248913, rs536319796, rs536322979, rs536368208, rs536381900, rs536403760, rs536441331, rs536464932, rs536481367, rs536617227, rs536641487, rs536676174, rs536688051, rs536702490, rs536734039, rs536734040, rs536756665, rs536762274, rs536839594, rs536918708, rs536982720, rs537094875, rs537164121, rs537354338, rs537442310, rs537663047, rs537683721, rs537684376, rs537688073, rs537719249, rs537745188, rs537747518, rs537785443, rs537883898, rs537896302, rs537950861, rs537954187, rs537989397, rs538025474, rs538062937, rs538176349, rs538233201, rs538280221, rs538311706, rs538326728, rs538374093, rs538447370, rs538492603, rs538522022, rs538524974, rs538593157, rs538646262, rs538656909, rs538708334, rs538740894, rs538807494, rs538824953, rs538987582, rs539029744, rs539042113, rs539089856, rs539265962, rs539280938, rs539308577, rs539327269, rs539366889, rs539368977, rs539453396, rs539540802, rs539556337, rs539573389, rs539574318, rs539619929, rs539688619, rs539711232, rs539766268, rs539770422, rs539816192, rs539903799, rs539957550, rs540016883, rs540018243, rs540020290, rs540077178, rs540079847, rs540081916, rs540118382, rs540163645, rs540191916, rs540231506, rs540237269, rs540305081, rs540322885, rs540340292, rs540358009, rs540385883, rs540404335, rs540491579, rs540553864, rs540590079, rs540610687, rs540627159, rs540630024, rs540693809, rs540739863, rs540785277, rs540919278, rs540946238, rs540946425, rs540969446, rs541004149, rs541082722, rs541113499, rs541116796, rs541155939, rs541167226, rs541223608, rs541263315, rs541298199, rs541332672, rs541336843, rs541370565, rs541395357, rs541494830, rs541520785, rs541529013, rs541644246, rs541665451, rs541703368, rs541778117, rs541829363, rs541866167, rs541869498, rs541877776, rs541905701, rs541915957, rs541941986, rs541981554, rs542052994, rs542070478, rs542079111, rs542089320, rs542266360, rs542296100, rs542328907, rs542370773, rs542449121, rs542487902, rs542650633, rs542718257, rs542738140, rs542765715, rs542786671, rs542802936, rs542910582, rs543076270, rs543118740, rs543138310, rs543155771, rs543163058, rs543178023, rs543200298, rs543205804, rs543209710, rs543227625, rs543272954, rs543310211, rs543310647, rs543321921, rs543490459, rs543535406, rs543710417, rs543763936, rs543840795, rs543899294, rs543957399, rs543987930, rs543993919, rs544093183, rs544129099, rs544191450, rs544259697, rs544335448, rs544381688, rs544408222, rs544535595, rs544600854, rs544610058, rs544620375, rs544660354, rs544685523, rs544717151, rs544744228, rs544792197, rs544807278, rs544811337, rs544837830, rs544866196, rs544904207, rs545018122, rs545030160, rs545063628, rs545068629, rs545123370, rs545142762, rs545268662, rs545289105, rs545445918, rs545462786, rs545482993, rs545529155, rs545544876, rs545572761, rs545580072, rs545645425, rs545665595, rs545675155, rs545805739, rs545820587, rs546063731, rs546083442, rs546206866, rs546218928, rs546272808, rs546305842, rs546386988, rs546428624, rs546600261, rs546654612, rs546684014, rs546703453, rs546840967, rs546872015, rs546878669, rs546909054, rs547027032, rs547122931, rs547220152, rs547232758, rs547257969, rs547270778, rs547296845, rs547340123, rs547355027, rs547380421, rs547391946, rs547403438, rs547423309, rs547477114, rs547484083, rs547488489, rs547554223, rs547579509, rs547583750, rs547708529, rs547734274, rs547745259, rs547796605, rs547822622, rs547840411, rs547849272, rs547869669, rs547893170, rs547895035, rs547929936, rs548158670, rs548189845, rs548190901, rs548349099, rs548372260, rs548407157, rs548412461, rs548423831, rs548445521, rs548535433, rs548538242, rs548650662, rs548678937, rs548690504, rs548802677, rs548887072, rs548893635, rs548910156, rs548941856, rs548952952, rs549014811, rs549037457, rs549082993, rs549117168, rs549168108, rs549183797, rs549196910, rs549266774, rs549292346, rs549300607, rs549388482, rs549463249, rs549468324, rs549497725, rs549543793, rs549602126, rs549603992, rs549642616, rs549701672, rs549714780, rs549819630, rs549834673, rs549856204, rs549858515, rs549875990, rs549912845, rs549919726, rs549922367, rs549923791, rs549984946, rs549991367, rs550044569, rs550096130, rs550132949, rs550180414, rs550182249, rs550186155, rs550238385, rs550289991, rs550331484, rs550414471, rs550449153, rs550496570, rs550627495, rs550661442, rs550664246, rs550734061, rs550764893, rs550805668, rs550860170, rs550879260, rs550896572, rs550898610, rs550921629, rs550942565, rs550946139, rs550964366, rs550983274, rs550988602, rs551123696, rs551207990, rs551212290, rs551265126, rs551358222, rs551390452, rs551465796, rs551479564, rs551503234, rs551507321, rs551511302, rs551519207, rs551532566, rs551560898, rs551580438, rs551624325, rs551637575, rs551668623, rs551745577, rs551750089, rs551798055, rs551827466, rs551931592, rs551991546, rs552064317, rs552167626, rs552217323, rs552217953, rs552240680, rs552275550, rs552288509, rs552379839, rs552396629, rs552453259, rs552453290, rs552538418, rs552585261, rs552588104, rs552620561, rs552689170, rs552768536, rs552805325, rs552932594, rs553010018, rs553015657, rs553154609, rs553175484, rs553187401, rs553194369, rs553224180, rs553297659, rs553333072, rs553338069, rs553369208, rs553376668, rs553392464, rs553433126, rs553486348, rs553500875, rs553565003, rs553678262, rs553693318, rs553752396, rs553770867, rs553807888, rs553825049, rs553887673, rs553942694, rs554036920, rs554067106, rs554073561, rs554082615, rs554107024, rs554135158, rs554145793, rs554171683, rs554201726, rs554210372, rs554222452, rs554224688, rs554252722, rs554294578, rs554350828, rs554369374, rs554396864, rs554402308, rs554457838, rs554477441, rs554512064, rs554514050, rs554646816, rs554650785, rs554690587, rs554746113, rs554767296, rs554893829, rs554923881, rs554931067, rs554953238, rs555061379, rs555117607, rs555149550, rs555152684, rs555281927, rs555286203, rs555289797, rs555314316, rs555323842, rs555415525, rs555449320, rs555538162, rs555554397, rs555673369, rs555679882, rs555704366, rs555709887, rs555709942, rs555717633, rs555802027, rs555806229, rs555900267, rs555937331, rs555942247, rs555987834, rs556018356, rs556052797, rs556078632, rs556102038, rs556125293, rs556165918, rs556175198, rs556222145, rs556235178, rs556258290, rs556289262, rs556323737, rs556400761, rs556435403, rs556584116, rs556598863, rs556602958, rs556609553, rs556705379, rs556755578, rs556826580, rs556863382, rs556870034, rs556929810, rs556969666, rs556997772, rs557005957, rs557061894, rs557134416, rs557181580, rs557218395, rs557220225, rs557221555, rs557258076, rs557292216, rs557402105, rs557427697, rs557466633, rs557478711, rs557538910, rs557543600, rs557603458, rs557658002, rs557707566, rs557745375, rs557800600, rs557830508, rs557837336, rs557862761, rs557885334, rs557932661, rs558051650, rs558059626, rs558102233, rs558158588, rs558166006, rs558227874, rs558354331, rs558379641, rs558406909, rs558487768, rs558513400, rs558516708, rs558580498, rs558760929, rs558812717, rs558884984, rs558921907, rs558958724, rs558965282, rs558968178, rs559163625, rs559174221, rs559181286, rs559215648, rs559281758, rs559283143, rs559305385, rs559317356, rs559347348, rs559418532, rs559426389, rs559453628, rs559498611, rs559524325, rs559529269, rs559550553, rs559666608, rs559676889, rs559680500, rs559684143, rs559880628, rs559884502, rs559890101, rs559890663, rs559891429, rs560231843, rs560240580, rs560247985, rs560268746, rs560414482, rs560429810, rs560535512, rs560544402, rs560556732, rs560613065, rs560664080, rs560730344, rs560750270, rs560766697, rs561002167, rs561007098, rs561110767, rs561144716, rs561147581, rs561156127, rs561181459, rs561269277, rs561285473, rs561310622, rs561315737, rs561395132, rs561466570, rs561516241, rs561605018, rs561646722, rs561683226, rs561687559, rs561738373, rs561745482, rs561784055, rs561829158, rs561877982, rs561879829, rs561990408, rs562008492, rs562029294, rs562029503, rs562045597, rs562167058, rs562179663, rs562250794, rs562316107, rs562366245, rs562442756, rs562467159, rs562565128, rs562664017, rs562845346, rs562909570, rs562921920, rs563027152, rs563048897, rs563063687, rs563083614, rs563145833, rs563163214, rs563185824, rs563200251, rs563211322, rs563239532, rs563253685, rs563298308, rs563401496, rs563433826, rs563437667, rs563526419, rs563558223, rs563562170, rs563595304, rs563598648, rs563601612, rs563601679, rs563691776, rs563831468, rs563872382, rs563892999, rs564022170, rs564029830, rs564080802, rs564082656, rs564128165, rs564133341, rs564137122, rs564144260, rs564173975, rs564195355, rs564257369, rs564265155, rs564268026, rs564274782, rs564306711, rs564358121, rs564395119, rs564395274, rs564396317, rs564436152, rs564446779, rs564508892, rs564544706, rs564568261, rs564569521, rs564603326, rs564611637, rs564637905, rs564704828, rs564759689, rs564787559, rs564818704, rs564834433, rs564839499, rs564852038, rs564865605, rs564938446, rs564950156, rs564986677, rs565054764, rs565055255, rs565109168, rs565157015, rs565222974, rs565249599, rs565265168, rs565294240, rs565301663, rs565338557, rs565437560, rs565448724, rs565479769, rs565499074, rs565503427, rs565525124, rs565563867, rs565598991, rs565670886, rs565692050, rs565721099, rs565827506, rs565838421, rs565989923, rs566018871, rs566042664, rs566055404, rs566191092, rs566241445, rs566307659, rs566327820, rs566389251, rs566412892, rs566436025, rs566449701, rs566471083, rs566568166, rs566592710, rs566666424, rs566844457, rs566954449, rs567002869, rs567011962, rs567021608, rs567045572, rs567068809, rs567104262, rs567173911, rs567212428, rs567246951, rs567298189, rs567364030, rs567380969, rs567397212, rs567401064, rs567452359, rs567533926, rs567546733, rs567645657, rs567706571, rs567724104, rs567749798, rs567786158, rs567861737, rs567976142, rs568016884, rs568068199, rs568114524, rs568184552, rs568191126, rs568207638, rs568222006, rs568252094, rs568327835, rs568402981, rs568459124, rs568467675, rs568592677, rs568658206, rs568661908, rs568673795, rs568686959, rs568758723, rs568818014, rs568837035, rs568948004, rs568995901, rs569202320, rs569206072, rs569220832, rs569245232, rs569388825, rs569426914, rs569435256, rs569446074, rs569452970, rs569485059, rs569506235, rs569515511, rs569552635, rs569597276, rs569676980, rs569813875, rs569827547, rs569838741, rs569893604, rs569894454, rs569941203, rs569941506, rs569961039, rs570000437, rs570036450, rs570147887, rs570168406, rs570196790, rs570261492, rs570269027, rs570284596, rs570401708, rs570430496, rs570521734, rs570548498, rs570581593, rs570607224, rs570630585, rs570732305, rs570755950, rs570768659, rs570783167, rs570792069, rs570867813, rs570958540, rs570984118, rs571014160, rs571046012, rs571046722, rs571068698, rs571077230, rs571094933, rs571117488, rs571129055, rs571163161, rs571215919, rs571231514, rs571371692, rs571398446, rs571476416, rs571496840, rs571508634, rs571546328, rs571572380, rs571670495, rs571672975, rs571675417, rs571690185, rs571697351, rs571788167, rs571817699, rs571819192, rs571891336, rs571949567, rs572002477, rs572009607, rs572035816, rs572039496, rs572039569, rs572084867, rs572088109, rs572160076, rs572287465, rs572288477, rs572301673, rs572324212, rs572355668, rs572380967, rs572415842, rs572420571, rs572459794, rs572525789, rs572597060, rs572746726, rs572751966, rs572763508, rs572818928, rs572830075, rs572879461, rs572916196, rs572917170, rs572968489, rs573040351, rs573047787, rs573071691, rs573084529, rs573113323, rs573124780, rs573170325, rs573221748, rs573271742, rs573282462, rs573322613, rs573344152, rs573359740, rs573479031, rs573517789, rs573522088, rs573538996, rs573543677, rs573570938, rs573585910, rs573590186, rs573611653, rs573660463, rs573670430, rs573759998, rs573808388, rs573936535, rs573950940, rs573959518, rs573966650, rs573982848, rs574145979, rs574156799, rs574168548, rs574239420, rs574240706, rs574250383, rs574250646, rs574276300, rs574316873, rs574328696, rs574380319, rs574407381, rs574461694, rs574471677, rs574534373, rs574593066, rs574601589, rs574613747, rs574694794, rs574703184, rs574781106, rs574800040, rs574818743, rs574879885, rs574888268, rs574920056, rs575039754, rs575113738, rs575143823, rs575214353, rs575323949, rs575342440, rs575357118, rs575378154, rs575394221, rs575431456, rs575454239, rs575493752, rs575518983, rs575570199, rs575571595, rs575617173, rs575697397, rs575756324, rs575760503, rs575773756, rs575842589, rs575930243, rs575964124, rs576009249, rs576059316, rs576131689, rs576134509, rs576276623, rs576314797, rs576320282, rs576349922, rs576423115, rs576438866, rs576458206, rs576530952, rs576560866, rs576577609, rs576594434, rs576653187, rs576687751, rs576761640, rs576852565, rs576919040, rs576933597, rs577014185, rs577058186, rs577065596, rs577112663, rs577134591, rs577146696, rs577147048, rs577150064, rs577156397, rs577210412, rs577269042, rs577323096, rs577326014, rs577340827, rs577353109, rs577409632, rs577496547, rs577524070, rs577538151, rs577549236, rs577662010, rs577787834, rs577812435, rs577880779, rs577976367, rs577990776, rs577993089, rs578066973, rs578092324, rs578132113, rs578142070, rs578225076, rs745316809, rs745329904, rs745413584, rs745432753, rs745457952, rs745515888, rs745517860, rs745536380, rs745547924, rs745547964, rs745595058, rs745678308, rs745778189, rs745811387, rs745831074, rs745889823, rs745900347, rs746058538, rs746082216, rs746107137, rs746118982, rs746142245, rs746178772, rs746185269, rs746194844, rs746293087, rs746397744, rs746404242, rs746409929, rs746464292, rs746465531, rs746482894, rs746484178, rs746636178, rs746661906, rs746683617, rs746688324, rs746694402, rs746766848, rs746848900, rs746871913, rs746899436, rs746940941, rs746959408, rs746961433, rs747053499, rs747160627, rs747181537, rs747242457, rs747283339, rs747297688, rs747375804, rs747414724, rs747507255, rs747546778, rs747560638, rs747597972, rs747663751, rs747791777, rs747818273, rs747819947, rs747833464, rs747863528, rs747897246, rs747928085, rs748030265, rs748115135, rs748181801, rs748194094, rs748223169, rs748228573, rs748301131, rs748338717, rs748387283, rs748394966, rs748529752, rs748655031, rs748664293, rs748732246, rs748873039, rs748916855, rs748931196, rs748954797, rs748955021, rs748978397, rs749228688, rs749233516, rs749370801, rs749381013, rs749455814, rs749495089, rs749538375, rs749552100, rs749771624, rs749780215, rs749789086, rs749866327, rs749944693, rs750001425, rs750021282, rs750025330, rs750045899, rs750078672, rs750131585, rs750134910, rs750185140, rs750189874, rs750274023, rs750290788, rs750317657, rs750362266, rs750374949, rs750399865, rs750534702, rs750601138, rs750633153, rs750785722, rs750849535, rs750851970, rs750908951, rs750918335, rs750922004, rs750947571, rs751055122, rs751126091, rs751170542, rs751174770, rs751187056, rs751188649, rs751237760, rs751285630, rs751380725, rs751443934, rs751515519, rs751750956, rs751779967, rs751841462, rs751905776, rs751980766, rs752088690, rs752095986, rs752134126, rs752207437, rs752243015, rs752333345, rs752489512, rs752505312, rs752551764, rs752604911, rs752644897, rs752706616, rs752891523, rs752942907, rs752946708, rs752951070, rs752984836, rs752999811, rs753059607, rs753130226, rs753135380, rs753161284, rs753166772, rs753251360, rs753268974, rs753338138, rs753376546, rs753424889, rs753449624, rs753476133, rs753526987, rs753609136, rs753636701, rs753639569, rs753646932, rs753754474, rs753810872, rs753830529, rs754000838, rs754011132, rs754034431, rs754040145, rs754061837, rs754145222, rs754315544, rs754320731, rs754375060, rs754393818, rs754401753, rs754412357, rs754501858, rs754510799, rs754523390, rs754608490, rs754746888, rs754793570, rs754846862, rs754909534, rs754970132, rs755109124, rs755114739, rs755269445, rs755287106, rs755298863, rs755312975, rs755333075, rs755338528, rs755412417, rs755563750, rs755587126, rs755618365, rs755651741, rs755663313, rs755671218, rs755732400, rs755773638, rs755778259, rs755789461, rs755809102, rs755842538, rs756095302, rs756100481, rs756106388, rs756140768, rs756162462, rs756173478, rs756215781, rs756261701, rs756266925, rs756338195, rs756491594, rs756512739, rs756655062, rs756677045, rs756699587, rs756771078, rs756793173, rs756843121, rs756875180, rs756913934, rs756957603, rs756983788, rs756993304, rs757016554, rs757035526, rs757037429, rs757195051, rs757211493, rs757256914, rs757321331, rs757388721, rs757420512, rs757653156, rs757692572, rs757847415, rs758092073, rs758141230, rs758146250, rs758183326, rs758336176, rs758410528, rs758438250, rs758447440, rs758627675, rs758673064, rs758677615, rs758679929, rs758737478, rs758767026, rs758799482, rs758950764, rs758967474, rs759040045, rs759045543, rs759056527, rs759106727, rs759128041, rs759132843, rs759241853, rs759250467, rs759287478, rs759307044, rs759327643, rs759355251, rs759441343, rs759856741, rs759891984, rs760020074, rs760038577, rs760077354, rs760115124, rs760238287, rs760245159, rs760313816, rs760316594, rs760340650, rs760407791, rs760416368, rs760472710, rs760499872, rs760526706, rs760590880, rs760722797, rs760758521, rs760849088, rs760858976, rs760929807, rs760955521, rs760965156, rs760965862, rs761016970, rs761042672, rs761060655, rs761070483, rs761092024, rs761158607, rs761170109, rs761232462, rs761236678, rs759986147, rs759847092, rs759812181, rs759793549, rs759765061, rs759716244, rs759686954, rs759583238, rs759582953, rs759578074, rs759528534, rs759461887, rs759455303, rs758058874, rs757987411, rs757985418, rs757855837, rs761242340, rs761293792, rs761430705, rs761444170, rs761446772, rs761476110, rs761493719, rs761546241, rs761597183, rs761663231, rs761716704, rs761724785, rs761810393, rs761860083, rs761909026, rs761999773, rs762038510, rs762043498, rs762071027, rs762092438, rs762102142, rs762192643, rs762352479, rs762361237, rs762374877, rs762423115, rs762462088, rs762522892, rs762569043, rs762576904, rs762595005, rs762731436, rs762782421, rs762790190, rs762834748, rs762887131, rs762949523, rs762974415, rs762990650, rs763007223, rs763027842, rs763154217, rs763240107, rs763251375, rs763332748, rs763368025, rs763392205, rs763405256, rs763424076, rs763458454, rs763478658, rs763516609, rs763573517, rs763598943, rs763682148, rs763686361, rs763720330, rs763799314, rs763805125, rs763829493, rs763880866, rs763884009, rs763949306, rs763950166, rs763967317, rs764053164, rs764121977, rs764150671, rs764183510, rs764211878, rs764252512, rs764254307, rs764309306, rs764352477, rs764398463, rs764442167, rs764452894, rs764474325, rs764480721, rs764540542, rs764541033, rs764714873, rs764728893, rs764854730, rs764946585, rs764987705, rs765041538, rs765077588, rs765103806, rs765104278, rs765250715, rs765254518, rs765292167, rs765326819, rs765327959, rs765385467, rs765428828, rs765443063, rs765535884, rs765565268, rs765591364, rs765595341, rs765624130, rs765627835, rs765798124, rs765949363, rs765980325, rs766013384, rs766086086, rs766098970, rs766108031, rs766182110, rs766185043, rs766205564, rs766248658, rs766282859, rs766351329, rs766429135, rs766449339, rs766472272, rs766494247, rs766594368, rs766667087, rs766673048, rs766696067, rs766709547, rs766735156, rs766753015, rs766807869, rs766811051, rs766868487, rs766907810, rs766911652, rs766913579, rs766917058, rs767019606, rs767074416, rs767098170, rs767110855, rs767135118, rs767209869, rs767221228, rs767282028, rs767311143, rs767337081, rs767408126, rs767444075, rs767594211, rs767684144, rs767688998, rs767712381, rs767747274, rs767763971, rs767805270, rs767821167, rs767895442, rs767921269, rs767936812, rs767955696, rs768007005, rs768141633, rs768211884, rs768234696, rs768236204, rs768249441, rs768258705, rs768276171, rs768302281, rs768308746, rs768315920, rs768383346, rs768453636, rs768521098, rs768528021, rs768545612, rs768567679, rs768682148, rs768698102, rs768767571, rs768774261, rs768798165, rs768854337, rs768870216, rs768922208, rs769111363, rs769221893, rs769263357, rs769332608, rs769369486, rs769374256, rs769377072, rs769419324, rs769495410, rs769506907, rs769666460, rs769791923, rs769814681, rs769842953, rs769916554, rs769951615, rs769983356, rs770065256, rs770136809, rs770174890, rs770297831, rs770301407, rs770331392, rs770461831, rs770469110, rs770484040, rs770547062, rs770552483, rs770615540, rs770621146, rs770662527, rs770717563, rs770749218, rs770797393, rs770814725, rs770820187, rs772851285, rs772862580, rs772944947, rs772969571, rs773140020, rs773141179, rs773224517, rs773248460, rs773334153, rs773335291, rs773384438, rs773395588, rs773400184, rs773448415, rs773491164, rs773504655, rs773510858, rs773591108, rs773622110, rs773672471, rs773674426, rs773726261, rs773740446, rs773777893, rs773784116, rs773789443, rs773811006, rs773870140, rs773937838, rs774009421, rs774061606, rs774063213, rs774161001, rs774247851, rs774294743, rs774296834, rs774334226, rs774352947, rs774470069, rs774482038, rs774552998, rs774575889, rs774586012, rs774642391, rs774643033, rs774709233, rs774762045, rs774793728, rs774818917, rs774839688, rs774965614, rs775037912, rs775084721, rs775093187, rs775108471, rs775109062, rs775124025, rs775125985, rs775175487, rs775198773, rs775207232, rs775245346, rs775247170, rs775362003, rs775411092, rs774197299, rs774126196, rs773387329, rs772838646, rs772811260, rs772792033, rs772778611, rs772657240, rs772534557, rs772459922, rs772399509, rs772385458, rs772324471, rs772274838, rs772225763, rs772220865, rs772192693, rs772158520, rs772115386, rs772114366, rs772109541, rs771989365, rs771977006, rs771963647, rs771917961, rs771845909, rs771841331, rs771772248, rs771587107, rs771582496, rs771549096, rs771521962, rs771376781, rs771334233, rs771309291, rs771300774, rs771198338, rs771189323, rs770852732, rs770833066, rs770013261, rs769684401, rs769496727, rs769403578, rs775422930, rs775491351, rs775570821, rs775586060, rs775627319, rs775651157, rs775700480, rs775805998, rs775811038, rs775909929, rs776068810, rs776069419, rs776162050, rs776182760, rs776258801, rs776293634, rs776327698, rs776349476, rs776381343, rs776411838, rs776486323, rs776547476, rs776670422, rs776675663, rs776742257, rs776783015, rs776791338, rs776815324, rs776819110, rs776860998, rs776911647, rs776912990, rs776953881, rs776958080, rs777010211, rs777139953, rs777189440, rs777195182, rs777197335, rs777206398, rs777268224, rs777309330, rs777329360, rs777354411, rs777356002, rs777420129, rs777437973, rs777575699, rs777584849, rs777612392, rs777641173, rs777742220, rs777802297, rs777808073, rs777828114, rs777926714, rs777951879, rs778046313, rs778049381, rs778131313, rs778190061, rs778271999, rs778294133, rs778328348, rs778329662, rs778330269, rs778386401, rs778421871, rs778452780, rs778471518, rs778475864, rs778553167, rs778569361, rs778620538, rs778674959, rs778713583, rs778747720, rs778844235, rs778855294, rs778936475, rs778998517, rs779117235, rs779118774, rs779235355, rs779407412, rs779433953, rs779438703, rs779523762, rs779535518, rs779587953, rs779796383, rs779832932, rs779869090, rs779939985, rs779973443, rs779997028, rs780002761, rs780057588, rs780099351, rs780103828, rs780165577, rs780197298, rs780347607, rs780362055, rs780387020, rs780443975, rs780445803, rs780465562, rs780537650, rs780563284, rs780647613, rs780650361, rs780653185, rs780679409, rs780718943, rs780720645, rs780732530, rs780745566, rs780779362, rs780817833, rs780938645, rs780954419, rs781074030, rs781122008, rs781124063, rs781145998, rs781147870, rs781204747, rs781349561, rs781375252, rs781434584, rs781475090, rs781500913, rs781513478, rs781519769, rs781556528, rs781583462, rs781606112, rs781693019, VAR_002428, VAR_002429, VAR_002430, VAR_002431, VAR_008139, VAR_008140, VAR_016065, and VAR_016066.

[0423] In one example, the guide RNA used in the present disclosure may comprise at least one 20 nucleotide (nt) target nucleic acid sequence listed in Table 5. Provided in Table 5 are the gene symbol and the sequence identifier of the gene (Gene SEQ ID NO), the gene sequence including 1-5 kilobase pairs upstream and/or downstream of the target gene (Extended Gene SEQ ID NO), and the 20 nt target nucleic acid sequence (20 nt Target Sequence SEQ ID NO). In the sequence listing the respective target gene, the strand for targeting the gene (noted by a (+) strand or (−) strand in the sequence listing), the associated PAM type and the PAM sequence are described for each of the 20 nt target nucleic acid sequences (SEQ ID NOs: 5305-37514 and 37549). It is understood in the art that the spacer sequence, where “T” is “U,” may be an RNA sequence corresponding to the 20 nt sequences listed in Table 5.

TABLE 5
Nucleic Acid Sequences

| | Gene SEQ | Extended Gene | 20 nt Target Sequence |
|---|---|---|---|
| Gene Symbol | ID NO | SEQ ID NO | SEQ ID NO |
| FXN | 5303 | 5304 | 5305-37514 and 37549 |

[0424] In one example, the guide RNA used in the present disclosure may comprise at least one spacer sequence that, where “T” is “U”, may be an RNA sequence corresponding to a 20 nucleotide (nt) target sequence such as, but not limited to, any of SEQ ID NOs: 5305-37514 and 37549.

[0425] In one example, the guide RNA used in the present disclosure may comprise at least one spacer sequence which, where “T” is “U,” is an RNA sequence corresponding to the 20 nt sequences such as, but not limited to, any of SEQ ID NOs: 5305-37514 and 37549.

[0426] In one example, a guide RNA may comprise a 20 nucleotide (nt) target nucleic acid sequence associated with the PAM type such as, but not limited to, NAAAAC, NNAGAAW, NNGRRT, NNNNGHTT, NRG, or YTN. As a non-limiting example, the 20 nt target nucleic acid sequence for a specific target gene and a specific PAM type may be, where “T” is “U,” the RNA sequence corresponding to any one of the 20 nt nucleic acid sequences in Table 6.

TABLE 6
Nucleic Acid Sequences by PAM Type

| | PAM: | PAM: | PAM: | PAM: | PAM: | PAM: |
|---|---|---|---|---|---|---|
| | NAAAAC | NNAGAAW | NNGRRT | NNNNGHTT | NRG | YTN |
| | 20 nt Target | 20 nt Target | 20 nt Target | 20 nt Target | 20 nt Target | 20 nt Target |
| Gene | Nucleic Acid | Nucleic Acid | Nucleic Acid | Nucleic Acid | Nucleic Acid | Nucleic Acid |
| Symbol | SEQ ID NO | SEQ ID NO | SEQ ID NO | SEQ ID NO | SEQ ID NO | SEQ ID NO |
| FXN | 5305-5474 | 5475-5827 | 5828-7262 | 7263-8441 | 8442-22079 | 22080-37514 |
| | | | | | and 37549 | |

[0427] In one example, a guide RNA may comprise a 22 nucleotide (nt) target nucleic acid sequence associated with the YTN PAM type. As a non-limiting example, the 22 nt target nucleic acid sequence for a specific target gene may comprise a 20 nt core sequence where the nt core sequence, where “T” is “U,” may be the RNA sequence corresponding to SEQ ID NOs: 22080-37514 and 37549. As another non-limiting example, the 22 nt target nucleic acid sequence for a specific target gene may comprise a core sequence where the core sequence, where “T” is “U,” may be a fragment, segment or region of the RNA sequence corresponding to any of SEQ ID NOs: 22080-37514 and 37549.

### VI. Other Therapeutic Approaches

[0428] Gene editing can be conducted using nucleases engineered to target specific sequences. To date there are four major types of nucleases: meganucleases and their derivatives, zinc finger nucleases (ZFNs), transcription activator like effector nucleases (TALENs), and CRISPR-Cas9 nuclease systems. The nuclease platforms vary in difficulty of design, targeting density and mode of action, particularly as the specificity of ZFNs and TALENs is through protein-DNA interactions, while RNA-DNA interactions primarily guide Cas9.

[0429] CRISPR endonucleases, such as Cas9, can be used in the methods of the present disclosure. However, the teachings described herein, such as therapeutic target sites, could be applied to other forms of endonucleases, such as ZFNs, TALENs, HEs, or MegaTALs, or using combinations of nucleases. However, in order to apply the teachings of the present disclosure to such endonucleases, one would need to, among other things, engineer proteins directed to the specific target sites.

[0430] Additional binding domains can be fused to the Cas9 protein to increase specificity. The target sites of these constructs would map to the identified gRNA specified site, but would require additional binding motifs, such as for a zinc finger domain. In the case of Mega-TAL, a meganuclease can be fused to a TALE DNA-binding domain. The meganuclease domain can increase specificity and provide the cleavage. Similarly, inactivated or dead Cas9 (dCas9) can be fused to a cleavage domain and require the sgRNA/Cas9 target site and adjacent binding site for the fused DNA-binding domain. This likely would require some protein engineering of the dCas9, in addition to the catalytic inactivation, to decrease binding without the additional binding site.

[0431] Zinc Finger Nucleases

[0432] Zinc finger nucleases (ZFNs) are modular proteins comprised of an engineered zinc finger DNA binding domain linked to the catalytic domain of the type II endonuclease FokI. Because FokI functions only as a dimer, a pair of ZFNs must be engineered to bind to cognate target “half-site” sequences on opposite DNA strands and with precise spacing between them to enable the catalytically active FokI dimer to form. Upon dimerization of the FokI domain, which itself has no sequence specificity per se, a DNA double-strand break is generated between the ZFN half-sites as the initiating step in genome editing.

[0433] The DNA binding domain of each ZFN is typically comprised of 3-6 zinc fingers of the abundant Cys2-His2 architecture, with each finger primarily recognizing a triplet of nucleotides on one strand of the target DNA sequence, although cross-strand interaction with a fourth nucleotide also can be important. Alteration of the amino acids of a finger in positions that make key contacts with the DNA alters the sequence specificity of a given finger. Thus, a four-finger zinc finger protein will selectively recognize a 12 bp target sequence, where the target sequence is a composite of the triplet preferences contributed by each finger, although triplet preference can be influenced to varying degrees by neighboring fingers. An important aspect of ZFNs is that they can be readily re-targeted to almost any genomic address simply by modifying individual fingers, although considerable expertise is required to do this well. In most applications of ZFNs, proteins of 4-6 fingers are used, recognizing 12-18 bp respectively. Hence, a pair of ZFNs will typically recognize a combined target sequence of 24-36 bp, not including the typical 5-7 bp spacer between half-sites. The binding sites can be separated further with larger spacers, including 15-17 bp. A target sequence of this length is likely to be unique in the human genome, assuming repetitive sequences or gene homologs are excluded during the design process. Nevertheless, the ZFN protein-DNA interactions are not absolute in their specificity so off-target binding and cleavage events do occur, either as a heterodimer between the two ZFNs, or as a homodimer of one or the other of the ZFNs. The latter possibility has been effectively eliminated by engineering the dimerization interface of the FokI domain to create “plus” and “minus” variants, also known as obligate heterodimer variants, which can only dimerize with each other, and not with themselves. Forcing the obligate heterodimer prevents formation of the homodimer. This has greatly enhanced specificity of ZFNs, as well as any other nuclease that adopts these FokI variants.

[0434] A variety of ZFN-based systems have been described in the art, modifications thereof are regularly reported, and numerous references describe rules and parameters that are used to guide the design of ZFNs; see, e.g., Segal et al., Proc Natl Acad Sci USA 96(6):2758-63 (1999); Dreier B et al., J Mol Biol. 303(4):489-502 (2000); Liu Q et al., J Biol Chem. 277(6):3850-6 (2002); Dreier et al., J Biol Chem 280(42):35588-97 (2005); and Dreier et al., J Biol Chem. 276(31):29466-78 (2001).

[0435] Transcription Activator-Like Effector Nucleases (TALENs)

[0436] TALENs represent another format of modular nucleases whereby, as with ZFNs, an engineered DNA binding domain is linked to the FokI nuclease domain, and a pair of TALENs operate in tandem to achieve targeted DNA cleavage. The major difference from ZFNs is the nature of the DNA binding domain and the associated target DNA sequence recognition properties. The TALEN DNA binding domain derives from TALE proteins, which were originally described in the plant bacterial pathogen Xanthomonas sp. TALEs are comprised of tandem arrays of 33-35 amino acid repeats, with each repeat recognizing a single base pair in the target DNA sequence that is typically up to 20 bp in length, giving a total target sequence length of up to 40 bp. Nucleotide specificity of each repeat is determined by the repeat variable diresidue (RVD), which includes just two amino acids at positions 12 and 13. The bases guanine, adenine, cytosine and thymine are predominantly recognized by the four RVDs: Asn-Asn, Asn-Ile, His-Asp and Asn-Gly, respectively. This constitutes a much simpler recognition code than for zinc fingers, and thus represents an advantage over the latter for nuclease design. Nevertheless, as with ZFNs, the protein-DNA interactions of TALENs are not absolute in their specificity, and TALENs have also benefitted from the use of obligate heterodimer variants of the FokI domain to reduce off-target activity.

[0437] Additional variants of the FokI domain have been created that are deactivated in their catalytic function. If one half of either a TALEN or a ZFN pair contains an inactive FokI domain, then only single-strand DNA cleavage (nicking) will occur at the target site, rather than a DSB. The outcome is comparable to the use of CRISPR/Cas9 or CRISPR/Cpf1 “nickase” mutants in which one of the Cas9 cleavage domains has been deactivated. DNA nicks can be used to drive genome editing by HDR, but at lower efficiency than with a DSB. The main benefit is that off-target nicks are quickly and accurately repaired, unlike the DSB, which is prone to NHEJ-mediated mis-repair.

[0438] A variety of TALEN-based systems have been described in the art, and modifications thereof are regularly reported; see, e.g., Boch, Science 326(5959):1509-12 (2009); Mak et al., Science 335(6069):716-9 (2012); and Moscou et al., Science 326(5959):1501 (2009). The use of TALENs based on the “Golden Gate” platform, or cloning scheme, has been described by multiple groups; see, e.g., Cermak et al., Nucleic Acids Res. 39(12):e82 (2011); Li et al., Nucleic Acids Res. 39(14):6315-25(2011); Weber et al., PLoS One. 6(2):e16765 (2011); Wang et al., J Genet Genomics 41(6):339-47, Epub 2014 May 17 (2014); and Cermak T et al., Methods Mol Biol. 1239:133-59 (2015).

[0439] Homing Endonucleases

[0440] Homing endonucleases (HEs) are sequence-specific endonucleases that have long recognition sequences (14-44 base pairs) and cleave DNA with high specificity—often at sites unique in the genome. There are at least six known families of HEs as classified by their structure, including GIY-YIG, His-Cis box, H—N—H, PD-(D/E)xK, and Vsr-like that are derived from a broad range of hosts, including eukarya, protists, bacteria, archaea, cyanobacteria and phage. As with ZFNs and TALENs, HEs can be used to create a DSB at a target locus as the initial step in genome editing. In addition, some natural and engineered HEs cut only a single strand of DNA, thereby functioning as site-specific nickases. The large target sequence of HEs and the specificity that they offer have made them attractive candidates to create site-specific DSBs.

[0441] A variety of HE-based systems have been described in the art, and modifications thereof are regularly reported; see, e.g., the reviews by Steentoft et al., Glycobiology 24(8):663-80 (2014); Belfort and Bonocora, Methods Mol Biol. 1123:1-26 (2014); Hafez and Hausner, Genome 55(8):553-69 (2012); and references cited therein.

[0442] MegaTAL/Tev-mTALEN/MegaTev

[0443] As further examples of hybrid nucleases, the MegaTAL platform and Tev-mTALEN platform use a fusion of TALE DNA binding domains and catalytically active HEs, taking advantage of both the tunable DNA binding and specificity of the TALE, as well as the cleavage sequence specificity of the HE; see, e.g., Boissel et al., NAR 42: 2591-2601 (2014); Kleinstiver et al., G3 4:1155-65 (2014); and Boissel and Scharenberg, Methods Mol. Biol. 1239: 171-96 (2015).

[0444] In a further variation, the MegaTev architecture is the fusion of a meganuclease (Mega) with the nuclease domain derived from the GIY-YIG homing endonuclease I-TevI (Tev). The two active sites are positioned˜30 bp apart on a DNA substrate and generate two DSBs with non-compatible cohesive ends; see, e.g., Wolfs et al., NAR 42, 8816-29 (2014). It is anticipated that other combinations of existing nuclease-based approaches will evolve and be useful in achieving the targeted genome modifications described herein.

[0445] dCas9-FokI or dCpfl-FokI and Other Nucleases

[0446] Combining the structural and functional properties of the nuclease platforms described above offers a further approach to genome editing that can potentially overcome some of the inherent deficiencies. As an example, the CRISPR genome editing system typically uses a single Cas9 endonuclease to create a DSB. The specificity of targeting is driven by a 20 or 24 nucleotide sequence in the guide RNA that undergoes Watson-Crick base-pairing with the target DNA (plus an additional 2 bases in the adjacent NAG or NGG PAM sequence in the case of Cas9 from S. pyogenes). Such a sequence is long enough to be unique in the human genome, however, the specificity of the RNA/DNA interaction is not absolute, with significant promiscuity sometimes tolerated, particularly in the 5′ half of the target sequence, effectively reducing the number of bases that drive specificity. One solution to this has been to completely deactivate the Cas9 or Cpf1 catalytic function—retaining only the RNA-guided DNA binding function—and instead fusing a FokI domain to the deactivated Cas9; see, e.g., Tsai et al., Nature Biotech 32: 569-76 (2014); and Guilinger et al., Nature Biotech. 32: 577-82 (2014). Because FokI must dimerize to become catalytically active, two guide RNAs are required to tether two FokI fusions in close proximity to form the dimer and cleave DNA. This essentially doubles the number of bases in the combined target sites, thereby increasing the stringency of targeting by CRISPR-based systems.

[0447] As further example, fusion of the TALE DNA binding domain to a catalytically active HE, such as I-TevI, takes advantage of both the tunable DNA binding and specificity of the TALE, as well as the cleavage sequence specificity of I-TevI, with the expectation that off-target cleavage can be further reduced.

### VII. Kits

[0448] The present disclosure provides kits for carrying out the methods described herein. A kit can include one or more of a genome-targeting nucleic acid, a polynucleotide encoding a genome-targeting nucleic acid, a site-directed polypeptide, a polynucleotide encoding a site-directed polypeptide, and/or any nucleic acid or proteinaceous molecule necessary to carry out the aspects of the methods described herein, or any combination thereof.

[0449] A kit can comprise: (1) a vector comprising a nucleotide sequence encoding a genome-targeting nucleic acid, (2) the site-directed polypeptide or a vector comprising a nucleotide sequence encoding the site-directed polypeptide, and (3) a reagent for reconstitution and/or dilution of the vector(s) and or polypeptide.

[0450] A kit can comprise: (1) a vector comprising (i) a nucleotide sequence encoding a genome-targeting nucleic acid, and (ii) a nucleotide sequence encoding the site-directed polypeptide; and (2) a reagent for reconstitution and/or dilution of the vector.

[0451] In any of the above kits, the kit can comprise a single-molecule guide genome-targeting nucleic acid. In any of the above kits, the kit can comprise a double-molecule genome-targeting nucleic acid. In any of the above kits, the kit can comprise two or more double-molecule guides or single-molecule guides. The kits can comprise a vector that encodes the nucleic acid targeting nucleic acid.

[0452] In any of the above kits, the kit can further comprise a polynucleotide to be inserted to effect the desired genetic modification.

[0453] Components of a kit can be in separate containers, or combined in a single container.

[0454] Any kit described above can further comprise one or more additional reagents, where such additional reagents are selected from a buffer, a buffer for introducing a polypeptide or polynucleotide into a cell, a wash buffer, a control reagent, a control vector, a control RNA polynucleotide, a reagent for in vitro production of the polypeptide from DNA, adaptors for sequencing and the like. A buffer can be a stabilization buffer, a reconstituting buffer, a diluting buffer, or the like. A kit can also comprise one or more components that can be used to facilitate or enhance the on-target binding or the cleavage of DNA by the endonuclease, or improve the specificity of targeting.

[0455] In addition to the above-mentioned components, a kit can further comprise instructions for using the components of the kit to practice the methods. The instructions for practicing the methods can be recorded on a suitable recording medium. For example, the instructions can be printed on a substrate, such as paper or plastic, etc. The instructions can be present in the kits as a package insert, in the labeling of the container of the kit or components thereof (i.e., associated with the packaging or subpackaging), etc. The instructions can be present as an electronic storage data file present on a suitable computer readable storage medium, e.g. CD-ROM, diskette, flash drive, etc. In some instances, the actual instructions are not present in the kit, but means for obtaining the instructions from a remote source (e.g. via the Internet), can be provided. An example of this case is a kit that comprises a web address where the instructions can be viewed and/or from which the instructions can be downloaded. As with the instructions, this means for obtaining the instructions can be recorded on a suitable substrate.

### VIII. Specific Methods and Compositions of the Invention

[0456] Accordingly, the present disclosure relates in particular to the following non-limiting methods according to the present disclosure: in a first method, Method 1, the present disclosure provides a method for editing a Frataxin (FXN) gene in a cell by genome editing comprising the step of introducing into the cell one or more deoxyribonucleic acid (DNA) endonucleases to effect one or more single-strand breaks (SSBs) or double-strand breaks (DSBs) within or near the FXN gene that results in permanent deletion of the expanded trinucleotide repeat or replacement of one or more nucleotide bases, or one or more exons and/or introns within or near the FXN gene, thereby restoring the FXN gene function.

[0457] In another method, Method 2, the present disclosure provides a method for editing a Frataxin (FXN) gene in a cell by genome editing comprising the step of introducing into the cell one or more deoxyribonucleic acid (DNA) endonucleases to effect one or more single-strand breaks (SSBs) or double-strand breaks (DSBs) within or near the FXN gene or FXN regulatory elements that results in one or more permanent insertion, deletion or mutation of at least one nucleotide within or near the FXN gene, thereby reducing or eliminating the expression or function of aberrant FXN gene products.

[0458] In another method, Method 3, the present disclosure provides an ex vivo method for treating a patient having a FXN related condition or disorder comprising the steps of: creating a patient specific induced pluripotent stem cell (iPSC); editing within or near a Frataxin (FXN) gene or other DNA sequences that encode regulatory elements of the FXN gene of the iPSC; differentiating the genome-edited iPSC into a neuron or glial cell of the Central Nervous System (CNS); and implanting the neuron or glial cell of the Central Nervous System (CNS) into the patient.

[0459] In another method, Method 4, the present disclosure provides the method of Method 3, wherein the editing step comprises introducing into the iPSC one or more deoxyribonucleic acid (DNA) endonucleases to effect one or more single-strand breaks (SSBs) or double-strand breaks (DSBs) within or near the FXN gene that results in permanent deletion of the expanded trinucleotide repeat or replacement of one or more nucleotide bases, or one or more exons and/or introns within or near the FXN gene, thereby restoring the FXN gene function.

[0460] In another method, Method 5, the present disclosure provides the method of Method 3, wherein the editing step comprises introducing into the iPSC one or more deoxyribonucleic acid (DNA) endonucleases to effect one or more single-strand breaks (SSBs) or double-strand breaks (DSBs) within or near the FXN gene or FXN regulatory elements that results in one or more permanent insertion, deletion or mutation of at least one nucleotide within or near the FXN gene, thereby reducing or eliminating the expression or function of aberrant FXN gene products.

[0461] In another method, Method 6, the present disclosure provides an ex vivo method for treating a patient having a FXN related condition or disorder comprising the steps of: isolating a mesenchymal stem cell from the patient; editing within or near a Frataxin (FXN) gene or other DNA sequences that encode regulatory elements of the FXN gene of the mesenchymal stem cell; differentiating the genome-edited mesenchymal stem cell into a neuron or glial cell of the Central Nervous System (CNS); and implanting the neuron or glial cell of the Central Nervous System (CNS) into the patient.

[0462] In another method, Method 7, the present disclosure provides the method of Method 6, wherein the editing step comprises introducing into the mesenchymal stem cell one or more deoxyribonucleic acid (DNA) endonucleases to effect one or more single-strand breaks (SSBs) or double-strand breaks (DSBs) within or near the FXN gene that results in permanent deletion of the expanded trinucleotide repeat or replacement of one or more nucleotide bases, or one or more exons and/or introns within or near the FXN gene, thereby restoring the FXN gene function.

[0463] In another method, Method 8, the present disclosure provides the method of Method 6, wherein the editing step comprises introducing into the mesenchymal stem cell one or more deoxyribonucleic acid (DNA) endonucleases to effect one or more single-strand breaks (SSBs) or double-strand breaks (DSBs) within or near the FXN gene or FXN regulatory elements that results in one or more permanent insertion, deletion or mutation of at least one nucleotide within or near the FXN gene, thereby reducing or eliminating the expression or function of aberrant FXN gene products.

[0464] In another method, Method 9, the present disclosure provides an in vivo method for treating a patient with a FXN related disorder comprising the step of editing the Frataxin (FXN) gene in a cell of the patient.

[0465] In another method, Method 10, the present disclosure provides the method of Method 9, wherein the editing step comprises introducing into the cell one or more deoxyribonucleic acid (DNA) endonucleases to effect one or more single-strand breaks (SSBs) or double-strand breaks (DSBs) within or near the FXN gene that results in permanent deletion of the expanded trinucleotide repeat or replacement of one or more nucleotide bases, or one or more exons and/or introns within or near the FXN gene, thereby restoring the FXN gene function.

[0466] In another method, Method 11, the present disclosure provides the method of Method 9, wherein the editing step comprises introducing into the cell one or more deoxyribonucleic acid (DNA) endonucleases to effect one or more single-strand breaks (SSBs) or double-strand breaks (DSBs) within or near the FXN gene or FXN regulatory elements that results in one or more permanent insertion, deletion or mutation of at least one nucleotide within or near the FXN gene, thereby reducing or eliminating the expression or function of aberrant FXN gene products.

[0467] In another method, Method 12, the present disclosure provides the method of any one of Methods 9-11, wherein the cell is a cell of the Central Nervous System (CNS).

[0468] In another method, Method 13, the present disclosure provides the method of Method 12, wherein the cell of the Central Nervous System (CNS) is a neuron.

[0469] In another method, Method 14, the present disclosure provides the method of Method 12, wherein the cell of the Central Nervous System (CNS) is a glial cell.

[0470] In another method, Method 15, the present disclosure provides the method of any one of Methods 12-14, wherein the one or more deoxyribonucleic acid (DNA) endonuclease is delivered to the cell of the Central Nervous System (CNS) via any administration route selected from the group consisting of intraparenchymal, intravenous, intra-arterial, intracerebroventricular, intracisternal, intrathecal, intracranial or intraperitoneal routes.

[0471] In another method, Method 16, the present disclosure provides a method of altering the contiguous genomic sequence of a FXN gene in a cell comprising contacting the cell with one or more deoxyribonucleic acid (DNA) endonuclease to effect one or more single-strand breaks (SSBs) or double-strand breaks (DSBs).

[0472] In another method, Method 17, the present disclosure provides the method of Method 16, wherein the alteration of the contiguous genomic sequence occurs in the first intron of the FXN gene.

[0473] In another method, Method 18, the present disclosure provides the method of Method 16, wherein the alteration of the contiguous genomic sequence occurs in one or more exons of the FXN gene.

[0474] In another method, Method 19, the present disclosure provides the method of any one of Methods 1-18, wherein the one or more deoxyribonucleic acid (DNA) endonuclease is selected from any of those sequences in SEQ ID NOs: 1-620 and variants having at least 90% homology to any of those sequences disclosed in SEQ ID NOs: 1-620.

[0475] In another method, Method 20, the present disclosure provides the method of Method 19, wherein the one or more deoxyribonucleic acid (DNA) endonuclease is one or more protein or polypeptide.

[0476] In another method, Method 21, the present disclosure provides the method of Method 19, wherein the one or more deoxyribonucleic acid (DNA) endonuclease is one or more polynucleotide encoding the one or more DNA endonuclease.

[0477] In another method, Method 22, the present disclosure provides the method of Method 21, wherein the one or more deoxyribonucleic acid (DNA) endonuclease is one or more ribonucleic acid (RNA) encoding the one or more DNA endonuclease.

[0478] In another method, Method 23, the present disclosure provides the method of Method 22, wherein the one or more ribonucleic acid (RNA) is one or more chemically modified RNA.

[0479] In another method, Method 24, the present disclosure provides the method of Method 23, wherein the one or more ribonucleic acid (RNA) is chemically modified in the coding region.

[0480] In another method, Method 25, the present disclosure provides the method of any one of Methods 21-24, wherein the one or more polynucleotide or one or more ribonucleic acid (RNA) is codon optimized.

[0481] In another method, Method 26, the present disclosure provides the method of any one of Methods 1-25, wherein the method further comprises introducing one or more gRNA or one or more sgRNA.

[0482] In another method, Method 27, the present disclosure provides the method of Method 26, wherein the one or more gRNA or one or more sgRNA comprises a spacer sequence that is complementary to a sequence within or near the expanded trinucleotide repeat in the FXN gene.

[0483] In another method, Method 28, the present disclosure provides the method of Method 26, wherein the one or more gRNA or one or more sgRNA comprises a spacer sequence that is complementary to a DNA sequence within or near the FXN gene.

[0484] In another method, Method 29, the present disclosure provides the method of Method 26, wherein the one or more gRNA or one or more sgRNA comprises a spacer sequence that is complementary to a sequence flanking the FXN gene or other sequence that encodes a regulatory element of the FXN gene.

[0485] In another method, Method 30, the present disclosure provides the method of any one of Methods 26-29, wherein the one or more gRNA or one or more sgRNA is chemically modified.

[0486] In another method, Method 31, the present disclosure provides the method of any one of Methods 26-30, wherein the one or more gRNA or one or more sgRNA is pre-complexed with the one or more deoxyribonucleic acid (DNA) endonuclease.

[0487] In another method, Method 32, the present disclosure provides the method of Method 31, wherein the pre-complexing involves a covalent attachment of the one or more gRNA or one or more sgRNA to the one or more deoxyribonucleic acid (DNA) endonuclease.

[0488] In another method, Method 33, the present disclosure provides the method of any one of Methods 19-32, wherein the one or more deoxyribonucleic acid (DNA) endonuclease is formulated in a liposome or lipid nanoparticle.

[0489] In another method, Method 34, the present disclosure provides the method of any one of Methods 26-32, wherein the one or more deoxyribonucleic acid (DNA) endonuclease is formulated in a liposome or a lipid nanoparticle, which also comprises the one or more gRNA or one or more sgRNA.

[0490] In another method, Method 35, the present disclosure provides the method of any one of Methods 19, or 26-29, wherein the one or more deoxyribonucleic acid (DNA) endonuclease is encoded in an AAV vector particle.

[0491] In another method, Method 36, the present disclosure provides the method of any of the Methods 26-29, wherein the one or more gRNA or one or more sgRNA is encoded in an AAV vector particle.

[0492] In another method, Method 37, the present disclosure provides the method of any of the Methods 26-29, wherein the one or more deoxyribonucleic acid (DNA) endonuclease is encoded in an AAV vector particle, which also encodes the one or more gRNA or one or more sgRNA.

[0493] In another method, Method 38, the AAV vector particle is selected from the group consisting of any of those disclosed in SEQ ID NOs: 4734-5302 and Table 2.

[0494] In another method, Method 39, the present disclosure provides the method of any of Methods 1-38, wherein the method further comprises introducing into the cell a donor template comprising at least a portion of the wild-type FXN gene.

[0495] In another method, Method 40, the present disclosure provides the method of Method 39, wherein the at least a portion of the wild-type FXN gene comprises one or more sequences selected from the group consisting of: a FXN exon, a FXN intron, and a sequence comprising an exon:intron junction of FXN.

[0496] In another method, Method 41, the present disclosure provides the method of any one of Methods 39-40, wherein the donor template comprises homologous arms to the genomic locus of the FXN gene.

[0497] In another method, Method 42, the present disclosure provides the method of any one of Methods 39-41, wherein the donor template is either a single or double stranded polynucleotide.

[0498] In another method, Method 43, the present disclosure provides the method of any one of Methods 39-42, wherein the donor template is encoded in an AAV vector particle, where the AAV vector serotype is selected from the group consisting of those disclosed in SEQ ID NOs: 4734-5302 and Table 2.

[0499] In another method, Method 44, the present disclosure provides the method of any one of Methods 39-42, wherein the one or more polynucleotide encoding one or more deoxyribonucleic acid (DNA) endonuclease is formulated into a lipid nanoparticle, and the one or more gRNA or one or more sgRNA is delivered to the cell ex vivo by electroporation and the donor template is delivered to the cell by an adeno-associated virus (AAV) vector.

[0500] In another method, Method 45, the present disclosure provides the method of any one of Methods 39-42, wherein the one or more polynucleotide encoding one or more deoxyribonucleic acid (DNA) endonuclease is formulated into a liposome or lipid nanoparticle, which also comprises the one or more gRNA or one or more sgRNA and the donor template.

[0501] The present disclosure also provides a composition, Composition 1, comprising a single-molecule guide RNA comprising: at least a spacer sequence that is an RNA sequence corresponding to any of SEQ ID NOs: 5305-37514 and 37549.

[0502] In another composition, Composition 2, the present disclosure provides the single-molecule guide RNA of Composition 1, wherein the single-molecule guide RNA further comprises a spacer extension region.

[0503] In another composition, Composition 3, the present disclosure provides the single-molecule guide RNA of Composition 1, wherein the single-molecule guide RNA further comprises a tracrRNA extension region.

[0504] In another composition, Composition 4, the present disclosure provides the single-molecule guide RNA of Compositions 1-3, wherein the single-molecule guide RNA is chemically modified.

[0505] In another composition, Composition 5, the present disclosure provides a single-molecule guide RNA of Compositions 1-4 pre-complexed with a DNA endonuclease.

[0506] In another composition, Composition 6, the present disclosure provides the composition of Composition 5, wherein the DNA endonuclease is a Cas9 or Cpf1 endonuclease.

[0507] In another composition, Composition 7, the present disclosure provides the composition of Composition 6, wherein the Cas9 or Cpf1 endonuclease is selected from the group consisting of: S. pyogenes Cas9, S. aureus Cas9, N. meningitides Cas9, S. thermophilus CRISPR1 Cas9, S. thermophilus CRISPR 3 Cas9, T. denticola Cas9, L. bacterium ND2006 Cpf1 and Acidaminococcus sp. BV3L6 Cpf1, and variants having at least 90% homology to the endonuclease.

[0508] In another composition, Composition 8, the present disclosure provides the composition of Composition 7, wherein the Cas9 or Cpf1 endonuclease comprises one or more nuclear localization signals (NLSs).

[0509] In another composition, Composition 9, the present disclosure provides the composition of Composition 8, wherein at least one NLS is at or within 50 amino acids of the amino-terminus of the Cas9 or Cpf1 endonucelase and/or at least one NLS is at or within 50 amino acids of the carboxy-terminus of the Cas9 or Cpf1 endonucelase.

[0510] In another compostion, Composition 10, the present disclosure provides a DNA encoding the single-molecule guide RNA of any of Compositions 1-4.

[0511] In another composition, Composition 11, the present disclosure provides a non-naturally occurring CRISPR/Cas system comprising a polynucleotide encoding a Cas9 or Cpf1 endonuclease and at least one single-molecule guide RNA from Compositions 1-4.

[0512] In another composition, Composition 12, the present disclosure provides the CRISPR/Cas system of Composition 11, wherein the polynucleotide encoding a Cas9 or Cpf1 endnuclease is selected from the group consisting of: S. pyogenes Cas9, S. aureus Cas9, N. meningitides Cas9, S. thermophilus CRISPR1 Cas9, S. thermophilus CRISPR 3 Cas9, T. denticola Cas9, L. bacterium ND2006 Cpf1 and Acidaminococcus sp. BV3L6 Cpf1, and variants having at least 90% homology to the endonucleases.

[0513] In another composition, Composition 13, the present disclosure provides The CRISPR/Cas system of Composition 12, wherein the polynucleotide encoding a Cas9 or Cpf1 enzyme comprises one or more nuclear localization signals (NLSs).

[0514] In another composition, Composition 14, the present disclosure provides the CRISPR/Cas system of Composition 13, wherein at least one NLS is at or within 50 amino acids of the amino-terminus of the polynucleotide encoding a Cas9 or Cpf1 endonuclease and/or at least one NLS is at or within 50 amino acids of the carboxy-terminus of the polynucleotide encoding a Cas9 or Cpf1 endonuclease.

[0515] In another composition, Composition 15, the present disclosure provides the CRISPR/Cas system of Composition 14, wherein the polynucleotide encoding a Cas9 or Cpf1 enzyme is codon optimized for expression in a eukaryotic cell.

[0516] In another composition, Composition 16, the present disclosure provides a DNA encoding the CRISPR/Cas system of any one of Compositions 11-15.

[0517] In another composition, Composition 17, the present disclosure provides a vector comprising the DNA of Compositions 10 or 16.

[0518] In another composition, Composition 18, the present disclosure provides the vector of Composition 17, wherein the vector is a plasmid.

[0519] In another composition, Composition 19, the present disclosure provides the vector of Composition 17, wherein the vector is an AAV vector particle, and the AAV vector serotype is selected from the group consisting of those disclosed in SEQ ID NOs: 4734-5302 or Table 2.

### IX. DEFINITIONS

[0520] The term “comprising” or “comprises” is used in reference to compositions, methods, and respective component(s) thereof, that are essential to the present disclosure, yet open to the inclusion of unspecified elements, whether essential or not.

[0521] The term “consisting essentially of” refers to those elements required for a given aspect. The term permits the presence of additional elements that do not materially affect the basic and novel or functional characteristic(s) of that aspect of the present disclosure.

[0522] The term “consisting of” refers to compositions, methods, and respective components thereof as described herein, which are exclusive of any element not recited in that description of the aspect.

[0523] The singular forms “a,” “an” and “the” include plural references, unless the context clearly dictates otherwise.

[0524] Any numerical range recited in this specification describes all sub-ranges of the same numerical precision (i.e., having the same number of specified digits) subsumed within the recited range. For example, a recited range of “1.0 to 10.0” describes all sub-ranges between (and including) the recited minimum value of 1.0 and the recited maximum value of 10.0, such as, for example, “2.4 to 7.6,” even if the range of “2.4 to 7.6” is not expressly recited in the text of the specification. Accordingly, the Applicant reserves the right to amend this specification, including the claims, to expressly recite any sub-range of the same numerical precision subsumed within the ranges expressly recited in this specification. All such ranges are inherently described in this specification such that amending to expressly recite any such sub-ranges will comply with written description, sufficiency of description, and added matter requirements, including the requirements under 35 U.S.C. § 112(a) and Article 123(2) EPC. Also, unless expressly specified or otherwise required by context, all numerical parameters described in this specification (such as those expressing values, ranges, amounts, percentages, and the like) may be read as if prefaced by the word “about,” even if the word “about” does not expressly appear before a number. Additionally, numerical parameters described in this specification should be construed in light of the number of reported significant digits, numerical precision, and by applying ordinary rounding techniques. It is also understood that numerical parameters described in this specification will necessarily possess the inherent variability characteristic of the underlying measurement techniques used to determine the numerical value of the parameter.

[0525] The details of one or more aspects of the present disclosure are set forth in the accompanying description below. Although any materials and methods similar or equivalent to those described herein can be used in the practice or testing of the present disclosure, the preferred materials and methods are now described. Other features, objects and advantages of the disclosure will be apparent from the description. In the description, the singular forms also include the plural unless the context clearly dictates otherwise. Unless defined otherwise, all technical and scientific terms used herein have the same meaning as commonly understood by one of ordinary skill in the art to which this disclosure belongs. In the case of conflict, the present description will control.

[0526] The present disclosure is further illustrated by the following non-limiting examples.

### X. EXAMPLES

[0527] The present disclosure will be more fully understood by reference to the following examples, which provide illustrative non-limiting aspects of the invention.

[0528] The examples describe the use of the CRISPR system as an illustrative genome editing technique to create defined therapeutic genomic deletions, insertions, or replacements, termed “genomic modifications” herein, in the FXN gene that lead to permanent deletion or correction of expanded trinucleotide repeats in the FXN gene, knock-out of the FXN gene, or correction of the entire gene or correction of mutations within the gene, that restore the wild-type or similar levels of trinucleotide repeats in the FXN gene and/or eliminate aberrant FXN gene products.

[0529] All tested gRNAs can be used for an HDR/correction based editing approach. Single gRNAs targeting the splice acceptors can be used to induce exon skipping to restore the reading frame of the FXN gene. Selected pairs of gRNAs can be used to make deletions in the FXN gene that restore the reading frame. Selected pairs of gRNAs can be used to make deletions that simulate patient mutations and can be used to generate model FXN mutant lines.

[0530] Various Cas orthologs are evaluated for cutting. gRNAs are delivered as RNA and expressed from the U6 promoter in plasmids. The corresponding Cas protein is either knocked into the cell line of interest and constitutively expressed, delivered as mRNA, or delivered as protein. The gRNA activity in all formats is evaluated using TIDE analysis in HEK293T cells.

[0531] Introduction of the defined therapeutic modifications described above represents a novel therapeutic strategy for the potential amelioration of Friedreich Ataxia and related disorders, as described and illustrated herein.

### Example 1—CRISPR/SpCas9 Target Sites for the FXN Gene

[0532] Regions of the FXN gene were scanned for target sites. Each area was scanned for a protospacer adjacent motif (PAM) having the sequence NRG. gRNA 20 bp spacer sequences corresponding to the PAM were then identified, as shown in SEQ ID NOs: 8442-22079 and 37549 of the Sequence Listing.

### Example 2—CRISPR/SaCas9 Target Sites for the FXN Gene

[0533] Regions of the FXN gene were scanned for target sites. Each area was scanned for a protospacer adjacent motif (PAM) having the sequence NNGRRT. gRNA 20 bp spacer sequences corresponding to the PAM were then identified, as shown in SEQ ID NOs: 5828-7262 of the Sequence Listing.

### Example 3—CRISPR/StCas9 Target Sites for the FXN Gene

[0534] Regions of the FXN gene were scanned for target sites. Each area was scanned for a protospacer adjacent motif (PAM) having the sequence NNAGAAW. gRNA 20 bp spacer sequences corresponding to the PAM were then identified, as shown in SEQ ID NOs: 5475-5827 of the Sequence Listing.

### Example 4—CRISPR/TdCas9 Target Sites for the FXN Gene

[0535] Regions of the FXN gene were scanned for target sites. Each area was scanned for a protospacer adjacent motif (PAM) having the sequence NAAAAC. gRNA 20 bp spacer sequences corresponding to the PAM were then identified, as shown in SEQ ID NOs: 5305-5474 of the Sequence Listing.

### Example 5—CRISPR/NmCas9 Target Sites for the FXN Gene

[0536] Regions of the FXN gene were scanned for target sites. Each area was scanned for a protospacer adjacent motif (PAM) having the sequence NNNNGHTT. gRNA 20 bp spacer sequences corresponding to the PAM were then identified, as shown in SEQ ID NOs: 7263-8441 of the Sequence Listing.

### Example 6—CRISPR/Cpf1 Target Sites for the FXN Gene

[0537] Regions of the FXN gene were scanned for target sites. Each area was scanned for a protospacer adjacent motif (PAM) having the sequence YTN. gRNA 22 bp spacer sequences corresponding to the PAM were then identified, as shown in SEQ ID NOs: 22080-37514 of the Sequence Listing.

### Example 7—Bioinformatics Analysis of the Guide Strands

[0538] Candidate guides will then be screened and selected in a single process or multi-step process that involves both theoretical binding and experimentally assessed activity at both on-target and off-target sites. By way of illustration, candidate guides having sequences that match a particular on-target site, such as a site within the FXN gene, with adjacent PAM can be assessed for their potential to cleave at off-target sites having similar sequences, using one or more of a variety of bioinformatics tools available for assessing off-target binding, as described and illustrated in more detail below, in order to assess the likelihood of effects at chromosomal positions other than those intended.

[0539] Candidates predicted to have relatively lower potential for off-target activity can then be assessed experimentally to measure their on-target activity, and then off-target activities at various sites. Preferred guides have sufficiently high on-target activity to achieve desired levels of gene editing at the selected locus, and relatively lower off-target activity to reduce the likelihood of alterations at other chromosomal loci. The ratio of on-target to off-target activity is often referred to as the “specificity” of a guide.

[0540] For initial screening of predicted off-target activities, there are a number of bioinformatics tools known and publicly available that can be used to predict the most likely off-target sites; and since binding to target sites in the CRISPR/Cas9 or CRISPR/Cpf1 nuclease system is driven by Watson-Crick base pairing between complementary sequences, the degree of dissimilarity (and therefore reduced potential for off-target binding) is essentially related to primary sequence differences: mismatches and bulges, i.e. bases that are changed to a non-complementary base, and insertions or deletions of bases in the potential off-target site relative to the target site. An exemplary bioinformatics tool called COSMID (CRISPR Off-target Sites with Mismatches, Insertions and Deletions) (available on the web at crispr.bme.gatech.edu) compiles such similarities. Other bioinformatics tools include, but are not limited to autoCOSMID and CCTop.

[0541] Bioinformatics were used to minimize off-target cleavage in order to reduce the detrimental effects of mutations and chromosomal rearrangements. Studies on CRISPR/Cas9 systems suggested the possibility of off-target activity due to non-specific hybridization of the guide strand to DNA sequences with base pair mismatches and/or bulges, particularly at positions distal from the PAM region. Therefore, it is important to have a bioinformatics tool that can identify potential off-target sites that have insertions and/or deletions between the RNA guide strand and genomic sequences, in addition to base-pair mismatches. Bioinformatics tools based upon the off-target prediction algorithm CCTop were used to search genomes for potential CRISPR off-target sites (CCTop is available on the web at crispr.cos.uni-heidelberg.de/). The output ranked lists of the potential off-target sites based on the number and location of mismatches, allowing more informed choice of target sites, and avoiding the use of sites with more likely off-target cleavage.

[0542] Additional bioinformatics pipelines were employed that weigh the estimated on- and/or off-target activity of gRNA targeting sites in a region. Other features that may be used to predict activity include information about the cell type in question, DNA accessibility, chromatin state, transcription factor binding sites, transcription factor binding data, and other CHIP-seq data. Additional factors are weighed that predict editing efficiency, such as relative positions and directions of pairs of gRNAs, local sequence features and micro-homologies.

[0543] Initial evaluation and screening of CRISPR/Cas9 target sites focused on the 500 bp upstream region of FXN, Exon1 and Intron 1. gRNAs targeting the upstream sequence and Exon1 can be used to insert full length cDNA of FXN for replacing the mutated endogenous FXN gene and restoring protein expression. Guide RNAs targeting Intron 1 can be used to target the expanded repeats. Pairs of gRNAs on either side of the expanded repeat sequence can be used to excise the expanded repeats. gRNAs overlapping with expanded repeat sequence can be used to induce partial or full contraction of the repeats. In addition, carefully chosen gRNAs together with dCas9 fused to chromatin modifier proteins can be used to alleviate the epigenetic changes that occur at the FXN allele with expanded repeats and restore FXN expression. These gRNAs can also be used to edit one or more nucleotides, exonic sequences and/or intronic sequences.

[0544] Initial bioinformatics analysis identified, 146 gRNAs targeting the upstream region and Exon 1 and 1432 guides targeting Intron 1. Further analysis of predicted off-target sites and evaluation of the gRNA target site within the FXN gene resulted in 192 gRNAs selected for screening. The prioritized list of 192 single gRNAs targeting the FXN gene were tested for cutting efficiencies using spCas9 (Table 7).

TABLE 7

| SEQ | | |
|---|---|---|
| ID | | |
| NO. | Name | Sequence |
| 16178 | Fxn_T99 | GACCGGTTCCGAGGGGTGTG |
| 16295 | Fxn_T11 | TGGTACGCCGCATGTATTAG |
| 16240 | Fxn_T18 | CAGTTACGCCACGGCTTGAA |
| 9521 | Fxn_T69 | CTGGGCGGCAGCGCCAAGTT |
| 16177 | Fxn_T24 | TGGAGGGGACCGGTTCCGAG |
| 9373 | Fxn_T208 | GGCGTACCAGCCACTCTGAA |
| 9257 | Fxn_T34 | CGGAGCGACCCCGGCGTGCG |
| 16201 | Fxn_T417 | GCAGAATAGCTAGAGCAGCA |
| 16094 | Fxn upstream and Exon1_T59 | GGCAGACCCGGAGCAGCATG |
| 9210 | Fxn upstream and Exon1_T8 | CCAGGAGGCCGGCTACTGCG |
| 9232 | Fxn upstream and Exon1_T30 | GCCACGGCGGCCGCAGAGTG |
| 16187 | Fxn_T250 | GCGCACACCTAATATTTTCA |
| 9194 | Fxn upstream and Exon1_T40 | GCCGCAGGCACTCTTCTGTG |
| 16084 | Fxn upstream and Exon1_T72 | CCGCAGCACCCAGCGCTGGA |
| 16133 | Fxn_T72 | GCGCACGCCGGGGTCGCTCC |
| 16253 | Fxn_T383 | GGATGAGGAAGATTCCTCAA |
| 16278 | Fxn_T318 | GGAGGGAACCGTCTGGGCAA |
| 9364 | Fxn_T449 | TCATCCCCACAGCCATTCTT |
| 16141 | Fxn_T84 | TCCTTCTCAGGGCGGCCCGG |
| 9359 | Fxn_T10 | TTTCAAGCCGTGGCGTAACT |
| 16315 | Fxn_T494 | GTTGCCAGTGCTTAAAAGTT |
| 9294 | Fxn_T135 | GGAGACAGCCGCACACCCCT |
| 16271 | Fxn_T114 | GTGGTAGAGGGTGTTTCACG |
| 16164 | Fxn_T129 | TCAAGGCACGGGCGAAGGCA |
| 16311 | Fxn_T580 | GTTTGAAGAAACTTTGGGAT |
| 9203 | Fxn upstream and Exon1_T56 | CCGCTCCGCCCTCCAGCGCT |
| 9258 | Fxn_T28 | GCGCGTACCCGGAGCGACCC |
| 16224 | Fxn_T133 | CATTTTGCGGACCTGGTGTG |
| 16163 | Fxn_T38 | GTCAAGGCACGGGCGAAGGC |
| 16238 | Fxn_T40 | TATCTGACCCAGTTACGCCA |
| 16159 | Fxn_T37 | GCGACTGCGGGTCAAGGCAC |
| 9327 | Fxn_T215 | TCACACAGCTCTGCGGAGTG |
| 9264 | Fxn_T341 | GGCCGCCCTGAGAAGGAGCG |
| 16274 | Fxn_T569 | TAGAGGGTGTTTCACGAGGA |
| 9237 | Fxn upstream and Exon1_T16 | TGTCGGTGCGCAGGCCACGG |
| 9282 | Fxn_T199 | AAGCCAGTGTAAATGCAACC |
| 16161 | Fxn_T45 | GCGGGTCAAGGCACGGGCGA |
| 16091 | Fxn upstream and Exon1_T65 | GGCGGAGCGGGCGGCAGACC |
| 16260 | Fxn_T423 | GAGGACATGGTATTTAATGA |
| 16293 | Fxn_T3 | GCTGGTACGCCGCATGTATT |
| 16294 | Fxn_T6 | CTGGTACGCCGCATGTATTA |
| 16450 | Fxn_T255 | ACAGTTTTTTAGATGGTACC |
| 16100 | Fxn upstream and Exon1_T14 | CCGCGCAGTAGCCGGCCTCC |
| 16138 | Fxn_T330 | GCTCACCCCGCTCCTTCTCA |
| 9387 | Fxn_T46 | GTGGGCCAAATAACACGTGT |
| 9249 | Fxn_T88 | GTGCGGCCCGCGGCTGTTCC |
| 16131 | Fxn_T148 | GGGAGGCGCCGCGCACGCCG |
| 9214 | Fxn upstream and Exon1_T73 | GGGCTGGGCTGGGTGACGCC |
| 37549 | Fxn upstream and Exon1_T73 | GGGCCGGGCTGGGTGACGCC |
| | V2 | |
| 16123 | Fxn_T86 | AGCCGCGGGCCGCACGCCGC |
| 16126 | Fxn_T61 | GCACGCCGCACGCCTGCGCA |
| 9271 | Fxn_T35 | GTTGCAAGGCCGCTTCCGCC |
| 16176 | Fxn_T5 | GTGGAGGGGACCGGTTCCGA |
| 9260 | Fxn_T1 | GCTAGTCCAGCGCGCGTACC |
| 16128 | Fxn_T90 | CGCCGCACGCCTGCGCAGGG |
| 9388 | Fxn_T60 | TGTGGGCCAAATAACACGTG |
| 16096 | Fxn upstream and Exon1_T52 | GGAGCAGCATGTGGACTCTC |
| 16259 | Fxn_T388 | GGAGGACATGGTATTTAATG |
| 9212 | Fxn upstream and Exon1_T71 | CTGGGCTGGGTGACGCCAGG |
| 9516 | Fxn_T166 | AATAGCCCTTAACAGCCACC |
| 9224 | Fxn upstream and Exon1_T22 | CGGCCGCGGGACCCGGGTGA |
| 9369 | Fxn_T493 | AACACCCTCTACCACTTCCT |
| 9206 | Fxn upstream and Exon1_T58 | GAGAGTCCACATGCTGCTCC |
| 9333 | Fxn_T334 | GAGGTTAGGGGAATCCCCCA |
| 16242 | Fxn_T36 | TTACGCCACGGCTTGAAAGG |
| 9293 | Fxn_T33 | AGCCGCACACCCCTCGGAAC |
| 16252 | Fxn_T485 | GGGATGAGGAAGATTCCTCA |
| 9211 | Fxn upstream and Exon1_T70 | GCTGGGTGACGCCAGGAGGC |
| 16275 | Fxn_T22 | TTCACGAGGAGGGAACCGTC |
| 9234 | Fxn upstream and Exon1_T60 | AGGCCACGGCGGCCGCAGAG |
| 16129 | Fxn_T71 | CAGGGAGGCGCCGCGCACGC |
| 16254 | Fxn_T420 | GATGAGGAAGATTCCTCAAG |
| 9174 | Fxn upstream and Exon1_T19 | GCAAAGCACGGAGTGCAACC |
| 9363 | Fxn_T554 | CATCCCCACAGCCATTCTTT |
| 9251 | Fxn_T192 | GGCGTGCGGCCCGCGGCGTG |
| 16144 | Fxn_T377 | GGCCTTGCAACTCCCTTCTC |
| 9372 | Fxn_T320 | GGGATCCCCTTCCGCCTTCC |
| 16263 | Fxn_T451 | TGAGGGTCTTGAAGATGCCA |
| 16290 | Fxn_T433 | GGAAGGGGATCCCTTCAGAG |
| 16143 | Fxn_T159 | TCAGGGCGGCCCGGCGGAAG |
| 16273 | Fxn_T105 | GTAGAGGGTGTTTCACGAGG |
| 16245 | Fxn_T601 | GGAAACCCAAAGAATGGCTG |
| 16221 | Fxn_T147 | TAAAGGTGACGCCCATTTTG |
| 9207 | Fxn upstream and Exon1_T24 | CGAGAGTCCACATGCTGCTC |
| 9233 | Fxn upstream and Exon1_T28 | GGCCACGGCGGCCGCAGAGT |
| 16185 | Fxn_T367 | GTGTGTGTGTTTGCGCGCAC |
| 16095 | Fxn upstream and Exon1_T50 | CGGAGCAGCATGTGGACTCT |
| 16256 | Fxn_T314 | GAGGAAGATTCCTCAAGGGG |
| 9360 | Fxn_T2 | CTTTCAAGCCGTGGCGTAAC |
| 16137 | Fxn_T384 | AGCTCACCCCGCTCCTTCTC |
| 9248 | Fxn_T113 | GCCCGCGGCTGTTCCCGGCG |
| 16175 | Fxn_T19 | GGTGGAGGGGACCGGTTCCG |
| 9346 | Fxn_T49 | CTCACACCAGGTCCGCAAAA |
| 16257 | Fxn_T573 | GATTCCTCAAGGGGAGGACA |
| 9195 | Fxn upstream and Exon1_T27 | GGCCGCAGGCACTCTTCTGT |
| 9361 | Fxn_T68 | GGTTTCCTCCTTTCAAGCCG |
| 9353 | Fxn_T454 | TGTACCCCCCAAAGGAAGAA |
| 16132 | Fxn_T42 | CGCGCACGCCGGGGTCGCTC |
| 16451 | Fxn_T390 | GTTTTTTAGATGGTACCTGG |
| 9311 | Fxn_T77 | TGAAAGTTTCACCTCGTTCC |
| 16276 | Fxn_T50 | TCACGAGGAGGGAACCGTCT |
| 16072 | Fxn upstream and Exon1_T53 | CCCCCACAGAAGAGTGCCTG |
| 9289 | Fxn_T4 | TTGACCCGCAGTCGCACCGC |
| 16453 | Fxn_T163 | ATGGTACCTGGTGGCTGTTA |
| 9250 | Fxn_T274 | GGCCCGCGGCGTGCGGCCCG |
| 9329 | Fxn_T307 | GGTCACACAGCTCTGCGGAG |
| 9328 | Fxn_T118 | GTCACACAGCTCTGCGGAGT |
| 9321 | Fxn_T368 | CAGAATCTGGAATAAAGGTC |
| 16134 | Fxn_T7 | GTCGCTCCGGGTACGCGCGC |
| 16081 | Fxn upstream and Exon1_T38 | GTCGCCGCAGCACCCAGCGC |
| 9378 | Fxn_T143 | ACACAAATATGGCTTGGACG |
| 9200 | Fxn upstream and Exon1_T44 | GGTGCTGCGGCGACCCCTGG |
| 9252 | Fxn_T229 | GGCGTGCGGCGTGCGGCCCG |
| 9241 | Fxn upstream and Exon1_T2 | CGTGCAGGTCGCATCGATGT |
| 16459 | Fxn_T406 | ACTTGGCGCTGCCGCCCAGG |
| 9185 | Fxn upstream and Exon1_T23 | GCAGCTAGAGGTTAGACCTC |
| 9193 | Fxn upstream and Exon1_T35 | CCGCAGGCACTCTTCTGTGG |
| 16246 | Fxn_T491 | GAAACCCAAAGAATGGCTGT |
| 16109 | Fxn upstream and Exon1_T25 | CCTCACCCGGGTCCCGCGGC |
| 9379 | Fxn_T553 | AGAGCAACACAAATATGGCT |
| 16064 | Fxn upstream and Exon1_T13 | TGCACGAATAGTGCTAAGCT |
| 9380 | Fxn_T249 | TCCGGAGAGCAACACAAATA |
| 16454 | Fxn_T231 | TGGTACCTGGTGGCTGTTAA |
| 16307 | Fxn_T55 | AACTTCCCACACGTGTTATT |
| 9283 | Fxn_T164 | GAAGCCAGTGTAAATGCAAC |
| 9374 | Fxn_T142 | CGGCGTACCAGCCACTCTGA |
| 16155 | Fxn_T15 | TTGTCCTGCGGTGCGACTGC |
| 9356 | Fxn_T252 | TATTTCTTTGTACCCCCCAA |
| 16112 | Fxn upstream and Exon1_T20 | GGTCCCGCGGCCGGCAGAGT |
| 9377 | Fxn_T196 | TTCATCTCCCCTAATACATG |
| 9345 | Fxn_T44 | TCACACCAGGTCCGCAAAAT |
| 9255 | Fxn_T146 | TGCGCGGCGCCTCCCTGCGC |
| 9227 | Fxn upstream and Exon1_T41 | CTCTGCCGGCCGCGGGACCC |
| 16122 | Fxn_T121 | CAGCCGCGGGCCGCACGCCG |
| 9268 | Fxn_T80 | TCCGCCGGGCCGCCCTGAGA |
| 9513 | Fxn_T230 | ACTCTGCTGATGGCCAGACG |
| 9366 | Fxn_T301 | AATACCATGTCCTCCCCTTG |
| 9204 | Fxn upstream and Exon1_T62 | CCCGCTCCGCCCTCCAGCGC |
| 9201 | Fxn upstream and Exon1_T31 | CTGGGTGCTGCGGCGACCCC |
| 9228 | Fxn upstream and Exon1_T15 | ACTCTGCCGGCCGCGGGACC |
| 16457 | Fxn_T158 | CCAACTTGGCGCTGCCGCCC |
| 9272 | Fxn_T8 | AGTTGCAAGGCCGCTTCCGC |
| 9253 | Fxn_T62 | CTGCGCAGGCGTGCGGCGTG |
| 16157 | Fxn_T30 | TGCGGTGCGACTGCGGGTCA |
| 16120 | Fxn_T23 | ATCCGCGCCGGGAACAGCCG |
| 9442 | Fxn_T259 | GCTTTCCTAGAGGAGATCTA |
| 16191 | Fxn_T108 | CGAAATGCTTTCCTGGAACG |
| 9197 | Fxn upstream and Exon1_T45 | CCCTGGTGGCCACTGGCCGC |
| 9229 | Fxn upstream and Exon1_T29 | GGGCCAACTCTGCCGGCCGC |
| 9223 | Fxn upstream and Exon1_T51 | GCGGGACCCGGGTGAGGGTC |
| 16291 | Fxn_T264 | GGGGATCCCTTCAGAGTGGC |
| 9188 | Fxn upstream and Exon1_T47 | TTCTGTGGGGGAGCAGCTAG |
| 9196 | Fxn upstream and Exon1_T34 | TGGCCGCAGGCACTCTTCTG |
| 16121 | Fxn_T74 | TCCGCGCCGGGAACAGCCGC |
| 9254 | Fxn_T122 | CGCCTCCCTGCGCAGGCGTG |
| 9225 | Fxn upstream and Exon1_T46 | CCGGCCGCGGGACCCGGGTG |
| 9230 | Fxn upstream and Exon1_T21 | GGGGCCAACTCTGCCGGCCG |
| 9445 | Fxn_T560 | ATAAATGTCTGCTTTCCTAG |
| 16200 | Fxn_T284 | TGCAGAATAGCTAGAGCAGC |
| 16063 | Fxn upstream and Exon1_T10 | ATGCACGAATAGTGCTAAGC |
| 16158 | Fxn_T97 | TGCGACTGCGGGTCAAGGCA |
| 16130 | Fxn_T177 | AGGGAGGCGCCGCGCACGCC |
| 16113 | Fxn upstream and Exon1_T68 | GCAGAGTTGGCCCCACTCTG |
| 16125 | Fxn_T65 | CGCACGCCGCACGCCTGCGC |
| 16148 | Fxn_T193 | CACTGGCTTCTGCTTTCCGA |
| 9317 | Fxn_T167 | CGGGTCAGTTTCCAAAAGCC |
| 16154 | Fxn_T17 | TTTGTCCTGCGGTGCGACTG |
| 16140 | Fxn_T240 | CGCTCCTTCTCAGGGCGGCC |
| 9441 | Fxn_T265 | AGGAGATCTAAGGACCATCA |
| 16383 | Fxn_T608 | TCTGGAAAAATAGGCAAGTG |
| 9392 | Fxn_T355 | AAGTCCTAACTTTTAAGCAC |
| 16114 | Fxn upstream and Exon1_T36 | GCCCCACTCTGCGGCCGCCG |
| 16387 | Fxn_T183 | ATGGTCCTTAGATCTCCTCT |
| 9238 | Fxn upstream and Exon1_T9 | CGATGTCGGTGCGCAGGCCA |
| 16384 | Fxn_T464 | ATAGGCAAGTGTGGCCATGA |
| 9461 | Fxn_T237 | ACAACCCATGCTGTCCACAC |
| 16397 | Fxn_T434 | CCTGCCTGTGTGGACAGCAT |
| 9222 | Fxn upstream and Exon1_T54 | CGGGACCCGGGTGAGGGTCT |
| 16392 | Fxn_T476 | CTATCTGAGCTGCCACGTAT |
| 9459 | Fxn_T597 | CCCATGCTGTCCACACAGGC |
| 16108 | Fxn upstream and Exon1_T18 | AGACCCTCACCCGGGTCCCG |
| 9231 | Fxn upstream and Exon1_T37 | CAGAGTGGGGCCAACTCTGC |
| 16393 | Fxn_T67 | TATCTGAGCTGCCACGTATT |
| 9239 | Fxn upstream and Exon1_T4 | TCGCATCGATGTCGGTGCGC |
| 16222 | Fxn_T20 | TGACGCCCATTTTGCGGACC |
| 16099 | Fxn upstream and Exon1_T7 | CTCGGGCGCCGCGCAGTAGC |
| 16146 | Fxn_T57 | TCTCCCGGTTGCATTTACAC |
| 16303 | Fxn_T466 | GCCATATTTGTGTTGCTCTC |
| 16306 | Fxn_T587 | CTCTCCGGAGTTTGTACTTT |
| 9383 | Fxn_T399 | CAAGCCTAAAGTACAAACTC |
| 16321 | Fxn_T387 | ATGGATTTCCTGGCAGGACG |
| 16379 | Fxn_T507 | AATGGATTTCCCAGCATCTC |
| 9454 | Fxn_T29 | AGGGGTGGAAGCCCAATACG |

[0545] Note that the SEQ ID NOs represent the DNA sequence of the genomic target, while the gRNA or sgRNA spacer sequence will be the RNA version of the DNA sequence.

[0546] Single gRNAs spanning different regions of the FXN gene were selected and tested for cutting efficiencies using saCas9. Further analysis of predicted off-target sites and evaluation of the gRNA target site within the FXN gene resulted in 74 gRNAs selected for screening. The prioritized list of 74 single gRNAs targeting the FXN gene were tested for cutting efficiencies using spCas9 (Table 8).

TABLE 8

| SEQ | | |
|---|---|---|
| ID | | |
| NO. | Name | Sequence |
| 6627 | FA Intron 1.txt_T6 | CAGGGAGGCGCCGCGCACGC |
| 5916 | Fxn upstream and Exon1_T10 | CCGAGAGTCCACATGCTGCT |
| 6625 | Fxn upstream and Exon1_T15 | GCCCAGGCCCAGACCCTCAC |
| 5911 | Fxn upstream and Exon1_T7 | CCGGTATGGGTTTACAGCAG |
| 6664 | FA Intron 1.txt_T90 | TTGCACATCTTGGGTATTTG |
| 5923 | FA Intron 1.txt_T51 | CGGGCCGCCCTGAGAAGGAG |
| 5917 | Fxn upstream and Exon1_T5 | CCGGCTACTGCGCGGCGCCC |
| 6651 | FA Intron 1.txt_T65 | TGGACAGCATGGGTTGTCAG |
| 6635 | FA Intron 1.txt_T167 | ACCTGGTGTGAGGATTAAAT |
| 6628 | FA Intron 1.txt_T2 | CCGCGCACGCCGGGGTCGCT |
| 5947 | FA Intron 1.txt_T139 | TAGATGCAAGGGGTGGAGAA |
| 5948 | FA Intron 1.txt_T70 | CTGCTTTAGAAGTAGATGCA |
| 6666 | FA Intron 1.txt_T113 | TTGGGTATTTGAGGAGTTGG |
| 6665 | FA Intron 1.txt_T101 | CATCTTGGGTATTTGAGGAG |
| 6630 | FA Intron 1.txt_T1 | GGTGGAGGGGACCGGTTCCG |
| 6640 | FA Intron 1.txt_T110 | AAGATGCCAAGGAAGTGGTA |
| 5926 | FA Intron 1.txt_T19 | CTGCGGAGTGGGGCAGAATC |
| 6650 | FA Intron 1.txt_T95 | CCCCTGCCTGTGTGGACAGC |
| 6641 | FA Intron 1.txt_T111 | CAAAGGCCAGGAAGGCGGAA |
| 6629 | FA Intron 1.txt_T4 | TTTTGTCCTGCGGTGCGACT |
| 6623 | Fxn upstream and Exon1_T11 | CTCTAGCTGCTCCCCCACAG |
| 6626 | Fxn upstream and Exon1_T2 | CACCCGGGTCCCGCGGCCGG |
| 5913 | Fxn upstream and Exon1_T16 | AGCTGCTGTCTTGCTGGGAA |
| 6637 | FA Intron 1.txt_T86 | GCTTGAAAGGAGGAAACCCA |
| 5939 | FA Intron 1.txt_T153 | CCCATGCTGTCCACACAGGC |
| 6660 | FA Intron 1.txt_T54 | TGCCGCCCAGGAGGTGGACA |
| 5927 | FA Intron 1.txt_T103 | CACAGCTCTGCGGAGTGGGG |
| 6668 | FA Intron 1.txt_T157 | TCTCCAAAATTCATCAGAAA |
| 6669 | FA Intron 1.txt_T142 | AAGCAGCTGTTCAACAGAAA |
| 5933 | FA Intron 1.txt_T5 | CGGCGTACCAGCCACTCTGA |
| 6621 | Fxn upstream and Exon1_T14 | GCTGCAGTCTCCCTTGGGTC |
| 5920 | Fxn upstream and Exon1_T3 | AACTCTGCCGGCCGCGGGAC |
| 5930 | FA Intron 1.txt_T7 | CCTTTCAAGCCGTGGCGTAA |
| 5919 | Fxn upstream and Exon1_T6 | GCCGGCCGCGGGACCCGGGT |
| 6658 | FA Intron 1.txt_T183 | CCACCGCGTCTGGCCATCAG |
| 6644 | FA Intron 1.txt_T143 | CATTGTGTTTGAAGAAACTT |
| 5922 | FA Intron 1.txt_T22 | GGCCCGCGGCTGTTCCCGGC |
| 5910 | Fxn upstream and Exon1_T18 | TGGGTATGTGGGGCCAGGAG |
| 6622 | Fxn upstream and Exon1_T19 | TCTCCATTTTTGTTAAATGC |
| 5931 | FA Intron 1.txt_T128 | CTCATCCCCACAGCCATTCT |
| 6663 | FA Intron 1.txt_T39 | CCATAGTTCCCTTGCACATC |
| 6624 | Fxn upstream and Exon1_T12 | GCCTGCGGCCAGTGGCCACC |
| 6642 | FA Intron 1.txt_T31 | AAGGCGGAAGGGGATCCCTT |
| 5943 | FA Intron 1.txt_T12 | TCCTGGGCGGCAGCGCCAAG |
| 5915 | Fxn upstream and Exon1_T8 | GCCCGCTCCGCCCTCCAGCG |
| 6618 | Fxn upstream and Exon1_T20 | TCACACAGCTAGGAAGTGGG |
| 5924 | FA Intron 1.txt_T68 | CAACCGGGAGAACCAGAGAA |
| 6638 | FA Intron 1.txt_T134 | GAAACCCAAAGAATGGCTGT |
| 5945 | FA Intron 1.txt_T88 | TTTGGAGACCAGGGGGAGCT |
| 5932 | FA Intron 1.txt_T56 | AATACCATGTCCTCCCCTTG |
| 5946 | FA Intron 1.txt_T87 | TCAAGTGAACTCAGTTTCTG |
| 6631 | FA Intron 1.txt_T77 | CACACCTAATATTTTCAAGG |
| 5914 | Fxn upstream and Exon1_T17 | AGCCTGCTTTGTGCAAAGCA |
| 5925 | FA Intron 1.txt_T112 | GGCAGAATCTGGAATAAAGG |
| 6619 | Fxn upstream and Exon1_T13 | GCTCCCAAGTTCCTCCTGTT |
| 5929 | FA Intron 1.txt_T74 | CCACGTCTCAGAGAGGTTAG |
| 6645 | FA Intron 1.txt_T152 | TAAAAGTTAGGACTTAGAAA |
| 6643 | FA Intron 1.txt_T30 | GCCATATTTGTGTTGCTCTC |
| 6633 | FA Intron 1.txt_T137 | CGCAGAGCTGTGTGACCTTG |
| 5928 | FA Intron 1.txt_T180 | CCCAAGGTCACACAGCTCTG |
| 6634 | FA Intron 1.txt_T33 | CCATTTTGCGGACCTGGTGT |
| 6659 | FA Intron 1.txt_T150 | CAGCAGAGTTTTTAATTTAG |
| 6639 | FA Intron 1.txt_T94 | GGGAGGACATGGTATTTAAT |
| 6661 | FA Intron 1.txt_T124 | AGGAGGTGGACACTGGGTTT |
| 6636 | FA Intron 1.txt_T155 | AGTTCCCCTTTCTTCCTTTG |
| 5912 | Fxn upstream and Exon1_T1 | GAGGCTGCTTGGCCGCCGGT |
| 5921 | Fxn upstream and Exon1_T4 | TGCGCAGGCCACGGCGGCCG |
| 6632 | FA Intron 1.txt_T136 | AGGTGAAACTTTCAGAGCTG |
| 5950 | FA Intron 1.txt_T147 | AATATTTTGTATGTACTAGG |
| 6662 | FA Intron 1.txt_T151 | TGGGCCTCTTTTTTTCTATA |
| 5951 | FA Intron 1.txt_T179 | TTAAAATACTGATTACATGT |
| 6667 | FA Intron 1.txt_T52 | ATTTTAAAGCCCTGACTGTC |
| 6620 | Fxn upstream and Exon1_T9 | CCACCAGGCTGCAGTCTCCC |
| 5949 | FA Intron 1.txt_T186 | TTCTTTTTAACTAGAAAATG |

[0547] Note that the SEQ ID NOs represent the DNA sequence of the genomic target, while the gRNA or sgRNA spacer sequence will be the RNA version of the DNA sequence.

### Example 8—Testing of Preferred Guides in In Vitro Transcribed (IVT) gRNA Screen

[0548] To identify a large spectrum of pairs of gRNAs able to edit the cognate DNA target region, an in vitro transcribed (IVT) gRNA screen was conducted. The relevant genomic sequence was submitted for analysis using a gRNA design software. The resulting list of gRNAs was narrowed to a select list of gRNAs as described above based on uniqueness of sequence (only gRNAs without a perfect match somewhere eke in the genome were screened) and minimal predicted off targets. This set of gRNAs was in vitro transcribed, and transfected using Lipofectamine MessengerMAX into HEK293T cells that constitutively express Cas9. Cells were harvested 48 hours post transfection, the genomic DNA was isolated, and cutting efficiency was evaluated using TIDE analysis. (FIGS. 2A-E; FIGS. 3A-C; FIGS. 4A-C; and FIG. 5).

[0549] The results also demonstrate that guide sequences efficiently cut genomic sequence containing a single nucleotide polymorphisms (SNPs). For example, gRNA containing the guide sequence spacer, ‘Fxn upstream and Exon1_T73’ (SEQ ID NO: 9214) efficiently cut (78.2%, FIG. 2B) genomic targets sequence containing a SNP at position 5. Thus, gRNAs containing spacer guide sequences: ‘Fxn upstream and Exon1_T73’ or ‘Fxn upstream and Exon1_T73_V2’ can be used to efficiently edit FXN.

[0550] The gRNA or pairs of gRNA with significant activity can then be followed up in cultured cells to measure correction of the FXN mutation. Off-target events can be followed again. A variety of cells can be transfected and the level of gene correction and possible off-target events measured. These experiments allow optimization of nuclease and donor design and delivery.

### Example 9—Testing of Preferred Guides in Cells for Off-Target Activity

[0551] The gRNAs having the best on-target activity from the IVT screen in the above example are tested for off-target activity using Hybrid capture assays, GUIDE Seq. and whole genome sequencing in addition to other methods.

### Example 10—Testing Different Approaches for HDR Gene Editing

[0552] After testing the gRNAs for both on-target activity and off-target activity, repeat expansion correction and whole gene correction strategy will be tested for HDR gene editing.

[0553] For the whole gene correction approach, a single-stranded or double-stranded DNA having homologous arms to the FXN chromosomal region may include more than 40 nt of the first exon (the first coding exon or upstream sequence) of the FXN gene, the complete CDS of the FXN gene and 3′ UTR of the FXN gene, and at least 40 nt of the following intron. The single-stranded or double-stranded DNA having homologous arms to the FXN chromosomal region may include more than 80 nt of the first exon of the FXN gene, the complete CDS of the FXN gene and 3′ UTR of the FXN gene, and at least 80 nt of the following intron. The single-stranded or double-stranded DNA having homologous arms to the FXN chromosomal region may include more than 100 nt of the first exon of the FXN gene, the complete CDS of the FXN gene and 3′ UTR of the FXN gene, and at least 100 nt of the following intron. The single-stranded or double-stranded DNA having homologous arms to the FXN chromosomal region may include more than 150 nt of the first exon of the FXN gene, the complete CDS of the FXN gene and 3′ UTR of the FXN gene, and at least 150 nt of the following intron. The single-stranded or double-stranded DNA having homologous arms to the FXN chromosomal region may include more than 300 nt of the first exon of the FXN gene, the complete CDS of the FXN gene and 3′ UTR of the FXN gene, and at least 300 nt of the following intron. The single-stranded or double-stranded DNA having homologous arms to the FXN chromosomal region may include more than 400 nt of the first exon of the FXN gene, the complete CDS of the FXN gene and 3′ UTR of the FXN gene, and at least 400 nt of the following intron.

[0554] Alternatively, the DNA template will be delivered by a recombinant AAV particle such as those taught herein.

[0555] A knock-in of FXN cDNA can be performed into any selected chromosomal location, including the FXN gene locus or in a “safe-harbor” locus, i.e., AAVS1 (PPP1R12C), ALB, Angpt13, ApoC3, ASGR2, CCR5, FIX (F9), Gys2, HGD, Lp(a), Pcsk9, Serpina1, TF, and/or TTR. Assessment of efficiency of HDR mediated knock-in of cDNA into the first exon can utilize cDNA knock-in into “safe harbor” sites such as: single-stranded or double-stranded DNA having homologous arms to one of the following regions, for example: exon 1-2 of AAVS1 (PPP1R12C), exon 1-2 of ALB, exon 1-2 of Angpt13, exon 1-2 of ApoC3, exon 1-2 of ASGR2, exon 1-2 of CCR5, exon 1-2 of FIX (F9), exon 1-2 of Gys2, exon 1-2 of HGD, exon 1-2 of Lp(a), exon 1-2 of Pcsk9, exon 1-2 of Serpina1, exon 1-2 of TF, or exon 1-2 of TTR; 5′UTR correspondent to FXN or alternative 5′ UTR, complete CDS of FXN and 3′ UTR of FXN or modified 3′ UTR and at least 80 nt of the first intron, alternatively same DNA template sequence will be delivered by AAV.

### Example 11—Re-Assessment of Lead CRISPR-Cas9/DNA Donor Combinations

[0556] After testing the different strategies for gene editing, the lead CRISPR-Cas9/DNA donor combinations will be re-assessed in cells for efficiency of deletion, recombination, and off-target specificity. Cas9 mRNA or RNP will be formulated into lipid nanoparticles for delivery, sgRNAs will be formulated into nanoparticles or delivered as a recombinant AAV particle, and donor DNA will be formulated into nanoparticles or delivered as recombinant AAV particle.

### Example 12—In Vivo Testing in Relevant Animal Model

[0557] After the CRISPR-Cas9/DNA donor combinations have been re-assessed, the lead formulations will be tested in vivo in an animal model.

[0558] Culture in human cells allows direct testing on the human target and the background human genome, as described above.

[0559] Preclinical efficacy and safety evaluations can be observed through engraftment of modified mouse or human neurons in a mouse model. The modified cells can be observed in the months after engraftment.

### XI. Equivalents and Scope

[0560] Those skilled in the art will recognize, or be able to ascertain using no more than routine experimentation, many equivalents to the specific examples in accordance with the invention described herein. The scope of the present disclosure is not intended to be limited to the above Description, but rather is as set forth in the appended claims.

[0561] Claims or descriptions that include “or” between one or more members of a group are considered satisfied if one, more than one, or all of the group members are present in, employed in, or otherwise relevant to a given product or process unless indicated to the contrary or otherwise evident from the context. The present disclosure includes examples in which exactly one member of the group is present in, employed in, or otherwise relevant to a given product or process. The present disclosure includes examples in which more than one, or the entire group members are present in, employed in, or otherwise relevant to a given product or process.

[0562] In addition, it is to be understood that any particular example of the present disclosure that falls within the prior art may be explicitly excluded from any one or more of the claims. Since such examples are deemed to be known to one of ordinary skill in the art, they may be excluded even if the exclusion is not set forth explicitly herein. Any particular example of the compositions of the present disclosure (e.g., any antibiotic, therapeutic or active ingredient; any method of production; any method of use; etc.) can be excluded from any one or more claims, for any reason, whether or not related to the existence of prior art.

[0563] It is to be understood that the words which have been used are words of description rather than limitation, and that changes may be made within the purview of the appended claims without departing from the true scope and spirit of the present disclosure in its broader aspects.

[0564] While the present invention has been described at some length and with some particularity with respect to the several described examples, it is not intended that it should be limited to any such particulars or examples or any particular example, but it is to be construed with references to the appended claims so as to provide the broadest possible interpretation of such claims in view of the prior art and, therefore, to effectively encompass the intended scope of the invention.

### Note Regarding Illustrative Examples

[0565] While the present disclosure provides descriptions of various specific aspects for the purpose of illustrating various aspects of the present disclosure and/or its potential applications, it is understood that variations and modifications will occur to those skilled in the art. Accordingly, the invention or inventions described herein should be understood to be at least as broad as they are claimed, and not as more narrowly defined by particular illustrative aspects provided herein.

[0566] Any patent, publication, or other disclosure material identified herein is incorporated by reference into this specification in its entirety unless otherwise indicated, but only to the extent that the incorporated material does not conflict with existing descriptions, definitions, statements, or other disclosure material expressly set forth in this specification. As such, and to the extent necessary, the express disclosure as set forth in this specification supersedes any conflicting material incorporated by reference. Any material, or portion thereof, that is said to be incorporated by reference into this specification, but which conflicts with existing definitions, statements, or other disclosure material set forth herein, is only incorporated to the extent that no conflict arises between that incorporated material and the existing disclosure material. Applicants reserve the right to amend this specification to expressly recite any subject matter, or portion thereof, incorporated by reference herein.

The application's sequence listing, which the Patent Office published only in electronic form, follows.

SEQUENCE LISTING (37549 sequences)

SEQ ID NO: 1 - protein, 1368 aa, Streptococcus pyogenes [sequence omitted]

SEQ ID NO: 2 - DNA, 4107 bp, Streptococcus pyogenes
  source 1..4107: mol_type = genomic DNA
atggataagaaatactcaataggcttagatatcggcacaaatagcgtcggatgggcggtgatcactgatgaatataaggttccgtctaaaaagttcaaggttctgggaaatacagaccgccacagtatcaaaaaaaatcttataggggctcttttatttgacagtggagagacagcggaagcgactcgtctcaaacggacagctcgtagaaggtatacacgtcggaagaatcgtatttgttatctacaggagattttttcaaatgagatggcgaaagtagatgatagtttctttcatcgacttgaagagtcttttttggtggaagaagacaagaagcatgaacgtcatcctatttttggaaatatagtagatgaagttgcttatcatgagaaatatccaactatctatcatctgcgaaaaaaattggtagattctactgataaagcggatttgcgcttaatctatttggccttagcgcatatgattaagtttcgtggtcattttttgattgagggagatttaaatcctgataatagtgatgtggacaaactatttatccagttggtacaaacctacaatcaattatttgaagaaaaccctattaacgcaagtggagtagatgctaaagcgattctttctgcacgattgagtaaatcaagacgattagaaaatctcattgctcagctccccggtgagaagaaaaatggcttatttgggaatctcattgctttgtcattgggtttgacccctaattttaaatcaaattttgatttggcagaagatgctaaattacagctttcaaaagatacttacgatgatgatttagataatttattggcgcaaattggagatcaatatgctgatttgtttttggcagctaagaatttatcagatgctattttactttcagatatcctaagagtaaatactgaaataactaaggctcccctatcagcttcaatgattaaacgctacgatgaacatcatcaagacttgactcttttaaaagctttagttcgacaacaacttccagaaaagtataaagaaatcttttttgatcaatcaaaaaacggatatgcaggttatattgatgggggagctagccaagaagaattttataaatttatcaaaccaattttagaaaaaatggatggtactgaggaattattggtgaaactaaatcgtgaagatttgctgcgcaagcaacggacctttgacaacggctctattccccatcaaattcacttgggtgagctgcatgctattttgagaagacaagaagacttttatccatttttaaaagacaatcgtgagaagattgaaaaaatcttgacttttcgaattccttattatgttggtccattggcgcgtggcaatagtcgttttgcatggatgactcggaagtctgaagaaacaattaccccatggaattttgaagaagttgtcgataaaggtgcttcagctcaatcatttattgaacgcatgacaaactttgataaaaatcttccaaatgaaaaagtactaccaaaacatagtttgctttatgagtattttacggtttataacgaattgacaaaggtcaaatatgttactgaaggaatgcgaaaaccagcatttctttcaggtgaacagaagaaagccattgttgatttactcttcaaaacaaatcgaaaagtaaccgttaagcaattaaaagaagattatttcaaaaaaatagaatgttttgatagtgttgaaatttcaggagttgaagatagatttaatgcttcattaggtacctaccatgatttgctaaaaattattaaagataaagattttttggataatgaagaaaatgaagatatcttagaggatattgttttaacattgaccttatttgaagatagggagatgattgaggaaagacttaaaacatatgctcacctctttgatgataaggtgatgaaacagcttaaacgtcgccgttatactggttggggacgtttgtctcgaaaattgattaatggtattagggataagcaatctggcaaaacaatattagattttttgaaatcagatggttttgccaatcgcaattttatgcagctgatccatgatgatagtttgacatttaaagaagacattcaaaaagcacaagtgtctggacaaggcgatagtttacatgaacatattgcaaatttagctggtagccctgctattaaaaaaggtattttacagactgtaaaagttgttgatgaattggtcaaagtaatggggcggcataagccagaaaatatcgttattgaaatggcacgtgaaaatcagacaactcaaaagggccagaaaaattcgcgagagcgtatgaaacgaatcgaagaaggtatcaaagaattaggaagtcagattcttaaagagcatcctgttgaaaatactcaattgcaaaatgaaaagctctatctctattatctccaaaatggaagagacatgtatgtggaccaagaattagatattaatcgtttaagtgattatgatgtcgatcacattgttccacaaagtttccttaaagacgattcaatagacaataaggtcttaacgcgttctgataaaaatcgtggtaaatcggataacgttccaagtgaagaagtagtcaaaaagatgaaaaactattggagacaacttctaaacgccaagttaatcactcaacgtaagtttgataatttaacgaaagctgaacgtggaggtttgagtgaacttgataaagctggttttatcaaacgccaattggttgaaactcgccaaatcactaagcatgtggcacaaattttggatagtcgcatgaatactaaatacgatgaaaatgataaacttattcgagaggttaaagtgattaccttaaaatctaaattagtttctgacttccgaaaagatttccaattctataaagtacgtgagattaacaattaccatcatgcccatgatgcgtatctaaatgccgtcgttggaactgctttgattaagaaatatccaaaacttgaatcggagtttgtctatggtgattataaagtttatgatgttcgtaaaatgattgctaagtctgagcaagaaataggcaaagcaaccgcaaaatatttcttttactctaatatcatgaacttcttcaaaacagaaattacacttgcaaatggagagattcgcaaacgccctctaatcgaaactaatggggaaactggagaaattgtctgggataaagggcgagattttgccacagtgcgcaaagtattgtccatgccccaagtcaatattgtcaagaaaacagaagtacagacaggcggattctccaaggagtcaattttaccaaaaagaaattcggacaagcttattgctcgtaaaaaagactgggatccaaaaaaatatggtggttttgatagtccaacggtagcttattcagtcctagtggttgctaaggtggaaaaagggaaatcgaagaagttaaaatccgttaaagagttactagggatcacaattatggaaagaagttcctttgaaaaaaatccgattgactttttagaagctaaaggatataaggaagttaaaaaagacttaatcattaaactacctaaatatagtctttttgagttagaaaacggtcgtaaacggatgctggctagtgccggagaattacaaaaaggaaatgagctggctctgccaagcaaatatgtgaattttttatatttagctagtcattatgaaaagttgaagggtagtccagaagataacgaacaaaaacaattgtttgtggagcagcataagcattatttagatgagattattgagcaaatcagtgaattttctaagcgtgttattttagcagatgccaatttagataaagttcttagtgcatataacaaacatagagacaaaccaatacgtgaacaagcagaaaatattattcatttatttacgttgacgaatcttggagctcccgctgcttttaaatattttgatacaacaattgatcgtaaacgatatacgtctacaaaagaagttttagatgccactcttatccatcaatccatcactggtctttatgaaacacgcattgatttgagtcagctaggaggtgactga

SEQ ID NO: 3 - DNA, 4107 bp, Streptococcus pyogenes
  source 1..4107: mol_type = genomic DNA
atggacaagaagtactccattgggctcgctatcggcacaaacagcgtcggctgggccgtcattacggacgagtacaaggtgccgagcaaaaaattcaaagttctgggcaataccgatcgccacagcataaagaagaacctcattggcgccctcctgttcgactccggggagacggccgaagccacgcggctcaaaagaacagcacggcgcagatatacccgcagaaagaatcggatctgctacctgcaggagatctttagtaatgagatggctaaggtggatgactctttcttccataggctggaggagtcctttttggtggaggaggataaaaagcacgagcgccacccaatctttggcaatatcgtggacgaggtggcgtaccatgaaaagtacccaaccatatatcatctgaggaagaagcttgtagacagtactgataaggctgacttgcggttgatctatctcgcgctggcgcatatgatcaaatttcggggacacttcctcatcgagggggacctgaacccagacaacagcgatgtcgacaaactctttatccaactggttcagacttacaatcagcttttcgaagagaacccgatcaacgcatccggagttgacgccaaagcaatcctgagcgctaggctgtccaaatcccggcggctcgaaaacctcatcgcacagctccctggggagaagaagaacggcctgtttggtaatcttatcgccctgtcactcgggctgacccccaactttaaatctaacttcgacctggccgaagatgccaagcttcaactgagcaaagacacctacgatgatgatctcgacaatctgctggcccagatcggcgaccagtacgcagacctttttttggcggcaaagaacctgtcagacgccattctgctgagtgatattctgcgagtgaacacggagatcaccaaagctccgctgagcgctagtatgatcaagcgctatgatgagcaccaccaagacttgactttgctgaaggcccttgtcagacagcaactgcctgagaagtacaaggaaattttcttcgatcagtctaaaaatggctacgccggatacattgacggcggagcaagccaggaggaattttacaaatttattaagcccatcttggaaaaaatggacggcaccgaggagctgctggtaaagcttaacagagaagatctgttgcgcaaacagcgcactttcgacaatggaagcatcccccaccagattcacctgggcgaactgcacgctatcctcaggcggcaagaggatttctacccctttttgaaagataacagggaaaagattgagaaaatcctcacatttcggataccctactatgtaggccccctcgcccggggaaattccagattcgcgtggatgactcgcaaatcagaagagaccatcactccctggaacttcgaggaagtcgtggataagggggcctctgcccagtccttcatcgaaaggatgactaactttgataaaaatctgcctaacgaaaaggtgcttcctaaacactctctgctgtacgagtacttcacagtttataacgagctcaccaaggtcaaatacgtcacagaagggatgagaaagccagcattcctgtctggagagcagaagaaagctatcgtggacctcctcttcaagacgaaccggaaagttaccgtgaaacagctcaaagaagactatttcaaaaagattgaatgtttcgactctgttgaaatcagcggagtggaggatcgcttcaacgcatccctgggaacgtatcacgatctcctgaaaatcattaaagacaaggacttcctggacaatgaggagaacgaggacattcttgaggacattgtcctcacccttacgttgtttgaagatagggagatgattgaagaacgcttgaaaacttacgctcatctcttcgacgacaaagtcatgaaacagctcaagaggcgccgatatacaggatgggggcggctgtcaagaaaactgatcaatgggatccgagacaagcagagtggaaagacaatcctggattttcttaagtccgatggatttgccaaccggaacttcatgcagttgatccatgatgactctctcacctttaaggaggacatccagaaagcacaagtttctggccagggggacagtcttcacgagcacatcgctaatcttgcaggtagcccagctatcaaaaagggaatactgcagaccgttaaggtcgtggatgaactcgtcaaagtaatgggaaggcataagcccgagaatatcgttatcgagatggcccgagagaaccaaactacccagaagggacagaagaacagtagggaaaggatgaagaggattgaagagggtataaaagaactggggtcccaaatccttaaggaacacccagttgaaaacacccagcttcagaatgagaagctctacctgtactacctgcagaacggcagggacatgtacgtggatcaggaactggacatcaatcggctctccgactacgacgtggctgctatcgtgccccagtcttttctcaaagatgattctattgataataaagtgttgacaagatccgataaagctagagggaagagtgataacgtcccctcagaagaagttgtcaagaaaatgaaaaattattggcggcagctgctgaacgccaaactgatcacacaacggaagttcgataatctgactaaggctgaacgaggtggcctgtctgagttggataaagccggcttcatcaaaaggcagcttgttgagacacgccagatcaccaagcacgtggcccaaattctcgattcacgcatgaacaccaagtacgatgaaaatgacaaactgattcgagaggtgaaagttattactctgaagtctaagctggtctcagatttcagaaaggactttcagttttataaggtgagagagatcaacaattaccaccatgcgcatgatgcctacctgaatgcagtggtaggcactgcacttatcaaaaaatatcccaagcttgaatctgaatttgtttacggagactataaagtgtacgatgttaggaaaatgatcgcaaagtctgagcaggaaataggcaaggccaccgctaagtacttcttttacagcaatattatgaattttttcaagaccgagattacactggccaatggagagattcggaagcgaccacttatcgaaacaaacggagaaacaggagaaatcgtgtgggacaagggtagggatttcgcgacagtccggaaggtcctgtccatgccgcaggtgaacatcgttaaaaagaccgaagtacagaccggaggcttctccaaggaaagtatcctcccgaaaaggaacagcgacaagctgatcgcacgcaaaaaagattgggaccccaagaaatacggcggattcgattctcctacagtcgcttacagtgtactggttgtggccaaagtggagaaagggaagtctaaaaaactcaaaagcgtcaaggaactgctgggcatcacaatcatggagcgatcaagcttcgaaaaaaaccccatcgactttctcgaggcgaaaggatataaagaggtcaaaaaagacctcatcattaagcttcccaagtactctctctttgagcttgaaaacggccggaaacgaatgctcgctagtgcgggcgagctgcagaaaggtaacgagctggcactgccctctaaatacgttaatttcttgtatctggccagccactatgaaaagctcaaagggtctcccgaagataatgagcagaagcagctgttcgtggaacaacacaaacactaccttgatgagatcatcgagcaaataagcgaattctccaaaagagtgatcctcgccgacgctaacctcgataaggtgctttctgcttacaataagcacagggataagcccatcagggagcaggcagaaaacattatccacttgtttactctgaccaacttgggcgcgcctgcagccttcaagtacttcgacaccaccatagacagaaagcggtacacctctacaaaggaggtcctggacgccacactgattcatcagtcaattacggggctctatgaaacaagaatcgacctctctcagctcggtggagactaa

SEQ ID NO: 4 - DNA, 4140 bp, Streptococcus pyogenes
  source 1..4140: mol_type = genomic DNA
atggacaagaagtactccattgggctcgatatcggcacaaacagcgtcggctgggccgtcattacggacgagtacaaggtgccgagcaaaaaattcaaagttctgggcaataccgatcgccacagcataaagaagaacctcattggcgccctcctgttcgactccggggagacggccgaagccacgcggctcaaaagaacagcacggcgcagatatacccgcagaaagaatcggatctgctacctgcaggagatctttagtaatgagatggctaaggtggatgactctttcttccataggctggaggagtcctttttggtggaggaggataaaaagcacgagcgccacccaatctttggcaatatcgtggacgaggtggcgtaccatgaaaagtacccaaccatatatcatctgaggaagaagcttgtagacagtactgataaggctgacttgcggttgatctatctcgcgctggcgcatatgatcaaatttcggggacacttcctcatcgagggggacctgaacccagacaacagcgatgtcgacaaactctttatccaactggttcagacttacaatcagcttttcgaagagaacccgatcaacgcatccggagttgacgccaaagcaatcctgagcgctaggctgtccaaatcccggcggctcgaaaacctcatcgcacagctccctggggagaagaagaacggcctgtttggtaatcttatcgccctgtcactcgggctgacccccaactttaaatctaacttcgacctggccgaagatgccaagcttcaactgagcaaagacacctacgatgatgatctcgacaatctgctggcccagatcggcgaccagtacgcagacctttttttggcggcaaagaacctgtcagacgccattctgctgagtgatattctgcgagtgaacacggagatcaccaaagctccgctgagcgctagtatgatcaagcgctatgatgagcaccaccaagacttgactttgctgaaggcccttgtcagacagcaactgcctgagaagtacaaggaaattttcttcgatcagtctaaaaatggctacgccggatacattgacggcggagcaagccaggaggaattttacaaatttattaagcccatcttggaaaaaatggacggcaccgaggagctgctggtaaagcttaacagagaagatctgttgcgcaaacagcgcactttcgacaatggaagcatcccccaccagattcacctgggcgaactgcacgctatcctcaggcggcaagaggatttctacccctttttgaaagataacagggaaaagattgagaaaatcctcacatttcggataccctactatgtaggccccctcgcccggggaaattccagattcgcgtggatgactcgcaaatcagaagagaccatcactccctggaacttcgaggaagtcgtggataagggggcctctgcccagtccttcatcgaaaggatgactaactttgataaaaatctgcctaacgaaaaggtgcttcctaaacactctctgctgtacgagtacttcacagtttataacgagctcaccaaggtcaaatacgtcacagaagggatgagaaagccagcattcctgtctggagagcagaagaaagctatcgtggacctcctcttcaagacgaaccggaaagttaccgtgaaacagctcaaagaagactatttcaaaaagattgaatgtttcgactctgttgaaatcagcggagtggaggatcgcttcaacgcatccctgggaacgtatcacgatctcctgaaaatcattaaagacaaggacttcctggacaatgaggagaacgaggacattcttgaggacattgtcctcacccttacgttgtttgaagatagggagatgattgaagaacgcttgaaaacttacgctcatctcttcgacgacaaagtcatgaaacagctcaagaggcgccgatatacaggatgggggcggctgtcaagaaaactgatcaatgggatccgagacaagcagagtggaaagacaatcctggattttcttaagtccgatggatttgccaaccggaacttcatgcagttgatccatgatgactctctcacctttaaggaggacatccagaaagcacaagtttctggccagggggacagtcttcacgagcacatcgctaatcttgcaggtagcccagctatcaaaaagggaatactgcagaccgttaaggtcgtggatgaactcgtcaaagtaatgggaaggcataagcccgagaatatcgttatcgagatggcccgagagaaccaaactacccagaagggacagaagaacagtagggaaaggatgaagaggattgaagagggtataaaagaactggggtcccaaatccttaaggaacacccagttgaaaacacccagcttcagaatgagaagctctacctgtactacctgcagaacggcagggacatgtacgtggatcaggaactggacatcaatcggctctccgactacgacgtggatcatatcgtgccccagtcttttctcaaagatgattctattgataataaagtgttgacaagatccgataaaaatagagggaagagtgataacgtcccctcagaagaagttgtcaagaaaatgaaaaattattggcggcagctgctgaacgccaaactgatcacacaacggaagttcgataatctgactaaggctgaacgaggtggcctgtctgagttggataaagccggcttcatcaaaaggcagcttgttgagacacgccagatcaccaagcacgtggcccaaattctcgattcacgcatgaacaccaagtacgatgaaaatgacaaactgattcgagaggtgaaagttattactctgaagtctaagctggtctcagatttcagaaaggactttcagttttataaggtgagagagatcaacaattaccaccatgcgcatgatgcctacctgaatgcagtggtaggcactgcacttatcaaaaaatatcccaagcttgaatctgaatttgtttacggagactataaagtgtacgatgttaggaaaatgatcgcaaagtctgagcaggaaataggcaaggccaccgctaagtacttcttttacagcaatattatgaattttttcaagaccgagattacactggccaatggagagattcggaagcgaccacttatcgaaacaaacggagaaacaggagaaatcgtgtgggacaagggtagggatttcgcgacagtccggaaggtcctgtccatgccgcaggtgaacatcgttaaaaagaccgaagtacagaccggaggcttctccaaggaaagtatcctcccgaaaaggaacagcgacaagctgatcgcacgcaaaaaagattgggaccccaagaaatacggcggattcgattctcctacagtcgcttacagtgtactggttgtggccaaagtggagaaagggaagtctaaaaaactcaaaagcgtcaaggaactgctgggcatcacaatcatggagcgatcaagcttcgaaaaaaaccccatcgactttctcgaggcgaaaggatataaagaggtcaaaaaagacctcatcattaagcttcccaagtactctctctttgagcttgaaaacggccggaaacgaatgctcgctagtgcgggcgagctgcagaaaggtaacgagctggcactgccctctaaatacgttaatttcttgtatctggccagccactatgaaaagctcaaagggtctcccgaagataatgagcagaagcagctgttcgtggaacaacacaaacactaccttgatgagatcatcgagcaaataagcgaattctccaaaagagtgatcctcgccgacgctaacctcgataaggtgctttctgcttacaataagcacagggataagcccatcagggagcaggcagaaaacattatccacttgtttactctgaccaacttgggcgcgcctgcagccttcaagtacttcgacaccaccatagacagaaagcggtacacctctacaaaggaggtcctggacgccacactgattcatcagtcaattacggggctctatgaaacaagaatcgacctctctcagctcggtggagacagcagggctgaccccaagaagaagaggaaggtgtga

SEQ ID NO: 5 - DNA, 4200 bp, Streptococcus pyogenes
  source 1..4200: mol_type = genomic DNA
atggacaagaagtactccattgggctcgatatcggcacaaacagcgtcggctgggccgtcattacggacgagtacaaggtgccgagcaaaaaattcaaagttctgggcaataccgatcgccacagcataaagaagaacctcattggcgccctcctgttcgactccggggagacggccgaagccacgcggctcaaaagaacagcacggcgcagatatacccgcagaaagaatcggatctgctacctgcaggagatctttagtaatgagatggctaaggtggatgactctttcttccataggctggaggagtcctttttggtggaggaggataaaaagcacgagcgccacccaatctttggcaatatcgtggacgaggtggcgtaccatgaaaagtacccaaccatatatcatctgaggaagaagcttgtagacagtactgataaggctgacttgcggttgatctatctcgcgctggcgcatatgatcaaatttcggggacacttcctcatcgagggggacctgaacccagacaacagcgatgtcgacaaactctttatccaactggttcagacttacaatcagcttttcgaagagaacccgatcaacgcatccggagttgacgccaaagcaatcctgagcgctaggctgtccaaatcccggcggctcgaaaacctcatcgcacagctccctggggagaagaagaacggcctgtttggtaatcttatcgccctgtcactcgggctgacccccaactttaaatctaacttcgacctggccgaagatgccaagcttcaactgagcaaagacacctacgatgatgatctcgacaatctgctggcccagatcggcgaccagtacgcagacctttttttggcggcaaagaacctgtcagacgccattctgctgagtgatattctgcgagtgaacacggagatcaccaaagctccgctgagcgctagtatgatcaagcgctatgatgagcaccaccaagacttgactttgctgaaggcccttgtcagacagcaactgcctgagaagtacaaggaaattttcttcgatcagtctaaaaatggctacgccggatacattgacggcggagcaagccaggaggaattttacaaatttattaagcccatcttggaaaaaatggacggcaccgaggagctgctggtaaagcttaacagagaagatctgttgcgcaaacagcgcactttcgacaatggaagcatcccccaccagattcacctgggcgaactgcacgctatcctcaggcggcaagaggatttctacccctttttgaaagataacagggaaaagattgagaaaatcctcacatttcggataccctactatgtaggccccctcgcccggggaaattccagattcgcgtggatgactcgcaaatcagaagagaccatcactccctggaacttcgaggaagtcgtggataagggggcctctgcccagtccttcatcgaaaggatgactaactttgataaaaatctgcctaacgaaaaggtgcttcctaaacactctctgctgtacgagtacttcacagtttataacgagctcaccaaggtcaaatacgtcacagaagggatgagaaagccagcattcctgtctggagagcagaagaaagctatcgtggacctcctcttcaagacgaaccggaaagttaccgtgaaacagctcaaagaagactatttcaaaaagattgaatgtttcgactctgttgaaatcagcggagtggaggatcgcttcaacgcatccctgggaacgtatcacgatctcctgaaaatcattaaagacaaggacttcctggacaatgaggagaacgaggacattcttgaggacattgtcctcacccttacgttgtttgaagatagggagatgattgaagaacgcttgaaaacttacgctcatctcttcgacgacaaagtcatgaaacagctcaagaggcgccgatatacaggatgggggcggctgtcaagaaaactgatcaatgggatccgagacaagcagagtggaaagacaatcctggattttcttaagtccgatggatttgccaaccggaacttcatgcagttgatccatgatgactctctcacctttaaggaggacatccagaaagcacaagtttctggccagggggacagtcttcacgagcacatcgctaatcttgcaggtagcccagctatcaaaaagggaatactgcagaccgttaaggtcgtggatgaactcgtcaaagtaatgggaaggcataagcccgagaatatcgttatcgagatggcccgagagaaccaaactacccagaagggacagaagaacagtagggaaaggatgaagaggattgaagagggtataaaagaactggggtcccaaatccttaaggaacacccagttgaaaacacccagcttcagaatgagaagctctacctgtactacctgcagaacggcagggacatgtacgtggatcaggaactggacatcaatcggctctccgactacgacgtggatcatatcgtgccccagtcttttctcaaagatgattctattgataataaagtgttgacaagatccgataaaaatagagggaagagtgataacgtcccctcagaagaagttgtcaagaaaatgaaaaattattggcggcagctgctgaacgccaaactgatcacacaacggaagttcgataatctgactaaggctgaacgaggtggcctgtctgagttggataaagccggcttcatcaaaaggcagcttgttgagacacgccagatcaccaagcacgtggcccaaattctcgattcacgcatgaacaccaagtacgatgaaaatgacaaactgattcgagaggtgaaagttattactctgaagtctaagctggtctcagatttcagaaaggactttcagttttataaggtgagagagatcaacaattaccaccatgcgcatgatgcctacctgaatgcagtggtaggcactgcacttatcaaaaaatatcccaagcttgaatctgaatttgtttacggagactataaagtgtacgatgttaggaaaatgatcgcaaagtctgagcaggaaataggcaaggccaccgctaagtacttcttttacagcaatattatgaattttttcaagaccgagattacactggccaatggagagattcggaagcgaccacttatcgaaacaaacggagaaacaggagaaatcgtgtgggacaagggtagggatttcgcgacagtccggaaggtcctgtccatgccgcaggtgaacatcgttaaaaagaccgaagtacagaccggaggcttctccaaggaaagtatcctcccgaaaaggaacagcgacaagctgatcgcacgcaaaaaagattgggaccccaagaaatacggcggattcgattctcctacagtcgcttacagtgtactggttgtggccaaagtggagaaagggaagtctaaaaaactcaaaagcgtcaaggaactgctgggcatcacaatcatggagcgatcaagcttcgaaaaaaaccccatcgactttctcgaggcgaaaggatataaagaggtcaaaaaagacctcatcattaagcttcccaagtactctctctttgagcttgaaaacggccggaaacgaatgctcgctagtgcgggcgagctgcagaaaggtaacgagctggcactgccctctaaatacgttaatttcttgtatctggccagccactatgaaaagctcaaagggtctcccgaagataatgagcagaagcagctgttcgtggaacaacacaaacactaccttgatgagatcatcgagcaaataagcgaattctccaaaagagtgatcctcgccgacgctaacctcgataaggtgctttctgcttacaataagcacagggataagcccatcagggagcaggcagaaaacattatccacttgtttactctgaccaacttgggcgcgcctgcagccttcaagtacttcgacaccaccatagacagaaagcggtacacctctacaaaggaggtcctggacgccacactgattcatcagtcaattacggggctctatgaaacaagaatcgacctctctcagctcggtggagacgcggccgcagatccaaaaaagaagagaaaggtagatccaaaaaagaagagaaaggtagatccaaaaaagaagagaaaggtagatacggccgcatag

SEQ ID NO: 6 - DNA, 4326 bp, Streptococcus pyogenes
  source 1..4326: mol_type = genomic DNA
atggacaagaagtactccattgggctcgctatcggcacaaacagcgtcggctgggccgtcattacggacgagtacaaggtgccgagcaaaaaattcaaagttctgggcaataccgatcgccacagcataaagaagaacctcattggcgccctcctgttcgactccggggagacggccgaagccacgcggctcaaaagaacagcacggcgcagatatacccgcagaaagaatcggatctgctacctgcaggagatctttagtaatgagatggctaaggtggatgactctttcttccataggctggaggagtcctttttggtggaggaggataaaaagcacgagcgccacccaatctttggcaatatcgtggacgaggtggcgtaccatgaaaagtacccaaccatatatcatctgaggaagaagcttgtagacagtactgataaggctgacttgcggttgatctatctcgcgctggcgcatatgatcaaatttcggggacacttcctcatcgagggggacctgaacccagacaacagcgatgtcgacaaactctttatccaactggttcagacttacaatcagcttttcgaagagaacccgatcaacgcatccggagttgacgccaaagcaatcctgagcgctaggctgtccaaatcccggcggctcgaaaacctcatcgcacagctccctggggagaagaagaacggcctgtttggtaatcttatcgccctgtcactcgggctgacccccaactttaaatctaacttcgacctggccgaagatgccaagcttcaactgagcaaagacacctacgatgatgatctcgacaatctgctggcccagatcggcgaccagtacgcagacctttttttggcggcaaagaacctgtcagacgccattctgctgagtgatattctgcgagtgaacacggagatcaccaaagctccgctgagcgctagtatgatcaagcgctatgatgagcaccaccaagacttgactttgctgaaggcccttgtcagacagcaactgcctgagaagtacaaggaaattttcttcgatcagtctaaaaatggctacgccggatacattgacggcggagcaagccaggaggaattttacaaatttattaagcccatcttggaaaaaatggacggcaccgaggagctgctggtaaagcttaacagagaagatctgttgcgcaaacagcgcactttcgacaatggaagcatcccccaccagattcacctgggcgaactgcacgctatcctcaggcggcaagaggatttctacccctttttgaaagataacagggaaaagattgagaaaatcctcacatttcggataccctactatgtaggccccctcgcccggggaaattccagattcgcgtggatgactcgcaaatcagaagagaccatcactccctggaacttcgaggaagtcgtggataagggggcctctgcccagtccttcatcgaaaggatgactaactttgataaaaatctgcctaacgaaaaggtgcttcctaaacactctctgctgtacgagtacttcacagtttataacgagctcaccaaggtcaaatacgtcacagaagggatgagaaagccagcattcctgtctggagagcagaagaaagctatcgtggacctcctcttcaagacgaaccggaaagttaccgtgaaacagctcaaagaagactatttcaaaaagattgaatgtttcgactctgttgaaatcagcggagtggaggatcgcttcaacgcatccctgggaacgtatcacgatctcctgaaaatcattaaagacaaggacttcctggacaatgaggagaacgaggacattcttgaggacattgtcctcacccttacgttgtttgaagatagggagatgattgaagaacgcttgaaaacttacgctcatctcttcgacgacaaagtcatgaaacagctcaagaggcgccgatatacaggatgggggcggctgtcaagaaaactgatcaatgggatccgagacaagcagagtggaaagacaatcctggattttcttaagtccgatggatttgccaaccggaacttcatgcagttgatccatgatgactctctcacctttaaggaggacatccagaaagcacaagtttctggccagggggacagtcttcacgagcacatcgctaatcttgcaggtagcccagctatcaaaaagggaatactgcagaccgttaaggtcgtggatgaactcgtcaaagtaatgggaaggcataagcccgagaatatcgttatcgagatggcccgagagaaccaaactacccagaagggacagaagaacagtagggaaaggatgaagaggattgaagagggtataaaagaactggggtcccaaatccttaaggaacacccagttgaaaacacccagcttcagaatgagaagctctacctgtactacctgcagaacggcagggacatgtacgtggatcaggaactggacatcaatcggctctccgactacgacgtggctgctatcgtgccccagtcttttctcaaagatgattctattgataataaagtgttgacaagatccgataaagctagagggaagagtgataacgtcccctcagaagaagttgtcaagaaaatgaaaaattattggcggcagctgctgaacgccaaactgatcacacaacggaagttcgataatctgactaaggctgaacgaggtggcctgtctgagttggataaagccggcttcatcaaaaggcagcttgttgagacacgccagatcaccaagcacgtggcccaaattctcgattcacgcatgaacaccaagtacgatgaaaatgacaaactgattcgagaggtgaaagttattactctgaagtctaagctggtctcagatttcagaaaggactttcagttttataaggtgagagagatcaacaattaccaccatgcgcatgatgcctacctgaatgcagtggtaggcactgcacttatcaaaaaatatcccaagcttgaatctgaatttgtttacggagactataaagtgtacgatgttaggaaaatgatcgcaaagtctgagcaggaaataggcaaggccaccgctaagtacttcttttacagcaatattatgaattttttcaagaccgagattacactggccaatggagagattcggaagcgaccacttatcgaaacaaacggagaaacaggagaaatcgtgtgggacaagggtagggatttcgcgacagtccggaaggtcctgtccatgccgcaggtgaacatcgttaaaaagaccgaagtacagaccggaggcttctccaaggaaagtatcctcccgaaaaggaacagcgacaagctgatcgcacgcaaaaaagattgggaccccaagaaatacggcggattcgattctcctacagtcgcttacagtgtactggttgtggccaaagtggagaaagggaagtctaaaaaactcaaaagcgtcaaggaactgctgggcatcacaatcatggagcgatcaagcttcgaaaaaaaccccatcgactttctcgaggcgaaaggatataaagaggtcaaaaaagacctcatcattaagcttcccaagtactctctctttgagcttgaaaacggccggaaacgaatgctcgctagtgcgggcgagctgcagaaaggtaacgagctggcactgccctctaaatacgttaatttcttgtatctggccagccactatgaaaagctcaaagggtctcccgaagataatgagcagaagcagctgttcgtggaacaacacaaacactaccttgatgagatcatcgagcaaataagcgaattctccaaaagagtgatcctcgccgacgctaacctcgataaggtgctttctgcttacaataagcacagggataagcccatcagggagcaggcagaaaacattatccacttgtttactctgaccaacttgggcgcgcctgcagccttcaagtacttcgacaccaccatagacagaaagcggtacacctctacaaaggaggtcctggacgccacactgattcatcagtcaattacggggctctatgaaacaagaatcgacctctctcagctcggtggagacagcagggctgaccccaagaagaagaggaaggtggaggccagcggttccggacgggctgacgcattggacgattttgatctggatatgctgggaagtgacgccctcgatgattttgaccttgacatgcttggttcggatgcccttgatgactttgacctcgacatgctcggcagtgacgcccttgatgatttcgacctggacatgctgattaactctagatga

SEQ ID NO: 7 - DNA, 4359 bp, Streptococcus pyogenes
  source 1..4359: mol_type = genomic DNA
atgcccaagaagaagaggaaggtgggaagggggatggacaagaagtactccattgggctcgctatcggcacaaacagcgtcggctgggccgtcattacggacgagtacaaggtgccgagcaaaaaattcaaagttctgggcaataccgatcgccacagcataaagaagaacctcattggcgccctcctgttcgactccggggagacggccgaagccacgcggctcaaaagaacagcacggcgcagatatacccgcagaaagaatcggatctgctacctgcaggagatctttagtaatgagatggctaaggtggatgactctttcttccataggctggaggagtcctttttggtggaggaggataaaaagcacgagcgccacccaatctttggcaatatcgtggacgaggtggcgtaccatgaaaagtacccaaccatatatcatctgaggaagaagcttgtagacagtactgataaggctgacttgcggttgatctatctcgcgctggcgcatatgatcaaatttcggggacacttcctcatcgagggggacctgaacccagacaacagcgatgtcgacaaactctttatccaactggttcagacttacaatcagcttttcgaagagaacccgatcaacgcatccggagttgacgccaaagcaatcctgagcgctaggctgtccaaatcccggcggctcgaaaacctcatcgcacagctccctggggagaagaagaacggcctgtttggtaatcttatcgccctgtcactcgggctgacccccaactttaaatctaacttcgacctggccgaagatgccaagcttcaactgagcaaagacacctacgatgatgatctcgacaatctgctggcccagatcggcgaccagtacgcagacctttttttggcggcaaagaacctgtcagacgccattctgctgagtgatattctgcgagtgaacacggagatcaccaaagctccgctgagcgctagtatgatcaagcgctatgatgagcaccaccaagacttgactttgctgaaggcccttgtcagacagcaactgcctgagaagtacaaggaaattttcttcgatcagtctaaaaatggctacgccggatacattgacggcggagcaagccaggaggaattttacaaatttattaagcccatcttggaaaaaatggacggcaccgaggagctgctggtaaagcttaacagagaagatctgttgcgcaaacagcgcactttcgacaatggaagcatcccccaccagattcacctgggcgaactgcacgctatcctcaggcggcaagaggatttctacccctttttgaaagataacagggaaaagattgagaaaatcctcacatttcggataccctactatgtaggccccctcgcccggggaaattccagattcgcgtggatgactcgcaaatcagaagagaccatcactccctggaacttcgaggaagtcgtggataagggggcctctgcccagtccttcatcgaaaggatgactaactttgataaaaatctgcctaacgaaaaggtgcttcctaaacactctctgctgtacgagtacttcacagtttataacgagctcaccaaggtcaaatacgtcacagaagggatgagaaagccagcattcctgtctggagagcagaagaaagctatcgtggacctcctcttcaagacgaaccggaaagttaccgtgaaacagctcaaagaagactatttcaaaaagattgaatgtttcgactctgttgaaatcagcggagtggaggatcgcttcaacgcatccctgggaacgtatcacgatctcctgaaaatcattaaagacaaggacttcctggacaatgaggagaacgaggacattcttgaggacattgtcctcacccttacgttgtttgaagatagggagatgattgaagaacgcttgaaaacttacgctcatctcttcgacgacaaagtcatgaaacagctcaagaggcgccgatatacaggatgggggcggctgtcaagaaaactgatcaatgggatccgagacaagcagagtggaaagacaatcctggattttcttaagtccgatggatttgccaaccggaacttcatgcagttgatccatgatgactctctcacctttaaggaggacatccagaaagcacaagtttctggccagggggacagtcttcacgagcacatcgctaatcttgcaggtagcccagctatcaaaaagggaatactgcagaccgttaaggtcgtggatgaactcgtcaaagtaatgggaaggcataagcccgagaatatcgttatcgagatggcccgagagaaccaaactacccagaagggacagaagaacagtagggaaaggatgaagaggattgaagagggtataaaagaactggggtcccaaatccttaaggaacacccagttgaaaacacccagcttcagaatgagaagctctacctgtactacctgcagaacggcagggacatgtacgtggatcaggaactggacatcaatcggctctccgactacgacgtggctgctatcgtgccccagtcttttctcaaagatgattctattgataataaagtgttgacaagatccgataaagctagagggaagagtgataacgtcccctcagaagaagttgtcaagaaaatgaaaaattattggcggcagctgctgaacgccaaactgatcacacaacggaagttcgataatctgactaaggctgaacgaggtggcctgtctgagttggataaagccggcttcatcaaaaggcagcttgttgagacacgccagatcaccaagcacgtggcccaaattctcgattcacgcatgaacaccaagtacgatgaaaatgacaaactgattcgagaggtgaaagttattactctgaagtctaagctggtctcagatttcagaaaggactttcagttttataaggtgagagagatcaacaattaccaccatgcgcatgatgcctacctgaatgcagtggtaggcactgcacttatcaaaaaatatcccaagcttgaatctgaatttgtttacggagactataaagtgtacgatgttaggaaaatgatcgcaaagtctgagcaggaaataggcaaggccaccgctaagtacttcttttacagcaatattatgaattttttcaagaccgagattacactggccaatggagagattcggaagcgaccacttatcgaaacaaacggagaaacaggagaaatcgtgtgggacaagggtagggatttcgcgacagtccggaaggtcctgtccatgccgcaggtgaacatcgttaaaaagaccgaagtacagaccggaggcttctccaaggaaagtatcctcccgaaaaggaacagcgacaagctgatcgcacgcaaaaaagattgggaccccaagaaatacggcggattcgattctcctacagtcgcttacagtgtactggttgtggccaaagtggagaaagggaagtctaaaaaactcaaaagcgtcaaggaactgctgggcatcacaatcatggagcgatcaagcttcgaaaaaaaccccatcgactttctcgaggcgaaaggatataaagaggtcaaaaaagacctcatcattaagcttcccaagtactctctctttgagcttgaaaacggccggaaacgaatgctcgctagtgcgggcgagctgcagaaaggtaacgagctggcactgccctctaaatacgttaatttcttgtatctggccagccactatgaaaagctcaaagggtctcccgaagataatgagcagaagcagctgttcgtggaacaacacaaacactaccttgatgagatcatcgagcaaataagcgaattctccaaaagagtgatcctcgccgacgctaacctcgataaggtgctttctgcttacaataagcacagggataagcccatcagggagcaggcagaaaacattatccacttgtttactctgaccaacttgggcgcgcctgcagccttcaagtacttcgacaccaccatagacagaaagcggtacacctctacaaaggaggtcctggacgccacactgattcatcagtcaattacggggctctatgaaacaagaatcgacctctctcagctcggtggagacagcagggctgaccccaagaagaagaggaaggtggaggccagcggttccggacgggctgacgcattggacgattttgatctggatatgctgggaagtgacgccctcgatgattttgaccttgacatgcttggttcggatgcccttgatgactttgacctcgacatgctcggcagtgacgcccttgatgatttcgacctggacatgctgattaactctagatga

SEQ ID NO: 8 - protein, 1409 aa, Streptococcus thermophilus
MLFNKCIIISINLDFSNKEKCMTKPYSIGLDIGTNSVGWAVITDNYKVPSKKMKVLGNTSKKYIKKNLLGVLLFDSGITAEGRRLKRTARRRYTRRRNRILYLQEIFSTEMATLDDAFFQRLDDSFLVPDDKRDSKYPIFGNLVEEKVYHDEFPTIYHLRKYLADSTKKADLRLVYLALAHMIKYRGHFLIEGEFNSKNNDIQKNFQDFLDTYNAIFESDLSLENSKQLEEIVKDKISKLEKKDRILKLFPGEKNSGIFSEFLKLIVGNQADFRKCFNLDEKASLHFSKESYDEDLETLLGYIGDDYSDVFLKAKKLYDAILLSGFLTVTDNETEAPLSSAMIKRYNEHKEDLALLKEYIRNISLKTYNEVFKDDTKNGYAGYIDGKTNQEDFYVYLKNLLAEFEGADYFLEKIDREDFLRKQRTFDNGSIPYQIHLQEMRAILDKQAKFYPFLAKNKERIEKILTFRIPYYVGPLARGNSDFAWSIRKRNEKITPWNFEDVIDKESSAEAFINRMTSFDLYLPEEKVLPKHSLLYETFNVYNELTKVRFIAESMRDYQFLDSKQKKDIVRLYFKDKRKVTDKDIIEYLHAIYGYDGIELKGIEKQFNSSLSTYHDLLNIINDKEFLDDSSNEAIIEEIIHTLTIFEDREMIKQRLSKFENIFDKSVLKKLSRRHYTGWGKLSAKLINGIRDEKSGNTILDYLIDDGISNRNFMQLIHDDALSFKKKIQKAQIIGDEDKGNIKEVVKSLPGSPAIKKGILQSIKIVDELVKVMGGRKPESIVVEMARENQYTNQGKSNSQQRLKRLEKSLKELGSKILKENIPAKLSKIDNNALQNDRLYLYYLQNGKDMYTGDDLDIDRLSNYDIDHIIPQAFLKDNSIDNKVLVSSASNRGKSDDFPSLEVVKKRKTFWYQLLKSKLISQRKFDNLTKAERGGLLPEDKAGFIQRQLVETRQITKHVARLLDEKFNNKKDENNRAVRTVKIITLKSTLVSQFRKDFELYKVREINDFHHAHDAYLNAVIASALLKKYPKLEPEFVYGDYPKYNSFRERKSATEKVYFYSNIMNIFKKSISLADGRVIERPLIEVNEETGESVWNKESDLATVRRVLSYPQVNVVKKVEEQNHGLDRGKPKGLFNANLSSKPKPNSNENLVGAKEYLDPKKYGGYAGISNSFAVLVKGTIEKGAKKKITNVLEFQGISILDRINYRKDKLNFLLEKGYKDIELIIELPKYSLFELSDGSRRMLASILSTNNKRGEIHKGNQIFLSQKFVKLLYHAKRISNTINENHRKYVENHKKEFEELFYYILEFNENYVGAKKNGKLLNSAFQSWQNHSIDELCSSFIGPTGSERKGLFELTSRGSAADFEFLGVKIPRYRDYTPSSLLKDATLIHQSVTGLYETRIDLAKLGEG

SEQ ID NO: 9 - DNA, 4167 bp, Streptococcus thermophilus
  source 1..4167: mol_type = genomic DNA
atgactaagccatactcaattggacttgatattggaacgaatagtgttggatgggctgtaataactgataattacaaggttccgtctaaaaaaatgaaagtcttaggaaatacgagtaaaaagtatatcaaaaagaacctgttaggtgtattactctttgactctggaatcacagcagaaggaagaagattgaagcgtactgcaagaagacgttatactagacgccgtaatcgtatcctttatttgcaggaaatttttagcacggagatggctacattagatgatgctttctttcaaagacttgacgattcgtttttagttcctgatgataaacgtgatagtaagtatccgatatttggaaacttagtagaagaaaaagtctatcatgatgaatttccaactatctatcatttaaggaaatatttagcagatagtactaaaaaagcagatttgcgtctagtttatcttgcattggctcatatgattaaatatagaggtcacttcttaattgaaggagagtttaattcaaaaaataatgatattcagaagaattttcaagactttttggacacttataatgctatttttgaatcggatttatcacttgagaatagtaaacaacttgaggaaattgttaaagataagattagtaaattagaaaagaaagatcgtattttaaaactcttccctggggagaagaattcggggattttttcagagtttctaaagttgattgtaggaaatcaagctgattttaggaaatgttttaatttagacgaaaaagcctccttacatttttccaaagaaagctatgatgaagatttagagactttgttaggttatattggagatgattacagtgatgtctttctcaaagcaaagaaactttatgatgctattcttttatcgggttttctgactgtaactgataatgagacagaagcacctctctcttctgctatgataaagcgatataatgaacacaaagaagatttagcgttactaaaggaatatataagaaatatttcactaaaaacgtataatgaagtatttaaagatgacaccaaaaatggttatgctggttatattgatggaaaaacaaatcaggaagatttctacgtatatctaaaaaacctattggctgaatttgaaggtgcggattattttcttgaaaaaattgatcgagaagattttttgagaaagcaacgtacatttgacaatggttcgataccatatcagattcatcttcaagaaatgagagcaattcttgataagcaagctaaattttatcctttcttggctaaaaataaagaaagaatcgagaagattttaaccttccgaattccttattatgtaggtccacttgcgagagggaatagtgattttgcctggtcaataagaaaacgaaatgaaaaaattacaccttggaattttgaggacgttattgacaaagaatcttcggcagaggctttcattaatcgaatgactagttttgatttgtatttgccagaagagaaggtacttccaaagcatagtctcttatacgaaacttttaatgtatataatgaattaacaaaagttagatttattgccgaaagtatgagagattatcaatttttagatagtaagcagaagaaagatattgttagactttattttaaagataaaaggaaagttactgataaggatattattgaatatttacatgcaatttatgggtatgatggaattgaattaaaaggcatagagaaacagtttaattctagtttatctacttatcacgatcttttaaatattattaatgataaagagtttttggatgatagttcaaatgaagcgattatcgaagaaattatccatactttgacaatttttgaagatagagagatgataaaacaacgtctttcaaaatttgagaatatattcgataaatccgttttgaaaaagttatctcgtagacattacactggctggggtaagttatctgctaagcttattaatggtattcgagatgaaaaatctggtaatactattcttgattacttaattgatgatggtatttctaaccgtaatttcatgcaacttattcacgatgatgctctttcttttaaaaagaagatacagaaagcacaaattattggtgacgaagataaaggtaatattaaagaggtcgttaagtctttgccaggtagtcctgcgattaaaaaaggtattttacaaagcataaaaattgtagatgaattggtcaaagtaatgggaggaagaaaacccgagtcaattgttgttgagatggctcgtgaaaatcaatataccaatcaaggtaagtctaattcccaacaacgcttgaaacgtttagaaaaatctctcaaagagttaggtagtaagatacttaaggaaaatattcctgcaaaactttctaaaatagacaataacgcacttcaaaatgatcgactttacttatactatcttcaaaatggaaaagatatgtataccggagatgatttagatattgatagattaagtaattatgatattgatcatattattcctcaagcttttttgaaagataattctattgacaataaagtacttgtttcatctgctagtaaccgtggtaaatcagatgattttccaagtttagaggttgtcaaaaaaagaaagacattttggtatcaattattgaaatcaaaattaatttctcaacgaaaatttgataatctgacaaaagctgaacggggaggattgttacctgaggacaaagctggttttattcaacgccagttggttgaaacacgtcaaataacaaaacatgtagctcgtttacttgatgagaaatttaataataaaaaagatgaaaataatagagcggtacgaacagtaaaaattattaccttgaaatctaccttagtttctcaatttcgtaaggattttgaactttataaagttcgtgaaatcaatgattttcatcatgctcatgatgcttacttgaatgccgttatagcaagtgctttacttaagaaataccctaaactagagccagaatttgtgtacggtgattatccaaaatacaatagttttagagaaagaaagtccgctacagaaaaggtatatttctattcaaatatcatgaatatctttaaaaaatctatttctttagctgatggtagagttattgaaagaccacttattgaggtaaatgaggagaccggcgaatccgtttggaataaagaatctgatttagcaactgtaaggagagtactctcttatccgcaagtaaatgttgtgaaaaaagttgaggaacagaatcacggattggatagaggaaaaccaaagggattgtttaatgcaaatctttcctcaaagccaaaaccaaatagtaatgaaaatttagtaggtgctaaagagtatcttgaccccaaaaagtatggggggtatgctggaatttctaattcttttgctgttcttgttaaagggacaattgaaaaaggtgctaagaaaaaaataacaaatgtactagaatttcaaggtatttctattttagataggattaattatagaaaagataaacttaattttttacttgaaaaaggttataaagatattgagttaattattgaactacctaaatatagtttatttgaactttcagatggttcacgtcgtatgttggctagtattttgtcaacgaataataagaggggagagattcacaaaggaaatcagatttttctttcacagaagtttgtgaaattactttatcatgctaagagaataagtaacacaattaatgagaatcatagaaaatatgttgagaaccataaaaaagagtttgaagaattattttactacattcttgagtttaatgagaattatgttggagctaaaaagaatggtaaacttttaaactctgcctttcaatcttggcaaaatcatagtatagatgaactctgtagtagttttataggacctaccggaagtgaaagaaaggggctatttgaattaacctctcgtggaagtgctgctgattttgaatttttaggtgttaaaattccaaggtatagagactataccccatcatccctattaaaagatgccacacttattcatcaatctgttacaggcctctatgaaacacgaatagaccttgccaaactaggagagggttaa

SEQ ID NO: 10 - DNA, 3366 bp, Streptococcus thermophilus
  source 1..3366: mol_type = genomic DNA
atgagcgacctggtgctgggcctggacatcggcatcggcagcgtgggcgtgggcatcctgaacaaggtgaccggcgagatcatccacaagaacagtcgcatcttccctgctgctcaggctgagaacaacctggtgcgccgcaccaaccgccagggtcgccggcttgctcgccgcaagaagcaccggcgcgtgcgcctgaaccgcctgttcgaggagagcggcctgatcaccgacttcaccaagatcagcatcaacctgaacccctaccagctgcgcgtgaagggcctgaccgacgagctgagcaacgaggagctgttcatcgccctgaagaacatggtgaagcaccgcggcatcagctacctggacgacgccagcgacgacggcaacagcagcgtgggcgactacgcccagatcgtgaaggagaacagcaagcagctggagaccaagacccccggccagatccagctggagcgctaccagacctacggccagctgcgcggcgacttcaccgtggagaaggacggcaagaagcaccgcctgatcaacgtgttccccaccagcgcctaccgcagcgaggccctgcgcatcctgcagacccagcaggagttcaacccccagatcaccgacgagttcatcaaccgctacctggagatcctgaccggcaagcgcaagtactaccacggccccggcaacgagaagagccgcaccgactacggccgctaccgcaccagcggcgagaccctggacaacatcttcggcatcctgatcggcaagtgcaccttctaccccgacgagttccgcgccgccaaggccagctacaccgcccaggagttcaacctgctgaacgacctgaacaacctgaccgtgcccaccgagaccaagaagctgagcaaggagcagaagaaccagatcatcaactacgtgaagaacgagaaggccatgggccccgccaagctgttcaagtacatcgccaagctgctgagctgcgacgtggccgacatcaagggctaccgcatcgacaagagcggcaaggccgagatccacaccttcgaggcctaccgcaagatgaagaccctggagaccctggacatcgagcagatggaccgcgagaccctggacaagctggcctacgtgctgaccctgaacaccgagcgcgagggcatccaggaggccctggagcacgagttcgccgacggcagcttcagccagaagcaggtggacgagctggtgcagttccgcaaggccaacagcagcatcttcggcaagggctggcacaacttcagcgtgaagctgatgatggagctgatccccgagctgtacgagaccagcgaggagcagatgaccatcctgacccgcctgggcaagcagaagaccaccagcagcagcaacaagaccaagtacatcgacgagaagctgctgaccgaggagatctacaaccccgtggtggccaagagcgtgcgccaggccatcaagatcgtgaacgccgccatcaaggagtacggcgacttcgacaacatcgtgatcgagatggcccgcgagaccaacgaggacgacgagaagaaggccatccagaagatccagaaggccaacaaggacgagaaggacgccgccatgctgaaggccgccaaccagtacaacggcaaggccgagctgccccacagcgtgttccacggccacaagcagctggccaccaagatccgcctgtggcaccagcagggcgagcgctgcctgtacaccggcaagaccatcagcatccacgacctgatcaacaacagcaaccagttcgaggtggaccacatcctgcccctgagcatcaccttcgacgacagcctggccaacaaggtgctggtgtacgccaccgccaaccaggagaagggccagcgcaccccctaccaggccctggacagcatggacgacgcctggagcttccgcgagctgaaggccttcgtgcgcgagagcaagaccctgagcaacaagaagaaggagtacctgctgaccgaggaggacatcagcaagttcgacgtgcgcaagaagttcatcgagcgcaacctggtggacacccgctacgccagccgcgtggtgctgaacgccctgcaggagcacttccgcgcccacaagatcgacaccaaggtgagcgtggtgcgcggccagttcaccagccagctgcgccgccactggggcatcgagaagacccgcgacacctaccaccaccacgccgtggacgccctgatcattgcggcttctagccagctgaacctgtggaagaagcagaagaacaccctggtgagctacagcgaggaccagctgctggacatcgagaccggcgagctgatcagcgacgacgagtacaaggagagcgtgttcaaggccccctaccagcacttcgtggacaccctgaagagcaaggagttcgaggacagcatcctgttcagctaccaggtggacagcaagttcaaccgcaagatcagcgacgccaccatctacgccacccgccaggccaaggtgggcaaggacaaggccgacgagacctacgtgctgggcaagatcaaggacatctacacccaggacggctacgacgccttcatgaagatctacaagaaggacaagagcaagttcctgatgtaccgccacgacccccagaccttcgagaaggtgatcgagcccatcctggagaactaccccaacaagcagatcaacgataaaggcaaggaggtgccctgcaaccccttcctgaagtacaaggaggagcacggctacatccgcaagtacagcaagaagggcaacggccccgagatcaagagcctgaagtactacgacagcaagctgggcaaccacatcgacatcacccccaaggacagcaacaacaaggtggtgctgcagagcgtgagcccctggcgcgccgacgtgtacttcaacaagaccaccggcaagtacgagatcctgggcctgaagtacgccgacctgcagtttgataagggcaccggcacctacaagatcagccaggagaagtacaacgacatcaagaagaaggagggcgtggacagcgacagcgagttcaagttcaccctgtacaagaacgaccttctgctggtgaaggacaccgagaccaaggagcaacagctgttccgcttcctgagccgcaccatgcccaagcagaagcactacgtggagctgaagccctacgacaagcagaagttcgagggcggcgaggccctgatcaaggtgctgggcaacgtggccaacagcggccagtgcaagaagggcctgggcaagagcaacatcagcatctacaaggtgcgcaccgacgtgctgggcaaccagcacatcatcaagaacgagggcgacaagcccaagctggacttctaa

SEQ ID NO: 11 - DNA, 3366 bp, Streptococcus thermophilus
  source 1..3366: mol_type = genomic DNA
atgagcgacctggtgctgggcctggccatcggcatcggcagcgtgggcgtgggcatcctgaacaaggtgaccggcgagatcatccacaagaacagtcgcatcttccctgctgctcaggctgagaacaacctggtgcgccgcaccaaccgccagggtcgccggcttgctcgccgcaagaagcaccggcgcgtgcgcctgaaccgcctgttcgaggagagcggcctgatcaccgacttcaccaagatcagcatcaacctgaacccctaccagctgcgcgtgaagggcctgaccgacgagctgagcaacgaggagctgttcatcgccctgaagaacatggtgaagcaccgcggcatcagctacctggacgacgccagcgacgacggcaacagcagcgtgggcgactacgcccagatcgtgaaggagaacagcaagcagctggagaccaagacccccggccagatccagctggagcgctaccagacctacggccagctgcgcggcgacttcaccgtggagaaggacggcaagaagcaccgcctgatcaacgtgttccccaccagcgcctaccgcagcgaggccctgcgcatcctgcagacccagcaggagttcaacccccagatcaccgacgagttcatcaaccgctacctggagatcctgaccggcaagcgcaagtactaccacggccccggcaacgagaagagccgcaccgactacggccgctaccgcaccagcggcgagaccctggacaacatcttcggcatcctgatcggcaagtgcaccttctaccccgacgagttccgcgccgccaaggccagctacaccgcccaggagttcaacctgctgaacgacctgaacaacctgaccgtgcccaccgagaccaagaagctgagcaaggagcagaagaaccagatcatcaactacgtgaagaacgagaaggccatgggccccgccaagctgttcaagtacatcgccaagctgctgagctgcgacgtggccgacatcaagggctaccgcatcgacaagagcggcaaggccgagatccacaccttcgaggcctaccgcaagatgaagaccctggagaccctggacatcgagcagatggaccgcgagaccctggacaagctggcctacgtgctgaccctgaacaccgagcgcgagggcatccaggaggccctggagcacgagttcgccgacggcagcttcagccagaagcaggtggacgagctggtgcagttccgcaaggccaacagcagcatcttcggcaagggctggcacaacttcagcgtgaagctgatgatggagctgatccccgagctgtacgagaccagcgaggagcagatgaccatcctgacccgcctgggcaagcagaagaccaccagcagcagcaacaagaccaagtacatcgacgagaagctgctgaccgaggagatctacaaccccgtggtggccaagagcgtgcgccaggccatcaagatcgtgaacgccgccatcaaggagtacggcgacttcgacaacatcgtgatcgagatggcccgcgagaccaacgaggacgacgagaagaaggccatccagaagatccagaaggccaacaaggacgagaaggacgccgccatgctgaaggccgccaaccagtacaacggcaaggccgagctgccccacagcgtgttccacggccacaagcagctggccaccaagatccgcctgtggcaccagcagggcgagcgctgcctgtacaccggcaagaccatcagcatccacgacctgatcaacaacagcaaccagttcgaggtggctgccatcctgcccctgagcatcaccttcgacgacagcctggccaacaaggtgctggtgtacgccaccgccgctcaggagaagggccagcgcaccccctaccaggccctggacagcatggacgacgcctggagcttccgcgagctgaaggccttcgtgcgcgagagcaagaccctgagcaacaagaagaaggagtacctgctgaccgaggaggacatcagcaagttcgacgtgcgcaagaagttcatcgagcgcaacctggtggacacccgctacgccagccgcgtggtgctgaacgccctgcaggagcacttccgcgcccacaagatcgacaccaaggtgagcgtggtgcgcggccagttcaccagccagctgcgccgccactggggcatcgagaagacccgcgacacctaccaccaccacgccgtggacgccctgatcattgcggcttctagccagctgaacctgtggaagaagcagaagaacaccctggtgagctacagcgaggaccagctgctggacatcgagaccggcgagctgatcagcgacgacgagtacaaggagagcgtgttcaaggccccctaccagcacttcgtggacaccctgaagagcaaggagttcgaggacagcatcctgttcagctaccaggtggacagcaagttcaaccgcaagatcagcgacgccaccatctacgccacccgccaggccaaggtgggcaaggacaaggccgacgagacctacgtgctgggcaagatcaaggacatctacacccaggacggctacgacgccttcatgaagatctacaagaaggacaagagcaagttcctgatgtaccgccacgacccccagaccttcgagaaggtgatcgagcccatcctggagaactaccccaacaagcagatcaacgataaaggcaaggaggtgccctgcaaccccttcctgaagtacaaggaggagcacggctacatccgcaagtacagcaagaagggcaacggccccgagatcaagagcctgaagtactacgacagcaagctgggcaaccacatcgacatcacccccaaggacagcaacaacaaggtggtgctgcagagcgtgagcccctggcgcgccgacgtgtacttcaacaagaccaccggcaagtacgagatcctgggcctgaagtacgccgacctgcagtttgataagggcaccggcacctacaagatcagccaggagaagtacaacgacatcaagaagaaggagggcgtggacagcgacagcgagttcaagttcaccctgtacaagaacgaccttctgctggtgaaggacaccgagaccaaggagcaacagctgttccgcttcctgagccgcaccatgcccaagcagaagcactacgtggagctgaagccctacgacaagcagaagttcgagggcggcgaggccctgatcaaggtgctgggcaacgtggccaacagcggccagtgcaagaagggcctgggcaagagcaacatcagcatctacaaggtgcgcaccgacgtgctgggcaaccagcacatcatcaagaacgagggcgacaagcccaagctggacttctaa

SEQ ID NO: 12 - DNA, 3399 bp, Streptococcus thermophilus
  source 1..3399: mol_type = genomic DNA
atgagcgacctggtgctgggcctggacatcggcatcggcagcgtgggcgtgggcatcctgaacaaggtgaccggcgagatcatccacaagaacagtcgcatcttccctgctgctcaggctgagaacaacctggtgcgccgcaccaaccgccagggtcgccggcttgctcgccgcaagaagcaccggcgcgtgcgcctgaaccgcctgttcgaggagagcggcctgatcaccgacttcaccaagatcagcatcaacctgaacccctaccagctgcgcgtgaagggcctgaccgacgagctgagcaacgaggagctgttcatcgccctgaagaacatggtgaagcaccgcggcatcagctacctggacgacgccagcgacgacggcaacagcagcgtgggcgactacgcccagatcgtgaaggagaacagcaagcagctggagaccaagacccccggccagatccagctggagcgctaccagacctacggccagctgcgcggcgacttcaccgtggagaaggacggcaagaagcaccgcctgatcaacgtgttccccaccagcgcctaccgcagcgaggccctgcgcatcctgcagacccagcaggagttcaacccccagatcaccgacgagttcatcaaccgctacctggagatcctgaccggcaagcgcaagtactaccacggccccggcaacgagaagagccgcaccgactacggccgctaccgcaccagcggcgagaccctggacaacatcttcggcatcctgatcggcaagtgcaccttctaccccgacgagttccgcgccgccaaggccagctacaccgcccaggagttcaacctgctgaacgacctgaacaacctgaccgtgcccaccgagaccaagaagctgagcaaggagcagaagaaccagatcatcaactacgtgaagaacgagaaggccatgggccccgccaagctgttcaagtacatcgccaagctgctgagctgcgacgtggccgacatcaagggctaccgcatcgacaagagcggcaaggccgagatccacaccttcgaggcctaccgcaagatgaagaccctggagaccctggacatcgagcagatggaccgcgagaccctggacaagctggcctacgtgctgaccctgaacaccgagcgcgagggcatccaggaggccctggagcacgagttcgccgacggcagcttcagccagaagcaggtggacgagctggtgcagttccgcaaggccaacagcagcatcttcggcaagggctggcacaacttcagcgtgaagctgatgatggagctgatccccgagctgtacgagaccagcgaggagcagatgaccatcctgacccgcctgggcaagcagaagaccaccagcagcagcaacaagaccaagtacatcgacgagaagctgctgaccgaggagatctacaaccccgtggtggccaagagcgtgcgccaggccatcaagatcgtgaacgccgccatcaaggagtacggcgacttcgacaacatcgtgatcgagatggcccgcgagaccaacgaggacgacgagaagaaggccatccagaagatccagaaggccaacaaggacgagaaggacgccgccatgctgaaggccgccaaccagtacaacggcaaggccgagctgccccacagcgtgttccacggccacaagcagctggccaccaagatccgcctgtggcaccagcagggcgagcgctgcctgtacaccggcaagaccatcagcatccacgacctgatcaacaacagcaaccagttcgaggtggaccacatcctgcccctgagcatcaccttcgacgacagcctggccaacaaggtgctggtgtacgccaccgccaaccaggagaagggccagcgcaccccctaccaggccctggacagcatggacgacgcctggagcttccgcgagctgaaggccttcgtgcgcgagagcaagaccctgagcaacaagaagaaggagtacctgctgaccgaggaggacatcagcaagttcgacgtgcgcaagaagttcatcgagcgcaacctggtggacacccgctacgccagccgcgtggtgctgaacgccctgcaggagcacttccgcgcccacaagatcgacaccaaggtgagcgtggtgcgcggccagttcaccagccagctgcgccgccactggggcatcgagaagacccgcgacacctaccaccaccacgccgtggacgccctgatcattgcggcttctagccagctgaacctgtggaagaagcagaagaacaccctggtgagctacagcgaggaccagctgctggacatcgagaccggcgagctgatcagcgacgacgagtacaaggagagcgtgttcaaggccccctaccagcacttcgtggacaccctgaagagcaaggagttcgaggacagcatcctgttcagctaccaggtggacagcaagttcaaccgcaagatcagcgacgccaccatctacgccacccgccaggccaaggtgggcaaggacaaggccgacgagacctacgtgctgggcaagatcaaggacatctacacccaggacggctacgacgccttcatgaagatctacaagaaggacaagagcaagttcctgatgtaccgccacgacccccagaccttcgagaaggtgatcgagcccatcctggagaactaccccaacaagcagatcaacgataaaggcaaggaggtgccctgcaaccccttcctgaagtacaaggaggagcacggctacatccgcaagtacagcaagaagggcaacggccccgagatcaagagcctgaagtactacgacagcaagctgggcaaccacatcgacatcacccccaaggacagcaacaacaaggtggtgctgcagagcgtgagcccctggcgcgccgacgtgtacttcaacaagaccaccggcaagtacgagatcctgggcctgaagtacgccgacctgcagtttgataagggcaccggcacctacaagatcagccaggagaagtacaacgacatcaagaagaaggagggcgtggacagcgacagcgagttcaagttcaccctgtacaagaacgaccttctgctggtgaaggacaccgagaccaaggagcaacagctgttccgcttcctgagccgcaccatgcccaagcagaagcactacgtggagctgaagccctacgacaagcagaagttcgagggcggcgaggccctgatcaaggtgctgggcaacgtggccaacagcggccagtgcaagaagggcctgggcaagagcaacatcagcatctacaaggtgcgcaccgacgtgctgggcaaccagcacatcatcaagaacgagggcgacaagcccaagctggacttcagcagggctgaccccaagaagaagaggaaggtgtga

SEQ ID NO: 13 - DNA, 3459 bp, Streptococcus thermophilus
  source 1..3459: mol_type = genomic DNA
atgagcgacctggtgctgggcctggacatcggcatcggcagcgtgggcgtgggcatcctgaacaaggtgaccggcgagatcatccacaagaacagtcgcatcttccctgctgctcaggctgagaacaacctggtgcgccgcaccaaccgccagggtcgccggcttgctcgccgcaagaagcaccggcgcgtgcgcctgaaccgcctgttcgaggagagcggcctgatcaccgacttcaccaagatcagcatcaacctgaacccctaccagctgcgcgtgaagggcctgaccgacgagctgagcaacgaggagctgttcatcgccctgaagaacatggtgaagcaccgcggcatcagctacctggacgacgccagcgacgacggcaacagcagcgtgggcgactacgcccagatcgtgaaggagaacagcaagcagctggagaccaagacccccggccagatccagctggagcgctaccagacctacggccagctgcgcggcgacttcaccgtggagaaggacggcaagaagcaccgcctgatcaacgtgttccccaccagcgcctaccgcagcgaggccctgcgcatcctgcagacccagcaggagttcaacccccagatcaccgacgagttcatcaaccgctacctggagatcctgaccggcaagcgcaagtactaccacggccccggcaacgagaagagccgcaccgactacggccgctaccgcaccagcggcgagaccctggacaacatcttcggcatcctgatcggcaagtgcaccttctaccccgacgagttccgcgccgccaaggccagctacaccgcccaggagttcaacctgctgaacgacctgaacaacctgaccgtgcccaccgagaccaagaagctgagcaaggagcagaagaaccagatcatcaactacgtgaagaacgagaaggccatgggccccgccaagctgttcaagtacatcgccaagctgctgagctgcgacgtggccgacatcaagggctaccgcatcgacaagagcggcaaggccgagatccacaccttcgaggcctaccgcaagatgaagaccctggagaccctggacatcgagcagatggaccgcgagaccctggacaagctggcctacgtgctgaccctgaacaccgagcgcgagggcatccaggaggccctggagcacgagttcgccgacggcagcttcagccagaagcaggtggacgagctggtgcagttccgcaaggccaacagcagcatcttcggcaagggctggcacaacttcagcgtgaagctgatgatggagctgatccccgagctgtacgagaccagcgaggagcagatgaccatcctgacccgcctgggcaagcagaagaccaccagcagcagcaacaagaccaagtacatcgacgagaagctgctgaccgaggagatctacaaccccgtggtggccaagagcgtgcgccaggccatcaagatcgtgaacgccgccatcaaggagtacggcgacttcgacaacatcgtgatcgagatggcccgcgagaccaacgaggacgacgagaagaaggccatccagaagatccagaaggccaacaaggacgagaaggacgccgccatgctgaaggccgccaaccagtacaacggcaaggccgagctgccccacagcgtgttccacggccacaagcagctggccaccaagatccgcctgtggcaccagcagggcgagcgctgcctgtacaccggcaagaccatcagcatccacgacctgatcaacaacagcaaccagttcgaggtggaccacatcctgcccctgagcatcaccttcgacgacagcctggccaacaaggtgctggtgtacgccaccgccaaccaggagaagggccagcgcaccccctaccaggccctggacagcatggacgacgcctggagcttccgcgagctgaaggccttcgtgcgcgagagcaagaccctgagcaacaagaagaaggagtacctgctgaccgaggaggacatcagcaagttcgacgtgcgcaagaagttcatcgagcgcaacctggtggacacccgctacgccagccgcgtggtgctgaacgccctgcaggagcacttccgcgcccacaagatcgacaccaaggtgagcgtggtgcgcggccagttcaccagccagctgcgccgccactggggcatcgagaagacccgcgacacctaccaccaccacgccgtggacgccctgatcattgcggcttctagccagctgaacctgtggaagaagcagaagaacaccctggtgagctacagcgaggaccagctgctggacatcgagaccggcgagctgatcagcgacgacgagtacaaggagagcgtgttcaaggccccctaccagcacttcgtggacaccctgaagagcaaggagttcgaggacagcatcctgttcagctaccaggtggacagcaagttcaaccgcaagatcagcgacgccaccatctacgccacccgccaggccaaggtgggcaaggacaaggccgacgagacctacgtgctgggcaagatcaaggacatctacacccaggacggctacgacgccttcatgaagatctacaagaaggacaagagcaagttcctgatgtaccgccacgacccccagaccttcgagaaggtgatcgagcccatcctggagaactaccccaacaagcagatcaacgataaaggcaaggaggtgccctgcaaccccttcctgaagtacaaggaggagcacggctacatccgcaagtacagcaagaagggcaacggccccgagatcaagagcctgaagtactacgacagcaagctgggcaaccacatcgacatcacccccaaggacagcaacaacaaggtggtgctgcagagcgtgagcccctggcgcgccgacgtgtacttcaacaagaccaccggcaagtacgagatcctgggcctgaagtacgccgacctgcagtttgataagggcaccggcacctacaagatcagccaggagaagtacaacgacatcaagaagaaggagggcgtggacagcgacagcgagttcaagttcaccctgtacaagaacgaccttctgctggtgaaggacaccgagaccaaggagcaacagctgttccgcttcctgagccgcaccatgcccaagcagaagcactacgtggagctgaagccctacgacaagcagaagttcgagggcggcgaggccctgatcaaggtgctgggcaacgtggccaacagcggccagtgcaagaagggcctgggcaagagcaacatcagcatctacaaggtgcgcaccgacgtgctgggcaaccagcacatcatcaagaacgagggcgacaagcccaagctggacttcgcggccgcagatccaaaaaagaagagaaaggtagatccaaaaaagaagagaaaggtagatccaaaaaagaagagaaaggtagatacggccgcatag

SEQ ID NO: 14 - DNA, 3585 bp, Streptococcus thermophilus
  source 1..3585: mol_type = genomic DNA
atgagcgacctggtgctgggcctggccatcggcatcggcagcgtgggcgtgggcatcctgaacaaggtgaccggcgagatcatccacaagaacagtcgcatcttccctgctgctcaggctgagaacaacctggtgcgccgcaccaaccgccagggtcgccggcttgctcgccgcaagaagcaccggcgcgtgcgcctgaaccgcctgttcgaggagagcggcctgatcaccgacttcaccaagatcagcatcaacctgaacccctaccagctgcgcgtgaagggcctgaccgacgagctgagcaacgaggagctgttcatcgccctgaagaacatggtgaagcaccgcggcatcagctacctggacgacgccagcgacgacggcaacagcagcgtgggcgactacgcccagatcgtgaaggagaacagcaagcagctggagaccaagacccccggccagatccagctggagcgctaccagacctacggccagctgcgcggcgacttcaccgtggagaaggacggcaagaagcaccgcctgatcaacgtgttccccaccagcgcctaccgcagcgaggccctgcgcatcctgcagacccagcaggagttcaacccccagatcaccgacgagttcatcaaccgctacctggagatcctgaccggcaagcgcaagtactaccacggccccggcaacgagaagagccgcaccgactacggccgctaccgcaccagcggcgagaccctggacaacatcttcggcatcctgatcggcaagtgcaccttctaccccgacgagttccgcgccgccaaggccagctacaccgcccaggagttcaacctgctgaacgacctgaacaacctgaccgtgcccaccgagaccaagaagctgagcaaggagcagaagaaccagatcatcaactacgtgaagaacgagaaggccatgggccccgccaagctgttcaagtacatcgccaagctgctgagctgcgacgtggccgacatcaagggctaccgcatcgacaagagcggcaaggccgagatccacaccttcgaggcctaccgcaagatgaagaccctggagaccctggacatcgagcagatggaccgcgagaccctggacaagctggcctacgtgctgaccctgaacaccgagcgcgagggcatccaggaggccctggagcacgagttcgccgacggcagcttcagccagaagcaggtggacgagctggtgcagttccgcaaggccaacagcagcatcttcggcaagggctggcacaacttcagcgtgaagctgatgatggagctgatccccgagctgtacgagaccagcgaggagcagatgaccatcctgacccgcctgggcaagcagaagaccaccagcagcagcaacaagaccaagtacatcgacgagaagctgctgaccgaggagatctacaaccccgtggtggccaagagcgtgcgccaggccatcaagatcgtgaacgccgccatcaaggagtacggcgacttcgacaacatcgtgatcgagatggcccgcgagaccaacgaggacgacgagaagaaggccatccagaagatccagaaggccaacaaggacgagaaggacgccgccatgctgaaggccgccaaccagtacaacggcaaggccgagctgccccacagcgtgttccacggccacaagcagctggccaccaagatccgcctgtggcaccagcagggcgagcgctgcctgtacaccggcaagaccatcagcatccacgacctgatcaacaacagcaaccagttcgaggtggctgccatcctgcccctgagcatcaccttcgacgacagcctggccaacaaggtgctggtgtacgccaccgccgctcaggagaagggccagcgcaccccctaccaggccctggacagcatggacgacgcctggagcttccgcgagctgaaggccttcgtgcgcgagagcaagaccctgagcaacaagaagaaggagtacctgctgaccgaggaggacatcagcaagttcgacgtgcgcaagaagttcatcgagcgcaacctggtggacacccgctacgccagccgcgtggtgctgaacgccctgcaggagcacttccgcgcccacaagatcgacaccaaggtgagcgtggtgcgcggccagttcaccagccagctgcgccgccactggggcatcgagaagacccgcgacacctaccaccaccacgccgtggacgccctgatcattgcggcttctagccagctgaacctgtggaagaagcagaagaacaccctggtgagctacagcgaggaccagctgctggacatcgagaccggcgagctgatcagcgacgacgagtacaaggagagcgtgttcaaggccccctaccagcacttcgtggacaccctgaagagcaaggagttcgaggacagcatcctgttcagctaccaggtggacagcaagttcaaccgcaagatcagcgacgccaccatctacgccacccgccaggccaaggtgggcaaggacaaggccgacgagacctacgtgctgggcaagatcaaggacatctacacccaggacggctacgacgccttcatgaagatctacaagaaggacaagagcaagttcctgatgtaccgccacgacccccagaccttcgagaaggtgatcgagcccatcctggagaactaccccaacaagcagatcaacgataaaggcaaggaggtgccctgcaaccccttcctgaagtacaaggaggagcacggctacatccgcaagtacagcaagaagggcaacggccccgagatcaagagcctgaagtactacgacagcaagctgggcaaccacatcgacatcacccccaaggacagcaacaacaaggtggtgctgcagagcgtgagcccctggcgcgccgacgtgtacttcaacaagaccaccggcaagtacgagatcctgggcctgaagtacgccgacctgcagtttgataagggcaccggcacctacaagatcagccaggagaagtacaacgacatcaagaagaaggagggcgtggacagcgacagcgagttcaagttcaccctgtacaagaacgaccttctgctggtgaaggacaccgagaccaaggagcaacagctgttccgcttcctgagccgcaccatgcccaagcagaagcactacgtggagctgaagccctacgacaagcagaagttcgagggcggcgaggccctgatcaaggtgctgggcaacgtggccaacagcggccagtgcaagaagggcctgggcaagagcaacatcagcatctacaaggtgcgcaccgacgtgctgggcaaccagcacatcatcaagaacgagggcgacaagcccaagctggacttcagcagggctgaccccaagaagaagaggaaggtggaggccagcggttccggacgggctgacgcattggacgattttgatctggatatgctgggaagtgacgccctcgatgattttgaccttgacatgcttggttcggatgcccttgatgactttgacctcgacatgctcggcagtgacgcccttgatgatttcgacctggacatgctgattaactctagatga

SEQ ID NO: 15 - DNA, 3606 bp, Streptococcus thermophilus
  source 1..3606: mol_type = genomic DNA
atgcccaagaagaagaggaaggtgagcgacctggtgctgggcctggccatcggcatcggcagcgtgggcgtgggcatcctgaacaaggtgaccggcgagatcatccacaagaacagtcgcatcttccctgctgctcaggctgagaacaacctggtgcgccgcaccaaccgccagggtcgccggcttgctcgccgcaagaagcaccggcgcgtgcgcctgaaccgcctgttcgaggagagcggcctgatcaccgacttcaccaagatcagcatcaacctgaacccctaccagctgcgcgtgaagggcctgaccgacgagctgagcaacgaggagctgttcatcgccctgaagaacatggtgaagcaccgcggcatcagctacctggacgacgccagcgacgacggcaacagcagcgtgggcgactacgcccagatcgtgaaggagaacagcaagcagctggagaccaagacccccggccagatccagctggagcgctaccagacctacggccagctgcgcggcgacttcaccgtggagaaggacggcaagaagcaccgcctgatcaacgtgttccccaccagcgcctaccgcagcgaggccctgcgcatcctgcagacccagcaggagttcaacccccagatcaccgacgagttcatcaaccgctacctggagatcctgaccggcaagcgcaagtactaccacggccccggcaacgagaagagccgcaccgactacggccgctaccgcaccagcggcgagaccctggacaacatcttcggcatcctgatcggcaagtgcaccttctaccccgacgagttccgcgccgccaaggccagctacaccgcccaggagttcaacctgctgaacgacctgaacaacctgaccgtgcccaccgagaccaagaagctgagcaaggagcagaagaaccagatcatcaactacgtgaagaacgagaaggccatgggccccgccaagctgttcaagtacatcgccaagctgctgagctgcgacgtggccgacatcaagggctaccgcatcgacaagagcggcaaggccgagatccacaccttcgaggcctaccgcaagatgaagaccctggagaccctggacatcgagcagatggaccgcgagaccctggacaagctggcctacgtgctgaccctgaacaccgagcgcgagggcatccaggaggccctggagcacgagttcgccgacggcagcttcagccagaagcaggtggacgagctggtgcagttccgcaaggccaacagcagcatcttcggcaagggctggcacaacttcagcgtgaagctgatgatggagctgatccccgagctgtacgagaccagcgaggagcagatgaccatcctgacccgcctgggcaagcagaagaccaccagcagcagcaacaagaccaagtacatcgacgagaagctgctgaccgaggagatctacaaccccgtggtggccaagagcgtgcgccaggccatcaagatcgtgaacgccgccatcaaggagtacggcgacttcgacaacatcgtgatcgagatggcccgcgagaccaacgaggacgacgagaagaaggccatccagaagatccagaaggccaacaaggacgagaaggacgccgccatgctgaaggccgccaaccagtacaacggcaaggccgagctgccccacagcgtgttccacggccacaagcagctggccaccaagatccgcctgtggcaccagcagggcgagcgctgcctgtacaccggcaagaccatcagcatccacgacctgatcaacaacagcaaccagttcgaggtggctgccatcctgcccctgagcatcaccttcgacgacagcctggccaacaaggtgctggtgtacgccaccgccgctcaggagaagggccagcgcaccccctaccaggccctggacagcatggacgacgcctggagcttccgcgagctgaaggccttcgtgcgcgagagcaagaccctgagcaacaagaagaaggagtacctgctgaccgaggaggacatcagcaagttcgacgtgcgcaagaagttcatcgagcgcaacctggtggacacccgctacgccagccgcgtggtgctgaacgccctgcaggagcacttccgcgcccacaagatcgacaccaaggtgagcgtggtgcgcggccagttcaccagccagctgcgccgccactggggcatcgagaagacccgcgacacctaccaccaccacgccgtggacgccctgatcattgcggcttctagccagctgaacctgtggaagaagcagaagaacaccctggtgagctacagcgaggaccagctgctggacatcgagaccggcgagctgatcagcgacgacgagtacaaggagagcgtgttcaaggccccctaccagcacttcgtggacaccctgaagagcaaggagttcgaggacagcatcctgttcagctaccaggtggacagcaagttcaaccgcaagatcagcgacgccaccatctacgccacccgccaggccaaggtgggcaaggacaaggccgacgagacctacgtgctgggcaagatcaaggacatctacacccaggacggctacgacgccttcatgaagatctacaagaaggacaagagcaagttcctgatgtaccgccacgacccccagaccttcgagaaggtgatcgagcccatcctggagaactaccccaacaagcagatcaacgataaaggcaaggaggtgccctgcaaccccttcctgaagtacaaggaggagcacggctacatccgcaagtacagcaagaagggcaacggccccgagatcaagagcctgaagtactacgacagcaagctgggcaaccacatcgacatcacccccaaggacagcaacaacaaggtggtgctgcagagcgtgagcccctggcgcgccgacgtgtacttcaacaagaccaccggcaagtacgagatcctgggcctgaagtacgccgacctgcagtttgataagggcaccggcacctacaagatcagccaggagaagtacaacgacatcaagaagaaggagggcgtggacagcgacagcgagttcaagttcaccctgtacaagaacgaccttctgctggtgaaggacaccgagaccaaggagcaacagctgttccgcttcctgagccgcaccatgcccaagcagaagcactacgtggagctgaagccctacgacaagcagaagttcgagggcggcgaggccctgatcaaggtgctgggcaacgtggccaacagcggccagtgcaagaagggcctgggcaagagcaacatcagcatctacaaggtgcgcaccgacgtgctgggcaaccagcacatcatcaagaacgagggcgacaagcccaagctggacttcagcagggctgaccccaagaagaagaggaaggtggaggccagcggttccggacgggctgacgcattggacgattttgatctggatatgctgggaagtgacgccctcgatgattttgaccttgacatgcttggttcggatgcccttgatgactttgacctcgacatgctcggcagtgacgcccttgatgatttcgacctggacatgctgattaactctagatga

SEQ ID NO: 16 - DNA, 3366 bp, Streptococcus thermophilus
  source 1..3366: mol_type = genomic DNA
atgagtgacttagttttaggacttgatatcggtataggttctgttggtgtaggtatccttaacaaagtgacaggagaaattatccataaaaactcacgcatcttcccagcagctcaagcggaaaataacctagtacgtagaacgaatcgtcaaggaagacgcttgacacgacgtaaaaaacatcgtagagttcgtttaaatcgtctatttgaggaaagtggattaatcaccgattttacgaagatttcaattaatcttaacccatatcaattacgagttaagggcttgaccgatgaattgtctaatgaagaactgtttatcgctcttaaaaatatggtgaaacaccgtgggattagttacctcgatgatgctagtgatgacggaaattcatcaataggagactatgcacaaattgttaaggaaaatagtaaacaattagaaactaagacaccgggacagatacagttggaacgctaccaaacatatggtcaattacgtggtgattttactgttgagaaagatggcaaaaaacatcgcttgattaatgtctttccaacatcagcttatcgttcagaagccttaaggatactgcaaactcaacaagaatttaatccacagattacagatgaatttattaatcgttatctcgaaattttaactggaaaacggaaatattatcatggacccggaaatgaaaagtcacggactgattatggtcgttacagaacgagtggagaaactttagacaatatttttggaattctaattgggaaatgtacattttatccagacgagtttagagcagcaaaagcttcctacacggctcaagaattcaatttgctaaatgatttgaacaatctaacagttcctactgaaaccaaaaagttgagcaaagaacagaagaatcaaatcattaattatgtcaaaaatgaaaaggcaatggggccagcgaaactttttaaatatatcgctaagttactttcttgtgatgttgcagatatcaagggataccgtatcgacaaatcaggtaaggctgagattcatactttcgaagcctatcgaaaaatgaaaacgcttgaaaccttagatattgagcaaatggatagagaaacgcttgataaattagcctatgtcttaacattaaacactgagagggaaggtattcaagaagccttagaacatgaatttgctgatggtagctttagccagaagcaagttgacgaattggttcaattccgcaaagcaaatagttccatttttggaaaaggatggcataatttttctgtcaaactgatgatggagttaattccagaattgtatgagacgtcagaagagcaaatgactatcctaacacgacttggaaaacaaaaaacgacttcgtcttcaaataaaacaaaatatatagatgaaaaactattaactgaagaaatctataatcctgttgttgctaagtctgttcgccaggctataaaaatcgtaaatgcggcgattaaagaatacggagactttgacaatattgtcatcgaaatggctcgtgaaacaaatgaagatgatgaaaagaaagctattcaaaagattcaaaaagccaacaaagatgaaaaagatgcagcaatgcttaaggctgctaaccaatataatggaaaggctgaattaccacatagtgttttccacggtcataagcaattagcgactaaaatccgcctttggcatcagcaaggagaacgttgcctttatactggtaagacaatctcaatccatgatttgataaataattctaatcagtttgaagtagatcatattttacctctttctatcacattcgatgatagccttgcaaataaggttttggtttatgcaactgctaaccaagaaaaaggacaacgaacaccttatcaggctttagatagtatggatgatgcgtggtctttccgtgaattaaaagcttttgtacgtgagtcaaaaacactttcgaacaagaaaaaagaatacctccttacagaagaagatatttcaaagtttgatgttcgaaagaaatttattgaacgaaatcttgtagatacaagatacgcttcaagagttgtcctcaatgcccttcaagaacactttagagctcacaagattgatacaaaagtttccgtggttcgtggccaatttacatctcaattgagacgccattggggaattgagaagactcgtgatacttatcatcaccatgctgtcgatgcattgattattgccgcctcaagtcagttgaatttgtggaaaaaacaaaagaatacccttgtaagttattcagaagaccaactccttgatattgaaacaggtgaacttattagtgatgatgagtacaaggaatctgtgttcaaagccccttatcaacattttgttgatacattgaagagtaaagaatttgaagacagtatcttattctcttatcaagtggattctaagtttaatcgtaaaatatcagatgccactatttatgcgacaagacaggctaaagtaggaaaagataaggcggatgaaacttatgtcttagggaaaatcaaagatatttatactcaggatggttatgatgcctttatgaagatttataagaaggataagtcaaaattcctcatgtatcgtcacgacccacaaacctttgagaaagttatcgagccaattttagagaactatcctaataagcaaataaatgaaaaagggaaagaggtaccatgtaatcctttcctaaaatataaagaagaacatggctatattcgtaaatatagtaaaaaaggcaatggtcctgaaatcaagagtcttaaatactatgatagtaagctaggcaatcatattgatattactccgaaggatagtaacaataaagttgtcttacagtcagtttctccatggagagcggatgtctatttcaataagactactggaaaatacgaaatcctcggattgaaatatgctgatttacaatttgaaaaagggacaggaacatataagatttcccaggaaaaatacaatgacattaagaaaaaagagggtgtagattctgattcagaattcaagtttacactttataaaaatgatttgttactcgttaaagatacagaaacaaaagaacaacagcttttccgttttctttctcgaactatgcctaaacaaaagcattatgttgaattaaaaccttatgataaacagaaatttgaaggaggtgaggcgttaattaaagtgttgggtaacgttgctaatagtggtcaatgcaaaaaagggctaggaaaatcaaatatttctatttataaggtaagaacagatgtcctaggaaatcagcatatcatcaaaaatgagggtgataagcctaagctagatttttaa

SEQ ID NO: 17 - DNA, 4167 bp, Streptococcus thermophilus; identical to SEQ ID NO: 9
  source 1..4167: mol_type = genomic DNA

SEQ ID NO: 18 - DNA, 3249 bp, Neisseria meningitidis
  source 1..3249: mol_type = genomic DNA
atggccgccttcaagcccaaccccatcaactacatcctgggcctggacatcggcatcgccagcgtgggctgggccatggtggagatcgacgaggacgagaaccccatctgcctgatcgacctgggtgtgcgcgtgttcgagcgcgctgaggtgcccaagactggtgacagtctggctatggctcgccggcttgctcgctctgttcggcgccttactcgccggcgcgctcaccgccttctgcgcgctcgccgcctgctgaagcgcgagggtgtgctgcaggctgccgacttcgacgagaacggcctgatcaagagcctgcccaacactccttggcagctgcgcgctgccgctctggaccgcaagctgactcctctggagtggagcgccgtgctgctgcacctgatcaagcaccgcggctacctgagccagcgcaagaacgagggcgagaccgccgacaaggagctgggtgctctgctgaagggcgtggccgacaacgcccacgccctgcagactggtgacttccgcactcctgctgagctggccctgaacaagttcgagaaggagagcggccacatccgcaaccagcgcggcgactacagccacaccttcagccgcaaggacctgcaggccgagctgatcctgctgttcgagaagcagaaggagttcggcaacccccacgtgagcggcggcctgaaggagggcatcgagaccctgctgatgacccagcgccccgccctgagcggcgacgccgtgcagaagatgctgggccactgcaccttcgagccagccgagcccaaggccgccaagaacacctacaccgccgagcgcttcatctggctgaccaagctgaacaacctgcgcatcctggagcagggcagcgagcgccccctgaccgacaccgagcgcgccaccctgatggacgagccctaccgcaagagcaagctgacctacgcccaggcccgcaagctgctgggtctggaggacaccgccttcttcaagggcctgcgctacggcaaggacaacgccgaggccagcaccctgatggagatgaaggcctaccacgccatcagccgcgccctggagaaggagggcctgaaggacaagaagagtcctctgaacctgagccccgagctgcaggacgagatcggcaccgccttcagcctgttcaagaccgacgaggacatcaccggccgcctgaaggaccgcatccagcccgagatcctggaggccctgctgaagcacatcagcttcgacaagttcgtgcagatcagcctgaaggccctgcgccgcatcgtgcccctgatggagcagggcaagcgctacgacgaggcctgcgccgagatctacggcgaccactacggcaagaagaacaccgaggagaagatctacctgcctcctatccccgccgacgagatccgcaaccccgtggtgctgcgcgccctgagccaggcccgcaaggtgatcaacggcgtggtgcgccgctacggcagccccgcccgcatccacatcgagaccgcccgcgaggtgggcaagagcttcaaggaccgcaaggagatcgagaagcgccaggaggagaaccgcaaggaccgcgagaaggccgccgccaagttccgcgagtacttccccaacttcgtgggcgagcccaagagcaaggacatcctgaagctgcgcctgtacgagcagcagcacggcaagtgcctgtacagcggcaaggagatcaacctgggccgcctgaacgagaagggctacgtggagatcgaccacgccctgcccttcagccgcacctgggacgacagcttcaacaacaaggtgctggtgctgggcagcgagaaccagaacaagggcaaccagaccccctacgagtacttcaacggcaaggacaacagccgcgagtggcaggagttcaaggcccgcgtggagaccagccgcttcccccgcagcaagaagcagcgcatcctgctgcagaagttcgacgaggacggcttcaaggagcgcaacctgaacgacacccgctacgtgaaccgcttcctgtgccagttcgtggccgaccgcatgcgcctgaccggcaagggcaagaagcgcgtgttcgccagcaacggccagatcaccaacctgctgcgcggcttctggggcctgcgcaaggtgcgcgccgagaacgaccgccaccacgccctggacgccgtggtggtggcctgcagcaccgtggccatgcagcagaagatcacccgcttcgtgcgctacaaggagatgaacgccttcgacggtaaaaccatcgacaaggagaccggcgaggtgctgcaccagaagacccacttcccccagccctgggagttcttcgcccaggaggtgatgatccgcgtgttcggcaagcccgacggcaagcccgagttcgaggaggccgacacccccgagaagctgcgcaccctgctggccgagaagctgagcagccgccctgaggccgtgcacgagtacgtgactcctctgttcgtgagccgcgcccccaaccgcaagatgagcggtcagggtcacatggagaccgtgaagagcgccaagcgcctggacgagggcgtgagcgtgctgcgcgtgcccctgacccagctgaagctgaaggacctggagaagatggtgaaccgcgagcgcgagcccaagctgtacgaggccctgaaggcccgcctggaggcccacaaggacgaccccgccaaggccttcgccgagcccttctacaagtacgacaaggccggcaaccgcacccagcaggtgaaggccgtgcgcgtggagcaggtgcagaagaccggcgtgtgggtgcgcaaccacaacggcatcgccgacaacgccaccatggtgcgcgtggacgtgttcgagaagggcgacaagtactacctggtgcccatctacagctggcaggtggccaagggcatcctgcccgaccgcgccgtggtgcagggcaaggacgaggaggactggcagctgatcgacgacagcttcaacttcaagttcagcctgcaccccaacgacctggtggaggtgatcaccaagaaggcccgcatgttcggctacttcgccagctgccaccgcggcaccggcaacatcaacatccgcatccacgacctggaccacaagatcggcaagaacggcatcctggagggcatcggcgtgaagaccgccctgagcttccagaagtaccagatcgacgagctgggcaaggagatccgcccctgccgcctgaagaagcgccctcctgtgcgctaa

SEQ ID NO: 19 - DNA, 3249 bp, Neisseria meningitidis
  source 1..3249: mol_type = genomic DNA
atggccgccttcaagcccaaccccatcaactacatcctgggcctggccatcggcatcgccagcgtgggctgggccatggtggagatcgacgaggacgagaaccccatctgcctgatcgacctgggtgtgcgcgtgttcgagcgcgctgaggtgcccaagactggtgacagtctggctatggctcgccggcttgctcgctctgttcggcgccttactcgccggcgcgctcaccgccttctgcgcgctcgccgcctgctgaagcgcgagggtgtgctgcaggctgccgacttcgacgagaacggcctgatcaagagcctgcccaacactccttggcagctgcgcgctgccgctctggaccgcaagctgactcctctggagtggagcgccgtgctgctgcacctgatcaagcaccgcggctacctgagccagcgcaagaacgagggcgagaccgccgacaaggagctgggtgctctgctgaagggcgtggccgacaacgcccacgccctgcagactggtgacttccgcactcctgctgagctggccctgaacaagttcgagaaggagagcggccacatccgcaaccagcgcggcgactacagccacaccttcagccgcaaggacctgcaggccgagctgatcctgctgttcgagaagcagaaggagttcggcaacccccacgtgagcggcggcctgaaggagggcatcgagaccctgctgatgacccagcgccccgccctgagcggcgacgccgtgcagaagatgctgggccactgcaccttcgagccagccgagcccaaggccgccaagaacacctacaccgccgagcgcttcatctggctgaccaagctgaacaacctgcgcatcctggagcagggcagcgagcgccccctgaccgacaccgagcgcgccaccctgatggacgagccctaccgcaagagcaagctgacctacgcccaggcccgcaagctgctgggtctggaggacaccgccttcttcaagggcctgcgctacggcaaggacaacgccgaggccagcaccctgatggagatgaaggcctaccacgccatcagccgcgccctggagaaggagggcctgaaggacaagaagagtcctctgaacctgagccccgagctgcaggacgagatcggcaccgccttcagcctgttcaagaccgacgaggacatcaccggccgcctgaaggaccgcatccagcccgagatcctggaggccctgctgaagcacatcagcttcgacaagttcgtgcagatcagcctgaaggccctgcgccgcatcgtgcccctgatggagcagggcaagcgctacgacgaggcctgcgccgagatctacggcgaccactacggcaagaagaacaccgaggagaagatctacctgcctcctatccccgccgacgagatccgcaaccccgtggtgctgcgcgccctgagccaggcccgcaaggtgatcaacggcgtggtgcgccgctacggcagccccgcccgcatccacatcgagaccgcccgcgaggtgggcaagagcttcaaggaccgcaaggagatcgagaagcgccaggaggagaaccgcaaggaccgcgagaaggccgccgccaagttccgcgagtacttccccaacttcgtgggcgagcccaagagcaaggacatcctgaagctgcgcctgtacgagcagcagcacggcaagtgcctgtacagcggcaaggagatcaacctgggccgcctgaacgagaagggctacgtggagatcgccgctgccctgcccttcagccgcacctgggacgacagcttcaacaacaaggtgctggtgctgggcagcgaggctcagaacaagggcaaccagaccccctacgagtacttcaacggcaaggacaacagccgcgagtggcaggagttcaaggcccgcgtggagaccagccgcttcccccgcagcaagaagcagcgcatcctgctgcagaagttcgacgaggacggcttcaaggagcgcaacctgaacgacacccgctacgtgaaccgcttcctgtgccagttcgtggccgaccgcatgcgcctgaccggcaagggcaagaagcgcgtgttcgccagcaacggccagatcaccaacctgctgcgcggcttctggggcctgcgcaaggtgcgcgccgagaacgaccgccaccacgccctggacgccgtggtggtggcctgcagcaccgtggccatgcagcagaagatcacccgcttcgtgcgctacaaggagatgaacgccttcgacggtaaaaccatcgacaaggagaccggcgaggtgctgcaccagaagacccacttcccccagccctgggagttcttcgcccaggaggtgatgatccgcgtgttcggcaagcccgacggcaagcccgagttcgaggaggccgacacccccgagaagctgcgcaccctgctggccgagaagctgagcagccgccctgaggccgtgcacgagtacgtgactcctctgttcgtgagccgcgcccccaaccgcaagatgagcggtcagggtcacatggagaccgtgaagagcgccaagcgcctggacgagggcgtgagcgtgctgcgcgtgcccctgacccagctgaagctgaaggacctggagaagatggtgaaccgcgagcgcgagcccaagctgtacgaggccctgaaggcccgcctggaggcccacaaggacgaccccgccaaggccttcgccgagcccttctacaagtacgacaaggccggcaaccgcacccagcaggtgaaggccgtgcgcgtggagcaggtgcagaagaccggcgtgtgggtgcgcaaccacaacggcatcgccgacaacgccaccatggtgcgcgtggacgtgttcgagaagggcgacaagtactacctggtgcccatctacagctggcaggtggccaagggcatcctgcccgaccgcgccgtggtgcagggcaaggacgaggaggactggcagctgatcgacgacagcttcaacttcaagttcagcctgcaccccaacgacctggtggaggtgatcaccaagaaggcccgcatgttcggctacttcgccagctgccaccgcggcaccggcaacatcaacatccgcatccacgacctggaccacaagatcggcaagaacggcatcctggagggcatcggcgtgaagaccgccctgagcttccagaagtaccagatcgacgagctgggcaaggagatccgcccctgccgcctgaagaagcgccctcctgtgcgctaa

SEQ ID NO: 20 - DNA, 3282 bp, Neisseria meningitidis
  source 1..3282: mol_type = genomic DNA
atggccgccttcaagcccaaccccatcaactacatcctgggcctggacatcggcatcgccagcgtgggctgggccatggtggagatcgacgaggacgagaaccccatctgcctgatcgacctgggtgtgcgcgtgttcgagcgcgctgaggtgcccaagactggtgacagtctggctatggctcgccggcttgctcgctctgttcggcgccttactcgccggcgcgctcaccgccttctgcgcgctcgccgcctgctgaagcgcgagggtgtgctgcaggctgccgacttcgacgagaacggcctgatcaagagcctgcccaacactccttggcagctgcgcgctgccgctctggaccgcaagctgactcctctggagtggagcgccgtgctgctgcacctgatcaagcaccgcggctacctgagccagcgcaagaacgagggcgagaccgccgacaaggagctgggtgctctgctgaagggcgtggccgacaacgcccacgccctgcagactggtgacttccgcactcctgctgagctggccctgaacaagttcgagaaggagagcggccacatccgcaaccagcgcggcgactacagccacaccttcagccgcaaggacctgcaggccgagctgatcctgctgttcgagaagcagaaggagttcggcaacccccacgtgagcggcggcctgaaggagggcatcgagaccctgctgatgacccagcgccccgccctgagcggcgacgccgtgcagaagatgctgggccactgcaccttcgagccagccgagcccaaggccgccaagaacacctacaccgccgagcgcttcatctggctgaccaagctgaacaacctgcgcatcctggagcagggcagcgagcgccccctgaccgacaccgagcgcgccaccctgatggacgagccctaccgcaagagcaagctgacctacgcccaggcccgcaagctgctgggtctggaggacaccgccttcttcaagggcctgcgctacggcaaggacaacgccgaggccagcaccctgatggagatgaaggcctaccacgccatcagccgcgccctggagaaggagggcctgaaggacaagaagagtcctctgaacctgagccccgagctgcaggacgagatcggcaccgccttcagcctgttcaagaccgacgaggacatcaccggccgcctgaaggaccgcatccagcccgagatcctggaggccctgctgaagcacatcagcttcgacaagttcgtgcagatcagcctgaaggccctgcgccgcatcgtgcccctgatggagcagggcaagcgctacgacgaggcctgcgccgagatctacggcgaccactacggcaagaagaacaccgaggagaagatctacctgcctcctatccccgccgacgagatccgcaaccccgtggtgctgcgcgccctgagccaggcccgcaaggtgatcaacggcgtggtgcgccgctacggcagccccgcccgcatccacatcgagaccgcccgcgaggtgggcaagagcttcaaggaccgcaaggagatcgagaagcgccaggaggagaaccgcaaggaccgcgagaaggccgccgccaagttccgcgagtacttccccaacttcgtgggcgagcccaagagcaaggacatcctgaagctgcgcctgtacgagcagcagcacggcaagtgcctgtacagcggcaaggagatcaacctgggccgcctgaacgagaagggctacgtggagatcgaccacgccctgcccttcagccgcacctgggacgacagcttcaacaacaaggtgctggtgctgggcagcgagaaccagaacaagggcaaccagaccccctacgagtacttcaacggcaaggacaacagccgcgagtggcaggagttcaaggcccgcgtggagaccagccgcttcccccgcagcaagaagcagcgcatcctgctgcagaagttcgacgaggacggcttcaaggagcgcaacctgaacgacacccgctacgtgaaccgcttcctgtgccagttcgtggccgaccgcatgcgcctgaccggcaagggcaagaagcgcgtgttcgccagcaacggccagatcaccaacctgctgcgcggcttctggggcctgcgcaaggtgcgcgccgagaacgaccgccaccacgccctggacgccgtggtggtggcctgcagcaccgtggccatgcagcagaagatcacccgcttcgtgcgctacaaggagatgaacgccttcgacggtaaaaccatcgacaaggagaccggcgaggtgctgcaccagaagacccacttcccccagccctgggagttcttcgcccaggaggtgatgatccgcgtgttcggcaagcccgacggcaagcccgagttcgaggaggccgacacccccgagaagctgcgcaccctgctggccgagaagctgagcagccgccctgaggccgtgcacgagtacgtgactcctctgttcgtgagccgcgcccccaaccgcaagatgagcggtcagggtcacatggagaccgtgaagagcgccaagcgcctggacgagggcgtgagcgtgctgcgcgtgcccctgacccagctgaagctgaaggacctggagaagatggtgaaccgcgagcgcgagcccaagctgtacgaggccctgaaggcccgcctggaggcccacaaggacgaccccgccaaggccttcgccgagcccttctacaagtacgacaaggccggcaaccgcacccagcaggtgaaggccgtgcgcgtggagcaggtgcagaagaccggcgtgtgggtgcgcaaccacaacggcatcgccgacaacgccaccatggtgcgcgtggacgtgttcgagaagggcgacaagtactacctggtgcccatctacagctggcaggtggccaagggcatcctgcccgaccgcgccgtggtgcagggcaaggacgaggaggactggcagctgatcgacgacagcttcaacttcaagttcagcctgcaccccaacgacctggtggaggtgatcaccaagaaggcccgcatgttcggctacttcgccagctgccaccgcggcaccggcaacatcaacatccgcatccacgacctggaccacaagatcggcaagaacggcatcctggagggcatcggcgtgaagaccgccctgagcttccagaagtaccagatcgacgagctgggcaaggagatccgcccctgccgcctgaagaagcgccctcctgtgcgcagcagggctgaccccaagaagaagaggaaggtgtga

SEQ ID NO: 21 - DNA, 3342 bp, Neisseria meningitidis
  source 1..3342: mol_type = genomic DNA
atggccgccttcaagcccaaccccatcaactacatcctgggcctggacatcggcatcgccagcgtgggctgggccatggtggagatcgacgaggacgagaaccccatctgcctgatcgacctgggtgtgcgcgtgttcgagcgcgctgaggtgcccaagactggtgacagtctggctatggctcgccggcttgctcgctctgttcggcgccttactcgccggcgcgctcaccgccttctgcgcgctcgccgcctgctgaagcgcgagggtgtgctgcaggctgccgacttcgacgagaacggcctgatcaagagcctgcccaacactccttggcagctgcgcgctgccgctctggaccgcaagctgactcctctggagtggagcgccgtgctgctgcacctgatcaagcaccgcggctacctgagccagcgcaagaacgagggcgagaccgccgacaaggagctgggtgctctgctgaagggcgtggccgacaacgcccacgccctgcagactggtgacttccgcactcctgctgagctggccctgaacaagttcgagaaggagagcggccacatccgcaaccagcgcggcgactacagccacaccttcagccgcaaggacctgcaggccgagctgatcctgctgttcgagaagcagaaggagttcggcaacccccacgtgagcggcggcctgaaggagggcatcgagaccctgctgatgacccagcgccccgccctgagcggcgacgccgtgcagaagatgctgggccactgcaccttcgagccagccgagcccaaggccgccaagaacacctacaccgccgagcgcttcatctggctgaccaagctgaacaacctgcgcatcctggagcagggcagcgagcgccccctgaccgacaccgagcgcgccaccctgatggacgagccctaccgcaagagcaagctgacctacgcccaggcccgcaagctgctgggtctggaggacaccgccttcttcaagggcctgcgctacggcaaggacaacgccgaggccagcaccctgatggagatgaaggcctaccacgccatcagccgcgccctggagaaggagggcctgaaggacaagaagagtcctctgaacctgagccccgagctgcaggacgagatcggcaccgccttcagcctgttcaagaccgacgaggacatcaccggccgcctgaaggaccgcatccagcccgagatcctggaggccctgctgaagcacatcagcttcgacaagttcgtgcagatcagcctgaaggccctgcgccgcatcgtgcccctgatggagcagggcaagcgctacgacgaggcctgcgccgagatctacggcgaccactacggcaagaagaacaccgaggagaagatctacctgcctcctatccccgccgacgagatccgcaaccccgtggtgctgcgcgccctgagccaggcccgcaaggtgatcaacggcgtggtgcgccgctacggcagccccgcccgcatccacatcgagaccgcccgcgaggtgggcaagagcttcaaggaccgcaaggagatcgagaagcgccaggaggagaaccgcaaggaccgcgagaaggccgccgccaagttccgcgagtacttccccaacttcgtgggcgagcccaagagcaaggacatcctgaagctgcgcctgtacgagcagcagcacggcaagtgcctgtacagcggcaaggagatcaacctgggccgcctgaacgagaagggctacgtggagatcgaccacgccctgcccttcagccgcacctgggacgacagcttcaacaacaaggtgctggtgctgggcagcgagaaccagaacaagggcaaccagaccccctacgagtacttcaacggcaaggacaacagccgcgagtggcaggagttcaaggcccgcgtggagaccagccgcttcccccgcagcaagaagcagcgcatcctgctgcagaagttcgacgaggacggcttcaaggagcgcaacctgaacgacacccgctacgtgaaccgcttcctgtgccagttcgtggccgaccgcatgcgcctgaccggcaagggcaagaagcgcgtgttcgccagcaacggccagatcaccaacctgctgcgcggcttctggggcctgcgcaaggtgcgcgccgagaacgaccgccaccacgccctggacgccgtggtggtggcctgcagcaccgtggccatgcagcagaagatcacccgcttcgtgcgctacaaggagatgaacgccttcgacggtaaaaccatcgacaaggagaccggcgaggtgctgcaccagaagacccacttcccccagccctgggagttcttcgcccaggaggtgatgatccgcgtgttcggcaagcccgacggcaagcccgagttcgaggaggccgacacccccgagaagctgcgcaccctgctggccgagaagctgagcagccgccctgaggccgtgcacgagtacgtgactcctctgttcgtgagccgcgcccccaaccgcaagatgagcggtcagggtcacatggagaccgtgaagagcgccaagcgcctggacgagggcgtgagcgtgctgcgcgtgcccctgacccagctgaagctgaaggacctggagaagatggtgaaccgcgagcgcgagcccaagctgtacgaggccctgaaggcccgcctggaggcccacaaggacgaccccgccaaggccttcgccgagcccttctacaagtacgacaaggccggcaaccgcacccagcaggtgaaggccgtgcgcgtggagcaggtgcagaagaccggcgtgtgggtgcgcaaccacaacggcatcgccgacaacgccaccatggtgcgcgtggacgtgttcgagaagggcgacaagtactacctggtgcccatctacagctggcaggtggccaagggcatcctgcccgaccgcgccgtggtgcagggcaaggacgaggaggactggcagctgatcgacgacagcttcaacttcaagttcagcctgcaccccaacgacctggtggaggtgatcaccaagaaggcccgcatgttcggctacttcgccagctgccaccgcggcaccggcaacatcaacatccgcatccacgacctggaccacaagatcggcaagaacggcatcctggagggcatcggcgtgaagaccgccctgagcttccagaagtaccagatcgacgagctgggcaaggagatccgcccctgccgcctgaagaagcgccctcctgtgcgcgcggccgcagatccaaaaaagaagagaaaggtagatccaaaaaagaagagaaaggtagatccaaaaaagaagagaaaggtagatacggccgcatag

SEQ ID NO: 22 - DNA, 3468 bp, Neisseria meningitidis
  source 1..3468: mol_type = genomic DNA
atggccgccttcaagcccaaccccatcaactacatcctgggcctggccatcggcatcgccagcgtgggctgggccatggtggagatcgacgaggacgagaaccccatctgcctgatcgacctgggtgtgcgcgtgttcgagcgcgctgaggtgcccaagactggtgacagtctggctatggctcgccggcttgctcgctctgttcggcgccttactcgccggcgcgctcaccgccttctgcgcgctcgccgcctgctgaagcgcgagggtgtgctgcaggctgccgacttcgacgagaacggcctgatcaagagcctgcccaacactccttggcagctgcgcgctgccgctctggaccgcaagctgactcctctggagtggagcgccgtgctgctgcacctgatcaagcaccgcggctacctgagccagcgcaagaacgagggcgagaccgccgacaaggagctgggtgctctgctgaagggcgtggccgacaacgcccacgccctgcagactggtgacttccgcactcctgctgagctggccctgaacaagttcgagaaggagagcggccacatccgcaaccagcgcggcgactacagccacaccttcagccgcaaggacctgcaggccgagctgatcctgctgttcgagaagcagaaggagttcggcaacccccacgtgagcggcggcctgaaggagggcatcgagaccctgctgatgacccagcgccccgccctgagcggcgacgccgtgcagaagatgctgggccactgcaccttcgagccagccgagcccaaggccgccaagaacacctacaccgccgagcgcttcatctggctgaccaagctgaacaacctgcgcatcctggagcagggcagcgagcgccccctgaccgacaccgagcgcgccaccctgatggacgagccctaccgcaagagcaagctgacctacgcccaggcccgcaagctgctgggtctggaggacaccgccttcttcaagggcctgcgctacggcaaggacaacgccgaggccagcaccctgatggagatgaaggcctaccacgccatcagccgcgccctggagaaggagggcctgaaggacaagaagagtcctctgaacctgagccccgagctgcaggacgagatcggcaccgccttcagcctgttcaagaccgacgaggacatcaccggccgcctgaaggaccgcatccagcccgagatcctggaggccctgctgaagcacatcagcttcgacaagttcgtgcagatcagcctgaaggccctgcgccgcatcgtgcccctgatggagcagggcaagcgctacgacgaggcctgcgccgagatctacggcgaccactacggcaagaagaacaccgaggagaagatctacctgcctcctatccccgccgacgagatccgcaaccccgtggtgctgcgcgccctgagccaggcccgcaaggtgatcaacggcgtggtgcgccgctacggcagccccgcccgcatccacatcgagaccgcccgcgaggtgggcaagagcttcaaggaccgcaaggagatcgagaagcgccaggaggagaaccgcaaggaccgcgagaaggccgccgccaagttccgcgagtacttccccaacttcgtgggcgagcccaagagcaaggacatcctgaagctgcgcctgtacgagcagcagcacggcaagtgcctgtacagcggcaaggagatcaacctgggccgcctgaacgagaagggctacgtggagatcgccgctgccctgcccttcagccgcacctgggacgacagcttcaacaacaaggtgctggtgctgggcagcgaggctcagaacaagggcaaccagaccccctacgagtacttcaacggcaaggacaacagccgcgagtggcaggagttcaaggcccgcgtggagaccagccgcttcccccgcagcaagaagcagcgcatcctgctgcagaagttcgacgaggacggcttcaaggagcgcaacctgaacgacacccgctacgtgaaccgcttcctgtgccagttcgtggccgaccgcatgcgcctgaccggcaagggcaagaagcgcgtgttcgccagcaacggccagatcaccaacctgctgcgcggcttctggggcctgcgcaaggtgcgcgccgagaacgaccgccaccacgccctggacgccgtggtggtggcctgcagcaccgtggccatgcagcagaagatcacccgcttcgtgcgctacaaggagatgaacgccttcgacggtaaaaccatcgacaaggagaccggcgaggtgctgcaccagaagacccacttcccccagccctgggagttcttcgcccaggaggtgatgatccgcgtgttcggcaagcccgacggcaagcccgagttcgaggaggccgacacccccgagaagctgcgcaccctgctggccgagaagctgagcagccgccctgaggccgtgcacgagtacgtgactcctctgttcgtgagccgcgcccccaaccgcaagatgagcggtcagggtcacatggagaccgtgaagagcgccaagcgcctggacgagggcgtgagcgtgctgcgcgtgcccctgacccagctgaagctgaaggacctggagaagatggtgaaccgcgagcgcgagcccaagctgtacgaggccctgaaggcccgcctggaggcccacaaggacgaccccgccaaggccttcgccgagcccttctacaagtacgacaaggccggcaaccgcacccagcaggtgaaggccgtgcgcgtggagcaggtgcagaagaccggcgtgtgggtgcgcaaccacaacggcatcgccgacaacgccaccatggtgcgcgtggacgtgttcgagaagggcgacaagtactacctggtgcccatctacagctggcaggtggccaagggcatcctgcccgaccgcgccgtggtgcagggcaaggacgaggaggactggcagctgatcgacgacagcttcaacttcaagttcagcctgcaccccaacgacctggtggaggtgatcaccaagaaggcccgcatgttcggctacttcgccagctgccaccgcggcaccggcaacatcaacatccgcatccacgacctggaccacaagatcggcaagaacggcatcctggagggcatcggcgtgaagaccgccctgagcttccagaagtaccagatcgacgagctgggcaaggagatccgcccctgccgcctgaagaagcgccctcctgtgcgcagcagggctgaccccaagaagaagaggaaggtggaggccagcggttccggacgggctgacgcattggacgattttgatctggatatgctgggaagtgacgccctcgatgattttgaccttgacatgcttggttcggatgcccttgatgactttgacctcgacatgctcggcagtgacgcccttgatgatttcgacctggacatgctgattaactctagatga

SEQ ID NO: 23 - DNA, 3489 bp, Neisseria meningitidis
  source 1..3489: mol_type = genomic DNA
atgcccaagaagaagaggaaggtggccgccttcaagcccaaccccatcaactacatcctgggcctggccatcggcatcgccagcgtgggctgggccatggtggagatcgacgaggacgagaaccccatctgcctgatcgacctgggtgtgcgcgtgttcgagcgcgctgaggtgcccaagactggtgacagtctggctatggctcgccggcttgctcgctctgttcggcgccttactcgccggcgcgctcaccgccttctgcgcgctcgccgcctgctgaagcgcgagggtgtgctgcaggctgccgacttcgacgagaacggcctgatcaagagcctgcccaacactccttggcagctgcgcgctgccgctctggaccgcaagctgactcctctggagtggagcgccgtgctgctgcacctgatcaagcaccgcggctacctgagccagcgcaagaacgagggcgagaccgccgacaaggagctgggtgctctgctgaagggcgtggccgacaacgcccacgccctgcagactggtgacttccgcactcctgctgagctggccctgaacaagttcgagaaggagagcggccacatccgcaaccagcgcggcgactacagccacaccttcagccgcaaggacctgcaggccgagctgatcctgctgttcgagaagcagaaggagttcggcaacccccacgtgagcggcggcctgaaggagggcatcgagaccctgctgatgacccagcgccccgccctgagcggcgacgccgtgcagaagatgctgggccactgcaccttcgagccagccgagcccaaggccgccaagaacacctacaccgccgagcgcttcatctggctgaccaagctgaacaacctgcgcatcctggagcagggcagcgagcgccccctgaccgacaccgagcgcgccaccctgatggacgagccctaccgcaagagcaagctgacctacgcccaggcccgcaagctgctgggtctggaggacaccgccttcttcaagggcctgcgctacggcaaggacaacgccgaggccagcaccctgatggagatgaaggcctaccacgccatcagccgcgccctggagaaggagggcctgaaggacaagaagagtcctctgaacctgagccccgagctgcaggacgagatcggcaccgccttcagcctgttcaagaccgacgaggacatcaccggccgcctgaaggaccgcatccagcccgagatcctggaggccctgctgaagcacatcagcttcgacaagttcgtgcagatcagcctgaaggccctgcgccgcatcgtgcccctgatggagcagggcaagcgctacgacgaggcctgcgccgagatctacggcgaccactacggcaagaagaacaccgaggagaagatctacctgcctcctatccccgccgacgagatccgcaaccccgtggtgctgcgcgccctgagccaggcccgcaaggtgatcaacggcgtggtgcgccgctacggcagccccgcccgcatccacatcgagaccgcccgcgaggtgggcaagagcttcaaggaccgcaaggagatcgagaagcgccaggaggagaaccgcaaggaccgcgagaaggccgccgccaagttccgcgagtacttccccaacttcgtgggcgagcccaagagcaaggacatcctgaagctgcgcctgtacgagcagcagcacggcaagtgcctgtacagcggcaaggagatcaacctgggccgcctgaacgagaagggctacgtggagatcgccgctgccctgcccttcagccgcacctgggacgacagcttcaacaacaaggtgctggtgctgggcagcgaggctcagaacaagggcaaccagaccccctacgagtacttcaacggcaaggacaacagccgcgagtggcaggagttcaaggcccgcgtggagaccagccgcttcccccgcagcaagaagcagcgcatcctgctgcagaagttcgacgaggacggcttcaaggagcgcaacctgaacgacacccgctacgtgaaccgcttcctgtgccagttcgtggccgaccgcatgcgcctgaccggcaagggcaagaagcgcgtgttcgccagcaacggccagatcaccaacctgctgcgcggcttctggggcctgcgcaaggtgcgcgccgagaacgaccgccaccacgccctggacgccgtggtggtggcctgcagcaccgtggccatgcagcagaagatcacccgcttcgtgcgctacaaggagatgaacgccttcgacggtaaaaccatcgacaaggagaccggcgaggtgctgcaccagaagacccacttcccccagccctgggagttcttcgcccaggaggtgatgatccgcgtgttcggcaagcccgacggcaagcccgagttcgaggaggccgacacccccgagaagctgcgcaccctgctggccgagaagctgagcagccgccctgaggccgtgcacgagtacgtgactcctctgttcgtgagccgcgcccccaaccgcaagatgagcggtcagggtcacatggagaccgtgaagagcgccaagcgcctggacgagggcgtgagcgtgctgcgcgtgcccctgacccagctgaagctgaaggacctggagaagatggtgaaccgcgagcgcgagcccaagctgtacgaggccctgaaggcccgcctggaggcccacaaggacgaccccgccaaggccttcgccgagcccttctacaagtacgacaaggccggcaaccgcacccagcaggtgaaggccgtgcgcgtggagcaggtgcagaagaccggcgtgtgggtgcgcaaccacaacggcatcgccgacaacgccaccatggtgcgcgtggacgtgttcgagaagggcgacaagtactacctggtgcccatctacagctggcaggtggccaagggcatcctgcccgaccgcgccgtggtgcagggcaaggacgaggaggactggcagctgatcgacgacagcttcaacttcaagttcagcctgcaccccaacgacctggtggaggtgatcaccaagaaggcccgcatgttcggctacttcgccagctgccaccgcggcaccggcaacatcaacatccgcatccacgacctggaccacaagatcggcaagaacggcatcctggagggcatcggcgtgaagaccgccctgagcttccagaagtaccagatcgacgagctgggcaaggagatccgcccctgccgcctgaagaagcgccctcctgtgcgcagcagggctgaccccaagaagaagaggaaggtggaggccagcggttccggacgggctgacgcattggacgattttgatctggatatgctgggaagtgacgccctcgatgattttgaccttgacatgcttggttcggatgcccttgatgactttgacctcgacatgctcggcagtgacgcccttgatgatttcgacctggacatgctgattaactctagatga

SEQ ID NO: 24 - DNA, 3249 bp, Neisseria meningitidis
  source 1..3249: mol_type = genomic DNA
atggctgccttcaaacctaattcaatcaactacatcctcggcctcgatatcggcatcgcatccgtcggctgggcgatggtagaaattgacgaagaagaaaaccccatccgcctgattgatttgggcgtgcgcgtatttgagcgtgccgaagtaccgaaaacaggcgactcccttgccatggcaaggcgtttggcgcgcagtgttcgccgcctgacccgccgtcgcgcccaccgcctgcttcggacccgccgcctattgaaacgcgaaggcgtattacaagccgccaattttgacgaaaacggcttgattaaatccttaccgaatacaccatggcaacttcgcgcagccgcattagaccgcaaactgacgcctttagagtggtcggcagtcttgttgcatttaatcaaacatcgcggctatttatcgcaacggaaaaacgagggcgaaactgccgataaggagcttggcgctttgcttaaaggcgtagccggcaatgcccatgccttacagacaggcgatttccgcacaccggccgaattggctttaaataaatttgagaaagaaagcggccatatccgcaatcagcgcagcgattattcgcatacgttcagccgcaaagatttacaggcggagctgattttgctgtttgaaaaacaaaaagaatttggcaatccgcatgtttcaggcggccttaaagaaggtattgaaaccctactgatgacgcaacgccctgccctgtccggcgatgccgttcaaaaaatgttggggcattgcaccttcgaaccggcagagccgaaagccgctaaaaacacctacacagccgaacgtttcatctggctgaccaagctgaacaacctgcgtattttagagcaaggcagcgagcggccattgaccgataccgaacgcgccacgcttatggacgagccatacagaaaatccaaactgacttacgcacaagcccgtaagctgctgggtttagaagataccgcctttttcaaaggcttgcgctatggtaaagacaatgccgaagcctcaacattgatggaaatgaaggcctaccatgccatcagccgtgcactggaaaaagaaggattgaaagacaaaaaatccccattaaacctttctcccgaattacaagacgaaatcggcacggcattctccctgttcaaaaccgatgaagacattacaggccgtctgaaagaccgtatacagcccgaaatcttagaagcgctgttgaaacacatcagcttcgataagttcgtccaaatttccttgaaagcattgcgccgaattgtgcctctaatggaacaaggcaaacgttacgatgaagcctgcgccgaaatctacggagaccattacggcaagaagaatacggaagaaaagatttatctgccgccgattcccgccgacgaaatccgcaaccccgtcgtcttgcgcgccttatctcaagcacgtaaggtcattaacggcgtggtacgccgttacggctccccagctcgtatccatattgaaactgcaagggaagtaggtaaatcgtttaaagaccgcaaagaaattgagaaacgccaagaagaaaaccgcaaagaccgggaaaaagccgccgccaaattccgagagtatttccccaattttgtcggagaacccaaatccaaagatattctgaaactgcgcctgtacgagcaacaacacggcaaatgcctgtattcgggcaaagaaatcaacttaggccgtctgaacgaaaaaggctatgtcgaaatcgaccatgccctgccgttctcgcgcacatgggacgacagtttcaacaataaagtactggtattgggcagcgaaaaccaaaacaaaggcaatcaaaccccttacgaatacttcaacggcaaagacaacagccgcgaatggcaggaatttaaagcgcgtgtcgaaaccagccgtttcccgcgcagtaaaaaacaacggattctgctgcaaaaattcgatgaagacggctttaaagaacgcaatctgaacgacacgcgctacgtcaaccgtttcctgtgtcaatttgttgccgaccgtatgcggctgacaggtaaaggcaagaaacgtgtctttgcatccaacggacaaattaccaatctgttgcgcggcttttggggattgcgcaaagtgcgtgcggaaaacgaccgccatcacgccttggacgccgtcgtcgttgcctgctcgaccgttgccatgcagcagaaaattacccgttttgtacgctataaagagatgaacgcgtttgacggtaaaaccatagacaaagaaacaggagaagtgctgcatcaaaaaacacacttcccacaaccttgggaatttttcgcacaagaagtcatgattcgcgtcttcggcaaaccggacggcaaacccgaattcgaagaagccgataccctagaaaaactgcgcacgttgcttgccgaaaaattatcatctcgccccgaagccgtacacgaatacgttacgccactgtttgtttcacgcgcgcccaatcggaagatgagcgggcaagggcatatggagaccgtcaaatccgccaaacgactggacgaaggcgtcagcgtgttgcgcgtaccgctgacacagttaaaactgaaagacttggaaaaaatggtcaatcgggagcgcgaacctaagctatacgaagcactgaaagcacggctggaagcacataaagacgatcctgccaaagcctttgccgagccgttttacaaatacgataaagcaggcaaccgcacccaacaggtaaaagccgtacgcgtagagcaagtacagaaaaccggcgtatgggtgcgcaaccataacggtattgccgacaacgcaaccatggtgcgcgtagatgtgtttgagaaaggcgacaagtattatctggtaccgatttacagttggcaggtagcgaaagggattttgccggatagggctgttgtacaaggaaaagatgaagaagattggcaacttattgatgatagtttcaactttaaattctcattacaccctaatgatttagtcgaggttataacaaaaaaagctagaatgtttggttactttgccagctgccatcgaggcacaggtaatatcaatatacgcattcatgatcttgatcataaaattggcaaaaatggaatactggaaggtatcggcgtcaaaaccgccctttcattccaaaaataccaaattgacgaactgggcaaagaaatcagaccatgccgtctgaaaaaacgcccgcctgtccgttaa

SEQ ID NO: 25 - DNA, 4188 bp, Treponema denticola
  source 1..4188: mol_type = genomic DNA
atgaaaaaggaaattaaggattattttctcggattggatgtaggaaccggatcggttggttgggcagttactgatactgactataaactcttaaaggctaatcgtaaagacctttggggaatgaggtgttttgagacggcggaaactgcggaagtgagaaggcttcacaggggggctaggcgccgtattgagagaagaaaaaaaagaataaagctgcttcaagagcttttttcccaagaaattgcaaaaacagatgagggatttttccaaagaatgaaggaaagccctttctatgcagaagacaagactatattacaggaaaacactctttttaatgataaagattttgccgataagacctaccataaagcctatcctaccataaaccatctgataaaggcttggattgaaaacaaggtaaagccggatccaaggttattatacttagcctgtcataatattataaaaaaaagaggtcattttttattcgagggcgatttcgattcagaaaatcagtttgatacttctatacaagccctttttgaatatctgcgtgaagatatggaagtcgatattgatgccgatagccaaaaagtaaaagagattttaaaggatagctctttaaaaaattccgaaaaacaaagccgcctaaataagattttaggactgaaaccctccgacaaacaaaaaaaagctattactaatttaatatcaggcaacaaaataaactttgccgatctttatgataatccggatttaaaggatgcggagaaaaatagtatatctttttcgaaagatgattttgatgctttgagtgatgatcttgcttccattctaggagattcttttgagcttttattaaaagcaaaggctgtatataactgctcggttctttccaaggtaataggcgatgaacagtatctttcttttgcaaaggtaaaaatatatgaaaagcataaaaccgatttgactaaattaaaaaatgttataaaaaagcatttcccaaaagattataaaaaagtattcggatacaataaaaacgaaaaaaataacaacaattactccggatatgtaggcgtatgtaaaaccaagagtaaaaaactaattataaacaattctgtaaatcaagaagatttttacaaatttttaaaaactatcctttcagcaaaatccgagataaaggaagtaaatgatatattgaccgaaattgaaacagggacttttttacctaaacagatatctaaaagcaatgcggagattccttatcaattacgcaagatggagctggaaaaaatattatcaaacgcagaaaaacatttttcctttttaaaacaaaaagatgaaaaaggtttatctcacagtgaaaagattataatgcttttaacatttaagattccttattatattggacctataaacgataaccataaaaaattttttcccgatagatgctgggtagtaaaaaaagaaaaatcgccttccggtaaaactactccatggaacttttttgatcatatcgataaagaaaaaacagctgaagcatttattacaagcagaaccaatttttgcacatatttagtaggggaatccgttttaccaaaaagttctcttttatattccgagtataccgttttaaatgaaatcaacaatttacagattatcattgacggaaaaaatatctgcgatattaaactaaaacaaaaaatatacgaagatttatttaaaaaatataaaaagattacacaaaaacaaatttcaacttttatcaaacacgaaggtatttgcaataaaactgatgaagtaattattctaggtatcgataaagaatgtacatcttcgttaaaatcatatatagaacttaaaaacatattcggaaagcaagtagatgaaatttctacaaagaatatgcttgaagaaattatacgatgggctactatctatgatgaaggagaaggcaaaacaatacttaaaacaaaaataaaagccgaatatggaaaatattgttctgatgaacagatcaaaaaaattctaaatcttaaattttcaggttggggccgcttgtcacgcaaattccttgaaaccgtcacatcagaaatgccgggttttagcgaaccggtaaatataataactgcaatgcgggaaactcaaaataatttaatggagttgcttagcagtgaatttacatttactgaaaatattaaaaagataaattcgggatttgaagatgctgaaaagcaattttcatatgacggtttggttaagcctctgtttttatcaccatcggtaaaaaaaatgttgtggcagactctaaagcttgtaaaagaaatatcgcatattacccaagcccctcctaaaaaaatatttatagaaatggcaaagggtgcagagcttgaacctgcgaggactaagacaagattaaaaattttacaagacttatacaataactgtaaaaatgatgcggatgcttttagttccgagataaaagacctttcaggtaaaatagaaaatgaagataatttaaggcttcgaagcgacaaactttatctttattacacgcagcttggaaagtgcatgtattgcggtaaaccgattgaaataggccatgtatttgatacaagcaactatgatatagatcatatttatccccaatccaagattaaagatgacagtataagtaatcgggttttagtatgcagcagctgcaataaaaataaggaagataaatatcctttgaagtctgaaattcaatcaaagcaaaggggcttttggaattttttacaacgaaataactttataagccttgaaaaattgaataggttaacaagggccactccaatctcggatgacgaaacggcaaaattcattgccagacagcttgtagaaacaagacaggcgacaaaagtagctgcaaaagtattagaaaaaatgtttcccgaaactaagattgtttattctaaagctgaaaccgtatcaatgtttagaaataaattcgatattgtaaaatgcagagaaataaacgattttcatcatgctcatgatgcatatttaaatattgttgtcggaaatgtatataatacaaaatttacaaataatccttggaactttataaaggagaaacgggataatccaaagattgccgatacttacaattattataaagtttttgattatgatgtaaaaagaaataatattacggcatgggaaaaaggaaaaacaattatcactgtgaaggatatgcttaaaagaaatacccctatttatacacgccaagccgcctgcaaaaaaggagaactctttaaccaaaccattatgaaaaaaggattgggccagcatcctctaaaaaaagaaggtcctttttctaatatttcaaaatatgggggctataataaagtctctgctgcatattatactcttatagaatacgaagaaaaagggaataaaatacgaagcttagaaaccatccctctatatttggtaaaagacattcaaaaagatcaagatgtattaaagagttacttaacagatctgctagggaaaaaagaatttaagattttggttcctaaaataaaaatcaactccctcttaaaaattaacggtttcccttgtcatataacagggaaaaccaatgattctttcttactgcgtccggctgttcagttttgctgttcaaataatgaagttctttattttaaaaaaattataagattcagtgaaataagaagtcaaagagaaaagataggaaaaacaatttctccttatgaagacttatcctttagatcttatatcaaagaaaatttatggaaaaagacaaaaaatgatgaaataggagaaaaggagttttatgaccttcttcaaaagaagaatttggaaatctatgatatgcttttaacaaaacataaggatactatttataaaaaaagacctaactctgcaactattgatatcttagtcaaaggaaaagaaaagtttaaatctttaataatcgaaaatcagtttgaagttattttagagattttaaaactgttttctgccactagaaatgtatcagacttacaacatataggcggaagcaaatattcaggagttgcaaagataggaaataaaatatctagtcttgataactgtattttaatttaccaatcaataacaggtatttttgaaaaaaggattgatttgttaaaggtatga

SEQ ID NO: 26 - DNA, 4188 bp, Treponema denticola
  source 1..4188: mol_type = genomic DNA
atgaagaaggagatcaaggactacttcctgggcctggacgtgggcaccggcagcgtgggctgggccgtgaccgacaccgactacaagctgctgaaggccaaccgcaaggacctgtggggcatgcgctgcttcgagactgctgagaccgccgaggtgcgccggctgcaccgcggtgctcgccggcgcatcgagcgccgcaagaagcgcatcaagctgctgcaggagctgttcagccaggagatcgccaagaccgacgagggcttcttccagcgcatgaaggagagccccttctacgccgaggacaagaccatcctgcaggagaacaccctgttcaacgacaaggacttcgccgacaagacctaccacaaggcctaccccaccatcaaccacctgatcaaggcctggatcgagaacaaggtgaagcccgaccctcgcctgctgtacctggcctgccacaacatcatcaagaagcgcggccacttcctgttcgagggcgacttcgacagcgagaaccagttcgacaccagcatccaggccctgttcgagtacctgcgcgaggacatggaggtggacatcgacgccgacagccagaaggtgaaggagatcctgaaggacagcagcctgaagaacagcgagaagcagagccgcctgaacaagatcctgggcctgaagcccagcgacaagcagaagaaggccatcaccaacctgatcagcggcaacaagatcaacttcgccgacctgtacgacaaccccgacctgaaggacgccgagaagaacagcatcagcttcagcaaggacgacttcgacgccctgagcgacgacctggccagcatcctgggcgacagcttcgagctgctgctgaaggccaaggccgtgtacaactgcagcgtgctgagcaaggtgatcggcgacgagcagtacctgagcttcgccaaggtgaagatctacgagaagcacaagaccgaccttaccaagctgaagaacgtgatcaagaagcacttccccaaggactacaagaaggtgttcggctacaacaagaacgagaagaacaacaacaactacagcggctacgtgggcgtgtgcaagaccaagagcaagaagctgatcatcaacaacagcgtgaaccaggaggacttctacaagttcctgaagaccatcctgagcgccaagagcgagatcaaggaggtgaacgacatcctgaccgagatcgagaccggcaccttcctgcccaagcagatcagcaagagcaacgccgagatcccctaccagctgcgcaagatggagctggagaagatcctgagcaacgccgagaagcacttcagcttcctgaagcagaaggacgagaagggcctgagccacagcgagaagatcatcatgctgctgaccttcaagatcccctactacatcggccccatcaacgacaaccacaagaagttcttccccgaccgctgctgggtggtgaagaaggagaagagccccagcggcaagaccaccccctggaacttcttcgaccacatcgacaaggagaagaccgccgaggccttcatcaccagccgcaccaacttctgcacatacctggtgggcgagagcgtgctgcccaagagcagcctgctgtacagcgagtacaccgtgctgaacgagatcaacaacctgcagatcatcatcgacggcaagaacatctgcgacatcaagctgaagcagaagatctacgaggacctgttcaagaagtacaagaagatcacccagaagcagatcagcaccttcatcaagcacgagggcatctgcaacaagaccgacgaggtgatcatcctgggcatcgacaaggagtgcaccagcagcctgaagagctacatcgagctgaagaacatcttcggcaagcaggtggacgagatcagcaccaagaacatgctggaggagatcatccgctgggccaccatctacgacgagggcgagggcaagaccatcctgaagaccaagatcaaggccgagtacggcaagtactgcagcgacgagcagatcaagaagatcctgaacctgaagttcagcggctggggccgcctgagccgcaagttcctggagaccgtgaccagcgagatgcccggcttcagcgagcccgtgaacatcatcaccgccatgcgcgagacccagaacaacctgatggagctgctgagcagcgagttcaccttcaccgagaacatcaagaagatcaacagcggcttcgaggacgccgagaagcagttcagctacgacggcctggtgaagcccctgttcctgagccccagcgtgaagaagatgctgtggcagaccctgaagctggtgaaggagatcagccacatcacccaggctcctcctaagaagatcttcatcgagatggccaagggcgccgagctggagcctgctcgcaccaagacccgcctgaagatcctgcaggacctgtacaacaactgcaagaacgacgccgacgcattcagcagcgagatcaaggacctgagcggcaagatcgagaacgaggacaacctgcgcctgcgcagcgacaagctgtacctgtactacacccagctgggcaagtgcatgtactgcggcaagcccatcgagatcggccacgtgttcgacaccagcaactacgacatcgaccacatctacccccagagcaagatcaaggacgacagcatcagcaaccgcgtgctggtgtgcagcagctgcaacaagaacaaggaggacaagtaccctctgaagagcgagatccagagcaagcagcgcggcttctggaacttcctgcagcgcaacaacttcatcagcctggagaagctgaaccgcctgacccgcgccacccccatcagcgacgacgagaccgccaagttcatcgcccgccagctggtggagactcgccaagctaccaaggtggccgccaaggtgctggagaagatgttccccgagaccaagatcgtgtacagcaaggccgagaccgtgagcatgttccgcaacaagttcgacatcgtgaagtgccgcgagatcaacgacttccaccacgcccacgacgcctacctgaacatcgtggtgggcaacgtgtacaacaccaagttcaccaacaacccctggaatttcattaaggagaagcgcgacaaccccaagatcgccgacacctacaactactacaaggtgttcgactacgacgtgaagcgcaacaacatcaccgcctgggagaagggcaagaccatcatcaccgtgaaggacatgctgaagcgcaacacccccatctacacccgccaggccgcctgcaagaagggcgagctgttcaaccagaccatcatgaagaagggcctgggccagcaccccctgaagaaggagggccccttcagcaacatcagcaagtacggcggctacaacaaggtgagcgccgcctactacaccctgatcgagtacgaggagaagggcaacaagatccgcagcctggagaccatccccctgtacctggtgaaggacatccagaaggaccaggacgtgctgaagagctacctgaccgacctgctgggcaagaaggagttcaagatcctggtgcccaagatcaagatcaacagcctgctgaagatcaacggcttcccctgccacatcaccggcaagaccaacgacagcttcctgctgcgccccgccgtgcagttctgctgcagcaacaacgaggtgctgtacttcaagaagatcatccgcttcagcgagatccgcagccagcgcgagaagatcggcaagaccatcagcccctacgaggacctgagcttccgcagctacatcaaggagaacctgtggaagaagaccaagaacgacgagatcggcgagaaggagttctacgacctgctgcagaagaagaacctggagatctacgacatgctgctgaccaagcacaaggacaccatctacaagaagcgccccaacagcgccaccatcgacatcctggtgaagggcaaggagaagttcaagagcctgatcatcgagaaccagttcgaggtgatcctggagatcctgaagctgttcagcgccacccgcaacgtgagcgacctgcagcacatcggcggcagcaagtacagcggcgtggccaagatcggcaacaagatcagcagcctggacaactgcatcctgatctaccagagcatcaccggcatcttcgagaagcgcatcgacctgctgaaggtgtaa

SEQ ID NO: 27 - DNA, 4188 bp, Treponema denticola
  source 1..4188: mol_type = genomic DNA
atgaagaaggagatcaaggactacttcctgggcctggccgtgggcaccggcagcgtgggctgggccgtgaccgacaccgactacaagctgctgaaggccaaccgcaaggacctgtggggcatgcgctgcttcgagactgctgagaccgccgaggtgcgccggctgcaccgcggtgctcgccggcgcatcgagcgccgcaagaagcgcatcaagctgctgcaggagctgttcagccaggagatcgccaagaccgacgagggcttcttccagcgcatgaaggagagccccttctacgccgaggacaagaccatcctgcaggagaacaccctgttcaacgacaaggacttcgccgacaagacctaccacaaggcctaccccaccatcaaccacctgatcaaggcctggatcgagaacaaggtgaagcccgaccctcgcctgctgtacctggcctgccacaacatcatcaagaagcgcggccacttcctgttcgagggcgacttcgacagcgagaaccagttcgacaccagcatccaggccctgttcgagtacctgcgcgaggacatggaggtggacatcgacgccgacagccagaaggtgaaggagatcctgaaggacagcagcctgaagaacagcgagaagcagagccgcctgaacaagatcctgggcctgaagcccagcgacaagcagaagaaggccatcaccaacctgatcagcggcaacaagatcaacttcgccgacctgtacgacaaccccgacctgaaggacgccgagaagaacagcatcagcttcagcaaggacgacttcgacgccctgagcgacgacctggccagcatcctgggcgacagcttcgagctgctgctgaaggccaaggccgtgtacaactgcagcgtgctgagcaaggtgatcggcgacgagcagtacctgagcttcgccaaggtgaagatctacgagaagcacaagaccgaccttaccaagctgaagaacgtgatcaagaagcacttccccaaggactacaagaaggtgttcggctacaacaagaacgagaagaacaacaacaactacagcggctacgtgggcgtgtgcaagaccaagagcaagaagctgatcatcaacaacagcgtgaaccaggaggacttctacaagttcctgaagaccatcctgagcgccaagagcgagatcaaggaggtgaacgacatcctgaccgagatcgagaccggcaccttcctgcccaagcagatcagcaagagcaacgccgagatcccctaccagctgcgcaagatggagctggagaagatcctgagcaacgccgagaagcacttcagcttcctgaagcagaaggacgagaagggcctgagccacagcgagaagatcatcatgctgctgaccttcaagatcccctactacatcggccccatcaacgacaaccacaagaagttcttccccgaccgctgctgggtggtgaagaaggagaagagccccagcggcaagaccaccccctggaacttcttcgaccacatcgacaaggagaagaccgccgaggccttcatcaccagccgcaccaacttctgcacatacctggtgggcgagagcgtgctgcccaagagcagcctgctgtacagcgagtacaccgtgctgaacgagatcaacaacctgcagatcatcatcgacggcaagaacatctgcgacatcaagctgaagcagaagatctacgaggacctgttcaagaagtacaagaagatcacccagaagcagatcagcaccttcatcaagcacgagggcatctgcaacaagaccgacgaggtgatcatcctgggcatcgacaaggagtgcaccagcagcctgaagagctacatcgagctgaagaacatcttcggcaagcaggtggacgagatcagcaccaagaacatgctggaggagatcatccgctgggccaccatctacgacgagggcgagggcaagaccatcctgaagaccaagatcaaggccgagtacggcaagtactgcagcgacgagcagatcaagaagatcctgaacctgaagttcagcggctggggccgcctgagccgcaagttcctggagaccgtgaccagcgagatgcccggcttcagcgagcccgtgaacatcatcaccgccatgcgcgagacccagaacaacctgatggagctgctgagcagcgagttcaccttcaccgagaacatcaagaagatcaacagcggcttcgaggacgccgagaagcagttcagctacgacggcctggtgaagcccctgttcctgagccccagcgtgaagaagatgctgtggcagaccctgaagctggtgaaggagatcagccacatcacccaggctcctcctaagaagatcttcatcgagatggccaagggcgccgagctggagcctgctcgcaccaagacccgcctgaagatcctgcaggacctgtacaacaactgcaagaacgacgccgacgcattcagcagcgagatcaaggacctgagcggcaagatcgagaacgaggacaacctgcgcctgcgcagcgacaagctgtacctgtactacacccagctgggcaagtgcatgtactgcggcaagcccatcgagatcggccacgtgttcgacaccagcaactacgacatcgctgctatctacccccagagcaagatcaaggacgacagcatcagcaaccgcgtgctggtgtgcagcagctgcgccaagaacaaggaggacaagtaccctctgaagagcgagatccagagcaagcagcgcggcttctggaacttcctgcagcgcaacaacttcatcagcctggagaagctgaaccgcctgacccgcgccacccccatcagcgacgacgagaccgccaagttcatcgcccgccagctggtggagactcgccaagctaccaaggtggccgccaaggtgctggagaagatgttccccgagaccaagatcgtgtacagcaaggccgagaccgtgagcatgttccgcaacaagttcgacatcgtgaagtgccgcgagatcaacgacttccaccacgcccacgacgcctacctgaacatcgtggtgggcaacgtgtacaacaccaagttcaccaacaacccctggaatttcattaaggagaagcgcgacaaccccaagatcgccgacacctacaactactacaaggtgttcgactacgacgtgaagcgcaacaacatcaccgcctgggagaagggcaagaccatcatcaccgtgaaggacatgctgaagcgcaacacccccatctacacccgccaggccgcctgcaagaagggcgagctgttcaaccagaccatcatgaagaagggcctgggccagcaccccctgaagaaggagggccccttcagcaacatcagcaagtacggcggctacaacaaggtgagcgccgcctactacaccctgatcgagtacgaggagaagggcaacaagatccgcagcctggagaccatccccctgtacctggtgaaggacatccagaaggaccaggacgtgctgaagagctacctgaccgacctgctgggcaagaaggagttcaagatcctggtgcccaagatcaagatcaacagcctgctgaagatcaacggcttcccctgccacatcaccggcaagaccaacgacagcttcctgctgcgccccgccgtgcagttctgctgcagcaacaacgaggtgctgtacttcaagaagatcatccgcttcagcgagatccgcagccagcgcgagaagatcggcaagaccatcagcccctacgaggacctgagcttccgcagctacatcaaggagaacctgtggaagaagaccaagaacgacgagatcggcgagaaggagttctacgacctgctgcagaagaagaacctggagatctacgacatgctgctgaccaagcacaaggacaccatctacaagaagcgccccaacagcgccaccatcgacatcctggtgaagggcaaggagaagttcaagagcctgatcatcgagaaccagttcgaggtgatcctggagatcctgaagctgttcagcgccacccgcaacgtgagcgacctgcagcacatcggcggcagcaagtacagcggcgtggccaagatcggcaacaagatcagcagcctggacaactgcatcctgatctaccagagcatcaccggcatcttcgagaagcgcatcgacctgctgaaggtgtaa

SEQ ID NO: 28 - protein, 1053 aa, Streptococcus aureus
MKRNYILGLDIGITSVGYGIIDYETRDVIDAGVRLFKEANVENNEGRRSKRGARRLKRRRRHRIQRVKKLLFDYNLLTDHSELSGINPYEARVKGLSQKLSEEEFSAALLHLAKRRGVHNVNEVEEDTGNELSTKEQISRNSKALEEKYVAELQLERLKKDGEVRGSINRFKTSDYVKEAKQLLKVQKAYHQLDQSFIDTYIDLLETRRTYYEGPGEGSPFGWKDIKEWYEMLMGHCTYFPEELRSVKYAYNADLYNALNDLNNLVITRDENEKLEYYEKFQIIENVFKQKKKPTLKQIAKEILVNEEDIKGYRVTSTGKPEFTNLKVYHDIKDITARKEIIENAELLDQIAKILTIYQSSEDIQEELTNLNSELTQEEIEQISNLKGYTGTHNLSLKAINLILDELWHTNDNQIAIFNRLKLVPKKVDLSQQKEIPTTLVDDFILSPVVKRSFIQSIKVINAIIKKYGLPNDIIIELAREKNSKDAQKMINEMQKRNRQTNERIEEIIRTTGKENAKYLIEKIKLHDMQEGKCLYSLEAIPLEDLLNNPFNYEVDHIIPRSVSFDNSFNNKVLVKQEENSKKGNRTPFQYLSSSDSKISYETFKKHILNLAKGKGRISKTKKEYLLEERDINRFSVQKDFINRNLVDTRYATRGLMNLLRSYFRVNNLDVKVKSINGGFTSFLRRKWKFKKERNKGYKHHAEDALIIANADFIFKEWKKLDKAKKVMENQMFEEKQAESMPEIETEQEYKEIFITPHQIKHIKDFKDYKYSHRVDKKPNRELINDTLYSTRKDDKGNTLIVNNLNGLYDKDNDKLKKLINKSPEKLLMYHHDPQTYQKLKLIMEQYGDEKNPLYKYYEETGNYLTKYSKKDNGPVIKKIKYYGNKLNAHLDITDDYPNSRNKVVKLSLKPYRFDVYLDNGVYKFVTVKNLDVIKKENYYEVNSKCYEEAKKLKKISNQAEFIASFYNNDLIKINGELYRVIGVNNDLLNRIEVNMIDITYREYLENMNDKRPPRIIKTIASKTQSIKKYSTDILGNLYEVKSKKHPQIIKKG

SEQ ID NO: 29 - DNA, 3162 bp, Streptococcus aureus
  source 1..3162: mol_type = genomic DNA
atgaaaaggaattatatcttaggattagatatcggaattacatcagtgggttatggaattattgattatgaaactagagatgtcatagatgcgggcgtacgtttatttaaagaggctaatgttgaaaataatgaaggacgacgatcaaaaagaggtgccagaaggcttaagaggcgtcgtagacatagaatacaaagagtaaagaaacttttatttgattacaatttgttgacagatcatagtgagctaagtggaatcaatccttacgaggcgcgcgtaaagggattaagtcaaaaattaagtgaagaggaattttctgcggcattgctacatttagcaaagcgtagaggtgtacataatgttaatgaagtggaagaagatacaggtaatgaattatccactaaagaacaaatttcaagaaatagtaaagcgttagaagagaagtatgttgcagaattacagttggaacgtttgaaaaaagacggtgaagtgagaggttcgattaaccgtttcaaaacatctgactatgtaaaagaagcaaagcagttattaaaagtacaaaaagcatatcatcaacttgatcaatcatttatagacacttatattgatttattggaaacaagaagaacatattatgagggaccaggtgaaggtagcccatttggatggaaagatattaaagaatggtatgaaatgttaatgggacattgtacgtatttcccagaagaattacgtagtgtgaaatatgcctataatgctgatttatataatgcgctgaatgatttgaacaacttggttattacacgagatgagaatgagaagctagagtattatgaaaaattccaaattatcgagaatgtctttaaacaaaagaaaaagccgacgcttaaacaaattgcgaaggaaatcttggtgaatgaagaagacatcaaaggctatcgtgtcacaagtacaggtaaaccagaatttacaaacttgaaagtttatcacgatatcaaagatattacagcaagaaaagaaattatcgagaatgcagagctactcgatcaaatagctaaaatattaactatttaccagtcatcagaagatatacaagaagaattaacaaacctaaattcagaattgacacaagaagagattgaacaaatttcaaacttgaaaggttatacaggaactcataacctttcactaaaggcaataaatttaatattagacgaattgtggcatacgaacgataatcaaatagctattttcaatcgtttgaaacttgtacctaaaaaggtagatttaagccaacaaaaagaaattcctactactttagttgatgattttatactgtctccagtagtgaaacgttcatttatacaatctattaaagttattaacgctattattaaaaaatacggtttgccaaatgatattattattgaacttgcgagagaaaagaattctaaagatgcacaaaaaatgattaatgaaatgcagaagagaaatcgtcaaacgaatgaacgtattgaggaaattataagaacgacaggtaaagaaaatgctaaatatttaattgaaaaaattaagctgcacgatatgcaagaagggaaatgtttatactcgttagaagcaatccctctagaagatttacttaataatccattcaattacgaagtagaccatatcattccacgttctgtttctttcgataactctttcaataataaagtgttggtgaaacaagaagaaaatagtaaaaaaggtaatagaacgccatttcaatatttaagttcttcagattctaaaataagttatgagacattcaaaaagcatattttaaatcttgctaaaggcaaaggtagaatctctaagacgaaaaaagaatatttgttagaagaacgagatatcaatcgcttcagtgtccaaaaagattttattaaccgtaacttagtagatacacgctatgcgacaagagggttaatgaacttattaagatcttattttagagtgaataacttagatgtcaaagtgaaatcgattaatggcggattcacaagtttcttaagaaggaaatggaagttcaaaaaagaaagaaataagggctacaaacaccatgctgaagatgcactgattattgcgaacgctgattttattttcaaagaatggaaaaaactagataaagctaaaaaagtgatggaaaatcaaatgtttgaagaaaagcaagctgaaagtatgcctgaaattgagactgagcaagagtataaagaaatttttataacgcctcatcaaattaaacatattaaggattttaaagattataaatattcacatagagttgataaaaagccgaatagagagttaataaatgatacattatattctacgagaaaagatgacaagggtaatacattaatcgttaataacttaaatggtttatacgataaagataatgataaattgaaaaaattaattaataaatcacctgaaaaattattgatgtatcatcatgatccacaaacatatcaaaaattaaaattgatcatggaacaatatggcgatgagaaaaatccgctttataaatattatgaagaaacaggcaattacttaacaaaatatagtaaaaaagataacggaccagtcatcaaaaaaattaaatattatggtaacaagctaaatgcgcatttagatattacggatgattatccaaatagcagaaataaagtagtaaaactttcattaaaaccatatcgctttgatgtttatttagataatggggtatataaatttgtgacagttaaaaatttagatgttatcaaaaaagaaaactactatgaagttaattcaaagtgttatgaagaagcaaaaaaactgaagaaaattagtaatcaagcagaatttatcgcaagtttttacaataatgacttgattaagattaacggagaattatatagagtcataggtgtaaataatgatctacttaacagaattgaagtaaatatgatagacatcacatatagagaatatttagagaacatgaatgataaaagaccacctagaataattaaaacaatagcaagcaaaacacaatctattaaaaagtattctacagatattctaggcaatctttatgaagtgaagagtaaaaagcatcctcaaatcataaagaaaggatga

SEQ ID NO: 30 - protein, 1629 aa, Francisella tularensis
MNFKILPIAIDLGVKNTGVFSAFYQKGTSLERLDNKNGKVYELSKDSYTLLMNNRTARRHQRRGIDRKQLVKRLFKLIWTEQLNLEWDKDTQQAISFLFNRRGFSFITDGYSPEYLNIVPEQVKAILMDIFDDYNGEDDLDSYLKLATEQESKISEIYNKLMQKILEFKLMKLCTDIKDDKVSTKTLKEITSYEFELLADYLANYSESLKTQKFSYTDKQGNLKELSYYHHDKYNIQEFLKRHATINDRILDTLLTDDLDIWNFNFEKFDFDKNEEKLQNQEDKDHIQAHLHHFVFAVNKIKSEMASGGRHRSQYFQEITNVLDENNHQEGYLKNFCENLHNKKYSNLSVKNLVNLIGNLSNLELKPLRKYFNDKIHAKADHWDEQKFTETYCHWILGEWRVGVKDQDKKDGAKYSYKDLCNELKQKVTKAGLVDFLLELDPCRTIPPYLDNNNRKPPKCQSLILNPKFLDNQYPNWQQYLQELKKLQSIQNYLDSFETDLKVLKSSKDQPYFVEYKSSNQQIASGQRDYKDLDARILQFIFDRVKASDELLLNEIYFQAKKLKQKASSELEKLESSKKLDEVIANSQLSQILKSQHTNGIFEQGTFLHLVCKYYKQRQRARDSRLYIMPEYRYDKKLHKYNNTGRFDDDNQLLTYCNHKPRQKRYQLLNDLAGVLQVSPNFLKDKIGSDDDLFISKWLVEHIRGFKKACEDSLKIQKDNRGLLNHKINIARNTKGKCEKEIFNLICKIEGSEDKKGNYKHGLAYELGVLLFGEPNEASKPEFDRKIKKFNSIYSFAQIQQIAFAERKGNANTCAVCSADNAHRMQQIKITEPVEDNKDKIILSAKAQRLPAIPTRIVDGAVKKMATILAKNIVDDNWQNIKQVLSAKHQLHIPIITESNAFEFEPALADVKGKSLKDRRKKALERISPENIFKDKNNRIKEFAKGISAYSGANLTDGDFDGAKEELDHIIPRSHKKYGTLNDEANLICVTRGDNKNKGNRIFCLRDLADNYKLKQFETTDDLEIEKKIADTIWDANKKDFKFGNYRSFINLTPQEQKAFRHALFLADENPIKQAVIRAINNRNRTFVNGTQRYFAEVLANNIYLRAKKENLNTDKISFDYFGIPTIGNGRGIAEIRQLYEKVDSDIQAYAKGDKPQASYSHLIDAMLAFCIAADEHRNDGSIGLEIDKNYSLYPLDKNTGEVFTKDIFSQIKITDNEFSDKKLVRKKAIEGFNTHRQMTRDGIYAENYLPILIHKELNEVRKGYTWKNSEEIKIFKGKKYDIQQLNNLVYCLKFVDKPISIDIQISTLEELRNILTTNNIAATAEYYYINLKTQKLHEYYIENYNTALGYKKYSKEMEFLRSLAYRSERVKIKSIDDVKQVLDKDSNFIIGKITLPFKKEWQRLYREWQNTTIKDDYEFLKSFFNVKSITKLHKKVRKDFSLPISTNEGKFLVKRKTWDNNFIYQILNDSDSRADGTKPFIPAFDISKNEIVEAIIDSFTSKNIFWLPKNIELQKVDNKNIFAIDTSKWFEVETPSDLRDIGIATIQYKIDNNSRPKVRVKLDYVIDDDSKINYFMNHSLLKSRYPDKVLEILKQSTIIEFESSGFNKTIKEMLGMKLAGIYNETSNN

SEQ ID NO: 31 - DNA, 4890 bp, Francisella tularensis
  source 1..4890: mol_type = genomic DNA
atgaatttcaaaatattgccaatagcaatagatttaggtgttaaaaatactggtgtctttagcgcattttatcaaaaaggaacttctcttgagagattggataataaaaatggcaaagtatatgaactatcaaaagattcttatactttattgatgaataatagaacagcaagaagacatcaaagaagagggatagatagaaagcagctagtcaaaaggctctttaagcttatttggacagagcagctaaatttagagtgggataaagacactcaacaagcaattagctttttatttaatcgtagaggttttagttttattactgatggttattcgcctgaatatttaaatattgttccagagcaagtaaaagcgatacttatggatatatttgatgattacaacggtgaagatgatttagacagttatttaaaattagctactgagcaagaaagcaaaatttctgaaatttataacaagctaatgcaaaaaatattagagtttaaattaatgaaattatgtactgatattaaggatgataaagtaagtactaaaacgcttaaagaaatcacaagctatgaatttgagttattagctgattatttagcaaactatagcgagagtttaaaaacacaaaaatttagttatacagataaacaaggtaatttaaaagagctaagctactatcatcatgataaatataatattcaagaatttctaaagcgacatgctactataaatgatcgaattttagatactcttttaactgatgatttagatatttggaattttaattttgagaaatttgattttgataagaatgaagaaaagcttcagaatcaggaagataaagatcatatacaagcgcatttacatcattttgtttttgcagtaaataaaataaaaagtgaaatggcaagtggtggtcgtcatcgtagccaatattttcaagagataacaaatgtgctagatgaaaataatcatcaagagggatatctcaagaatttctgtgaaaatttgcataataaaaaatattcaaatttaagtgttaaaaatttagttaatctaattggtaacctaagtaatttagagctaaaaccgctaagaaaatattttaatgacaaaattcacgcaaaagctgatcattgggatgagcaaaagtttacagaaacttattgccactggatattaggagagtggcgagtaggtgtcaaagatcaagataagaaagatggcgctaaatatagttataaagatctgtgtaatgaattaaaacaaaaagttactaaggctggtttggtagattttttattagagttagatccatgtagaactataccaccatatctggataacaataaccgtaaaccaccaaaatgtcaaagtttgattttaaatccgaagtttttagataatcaatatccaaactggcaacaatatttacaagaattaaagaaactacaaagtattcaaaattatttagacagttttgaaactgatttaaaagtcttaaagtcaagtaaagatcaaccatattttgttgaatacaagagttcaaatcagcaaatagcaagtggtcaaagagattataaagatttagatgctcgaatattacagtttatatttgatagggtaaaagctagtgatgagttgcttttgaatgagatttattttcaggctaaaaaacttaaacaaaaagctagctctgagttagaaaaactcgagtcgagcaaaaagctagatgaagttatagcaaatagtcaactatcacagatactaaagtctcaacatacaaatggtatttttgaacagggtacttttttgcatttggtttgtaaatattataaacaaagacaaagagcgagagactctaggctatatattatgcctgaatatcgttatgataaaaaactacataaatataacaatacaggcaggtttgatgatgataatcagctgctaacatattgtaatcataagccaagacaaaaaagataccaattgttaaatgatttagctggggtgttgcaggtatcacctaattttttgaaagataaaattggttctgatgatgatctatttattagcaaatggttggtagagcatattagaggatttaaaaaagcttgtgaagatagtttaaaaatacaaaaagacaatagaggattattaaatcataaaataaatatagctaggaatacaaaaggcaaatgtgaaaaagaaatatttaatttaatatgtaaaatagaaggttcagaagataaaaaaggtaattacaagcatggtttagcttacgaattaggagtacttttatttggtgaacctaatgaagctagtaaacctgagttcgatagaaaaattaaaaaatttaactcaatatacagttttgcacagattcaacaaattgcttttgcagagcgtaaaggcaatgctaacacttgtgcagtttgtagtgctgataatgctcatagaatgcaacaaattaagatcactgagcctgtagaggacaataaagataagataatcttaagtgccaaagctcagagactaccagcgattccaactagaatagttgacggtgcggttaagaaaatggcaactatattagctaaaaatatagttgatgataattggcagaatatcaaacaagttttatcagcaaaacatcagttacatatacctattatcacagaatcaaatgcttttgagtttgaaccagcattagctgatgtaaaaggtaagagcctaaaagataggagaaaaaaagcattagagagaataagtcctgaaaatatattcaaggataaaaacaatagaataaaagaatttgctaaaggtatatcagcatatagtggtgctaatttaactgatggcgattttgatggtgcaaaagaagaattagatcatataatacctcgttcacataaaaaatacggtactctaaatgatgaagcaaatctaatttgtgtaactcgtggtgataataaaaataaaggtaatagaattttctgcctacgtgatcttgcagataactataaactaaaacagtttgagacaactgatgatttagaaattgaaaagaagatagctgatacaatctgggatgctaacaagaaagattttaaatttggtaattatcgtagttttattaacctaacaccacaagagcagaaagcatttcgtcacgcgctatttctggctgatgaaaatcctatcaaacaagcagtcataagagcgataaataatcgtaatcgtacatttgtaaatggcactcaacgctattttgcagaagtactggcaaacaatatctatctaagggctaaaaaagaaaatctaaatacagataaaatttcatttgattattttggtattccaactataggtaatggtagaggtattgctgaaatccgtcaactttatgaaaaagttgatagtgatatacaagcttatgcaaaaggtgataaacctcaagctagctactctcacctaatagatgcgatgctggctttttgtattgctgctgatgaacacagaaatgatggaagtataggtctagaaatcgataaaaattatagtttatatccattagataaaaatacaggagaagtctttaccaaagatatttttagtcaaattaaaattactgataatgagtttagcgataaaaaattagtaagaaaaaaagctatagagggctttaacacgcatagacaaatgactagagatggcatttatgcagaaaattacctaccaatactaatccataaagaactaaatgaagttagaaaaggctatacttggaaaaatagtgaagaaataaaaatattcaaaggtaaaaagtacgatatacaacaattgaataaccttgtgtattgtctaaaatttgtagataaacctatatctatagatatacaaattagtaccttagaagagttaagaaatatattaacaacaaataatatagctgctacagcagaatactattatataaatctaaaaacccaaaaattacatgagtattatatcgaaaactataatactgccttaggttataaaaaatacagtaaagaaatggagtttttgagaagcttagcttatcgtagcgaaagggtaaaaattaaatcaatagatgatgtaaagcaggttttggataaggatagtaactttatcatcggtaagattactttaccatttaaaaaagagtggcaaagactatatcgtgagtggcaaaatacaactatcaaagatgattatgagtttttaaaatcattctttaatgttaaaagtattactaagttgcataaaaaagttagaaaagatttctctttacctatttctacaaatgaaggtaaattcctggtcaaaagaaaaacatgggataacaattttatctatcagatattaaatgattctgattctagagcagacggaacaaagccatttattccagcttttgacatttctaaaaatgaaatagtcgaagccataattgattcatttacatcaaaaaatattttttggctgcctaaaaatatagaattacaaaaggtggataataaaaacatttttgctatagatactagtaaatggttcgaagtagaaacacctagtgatcttagagacattggaatagcaacaattcaatacaagatagataataattctcgccctaaagtcagagttaaacttgattatgttatcgatgatgatagtaagataaattattttatgaatcattctttattaaaatcaagatatcctgacaaagttttagaaattttaaaacaatcaactattatagaatttgaaagttcaggttttaataaaactatcaaagaaatgcttggtatgaaattagcaggtatttataatgaaacatctaataattag

SEQ ID NO: 32 - DNA, 3903 bp, Francisella tularensis
  misc_feature 1..3903: note = Francisella tularensis subsp. novicida (strain U112)
  source 1..3903: mol_type = genomic DNA
atgtcaatttatcaagaatttgttaataaatatagtttaagtaaaactctaagatttgagttaatcccacagggtaaaacacttgaaaacataaaagcaagaggtttgattttagatgatgagaaaagagctaaagactacaaaaaggctaaacaaataattgataaatatcatcagttttttatagaggagatattaagttcggtttgtattagcgaagatttattacaaaactattctgatgtttattttaaacttaaaaagagtgatgatgataatctacaaaaagattttaaaagtgcaaaagatacgataaagaaacaaatatctgaatatataaaggactcagagaaatttaagaatttgtttaatcaaaaccttatcgatgctaaaaaagggcaagagtcagatttaattctatggctaaagcaatctaaggataatggtatagaactatttaaagccaatagtgatatcacagatatagatgaggcgttagaaataatcaaatcttttaaaggttggacaacttattttaagggttttcatgaaaatagaaaaaatgtttatagtagcaatgatattcctacatctattatttataggatagtagatgataatttgcctaaatttctagaaaataaagctaagtatgagagtttaaaagacaaagctccagaagctataaactatgaacaaattaaaaaagatttggcagaagagctaacctttgatattgactacaaaacatctgaagttaatcaaagagttttttcacttgatgaagtttttgagatagcaaactttaataattatctaaatcaaagtggtattactaaatttaatactattattggtggtaaatttgtaaatggtgaaaatacaaagagaaaaggtataaatgaatatataaatctatactcacagcaaataaatgataaaacactcaaaaaatataaaatgagtgttttatttaagcaaattttaagtgatacagaatctaaatcttttgtaattgataagttagaagatgatagtgatgtagttacaacgatgcaaagtttttatgagcaaatagcagcttttaaaacagtagaagaaaaatctattaaagaaacactatctttattatttgatgatttaaaagctcaaaaacttgatttgagtaaaatttattttaaaaatgataaatctcttactgatctatcacaacaagtttttgatgattatagtgttattggtacagcggtactagaatatataactcaacaaatagcacctaaaaatcttgataaccctagtaagaaagagcaagaattaatagccaaaaaaactgaaaaagcaaaatacttatctctagaaactataaagcttgccttagaagaatttaataagcatagagatatagataaacagtgtaggtttgaagaaatacttgcaaactttgcggctattccgatgatatttgatgaaatagctcaaaacaaagacaatttggcacagatatctatcaaatatcaaaatcaaggtaaaaaagacctacttcaagctagtgcggaagatgatgttaaagctatcaaggatcttttagatcaaactaataatctcttacataaactaaaaatatttcatattagtcagtcagaagataaggcaaatattttagacaaggatgagcatttttatctagtatttgaggagtgctactttgagctagcgaatatagtgcctctttataacaaaattagaaactatataactcaaaagccatatagtgatgagaaatttaagctcaattttgagaactcgactttggctaatggttgggataaaaataaagagcctgacaatacggcaattttatttatcaaagatgataaatattatctgggtgtgatgaataagaaaaataacaaaatatttgatgataaagctatcaaagaaaataaaggcgagggttataaaaaaattgtttataaacttttacctggcgcaaataaaatgttacctaaggttttcttttctgctaaatctataaaattttataatcctagtgaagatatacttagaataagaaatcattccacacatacaaaaaatggtagtcctcaaaaaggatatgaaaaatttgagtttaatattgaagattgccgaaaatttatagatttttataaacagtctataagtaagcatccggagtggaaagattttggatttagattttctgatactcaaagatataattctatagatgaattttatagagaagttgaaaatcaaggctacaaactaacttttgaaaatatatcagagagctatattgatagcgtagttaatcagggtaaattgtacctattccaaatctataataaagatttttcagcttatagcaaagggcgaccaaatctacatactttatattggaaagcgctgtttgatgagagaaatcttcaagatgtggtttataagctaaatggtgaggcagagcttttttatcgtaaacaatcaatacctaaaaaaatcactcacccagctaaagaggcaatagctaataaaaacaaagataatcctaaaaaagagagtgtttttgaatatgatttaatcaaagataaacgctttactgaagataagtttttctttcactgtcctattacaatcaattttaaatctagtggagctaataagtttaatgatgaaatcaatttattgctaaaagaaaaagcaaatgatgttcatatattaagtatagatagaggtgaaagacatttagcttactatactttggtagatggtaaaggcaatatcatcaaacaagatactttcaacatcattggtaatgatagaatgaaaacaaactaccatgataagcttgctgcaatagagaaagatagggattcagctaggaaagactggaaaaagataaataacatcaaagagatgaaagagggctatctatctcaggtagttcatgaaatagctaagctagttatagagtataatgctattgtggtttttgaggatttaaattttggatttaaaagagggcgtttcaaggtagagaagcaggtctatcaaaagttagaaaaaatgctaattgagaaactaaactatctagttttcaaagataatgagtttgataaaactgggggagtgcttagagcttatcagctaacagcaccttttgagacttttaaaaagatgggtaaacaaacaggtattatctactatgtaccagctggttttacttcaaaaatttgtcctgtaactggttttgtaaatcagttatatcctaagtatgaaagtgtcagcaaatctcaagagttctttagtaagtttgacaagatttgttataaccttgataagggctattttgagtttagttttgattataaaaactttggtgacaaggctgccaaaggcaagtggactatagctagctttgggagtagattgattaactttagaaattcagataaaaatcataattgggatactcgagaagtttatccaactaaagagttggagaaattgctaaaagattattctatcgaatatgggcatggcgaatgtatcaaagcagctatttgcggtgagagcgacaaaaagttttttgctaagctaactagtgtcctaaatactatcttacaaatgcgtaactcaaaaacaggtactgagttagattatctaatttcaccagtagcagatgtaaatggcaatttctttgattcgcgacaggcgccaaaaaatatgcctcaagatgctgatgccaatggtgcttatcatattgggctaaaaggtctgatgctactaggtaggatcaaaaataatcaagagggcaaaaaactcaatttggttatcaaaaatgaagagtattttgagttcgtgcagaataggaataactaa

SEQ ID NO: 33 - protein, 1300 aa, Francisella tularensis
  REGION 1..1300: note = Francisella tularensis subsp. novicida (strain U112)
MSIYQEFVNKYSLSKTLRFELIPQGKTLENIKARGLILDDEKRAKDYKKAKQIIDKYHQFFIEEILSSVCISEDLLQNYSDVYFKLKKSDDDNLQKDFKSAKDTIKKQISEYIKDSEKFKNLFNQNLIDAKKGQESDLILWLKQSKDNGIELFKANSDITDIDEALEIIKSFKGWTTYFKGFHENRKNVYSSNDIPTSIIYRIVDDNLPKFLENKAKYESLKDKAPEAINYEQIKKDLAEELTFDIDYKTSEVNQRVFSLDEVFEIANFNNYLNQSGITKFNTIIGGKFVNGENTKRKGINEYINLYSQQINDKTLKKYKMSVLFKQILSDTESKSFVIDKLEDDSDVVTTMQSFYEQIAAFKTVEEKSIKETLSLLFDDLKAQKLDLSKIYFKNDKSLTDLSQQVFDDYSVIGTAVLEYITQQIAPKNLDNPSKKEQELIAKKTEKAKYLSLETIKLALEEFNKHRDIDKQCRFEEILANFAAIPMIFDEIAQNKDNLAQISIKYQNQGKKDLLQASAEDDVKAIKDLLDQTNNLLHKLKIFHISQSEDKANILDKDEHFYLVFEECYFELANIVPLYNKIRNYITQKPYSDEKFKLNFENSTLANGWDKNKEPDNTAILFIKDDKYYLGVMNKKNNKIFDDKAIKENKGEGYKKIVYKLLPGANKMLPKVFFSAKSIKFYNPSEDILRIRNHSTHTKNGSPQKGYEKFEFNIEDCRKFIDFYKQSISKHPEWKDFGFRFSDTQRYNSIDEFYREVENQGYKLTFENISESYIDSVVNQGKLYLFQIYNKDFSAYSKGRPNLHTLYWKALFDERNLQDVVYKLNGEAELFYRKQSIPKKITHPAKEAIANKNKDNPKKESVFEYDLIKDKRFTEDKFFFHCPITINFKSSGANKFNDEINLLLKEKANDVHILSIDRGERHLAYYTLVDGKGNIIKQDTFNIIGNDRMKTNYHDKLAAIEKDRDSARKDWKKINNIKEMKEGYLSQVVHEIAKLVIEYNAIVVFEDLNFGFKRGRFKVEKQVYQKLEKMLIEKLNYLVFKDNEFDKTGGVLRAYQLTAPFETFKKMGKQTGIIYYVPAGFTSKICPVTGFVNQLYPKYESVSKSQEFFSKFDKICYNLDKGYFEFSFDYKNFGDKAAKGKWTIASFGSRLINFRNSDKNHNWDTREVYPTKELEKLLKDYSIEYGHGECIKAAICGESDKKFFAKLTSVLNTILQMRNSKTGTELDYLISPVADVNGNFFDSRQAPKNMPQDADANGAYHIGLKGLMLLGRIKNNQEGKKLNLVIKNEEYFEFVQNRNN

SEQ ID NO: 34 - DNA, 3924 bp, Acidaminococcus sp.
  misc_feature 1..3924: note = Acidaminococcus sp. (strain BV3L6)
  source 1..3924: mol_type = genomic DNA
atgacccaatttgaaggttttaccaatttataccaagtttcgaagacccttcgttttgaactgattccccaaggaaaaacactcaaacatatccaggagcaagggttcattgaggaggataaagctcgcaatgaccattacaaagagttaaaaccaatcattgaccgcatctataagacttatgctgatcaatgtctccaactggtacagcttgactgggagaatctatctgcagccatagactcctatcgtaaggaaaaaaccgaagaaacacgaaatgcgctgattgaggagcaagcaacatatagaaatgcgattcatgactactttataggtcggacggataatctgacagatgccataaataagcgccatgctgaaatctataaaggactttttaaagctgaacttttcaatggaaaagttttaaagcaattagggaccgtaaccacgacagaacatgaaaatgctctactccgttcgtttgacaaatttacgacctatttttccggcttttatgaaaaccgaaaaaatgtctttagcgctgaagatatcagcacggcaattccccatcgaatcgtccaggacaatttccctaaatttaaggaaaactgccatatttttacaagattgataaccgcagttccttctttgcgggagcattttgaaaatgtcaaaaaggccattggaatctttgttagtacgtctattgaagaagtcttttcctttcccttttataatcaacttctaacccaaacgcaaattgatctttataatcaacttctcggcggcatatctagggaagcaggcacagaaaaaatcaagggacttaatgaagttctcaatctggctatccaaaaaaatgatgaaacagcccatataatcgcgtccctgccgcatcgttttattcctctttttaaacaaattctttccgatcgaaatacgttatcctttattttggaagaattcaaaagcgatgaggaagtcatccaatccttctgcaaatataaaaccctcttgagaaacgaaaatgtactggagactgcagaagcccttttcaatgaattaaattccattgatttgactcatatctttatttcccataaaaagttagaaaccatctcttcagcgctttgtgaccattgggataccttgcgcaatgcactttacgaaagacggatttctgaactcactggcaaaataacaaaaagtgccaaagaaaaagttcaaaggtcattaaaacatgaggatataaatctccaagaaattatttctgctgcaggaaaagaactatcagaagcattcaaacaaaaaacaagtgaaattctttcccatgcccatgctgcacttgaccagcctcttcccacaacattaaaaaaacaggaagaaaaagaaatcctcaaatcacagctcgattcgcttttaggcctttatcatcttcttgattggtttgctgtcgatgaaagcaatgaagtcgacccagaattctcagcacggctgacaggcattaaactagaaatggaaccaagcctttcgttttataataaagcaagaaattatgcgacaaaaaagccctattcggtggaaaaatttaaattgaattttcaaatgccaacccttgcctctggttgggatgtcaataaagaaaaaaataatggagctattttattcgtaaaaaatggtctctattaccttggtatcatgcctaaacagaaggggcgctataaagccctgtcttttgagccgacagaaaaaacatcagaaggattcgataagatgtactatgactacttcccagatgccgcaaaaatgattcctaagtgttccactcagctaaaggctgtaaccgctcattttcaaactcataccacccccattcttctctcaaataatttcattgaacctcttgaaatcacaaaagaaatttatgacctgaacaatcctgaaaaggagcctaaaaagtttcaaacggcttatgcaaagaagacaggcgatcaaaaaggctatagagaagcgctttgcaaatggattgactttacgcgggattttctctctaaatatacgaaaacaacttcaatcgatttatcttcactccgcccttcttcgcaatataaagatttaggggaatattacgccgaactgaatccgcttctctatcatatctccttccaacgaattgctgaaaaggaaatcatggatgctgtagaaacgggaaaattgtatctgttccaaatctacaataaggattttgcgaagggccatcacgggaaaccaaatctccacaccctgtattggacaggtctcttcagtcctgaaaaccttgcgaaaaccagcatcaaacttaatggtcaagcagaattgttctatcgacctaaaagccgcatgaagcggatggcccatcgtcttggggaaaaaatgctgaacaaaaaactaaaggaccagaagacaccgattccagataccctctaccaagaactgtacgattatgtcaaccaccggctaagccatgatctttccgatgaagcaagggccctgcttccaaatgttatcaccaaagaagtctcccatgaaattataaaggatcggcggtttacttccgataaatttttcttccatgttcccattacactgaattatcaagcagccaatagtcccagtaaattcaaccagcgtgtcaatgcctaccttaaggagcatccggaaacgcccatcattggtatcgatcgtggagaacgcaatctaatctatattaccgtcattgacagtactgggaaaattttggagcagcgttccctgaataccatccagcaatttgactaccaaaaaaaattggacaacagggaaaaagagcgtgttgccgcccgtcaagcctggtccgtcgtcggaacgatcaaagaccttaaacaaggctacttgtcacaggtcatccatgaaattgtagacctgatgattcattaccaagctgttgtcgtccttgaaaacctcaacttcggatttaaatcaaaacggacaggcattgccgaaaaagcagtctaccaacaatttgaaaagatgctaatagataaactcaactgtttggttctcaaagattatcctgctgagaaagtgggaggcgtcttaaacccgtatcaacttacagatcagttcacgagctttgcaaaaatgggcacgcaaagcggcttccttttctatgtaccggccccttatacctcaaagattgatcccctgactggttttgtcgatccctttgtatggaagaccattaaaaatcatgaaagtcggaagcatttcctagaaggatttgatttcctgcattatgatgtcaaaacaggtgattttatcctccattttaaaatgaatcggaatctctctttccagagagggcttcctggcttcatgccagcttgggatattgttttcgaaaagaatgaaacccaatttgatgcaaaagggacgcccttcattgcaggaaaacgaattgttcctgtaatcgaaaatcatcgttttacgggtcgttacagagacctctatcccgctaatgaactcattgcccttctggaagaaaaaggcattgtctttagagacggaagtaatatattacccaaacttttagaaaatgatgattctcatgcaattgatacgatggtcgccttgattcgcagtgtactccaaatgagaaacagcaatgccgcaacgggggaagactacatcaactctcccgttagggatctgaacggggtgtgtttcgacagtcgattccaaaatccagaatggccaatggatgcggatgccaacggagcttatcatattgccttaaaagggcagcttcttctgaaccacctcaaagaaagcaaagatctgaaattacaaaacggcatcagcaaccaagattggctggcctacattcaggaactgagaaactga

SEQ ID NO: 35 - protein, 1307 aa, Acidaminococcus sp.
  REGION 1..1307: note = Acidaminococcus sp. (strain BV3L6)
MTQFEGFTNLYQVSKTLRFELIPQGKTLKHIQEQGFIEEDKARNDHYKELKPIIDRIYKTYADQCLQLVQLDWENLSAAIDSYRKEKTEETRNALIEEQATYRNAIHDYFIGRTDNLTDAINKRHAEIYKGLFKAELFNGKVLKQLGTVTTTEHENALLRSFDKFTTYFSGFYENRKNVFSAEDISTAIPHRIVQDNFPKFKENCHIFTRLITAVPSLREHFENVKKAIGIFVSTSIEEVFSFPFYNQLLTQTQIDLYNQLLGGISREAGTEKIKGLNEVLNLAIQKNDETAHIIASLPHRFIPLFKQILSDRNTLSFILEEFKSDEEVIQSFCKYKTLLRNENVLETAEALFNELNSIDLTHIFISHKKLETISSALCDHWDTLRNALYERRISELTGKITKSAKEKVQRSLKHEDINLQEIISAAGKELSEAFKQKTSEILSHAHAALDQPLPTTLKKQEEKEILKSQLDSLLGLYHLLDWFAVDESNEVDPEFSARLTGIKLEMEPSLSFYNKARNYATKKPYSVEKFKLNFQMPTLASGWDVNKEKNNGAILFVKNGLYYLGIMPKQKGRYKALSFEPTEKTSEGFDKMYYDYFPDAAKMIPKCSTQLKAVTAHFQTHTTPILLSNNFIEPLEITKEIYDLNNPEKEPKKFQTAYAKKTGDQKGYREALCKWIDFTRDFLSKYTKTTSIDLSSLRPSSQYKDLGEYYAELNPLLYHISFQRIAEKEIMDAVETGKLYLFQIYNKDFAKGHHGKPNLHTLYWTGLFSPENLAKTSIKLNGQAELFYRPKSRMKRMAHRLGEKMLNKKLKDQKTPIPDTLYQELYDYVNHRLSHDLSDEARALLPNVITKEVSHEIIKDRRFTSDKFFFHVPITLNYQAANSPSKFNQRVNAYLKEHPETPIIGIDRGERNLIYITVIDSTGKILEQRSLNTIQQFDYQKKLDNREKERVAARQAWSVVGTIKDLKQGYLSQVIHEIVDLMIHYQAVVVLENLNFGFKSKRTGIAEKAVYQQFEKMLIDKLNCLVLKDYPAEKVGGVLNPYQLTDQFTSFAKMGTQSGFLFYVPAPYTSKIDPLTGFVDPFVWKTIKNHESRKHFLEGFDFLHYDVKTGDFILHFKMNRNLSFQRGLPGFMPAWDIVFEKNETQFDAKGTPFIAGKRIVPVIENHRFTGRYRDLYPANELIALLEEKGIVFRDGSNILPKLLENDDSHAIDTMVALIRSVLQMRNSNAATGEDYINSPVRDLNGVCFDSRFQNPEWPMDADANGAYHIALKGQLLLNHLKESKDLKLQNGISNQDWLAYIQELRN

SEQ ID NO: 36 - DNA, 3741 bp, Lachnospiraceae bacterium
  misc_feature 1..3741: note = Lachnospiraceae bacterium (strain ND2006)
  source 1..3741: mol_type = genomic DNA
atgcttaagaatgttggaattgataggttagatgttgaaaaagggagaaaaaatatgtctaaattagagaagtttacaaattgttactctttgtcaaaaacacttcgttttaaggcgattcctgttggaaaaacccaagaaaatattgataataaaagattgcttgtcgaggatgaaaaacgtgcagaagattataagggggttaaaaaattacttgataggtattatttatcatttattaatgatgttcttcattccattaaactaaagaatttaaataattatatttcgttgtttagaaagaaaactcggacggaaaaagaaaacaaagaattagaaaatttagagataaatttacgtaaagaaatcgctaaggcttttaagggtaatgaaggttataaatctttatttaagaaggatattatcgagacgatattgcctgaatttcttgatgataaagatgaaattgctttggttaattcatttaatggatttacaacggcatttaccggtttttttgataatagggaaaatatgttttcggaagaagctaaatcaacctcaattgcttttcgttgtattaatgagaatttaacaagatatatatcaaatatggatatatttgaaaaagttgatgcaattttcgataagcatgaagtacaggaaataaaagaaaaaattctaaacagtgattatgatgttgaagatttcttcgaaggagaattttttaattttgttcttacgcaagaaggtatcgatgtttataacgctataattggtggctttgtgacagaatccggagaaaaaataaaaggattaaatgaatatattaatttatataatcagaaaactaagcaaaaattaccgaagtttaagcctttatataaacaggttttatcagatagagagtcactttctttttatggcgaaggttatacatctgatgaggaagttttagaagtatttagaaatactcttaataagaattcagaaatattttcttcaattaagaaattggaaaagttatttaaaaacttcgatgaatattcaagtgcaggaattttcgtaaaaaatggaccggctatttctacaatttctaaggatatatttggagagtggaatgtaattagagacaaatggaatgcggagtacgatgatatacatttaaaaaagaaggctgtagtaacagaaaaatatgaagatgacaggcgtaaatcattcaaaaaaataggaagtttttcattggagcagttgcaagaatacgctgatgctgatctatctgtggtagagaagttaaaagaaatcattatccaaaaagtggatgagatatataaagtttatggctcgtcagaaaaattgttcgatgctgattttgtactagaaaaatcgttaaaaaagaatgatgcagttgtagcaataatgaaagatttactagattctgtgaagtcttttgaaaattatataaaagccttttttggagagggaaaagaaacaaatcgagatgaatcattttatggtgattttgttttggcatatgacattcttttgaaagtggatcatatttatgatgcaatacgaaattatgtgacacaaaaaccgtattcgaaagataagtttaaattatattttcaaaacccgcaatttatggggggctgggataaggataaagagacagactatagggcaactatacttagatatggctcaaagtattacttggcgattatggataaaaaatatgctaagtgcttgcaaaaaatagataaggatgatgtaaatggaaactatgaaaaaataaattataagttgcttccaggacctaataagatgcttccaaaggtgttttttagtaagaagtggatggcttattataatccgtcggaagatattcaaaaaatatataaaaatggaacatttaaaaaaggagatatgtttaatttaaatgattgtcataaattaattgatttctttaaggattcaatcagtcggtatccgaaatggagtaacgcatatgattttaacttttctgagaccgagaaatataaggatatagcaggtttttacagagaggttgaagaacaaggatataaagtatcatttgaaagtgcgtctaaaaaagaagttgataaattggtagaagaaggaaaattatacatgttccaaatttataataaagacttttcggataaaagtcatggaacgccaaatcttcatacaatgtattttaagttgctgtttgatgaaaataatcatggtcaaattaggctttctggtggtgctgagctattcatgcgacgtgcaagtttgaaaaaggaagaattagttgtgcatcctgccaatagcccgatagcgaataaaaacccggataatccaaagaaaacgactacgttgtcatatgatgtatacaaggacaaaagattttcggaagatcagtatgagttgcatatacctattgcaataaataaatgccctaaaaatatatttaagataaatacagaggttagagtgctgctgaagcatgatgataatccttatgttataggaattgataggggggagagaaatttactttacattgtggtggttgatggtaagggtaatattgtggagcaatattcgctgaatgaaataattaataattttaatggaattagaattaagacggattaccattcacttttggataaaaaggagaaggaaagatttgaagctcgtcaaaattggacgtctatagaaaacattaaagaactaaaagccggatatattagtcaggttgttcataagatatgtgagttggtagaaaaatatgatgcggtaattgcacttgaagatttgaattctggttttaagaatagtcgagttaaagttgaaaagcaagtatatcagaaatttgaaaaaatgctgattgataaacttaactatatggtagataagaaatctaatccttgcgctacgggtggtgctctgaaaggctatcaaattactaacaagtttgagagttttaagtcgatgagtacacaaaatggttttattttttatattccggcgtggttgactagcaaaattgatccgtcaacaggatttgtaaatttgttgaaaacaaagtatacgagcattgcagattcaaagaaatttataagttcttttgacagaattatgtatgtacctgaagaagatttattcgagtttgcattagattataagaatttttctcggacagacgcggattatataaaaaaatggaaactctatagctatggtaacaggattagaatatttagaaatcctaaaaaaaataatgtatttgattgggaagaggtatgtcttacatcagcctataaggaactttttaataaatatgggattaattatcagcaaggagatatacgagctctcttatgtgaacagagtgataaggcattctatagctcttttatggcattaatgtcactcatgctgcaaatgagaaatagtataacaggtaggacggatgtagattttttgatttcaccagtaaaaaattctgacggtattttttatgattccagaaattatgaagctcaggaaaatgcaatattaccgaaaaatgcagatgctaatggggcttataatatcgcaagaaaagttttgtgggctataggtcagtttaaaaaggctgaagatgaaaaacttgataaggttaaaattgcaatatcaaataaggaatggctcgaatatgcgcaaacaagtgttaagcattga

SEQ ID NO: 37 - protein, 1228 aa, Lachnospiraceae bacterium
  REGION 1..1228: note = Lachnospiraceae bacterium (strain ND2006)
MSKLEKFTNCYSLSKTLRFKAIPVGKTQENIDNKRLLVEDEKRAEDYKGVKKLLDRYYLSFINDVLHSIKLKNLNNYISLFRKKTRTEKENKELENLEINLRKEIAKAFKGNEGYKSLFKKDIIETILPEFLDDKDEIALVNSFNGFTTAFTGFFDNRENMFSEEAKSTSIAFRCINENLTRYISNMDIFEKVDAIFDKHEVQEIKEKILNSDYDVEDFFEGEFFNFVLTQEGIDVYNAIIGGFVTESGEKIKGLNEYINLYNQKTKQKLPKFKPLYKQVLSDRESLSFYGEGYTSDEEVLEVFRNTLNKNSEIFSSIKKLEKLFKNFDEYSSAGIFVKNGPAISTISKDIFGEWNVIRDKWNAEYDDIHLKKKAVVTEKYEDDRRKSFKKIGSFSLEQLQEYADADLSVVEKLKEIIIQKVDEIYKVYGSSEKLFDADFVLEKSLKKNDAVVAIMKDLLDSVKSFENYIKAFFGEGKETNRDESFYGDFVLAYDILLKVDHIYDAIRNYVTQKPYSKDKFKLYFQNPQFMGGWDKDKETDYRATILRYGSKYYLAIMDKKYAKCLQKIDKDDVNGNYEKINYKLLPGPNKMLPKVFFSKKWMAYYNPSEDIQKIYKNGTFKKGDMFNLNDCHKLIDFFKDSISRYPKWSNAYDFNFSETEKYKDIAGFYREVEEQGYKVSFESASKKEVDKLVEEGKLYMFQIYNKDFSDKSHGTPNLHTMYFKLLFDENNHGQIRLSGGAELFMRRASLKKEELVVHPANSPIANKNPDNPKKTTTLSYDVYKDKRFSEDQYELHIPIAINKCPKNIFKINTEVRVLLKHDDNPYVIGIDRGERNLLYIVVVDGKGNIVEQYSLNEIINNFNGIRIKTDYHSLLDKKEKERFEARQNWTSIENIKELKAGYISQVVHKICELVEKYDAVIALEDLNSGFKNSRVKVEKQVYQKFEKMLIDKLNYMVDKKSNPCATGGALKGYQITNKFESFKSMSTQNGFIFYIPAWLTSKIDPSTGFVNLLKTKYTSIADSKKFISSFDRIMYVPEEDLFEFALDYKNFSRTDADYIKKWKLYSYGNRIRIFRNPKKNNVFDWEEVCLTSAYKELFNKYGINYQQGDIRALLCEQSDKAFYSSFMALMSLMLQMRNSITGRTDVDFLISPVKNSDGIFYDSRNYEAQENAILPKNADANGAYNIARKVLWAIGQFKKAEDEKLDKVKIAISNKEWLEYAQTSVKH

SEQ ID NO: 38 - protein, 1064 aa, Bradyrhizobium sp.
  REGION 1..1064: note = Bradyrhizobium sp. BTAi1
MKRTSLRAYRLGVDLGANSLGWFVVWLDDHGQPEGLGPGGVRIFPDGRNPQSKQSNAAGRRLARSARRRRDRYLQRRGKLMGLLVKHGLMPADEPARKRLECLDPYGLRAKALDEVLPLHHVGRALFHLNQRRGLFANRAIEQGDKDASAIKAAAGRLQTSMQACGARTLGEFLNRRHQLRATVRARSPVGGDVQARYEFYPTRAMVDAEFEAIWAAQAPHHPTMTAEAHDTIREAIFSQRAMKRPSIGKCSLDPATSQDDVDGFRCAWSHPLAQRFRIWQDVRNLAVVETGPTSSRLGKEDQDKVARALLQTDQLSFDEIRGLLGLPSDARFNLESDRRDHLKGDATGAILSARRHFGPAWHDRSLDRQIDIVALLESALDEAAIIASLGTTHSLDEAAAQRALSALLPDGYCRLGLRAIKRVLPLMEAGRTYAEAASAAGYDHALLPGGKLSPTGYLPYYGQWLQNDVVGSDDERDTNERRWGRLPNPTVHIGIGQLRRVVNELIRWHGPPAEITVELTRDLKLSPRRLAELEREQAENQRKNDKRTSLLRKLGLPASTHNLLKLRLWDEQGDVASECPYTGEAIGLERLVSDDVDIDHLIPFSISWDDSAANKVVCMRYANREKGNRTPFEAFGHRQGRPYDWADIAERAARLPRGKRWRFGPGARAQFEELGDFQARLLNETSWLARVAKQYLAAVTHPHRIHVLPGRLTALLRATWELNDLLPGSDDRAAKSRKDHRHHAIDALVAALTDQALLRRMANAHDDTRRKIEVLLPWPTFRIDLETRLKAMLVSHKPDHGLQARLHEDTAYGTVEHPETEDGANLVYRKTFVDISEKEIDRIRDRRLRDLVRAHVAGERQQGKTLKAAVLSFAQRRDIAGHPNGIRHVRLTKSIKPDYLVPIRDKAGRIYKSYNAGENAFVDILQAESGRWIARATTVFQANQANESHDAPAAQPIMRVFKGDMLRIDHAGAEKFVKIVRLSPSNNLLYLVEHHQAGVFQTRHDDPEDSFRWLFASFDKLREWNAELVRIDTLGQPWRRKRGLETGSEDATRIGWTRPKKWP

SEQ ID NO: 39 - protein, 1035 aa, Candidatus Puniceispirillum marinum
MRRLGLDLGTNSIGWCLLDLGDDGEPVSIFRTGARIFSDGRDPKSLGSLKATRREARLTRRRRDRFIQRQKNLINALVKYGLMPADEIQRQALAYKDPYPIRKKALDEAIDPYEMGRAIFHINQRRGFKSNRKSADNEAGVVKQSIADLEMKLGEAGARTIGEFLADRQATNDTVRARRLSGTNALYEFYPDRYMLEQEFDTLWAKQAAFNPSLYIEAARERLKEIVFFQRKLKPQEVGRCIFLSDEDRISKALPSFQRFRIYQELSNLAWIDHDGVAHRITASLALRDHLFDELEHKKKLTFKAMRAILRKQGVVDYPVGFNLESDNRDHLIGNLTSCIMRDAKKMIGSAWDRLDEEEQDSFILMLQDDQKGDDEVRSILTQQYGLSDDVAEDCLDVRLPDGHGSLSKKAIDRILPVLRDQGLIYYDAVKEAGLGEANLYDPYAALSDKLDYYGKALAGHVMGASGKFEDSDEKRYGTISNPTVHIALNQVRAVVNELIRLHGKPDEVVIEIGRDLPMGADGKRELERFQKEGRAKNERARDELKKLGHIDSRESRQKFQLWEQLAKEPVDRCCPFTGKMMSISDLFSDKVEIEHLLPFSLTLDDSMANKTVCFRQANRDKGNRAPFDAFGNSPAGYDWQEILGRSQNLPYAKRWRFLPDAMKRFEADGGFLERQLNDTRYISRYTTEYISTIIPKNKIWVVTGRLTSLLRGFWGLNSILRGHNTDDGTPAKKSRDDHRHHAIDAIVVGMTSRGLLQKVSKAARRSEDLDLTRLFEGRIDPWDGFRDEVKKHIDAIIVSHRPRKKSQGALHNDTAYGIVEHAENGASTVVHRVPITSLGKQSDIEKVRDPLIKSALLNETAGLSGKSFENAVQKWCADNSIKSLRIVETVSIIPITDKEGVAYKGYKGDGNAYMDIYQDPTSSKWKGEIVSRFDANQKGFIPSWQSQFPTARLIMRLRINDLLKLQDGEIEEIYRVQRLSGSKILMAPHTEANVDARDRDKNDTFKLTSKSPGKLQSASARKVHISPTGLIREG

SEQ ID NO: 40 - protein, 1358 aa, Acidaminococcus sp.
MGKMYYLGLDIGTNSVGYAVTDPSYHLLKFKGEPMWGAHVFAAGNQSAERRSFRTSRRRLDRRQQRVKLVQEIFAPVISPIDPRFFIRLHESALWRDDVAETDKHIFFNDPTYTDKEYYSDYPTIHHLIVDLMESSEKHDPRLVYLAVAWLVAHRGHFLNEVDKDNIGDVLSFDAFYPEFLAFLSDNGVSPWVCESKALQATLLSRNSVNDKYKALKSLIFGSQKPEDNFDANISEDGLIQLLAGKKVKVNKLFPQESNDASFTLNDKEDAIEEILGTLTPDECEWIAHIRRLFDWAIMKHALKDGRTISESKVKLYEQHHHDLTQLKYFVKTYLAKEYDDIFRNVDSETTKNYVAYSYHVKEVKGTLPKNKATQEEFCKYVLGKVKNIECSEADKVDFDEMIQRLTDNSFMPKQVSGENRVIPYQLYYYELKTILNKAASYLPFLTQCGKDAISNQDKLLSIMTFRIPYFVGPLRKDNSEHAWLERKAGKIYPWNFNDKVDLDKSEEAFIRRMTNTCTYYPGEDVLPLDSLIYEKFMILNEINNIRIDGYPISVDVKQQVFGLFEKKRRVTVKDIQNLLLSLGALDKHGKLTGIDTTIHSNYNTYHHFKSLMERGVLTRDDVERIVERMTYSDDTKRVRLWLNNNYGTLTADDVKHISRLRKHDFGRLSKMFLTGLKGVHKETGERASILDFMWNTNDNLMQLLSECYTFSDEITKLQEAYYAKAQLSLNDFLDSMYISNAVKRPIYRTLAVVNDIRKACGTAPKRIFIEMARDGESKKKRSVTRREQIKNLYRSIRKDFQQEVDFLEKILENKSDGQLQSDALYLYFAQLGRDMYTGDPIKLEHIKDQSFYNIDHIYPQSMVKDDSLDNKVLVQSEINGEKSSRYPLDAAIRNKMKPLWDAYYNHGLISLKKYQRLTRSTPFTDDEKWDFINRQLVETRQSTKALAILLKRKFPDTEIVYSKAGLSSDFRHEFGLVKSRNINDLHHAKDAFLAIVTGNVYHERFNRRWFMVNQPYSVKTKTLFTHSIKNGNFVAWNGEEDLGRIVKMLKQNKNTIHFTRFSFDRKEGLFDIQPLKASTGLVPRKAGLDVVKYGGYDKSTAAYYLLVRFTLEDKKTQHKLMMIPVEGLYKARIDHDKEFLTDYAQTTISEILQKDKQKVINIMFPMGTRHIKLNSMISIDGFYLSIGGKSSKGKSVLCHAMVPLIVPHKIECYIKAMESFARKFKENNKLRIVEKFDKITVEDNLNLYELFLQKLQHNPYNKFFSTQFDVLTNGRSTFTKLSPEEQVQTLLNILSIFKTCRSSGCDLKSINGSAQAARIMISADLTGLSKKYSDIRLVEQSASGLFVSKSQNLLEYL

SEQ ID NO: 41 - protein, 1358 aa, Acidaminococcus sp.; identical to SEQ ID NO: 40
  REGION 1..1358: note = Acidaminococcus sp. D21

SEQ ID NO: 42 - protein, 1138 aa, Acidothermus cellulolyticus
MGGSEVGTVPVTWRLGVDVGERSIGLAAVSYEEDKPKEILAAVSWIHDGGVGDERSGASRLALRGMARRARRLRRFRRARLRDLDMLLSELGWTPLPDKNVSPVDAWLARKRLAEEYVVDETERRRLLGYAVSHMARHRGWRNPWTTIKDLKNLPQPSDSWERTRESLEARYSVSLEPGTVGQWAGYLLQRAPGIRLNPTQQSAGRRAELSNATAFETRLRQEDVLWELRCIADVQGLPEDVVSNVIDAVFCQKRPSVPAERIGRDPLDPSQLRASRACLEFQEYRIVAAVANLRIRDGSGSRPLSLEERNAVIEALLAQTERSLTWSDIALEILKLPNESDLTSVPEEDGPSSLAYSQFAPFDETSARIAEFIAKNRRKIPTFAQWWQEQDRTSRSDLVAALADNSIAGEEEQELLVHLPDAELEALEGLALPSGRVAYSRLTLSGLTRVMRDDGVDVHNARKTCFGVDDNWRPPLPALHEATGHPVVDRNLAILRKFLSSATMRWGPPQSIVVELARGASESRERQAEEEAARRAHRKANDRIRAELRASGLSDPSPADLVRARLLELYDCHCMYCGAPISWENSELDHIVPRTDGGSNRHENLAITCGACNKEKGRRPFASWAETSNRVQLRDVIDRVQKLKYSGNMYWTRDEFSRYKKSVVARLKRRTSDPEVIQSIESTGYAAVALRDRLLSYGEKNGVAQVAVFRGGVTAEARRWLDISIERLFSRVAIFAQSTSTKRLDRRHHAVDAVVLTTLTPGVAKTLADARSRRVSAEFWRRPSDVNRHSTEEPQSPAYRQWKESCSGLGDLLISTAARDSIAVAAPLRLRPTGALHEETLRAFSEHTVGAAWKGAELRRIVEPEVYAAFLALTDPGGRFLKVSPSEDVLPADENRHIVLSDRVLGPRDRVKLFPDDRGSIRVRGGAAYIASFHHARVFRWGSSHSPSFALLRVSLADLAVAGLLRDGVDVFTAELPPWTPAWRYASIALVKAVESGDAKQVGWLVPGDELDFGPEGVTTAAGDLSMFLKYFPERHWVVTGFEDDKRINLKPAFLSAEQAEVLRTERSDRPDTLTEAGEILAQFFPRCWRATVAKVLCHPGLTVIRRTALGQPRWRRGHLPYSWRPWSADPWSGGTP

SEQ ID NO: 43 - protein, 1045 aa, Acidovorax avenae
MQKEKPLAYRLALDLGSTSLGWAVLRLSAPGEPSAVIRAGSRIFSDGRNPKDGSSLAVTRRAARAMRRRRDRLLKRKARMLAALERHGFFPQDEAARKALEKLNPYGLRARGLESALKPEEFGRALFHLNQRRGFQSNRKTDRKDSDSGALKQAIGTLRAQMHESGCRTVGEWFWKVRMERKPEGVKGQGVRARYRETPFTTDEGKKRIDKRYDLYVDRAMVAQEFDALWAAQATFAPALFNEAARAELRDILLHQRKLRPVQPGRCTLVPEEPRALLALPSTQRFRIYQEVNHLRVLHDELREEALTLAQRDQIVALLERQAKVTFTAMRKALGFSALFNLEDAKRDGLKGNATTAALGKKDLFGPLWAGFDTALQDEIVTQLMTEESEPRLIAWLQEHTGVDEARAQAIANAGLPEGYGSLGRTALARIVPELQRDVITYDKAVQAAGFAHHSDLGFSFEHDADEVERIGERTIASTGEIKPVFAFKQLPYYGRALQRHVAFAKENPRNDEERYGKIANPTVHIGLNQVRVVVNALMCRYGRPTEVVIELARDLKQSREQKLEAQQRQADNQKRNARIRRSIAEVLGISEERVRTLDIQKWILWEELSHDAADRRCPYSGVQISASMLLGERVEIEHILPFSMTLDDSLNNRTVALREANRIKRNRTPWDARTDFEAHGWSYDGILQRAERMPQRKRHRFAPDGYERWLGEDKDFLARALNDTRYLSRVAAEYLRLVCPGSATRVIPGQMTALLRGKFGLNDVLGLDGEKNRNDHRHHAVDACVIGVTDQRMMQRFAQANAQAREDGLTRLVEDMPLPWPTYRAHVERAVRHIWVSHKPDHGFEGAMMEETSYGILRDGTIKQRRKADGSAGREISRLIRITEPSQPQRHGVDAEGRPLPYKGYVGGSNYCLEITVNDKGKWEGQVISTFDAYRIVREGGLRQLRHSTQGQNGQALAMRLVIGDSVRLEVDEQERVMRIVKINGNNGQVFMAPVHEANVDARNSDKNEAFAYTSKIAGSFQKTKARQVTISPIGELRDPGFKG

SEQ ID NO: 44 - protein, 1131 aa, Acidovorax ebreus
MAQHVFGLDIGIASVGWAILGEQRIIDLGVRCFDKAETAKEGDPLNLTRRQARLLRRRLYRRAWRLTQLSRLLKRKGLIADAKLFAKAPSYGDSAWELRRQGLDRLLTPLEWARVIYHQCKHRGFHWTSKAEEAKADSDAEGGRVKQGLAHTKALMQAKNYRSAAEMVLAEFPDAQRNKRGQYDKALSRVLLGEELALLFATQRRLGNPHASDFFEKLILGDGDRKSGLFWQQKPALSGADLLKMLGKCTFEKGEYRAPKASFSVERHVWLTRLNNLRIVVDGRSRPLNEAERQAALLLPYQTETSKYKTLKNAFIKAGLWGDGVRFGGLAYPSQAQIDAEKTKDPEDQFLVKLPAWHELRKAFKAAGHEALWQQISTPALDGDPTLLDQIATVLSVYKDGAEVVQQLRQLALPEPAASIAVLEKISFDKFSSLSLKALRRIVPLMQSGLRYDEAVAQIPEYGHHSQRIEPGAAKHLYLPPFYEAQRKYAGKGDHIGSMQFRDDADIPRNPVVLRALNQARKVVNALIREYGSPIAVNIEMARDLSRPLDERNKVKRAQEEFRDRNDRARSEFERDFGYKPKAAAFEKWMLYREQLGQCAYSQQPLDIQRVLDDHNYAQVDHALPYSRSYDDSKNNKVLVLTHENQNKGNRTAFEYLTSFPDGEDGERWRTFVAWVQGNKAYRMAKRNRLLRKNYGVDESKGFIDRNLNDTRYICKFFKNYVEEHLQLAARADGDTARRCVVVNGQLTAFLRARWGLTKVRGDSDRHHALDAAVVAACTHGMVKALADYSRRKEISFLQEGFPDPETGEILNPAAFDRARQHFPEPWTHFAHELKARLFTDDLAALREDMQRLGSYTTEDLGRLRTLFVSRAPQRRSGGAVHKETIYAQPESLKQQGGVIEKILLTSLKLQDFDKLLNPESNDHFVEPHRNERLYAAIRQRLEQFGGRADKAFGPDNLFHKPDKNNQPTGPVVRSIKLVRGKQTGIPIRGGLAKNDSMLRVDIFTKAGKFHLVPVYVHHRVTGLPNRAIVAFKDEDEWTLIDESFAFLFSVYPNDYVKVTLKKEQQSGYYSGADRSTGAMNLWAHDRAASVGKDGLIRGIGVKTALSVEKFNVDVLGRIYLAPPETRSGLA

SEQ ID NO: 45 - protein, 1056 aa, Actinobacillus minor
  REGION 1..1056: note = Actinobacillus minor NM305
MKALNYILGLDLGIASVGWAVVEIDQNELPIRLIDLGVRTFERAEVPKTGDSLALARRLARSSRRLVRRRAVRLLKAKRLLKQEGILQADDFHSSHLKPLPNNPWELRVKGLNHLLDRKEWAAVLLHLLKHRGYLSQRKNESKTDNKELGALLKGVSENRQLLQAQAFSTPAEIAIKKFQQEEGHIRNQRGAYSHTFDRNDLLAELRLLFQKQREFNNPYTSQSLEQAIAELLMWQKPALSGEAILKMLGKCTFEPSEYKAPKNSYSAEYFVWLTKLNNLRILENGADRGLTAEERQLLINQPFEKAKFTYAQARKLLELSDLAIFKGVRYGKDNAESATLMEMKAWHAIRKALESNGLKTEWNGLKTKPELLDKIGTAFSIYKTDEDISQYLNGELSPAVLNALLENLSFDKFIRLSLQSLAKILPLMEQGLRYDEACKQVYGDHYGKKEQLELRFLPKIPVEDIRNPVVLRTLSQARKVINGVVRLYGSPARIHIETGREVGKSFSERRDISKRQEENRNERQRAVEKFKEFFPHFVGEPKAKDILKMRLYEQQHGKCLYSGKELDLNRLLEKGYVEIDHALPFSRTWDDSFNNKVLVLASENQNKGNQTPYEWLNGKENAERWKLFQALVNGSRFPYSKKQRILTKYLDEDGFRERNLNDTRYVARFLCNFIEDNMQLVGQGKKRVFASNGQITALLRRSWGIQKVREDNDRHHAVDAVVVACSTRALQKKITDYVRYKEMNVFTGEKIDQETGEIIKFHFPEPWKFFRQEVEIRVFSETPAEDVVIALPDRPQANHEFIQPLFVSRAPTRKMTGQGHMETIKSAKRLAEGLSVSRVPLTQLKLKDLENMVNREREKALYEALKVRLEKFNNDPAKAFADPFYKKGGQQVKAVRVEQVQKSGVLVRQENGVADNASMVRVDVFIKGGKYFLVPIYTWQVAKGILPNRAATQGKEEEYWDIMDETAIFQFSLYQNDLIKLVTKKKTIFGYFNGLNRATSNINIKEHDLDKSKGKDGIYLEVGVKLALSLEKYQVDELGKNIQPCRSMKKRPPVR

SEQ ID NO: 46 - protein, 1054 aa, Actinobacillus pleuropneumoniae
  REGION 1..1054: note = Actinobacillus pleuropneumoniae serovar 10 str. D13039
MKLTPLNYILGLDLGIASVGWAVVEIDEQENPLGLIDVGVRTFDRAEVAKTGESLALARRLARSSRRLVKRRADRIKKVKRLLKSENILLSADEQLPNDVWQLRVKGLDQKLERQEWAAVLLHLLKHRGYLSQRKNESKSENKELGALRSGVAANHQILQSAEYRTPAEIAVKKFHVEEGHIRNQRGAYTHTFSRLDLLAEIELLFTRQTELGNPHTSAKLLENLTALLMWQKPALAGEAILKMLGKCTFEPTEYKAAKNSYSAERFVWLTKLNNLRILEQGAERALTDNERFALLDQPYEKAKFTYAQARTMLALPDEAIFKGVRYQGEDKKAVETKTILMEMKAYHQIRKALENADLKAEWNELKNNSELLDDIGTAFSLHKTDEDICRYLDGKLSESILNALLENLNFDKFIQLSLKALQQILPLMLQGQRYDEAVSAIYGDHYGKKSAEINRLLPTIPADEIRNPVVLRTLTQARKVINAVVRLYGSPARIHIETGREVGKSYQDRKKLEKQQEDNRKHRESAVQKFKEYFPNFVGEPKGKDILKMRLYELQQAKCLYSGKSLELHRLLEKGYVEVDHALPFSRTWDDSFNNKVLVLANENQNKGNLTPYEWLDGKNNSEPWQNFVARVQTSGFSHTKKQRILSHKLDEKGFIERNLNDTRYVVRFLCNFIADNMLLTGKGKRKVFASNGQITALLRGRWGLQKVRDDNDRHHALDAVVVACSTVAMQQKITRFVRYEEGNVFSGERIDRETGEIIPLHFPSPWAFFRENVEIRIFSENPKLELENRLPDYPQYNHEFVQPLFVSRMPTRKMTGQGHMETVKSAKRLDEGLSVLKVPLTQLKLNDLERMVNREREMALYESLKVRLEQFDNDPAKAFAEPFYKKGGALVKAVRVEQTQKSGVLVRDGNGVADNASMVRVDVFTKAGKYFLVPIYTWQVAKGILPNKAVTANVDEIDWLEMDESYQFIFTMYPNDLVKVKLKKEEFFGYYGGLDRATGAIVIKEHDLEKSKGRQGIYRIGVKLALSFEKYQVDELGKNIRPCRPTKRQHVR

SEQ ID NO: 47 - protein, 1062 aa, Actinobacillus succinogenes
MNLNYILGLDLGIASVGWAVVEIDEQENPQRLIDVGVRTFDRAEVLKTGESLALARRLARSSRRLVKRRAERIKKAKRLLKAENLLLSADEILPNEAWQLRVKGLDQKLERQEWAAVLLHLLKHRGYLSQRKNESKSENKELGALLSGVAINHQILQSAEYRTPAEIAVNKFQAEEGHIRNQRGAYTHTFSRLDLLAEMELLFQRQATLGNPHTSTKLLENLTALLMWQKPALAGEAILKMLGKCTFEPTEYKAAKNSYSAERFVWLTKLNNLRILEQGAERALTDNERFALLDQPYEKAKLTYAQVRTLLGLSDEAIFKGLRYQGEDKKAVETKTTLMEVKAYHQIRKALEGLDLKAEWNELKNNPALLDEIGTAFSLYKTDDDIHRYLDGKLSESVLNALLENLNFDKFIQLSLKALQQILPLMLQGQRYDEAVSAIYGDHYGKKSDEIDRLLPNIPTDEIRNPVVLRTLTQARKVINAVVRLYGSPARIHIETGREVGKSYQDRKKLEKQQEENRKQRENAVKKFKEYFPNFVGEPKGKDILKMRLYELQQAKCLYSGKSLELYRLLEKGYVEVDHALPFSRTWDDSFNNKVLVLANENQNKGNATPYEWLDGKNNSEGWQHFVARVQTSGFSYAKKQRVLIQELDEKSFIERNLNDTRYVARFLCNHIADNMLLTGKGKRKVFASNGQITALLRGCWGLQKVRENNDRHHALDAVVVACSTKSMQDKITKFVKYKEGRLFKDKKDGVYKGERINRETGEIISLHFPTPWKFFKENVEIRIFSENPKLELENRLPDYPQYNHEFVQPLFVSRMPTRKMTGQGHMETVKSAKRLDKGLSVLKVPLTQLKLSDLERMVNREREMALYEALKECLEQFGNDPAKAFAEPFYKKGGALVKAVRVEQTQKSGVLVRNGNGVADNATGSIVRVDVFTKGGKYFLVPIYTWQVAKGILPNKAVIQGKDESEWEEMDENAVFQFSMHKNDLIKVKTKKGEIFGYFNGLDRATGSIEIEEHDLEKSKGKNGSHRGLGVKTAFFLEKYQVDELGKNIRPCRPTKRQHVR

SEQ ID NO: 48 - protein, 1054 aa, Actinobacillus suis
MKLTPLNYILGLDLGIASVGWAVVEIDEQENPLGLIDVGVRTFDRAEVPKTGESLALARRLARSARRLVKRRADRIKKAKRLLKAENILLSADEHLPNDVWQLRVKGLDQKLERQEWAAVLLHLLKHRGYLSQRKNESKSENKELGALLSGVETNHQILQSAEYRTPAEIAVKKFHVEDGHIRNQRGAYTHTFSRLDLLAEMELLFQRQTDLGNPHTSAKLLENLTALLMWQKPALAGEAILKMLGKCTFEPTEYKAAKNSYSAERFVWLTKLNNLRILEQGAERALTDNERFALLDQPYEKAKFTYAQARTMLALPDEAIFKGVRYQGEDKKAVETKTILMEMKAYHQIRKALENADLKAEWNELKNNSELLDDIGTAFSLHKTDEDICRYLDGKLSESILNALLENLNFDKFIQLSLKALQQILPLMLQGQRYDEAVSAIYGDHYGKKSAEINRLLPTIPADEIRNPVVLRTLTQARKVINAVVRLYGSPARIHIETGREVGKSYQDRKKLEKQQEDNRKQRESAVKKFKEYFPNFVGEPKGKDILKMRLYELQQAKCLYSGKSLELHRLLEKGYVEVDHALPFSRTWDDSFNNKVLVLANENQNKGNLTPYEWLDGKNNSEHWQNFVARVQTSGFSHTKKQRILSHKLDEKGFIERNLNDTRYVARFLCNFIADNMLLTGKGKRKVFASNGQITALLRGRWGLQKVRDDNDRHHALDAVVVACSTVVMQQKITRFVRYEEGNVFSGERIDRETGEIIPLHFPSPWAFFRENVEIRIFSENPKLELENRLPDYPQYNHEFVQPLFVSRMPTRKMTGQGHMETVKSAKRLDEGLSVLKVPLTQLKLSDLERMVNREREVTLYESLKARLEQFGNDPAKAFAEPFHKKGGAVVKAVRVEQTQKSGVLVRDGNGVADNASMVRVDVFTKGGKYFLVPIYTWQVAKGILPNKAVTANVDEIDWLEMDESYQFIFTMYPNDLVKVKLKKEEFFGYYGGLDRATGAIVIKEHDLEKSKGKQGIYRIGVKLALSFEKYQVDELGKNIRPCRPTKRQHVR

SEQ ID NO: 49 - protein, 1105 aa, Actinomyces coleocanis
  REGION 1..1105: note = Actinomyces coleocanis DSM 15436
MDNKNYRIGIDVGLNSIGFCAVEVDQHDTPLGFLNLSVYRHDAGIDPNGKKTNTTRLAMSGVARRTRRLFRKRKRRLAALDRFIEAQGWTLPDHADYKDPYTPWLVRAELAQTPIRDENDLHEKLAIAVRHIARHRGWRSPWVPVRSLHVEQPPSDQYLALKERVEAKTLLQMPEGATPAEMVVALDLSVDVNLRPKNREKTDTRPENKKPGFLGGKLMQSDNANELRKIAKIQGLDDALLRELIELVFAADSPKGASGELVGYDVLPGQHGKRRAEKAHPAFQRYRIASIVSNLRIRHLGSGADERLDVETQKRVFEYLLNAKPTADITWSDVAEEIGVERNLLMGTATQTADGERASAKPPVDVTNVAFATCKIKPLKEWWLNADYEARCVMVSALSHAEKLTEGTAAEVEVAEFLQNLSDEDNEKLDSFSLPIGRAAYSVDSLERLTKRMIENGEDLFEARVNEFGVSEDWRPPAEPIGARVGNPAVDRVLKAVNRYLMAAEAEWGAPLSVNIEHVREGFISKRQAVEIDRENQKRYQRNQAVRSQIADHINATSGVRGSDVTRYLAIQRQNGECLYCGTAITFVNSEMDHIVPRAGLGSTNTRDNLVATCERCNKSKSNKPFAVWAAECGIPGVSVAEALKRVDFWIADGFASSKEHRELQKGVKDRLKRKVSDPEIDNRSMESVAWMARELAHRVQYYFDEKHTGTKVRVFRGSLTSAARKASGFESRVNFIGGNGKTRLDRRHHAMDAATVAMLRNSVAKTLVLRGNIRASERAIGAAETWKSFRGENVADRQIFESWSENMRVLVEKFNLALYNDEVSIFSSLRLQLGNGKAHDDTITKLQMHKVGDAWSLTEIDRASTPALWCALTRQPDFTWKDGLPANEDRTIIVNGTHYGPLDKVGIFGKAAASLLVRGGSVDIGSAIHHARIYRIAGKKPTYGMVRVFAPDLLRYRNEDLFNVELPPQSVSMRYAEPKVREAIREGKAEYLGWLVVGDELLLDLSSETSGQIAELQQDFPGTTHWTVAGFFSPSRLRLRPVYLAQEGLGEDVSEGSKSIIAGQGWRPAVNKVFGSAMPEVIRRDGLGRKRRFSYSGLPVSWQG

SEQ ID NO: 50 - protein, 1113 aa, Actinomyces georgiae
  REGION 1..1113: note = Actinomyces georgiae F0490
MSASSQNVERIRYKVGIDVGLRSIGFCAVQVDADDRPVKLLNTVVHVHDAGVSPADAKKADTRKLVSGVARRTRRLYRTRKRRLVDLDRQLDGLGWPLVDPARFADPREPWFAREKLVSGRVDDADERKELLSVALRHIAHHRGWRNPYSTVESLQADAPPSEFLQGLNQRVSEKLGTELDPGLTQGQLVAKLLHRFPNAKIRGPEGILRGKLHQSDNAGELRLICRTQGLDCHITEELVRLVFQAKSPKANKEMRKRIGRDQLPGQGAHIRAEKAHPVFQRFRIVAVLANLRIREAHVDRRLTAEEMRTLTDFLLGLAGSEQPTWEELADNLNIERHQLRGTAKASVDGAPALRFPPIDATTDRIYASKLKWLAEWWRQADEERRGYMVDALSNSGGSEDEPYLDDEIAEMLEQASEEDQAKLDSLHLPGGRASYCLDTLRRLTDAMLGGGLDLFEARKAVFHVDDDWAPPTDPIGAPVGNPPVDRVLKHVARWLEAATGRWGAPQTINIEHVREGLGSEKAARELTRMNDRRRRNNQKLVEEMGEKLGMSGRIRRSDRMRYEAIRRQNCECLYCGQPITYQTMEMDHIVPRAGAASTNSRSNLAAVCRRCNHQKGKLPFAVWAESQDSPAEVRLQDAVQRVRHWLRDAGMGQKELQALRVQVIARLKSKRPDEEFDGRSMESIAWMANELRARVEAQYRGSGTTVRVYRGALTAEARKASGFEGRVNLIGGRGKDRFDRRHHAMDALVIALMNQSVAQTLALRLNMRDSQWLTQSEQTWRQFHGAPGEAARKWEAWDRDMRDASDLFNLALDGGRIPITENVRLRVGNGRVHEDGVIRFKPEYEVKGKTIKGGEARLLGDSLPSEQIDRAETPALWTALTRLPEYDRKSGLPENPDRVIRVNGAVVQATDRIRFFGTPASVAVRGGYAKLGESIHHARIYRINGKTPKYAMIRVYTIDLMRLNHEDIFTAVLKPSTISMRCAEKKLKYAIAEGNAEQIGWLVEGDQLELDAAAYAKGVGADLMREYPMATCWRVAGFPDEAKLRLRPVLLAAEGMGEDAPKFMREVLENQGWRPAVNALLSPGSVRVVRRNVLGEPRFKSSGHLPTTVDLV

SEQ ID NO: 51 - protein, 1101 aa, Actinomyces naeslundii
  REGION 1..1101: note = Actinomyces naeslundii str. Howell 279
MWYASLMSAHHLRVGIDVGTHSVGLATLRVDDHGTPIELLSALSHIHDSGVGKEGKKDHDTRKKLSGIARRARRLLHHRRTQLQQLDEVLRDLGFPIPTPGEFLDLNEQTDPYRVWRVRARLVEEKLPEELRGPAISMAVRHIARHRGWRNPYSKVESLLSPAEESPFMKALRERILATTGEVLDDGITPGQAMAQVALTHNISMRGPEGILGKLHQSDNANEIRKICARQGVSPDVCKQLLRAVFKADSPRGSAVSRVAPDPLPGQGSFRRAPKCDPEFQRFRIISIVANLRISETKGENRPLTADERRHVVTFLTEDSQADLTWVDVAEKLGVHRRDLRGTAVHTDDGERSAARPPIDATDRIMRQTKISSLKTWWEEADSEQRGAMIRYLYEDPTDSECAEIIAELPEEDQAKLDSLHLPAGRAAYSRESLTALSDHMLATTDDLHEARKRLFGVDDSWAPPAEAINAPVGNPSVDRTLKIVGRYLSAVESMWGTPEVIHVEHVRDGFTSERMADERDKANRRRYNDNQEAMKKIQRDYGKEGYISRGDIVRLDALELQGCACLYCGTTIGYHTCQLDHIVPQAGPGSNNRRGNLVAVCERCNRSKSNTPFAVWAQKCGIPHVGVKEAIGRVRGWRKQTPNTSSEDLTRLKKEVIARLRRTQEDPEIDERSMESVAWMANELHHRIAAAYPETTVMVYRGSITAAARKAAGIDSRINLIGEKGRKDRIDRRHHAVDASVVALMEASVAKTLAERSSLRGEQRLTGKEQTWKQYTGSTVGAREHFEMWRGHMLHLTELFNERLAEDKVYVTQNIRLRLSDGNAHTVNPSKLVSHRLGDGLTVQQIDRACTPALWCALTREKDFDEKNGLPAREDRAIRVHGHEIKSSDYIQVFSKRKKTDSDRDETPFGAIAVRGGFVEIGPSIHHARIYRVEGKKPVYAMLRVFTHDLLSQRHGDLFSAVIPPQSISMRCAEPKLRKAITTGNATYLGWVVVGDELEINVDSFTKYAIGRFLEDFPNTTRWRICGYDTNSKLTLKPIVLAAEGLENPSSAVNEIVELKGWRVAINVLTKVHPTVVRRDALGRPRYSSRSNLPTSWTIE

SEQ ID NO: 52 - protein, 1144 aa, Actinomyces sp.
  REGION 1..1144: note = Actinomyces sp. ICM47
MSMIDSSENVPGIRYRVGIDVGLKSIGFCAVEVDRNDQPVRMLNSMVFIHDAGVDPNENKAAKSRKLTAGVARRTRRLYRTRHQRLVNLDRVLSKEFGWPLPDLTSFKDPREPWHVRAGLLEGYIADDEKRKEALSIALRHIARHRGWRNPYAKVETLLQPSEPSDFLKGLNDRISEELGRAFPADATPGQLVDTYLAHPDYVGRAGTPKLRGPQGILAGKLHQSDNAQEIRGICDVQRIEPAERDRLIRVVFEAKSPKGSAKERGLVGYDELPGQGRHVRAEKAHPAFQLFRMVSVLANLRIREGREERPLTPDELEDLVDFINQVSLKQEVTWQDLADKLRIERADLRGTAKASFDGSPVLRNPPTDVTTEKIMACKVKWLKEWWKEADDEQRGYMVDAFSNSGGSEDGTDVNDEVAELLEQATEDDQLEFEKISLPQGRAAYSLDSLRRLTDRMLRDGVDLHTARRLEFNVGDDWKPAVEPIGAPTGNPAVDRVLKQVSRWLHAATERWGEPTVINIEHARDGLGSERVARELMRENEKRRKANASAVAEMAAKLKLSGKVHRSDQIRYFALQRQNCQCLYCGAPITYTTAEMDHIVPRADGSSTNDRSNLAAVCRTCNHMKGKIPFAVWASSDKANQGVSLTGALERVNMWQRDSGMSPRQLKQLQREVCARLKSKKPDQEFDGRSMESVAWMAVELRTRIEGFYRSRDEESVPSVGVYRGQLTAEARRASGFESRVNLIGGRGKTRFDRRHHAMDALVIALMNPSVSRTLALRLNMRDAQRLTGVEETWKHFYGKPGEASKRFESWRESMLRGVELFNIALSDNAIPFVENIRLRVGSSVIHDATVHSFCPPKTPDGKQIITKGYGEQHSLGSAMPVELIDRAETPALWTALTRCPDFDPKKGLPENPQRTISVNGTRVGPTELVNFFEFSKSGPKACLKVRGGYVDLSGAIHHARIYRIAGKKTAYAMIRVFQVDLLRLKDHDVFTTPLKPSTISMRTAEPKIREALANGTATQIGWLVEGDELVIDTSKYSGGFIGEVLARYPEATSWRVAGFMTPAKLRIKPILLSKEGFVDETQAALLGVEVTSEAIQKTVDRPGWLPAVNVLFGAGGVRVIRRNCLGEERYHSSASLPVSMTLE

SEQ ID NO: 53 - protein, 1095 aa, Actinomyces sp.
  REGION 1..1095: note = Actinomyces sp. oral taxon 175 str. F0384
MPAHHLRVGIDVGTHSVGLATLRVDDQGTPIELLSALSHIHDSGIGKEGQKDHDTRKKLSGVARRTRHLLRNRRERLQQLDKVLVDLGFPIPKPEEYPDLSERTDPYRVWRVRARLVEETLPEELRGPAISMAVRHIARHRGWRNPYSKVESLLSPAEESSFMKALRKRIMTKTGEVLDDDITPGQAMAQVALTHKIYMRGPEGILGKLHQSDNANEIRKICARQGISSDVCKQLLRAVFKAESPRGSAVSRVAPDPLPGQGSFRRAPKCDPEFQRFRIISIVANLRISETKGENRPLTVDERRQVVAFLMEDSQADLTWVDVAEKLRVSRQALRGTAMLTADGERSAAQPPIDVTDQIMRKTKISALKTWWDKADAERRGAMVRYLYEGLEDSECAEVIAKLPEKDHAKLDSLHLPAGRAAYSRESLTALSDHMLETTNDLHEARKRLFGVDDSWAPPAEPVGAPVGNPSVDRTLKIVARYLSAVESIWGTPEVIHVEHVRDGFTSERTAEERDKANRSRHNDNQKAIEKIQHDYGKEGYISRGDIVRFHALKLQGSACLYCGTTIGYHTCQLDHIVPQAGPGSNNRRGNLVAVCERCNHSKSNTPFAVWAQKCGIPHVGVKEAISRVNGWVEHNHSTSSGDLTRLKKEVIARLRRTQKDPEIDERSMESVAWMANELHHRIAAAYPETTVMVYRGSITAAARKAASIESRINLIGEKGRKDRLDRRHHAVDASVVALMEPSVAKTLAERSSLRGEQRLTGQEQTWKQYTGLTVGARERFEAWRGHMHRLTELFNESLAADEVYVTQNIRLRLSDGSAHTVKASKLVSHRLGDGLTVQQIDRACTPALWCALTREIDFDEKNGLPAREDRVIRVHGQEISSADCIQVFSKRKKTKSDRDEAPFGAIAVRGGFVEIGSSIHHARIYRIEGEKPAYAMLRVFTHDLLSQRHGDLFSAVIPPQSISMRCAATELRQAISEGRATYLGWIVSGDELHIPVETFTTHKIGSFLKDYPNTTRWRICGYDSETMLILKPRILSAEGLNNSSDIAEYVIKNKGWRVAINKLAKVHPTVVRRDALGRPRHSSRSNLPVTWSIE

SEQ ID NO: 54 - protein, 1181 aa, Actinomyces sp.
  REGION 1..1181: note = Actinomyces sp. oral taxon 180 str. F0310
MLHCIAVIRVPPSEEPGFFETHADSCALCHHGCMTYAANDKAIRYRVGIDVGLRSIGFCAVEVDDEDHPIRILNSVVHVHDAGTGGPGETESLRKRSGVAARARRRGRAEKQRLKKLDVLLEELGWGVSSNELLDSHAPWHIRKRLVSEYIEDETERRQCLSVAMAHIARHRGWRNSFSKVDTLLLEQAPSDRMQGLKERVEDRTGLQFSEEVTQGELVATLLEHDGDVTIRGFVRKGGKATKVHGVLEGKYMQSDLVAELRQICRTQRVSETTFEKLVLSIFHSKEPAPSAARQRERVGLDELQLALDPAAKQPRAERAHPAFQKFKVVATLANMRIREQSAGERSLTSEELNRVARYLLNHTESESPTWDDVARKLEVPRHRLRGSSRASLETGGGLTYPPVDDTTVRVMSAEVDWLADWWDCANDESRGHMIDAISNGCGSEPDDVEDEEVNELISSATAEDMLKLELLAKKLPSGRVAYSLKTLREVTAAILETGDDLSQAITRLYGVDPGWVPTPAPIEAPVGNPSVDRVLKQVARWLKFASKRWGVPQTVNIEHTREGLKSASLLEEERERWERFEARREIRQKEMYKRLGISGPFRRSDQVRYEILDLQDCACLYCGNEINFQTFEVDHIIPRVDASSDSRRTNLAAVCHSCNSAKGGLAFGQWVKRGDCPSGVSLENAIKRVRSWSKDRLGLTEKAMGKRKSEVISRLKTEMPYEEFDGRSMESVAWMAIELKKRIEGYFNSDRPEGCAAVQVNAYSGRLTACARRAAHVDKRVRLIRLKGDDGHHKNRFDRRNHAMDALVIALMTPAIARTIAVREDRREAQQLTRAFESWKNFLGSEERMQDRWESWIGDVEYACDRLNELIDADKIPVTENLRLRNSGKLHADQPESLKKARRGSKRPRPQRYVLGDALPADVINRVTDPGLWTALVRAPGFDSQLGLPADLNRGLKLRGKRISADFPIDYFPTDSPALAVQGGYVGLEFHHARLYRIIGPKEKVKYALLRVCAIDLCGIDCDDLFEVELKPSSISMRTADAKLKEAMGNGSAKQIGWLVLGDEIQIDPTKFPKQSIGKFLKECGPVSSWRVSALDTPSKITLKPRLLSNEPLLKTSRVGGHESDLVVAECVEKIMKKTGWVVEINALCQSGLIRVIRRNALGEVRTSPKSGLPISLNLR

SEQ ID NO: 55 - protein, 1103 aa, Actinomyces sp.
  REGION 1..1103: note = Actinomyces sp. oral taxon 181 str. F0379
MTKINDDLRYRVGIDVGLKSIGFCAVEVDENDQPLRLLNSMVFVHDAGVDPNENKAAKSRKLTAGVARRTQRGTAQNRRRLAELDRALSEELNWPLPNLEDFEDSYEPWHTRAELVEHYIKDDAERAEALAIAIRHIARHRGWRNPYLSVDSLLTPQEPSKFLRGLNERVTQALGREFPADATPGQLICAYIDSPKYAETQGIRGDSGILSGKLHQFDNVGEIRKICEVQRLDHDVFKLLVRKVFFAKSPRGSAAGLVGHDQIPGQGKYIRAEKAHPDFQLFRIVAVLTNLRIREGKAERCLTPDELRGLVDYILEVQLKQQVTWADLADNLGIERTDLRGTARASFDGSPALRFPPTDVTAEKIMASKVKWLKDWWDKADSERRGFMVDALSNSGGSTGDNDIDDEVAALLEAATEDEQAELEKIQLPQGRAAYSLDSLRRLTKRMLEEGVDLHTARKEEFNVDDDWRPEPEPIEAPVGNPAVDRVLKQVARWLNMATDRWGVPDVINIEHTRDGLGSEKVARELLRESQKRQDLNQKDMDKMIRELGISGKARRSSLIKYQAIQRQNSMCLYCGTEIGFETAEMDHIVPRALSGSTNDRSNLAAVCRACNHQKGAVPFAVWATSGEAHAGVSLEDAIKRVRLWQKGPGMSPKQHKAFQNEVISRLKSRKPDEEFDGRSMESVAWMAVELRTRIDGYYRKVNSDSVPKVGIYRGQLTAEARKASGFENRVNLIGGKGKTRFDRRHHAMDALVIAMMNQSVSQTLALRVNMRESQRITGQEETWKNFYGKPGQASERFEKWREGMLRAVELFNIELAKNAIPFHENVRLRVGSSKVHDDTVRKFIHAKLGEALSVAMIDCAETPALWTALTRLPDFDPKDGLPEDLSREIYIHSRKITADEQLNFFNSPSACLKVRGGYVEIGSSIHHARVYRIDGKKTTYSMVRVFATDLVKMTHEDVFTTPLKPSTISMRTADPKIRKALADGTATQIGWLVEGDELQLETDKYSGGLIGEVLAEYPQLTSWRVAGFYGVTQLRLRPYMLAAEGIPSDASESLRKVIEGKGWLPAINALLSSGCVKVVRRNCLGEPRFNAKSSLPVSQLLR

SEQ ID NO: 56 - protein, 1120 aa, Actinomyces sp.
  REGION 1..1120: note = Actinomyces sp. oral taxon 848 str. F0332
MNAMKQYNAGIDVGINSVGFAAIEVDSKGLPLNILNNMVVLHDSGVDPGTAKTGATRLANSGTARRTRKLIARRRKRLQKLDRYIEVQGWPLVDFSSLPDPYTPWKIRAKLTQDRLEGEEQGRGLSIALRHMARHRGWRNPYEGVESLHSPKEASKQFKDLKDRVTKVSGVIFDEDATPAEVVCDIGLSPKQRLRSAPSAKYKEGATLADEPVGGKSKEGLLGGKLMQSDNANELRKIGIVQGLSNEKVNEIIDQVFASESPKGQAGKRAKKDELPGQEQYVRALRAHLAFQRFRIVAAVANLRILEAEPKHERLLSQSEKDKVIEFLMSADGDDGVTWSDVAEELGIERECLSGTAKRGADGERPSSFPPTNSTNISIVRSKVKPLIEWWRKASDDEQATLVTALSNADELTDDQPSAETVRQFLSSPDEQSQEKIDKISLPKGRAAYSVNSLERLTRRMLKDSVDLFEARKREFGVDNNWTPTPDSIGEPVGNPAVDRVLKIVNRWLLAVTRKWGPPKVVNIEHVRVGFTSAAQTRKYEEENKTNRERNLAILEELRDKFGTSGKIRREDITRFAALRRQNCQCAYCGEAITFFDCEMDHIVPRKGPGSTNTRNNLVAICERCNKSKSNMPFSLWAQNCDIPGVSVEAVIDRVRTWIKDPELNPKQYNNFKKDVIERLRKTVDDDAIDNRSIESVAWMATELADRIGSHFRTAGANTKVRVYRGWLTSEARKASGFEGKINLIGGRGKTRLDRRHHAMDAATIALMRQSVAQTLVERASIRESDRLRRVVSSSWKDYRGADRDKQFSYGSWLNSMNALAELFNRAIDADGIPVTQNLRLRLGNGEAHDATIRSLEKKRVGASWTIGEIDRASTPQLWLALTRQEDFDQNDGLPANASRELRVKNHWFHAEENVTLFPTKSAAIAVRGGYAEIGNTIHHARLYKLPGKKLTYGMIRVFAIDLLCAWHTDLFSSPLLPESISLRTAETKVRRAVEDGAAMYIGWLVDGDEIVLDPETKAFKSNKIGEYLCEFPGTKRWKVDGFPDKEKLRLRPLQLAGEGLPEDVSAGTEEILGPKGNGWRVAINALFKSSQLVVVRRTALGMVRKLSRRHLPLTTRLRG

SEQ ID NO: 57 - protein, 1114 aa, Actinomyces turicensis
  REGION 1..1114: note = Actinomyces turicensis ACS-279-V-Col4
MQFHFYMVYVTMKGMNDKDASQQLRYRVGIDVGTHSIGFCAVEVDESGMPIQLLNSMVHKHDSGIDPGGNDTATTRLAEAGVARRTRRLIRRRKKRLQELDAFIEECGWPLVDLATITDARSPWRIRAHLATEHIDDEAEQGKLLSIALRHMARHRGWRSPYARISSLHIQADPSEQLKALAQRVSEKTGISLTADQTPAQLISVYLDVFETGKLRGPEGILGGKLMQSDNANELRRIATVQGLDNDLLKKIIGFVFAAESPKGSAAKRVGKDVLPGAHGLRAEKAHPAFQQFRIVSIVQNLRIKEGTGLRALTSEETEIVVDFLNQAGLTEAPTWEEVADNLEIPRSHLKGTATEGFDGIAPSTRPPFDVTSQKILNGKLKKLSAWWKDADYDHRCAMVNALSNVGSDDEGSLADDDVREFLSDFTDEELEALDKVELPGGRAAYSVDSLEKLTNTMLSEGCDLHSARKIAFGVDDSWTPPAEPIGQPVGNPAVDRVLKQVARWISAATNQWGTPESVNIEHVRDALGSEKASREYQRSLQTRRIRNEKLFAEMRERLDIGGKPRRSELTRYLALQRQNCQCLYCGMPITYTDAEMDHIVPRKGAASTNTRENFAAVCRACNHQKSNLPFAVWAEKTERPGVSVKEAYKRVSDMRIEPGMNGRQMNEFRKAIRLRLTTKHADAEIDGRSLESVAWMANELRHRIEGFYRSAENDVTVRVFRGAVTAEGRRASGFESRVNLIGGKGKTRLDRRHHAMDALTIALMEPGIAQTIALRMNMRESQRVLGEQETWKSFTGGSDTARKRWEHWCEEMLRASELFNVFLAEDRIPICQNKRLRLGSSAVHKAIVQPFEASDKRIVSDAMPVELIDRASTPALWTALTRDPDFDPKEGLPANPSRTIRLHDKRLGPNETVEFFPTAAACLAIRGGYCEIGAGIHHARIFRISGKKTTYAMLRVYQCDLVRFQKENLLTVELPANTISVRTAVPKLREALAHGTAEQIGWLVVGDELKIDLSGFTTGQIETFNETYPQATRWEVTGFPTKTQLRLKPLLIASEGLADDVPDDIVKIVKGPGWWPAIDKLLKIGNVVLYRRDTHGKPRVVSHRSLPLSSKLQ

SEQ ID NO: 58 - protein, 1101 aa, Akkermansia muciniphila
MSRSLTFSFDIGYASIGWAVIASASHDDADPSVCGCGTVLFPKDDCQAFKRREYRRLRRNIRSRRVRIERIGRLLVQAQIITPEMKETSGHPAPFYLASEALKGHRTLAPIELWHVLRWYAHNRGYDNNASWSNSLSEDGGNGEDTERVKHAQDLMDKHGTATMAETICRELKLEEGKADAPMEVSTPAYKNLNTAFPRLIVEKEVRRILELSAPLIPGLTAEIIELIAQHHPLTTEQRGVLLQHGIKLARRYRGSLLFGQLIPRFDNRIISRCPVTWAQVYEAELKKGNSEQSARERAEKLSKVPTANCPEFYEYRMARILCNIRADGEPLSAEIRRELMNQARQEGKLTKASLEKAISSRLGKETETNVSNYFTLHPDSEEALYLNPAVEVLQRSGIGQILSPSVYRIAANRLRRGKSVTPNYLLNLLKSRGESGEALEKKIEKESKKKEADYADTPLKPKYATGRAPYARTVLKKVVEEILDGEDPTRPARGEAHPDGELKAHDGCLYCLLDTDSSVNQHQKERRLDTMTNNHLVRHRMLILDRLLKDLIQDFADGQKDRISRVCVEVGKELTTFSAMDSKKIQRELTLRQKSHTDAVNRLKRKLPGKALSANLIRKCRIAMDMNWTCPFTGATYGDHELENLELEHIVPHSFRQSNALSSLVLTWPGVNRMKGQRTGYDFVEQEQENPVPDKPNLHICSLNNYRELVEKLDDKKGHEDDRRRKKKRKALLMVRGLSHKHQSQNHEAMKEIGMTEGMMTQSSHLMKLACKSIKTSLPDAHIDMIPGAVTAEVRKAWDVFGVFKELCPEAADPDSGKILKENLRSLTHLHHALDACVLGLIPYIIPAHHNGLLRRVLAMRRIPEKLIPQVRPVANQRHYVLNDDGRMMLRDLSASLKENIREQLMEQRVIQHVPADMGGALLKETMQRVLSVDGSGEDAMVSLSKKKDGKKEKNQVKASKLVGVFPEGPSKLKALKAAIEIDGNYGVALDPKPVVIRHIKVFKRIMALKEQNGGKPVRILKKGMLIHLTSSKDPKHAGVWRIESIQDSKGGVKLDLQRAHCAVPKNKTHECNWREVDLISLLKKYQMKRYPTSYTGTPR

SEQ ID NO: 59 - protein, 1113 aa, Alcanivorax pacificus
  REGION 1..1113: note = Alcanivorax pacificus W11-5
MRYRVGLDLGTASVGAAVFSMDEQGNPMELIWHYERLFSEPLVPDMGQLKPKKAARRLARQQRRQIDRRASRLRRIAIVSRRLGIAPGRNDSGVHGNDVPTLRAMAVNERIELGQLRAVLLRMGKKRGYGGTFKAVRKVGEAGEVASGASRLEEEMVALASVQNKDSVTVGEYLAARVEHGLPSKLKVAANNEYYAPEYALFRQYLGLPAIKGRPDCLPNMYALRHQIEHEFERIWATQSQFHDVMKDHGVKEEIRNAIFFQRPLKSPADKVGRCSLQTNLPRAPRAQIAAQNFRIEKQMADLRWGMGRRAEMLNDHQKAVIRELLNQQKELSFRKIYKELERAGCPGPEGKGLNMDRAALGGRDDLSGNTTLAAWRKLGLEDRWQELDEVTQIQVINFLADLGSPEQLDTDDWSCRFMGKNGRPRNFSDEFVAFMNELRMTDGFDRLSKMGFEGGRSSYSIKALKALTEWMIAPHWRETPETHRVDEEAAIRECYPESLATPAQGGRQSKLEPPPLTGNEVVDVALRQVRHTINMMIDDLGSVPAQIVVEMAREMKGGVTRRNDIEKQNKRFASERKKAAQSIEENGKTPTPARILRYQLWIEQGHQCPYCESNISLEQALSGAYTNFEHILPRTLTQIGRKRSELVLAHRECNDEKGNRTPYQAFGHDDRRWRIVEQRANALPKKSSRKTRLLLLKDFEGEALTDESIDEFADRQLHESSWLAKVTTQWLSSLGSDVYVSRGSLTAELRRRWGLDTVIPQVRFESGMPVVDEEGAEITPEEFEKFRLQWEGHRVTREMRTDRRPDKRIDHRHHLVDAIVTALTSRSLYQQYAKAWKVADEKQRHGRVDVKVELPMPILTIRDIALEAVRSVRISHKPDRYPDGRFFEATAYGIAQRLDERSGEKVDWLVSRKSLTDLAPEKKSIDVDKVRANISRIVGEAIRLHISNIFEKRVSKGMTPQQALREPIEFQGNILRKVRCFYSKADDCVRIEHSSRRGHHYKMLLNDGFAYMEVPCKEGILYGVPNLVRPSEAVGIKRAPESGDFIRFYKGDTVKNIKTGRVYTIKQILGDGGGKLILTPVTETKPADLLSAKWGRLKVGGRNIHLLRLCAE

SEQ ID NO: 60 - protein, 1029 aa, Alicycliphilus denitrificans
  REGION 1..1029: note = Alicycliphilus denitrificans BC
MRSLRYRLALDLGSTSLGWALFRLDACNRPTAVIKAGVRIFSDGRNPKDGSSLAVTRRAARAMRRRRDRLLKRKTRMQAKLVEHGFFPADAGKRKALEQLNPYALRAKGLQEALLPGEFARALFHINQRRGFKSNRKTDKKDNDSGVLKKAIGQLRQQMAEQGSRTVGEYLWTRLQQGQGVRARYREKPYTTEEGKKRIDKSYDLYIDRAMIEQEFDALWAAQAAFNPTLFHEAARADLKDTLLHQRPLRPVKPGRCTLLPEEERAPLALPSTQRFRIHQEVNHLRLLDENLREVALTLAQRDAVVTALETKAKLSFEQIRKLLKLSGSVQFNLEDAKRTELKGNATSAALARKELFGAAWSGFDEALQDEIVWQLVTEEGEGALIAWLQTHTGVDEARAQAIVDVSLPEGYGNLSRKALARIVPALRAAVITYDKAVQAAGFDHHSQLGFEYDASEVEDLVHPETGEIRSVFKQLPYYGKALQRHVAFGSGKPEDPDEKRYGKIANPTVHIGLNQVRMVVNALIRRYGRPTEVVIELARDLKQSREQKVEAQRRQADNQRRNARIRRSIAEVLGIGEERVRGSDIQKWICWEELSFDAADRRCPYSGVQISAAMLLSDEVEVEHILPFSKTLDDSLNNRTVAMRQANRIKRNRTPWDARAEFEAQGWSYEDILQRAERMPLRKRYRFAPDGYERWLGDDKDFLARALNDTRYLSRVAAEYLRLVCPGTRVIPGQLTALLRGKFGLNDVLGLDGEKNRNDHRHHAVDACVIGVTDQGLMQRFATASAQARGDGLTRLVDGMPMPWPTYRDHVERAVRHIWVSHRPDHGFEGAMMEETSYGIRKDGSIKQRRKADGSAGREISNLIRIHEATQPLRHGVSADGQPLAYKGYVGGSNYCIEITVNDKGKWEGEVISTFRAYGVVRAGGMGRLRNPHEGQNGRKLIMRLVIGDSVRLEVDGAERTMRIVKISGSNGQIFMAPIHEANVDARNTDKQDAFTYTSKYAGSLQKAKTRRVTISPIGEVRDPGFKG

SEQ ID NO: 61 - protein, 1029 aa, Alicycliphilus sp.; identical to SEQ ID NO: 60

SEQ ID NO: 62 - protein, 1146 aa, Alicyclobacillus hesperidum
  REGION 1..1146: note = Alicyclobacillus hesperidum URH17-3-68
MAYRLGLDIGITSVGWAVVALEKDESGLKPVRIQDLGVRIFDKAEDSKTGASLALPRREARSARRRTRRRRHRLWRVKRLLEQHGILSMEQIEALYAQRTSSPDVYALRVAGLDRCLIAEEIARVLIHIAHRRGFQSNRKSEIKDSDAGKLLKAVQENENLMQSKGYRTVAEMLVSEATKTDAEGKLVHGKKHGYVSNVRNKAGEYRHTVSRQAIVDEVRKIFAAQRALGNDVMSEELEDSYLKILCSQRNFDDGPGGDSPYGHGSVSPDGVRQSIYERMVGSCTFETGEKRAPRSSYSFERFQLLTKVVNLRIYRQQEDGGRYPCELTQTERARVIDCAYEQTKITYGKLRKLLDMKDTESFAGLTYGLNRSRNKTEDTVFVEMKFYHEVRKALQRAGVFIQDLSIETLDQIGWILSVWKSDDNRRKKLSTLGLSDNVIEELLPLNGSKFGHLSLKAIRKILPFLEDGYSYDVACELAGYQFQGKTEYVKQRLLPPLGEGEVTNPVVRRALSQAIKVVNAVIRKHGSPESIHIELARELSKNLDERRKIEKAQKENQKNNEQIKDEIREILGSAHVTGRDIVKYKLFKQQQEFCMYSGEKLDVTRLFEPGYAEVDHIIPYGISFDDSYDNKVLVKTEQNRQKGNRTPLEYLRDKPEQKAKFIALVESIPLSQKKKNHLLMDKRAIDLEQEGFRERNLSDTRYITRALMNHIQAWLLFDETASTRSKRVVCVNGAVTAYMRARWGLTKDRDAGDKHHAADAVVVACIGDSLIQRVTKYDKFKRNALADRNRYVQQVSKSEGITQYVDKETGEVFTWESFDERKFLPNEPLEPWPFFRDELLARLSDDPSKNIRAIGLLTYSETEQIDPIFVSRMPTRKVTGAAHKETIRSPRIVKVDDNKGTEIQVVVSKVALTELKLTKDGEIKDYFRPEDDPRLYNTLRERLVQFGGDAKAAFKEPVYKISKDGSVRTPVRKVKIQEKLTLGVPVHGGRGIAENGGMVRIDVFAKGGKYYFVPIYVADVLKRELPNRLATAHKPYSEWRVVDDSYQFKFSLYPNDAVMIKPSREVDITYKDRKEPVGCRIMYFVSANIASASISLRTHDNSGELEGLGIQGLEVFEKYVVGPLGDTHPVYKERRMPFRVERKMN

SEQ ID NO: 63 - protein, 1052 aa, Aminomonas paucivorans
  REGION 1..1052: note = Aminomonas paucivorans DSM 12260
MIGEHVRGGCLFDDHWTPNWGAFRLPNTVRTFTKAENPKDGSSLAEPRRQARGLRRRLRRKTQRLEDLRRLLAKEGVLSLSDLETLFRETPAKDPYQLRAEGLDRPLSFPEWVRVLYHITKHRGFQSNRRNPVEDGQERSRQEEEGKLLSGVGENERLLREGGYRTAGEMLARDPKFQDHRRNRAGDYSHTLSRSLLLEEARRLFQSQRTLGNPHASSNLEEAFLHLVAFQNPFASGEDIRNKAGHCSLEPDQIRAPRRSASAETFMLLQKTGNLRLIHRRTGEERPLTDKEREQIHLLAWKQEKVTHKTLRRHLEIPEEWLFTGLPYHRSGDKAEEKLFVHLAGIHEIRKALDKGPDPAVWDTLRSRRDLLDSIADTLTFYKNEDEILPRLESLGLSPENARALAPLSFSGTAHLSLSALGKLLPHLEEGKSYTQARADAGYAAPPPDRHPKLPPLEEADWRNPVVFRALTQTRKVVNALVRRYGPPWCIHLETARELSQPAKVRRRIETEQQANEKKKQQAEREFLDIVGTAPGPGDLLKMRLWREQGGFCPYCEEYLNPTRLAEPGYAEMDHILPYSRSLDNGWHNRVLVHGKDNRDKGNRTPFEAFGGDTARWDRLVAWVQASHLSAPKKRNLLREDFGEEAERELKDRNLTDTRFITKTAATLLRDRLTFHPEAPKDPVMTLNGRLTAFLRKQWGLHKNRKNGDLHHALDAAVLAVASRSFVYRLSSHNAAWGELPRGREAENGFSLPYPAFRSEVLARLCPTREEILLRLDQGGVGYDEAFRNGLRPVFVSRAPSRRLRGKAHMETLRSPKWKDHPEGPRTASRIPLKDLNLEKLERMVGKDRDRKLYEALRERLAAFGGNGKKAFVAPFRKPCRSGEGPLVRSLRIFDSGYSGVELRDGGEVYAVADHESMVRVDVYAKKNRFYLVPVYVADVARGIVKNRAIVAHKSEEEWDLVDGSFDFRFSLFPGDLVEIEKKDGAYLGYYKSCHRGDGRLLLDRHDRMPRESDCGTFYVSTRKDVLSMSKYQVDPLGEIRLVGSEKPPFVL

SEQ ID NO: 64 - protein, 1361 aa, Anaerococcus tetradius
  REGION 1..1361: note = Anaerococcus tetradius ATCC 35098
MGNYYLGLDIGTNSVGWAVTDENYNIERFKKKNMWGIRLFDEAKTAESRRIHRQARRMRQRKIQRLNLLMELFDVEISKVDESFFIRKKESDLHYEDKSQDSRYALFNDKEFNDKDYHNKYPTIFHLIMDLIENDEKKDIRLLYLACHYLIKNRGHFIFEGQKFDVNSSLNNNINKLKSHLDQFYNICLDFDNDKLIEILVNQNLNISEKSKKIKELLRKTNLEVGIANLIAGGSIKLSNMFDDDELKNLDYNSLSFKNSNFDEGRELFEEVLEDRFELVEILKDIHDASVLETMLSSASISPDGGKYISSSMINSYNKHKRDLKLLKKIIKKYKKSEYDNIFRDENIKNNYLSYTRTGINKNKKVQAEDNTDSDGFYKYIVKILKDIKENDSDEDIKYILSEIDKKNFVPKQRTKENSVIPYQLREIELRKIIDNQSKYHKFLNEVDEKGISVKEKIISLLTFRIPYYIGPLNPSYNEEKNFTTSWVKRLAKGKVTPWNFEDMVDIDASREAFIENKLNKCSFLLDETVLPKDSLLYQEYMVLNELNNLKINGQSINTDLKKSIYEELFKKYKKVTRKRLISYIKEKENMSGDIVITGIDGDFKQGLKSYIAFKDIIGEKIDDDIYRKEVEKIIRDISLYGDDKSFIQKKIKNENKLDLSDDQISKIAKLKFKDWGRFSKKLLVGIKASDKNTGEIDNIIGFMRNYNYNIMQLMANVFTFKDEIEKLNSKYYTDEKINIDYLDDLYLSSPAKRMLWQSFQIVDEIKNIKNSDPKKIFIEMARSKEDKPTRKMSRKSRLEKLYTDSKKQFIKLFGPDEYDKLNNEIKNKSESDFRWDNLYLYYTQFGRCMYSLDPIDLEELSNKNLYDQDHIYPKSKIYDDSIENRVLVKKQLNLDKSNEYPIPDRVLNKDKNKLLAFWKMLNEKELIGDKKYARLIRKSPFTDEELGDFIARQLVETRQATKETANMLKRLCPDSKIVYVKAKNVSDFRRKFDILKCRSINDLHHAHDAYLNIVVGNVFDTKFTSNPLNFIKNNSKNRSYNLEKIYDYDVIRNEKIAWLAERKEENQDGSIATVLKNLSKNDIRVTRRTYIKCEDLFDENIVRKGNGKFPIKENNNKSDTNKYGGYSGIKNAYFVLLEDEKHNRILEAIPSFIYKKEKNGEKGSVINYLQNILGIKSAKILRDKIKIGSLLKIDKFPYNLAGKSGNGILISGGVQLILDKNTSKYIKKIENYKYKLDENKDYQINIFDKLSKEENIKLFDLFVDKFENSIYKNRVNIKLKEIKLARPKFEHLSIEEQIKTLTQMLILFGRENNAVNLEYIGLPKNTGKTKINKKINNKDIKIINQSITGLYETEEDLANI

SEQ ID NO: 65 - protein, 1552 aa, Anaerophaga sp.
  REGION 1..1552: note = Anaerophaga sp. HS1
MFSQRNNPYCELLQNVKQLYKEKFGKTNQVDNSIIYGFMKRILGLDLGTNSIGWALVENDENDRKGKIIGMGSRIIPMDMSELDNFNKGASISKTAERTRLRMTRRLRERHLLRRARLHRILNIMGFLPEHYRNSIDFIDKKGCFFEGQEPKIAYKPDKNSEQFCFLFTSSFHEMLEDFRKFQPELIQNRKKVPYDWTIYYLRKKALTQKISKEELAWIILNFNTKRGYYHLRGEDEDNQDNKKIKEFRALKVVNVTEREGANSSGKKWYDMELENGWVYSRQSNLPPNLEGKTIELIVSYTLDNNGNIKKDKNGKEKYSLSMPGEEDWNLVKIKTENDLKTSKKSVGEYIYDHLLKNPDQKIRGKLISTIERKFYKEELSRILKTQMNFYEELKNRELYQKCVEELYPNNKSHQQTLLQKDFIHLIVEDIIFYQRPLKSKRAFVNNCPLEYRVYVDKKSGELIKSGVKCIPKSHPLFQEFRLWQYVRNLRIYERERMVNGRLMVNVDVTNELLPDEEHIVRLFDLLNDRKSFKQDDVLRFVGIKSPKDRKRYSWNYPEDKELPGNETRHLILAWLKKVDGVPEDWLDPEKLKALWHLLYSVTDREEIIKGLHSFAKKYELPDTFVEHFKKIPRLEREYGSFSEKAIKKLLPLMRMGKYWKAEEIPADLLEKAQKIIDAEADDRISDEVREKLLHLKDISQLKGLPLWQASYLVYGRHSETGEVVKWRTSEDLEKYILQFKQHSLRNPVVEQVILEALRVVKDIWEHYGEGKEGFFNEIHVEIGRELKNPADKRKKITSQIQENENTNLRIKALLEELFNDPSVKNVRPYSPAQQEILRIYEDGVLNGQKEIPDDILKISKMARPSKSQLVKYKLWLEQKYRSPYTGEIIPLSQLFTSAYEIEHIIPQARYFDDSFSNKVICEAEVNREKGHQLAFEFITKRGGDEIELNFGKKVTILNVEEYQKFVKDHYGRSLRSLSKMRKLLMEDIPDDFIDRQLNDSRYISKVVRNLLSNIVRAEDENSLVSKHLITCTGGVTTRLKHEWGLNDVWNELITPRFVRLNKMGKEKFGEWINKKGKQVFQIQMPLELQKGFNKKRIDHRHHALDALVVACASRSHVNYLNNDSARANASETRYDLRNKLCYKDKTDSNGNYRWKFYKPWESFTEEAKNRLAGTVVSFKSNRRIMTRSSNRYFKWVDTSEGKKKKLVRQIKGDNQAIRKPLHKDTVLGKVSLRKEKKVSLSKAIDLWESIVDKPLKKRIQSLREQGYDKKLLLKYFKDRNNQFNGQDISRVNIYFFDNNLAARRVTLDASFNSEKRIDGITDSGIKKILYAHLQNEKYHGKKDEKGNEISPYELAFSPEGLEEMNANIKKLNGGKPHCPIYKVRLAETIGEKFKLGEKGNKNKKYVEAAKGTNLFFAVYVDEKGVRSFETIPFSVALERRKQKLAVVPEENENKEKLLFYLSPNDLVYVPDEDEKLIDYRQLSINPTRIYKMVSSSGTQCFFIPHFVASPIVQTMELGPNNKSERAWDGQMIKNVCYKLSVDRLGNVKIEK

SEQ ID NO: 66 - protein, 1515 aa, Anaerophaga thermohalophila
  REGION 1..1515: note = Anaerophaga thermohalophila DSM 12881
MKRILGLDLGTNSIGWALVESDEEQKSGKIQGIGSRIIPMDQNELDNFNKGNTVSQTAERTRLRMVRRLRERHLLRRERLHRVLKEIGFLPEHYLEQIDFTEKPGGFLPGKEPKIAYKPDNFKDKYDFLFQDSYHEMLSDFQDKNPEFIQKRKKVPQDWTIYYLRKKALTAKITKEELAWIILNFNQKRGYYQLRGEDEDVAKNTKKEEFHALKVVKVKEREDSEGASGKWYDIELENGWVYPRQSNIRPDWEGKILELIVTYNLDKDGNIKTDKEGNEKRSFRMPNKDDWTLRKKRTENEIEKSGKTVGEYIYDNLLDAPDLKIRGKLVSTIERKYYRSELEQILTAQKKYHPELSNSELFNKCISNLYPNNDIHRKALLSKDFVHLIINDIIFYQRPLKSKRSTVSNCPLEYRVYVDKVTGEKKKVPLKCIPKSHPLYQEFRLWQYVKNLRLFEKERFENGRLLTNVDVTEQFLPDEDKYVELFEFLNGRKTFKQDDILKFAGIKSAKDRVKYYWNYPQEKEYPGNETRYLIESRLKKIENVPDEWLNYEKIEELWHLLYSVTDKVEIEKGLQSFAAKYQLPDLFVEVFKGFPRMEREYGAFSKKAIKKLLPLMRMGKYWKLENINPDLIEKVQKIIDGEADDNINDGIRERFSEINEMSDLRGMPLWKASYLVYGRHSEAAEVIRWRTSADLDQYIKDFKQHALRNPIVEQVVLEALRVVKDVWNYFGEGREKFFDEIHVEIGRDLKNPADKRQKIANQIQENENTNLRIKALLVELFNDPEVQNVRPYSPVQQQLLKIYEDGVLNAERDIPDDIQKISRMANPTRNQLIRYKLWLEQKYRSPYTGEIIPLNKLFTSEYEVEHIIPRARYFDDSFSNKIISEAEVNRKKDRMLAFEFIKKLGGSTIDLNYGKKVSVLTVEEYQQFVKDHYGINPHSRLKMQKLLMDEIPESFIERQLNDSRYISKMVRNLLSNIVREENENSPVAKQLITCSGSITNTLKQEWGLNDVWNTIITPRFERLNKMGEQKYGEWVNKEGKPVFQIQMPLELQKGFNKKRIDHRHHALDALIVASATRSHVNYLSNEAAKTNAKDTRFDLRNRLCYKEKRGQNRNFTWRFYKPWNTFTEDAKNALNDIVVSFKSNHRVINKSTNRYFKWENLPGGMKKKRLVRQEKGDNWAIRQSLHKDTVLGKVSLRKVKPVSLSVALDSWNNIVDKALKKKIRSLKDQGYDKKLMLKYFKDRRNEYNGENISRVNVYYFDEEMAARRVDLDTSFNSEKRIEGITDSGIKKIIYAHLKNEKYHGQKDDKGKDISPYELAFSPEGIAEMNANIKQLNGGKPHCPIYKVRLAEPVGEKFQLGETGNKTEKLVEVAKGTNLFFGVYANDEGVRSFATVPFYLAVEREKQGLPAVPQENENGDQLLFWLSPNDLVYVPSEEDAHFANPKQIELDNSRIYKMVSSTGTQCFFIPHFVATPIVQTIELGPNNKSERAWDGQMIKKVCYKLSVDRLGNVEIE

SEQ ID NO: 67 - protein, 1168 aa, Azospirillum lipoferum
MARPAFRAPRREHVNGWTPDPHRISKPFFILVSWHLLSRVVIDSSSGCFPGTSRDHTDKFAEWECAVQPYRLSFDLGTNSIGWGLLNLDRQGKPREIRALGSRIFSDGRDPQDKASLAVARRLARQMRRRRDRYLTRRTRLMGALVRFGLMPADPAARKRLEVAVDPYLARERATRERLEPFEIGRALFHLNQRRGYKPVRTATKPDEEAGKVKEAVERLEAAIAAAGAPTLGAWFAWRKTRGETLRARLAGKGKEAAYPFYPARRMLEAEFDTLWAEQARHHPDLLTAEAREILRHRIFHQRPLKPPPVGRCTLYPDDGRAPRALPSAQRLRLFQELASLRVIHLDLSERPLTPAERDRIVAFVQGRPPKAGRKPGKVQKSVPFEKLRGLLELPPGTGFSLESDKRPELLGDETGARIAPAFGPGWTALPLEEQDALVELLLTEAEPERAIAALTARWALDEATAAKLAGATLPDFHGRYGRRAVAELLPVLERETRGDPDGRVRPIRLDEAVKLLRGGKDHSDFSREGALLDALPYYGAVLERHVAFGTGNPADPEEKRVGRVANPTVHIALNQLRHLVNAILARHGRPEEIVIELARDLKRSAEDRRREDKRQADNQKRNEERKRLILSLGERPTPRNLLKLRLWEEQGPVENRRCPYSGETISMRMLLSEQVDIDHILPFSVSLDDSAANKVVCLREANRIKRNRSPWEAFGHDSERWAGILARAEALPKNKRWRFAPDALEKLEGEGGLRARHLNDTRHLSRLAVEYLRCVCPKVRVSPGRLTALLRRRWGIDAILAEADGPPPEVPAETLDPSPAEKNRADHRHHALDAVVIGCIDRSMVQRVQLAAASAEREAAAREDNIRRVLEGFKEEPWDGFRAELERRARTIVVSHRPEHGIGGALHKETAYGPVDPPEEGFNLVVRKPIDGLSKDEINSVRDPRLRRALIDRLAIRRRDANDPATALAKAAEDLAAQPASRGIRRVRVLKKESNPIRVEHGGNPSGPRSGGPFHKLLLAGEVHHVDVALRADGRRWVGHWVTLFEAHGGRGADGAAAPPRLGDGERFLMRLHKGDCLKLEHKGRVRVMQVVKLEPSSNSVVVVEPHQVKTDRSKHVKISCDQLRARGARRVTVDPLGRVRVHAPGARVGIGGDAGRTAMEPAEDIS

SEQ ID NO: 68 - protein, 1068 aa, Bacillus cereus
  REGION 1..1068: note = Bacillus cereus BAG4X12-1
MRYVLGLDIGIASCGWAVINQEKERIEDLGVRIFDKAENPKDGKSLAAPRRDARSTRRTLRRKKHRMQRIKILLVKQGLLFKTELNHLYESATEFDVWNLRLDALERKLHPKEFARVLIHLAKRRGFKSNRKETTLSENGQILESISENQQIMEQQNYRTVGEMILKDKKFENHKRNKDGTYIGTVTRQQLQDEIQMIFHTQRLYKNDYATEEFESSYLEIWASQRPYASKDQIEKMIGYCTLEPKEKRTPKASWSFQYFVALQTINNLRLISKDKIEELSFEEKKQIMNLALEKPIVKYIDIRKLLSIPNDFQFNSLSYSADTVDTTLENKRCIELKEYHSINKVYKQVYGKNTPNLLPIDYDTIAYGLTIFKDDKDILEYLQNKYVNAKGKPIKNLAKKTYDDTFIQALLNLNFTKMGHLSFKALKNIIPFLEEGLSYDKACEKAGYNFKGTSYTERTKYLPVIPQNTNPVVHRALSQTRKVINAIIKKYGSPNAIHIETARELSKTFQERKEIDSRYQDNSKKNEHAIHKLKELGNINPSGINIVKFKLWSEQDGRCMYSGKYIEPHRLFEEGYTEVDHILPYSRSLDDSYNNKILTLGTENQRKGNKTPYEYMGNTSIWDEFETRVQSNKKINFKKQQKLLLQNFSYAREQEFIERNLNDTRYATIYLTSLIQQHLIFSESSSKKKVRTVSGIITSHLRSRWGFNKDRKEGHIHHALDAVIVAVTSNHMIQRVTKYYKLKELNKNLQAKQLPFPEPWEGFRLELEARISPNTQQYLKGIHFKNYADVNLSDIKPIFVSRMPKRSITGELHQETIRKFLGYNEKGKVLTAIKTKLEDIPFDANGDFPMYGKETDLYTYNAIKERYLSHEKDKRKSFQEPLYKPTKSGEIGPLIKSIKIMDTRTIVNPVNQGKGVVYNSKIARTDVFKKEDKYYLIPIYTIDLLKNILPHKAITAGKGYEDWTTIDSSFTFLFSLFPNDLIQIVPSKNKTIKARTTVSKKEILLPSLTGYFKGVHSGTAGITVETHDGSVIANVGSKQLLLFEKYQVDVLGHYTKIKEEKRMGMAI

SEQ ID NO: 69 - protein, 1078 aa, Bacillus cereus
  REGION 1..1078: note = Bacillus cereus BAG4X2-1
MRYVLGLDIGIASCGWAVINQEKERIEDLGVRIFDKAENPKDGKSLAAPRRDARSTRRTLRRKKHRMQRIKVLLVKHGLLSKTELDHLYESATEVDVWNLRLDALERKLYPKEFARILIHLAKRRGFKSNRKETTLSENGQILESISENQQIMEKQNYRTVGEMILKDKKFENHKRNKNGTYVGTVTRQQLQDEIQMIFHAQRLYKNDYATEEFESSYLEIWASQRPYASKDQIEKMIGYCTLEPKEKRAPKASWSFQYFVALQTINNLRLISKDRIEELSFEEKKQIMNLALEKSIVKYIDIRKLLSVPNEFQFNSLSYSADTVDTAVESRKCIELKEYHSINKVYKQIYGENALNLLPKYYDTIAYGLTIFKDDKDILEYLQNKYVNAKGKPISNFANKTYDDTFIQALLNLNFTKMGHLSFKALKNIIPFLEEGLSYDKACEKAGYNFKGTSYTEQTKYLPVIPQNTNPVVHRALSQTRKVINAIIKKYGSPNAIHIETARELSKTFQERKEIDSMYQDNSKKNEHAIHKLKELGNINPSGINIVKFKLWNEQDGRCMYSGKYIEPHRLFEEGYTEVDHILPYSRSLDDSYNNKTLTLGTENQRKGNKIPYEYMGNTSIWNDFETRVQSNKKINKKKQQKLLLQHFSYAREQEFIERNLNDTRYATIYLSSLIQQHLIFSESSRKKKVHTVSGIITSHLRSRWGFNKDRKEGHIHHALDAVIVAVTSDHMIQRVTKYYKLKELNRNLQAKRMPFPEPWEGFRLELEARISPNTQQYLKGLRFKNYADVNLSEIKSIFVSRMPKHSITGELHQETIRKFIGYNEKGKVLTAIKTKLEDIPFDANGDFPMYGKESDLYTYNAIKERYLSHKKDKRKSFQEPLYKPTKSGGIGPLIKSIKIMDTRTIVNPVNQGKGVVYNSKIARTDVFKKEEKYYLIPIYTIDLMKNILPQKAITAGKGYEDWTTIDPSFTFLFSLFPNDLIQIVPSKNKTIKARTTVSKKEVLLPSLTGYFKGVHSGTAGITVETHDGSVIANVGSKQLLLIEKYQVDVLGNYTKIKEEKRIGLTTYNDNKKIAAC

SEQ ID NO: 70 - protein, 1069 aa, Bacillus cereus
  REGION 1..1069: note = Bacillus cereus Rock1-15
MNYDIGLRIGITSCGWSIINKDLERIEDLGVRVFEKAENPDGTASAAPRREARKSRRKHRRKKHRIERIKRLIVQHDLLSKKELDSLYLSPFNIDVWNLQVEALERKLDNREFARVLIHLVQRRGFQTIRKSVEIQEEGKLLENVSENERIMKVNGYKTVGEMFSKHEKFTHHKRNKDGSYTSVVTRSLLLKEIKTIFNSQRILGNVFSTQKLESDYLYIWGSQRPTLTYEQLMSMVGNCIYEKKEKRAPKTSWAFQYFSLLQKINKLKVSDDNTLRKLSKEERDIVIELAFKKKNVSFVDIRKALKLNDNTKFNHLTYSHVVETKKVEKATFIELKGYHLIKKQLKDRNVELTQELQPKDYDAIAAASTFFKNDIEFRDYLRNQYLDSNGKRKSNIANKVFEDKVIAAVFELNFSKVCHLSFKSLYKLIPHLEKGLDYKEAILCAGYNFRDENKRDKKLFLPVIQQETNPVVHRALTQARKVINAIIREYGSPNTIRFVVANDLAKTYKQRKELESTLKKNRAENEKIKTKLLSMGIINPTGMDIVKYKLWYEQSGICLYTGRQMELSSLFKPGYSIVNHIIPYNRSFDDTYHNRVLTLTETKYEKGNKIPFEYFGAEETCWNEYEKRVSTSKKIHDKKREKLLIRNFDIEYENEMISNNVFDTHYIGSYFEKYIDEHLQFKKSTKKQKVFSIHGNMVAHLHSRWGFNKNSREIYLNHAVDAAIVAVLTDQLIRNIADYYRRDNILEQKGSLKFPEPWKSFSIELEARISPQVRDLIKKLNLDSYLDVDILHIKPVFISKKPRRKVNGEAHKSTIRSLIGINEIGKTVTCIKTRLEDIPFDENGDFPMYGKDTDKYTYTAIKERYLEFNKDKEKAFSTPLYKLKRNGEPGNQIKSVKIIDTRNIVNKVNQGKGIAYNSNIIRVDVFSRDQKYYVVPIYLRDFIKGSLPNKIITAAKGFMQWPETDNSYTFLFSIFPNDLIKVVPKEGKFIKAKNENKENINLTEILGYFKGLDSSTGAFTLESHDGSLLARGIGTKNLLLIEKYQVDVLGRYNKVGNEERQDIKIQQN

SEQ ID NO: 71 - protein, 1088 aa, Bacillus smithii
  REGION 1..1088: note = Bacillus smithii 7_3_47FAA
MNYKMGLDIGIASVGWAVINLDLKRIEDLGVRIFDKAEHPQNGESLALPRRIARSARRRLRRRKHRLERIRRLLVSENVLTKEEMNLLFKQKKQIDVWQLRVDALERKLNNDELARVLLHLAKRRGFKSNRKSERNSKESSEFLKNIEENQSILAQYRSVGEMIVKDSKFAYHKRNKLDSYSNMIARDDLEREIKLIFEKQREFNNPVCTERLEEKYLNIWSSQRPFASKEDIEKKVGFCTFEPKEKRAPKATYTFQSFIVWEHINKLRLVSPDETRALTEIERNLLYKQAFSKNKMTYYDIRKLLNLSDDIHFKGLLYDPKSSLKQIENIRFLELDSYHKIRKCIENVYGKDGIRMFNETDIDTFGYALTIFKDDEDIVAYLQNEYITKNGKRVSNLANKVYDKSLIDELLNLSFSKFAHLSMKAIRNILPYMEQGEIYSKACELAGYNFTGPKKKEKALLLPVIPNIANPVVMRALTQSRKVVNAIIKKYGSPVSIHIELARDLSHSFDERKKIQKDQTENRKKNETAIKQLIEYELTKNPTGLDIVKFKLWSEQQGRCMYSLKPIELERLLEPGYVEVDHILPYSRSLDDSYANKVLVLTKENREKGNHTPVEYLGLGSERWKKFEKFVLANKQFSKKKKQNLLRLRYEETEEKEFKERNLNDTRYISKFFANFIKEHLKFADGDGGQKVYTINGKITAHLRSRWDFNKNREESDLHHAVDAVIVACATQGMIKKITEFYKAREQNKESAKKKEPIFPQPWPHFADELKARLSKFPQESIEAFALGNYDRKKLESLRPVFVSRMPKRSVTGAAHQETLRRCVGIDEQSGKIQTAVKTKLSDIKLDKDGHFPMYQKESDPRTYEAIRQRLLEHNNDPKKAFQEPLYKPKKNGEPGPVIRTVKIIDTKNKVVHLDGSKTVAYNSNIVRTDVFEKDGKYYCVPVYTMDIMKGTLPNKAIEANKPYSEWKEMTEEYTFQFSLFPNDLVRIVLPREKTIKTSTNEEIIIKDIFAYYKTIDSATGGLELISHDRNFSLRGVGSKTLKRFEKYQVDVLGNIHKVKGEKRVGLAAPTNQKKGKTVDSLQSVSD

SEQ ID NO: 72 - protein, 1069 aa, Bacillus thuringiensis
MNYDIGLRIGITSCGWSIINKDLERIEDLGVRVFEKAENPDGTASAAPRREARKSRRKHRRKKHRIERIKRLIVQHDLLSKKELDSLYLSPFNIDVWNLRVEALERKLDNREFARVLIHLVQRRGFQTIRKSVEIQEEGKLLENVSENERIMKVNGYKTVGEMFSKHEKFTHHKRNKDGSYTSVVTRSLLLKEIKTIFNSQRILGNVFSTQKLESDYLYIWGSQRPTLTYEQLMSMVGNCIYEKKEKRAPKTSWAFQYFSLLQKINKLKVSDDNTLRKLSKEERDIVIELAFKKKNVSFVDIRKALKLNDNTKFNHLTYSHVVETKKVEKATFIELKGYHLIKKQLKDRNVELTQELQPKDYDAIAAASTFFKNDIEFRDYLRNQYLDSNGKRKSNIANKVFEDKVIAAVFELNFSKVCHLSFKSLYKLIPHLEKGLDYKEAILCAGYNFRDENKRDKKLFLPVIQQETNPVVHRALTQARKVINAIIREYGSPNTIRFVVANDLAKTYKQRKELESTLKKNRAENEKIKTKLLSMGIINPTGMDIVKYKLWYEQSGICLYTGRQMELSSLFKPGYSIVNHIIPYNRSFDDTYHNRVLTLTETKYEKGNKIPFEYFGAEETCWNEYEKRVSTSKKIHDKKREKLLIRNFDIEYENEMISNNVFDTHYIGSYFEKYIDEHLQFKKSTKKQKVFSIHGNMVAHLHSRWGFNKNSREIYLNHAVDAAIVAVLTDQLIRNIADYYRRDNILEQKGSLKFPEPWKSFSIELEARISPQVRDLIKKLNLDSYLDVDILHIKPVFISKKPRRKVNGEAHKSTIRSLIGINEIGKTVTCIKTRLEDIPFDENGDFPMYGKDTDKYTYTAIKERYLEFNKDKEKAFSTPLYKLKRNGEPGNQIKSVKIIDTRNIVNKVNQGKGIAYNSNIIRVDVFSRDQKYYVVPIYLRDFIKGSLPNKIITAAKGFMQWPETDNSYTFLFSIFPNDLIKVVPKEGKFIKAKNENKENINLTEILGYFKGLDSSTGAFTLESHDGSLLARGIGTKNLLLIEKYQVDVLGRYNKVGNEERQDIKIQQN

SEQ ID NO: 73 - protein, 1509 aa, Bacteroides coprophilus
  REGION 1..1509: note = Bacteroides coprophilus DSM 18228
MKKTLGLDLGTNSIGWAVINSNIDSEGKEKLVGISSCGSRIIPMDATTLGDFGKGNTKSPVAERTRLRGIRRLLERSLLRRERLHRVLSVMGFLPEHYASQLDRYGKFLPETEPKLAWYKDDSGRYQFLFQKSFHEMLEDFRQHQPELVAGEKKIPYDWTIYYLRKKALSQEITKEELAWILLNFNQKRGYYQLRGEEEQEENNKSVEYHALKVVSVEDSGERKGKDIWYNVTLENGWVYRRASNIPLDWTGKVKEFVVTTELDDAGNPKKDKEGNVKRSFRAPKEDDWGLLKTRTQAQIDESGKTVGTYIYESLLCMPNQKIRGKLVRTIERKYYKDELRQILVKQSEFHAALQDHNLLLSCIEELYPNNEAHRRLLSASSFIYFLIEDILFYQRPLKSQKGLIDNCPYESHIYKDKKDGSLHHVPLKCVSKSHPLFQEFRLWQFLSNLRIYQRERMMDGSLKLDVDVTREFLPSEEDYVKLFDWLNERKEISQKFLLAYKPFGLKKNEQANYRWNYVEDKSYPCNETRAEIKSRLSKAGVPEEFLTEEKEEALWHILYSISDKKELTKALGTFAAKNCLNESFVEVFAKIPPFESNYAAYSLKAIRKLLALMRMGKYWNEQAIDRQTRDRIEKILTGEYDETIRSRVREKAMLLTDISSFRGLPLWLACYIVYDRHSESKELVKWETPADIDHFLSKFKQNSLRNPIVEQVITESLRTVRDIWKQEGKIDEIHVELGREMKNPAKERARITAQVQENENTNLRIKALLAEFMNPEFEIENVHPYSPGQQEILRIYEDGVLSGIAEKDLPDDITAILKKFRENDVKKRPTTSEVLRYKLWLEQRYRSPYTGRVIPLGKLFTPAYEIEHVIPQSRYFDDSISNKVICESAVNKLKDNCLGYEFIKKHSGEMVELGNGETVPVFSVEEYERFVKESYFGNSKKMKKLLLEDIPDSFIERQLNDSRYISRVVTSLLSNLVCEEGEQDGLSKNVIVCTGGITDRLKKDWGVQEVWNRIILPRFLRLNEITGRTDFTSTSVNGHLLPALPLYLQKGFNKKRIDHRHHAMDAIVIACANRNIVNYLNNSSARKNSEISRYDLQRLLCEKVKTDANGNYKWILRKPWETFTQDVYAALTNIVVSFKQNLRVINRTTNYYQHYNEAGEKRMIPQTKGDRWAIRKPMHKDTVYGEVNLRKEKTLPLRDVVKNPSIVVDKSLKNKLYELLKSQYDLKAIAKYFETHQDVWADVNLKKIKVYYFTKETNERFFATRKSLDPSFDQKKIEEEVTDTGVQKILLHHLQQNNNDPDMAFSPDGIDRMNQNMTILNDGKWHQPIYKVRTYEKADKFAVGESGNKAKKFVEAAKGTNLFFAVYESVQEDEAIGKQVCKRTFATIPLNEVIKRKKQGLPAAPEDLNGNLPKFVLSPNDLVYLPTEEERNSSRIIQPLDRERIYKMVSSSGSQCFFIKVFVANSIWDKNEYSSLNKMERAITNEMIKEICVPIKIDRLGNVSLIQI

SEQ ID NO: 74 - protein, 1504 aa, Bacteroides coprosuis
  REGION 1..1504: note = Bacteroides coprosuis DSM 18011
MKKVLGLDIGTNSVGWAVVNQNDKGEFLSIEKIGSRIIPMSQDVMDKFGAGQTESSTAQRTQYRGVRRLRERSLLRRERLHRVLHILHFLPQHYDAAIGWNKKENKTYGKFLPGVEVNIPWVATDQGHQFIFMDSYAEMLKDLKQHQPHLFEKSSTPVPLDWTIYYLRKKALTQAISKEELAWILLNFNQKRGYYQLRGEEVEDNTKREEFYALKVVKVELDKDNTSAKTWYKVHLENGFIYPCPSDTPIDSWVGMVKDFIVTTTLEKDGSEKRTADGEIKRSFRAPKEDDWTLLKKKTESELEKSGKQVGAFIYDTLLSNPDQKIIGGLIKTIERKYYKKELEQILETQQKFIAELSDKKLFQACAEELYPLNDSHRENLLERDFKHLFVQDIIFYHRPLKTKKSLISNCTYEYRTFYKNGEKQISPIKCIAKSNPLFQEFRVWQFVQNLRILQRQRSEGDSIKYNVDVTAEFLKDENDIANLFTWLNERKVIKQDQLLKSYFKLKVNKETKELDYRWNYVDDKNKEYPCNATRTHILSFLEKCKEEKRIEDDRFVYSLWHLLYSVVEPIELRGALAKFAEREHLHPSFVDVFAQFPPLEKEYGSYSEKAIKRLLPLMRMGDYWHEDKIDVKTKQRIQRIIDGEADDDITHRSREKVENLRSITDFKGLPLWKAGYVVYNRHSESGELTKWKTPHELSNYIQNEFKQYSLRNPIVEQIVLETLRVVHDLWVKHGDFSEIHLELGRDIKNSSDKRKRMAERQQENENSRQRVLEMLIDLKKEAAFADLNPYSPSQQEKLRIVEDGVLRSNIEIPKDIEKITKSAKPTSRELTKYRLWLDQKYRSPYTGQPISLAQLFTSKYEIEHVIPQAKYFDDSFTNKVICESEVNKEKGSMLAHEFILKNGGSTVNVGGRQVQVLKNDAYVELINRLYGKNNPVKAKKLLAEDIDEVVGDFSERQLNDTRYISRVVQKLLSNIVREEDEQESTSKHVIGCSGQVTTALKKDWGLNDIWNKIIQPRFERLNEMTATEDYGVWQSPNHFQIRVPEEIQKGFTKKRIDHRHHAMDALVIACATRSHINYISNRSGQDRNAKFETTRTDLRSKLCYKENSSGNNYNYIFNKPWDTFTQDAHRALENIVVSHKQNLRVLTKTNNYTQFINKDGKKDLQKQVKGDHFAVRKPMHQETIYGRVSIRSIKEVALKKALENWKQIVDRTLKDKIRELIGAYGKYDAQTILKYFKDRDYKFNNLKINRVEVYEYDHNCAAVRKSIGDDLTIKQIERITDESIRKILMNHLSNYDDNLKEAFSPEGLMEMNKNIKELNGGKNHQPIYKVRLFEDLGSKFPLGVSHNNPDKYAIAAKGTNLFFGIYEDQEGKRMFDSIPLNIVIDRLKEKKSPVPETYNESKLKFHLSPNDLVYVPTDEEQKQPELVDVDHLSDEQKGRVYKAVSFTGNRAFFVNHRVSKVIHDYVEFGTKNKIENDDDKRSLKHICWKLKVNRLGEITDVKR

SEQ ID NO: 75 - protein, 1504 aa, Bacteroides dorei
  REGION 1..1504: note = Bacteroides dorei DSM 17855
MKNIVGLDLGTNSIGWAVVNGSVNDDGSEQLVKIQASGSRIIPMDAAMIGDFNKGNSISQTAERTRLRGVRRLSERYLLRRERLHRILDILGFLPFHFAQDLDRHGKIVKGKEPKLAWRKNEAGQFEFIFQDSFKEMLEDFKLNYPNLITDDKKVPYDWTIYYLRKKGLTSKISKEELAWILLNFNQKRGYYQLRGEEEEENKDKLVEFYALKVVAVEDSGEKKGKDIWYNVHLENGWVYRRTSNMSLDWVGKTKEFIVTTDLEKDGTPKKDKEGNVKRSFRAPKEDDWSLVKKKTEADIDQTHKTVGAYIYDTLLGNPSQKIRGRLVRTIERKYYKEELKLILEKQKEFHLELQDRALYAACIEELYPINEAHRNNVGNRDFTYLFLEDILFYQRPLKSKKSLIDNCPYEENQGLDKETGEIKSFPVKCIAKSHPLFQEFRLWQFIINLRIYRKDLAQDVDVTNELLKTEEDYVALFDWLNGKKEIDQKAFLKYPVFGLKKEIENYRWNYVQDKPYPCNETRSLMLARLEKCDISIEFLTKENEEALWHILYSVEDKNEIVKALQKFADKHDLNASFVDVFQKFPPFKKEYGSYSAKAIKKLLPLMRMGKYWSENSIDKGTRERIDKIITGEYDEKIENRVREKAIHLADVSDFKGLPLWLVCYIVYGRHSEAKEIIQWKSPADIDSYLRSFKQHSLRNPIVEQIIIETLRVVRDIWKQVGNIDEIHVELGREMKNPADKRKKMTQQMSENENTNLRIKYLLTEFLNPEYEVENVRPYSPSQQDILRIYEEGVLNSVSDLPEEISDILKKFTETDLKKRPSRSEVLRYKLWLEQKYRSPYTGEVIPLGKLFTPAYEIEHVIPQSYYFDDSFSNKVICEAEVNKLKSNLLGHEFIVKHHGEIVELPFGKKVRIFTVDEYEQFVKDNYSRTRSKMKKLLMDDIPEEFVTRQLNDSRYISKVVKSLLSNIVREKGEEEAISKNVIPCTGGVTDRLKKDWGINEVWNKIILPRFQRLNELTGTNKFTTKNVGIQEIPTMPLELQKGFNKKRIDHRHHAMDAIIIACANRNIINYLNNKSATAKAELSRYDLQKMLCDKAKTDNNGNYKWVIRKPWASFTQDTYLALENIIVSFKQNLRVINKATNRFLHYNEEGKKIFVKQGKGDNWAIRKSMHKDTVFGEVNLRRIKTVALNEAMKNPQSIVVKDFKRKLLELWNLGFDAKRIKKYFEDNRETWSDINLSKIEVYYFSKDTKDRFFATRKPLDTSFDRKKIENNITDTGIQKILLRHLELKDNNPDIAFSPDGIDEMNRNIIQLNNGKYHQPIIKIRWYEQADKFAVGQTGNKSSKFVEAAKGTNLFFAVYESNILDKKTNTIIKKRNYATIPLNVAIERQKQGLPVAPEDENGNDPIFVLSPNDLVYLPTDDELANGIIAQPLDRGRIYKMVSSSGEQCFFIKHIVANVLVDKFEFSPLNKMERALTGEMIKMICIPIKVDRLGNVLESSSSYKK

SEQ ID NO: 76 - protein, 1509 aa, Bacteroides eggerthii
  REGION 1..1509: note = Bacteroides eggerthii 1_2_48FAA
MKTILGLDLGTNSVGWAVINSVIKEQAERIWIEMAGSRIIPMDAAVLGDFDKGNSISQTSERTRLRGARRLRERQLLRRERLHKVLNILGFLPNHYLEYIDFEKHPGKFLADAEPKLAWVKDEQGKYTFLFQAAFDEMLADFAIHQPSLVSGDKKIPYDWTIYYLRKKALTEMISKEELAWILLNFNQKRGYYQLRGEEEEDNAGKSVEFYALKVLTVEATDEKKGRDVWYNVHLENGWIYRRSSSVPLDWEGQVKEFIVTTDLNPDGTPKLDKYGEVKRSFRAPKEDDWMLIKKRTEADIANTHKTVGAYIYDTLLQKPQQKIIGKLVKTVERKLYRDELSLILQKQCAFHAELQDRALYARCVEALYPSNEVRRKNIANRDFVYLLMDDILFYQRPLKTKKSLIANCPYEENEYVDRETGEIKKTPLKCIAKSHPLFQEFRLWNFLSNIRIYQKEKEINGTLHLDVDVTAEFLKTEDDYVALFDWLNSRKEIEQKTFLKYPKFGLKKEISNYRWNYVEDKQYPCNETRHAILSSLEKANVCIDFLSNEKEVALWHILYSVSDKQEIEKALRTFAAKNGLDESFVEAFKKFPPFKSEYGAYSAKAIKKMLPLMRCGKYWDVSSIDDTTKERIKKIVTGEYDERISVKVRDKVMNLSDISCFRRLPLWLACYIVYNRHSEDKEAVKWESPADIDAYLASFKQHSLRNPIVEQVITETLRVVRDIWKQVGRIDEIHIELGREMKNPADKRKRMTAQILENENANLRIKALLAEFMNPEYEIENVRPYSPSQQEILRIYEDTVLHAEDQLPEEIDAILKKFNSSKVPTKSEFLRYKLWLEQKYRSPYTGELIPLGKLFTAAYEIEHVIPQSRYFDDSFSNKVICESAVNKLKDNQLGYEFIKNHHGQKVEVGFGKSVEIFSVDSYERFVKEQYAKSAVKMKKLLMDDIPEQFIERQLNDSRYISKVIKGLLSNIVREKNDSGEYEPEAVSKNIVVCTGSVTDRLKRDWGMNDVWNSIVYPRFERLNSLTDTQSFGHWENKSGKKVFQTELPLEYQKGFSKKRIDHRHHAMDAIVIACATRNHVNYLSNESASRNAKISRYDLQRLLCDKNRTDDNGNYKWVIKKPWDTFTQDAREVLSKIVVSLKQNLRIINKTTNVYRHLDATGNRVYEKQKTGDSWAIRKPMHKDTVFGAVNLRKVKVVRLSVALDTPAMIVDKRVKNKVFELLSYKYDKKRIEKYFKENAFLWKELDLAKVAVYYFTEATTEPLVAVRKPLDSTFNEKKIKESVTDTGIQKILLNHLCTKEGKPDLAFSAEGIEEMNRNLLQLNNGKSHQPIYKVRVYEPRGNKFSVGVLGNKGTKWVEAAKGTNLFFAIYITEDGKRTYETIPLNVVIEREKQGLVPVPDRNKKGDKLLFWLSPNDLVYLPTEEEREFGRINEPIDRGRIYKMVSCTGNEGHFIPANVANPIVPVIELGSNNKAQRAWTNEMIKDICIPIKVDRLGHIIEVKYRIDE

SEQ ID NO: 77 - protein, 1526 aa, Bacteroides faecis
  REGION 1..1526: note = Bacteroides faecis MAJ27
MKKILGLDLGTNSIGWAVLNAADDNSLKYIEAAGSRIIPMDAAILGDFDRGNSISQTAERTRIRGMRHLRERYLLRRARLHRILNLLGFLPFHYAQDIDRYGNFSADMEPKIAWCKNLEGELEFIFIESFNEMLEDFRKNQPELVADNKKVPYDWVIYYLRKKALEKKISKEELAWILLNFNQKRGYYQLRGEDDDESMKTAKTRQYFDKQIIKNIIDTNQTYKGQRILIVELQNGDKGKIFKKEIPDWIGQEKNIIVTVDIDKDGNDKYEESGSLSCRFKIPTDAEWESEWKLIKMKTQKDLDESNKTVGTYIYDSILQNPTQKVRGKLVRTIERKYYKAELKQILEKQTEFHSELQDKDLYIECLNELYSNNDTHRNAITDRDFVYLFMNDILFYQRPLKSKKSLIDNCPYERNIYIDKETGEIKYSPIKCIAKSHPLFQEFRLWKFISSIRIYQRESVVEVVDKQLDLFSSQSTSVQKLVTDVDVTDKFLTCENDYVALFEWLNKKKIIDQKEFLKYRPFGLKGDIDNYRWNYVEDKSYPCNETHAMILTYFAKAGISEDILTKEMEEALWHILYSVEDRQEITKALRTFASKYHLSDSFVKVFSNIPPFKKEYGSYSAKAIKKLLSLMRMGKYWSEDAIDVNTRERIDKIVTGEYDEKIRDRVREKTIRLNDIRHFRALPDWLACYVVYDRHSETREITEWKSPEEIDEYIRNFKQHSLRNPIVEQVITETLRTVRDIWKQVGCIDEIHVELGREMKNPADKRKRITSQIIENENANLRVKALLTEFVNSEFEIENVRPYSLSQQDILRIYEDGVLNSVAEVPGDIAGILKKFNENDAKKRPTTSEILRYKLWLEQKYRSPYTGEMIPLSKLFTSAYEIEHVIPQSRYFDDSFSNKVICEAEVNKLKDNALGYEFIKKHHGEKVELGFGKIVEIFSVSVYEQFVKDNYSRNRGKMKKLLMDEIPEQFIERQLNDSRYISKVVKTLLSNVVREKAEQEAVSKNVIVCTGGVTDRLKKDWGINDVWNKIVLPRFLRLNELTNSTNFTAKNAAGNEIPAMPLELQKGFNKKRIDHRHHAMDAIVIACANRNIVNYLNNESASRKAKISRHDLQAILCDKVRTDDKGNYQWRVKKPWDTFTQDVYVALENIIVSFKQNLRVINKTSNYYWHYENGKKVLVKQVKGDSWAIRKPMHKDTVFGEVNLRKVKSVSLNEALKNPQFIVEKDLKRQLLSLLQQNFDIKKIKKYFEEHKDIWSDISLSKMNIYYFTKETKDRYFATRKPLDASFDKKKIESCITDTGIQQILLRHLELKENDPERAFSPDGIDEMNRNIIQLNKGKGHHPIAKVRVYEKADKFEVGQRGNKSSKFVEAAKGTNLFFAVYETEYPDEKTNSIVRKRNYATIPLNIAIERQKRGLSTAPEDEKGNVPSFVLSPNDLVYLPTSEDIVNGHITQPIDKSRIYKMVSSSGSQCFFIKHNIANIIVDKYEFSPLNKMERAISNEMIKEICIPVKVDRLGNIVKLGKSE

SEQ ID NO: 78 - protein, 1509 aa, Bacteroides fluxus
  REGION 1..1509: note = Bacteroides fluxus YIT 12057
MKTILGLDLGTNSVGWAVINSVIKEQAERIWIEMAGSRIIPMDAAVLGDFDKGNSISQTSERTRLRGVRRLRERQLLRRERLHKVLNILGFLPNHYLEYIDFEKHPGKFLSDAEPKLPWVKDEQGKYTFLFQAAFDEMLADFAIHQPSLVSGDKKIPYDWTIYYLRKKALTEMISKEELAWILLNFNQKRGYYQLRGEEEEDNAGKSVEFYALKVLTVEATDEKKGRDVWYNVHLENGWIYRRSSSVPLDWEGQIKEFIVTTDLNPDSTPKLDKYGEVKRSFRAPKEDDWMLIKKRTEADIANTHKTVGAYIYDTLLQKPQQKIIGKLVKTVERKLYRDELSLILQKQCAFHAELQDRTLYARCVEALYPNNEVQRRNIANRDFVYLLMDDVLFYQRPLKTKKSLIANCPYEENEYVDRETGEIKKAPLKCIAKSHPLFQEFRLWNFLSNIRIYQKEKEINGTLHLDVDVTAEFLKTEDDYVALFDWLNSRKEIEQKTFLKYPKFGLKKEISNYRWNYVEDKQYPCNETRHAILSRLEKANVCIDFLSNEKEVALWHILYSVSDKQEIEKALRTFAAKNGLDESFVEAFKKFPPFKSEYGAYSAKAIKKLLPLMRCGKYWDVSSIDDTTKERIKKIVAGEYDERIAVKVRDKVMNLSDISCFKRLPLWLACYIVYNRHSEDKEAVKWESPADIDAYLASFKQHSLRNPIVEQVITETLRVVRDIWKQVGRIDEIHIELGREMKNPADKRKRMTAQILENENANLRIKALLAEFMNPEYEIENVRPYSPSQQEILRIYEDMVLHAEDQLPEEIDAILKKFNSSKVPTKSEFLRYKLWLEQKYRSPYTGELIPLGKLFTAAYEIEHVIPQSRYFDDSFSNKVICESAVNKLKDNQLGYEFIKNHHGQKVEVGFGKSVEIFSVDSYERFVKEQYAKSAVKMKKMLMDDIPEQFIERQLNDSRYISKVIKGLLSNIVREKNDSGEYEPEAVSKNIVVCTGSVTDRLKRDWGMNDVWNSIVYPRFERLNSLTDTQSFGHWENKSGKKVFQTELPLEYQKGFSKKRIDHRHHAMDAIVIACATRNHVNYLSNESASRNAKISRYDLQRLLCDKSRTDDNGNYKWVIKKPWDTFTQDAREVLSKIVVSLKQNLRIINKTTNVYRHLDATGNRVYEKQKTGDSWAIRKPMHKDTVFGAVNLRKVKVVRLSVALDAPTMIVDKRVKNKVFELLSYKYDKKRIEKYFKENAVLWKELDLARVAVYYFTEATTEPLVAVRKPLDSTFNEKKIKESVTDTGIQKILLNHLCTKEGKPDLAFSAEGIEEMNRNLLQLNNGKRHQPIYKVRVYEPRGNKFSVGVLGNKGTKWVEAAKGTNLFFAIYITEDGKRTYETIPLNMVIEREKQGLAPVPDKNEKGDKLLFWLSPNDLVYLPTEEELEFGRINEPIDRGRIYKMVSSSGNQCFFIPQSISNAIIPTKELGANNKAERSWDGAMIKNICIPVKVDRLGRIIEVKYRINE

SEQ ID NO: 79 - protein, 1436 aa, Bacteroides fragilis
MKRILGLDLGTNSIGWALVNEAENKDERSSIVKLGVRVNPLTVDELTNFEKGKSITTNADRTLKRGMRRNLQRYKLRRETLTEVLKEHKLITEDTILSENGNRTTFETYRLRAKAVTEEISLEEFARVLLMINKKRGYKSSRKAKGVEEGTLIDGMDIARELYNNNLTPGELCLQLLDAGKKFLPDFYRSDLQNELDRIWEKQKEYYPEILTDVLKEELRGKKRDAVWAICAKYFVWKENYTEWNKEKGKTEQQEREHKLEGIYSKRKRDEAKRENLQWRVNGLKEKLSLEQLVIVFQEMNTQINNSSGYLGAISDRSKELYFNKQTVGQYQMEMLDKNPNASLRNMVFYRQDYLDEFNMLWEKQAVYHKELTEELKKEIRDIIIFYQRRLKSQKGLIGFCEFESRQIEVDIDGKKKIKTVGNRVISRSSPLFQEFKIWQILNNIEVTVVGKKRKRRKLKENYSALFEELNDAEQLELNGSRRLCQEEKELLAQELFIRDKMTKSEVLKLLFDNPQELDLNFKTIDGNKTGYALFQAYSKMIEMSGHEPVDFKKPVEKVVEYIKAVFDLLNWNTDILGFNSNEELDNQSYYKLWHLLYSFEGDNTPTGNGRLIQKMTELYGFEKEYATILANVSFQDDYGSLSAKAIHKILPHLKEGNRYDVACVYAGYRHSESSLTREEIANKVLKDRLMLLPKNSLHNPVVEKILNQMVNVINVIIDIYGKPDEIRVELARELKKNAKEREELTKSIAQTTKAHEEYKTLLQTEFGLTNVSRTDILRYKLYKELESCGYKTLYSNTYISREKLFSKEFDIEHIIPQARLFDDSFSNKTLEARSVNIEKGNKTAYDFVKEKFGESGADNSLEHYLNNIEDLFKSGKISKTKYNKLKMAEQDIPDGFIERDLRNTQYIAKKALSMLNEISHRVVATSGSVTDKLREDWQLIDVMKELNWEKYKALGLVEYFEDRDGRQIGRIKDWTKRNDHRHHAMDALTVAFTKDVFIQYFNNKNASLDPNANEHAIKNKYFQNGRAIAPMPLREFRAEAKKHLENTLISIKAKNKVITGNINKTRKKGGVNKNMQQTPRGQLHLETIYGSGKQYLTKEEKVNASFDMRKIGTVSKLAYRDALLKRLYENDNDPKKAFAGKNSLDKQPIWLDKEQMRKVPEKVKIVTLEAIYTIRKEISPDLKVDKVIDVGVRKILIDRLNEYGNDAKKAFSNLDENPIWLNKEKGISIKRVTISGISNAQSLHVKKDKDGKPILDENGRNIPVDFVNTGNNHHVAVYYRPVIDKRGQLVVDEAGNPKYELEEVVVSFFEAVTRANLGQPIIDKDYKTTEGWQFLFSMKQNEYFVFPNEKTGFNPKEIDLLDVENYGLISPNLFRVQKFSLKNYVFRHHLETTIKDTSSILRGITWIDFRSSKGLDTIVKVRVNHIGQIVSVGEY

SEQ ID NO: 80 - protein, 1436 aa, Bacteroides sp.
MKRILGLDLGTNSIGWALVNEAENKDERSSIVKLGVRVNPLTVDELTNFEKGKSITTNADRTLKRGMRRNLQRYKLRRETLTEVLKEHKLITEDTILSENGNRTTFETYRLRAKAVTEEISLEEFARVLLMINKKRGYKSSRKAKGVEEGTLIDGMDIARELYNNNLTPGELCLQLLDAGKKFLPDFYRSDLQNELDRIWEKQKEYYPEILTDVLKEELRGKKRDAVWAICAKYFVWKENYTEWNKEKGKTEQQEREHKLEGIYSKRKRDEAKRENLQWRVNGLKEKLSLEQLVIVFQEMNTQINNSSGYLGAISDRSKELYFNKQTVGQYQMEMLDKNPNASLRNMVFYRQDYLDEFNMLWEKQAVYHKELTEELKKEIRDIIIFYQRRLKSQKGLIGFCEFESRQIEVDIDGKKKIKTVGNRVISRSSPLFQEFKIWQILNNIEVTVVGKKRKRRKLKENYSALFEELNDAEQLELNGSRRLCQEEKELLAQELFIRDKMTKSEVLKLLFDNPQELDLNFKTIDGNKTGYALFQAYSKMIEMSGHEPVDFKKPVEKVVEYIKAVFDLLNWNTDILGFNSNEELDNQPYYKLWHLLYSFEGDNTPTGNGRLIQKMTELYGFEKEYATILANVSFQDDYGSLSAKAIHKILPHLKEGNRYDVACVYAGYRHSESSLTREEIANKVLKDRLMLLPKNSLHNPVVEKILNQMVNVINVIIDIYGKPDEIRVELARELKKNAKEREELTKSIAQTTKAHEEYKTLLQTEFGLTNVSRTDILRYKLYKELESCGYKTLYSNTYISREKLFSKEFDIEHIIPQARLFDDSFSNKTLEARSVNIEKGNKTAYDFVKEKFGESGADNSLEHYLNNIEDLFKSGKISKTKYNKLKMAEQDIPDGFIERDLRNTQYIAKKALSMLNEISHRVVATSGSVTDKLREDWQLIDVMKELNWEKYKALGLVEYFEDRDGRQIGRIKDWTKRNDHRHHAMDALTVAFTKDVFIQYFNNKNASLDPNANEHAIKNKYFQNGRAIAPMPLREFRAEAKKHLENTLISIKAKNKVITGNINKTRKKGGVNKNMQQTPRGQLHLETIYGSGKQYLTKEEKVNASFDMRKIGTVSKSAYRDALLKRLYENDNDPKKAFAGKNSLDKQPIWLDKEQMRKVPEKVKIVTLEAIYTIRKEISPDLKVDKVIDVGVRKILIDRLNEYGNDAKKAFSNLDKNPIWLNKEKGISIKRVTISGISNAQSLHVKKDKDGKPILDENGRNIPVDFVNTGNNHHVAVYYRPVIDKRGQLVVDEAGNPKYELEEVVVSFFEAVTRANLGLPIIDKDYKTTEGWQFLFSMKQNEYFVFPNEKTGFNPKEIDLLDVENYGLISPNLFRVQKFSLKNYVFRHHLETTIKDTSSILRGITWIDFRSSKGLDTIVKVRVNHIGQIVSVGEY

SEQ ID NO: 81 - protein, 1512 aa, Bacteroides nordii
  REGION 1..1512: note = Bacteroides nordii CL02T12C05
MKNILGLDLGTNSIGWAVINSEEDGPIVKKRIELAGSRIIPMDAAVLGNFDSGVTKSQTAERTSFRSIRRLRERQLLRRERLHKVLQILGFLPEHYVNDIDFENHPGKIKRNTEPKLPWRKNSMGQFEFIFQDSFEAMLTDFATHQPVFVSEGKKVPYDWTLYYLRKKALTEGISKEELAWLILNFNQKRGYYQLRGEEEEEQSNKLVEFYALRVVKVEATDDKKGKDTWYNVHLENGWIYRRTSNIPLDWEGKVKEFIVTTDLNEDGTPKLDKYGEVKRSFRAPKEDDWTLIKKKTESDIANSHKTVGCYIYDALLQNPHQKIKGRLVRTVERKFYKEELRLILEKQLSFHPELQDRDLYRACIDALYVSNEAHKNNISGRDFVYLFIDDIIFYQRPLKTKKSLIDNCPYEENQYMDRETGEVKQAPIKCIAKSHPLFQEFRLWQFISNIRIYQRERVLDDGKLETDVDVTPDFLKTEDDYTTLFEWFNDRKEVDQKAFLKNPQFGLKKTFTEYRWNYVEDKSYPCNETRNAILNGLQKAGVSADFLSREVEEALWHILYSVEDKIEIESALRKFASKHDLDDRFADVFKKLPPFKKEYGAYSAKAIKKLLPLMRIGKYWELSNIDDKTKERIDKIITGEWDENIHDRVREKAIKLSDITDFKGLPLWLSCYVVYNRHSEARAIAKWESPEDIDSYLRLFRQHSLRNPIVEQVITETLRTVRDIWKRVGQIDEIHVELGREIKNPADKRAKMTAQIVENENTNLRIKALLAEFINSEYEIENVRPYSSNQQEKLKIYEDTVLNGVKEIPEDINTILKKFRESDLKKRPTKSDFLHYKLWLEQKYCSPYTGRIIPLGKLFTSAYEIEHIIPQAHYFDDSFSNKVICEAEVNGLKDKKLGYEFIKHNPGKMVEIGFGKPPVRIFSVEEYERFVKENYSGIKNKMNKLLMDDIPETFIERQLNDSRYISKVVKSLLSNIVREKDSNGEYEPEAISKNVIVCTGSVTDRLKRDWGVNDVWNSIIYPRFERLNELTGSQQFGCWENKEGKRVFQTAVPLEMQKGFSKKRIDHRHHAMDAIVIACATRNHINYLSNESASKKAKISRTDLQRLLCTKCRTDDNGNYKWIVKKPWPAFTQDIRKALENITVSFKQNLRVINKTTNYYVHFDESGKKVLEKQINGDSWAIRKPMHKDTVFGKVNLQKVKEVRLSLALDTPKMIVDKKLKEKVLQLYSYKYDKKRIDKYFKENASLWKDLNLSKVAVYYFTNDSTEPLVAVRKPLDTSFNAKKIKESVTDTGIQKILLNHLSNNQDDPNLAFSPDGIDKMNKNLTALNDGKYHQPIYKVRVCEPQGNKFSVGTSGNKTSKYVEAAKGTNLFFAVYQTEDGKRSYETIPLNVVIEREKLGWTPVPENNNNGDKLLFWLSPNDLVYVPTADELNNGMRLDNMDKGRIYKMISCSGPQCFFIPQNVSNAIIPVIELGANNKAEKSWNNEMIKVVCVPIRVDRLGCITQINNQK

SEQ ID NO: 82 - protein, 1436 aa, Bacteroides sp.
  REGION 1..1436: note = Bacteroides sp. 2_1_16
MKRILGLDLGTNSIGWALVNEAENKDERSSIVKLGVRVNPLTVDELTNFEKGKSITTNADRTLKRGMRRNLQRYKLRRETLTEVLKEHKLITEDTILSENGNRTTFETYRLRAKAVTEEISLEEFARVLLMINKKRGYKSSRKAKGVEEGTLIDGMDIARELYNNNLTPGELCLQLLDAGKKFLPDFYRSDLQNELDRIWEKQKEYYPEILTDVLKEELRGKKRDAVWAICAKYFVWKETYTEWNKEKGKTEQQEREHKLEGIYSKRKRDEAKRENLQWRVNGLKEKLSLEQLVIVFQEMNTQINNSSGYLGAISDRSKELYFNKQTVGQYQMEMLDKNPNASLRNMVFYRQDYLDEFNMLWEKQAVYHKELTEELKKEIRDIIIFYQRRLKSQKGLIGFCEFESRQIEVDIDGKKKIKTVGNRVISRSSPLFQEFKIWQILNNIEVTVVGKKRKRRKLKENYSAIFEELNDAEQLELNGSRRLCQEEKELLAQELFVRDKMTKSEVLKLLFDNPQELDLNFKTIDGNKTGYALFQAYSKMIEMSGHEPVDFKKPVEKVVEYIKAVFDLLNWNTDILGFNSNEELDNQSYYKLWHLLYSFEGDNTPTGNGRLIQKMTELYGFEKEYATILANVSFQDDYGSLSAKAIHKILPHLKEGNRYDVACVYAGYRHSESSLTREEIANKVLKDRLMLLPKNSLHNPVVEKILNQMVNVINVIIDIYGKPDEIRVELARELKKNAKEREELTKSIAQTTKANEEYKTLLQTEFGLTNVSRTDILRYKLYKELESCGYKTLYSNTYISREKLFSKEFDIEHIIPQARLFDDSFSNKTLEARSVNIEKGNKTAYDFVKEKFGESGADNSLEHYLNNIEDLFKSGKISKTKYNKLKMAEQDIPDGFIERDLRNTQYIAKKALSMLNEISHRVVATSGSVTDKLREDWQLIDVMKELNWEKYKALGLVEYFEDRDGRQIGRIKDWTKRNDHRHHAMDALTVAFTKDVFIQYFNNKNASLDPNANEHAIKNKYFQNGRAIAPMPLREFRAEAKKHLENTLISIKAKNKVITGNINKTRKKGGVNKNMQQTPRGQLHLETIYGSGKQYLTKEEKVNASFDMRKIETVSKSAYRDALLKRLYENDNDPKKAFAGKNSLDKQPIWLDKEQMRKVPEKVKIVTLEAIYTIRKEISPDLKVDKVIDVGVRKILIDRLNEYGNDAKKAFSNLDKNPIWLNKEKGISIKRVTISGISNAQSLHVKKDKDGKPILDENGRNIPVDFVNTGNNHHVAVYYRPVIDKRGQLVVDEAGNPKYELEEVVVSFFEAVTRANLGLPIIDKDYKTTEGWQFLFSMKQNEYFVFPNEKIGFNPKEIDLLDVENYGLISPNLFRVQKFSLKNYVFRHHLETTIKDTSSILRGITWIDFRSSKGLDTIVKVRVNHIGQIVSVGEY

SEQ ID NO: 83 - protein, 1517 aa, Bacteroides sp.
  REGION 1..1517: note = Bacteroides sp. 20_3
MKKIVGLDLGTNSIGWALINAYINKEHLYGIEACGSRIIPMDAAILGNFDKGNSISQTADRTSYRGIRRLRERHLLRRERLHRILDLLGFLPKHYSDSLNRYGKFLNDIECKLPWVKDETGSYKFIFQESFKEMLANFTEHHPILIANNKKVPYDWTIYYLRKKALTQKISKEELAWILLNFNQKRGYYQLRGEEEETPNKLVEYYSLKVEKVEDSGERKGKDTWYNVHLENGMIYRRTSNIPLDWEGKTKEFIVTTDLEADGSPKKDKEGNIKRSFRAPKDDDWTLIKKKTEADIDKIKMTVGAYIYDTLLQKPDQKIRGKLVRTIERKYYKNELYQILKTQSEFHEELRDKQLYIACLNELYPNNEPRRNSISTRDFCHLFIEDIIFYQRPLKSKKSLIDNCPYEENRYIDKESGEIKHASIKCIAKSHPLYQEFRLWQFIVNLRIYRKETDVDVTQELLPTEADYVTLFEWLNEKKEIDQKAFFKYPPFGFKKTTSNYRWNYVEDKPYPCNETHAQIIARLGKAHIPKAFLSKEKEETLWHILYSIEDKQEIEKALHSFANKNNLSEEFIEQFKNFPPFKKEYGSYSAKAIKKLLPLMRMGKYWSIENIDNGTRIRINKIIDGEYDENIRERVRQKAINLTDITHFRALPLWLACYLVYDRHSEVKDIVKWKTPKDIDLYLKSFKQHSLRNPIVEQVITETLRTVRDIWQQVGHIDEIHIELGREMKNPADKRARMSQQMIKNENTNLRIKALLTEFLNPEFGIENVRPYSPSQQDLLRIYEEGVLNSILELPEDIGIILGKFNQTDTLKRPTRSEILRYKLWLEQKYRSPYTGEMIPLSKLFTPAYEIEHIIPQSRYFDDSLSNKVICESEINKLKDRSLGYEFIKNHHGEKVELAFDKPVEVLSVEAYEKLVHESYSHNRSKMKKLLMEDIPDQFIERQLNDSRYISKVVKSLLSNIVREENEQEAISKNVIPCTGGITDRLKKDWGINDVWNKIVLPRFIRLNELTESTRFTSINTNNTMIPSMPLELQKGFNKKRIDHRHHAMDAIIIACANRNIVNYLNNVSASKNTKITRRDLQTLLCHKDKTDNNGNYKWVIDKPWETFTQDTLTALQKITVSFKQNLRVINKTTNHYQHYENGKKIVSNQSKGDSWAIRKSMHKETVHGEVNLRMIKTVSFNEALKKPQAIVEMDLKKKILAMLELGYDTKRIKNYFEENKDTWQDINPSKIKVYYFTKETKDRYFAVRKPIDTSFDKKKIKESITDTGIQQIMLRHLETKDNDPTLAFSPDGIDEMNRNILILNKGKKHQPIYKVRVYEKAEKFTVGQKGNKRTKFVEAAKGTNLFFAIYETEEIDKDTKKVIRKRSYSTIPLNVVIERQKQGLSSAPEDENGNLPKYILSPNDLVYVPTQEEINKGEVVMPIDRDRIYKMVDSSGITANFIPASTANLIFALPKATAEIYCNGENCIQNEYGIGSPQSKNQKAITGEMVKEICFPIKVDRLGNIIQVGSCILTN

SEQ ID NO: 84 - protein, 1424 aa, Bacteroides sp.
  REGION 1..1424: note = Bacteroides sp. 3_1_19
MKRILGLDLGTNSIGWALVNEAETDEEVSSIIRLGVRVNPLTVDETQNFEKGKSITTNAERTLKRSMRRNLQRYKLRRDALVEFLKELGFITDETILSEQGNRTTFETCRLRAKAAEEEISLEELSRVLLMINKKRGYKSSRKVKKEEDGVLIDGMEIAKKLYEEDLTPGQLCSQLLESGKKVLPDFYHSDLQEELDRIWSVQKQFHPDVFCDAAKEEIKGKNRSQTWAILANYFVWKEEVVGWNDREAKNETIEKECKLVGLKRTTKGYELKKENYRWRAQALTEQLGLEEIAVVLQEINGQINASSGYLGAISDRSKVLYFNHQTVGQYQMAELDKNPHASLRNMVFYRQDYLDEFDRIWEKQAEFHKELTAELKKEIRDMIIFYQRRLKSQKGLISFCEFERLEIVVEKDGKKQTKVIGCKVIPRSHPLFQEFKVWQTLNDIKVLGREKKRNALSASESRALYPEEKEILARELAIKENMKKADVLKLLFENPQELDLNFKQIDGNRTGFSLFSAYSKMIEKYGYEPLDFKKPADEIIGQLRTIFTDLGWNTNLFTIDLTKEGKELEMQPYFRLWHLLYSFEGDNTSTGNGKLIEKIMQLCGVEKEYAVELASLSFQDDYGSLSAKAIKRILPYLKEGNLYDVACEYAGYRHSKSSLTKEEIENKVLKGKLEVLPKNSLRNPVVEKILSQMVNVINTIIDTYGKPDEIRVELARELKKSAKEREELTKAIAKSTREHEEIRKLLQDEFGMMNVSRNDIIRYKLYEELKDNGYKTLYSNQYIPKEKIFSKEIDIEHIIPQSRLFDDSLSNKTLEYKAINIEKGNKTAYDFVKEKYGEEGLQQYINRCESLFNDKKAKLRKLKMEQKDIPDGFIDRDLRNTQYIAKKALAMLNEICRRVVATTGSITDQLREDWQLVDVMKELNLPKYEALGFVETYEDKDGRKIKRIKDWTKRNDHRHHAMDALTVAFTKDAFIQYFNNKNAAQDSGNRNHTNIIGIKTRYFDKGRALPPIPLEQFRIEAKQHLEKLLVSIKAKNKVVTVNVNRTKKRKGENTKIQQTPRGQLHLETVYGSHKQYVTKIEKVNASFDAAKIATVSKRAYRNALLKRLETFGNDPKKAFTGKNALEKNPLYADKYQTIRVPEKVQTVEFETIYTIRKPVDPALNVDKVVDVKVRAILERRLKEYGGDPKKAFVNFWENPIWLNKEKGISIKRVSIRGINNAQSIHVKKDKNGNPIWDENGKQIPVDFVNTGNNHHVAIYRKPVLDKKGQVTFDEDGNLMYELDEVVVPFFEAVTRANLGLPIIDKDYRKSEGWQFLFSMKQNEYFVFPNEKTGFNPKEVDLLNPDNYAMISPNLFRVQTMSKVMYGNNVVRDYKFRHHLETTVKDMKELKDIAYKQYKTLSFGNSVVKIRINHIGQIVSVGEY

SEQ ID NO: 85 - protein, 1510 aa, Bacteroides sp.
  REGION 1..1510: note = Bacteroides sp. D2
MKRILGLDLGTNSIGWALVDSEEQRILGMGSRIIPMDQGVLDTFSGGNPVETQTAARTAYRGTRRLRERALLRRERLIRVLNMMKFLPEHYASQIDFEKRLGQFFDEKEPKLAWKQNDEGRFEFIFQQSFNEMIEEFKNKGVVREDKKIPYDWTIYYLRKKALSQEIEKEELAWILLNFNQKRGYYQLRGEEEEENPNKLVEYYSLKIVDVIADEKPNSKGDIWYSLHLENGWIYRRSSKIPLFGWKDKTRDFIVTTDLNDDGTVKKDKEGIEKRSFRAPSENDWVLLKKKTESDIEKSHKTVGAYVYETLLQNPMQKVRGKLVRTIERKFYKDELKQILEKQREFHPELRDEDLYNDCVRELYRSNETYQFILSKRDFVHLFLDDILFYQRPLRSQKSAIGDCILEFKTYKDKDGNNIKEYLKVISKSNPLYQEFRIWQWLYNLKIYRKEDDEDVTLQFIANIEDKEQLFDFLSNRKSIEQKPLLEYLIKAKGLKKQVKTEAYRWNYVEDKIYPCSETKTMISTRLAKVENIPDNFFTKEIEQKLWHIIYSVTDKNEFEKALRTFAKKYDLDIASFVDNFKKIPPFKNEYGSFSEKAIKKLLPLMRLGKYWKWNDIDNNTQNRISKIITGEYDEEIKDIVREKSIALTNENDFQGLQLWLAQYLVYGRHSEADIAGKWHSVADLEKYLNEFKQHSLRNPIVEQIITETLRVVRDIWRKYGQGAENFFSEIHVELGRDMKNTADERKKIVNVVTENENTNLRIKALLMELKNNSDGKLEVENVRPYSPTQQDILKIYEEYAISTGLDNEKDEKVKEDIKKISRVAQPTTTELQRYKLWLEQKYCSPYTGKVIPLGKLFTEEYQIEHIIPKSRYYDDSFSNKVICEAAVNKLKDKCLGLEFIKNYHGQIVETGFGQKVTIFDEEAYQNFVKQHYAYNRSKRTKLLLEEIPEKMIERQMNDTRYISKFVLPLLSNLVRAEENDNGVNSKNVLPVNGKITTMLKQDWGLNDVWNDLILPRFVRMNELAKTIAFTSWNEQHQKYLPTVPLELSKGFQKKRIDHRHHAMDALVIACATRDHVNLLNNKHANTDTIRYDLQRKLRLFERVTYIDPQTKNNVTKDIPKEFKKPWDNFTVDARNELEKIIVSFKQNLRIINKATNIYTKYENGKKIKVGQKGLNWAIRKPLHKETVFAKVSLRKRKTVRLSEALKDWKKIVDKKLKQEIKRLTCQYGKFDVDTILRYFKDRKYQFGEVDVSKVKMYYFDEENAAVRKNVDTSFTEKFIQGSVTDTGIQKILLNHLEAKGNKVEIAFSPEGIEEMNKNIIQLNEGKLHLPIFKVRVYETIGNKFSVGVKGNKKDKYVEAAKGTNLFFAIYVDENGIRSYETIPLNIVIERLKQGLSVVPEKNRKEHSLLFYLSPNDLVYVPIEDERENIHAVNLDQLNNEQRKRIYKMVSCTGSECHFVPYYVASPIVNKVEYSSLNKIGRSLTGEMIKDVCIKLKVDRLGNVKGISGL

SEQ ID NO: 86 - protein, 1436 aa, Bacteroides sp.
  REGION 1..1436: note = Bacteroides sp. D2
MKRILGLDLGTNSIGWALVDEAENKDERSSIVKLGVRVNPLTVDELTNFEKGKSITTNADRTLKRGMRRNLQRYKLRRETLMEVLKEHKLITEDTILSENGNRTTFETYRLRAKAATEKISLEEFARVLLMINKKRGYKSCRKAKGAEEGTLIDGMDIARELYNNNLTPGELCLQLLDAGKKYLPDFYRSDLQNELDRIWEKQKEYYPEILTEVLKEELRGKKRDAVWAICAKSFVWEEYYTEWNKEKGKTEQQEREHKLEGIYSKRKRDEAKRENLQWRVNGLKEKLSLEQLVIVLQEMNIQINNSSGYLGAISDRSKELYFNKQTVGQYQMEMLDKNPNASLRNMVFYRQDYLDEFNTLWEKQAEYHKELTGELKKEIRDIVIFYQRRLKSQKGLVGFCEFESRQIEVEIDGKKKIKTVGNRVIPRSSPLFQEFKIWQILNNIEVTVVGKKGKRRKQKDNSPTLFDGLDDTEQLELNGSRYLYQEEKELLAQELFVRDKMTKSDVLKLLFDNPQELDLNFKTIDGNKTGYTLFQAYSKMIEMSGHEPVDFKKTVEKVVEHVKAVFDLLNWNTDILGFNSNEELDNQSYYKLWHLLYSFEGDNTPTGNARLVQKITELYGFEKEYAIILANVTFQDDYGSLSAKAIHKILPHLKEGNRYDVACAYAGYKHSESSLTKEEIANKALKDRLTLLPKNNLRNPVVEKILNQMVNVINAIIDTYGKPDEIRVELARELKKNAKEREELTKFIAETTRKHEEFKILLQSEFGLTNVSRTDILRYKLYKELESCGYKTLYSNTYIPREKLFSKEFDIEHIIPQARLFDDSFSNKTLEARSINLEKGNKTAYDFVKEKFGESGADNSLDHYLNNIEDLFKSGKISKTKYNKLKMAEQDIPDGFINRDLRNTQYIAKKALSMLNEISRRVVATSGTITDKLRQDWQLVDVMKELNWEKYKALGLVEYFEDKDGRQIGRIKDWTKRNDHRHHAMDALTVAFTKDIFIQYFNNKNASLNSNTNEYAIKNKYFQNGRAIAPIPLREFRVEAKKHLENTLISIKAKNKVVTGNINKTKKRGGVNKYLQQTPRGQLHLETIYGSGKQYLTKEEKVNASFDMKKIATVSKSAYRDVLLKRLHENDNDPKKAFTGKNSLDKQPIWLDKEQTRKVPEKVKTVTLETIYTVRKEISPDLKVDKVIDAGVRKILTGRLNEYGNDAKKAFSNLDENPIWLNKEKGISIKRVTISGISNAQSLHVKKDKDGKPILDEDSRNIPVDFVNTGNNHHVAVYRRPVIDKRGQLVIDEAGNPKYELEEVVVSFFEAVTRANLGQPIIDKDYKTSEGWQFLFSMKQNEYFVFPNEKTGFNPKEIDLLDAENYGVISPNLFRVQKFAHKNYVFRHHLETTIKDTSSILKGITWIDFRSSKGLDAIVKVRVNHIGQIVSVGEY

SEQ ID NO: 87 - protein, 1508 aa, Bacteroides uniformis
  REGION 1..1508: note = Bacteroides uniformis CL03T00C23
MRTILGLDLGTNSIGWAVINSVIKEQTERIWIEMAGSRIIPMDAAILGDFDKGNSISQTAERTRFRGVRRLRERQLLRRERLHKVLKILGFLPEHYLKGIDFEKHTGKFLSGSEPKLPWVKDRWGKYSFLFQTAFNEMLADFAKHQPSLVFDGKKIPYDWTVYYLRKKALTEMISKEELAWILLNFNQKRGYYQLRGEEEEDNAGKSVEFYALKVLSVEATDEKKGRDIWYNVHLENGWVYRRSSNVPLDWEGRVKEFIVTTDLNPDGTPKLDKYGEVKRSFRAPKEDDWMLIKKRTEADITGTHKTIGSYIYDALLQEPQQKIIGKLVKTVERKFYKEELNFILQKQCAFHAELQDRDLYMRCIEALYPGNEVQRRNIANRDFIYLLIDDVLFYQRPLKTKKSLIANCPYEENEYVNRKTGEIKTAPLKCIAKSHPLFQEFRLWYFLSNIRVYQKEREVNGTLHLDVDVTTEFLKTEDDYVALFDWLNSRKEIDQKAFLRYPAFGLKKEINNYRWNYVEDKFYPCNETRHAILSRLEKAGIGIDFLSDEKETALWHILYSVSDKQEIEKALATFAVKNGLNESFVEVFKKFPPFKSEYGAYSAKAIKKLLPLMRCGKYWDMSLIDGTTKERIERIIAGECDESIGAKVREKAMNLSDISCFKRLPLWLACYVVYNRHSEDKEITKWETPADIDAYLAAFKQHSLRNPIVEQVITETLRVVRDIWKQVGKIDEIRIELGREMKNPADKRKRMTTQILENENANLRIKALLAEFVNPEYGVENVRPYSPSQQEILRIYEDAVLKGEEQIPEDIDVILKKFNTSKLPTKSEFLRYKLWLEQKYRSPYTGELIPLAKLFTAAYEIEHVIPQSRYFDDSFSNKVICESAVNKLKDNQLGYEFIKNHHGQKVEVGFGKTVEIFSVDSYERFVKEQYAKSGIKMKKLLMDDIPEQFIERQLNDSRYISKVVKGLLSNIVREKNDSGEYEPEAVSKNILVCTGSVTDRLKKDWGMNDVWNSIVSPRFERLNALTETQCFGHWENKDGKKVFQTAVPLEYQKGFSKKRIDHRHHAMDAIVIACATRNHVNYLNNESASRNAKISRYDLQRLLCDKSRGDGNGNYRWIIKKPWTTFTQDAREALSGIIVSLKQNLRIINKTTNIYQHFDANGTRVYEKQKIGDSWAIRKPMHKDTVFGAVNLRKVKVVRLSVALDTPSMIVNKRVKNKVLELLSYKYDKKKIEKYFKENAFLWKELDIAKVAVYYFTENTTEPLVAVRKSLDSTFNEKKIASVTDTGIQKILLNHLKSKEGKAELAFSAEGIEEMNRNLLQLNDGKGHQPIYKVRVYEPRGNKFKVGVLGNKGAKWVEAAKGTNLFFAIYITEDGNRTYETIPLNWVIEREKQGLVPVPDRNEKGDKLLFWLSPNDLVYLPTEEERDFGRINEPIDRGRIYKMVSSSGNQCFFIPQSISNAIISTKELGSNNKAEKSWDGEMIKNICIPVKVDRLGRIIEVKYRVNE

SEQ ID NO: 88 - protein, 1504 aa, Bacteroides vulgatus
  REGION 1..1504: note = Bacteroides vulgatus CL09T03C04
MKNIVGLDLGTNSIGWAVVNGSVNDDGSEQLVKIQASGSRIIPMDAAMIGDFNKGNSISQTAERTRLRGVRRLSERYLLRRERLHRILDILGFLPFHFAQDLDRHGKIVKGKEPKLAWRKNEAGQFEFIFQDSFKEMLEDFKLNHPNLITDDKKVPYDWTIYYLRKKGLTSKISKEELAWILLNFNQKRGYYQLRGEEEEENKNKLVEFYALKVVAVEDSGEKKGKDIWYNVHLENGWVYRRTSNMPLDWVGKTKEFIVTTDLEKDGTPKKDKEGNVKRSFRAPKEDDWSLLKKKTEADIDQTHKTVGVYIYDTLLGNPSQKIRGRLVRTIERKYYKEELKQILEKQKEFHLELQDRALYAACIEELYPINEAHRNNVGNRDFTYLFLEDILFYQRPLKSKKSLIDNCPYEENQGLDKETGEIKSFPVKCIAKSHPLFQEFRLWQFIVNLRIYRKDLAQDVDVTNELLKTEEDYVALFDWLNGKKEIDQKAFLKYPVFGLKKEIENYRWNYVQDKPYPCNETRSLMLARLEKCDISIEFLTKENEEALWHILYSVEDKNEIVKALQKFADKHDLNASFVDVFQKFPPFKKEYGSYSAKAIKKLLPLMRMGKYWSENSIDKGTRERIDKIITGEYDEKIENRVREKAIHLADVSDFKGLPLWLVCYIVYGRHSEAKEITQWKSPADIDSYLRSFKQHSLRNPIVEQIIIETLRVVRDIWKQVGNIDEIHVELGREMKNPADKRKKMTQQMSENENTNLRIKYLLTEFLNPEYEVENVRPYSPSQQDILRIYEEGVLNSVSDLPEEISDILKKFTETDLKKRPSRSEILRYKLWLEQKYRSPYTGEVIPLGKLFTPAYEIEHVIPQSCYFDDSFSNKVICEAEVNKLKSNLLGHEFIVKHHGEIVELPFGKKVRIFTVDEYEQFVKDNYSRTRSKMKKLLMDDIPEEFVTRQLNDSRYISKVVKSLLSNIVREKGEEEAISKNVIPCTGGVTDRLKKDWGINEVWNKIILPRFQRLNELTGTNKFTTKNVGIQEIPTMPLELQKGFNKKRIDHRHHAMDAIIIACANRNIINYLNNESATAKAELSRYDLQKMLCDKAKTDNNGNYKWVIRKPWASFTQDTYLALENIIVSFKQNLRVINKATNRFLHYNEEGKKIFVKQGKGDNWAIRKSMHKDTVFGEVNLRRIKTVALNEAMKNPQSIVVKDFKRKLLELWNLGFDAKRIKKYFEDNRETWSDINLSKIEVYYFSKDTKDRFFATRKPLDTSFDRKKIENNITDTGIQKILLRHLELKDNNPDIAFSPDGIDEMNRNIIQLNNGKYHQPIIKIRWYEQADKFAVGQTGNKFSKFVEAAKGTNLFFAVYESNILDKKTNTIIKKRNYATIPLNVAIERQKQGLPVAPEDENGNDPIFVLSPNDLVYLPTDDELANGIIAQPLDRGRIYKMVSCTGNEGHFIPARIANPILQTIELGSNNKAQKAWTDEMIKEICMPIKVDRLGNVLESSSSYKK

SEQ ID NO: 89 - protein, 1434 aa, unidentified
  REGION 1..1434: note = Description of Unknown: Bacteroidetes oral taxon 274 str. F0058 polypeptide
MKNILGLDLGTNSIGWAYVKQAQNDSEKSEIAELGVRVNPLTVDEKTNFEKGKPISTNADRTLKRGARRNLQRYKLRRQELIELLKDYQVISDKTILAEDGKETTFETLRLRVKSAKEQVSLEELARILLMINKKRGYKSSRKAKNEDEGQLIDGMEIARRLYDENLTTGQLSLQLLKEGKKSLPDYYRSDLQHELDKVWNFQKQFHPDILTDEFYTSIQGKGQKATRESFSSKYGIDTAENKGSREEKKLQAYQWRADATHKELTKEELAFVITEINNNINNSSGYLGAISDRSKELIFANETVGEYLWKQIQNDPHTSLKNQVFYRQDYFDEFERIWETQSGFYPQILTESLKNELRDILIFYQRKLKSQKALVSICEFESKEIPLKDKQGNPISKNGIPVTKLVGPKVAPKSSPLFQEFKIWQNLNNVLVRPKGSRKRKVTTNQQSTLLEGQEPVFELNLEQKELLFEELNLKGNLKTDYCLELIGYSAKEWEMNYPTLEGNKTNKALYEAYLKIIDSEGYDAKKLLKVKTDKDDINLDDIKVSASEIKTMISDIFNELGINTKILDFDAELERKQFEAQASYRLWHLLYSYEGDDSKSGNELLYRLLEDKFGFKREHSKTLANVSLLSDYGNLSTKAIRTIYPYIKENKFSTACELAGYRHSKLSISKEENENRTLKDTLDVLKKNSLRQPVVEKILNQMINLINELIEKHSEKDEKGNIVKYFKFDEIHIELARELKKNAEERRELDSKVREGKDRNEKIITILKSEFGLPYPTKNDITRYRLYEELKDNGYKDLYTNTYIPREKLFSKEIDIEHIIPKSRLFNDSFSNKTICYRQDNLNKGERTAYDYIEGLGKTQLDEYLNRVENLYTNKFITKAKYRNLLKKESEIGDGFIERDLRETQYIAKKAKEMLLQITRHVVSTTGSITDRLRDDWELVNVMRELNLPKYKVLGLTEIQERKNGQTVEVITDWTKRNDHRHHAMDALTVAFTKHSHIQYLNFLNARKDEKHKEYSNIMGIQQLETEKTTDKDGKDRRVFKTPIPNFRQVAKEHLESILISHKTKNKVVTRATNKIAGSKKQQETLSPRGQLHKETVYGKYRRYVQKEEKIGSKFDLQTIERVANPLYKRLLTKRLEENGGDPKKAFTGKNALAKSPIYLDETQTQQLPEKVKLVWLETDFSIRKDITPDNFKDEKSIDKVLDEGIKRILKDRLKSFDGDAKRAFTDLEQNPIWLNKEKGIAIKRVTISGVSNAEPLHTKKDHLGNEIFDDTGKPIPVDYVSTGNNHHIAIYRDENGNLQEKAVSFFEAVTRANQGLPTVDKTYNQHLGWQFLFTMKQNEMFVFPNKETGFDPQEIDLLDPKNKKLISPNLFRVQKISTKNYFFRHHLETSVETHNALNGVTYKSQLGLNGITDIIKVRINHLGDIVHIGEY

SEQ ID NO: 90 - protein, 1153 aa, Barnesiella intestinihominis
  REGION 1..1153: note = Barnesiella intestinihominis YIT 11860
MKNILGLDLGLSSIGWSVIRENSEEQELVAMGSRVVSLTAAELSSFTQGNGVSINSQRTQKRTQRKGYDRYQLRRTLLRNKLDTLGMLPDDSLSYLPKLQLWGLRAKAVTQRIELNELGRVLLHLNQKRGYKSIKSDFSGDKKITDYVKTVKTRYDELKEMRLTIGELFFRRLTENAFFRCKEQVYPRQAYVEEFDCIMNCQRKFYPDILTDETIRCIRDEIIYYQRPLKSCKYLVSRCEFEKRFYLNAAGKKTEAGPKVSPRTSPLFQVCRLWESINNIVVKDRRNEIVFISAEQRAALFDFLNTHEKLKGSDLLKLLGLSKTYGYRLGEQFKTGIQGNKTRVEIERALGNYPDKKRLLQFNLQEESSSMVNTETGEIIPMISLSFEQEPLYRLWHVLYSIDDREQLQSVLRQKFGIDDDEVLERLSAIDLVKAGFGNKSSKAIRRILPFLQLGMNYAEACEAAGYNHSNNYTKAENEARALLDRLPAIKKNELRQPVVEKILNQMVNVVNALMEKYGRFDEIRVELARELKQSKEERSNTYKSINKNQRENEQIAKRIVEYGVPTRSRIQKYKMWEESKHCCIYCGQPVDVGDFLRGFDVEVEHIIPKSLYFDDSFANKVCSCRSCNKEKNNRTAYDYMKSKGEKALSDYVERVNTMYTNNQISKTKWQNLLTPVDKISIDFIDRQLRESQYIARKAKEILTSICYNVTATSGSVTSFLRHVWGWDTVLHDLNFDRYKKVGLTEVIEVNHRGSVIRREQIKDWSKRFDHRHHAIDALTIACTKQAYIQRLNNLRAEEGPDFNKMSLERYIQSQPHFSVAQVREAVDRILVSFRAGKRAVTPGKRYIRKNRKRISVQSVLIPRGALSEESVYGVIHVWEKDEQGHVIQKQRAVMKYPITSINREMLDKEKVVDKRIHRILSGRLAQYNDNPKEAFAKPVYIDKECRIPIRTVRCFAKPAINTLVPLKKDDKGNPVAWVNPGNNHHVAIYRDEDGKYKERTVTFWEAVDRCRVGIPAIVTQPDTIWDNILQRNDISENVLESLPDVKWQFVLSLQQNEMFILGMNEEDYRYAMDQQDYALLNKYLYRVQKLSKSDYSFRYHTETSVEDKYDGKPNLKLSMQMGKLKRVSIKSLLGLNPHKVHISVLGEIKEIS

SEQ ID NO: 91 - protein, 1352 aa, Belliella baltica
MKKILGLDLGTTSIGWAFIKEPEKDVVGSEIVDMGVRIVPLSSDEENDFAKGNTISINADRTLKRGARRNLQRFKQRRNALLEIFKEKKLISTNFKYAEDGPSSTFSTLNLRAKAAKEKIELQDLVKVLLQINKKRGYKSSRKAKSEEDDGSAIDSMGIAKELYENDLTPGQWVYEALQKGRKNVPDFYRSDLQEEFKKIVNYQSEFFPDIFNASFVEDWMGKASTPTKQYFNKKGVQLAENKGKREERRLQEYKWRAEAVNFKIDLSEIALILSQINSQISNSSGYLGAISDRSKELYFKNLTVGQYLYQQIKKNPHTRLKGQVFYRQDYLDEFERIWSVQSSFYPQLNDALKREVRDITIFFQRRLKSQKHLISNCEFEDHHKVVPKSHPVFQEFRIWQNLNNLLLIKKDNLNEKFDLELESKIALANELAFKRELNVKDALKILGLKPNEWEFNFTKIEGNRTNQAFFDAFAKIIELEDGEPIDLGDLKADDILDQFSEAFLRIGIDTELLQVNSDIEGAEYEKQSYIQFWHLLYSSEDDQKLKLNLIRKFGFKPEHAKILASISLQDDHASLSSRAIKKILPHLQSGLIYDKACTYAGYNHSSSFTKDENEKRELRAELELLKKNSLRNPVVEKILNQMINVVNAILKDPELGRPDEIRVEMARELKANAEQRKNMTSNIASATRDHDKYREILKSEFGLKRVTKNDLLRYKLWLETDGISLYTGKPIEASKLFSKEYDIEHIIPKARLFDDSFSNKTICERQLNIDKANVTAFSFLQNKLSADEFEQYQSRVKSLYGKLSKAKIQKLLMANDKIPEDFIARQLQETRYISKKAKEILFEISRRVSVTTGTITDKLREDWGLVEIMKELNWEKYDKLGLTYTIEGKHGERLNKIKDWSKRNDHRHHAMDALTVALTKPAYIQYLNNLNAKGLNNKKGTEVFAIEQKYLKRENGKLCFIPPIENIRSEAKKHLSRILVSYKAKNKVVTINKNKTKSKAGLNEQIALTPRGQLHKETVYGKSFHYSTKFEKIGASFNVQKINTVAKKEEREALLKRLAENGNDPKKAFTGKNTLNKMPIYLDLGKNIKLSEKVKTVVLEQNYTIRKNIDPDLKVDKVIDVGIKRILESRLEEFGGNAKLAFSNLEENPIWLNKEKGISIKRVKISGVSNVESLHVKKDHFGEPILDQEGNEIPVDFVSTGNNHHVAIYEDENGNLQEEVVSFFEAVVRQNQGLPIIKKNHTLGWKFLFTLKQNEYFVFPSDDFVPADVDLMDEQNYHLISPNLFRVQKIARKNYVFNNHLETKAVDNDLLKSKKELSKITYHFYQTPEHLRGIIKIRINHLGKIIQIGEY

SEQ ID NO: 92 - protein, 1415 aa, Bergeyella zoohelcum
  REGION 1..1415: note = Bergeyella zoohelcum ATCC 43767
MKHILGLDLGTNSIGWALIERNIEEKYGKIIGMGSRIVPMGAELSKFEQGQAQTKNADRRTNRGARRLNKRYKQRRNKLIYILQKLDMLPSQIKLKEDFSDPNKIDKITILPISKKQEQLTAFDLVSLRVKALTEKVGLEDLGKIIYKYNQLRGYAGGSLEPEKEDIFDEEQSKDKKNKSFIAFSKIVFLGEPQEEIFKNKKLNRRAIIVETEEGNFEGSTFLENIKVGDSLELLINISASKSGDTITIKLPNKTNWRKKMENIENQLKEKSKEMGREFYISEFLLELLKENRWAKIRNNTILRARYESEFEAIWNEQVKHYPFLENLDKKTLIEIVSFIFPGEKESQKKYRELGLEKGLKYIIKNQVVFYQRELKDQSHLISDCRYEPNEKAIAKSHPVFQEYKVWEQINKLIVNTKIEAGTNRKGEKKYKYIDRPIPTALKEWIFEELQNKKEITFSAIFKKLKAEFDLREGIDFLNGMSPKDKLKGNETKLQLQKSLGELWDVLGLDSINRQIELWNILYNEKGNEYDLTSDRTSKVLEFINKYGNNIVDDNAEETAIRISKIKFARAYSSLSLKAVERILPLVRAGKYFNNDFSQQLQSKILKLLNENVEDPFAKAAQTYLDNNQSVLSEGGVGNSIATILVYDKHTAKEYSHDELYKSYKEINLLKQGDLRNPLVEQIINEALVLIRDIWKNYGIKPNEIRVELARDLKNSAKERATIHKRNKDNQTINNKIKETLVKNKKELSLANIEKVKLWEAQRHLSPYTGQPIPLSDLFDKEKYDVDHIIPISRYFDDSFTNKVISEKSVNQEKANRTAMEYFEVGSLKYSIFTKEQFIAHVNEYFSGVKRKNLLATSIPEDPVQRQIKDTQYIAIRVKEELNKIVGNENVKTTTGSITDYLRNHWGLTDKFKLLLKERYEALLESEKFLEAEYDNYKKDFDSRKKEYEEKEVLFEEQELTREEFIKEYKENYIRYKKNKLIIKGWSKRIDHRHHAIDALIVACTEPAHIKRLNDLNKVLQDWLVEHKSEFMPNFEGSNSELLEEILSLPENERTEIFTQIEKFRAIEMPWKGFPEQVEQKLKEIIISHKPKDKLLLQYNKAGDRQIKLRGQLHEGTLYGISQGKEAYRIPLTKFGGSKFATEKNIQKIVSPFLSGFIANHLKEYNNKKEEAFSAEGIMDLNNKLAQYRNEKGELKPHTPISTVKIYYKDPSKNKKKKDEEDLSLQKLDREKAFNEKLYVKTGDNYLFAVLEGEIKTKKTSQIKRLYDIISFFDATNFLKEEFRNAPDKKTFDKDLLFRQYFEERNKAKLLFTLKQGDFVYLPNENEEVILDKESPLYNQYWGDLKERGKNIYVVQKFSKKQIYFIKHTIADIIKKDVEFGSQNCYETVEGRSIKENCFKLEIDRLGNIVKVIKR

SEQ ID NO: 93 - protein, 1430 aa, Bergeyella zoohelcum
  REGION 1..1430: note = Bergeyella zoohelcum CCUG 30536
MKHILGLDLGTNSIGWAVVKEAQNDNEQSEIVDVGVRVNPLTTDEKTNFEKGKPISTNADRTLKRSARRNLQRYKLRRKELIELLKEHQLISTDTILTENGKGTTFQTLELRAKSAKEKISLEELARVFLTINKKRGYKSSRKAKNEDEGQLIDGMEIAKRLYEENLTTGQLSLQLLKEGKKSLPDYYRSDLQFELDKVWNFQKQFHSDILTDEFYAQLKGKGQRATSALFLAKYQIYTAENKGSREDKKLQAYQWRVDALSKELTREQLAFVITEINNNLNNSSGYLGAISDRSKELYFNNETVGEYLWKQIAANPHTSLKNQVFYRQDYLDEFEQIWKTQSAFYPEILTDELKKELRDVVIFYQRKLKSQKSLVSFCEFENKEIEIKKEDGTSTKKVIGLKVAPKSSPLFQEFKIWQNLNNVLIRKKGSKTKKVAKNQQAVLFEEEKTISELDLEAKQALFNELNLKGNLKADYCLEILGYSPKEWEMNYSVLEGNRTNKALYEAYLKITDLEGYDAKNHLKVKLNKDEVELDDLKVPASEIKDMVQAIFKEAGINTDILHFNAELDGKDFENQASYQLWHLLYSYEGDDSKSGNELLYKLLETKFGFKKEYAQILANVSLSDDYGSLSTKAMRKIHPYIKENKFSTACELAGYRHSKHSLTKEENDNRVLKDSLEVLKKNSLRQPVVEKILNQMINLVNALLKKYRTENPNFKFDEIRIELARELKKNAEERANMTANINKAKTEHEKIIKILKNEFGLPNPTRNDIIRYRLYEELKANGYKDLYTNIKIPQEKLFTKEIDIEHIIPKSRVFDDSFSNKTLSFRKTNLDKGERTAFDYMESKFGADKLEEYVARVEDLYKNNIISKAKYQKLLKKESEIGDGFVERDLRETQYIAKKAKEILLQITPNVLSTSGGITDRLREDWDLINVMKELNLPKYRALGLTQMEDRKYGQQVEVITDWTKRNDHRHHAMDALTVAFTKHNHIQYLNYLNARKNEKHKEHSNIMGIQQLETIKVTDKNGNEKRVFKAPMPNFRQVTKAFLENILISHKAKNKVVTKNKNKVAGSNKVQEVLTPRGQLHKETVYGKYQYYVQKEEKIGAKFDLETIKKVANPLYQSLLKKRLEENGGDPKKAFTGKNSLAKNPIYLDDTQTEQLPEKVKLVWLENSFSIRKDITPENFKDEKLIDKILDEGVKRILKERLQSFGNDAKKAFSDLDKNPIWLNKEKGITIKRVTISGVANAEPLHTKKDHLGKEILDKEGKPIPVDFISTGSNHHVAVYRDEKGNLQEKVVSVFEAVVRANQGLPIIDKTYNQHLGWEFLFTMKQNEMFVFPNESTGFNPNDIDLLDPKNKRIISPNLFRVQKFSKLQYGNSFVREFVFRHHLETTVEDRKELQGITYKQMKNSTFFNDIIKVRINHLGDIVSIGEY

SEQ ID NO: 94 - protein, 1420 aa, Bifidobacterium bifidum
MSRKNYVDDYAISLDIGNASVGWSAFTPNYRLVRAKGHELIGVRLFDPADTAESRRMARTTRRRYSRRRWRLRLLDALFDQALSEIDPSFLARRKYSWVHPDDENNADCWYGSVLFDSNEQDKRFYEKYPTIYHLRKALMEDDSQHDIREIYLAIHHMVKYRGNFLVEGTLESSNAFKEDELLKLLGRITRYEMSEGEQNSDIEQDDENKLVAPANGQLADALCATRGSRSMRVDNALEALSAVNDLSREQRAIVKAIFAGLEGNKLDLAKIFVSKEFSSENKKILGIYFNKSDYEEKCVQIVDSGLLDDEEREFLDRMQGQYNAIALKQLLGRSTSVSDSKCASYDAHRANWNLIKLQLRTKENEKDINENYGILVGWKIDSGQRKSVRGESAYENMRKKANVFFKKMIETSDLSETDKNRLIHDIEEDKLFPIQRDSDNGVIPHQLHQNELKQIIKKQGKYYPFLLDAFEKDGKQINKIEGLLTFRVPYFVGPLVVPEDLQKSDNSENHWMVRKKKGEITPWNFDEMVDKDASGRKFIERLVGTDSYLLGEPTLPKNSLLYQEYEVLNELNNVRLSVRTGNHWNDKRRMRLGREEKTLLCQRLFMKGQTVTKRTAENLLRKEYGRTYELSGLSDESKFTSSLSTYGKMCRIFGEKYVNEHRDLMEKIVELQTVFEDKETLLHQLRQLEGISEADCALLVNTHYTGWGRLSRKLLTTKAGECKISDDFAPRKHSIIEIMRAEDRNLMEIITDKQLGFSDWIEQENLGAENGSSLMEVVDDLRVSPKVKRGIIQSIRLIDDISKAVGKRPSRIFLELADDIQPSGRTISRKSRLQDLYRNANLGKEFKGIADELNACSDKDLQDDRLFLYYTQLGKDMYTGEELDLDRLSSAYDIDHIIPQAVTQNDSIDNRVLVARAENARKTDSFTYMPQIADRMRNFWQILLDNGLISRVKFERLTRQNEFSEREKERFVQRSLVETRQIMKNVATLMRQRYGNSAAVIGLNAELTKEMHRYLGFSHKNRDINDYHHAQDALCVGIAGQFAANRGFFADGEVSDGAQNSYNQYLRDYLRGYREKLSAEDRKQGRAFGFIVGSMRSQDEQKRVNPRTGEVVWSEEDKDYLRKVMNYRKMLVTQKVGDDFGALYDETRYAATDPKGIKGIPFDGAKQDTSLYGGFSSAKPAYAVLIESKGKTRLVNVTMQEYSLLGDRPSDDELRKVLAKKKSEYAKANILLRHVPKMQLIRYGGGLMVIKSAGELNNAQQLWLPYEEYCYFDDLSQGKGSLEKDDLKKLLDSILGSVQCLYPWHRFTEEELADLHVAFDKLPEDEKKNVITGIVSALHADAKTANLSIVGMTGSWRRMNNKSGYTFSDEDEFIFQSPSGLFEKRVTVGELKRKAKKEVNSKYRTNEKRLPTLSGASQP

SEQ ID NO: 95 - protein, 1138 aa, Bifidobacterium dentium
MLCRCHRRYRIGIDVGLMSVGLAAIEVDETGFPIRILNIQSVIHDGGIDPQLGKKKSISRKAISGVARRTRRMRRRKVVRLRQLDATLESLGFPIVEPDSLDTWEIWLTRAKLASSYIQDDETRKEDVSIALRHIARHRGWRNPYSNVESLFVDVAPSEQYEELRRKAEEKLGTSLSGNPTSAEIVECILKRQVGEVQLRTRSRKGVNGNAVEKEGLLPTKLMQSDNAAEIRRIFKVQRIDDETGRKLLRAVFKACSPKGSVERRVGRDALAPGLPRALKASLAFQEYRIANVLTNLVISEDGTKRKLTIAEKQRVFGFLSSNETDDITWIDVAEKLGLERRQIQGVGCLTADGEERISSTPPRNITALHIHSAKPVIREKLVAWWKAASPTVRETMVELLSNTVDIDRVREDMDYSSAVAFIDSLGDEELTALDSVDLLSGRAAYSRQTLKQLTERMLNTDDDLHEARKAVFGVDDNWKPPVDAISTSVGNPAVDRVLKIVNRYLLACQKRWRNPQSVQIEHVRESFSSVAKAKETERVQGERARYRNDLRRELCEQEGLNKIRESDIRRWESVQRQNGTCLYCGSPITFRTCEMDHIVPRKGVGSTNTRVNLAAACAACNKLKSNTAFSVWARTEGAANRKVSQRDAIERVKTFIFNKSVPPREQRAFKQAVISRLRQAESDPAIDNRSIESVAWMADELHRRIEAYFNQDADVSGNTPATQVWVFQGRVTALARKASGIEGRIHFAGEWKKTRLDRRHHAVDAAVIAMMNHSAAQTLVERDSLRLSQWITRKPETWKNYPFSEGQKKTRFKEWLDCMNALLDLLNDALDSDRVPVTRCQRMSLGNSQAHAATIRKMKRVELFSPMDADLIRRASTPALYCALTRLPEYSPEKGLPENRGREIVLNGRHIRSTETVDFFASGAAQLMVRNGSAEIGDSIHHMRIYRYRKTGAKSQEYVYGMIRVFQIDLLHASSENLFAVQLPSQSVSVRYGDKNVVQAIQEGRAEYLGHIVPNDEILISYEGVRMKDSEKIGAYANDFSGTASELAQRRHWVVVGSDVSKLALRPSYLSEEGLENSGSESERLSKQTRKVIEGKGWVVAVNILAKYHPVVIRRNALGEPRFRTNSGMPVSWRWDR

SEQ ID NO: 96 - protein, 1187 aa, Bifidobacterium longum
MLSRQLLGASHLARPVSYSYNVQDNDVHCSYGERCFMRGKRYRIGIDVGLNSVGLAAVEVSDENSPVRLLNAQSVIHDGGVDPQKNKEAITRKNMSGVARRTRRMRRRKRERLHKLDMLLGKFGYPVIEPESLDKPFEEWHVRAELATRYIEDDELRRESISIALRHMARHRGWRNPYRQVDSLISDNPYSKQYGELKEKAKAYNDDATAAEEESTPAQLVVAMLDAGYAEAPRLRWRTGSKKPDAEGYLPVRLMQEDNANELKQIFRVQRVPADEWKPLFRSVFYAVSPKGSAEQRVGQDPLAPEQARALKASLAFQEYRIANVITNLRIKDASAELRKLTVDEKQSIYDQLVSPSSEDITWSDLCDFLGFKRSQLKGVGSLTEDGEERISSRPPRLTSVQRIYESDNKIRKPLVAWWKSASDNEHEAMIRLLSNTVDIDKVREDVAYASAIEFIDGLDDDALTKLDSVDLPSGRAAYSVETLQKLTRQMLTTDDDLHEARKTLFNVTDSWRPPADPIGEPLGNPSVDRVLKNVNRYLMNCQQRWGNPVSVNIEHVRSSFSSVAFARKDKREYEKNNEKRSIFRSSLSEQLRADEQMEKVRESDLRRLEAIQRQNGQCLYCGRTITFRTCEMDHIVPRKGVGSTNTRTNFAAVCAECNRMKSNTPFAIWARSEDAQTRGVSLAEAKKRVTMFTFNPKSYAPREVKAFKQAVIARLQQTEDDAAIDNRSIESVAWMADELHRRIDWYFNAKQYVNSASIDDAEAETMKTTVSVFQGRVTASARRAAGIEGKIHFIGQQSKTRLDRRHHAVDASVIAMMNTAAAQTLMERESLRESQRLIGLMPGERSWKEYPYEGTSRYESFHLWLDNMDVLLELLNDALDNDRIAVMQSQRYVLGNSIAHDATIHPLEKVPLGSAMSADLIRRASTPALWCALTRLPDYDEKEGLPEDSHREIRVHDTRYSADDEMGFFASQAAQIAVQEGSADIGSAIHHARVYRCWKTNAKGVRKYFYGMIRVFQTDLLRACHDDLFTVPLPPQSISMRYGEPRVVQALQSGNAQYLGSLVVGDEIEMDFSSLDVDGQIGEYLQFFSQFSGGNLAWKHWVVDGFFNQTQLRIRPRYLAAEGLAKAFSDDVVPDGVQKIVTKQGWLPPVNTASKTAVRIVRRNAFGEPRLSSAHHMPCSWQWRHE

SEQ ID NO: 97 - protein, 1124 aa, Bifidobacterium longum
  REGION 1..1124: note = Bifidobacterium longum subsp. longum 2-2B
LTGHSGHTFWPTSSSPPIQLEQEKRPLPQRNTSQNGHTFWPITRERCFMRGKRYRIGIDVGLNSVGLAAVEVSDENSPVRLLNAQSVIHDGGVDPQKNKEAITRKNMSGVARRTRRMRRRKRERLHKLDMLLGKFGYPVIEPESLDKPFEEWHVRAELATRYIEDDELRRESISIALRHMARHRGWRNPYRQVDSLISDNPYSKQYGELKEKAKAYNDDATAAEEESTPAQLVVAMLDAGYAEAPRLRWRTGSKKPDAEGYLPVRLMQEDNANELKQIFRVQRVPADEWKPLFRSVFYAVSPKGSAEQRVGQDPLAPEQARALKASLAFQEYRIANVITNLRIKDASAELRKLTVDEKQSIYDQLVSPSSEDITWSDLCDFLGFKRSQLKGVGSLTEDGEERISSRPPRLTSVQRIYESDNKIRKPLVAWWKSASDNEHEAMIRLLSNTVDIDKVREDVAYASAIEFIDGLDDDALTKLDSVDLPSGRAAYSVETLQKLTRQMLTTDDDLHEARKTLFNVTDSWRPPADPIGEPLGNPSVDRVLKNVNRYLMNCQQRWGNPVSVNIEHVRSSFSSVAFARKDKREYEKNNEKRSIFRSSLSEQLRADEQMEKVRESDLRRLEAIQRQNGQCLYCGRTITFRTCEMDHIVPRKGVGSTNTRTNFAAVCAECNRMKSNTPFAIWARSEDAQTRGVSLAEAKKRVTMFTFNPKSYAPREVKAFKQAVIARLQQTEDDAAIDNRSIESVAWMADELHRRIDWYFNAKQYVNSASIDDAEAETMKTTVSVFQGRVTASARRAAGIEGKIHFIGQQSKTRLDRRHHAVDASVIAMMNTAAAQTLMERESLRESQRLIGLMPGERSWKEYPYEGTSRYESFHLWLDNMDVLLELLNDALDNDRIAVMQSQRYVLGNSIAHDATIHPLEKVPLGSAMSADLIRRASTPALWCALTRLPDYDEKEGLPEDSHREIRVHDTRYSADDEMGFFASQAAQIAVQEGSADIGSAIHHARVYRCWKTNAKGVRKYFYGMIRVFQTDLLRACHDDLFTVPLPPQSISMRYGEPRVVQALQSGNAQYLGSLVVGDEIEMDFPVSMLMVRLASIYNSSRSLVEGTLHGNIGLLMDSLTRRS

SEQ ID NO: 98 - protein, 1138 aa, Bifidobacterium sp.
MNSVGLAAVEVSDENSPVRLLNAQSVIHDGGVDPQKNKEAITRKNMSGVARRTRRMRRRKRERLHKLDMLLGKFGYPVIEPESLDKPFEEWHVRAELATRYIEDDELRRESISIALRHMARHRGWRNPYRQVDSLISDNPYSKQYGELKEKAKAYNDDATAAEEESTPAQLVVAMLDAGYAEAPRLRWRTGSKKPDAEGYLPVRLMQEDNANELKQIFRVQRVPADEWKPLFRSVFYAVSPKGSAEQRVGQDPLAPEQARALKASLAFQEYRIANVITNLRIKDASAELRKLTVDEKQSIYDQLVSPSSEDITWSDLCDFLGFKRSQLKGVGSLTEDGEERISSRPPRLTSVQRIYESDNKIRKPLVAWWKSASDNEHEAMIRLLSNTVDIDKVREDVAYASAIEFIDGLDDDALTKLDSVDLPSGRAAYSVETLQKLTRQMLTTDDDLHEARKTLFNVTDSWRPPADPIGEPLGNPSVDRVLKNVNRYLMNCQQRWGNPVSVNIEHVRSSFSSVAFARKDKREYEKNNEKRSIFRSSLSEQLRADEQMEKVRESDLRRLEAIQRQNGQCLYCGRTITFRTCEMDHIVPRKGVGSTNTRTNFAAVCAECNRMKSNTPFAIWARSEDAQTRGVSLAEAKKRVTMFTFNPKSYAPREVKAFKQAVIARLQQTEDDAAIDNRSIESVAWMADELHRRIDWYFNAKQYVNSASIDDAEAETMKTTVSVFQGRVTASARRAAGIEGKIHFIGQQSKTRLDRRHHAVDASVIAMMNTAAAQTLMERESLRESQRLIGLMPGERSWKEYPYEGTSRYESFHLWLDNMDVLLELLNDALDNDRIAVMQSQRYVLGNSIAHDATIHPLEKVPLGSAMSADLIRRASTPALWCALTRLPDYDEKEGLPEDSHREIRVHDTRYSADDEMGFFASQAAQIAVQEGSADIGSAIHHARVYRCWKTNAKGVRKYFYGMIRVFQTDLLRACHDDLFTVPLPPQSISMRYGEPRVVQALQSGNAQYLGSLVVGDEIEMDFSSLDVDGQIGEYLQFFSQFSGGNLAWKHWVVDGFFNQTQLRIRPRYLAAEGLAKAFSDDVVPDGVQKIVTKQGWLPPVNTASKTAVRIVRRNAFGEPRLSSAHHMPCSWQWRHE

SEQ ID NO: 99 - protein, 1151 aa, Bifidobacterium sp.
  REGION 1..1151: note = Bifidobacterium sp. 12_1_47BFAA
MRGKRYRIGIDVGLNSVGLAAVEVSDENSPVRLLNAQSVIHDGGVDPQKNKEAITRKNMSGVARRTRRMRRRKRERLHKLDMLLGKFGYPVIEPESLDKPFEEWHVRAELATRYIEDDELRRESISIALRHMARHRGWRNPYRQVDSLISDNPYSKQYGELKEKAKAYNDDATAAEEESTPAQLVVAMLDAGYAEAPRLRWRTGSKKPDAEGYLPVRLMQEDNANELKQIFRVQRVPADEWKPLFRSVFYAVSPKGSAEQRVGQDPLAPEQARALKASLAFQEYRIANVITNLRIKDASAELRKLTVDEKQSIYDQLVSPSSEDITWSDLCDFLGFKRSQLKGVGSLTEDGEERISSRPPRLTSVQRIYESDNKIRKPLVAWWKSASDNEHEAMIRLLSNTVDIDKVREDVAYASAIEFIDGLDDDALTKLDSVDLPSGRAAYSVETLQKLTRQMLTTDDDLHEARKTLFNVTDSWRPPADPIGEPLGNPSVDRVLKNVNRYLMNCQQRWGNPVSVNIEHVRSSFSSVAFARKDKREYEKNNEKRSIFRSSLSEQLRADEQMEKVRESDLRRLEAIQRQNGQCLYCGRTITFRTCEMDHIVPRKGVGSTNTRTNFAAVCAECNRMKSNTPFAIWARSEDAQTRGVSLAEAKKRVTMFTFNPKSYAPREVKAFKQAVIARLQQTEDDAAIDNRSIESVAWMADELHRRIDWYFNAKQYVNSASIDDAEAETMKTTVSVFQGRVTASARRAAGIEGKIHFIGQQSKTRLDRRHHAVDASVIAMMNTAAAQTLMERESLRESQRLIGLMPGERSWKEYPYEGTSRYESFHLWLDNMDVLLELLNDALDNDRIAVMQSQRYVLGNSIAHDATIHPLEKVPLGSAMSADLIRRASTPALWCALTRLPDYDEKEGLPEDSHREIRVHDTRYSADDEMGFFASQAAQIAVQEGSADIGSAIHHARVYRCWKTNAKGVRKYFYGMIRVFQTDLLRACHDDLFTVPLPPQSISMRYGEPRVVQALQSGNAQYLGSLVVGDEIEMDFSSLDVDGQIGEYLQFFSQFSGGNLAWKHWVVDGFFNQTQLRIRPRYLAAEGLAKAFSDDVVPDGVQKIVTKQGWLPPVNTASKTAVRIVRRNAFGEPRLSSAHHMPCSWQWRHE

SEQ ID NO: 100 - protein, 1092 aa, Brevibacillus laterosporus
  REGION 1..1092: note = Brevibacillus laterosporus GI-9
MAYTMGIDVGIASCGWAIVDLERQRIIDIGVRTFEKAENPKNGEALAVPRREARSSRRRLRRKKHRIERLKYMFVRNGLAVDIQHLEQTLRSQNEIDVWQLRVDGLDRMLTQKEWLRVLIHLAQRRGFQSNRKTDGSSEDGQVLVNVTENDRLMEEKDYRTVAEMMVKDEKFSDHKRNKNGNYHGVVSRASLLVEIHTLFESQRQHHNFLASKDFELEYINIWSSQRPVATKDQIEKMIGTCTFLPKEKRAPKASWHFQYFMLLQTINHIRITNAQGTRPLNKEEIEQVVNMALTKSKVSYHDIRKVLDLSEEYQFVGLDYGKEDEKKKVESKETIIKLDDYHKLNKIFNEVELAKGETWEAVDYDTVAYALTFFKDDEDIRDYLQNKYKDSKNRLVKNVANKEYTNELIEKVSTLSFRKVGHLSLKALRKIIPFLEQGMTYDKACQAAGFNFQGISKKKRSVVLPVIDQISNPVVNRALTQTRKVINALIKKYGSPETIHIETARELSKRFDERKNITKDYKENRDKNERAKKHLSELGIINPTGLDIVKYKLWCEQQGRCMYSNQPISFERLRESGYTEVDHIIPYSRSMNDSYNNRVLVMTRENREKSNQTPYEYMGNDTQRWDEFEQRVTTNPQIKKEKRQNLLLKGFTNRRELEMLERNLNDTRHITKYLSHFISTNLEFSPSDKKKKVVNTSGRITSHLRSRWGLEKNREQNDLHHAMDAVVIAVTSDSFIQQVTNYYKRKERRELNGDDKFPLPWKFFREEVIARLSPNPKEQIEALPNHFYSEDELADLQPIFVSRMPKRSITGEAHQAQFRRVVGKTKEGKNITAKKTALVDISYDKNGDFNMYGRETDPATYEAIKERYLEFGGNAKKAFSTDLHKPKKDGTKGPLIKSVRIMENKTLVHPVNKGKGVVYNSSIVRTDVFQRKEKYYLLPVYVTDVTKGKLPNKVIAAKKGYDDWIEVDDSFTFLYSLYPNDLIFIRQNPKKKISLKKRIESHSISDSKEVQEILTYYKGVDSSTAAIEFITHDGSYYAKGVGVQNLDCFEKYQVDILGNYSKVKGEKRLELETSDNNHKGKDVNSIKSTSR

SEQ ID NO: 101 - protein, 1428 aa, Burkholderiales bacterium
  REGION 1..1428: note = Burkholderiales bacterium 1_1_47
MGKTHIIGVGLDLGGTYTGTFITSHPSDEAEHRDHSSAFTVVNSEKLSFSSKSRTAVRHRVRSYKGFDLRRRLLLLVAEYQLLQKKQTLAPEERENLRIALSGYLKRKGYARTEAETDTSVLESLDPSVFSSAPSFTNFFNDSEPLNIQWEAIANSPETTKALNKELSGQKEADFKKYIKTSFPEYSAKEILANYVEGRRAILDASKYIANLQSLGHKHRSKYLSDILQDMKRDSRITRLSEAFGSTDNLWRIIGNISNLQERAVRWYFNDAKFEQGQEQLDAVKLKNVLVRALKYLRSDDKEWSASQKQIIQSLEQSGDVLDVLAGLDPDRTIPPYEDQNNRRPPEDQTLYLNPKALSSEYGEKWKSWANKFAGAYPLLTEDLTEILKNTDRKSRIKIRSDVLPDSDYRLAYILQRAFDRSIALDECSIRRTAEDFENGVVIKNEKLEDVLSGHQLEEFLEFANRYYQETAKAKNGLWFPENALLERADLHPPMKNKILNVIVGQALGVSPAEGTDFIEEIWNSKVKGRSTVHSICNAIENERKTYGPYFSEDYKFVKTALKEGKTEKELSKKFAAVIKVLKMVSEVVPFIGKELRLSDEAQSKFDNPYSLAQLYNLIETERNGFSKVSLAAHLENAWRMTMTDGSAQCCRLPADCVRPFDGFIRKAIDRNSWEVAKRIAEEVKKSVDFTNGTVKIPVAIEANSFNFTASLTDLKYIQLKEQKLKKKLEDIQRNEENQEKRWLSKEERIRADSHGICAYTGRPLDDVGEIDHIIPRSLTLKKSESIYNSEVNLIFVSAQGNQEKKNNIYLLSNLAKNYLAAVFGASDLSQITNEIESTVLQLKAAGRLGYFDLLSEKERACARHALFLNSDSEARRAVIDVLGSRRKASVNGTQAWFVRSIFSKVRQALAAWTQETGNELIFDAISVPAADSSEMRKRFAEYRPEFRKPKVQPVASHSIDAMCIYLAACSDPFKTKRMGSQLAIYEPINFDNLFTGSCQVIQNTPRNFSDKTNIANSPIFKETIYAERFLDIIVSRGEIFIGYPSNMPFEEKPNRISIGGKDPFSILSVLGAYLDKAPSSEKEKLTIYRVVKNKAFELFSKVAGSKFTAEEDKAAKILEALHFVTVKQDVAATVSDLIKSKKELSKDSIENLAKQKGCLKKVEYSSKEFKFKGSLIIPAAVEWGKVLWNVFKENTAEELKDENALRKALEAAWPSSFGTRNLHSKAKRVFSLPVVATQSGAVRIRRKTAFGDFVYQSQDTNNLYSSFPVKNGKLDWSSPIIHPALQNRNLTAYGYRFVDHDRSISMSEFREVYNKDDLMRIELAQGTSSRRYLRVEMPGEKFLAWFGENSISLGSSFKFSVSEVFDNKIYTENAEFTKFLPKPREDNKHNGTIFFELVGPRVIFNYIVGGAASSLKEIFSEAGKERS

SEQ ID NO: 102 - protein, 1442 aa, Caenispirillum salinarum
  REGION 1..1442: note = Caenispirillum salinarum AK4
MPVLSPLSPNAAQGRRRWSLALDIGEGSIGWAVAEVDAEGRVLQLTGTGVTLFPSAWSNENGTYVAHGAADRAVRGQQQRHDSRRRRLAGLARLCAPVLERSPEDLKDLTRTPPKADPRAIFFLRADAARRPLDGPELFRVLHHMAAHRGIRLAELQEVDPPPESDADDAAPAATEDEDGTRRAAADERAFRRLMAEHMHRHGTQPTCGEIMAGRLRETPAGAQPVTRARDGLRVGGGVAVPTRALIEQEFDAIRAIQAPRHPDLPWDSLRRLVLDQAPIAVPPATPCLFLEELRRRGETFQGRTITREAIDRGLTVDPLIQALRIRETVGNLRLHERITEPDGRQRYVPRAMPELGLSHGELTAPERDTLVRALMHDPDGLAAKDGRIPYTRLRKLIGYDNSPVCFAQERDTSGGGITVNPTDPLMARWIDGWVDLPLKARSLYVRDVVARGADSAALARLLAEGAHGVPPVAAAAVPAATAAILESDIMQPGRYSVCPWAAEAILDAWANAPTEGFYDVTRGLFGFAPGEIVLEDLRRARGALLAHLPRTMAAARTPNRAAQQRGPLPAYESVIPSQLITSLRRAHKGRAADWSAADPEERNPFLRTWTGNAATDHILNQVRKTANEVITKYGNRRGWDPLPSRITVELAREAKHGVIRRNEIAKENRENEGRRKKESAALDTFCQDNTVSWQAGGLPKERAALRLRLAQRQEFFCPYCAERPKLRATDLFSPAETEIDHVIERRMGGDGPDNLVLAHKDCNNAKGKKTPHEHAGDLLDSPALAALWQGWRKENADRLKGKGHKARTPREDKDFMDRVGWRFEEDARAKAEENQERRGRRMLHDTARATRLARLYLAAAVMPEDPAEIGAPPVETPPSPEDPTGYTAIYRTISRVQPVNGSVTHMLRQRLLQRDKNRDYQTHHAEDACLLLLAGPAVVQAFNTEAAQHGADAPDDRPVDLMPTSDAYHQQRRARALGRVPLATVDAALADIVMPESDRQDPETGRVHWRLTRAGRGLKRRIDDLTRNCVILSRPRRPSETGTPGALHNATHYGRREITVDGRTDTVVTQRMNARDLVALLDNAKIVPAARLDAAAPGDTILKEICTEIADRHDRVVDPEGTHARRWISARLAALVPAHAEAVARDIAELADLDALADADRTPEQEARRSALRQSPYLGRAISAKKADGRARAREQEILTRALLDPHWGPRGLRHLIMREARAPSLVRIRANKTDAFGRPVPDAAVWVKTDGNAVSQLWRLTSVVTDDGRRIPLPKPIEKRIEISNLEYARLNGLDEGAGVTGNNAPPRPLRQDIDRLTPLWRDHGTAPGGYLGTAVGELEDKARSALRGKAMRQTLTDAGITAEAGWRLDSEGAVCDLEVAKGDTVKKDGKTYKVGVITQGIFGMPVDAAGSAPRTPEDCEKFEEQYGIKPWKAKGIPLA

SEQ ID NO: 103 - protein, 984 aa, Campylobacter coli
  REGION 1..984: note = Campylobacter coli 1098
MARILAFDIGISSIGWAFSENDELKDCGVRIFTKAENPKTGESLALPRRLARSARKRLARRKARLNHLKHLIANEFKLNYEDYQSFDESLAKAYKGSLISPYELRFRALNELLSKQDFARVILHIAKRRGYDDIKNNGDEEKSEILKAIKQNEEKLVNYQSVGEYLYKEYFQKFKENSKEFINVRNKKESYERCIAQSFLKDELKLIFQKQREFGFSFSKKFEEEVLSVAFYKRALKDFSHLVGNCSFFTDEKRAPKNSPLAFMFVALTRIINLLNNLKNTEGILYTKDDLNALLNEVLKNGTLTYKQTKKLLGLSDDYEFKGEKGTYFIEFKKYKEFIKALGEHNLSQDDLNEIAKDITLIKDEIKLKKALAKYDLNQNQIDSLSKLEFKDHLNISFKALKLITPLMLEGKKYDEACNELNLKVAINEDKKDFLPAFNETYYKDEVTNPVVLRAIKEYRKVLNALLKKYGKVHKINIELAREVGKNYSQRAKIEKEQNENYKAKKDAELECEKLGLKINSKNILKLRLFKEQKEFCAYSGEKIKISDLQDEKMLEIDHIYPYSRSFDDSYMNKVLVFTKQNQEKLNQTPFEAFGNDSAKWQKIEVLAKNLPTKKQKRILDKNYKDKEQKNFKDRNLNDTRYIARLVLNYTKDYLDFLPLSDDENTKLNDTQKGSKVHVEAKSGMLTSALRHTWGFSAKDRNNHLHHAIDAVIIAYANNSIVKAFSDFKKEQESNSAELYAKKISELDYKNKRKFFEPFSGFRQKVLDKIDEIFVSKPERKKPSGALHEETFRKEEEFYQSYGGKEGVLKALELGKIRKVNGKIVKNGDMFRVDIFKHKKTNKFYAVPIYTMDFALKVLPNKAVARSKKGEIKDWILMDENYEFCFSLYKDSLILIQTKDMQEPEFVYYNAFTSSTVSLIVSKHDNKFETLSKNQKILFKNANEKEVIAKSIGIQNLKVFEKYIVSALGEVTKAEFRQREDFKK

SEQ ID NO: 104 - protein, 984 aa, Campylobacter coli
  REGION 1..984: note = Campylobacter coli 111-3
MARILAFDIGISSIGWAFSENDELKDCGVRIFTKAENPKTGESLALPRRLARSARKRLARRKARLNHLKHLIANEFKLNYEDYQSFDESLAKAYKGSLISPYELRFRALNELLSKQDFARVILHIAKRRGYDDIKNNGDEEKSEILKAIKQNEEKLVNYQSVGEYLYKEYFQKFKENSKEFINVRNKKESYERCIAQSFLKDELKLIFQKQREFGFSFSKKFEEEVLSVAFYKRALKDFSHLVGNCSFFTDEKRAPKNSPLAFMFVALTRIINLLNNLKNTEGILYTKDDLNTLLNEVLKNGTLTYKQTKKLLGLSDDYEFKGEKGTYFIEFKKYKEFIKALGEHNLSQDNLNEIAKDITLIKDEIKLKKALAKYDLNQNQIDSLSKLEFKDHLNISFKALKLITPLMLEGKKYDEAYNELNLKVAINEDKKDFLPAFNETYYKDEVTNPVVLRAIKEYRKVLNALLKKYGKVHKINIELAREVGKNHSQRAKIEKEQNENYKAKKDAELECEKLGLKINSKNILKLRLFKEQKEFCAYSGEKIKISDLQDEKMLEIDHIYPYSRSFDDSYMNKVLVFTKQNQEKLNQTPFEAFGNDSAKWQKIEVLAKNLPTKKQKRILDKNYKDKEQKDFKDRNLNDTRYIARLVLNYTKDYLDFLPLSDDENTKLNDTQKGSKVHVEAKSGMLTSALRHTWGFSAKDRNNHLHHAIDAVIIAYANNSIVKAFSDFKKEQESNSAELYAKKISELDYKNKRKFFEPFSGFRQKVLDKIDEIFVSKPERKKPSGALHEETFRKEEEFYQSYGGKEGVLKALELGKIRKVNGKIVKNGDMFRVDIFKHKKTNKFYAVPIYTMDFALKVLPNKAVARSKKGEIKDWILMDENYEFCFSLYKDSLILIQTKDMQEPELVYFNAFTSSTVSLIVSKHDNKFETLSKNQKILFKNANEKEVIAKSIGIQNLKVFEKYIVSALGEVTKAEFRQREDFKK

SEQ ID NO: 105 - protein, 987 aa, Campylobacter coli
  REGION 1..987: note = Campylobacter coli 132-6
MARILAFDIGISSIGWAFSENDELKDCGVRIFTKAENPKTGESLALPRRLARSARKRLARRKARLNHLKHLIANEFKLNYEDYQSFDESLAKAYKGSLISPYELRFRALNELLSKQDFARVILHIAKRRGYDDIKNNGDEEKSEILKAIKQNEEKLVNYQSVGEYLYKEYFQKFKENSKEFINVRNKKESYERCIAQSFLKDELKLIFQKQREFGFSFSKKFEEEVLSVAFYKRALKDFSHLVGNCSFFTDEKRAPKNSPLAFMFVALTRIINLLNNLKNTEGILYTKDDLNTLLNEVLKNGTLTYKQTKKLLGLSDDYEFKGEKGTYFIEFKKYKEFIKALGEHNLSQDNLNEIAKDITLIKDEIKLKKALAKYDLNQNQIDSLSKLEFKDHLNISFKALKLITPLMLEGKKYDEAYNELNLKVAINEDKKDFLPAFNETYYKDEVTNPVVLRAIKEYRKVLNALLKKYGKVHKINIELAREVGKNHSQRAKIEKEQNENYKAKKDAELECEKLGLKINSKNILKLRLFKEQKEFCAYSGEKIKISDLQDEKMLEIDHIYPYSRSFDDSYMNKVLVFTKQNQEKLNQTPFEAFGNDSAKWQKIEVLAKNLPTKKQKRILDKNYKDKEQKDFKDRNLNDTRYIARLVLNYTKDYLDFLPLSDDENTKLNDTQKGSKVHVEAKSGMLTSALRHTWGFSAKDRNNHLHHAIDAVIIAYANNSIVKAFSDFKKEQESNSAELYAKKISELDYKNKRKFFEPFSGFRQKVLDKIDEIFVSKPERKKPSGALHEETFRKEEEFYQSYGGKEGVLKALELGKIRKVNGKIVKNGDMFRVDIFKHKKTNKFYAVPIYTMDFALKVLPNKAVARSKKGEIKDWILMDENYEFCFSLYKDSLILIQTKDMQEPELVYFNAFTSSTVSLIVSKHDNKFETLSKNQKILFKNANEKEVIAKSIGIQNLKVFEKYIVSALGEVTKAEFRQREDFKNELR

SEQ ID NO: 106 - protein, 984 aa, Campylobacter coli
  REGION 1..984: note = Campylobacter coli 151-9
MARILAFDIGISSIGWAFSENDELKDCGVRIFTKAENPKTGESLALPRRLARSARKRLARRKARLNHLKHLIANEFKLNYEDYQSFDESLAKAYKGSLISPYELRFRALNELLSKQDFARVILHIAKRRGYDDIKNNGDEEKSEILKAIKQNEEKLVNYQSVGEYLYKEYFQKFKENSKEFINVRNKKESYERCIAQSFLKDELKLIFQKQREFGFSFSKKFEEEVLSVAFYKRALKDFSHLVGNCSFFTDEKRAPKNSPLAFMFVALTRIINLLNNLKNTEGILYTKDDLNTLLNEVLKNGTLTYKQTKKLLGLSDDYEFKGEKGTYFIEFKKYKEFIKALGEHNLSQDNLNEIAKDITLIKDEIKLKKALAKYDLNQNQIDSLSKLEFKDHLNISFKALKLITPLMLEGKKYDEAYNELNLKVAINEDKKDFLPAFNETYYKDEVTNPVVLRAIKEYRKVLNALLKKYGKVHKINIELAREVGKNHSQRAKIEKEQNENYKAKKDAELECEKLGLKINSKNILKLRLFKEQKEFCAYSGEKIKISDLQDEKMLEIDHIYPYSRSFDDSYMNKVLVFTKQNQEKLNQTPFEAFGNDSAKWQKIEVLAKNLPTKKQKRILDKNYKDKEQKDFKDRNLNDTRYIARLVLNYTKDYLDFLPLSNDENTKLNDTQKGSKVHVEAKSGMLTSALRHTWGFSAKDRNNHLHHAIDAVIIAYANNSIVKAFSDFKKEQESNSAELYAKKISELDYKNKRKFFEPFSGFRQKVLDKIDEIFVSKPERKKPSGALHEETFRKEEEFYQSYGGKEGVLKALELGKIRKVNGKIVKNGDMFRVDIFKHKKTNKFYAVPIYTMDFALKVLPNKAVARSKKGEIKDWILMDENYEFCFSLYKDSLILIQTKDMQEPELVYFNAFTSSTVSLIVSKHDNKFETLSKNQKILFKNANEKEVIAKSIGIQNLKVFEKYIVSALGEVTKAEFRQREDFKK

SEQ ID NO: 107 - protein, 984 aa, Campylobacter coli
  REGION 1..984: note = Campylobacter coli 1909
MARILAFDIGISSIGWAFSENDELKDCGVRIFTKAENPKTGESLALPRRLARSARKCLARRKARLNHLKHLIANEFKLNYEDYQSFDESLAKAYKGSLISPYELRFRALNELLSKQDFARVILHIAKRRGYDDIKNNGDEEKSEILKAIKQNEEKLVNYQSVGEYLYKEYFQKFKENSKEFINVRNKKESYERCIAQSFLKDELKLIFQKQREFGFSFSKKFEEEVLSVAFYKRALKDFSHLVGNCSFFTDEKRAPKNSPLAFMFVALTRIINLLNNLKNTEGILYTKDDLNALLNEVLKNGTLTYKQTKKLLGLSDDYEFKGEKGTYFIEFKKYKEFIKALGEHNLSQDDLNEIAKDITLIKDEIKLKKALAKYDLNQNQIDSLSKLEFKDHLNISFKALKLITPLMLEGKKYDEACNELNLKVAINEDKKDFLPAFNETYYKDEVTNPVVLRAIKEYRKVLNALLKKYGKVHKINIELAREVGKNHSQRAKIEKEQNENYKAKKDAELECEKLGLKINSKNILKLRLFKEQKEFCAYSGEKIKISDLQDEKMLEIDHIYPYSRSFDDSYMNKVLVFTKQNQEKLNQTPFEAFGNDSAKWQKIEVLAKNLPTKKQKRILDKNYKDKEQKNFKDRNLNDTRYIARLVLNYTKDYLDFLPLSDDENTKLNDTQKGSKVHVEAKSGMLTSALRHTWGFSAKDRNNHLHHAIDAVIIAYANNSIVKAFSDFKKEQESNSAELYAKKISELDYKNKRKFFEPFSGFRQKVLDKIDEIFVSKPERKKPSGALHEETFRKEEEFYQSYGGKEGVLKALELGKIRKVNGKIVKNGDMFRVDIFKHKKTNKFYAVPIYTMDFALKVLPNKAVARSKKGEIKDWILMDENYEFCFSLYKDSLILIQTKDMQEPEFVYYNAFTSSTVSLIVSKHDNKFETLSKNQKILFKNANEKEVIAKSIGIQNLKVFEKYIVSALGEVTKAEFRQREDFKK

SEQ ID NO: 108 - protein, 965 aa, Campylobacter coli
  REGION 1..965: note = Campylobacter coli 1957
MKIIGFNLGIANIGWALRENDEIIDCGVRVFDIPENPKNGNSLALERRENKARMKIVKRKKARMLATKTFLKKELNVDLSKLFLIGSTQSIYELRTKALSSLISKEELSAIILHIAKHRGYDDSALKNENGTIIEALNKNKEAMLKFKSVGEYFYKNFVQNKEVKKIRNTTEDYSNSVPRSLLKQELDLILDKQKELGLIKNADFKEKLFEIIFFKRPLKDFSNKIGNCIFFENEKRAAKNTISACEFVALGKVVNLLKSIEKDIGIVYEKDSINEIMSIILDKTSISYKKIRDILNLPQDINFKGLDYSKNNAENSKLVDLKKLNEFKKALGDGFANLDKDILDSIATDITLTKDTATLKEKLKNYNVLNAEQIEKLSELVFNDHINLSLKALKQIIPLMYEGKRYDEACELCNFTIAKNQEKNEYLPLFEKTRFAKDISSPVVIRAICEFRKLLNDIIRRYGSVHKIHLELTRDFGISFNDRKKIIKEIEQNEQSRIKALETIKELKLEETSKNIQIVRLFEDQKGICPYSGLKMDLKCLDELVIDYIRPYNRSLDDSYSNKILTFKKLNDLKQGKTPFEAFGEDEKLWAEINERIKEYNGKKRFKIFDKFFKDKKPFDFTEQTLQDTRWLTKLVASYLNEYLLFLPINEDENTALGYGEKGSKQHVVLSSGMITQMLRNFWYLGFKNHKDYKNNAMDAIIVAFTTNSIIFAFNNFKKELDLAKAEFYANKISESDYLLKRKFLPPFSGFKEQALEKVKNIFVSHSLKIKNKGTLHELTPLKIKELKNTYGDLDLAVKLGKIRKYNDKYYANAKGSLVRTDLFADKENKFHAVSIYKADFSTKKLPNKTPATTSNGETKEGIEMNENYNFCMSLYKNTPISVKIKGMKEPIICYYHGFNTSGSKITYKKHDNNYHNLSEDEMVVFRKNDKESIVVGKILEIKKYSISPSGELSLIENEERKWF

SEQ ID NO: 109 - protein, 984 aa, Campylobacter coli
  REGION 1..984: note = Campylobacter coli 2692
MARILAFDIGISSIGWAFSENDELKDCGVRIFTKAENPKTGESLALPRRLARSARKRLARRKARLNHLKHLIANEFKLNYEDYQSFDESLAKAYKGSLISPYELRFRALNELLSKQDFARVILHIAKRRGYDDIKNSDDKEKGAILKAIKQNEEKLTNYQSVGEYLYKEYFQKFKENSKEFTNVRNKKESYERCIAQSFLKDELKLIFKKQREFGFSFSKKFEEEVLSVAFYKRALKDFSHLVGNCSFFTDEKRAPKNSPLAFMFVALTRIINLLNNLKNTEGILYTKDDLNALLNEVLKNGTLTYKQTKKLLGLSDDYEFKGEKGTYFIEFKKYKEFIKALGDHSLSQDDLNEIAKDITLIKDEIKLKKALAKYDLNQNQIDSLSKLEFKDHLNISFKALKLITPLMLEGKKYDEACNELNLKVAINEDKKDFLPAFNETYYKDEVTNPVVLRAIKEYRKVLNALLKKYGKVHKINIELAREVGKNYSQRAKIEKEQNENYKAKKDAELECEKLGLKINSKNILKLRLFKEQKEFCAYSGEKIKISDLQDEKMLEIDHIYPYSRSFDDSYMNKVLVFTKQNQEKLNQTPFEAFGNDSAKWQKIEVLAKNLPTKKQKRILDKNYKDKEQKDFKDRNLNDTRYIARLVLNYTKDYLDFLPLSDDENTKLNDTQKGSKVHVEAKSGMLTSALRHTWGFSAKDRNNHLHHAIDAVIIAYANNSIVKAFSDFKKEQESNSAELYAKKISELDYKNKRKFFEPFSGFRQKVLDKIDEIFVSKPERKKPSGALHEETFRKEEEFYQSYGGKEGVLKALELGKIRKVNGKIVKNGDMFRVDIFKHKKTNKFYAVPIYTMDFALKVLPNKAVARSKKGEIKDWILMDENYEFCFSLYKDSLILIQTKDMQEPEFVYYNAFTSSTVSLIVSKHDNKFETLSKNQKILFKNANEKEVIAKSIGIQNLKVFEKYIVSALGEVTKAEFRQREDFKK

SEQ ID NO: 110 - protein, 984 aa, Campylobacter coli
  REGION 1..984: note = Campylobacter coli 59-2
MARILAFDIGISSIGWAFSENDELKDCGVRIFTKAENPKTGESLALPRRLARSARKRLARRKARLNHLKHLIANEFKLNYEDYQSFDESLAKAYKGSLISPYELRFRALNELLSKQDFARVILHIAKRRGYDDIKNNGDEEKGKILKAIKQNEEKLVNYQSVGEYLYKEYFQKFKENSKEFINVRNKKESYERCITQSFLKYELKLIFQKQREFGFSFSKKFEEEVLSVAFYKRALKDFSHLVGNCSFFSDEKRAPKNSPLAFMFVALTRIINLLNNLKNTEGILYTKDDLNALLNEVLKNGTLTYKQTKKLLGLSDDYEFKGEKGTYFIEFKKYKEFIKALGEHNLSQDDLNEIAKDITLIKDEIKLKKALAKYDLNQNQIDSLSKLEFKDHLNISFKALKLITPLMLEGKKYDEACNELNLKVAINEDKKDFLPAFNETYYKDEVTNPVVLRAIKEYRKVLNALLKKYGKVHKINIELAREVGKNYSQRAKIEKEQNENYKAKKDAELECEKLGLKINSKNILKLRLFKEQKEFCAYSGEKIKISDLQDEKMLEIDHIYPYSRSFDDSYMNKVLVFTKQNQEKLNQTPFEAFGNDSAKWQKIEVLAKNLPTKKQKRILDKNYKDKEQKNFKDRNLNDTRYIARLVLNYTKDYLDFLPLSDDENTKLNDTQKGSKVHVEAKSGMLTSALRHTWGFSAKDRNNHLHHAIDAVIIAYANNSIVKAFSDFKKEQESNSAELYAKKISELDYKNKRKFFEPFSGFRQKVLDKIDEIFVSKPERKKPSGALHEETFRKEEEFYQSYGGKEGVLKALELGKIRKVNGKIVKNGDMFRVDIFKHKKTNKFYAVPIYTMDFALKVLPNKAVARSKKGEIKDWILMDENYEFCFSLYKDSLILIQTKDMQEPEFVYYNAFTSSTVSLIVSKHDNKFETLSKNQKILFKNANEKEVIAKSIGIQNLKVFEKYIVSALGEVTKAEFRQREDFKK

SEQ ID NO: 111 - protein, 965 aa, Campylobacter coli
  REGION 1..965: note = Campylobacter coli 67-8
MKIIGFNLGIANIGWALRENDEIIDCGVRVFDIPENPKNGNSLALERRENKARMKIVKRKKARMLATKTFLKKELNVDLSKLFLIGSTQSIYELRTKALSSLISKEELSAIILHIAKHRGYDDSALKNENGTIIEALNKNKEAMLKFKSVGEYFYKNFVQNKEVKKIRNTTEDYSNSVPRSLLKQELDLILDKQKELGLIKNADFKAKLFEIIFFKRPLKDFSNKIGNCIFFENEKRAAKNTISACEFVALGKVVNLLKSIEKDIGIVYEKDSINEIMSIILDKTSISYKKIRDILNLPQDINFKGLDYSKNNAENSKLVDLKKLNEFKKALGDGFANLDKDILDSIATDITLTKDTATLKEKLKNYNVLNAEQIEKLSELVFNDHINLSLKALKQIIPLMYEGKRYDEACELCNFTIAKNQEKNEYLPLFEKTRFAKDISSPVVIRAICEFRKLLNDIIRRYGSVHKIHLELTRDFGISFNDRKKIIKEIEQNEQSRIKALETIKELKLEETSKNIQIVRLFEDQKGICPYSGLKMDLKCLDELVIDYIRPYNRSLDDSYSNKVLTFKKLNDLKQGKTPFEAFGEDEKLWAEINERIKEYNGKKRFKIFDKFFKDKKPFDFTEQTLQDTRWLTKLVASYLNEYLSFLPISEDENTALGYGEKGSKQHVVLSSGMITQMLRNFWYLGFKNHKNYKNNAMDAIIVAFTTNSIIFAFNNFKKELDLAKAEFYANKISESDYLLKRKFLPPFSGFKEQALEKVKNIFVSHSLKIKNKGTLHELTPLKIKELKNTYGDLDLAVKLGKIRKYNDKYYANTKGSLVRTDLFVDKENKFHAVSIYKADFSTKKLPNKTPATTSNGETKEGIEMNENYNFCMSLYKNTPVSVKIKGMKEPIICYYHGFNTSGSKITYKKHDNNYHNLSEDEMVVFRKNDKESIVVGKILEIKKYSISPSGELSLIENEKRKWF

SEQ ID NO: 112 - protein, 965 aa, Campylobacter coli
  REGION 1..965: note = Campylobacter coli 80352
MKIIGFNLGIANIGWALRENDEIIDCGVRVFDIPENPKNGNSLALERRENKARMKIVKRKKARMLATKTFLKKELNVDLSKLFLIGSTQSIYELRTKALSSLISKEELSAIILHIAKHRGYDDSALKNENGTIIEALNKNKEAMLKFKSVGEYFYKNFVQNKEVKKIRNTTEDYSNSVPRSLLKQELDLILDKQKELGLIKNADFKAKLFEIIFFKRPLKDFSNKIGNCIFFENEKRAAKNTISACEFVALGKVVNLLKSIEKDIGIVYEKDSINEIMSIILDKTSISYKKIRDILNLPQDINFKGLDYSKNNVENSKLVDLKKLNEFKKALGDGFTNLDKDILDSIATDITLTKDTATLKEKLKNYNVLNAEQIEKLSELVFNDHINLSLKALKQIIPLMYEGKRYDEACELCNFTIAKNQEKNEYLPLFEKTRFAKDISSPVVIRAICEFRKLLNDIIRRYGSVHKIHLELTRDFGISFNDRKKIIKEIEQNEQSRIKALETIKELKLEETSKNIQIVRLFEDQKGICPYSGLKMDLKCLDELVIDYIRPYNRSLDDSYSNKVLTFKKLNDLKQGKTPFEAFGEDEKLWAEINERIKEYNGKKRFKIFDKFFKDKKPFDFTEQTLQDTRWLTKLVASYLNEYLSFLPISEDENTALGYGEKGSKQHVILSSGMITQMLRNFWYLGFKNHKDYKNNAMDAIIVAFTTNSIIFTFNNFKKELDLAKAEFYANKISESDYLLKRKFLPPFSGFKEQALEKVKNIFVSHSLKIKNKGTLHELTPLKIKELKNTYGDLDLAVKLGKIRKYNDKYYANAKGSLVRTDLFADKENKFHAVSIYKADFSTKKLPNKTPATTSNGETKEGIEMNENYNFCMSLYKNTPISVKIKGMKEPIICYYHGFNTSGSKITYKKHDNNYHNLSEDEMVVFRKNDKESIVVGKILEIKKYSISPSGELSLIENEERKWF

SEQ ID NO: 113 - protein, 987 aa, Campylobacter coli
  REGION 1..987: note = Campylobacter coli 80352
MARILAFDIGISSIGWAFSENDELKDCGVRIFTKAENPKTGESLALPRRLARSARKRLARRKARLNHLKHLIANEFKLNYEDYQSFDESLAKAYKGSLISPYELRFRALNELLSKQDFARVILHIAKRRGYDDIKNSDDKEKGAILKAIKQNEEKLANYQSVGEYLYKEYFQKFKENSKEFTNVRNKKESYERCIAQSFLKDELKLIFKKQREFGFSFSKKFEEEVLSVAFYKRALKDFSHLVGNCSFFTDEKRAPKNSPLAFMFVALTRIINLLNNLKNTEGILYTKDDLNALLNEVLKNGTLTYKQTKKLLGLSDDYEFKGEKGTYFIEFKKYKEFIKALGDHSLSQDDLNEIAKDITLIKDEIKLKKALAKYDLNQNQIDSLSKLEFKDHLNISFKALKLITPLMLEGKKYDEACNELNLKVAINEDKKDFLPAFNETYYKDEVTNPVVLRAIKEYRKVLNALLKKYGKVHKINIELAREVGKNYSQRAKIEKEQNENYKAKKDAELECEKLGLKINSKNILKLRLFKEQKEFCAYSGEKIKISDLQDEKMLEIDHIYPYSRSFDDSYMNKVLVFTKQNQEKLNKTPFEAFGNDSTKWQKIEVLAKNLPEKKQKRILDKNYKDKEQKDFKDRNLNDTRYIARLVLNYTKDYLDFLPLSDDENTKLNDTQKGSKVHVEAKSGMLTSALRHTWGFSTKDRNNHLHHAIDAVIIAYANNSIVKAFSDFKKEQESNSAELYAKKISELDYKNKRKFFEPFSGFRQKVLDKIDEIFVSKPERKKPSGALHEETFRKEEEFYQSYGGKEGVLKALELGKIRKVNGKIVKNGDMFRVDIFKHKKTNKFYAVPIYTMDFALKVLPNKAVARSKKGEIKDWILMDENYEFCFSLYKDSLILIQTKDMQEPEFVYYNAFTSSTVSLIVSKHDNKFETLSKNQKILFKNANEKEVIAKSIGIQNLKVFEKYIVSALGEVTKAEFRQREDFKNELR

SEQ ID NO: 114 - protein, 984 aa, Campylobacter jejuni
MAKILAFDIGISSIGWAFSENDELKDCGVRIFTKAENPKTGESLALPRRIARSARKRLARRKARLNHLKHLIANEFKLNYEDYQSFDEILAKAYKGSLISPYELRFRALNELLSKQDFARVILHIAKRRGYDDIKNNGDEEKGKILKAIKQNEEKLANYQSVGEYLYKEYFQKFKENSKEFINVRNKKESYERCIAQSFLKDELKLIFKKQREFGFSFSKKFEEEVLSVAFYKRALKDFSHLVGNCSFFTDEKRAPKNSPLAFMFVALTRIINLLNNLKNTLYTKDDLNALLNEVLKNGTLTYKQTKKLLGLSDDYEFKGEKGNYFIEFKKYKEFIKALGEHSLSQDDLNEIAKDITLIKDEIKLKKALAKYDLNENQIDNLSKLEFKDHLNISFKALKLITPLMLEGKKYDEACNELTLKVAINEDKKDFLPAFNETYYKDEVTNPVVLRAIKEYRKVLNALLKKYGKVHKINIELAREVGKNHSQRAKIEKEQNENYKAKKDAELECEKLGLKINSKNILKLRLFKEQKEFCVYSGEKIKLSDLQDEKMLEIDHIYPYSRSFDDSYMNKVLVFTKQNQEKLNQTPFEAFGNDSAKWQKIEVLAKNLPTKKQKRILDKNYKDKEQKDFKDRNLNDTRYIARLVLNYTKDYLDFLPLSDDENTKLNDTQKGSKVHVEAKSGMLTSALRHTWGFSTKDRNNHLHHAIDAVIIAYANNSIVKAFSDFKKEQESNTAELYAKKISELDYKNKRKFFEPFSGFRQKVLDKIDEIFVSKPERKKPSGALHEETFRKEEEFYQSYGGKEGVLKALELGKIRKVNGKIVKNGDMFRVDIFKHKKTNKFYAVPIYTMDFALKVLPNKAVARSKKGEIKDWILMDENYEFCFSLYKDSLILIQTKDMQEPEFVYYNAFTSSTVSLIVSKHDNKFETLSKNQKILFKNANEKEVIAKSIGIQNLKVFEKYIVSALGEVTKAEFRQREEFKNELR

SEQ ID NO: 115 - protein, 987 aa, Campylobacter jejuni
  REGION 1..987: note = Campylobacter jejuni subsp. jejuni 110-21
MARILAFDIGISSIGWAFSENDELKDCGVRIFTKAENPKTGESLALPRRLARSARKRLARRKARLNHLKHLIANEFKLNYEDYQSFDESLAKAYKGSLISPYELRFRALNELLSKQDFARVILHIAKRRGYDNIKNSDNEEKSEILKAIKQNEEKLVNYQSVGEYLYKEYFQKFKENSKEFINVRNKKESYERCIAQSFLKDELKLIFQKQREFGLSFSKKFEEEVLSVAFYKRALKDFSHLVGNCSFFTDEKRAPKNSPLAFMFVALTRIINLLNNLKNTEGILYTKDDLNTLLNEVLKNGTLTYKQTKKLLGLSDDYEFKGEKGTYFIEFKKYKEFIKALGDHSLSQDDLNEIAKDITLIKDEIKLKKALAKYDLNQNQIDSLSKLEFKDHLNISFKALKLITPLMLEGKKYDEACNELNLKVVINEDKKDFLPAFNETYYKDEVTNPVVLRAIKEYRKVLNALLKKYGKVHKINIELAREVGKNHSQRAKIEKEQNENYKAKKDAELECEKLGLKINNKNILKLRLFKEQKEFCAYSGEKIKLSDLQDEKMLEIDHIYPYSRSFDDSYMNKVLVFTKQNQEKLNKTPFEAFGNDSTKWQKIEVLAKNLPTKKQKRILDKNYKDKEQKDFKDRNLNDTRYIARLVLNYTKDYLDFLPLSDDENTKLNDIQKGSKVHVEAKSGMLTSALRHTWGFSTKDRNNHLHHAIDAVIIAYANNSIVKAFSDFKKEQESNSAELYAKKISELDYKNKRKFFEPFSGFRQKVLDKIDEIFVSKPERKKPSGALHEETFRKEEEFYQSYGGKEGVLKALELGKIRKVNGKIVKNGDMFRVDIFKHKKTNKFYAVPIYTMDFALKVLPNKAVVQGKDKKSGLIKDWILMDENYEFCFSLYKDSLILIQTKDMQEPEFVYYNAFTSSTVSLIVSKHDNKFETLSKNQKILFKNANEKEVIAKSIGIQNLKVFEKYIVSALGEVTKAEFRQREDFKK

SEQ ID NO: 116 - protein, 987 aa, Campylobacter jejuni
  REGION 1..987: note = Campylobacter jejuni subsp. jejuni 129-258
MARILAFDIGISSIGWAFSENDELKDCGVRIFTKAENPKTGESLALPRRLARSARKRLARRKARLNHLKHLIANEFKLNYEDYQSFNESLAKAYKGSLISPYELRFRALNELLSKQDFARVILHIAKRRGYDDIKNSDDKEKGAILKVIKQNEEKLANYQSVGEYLYKEYFQKFKENSKEFTNVRNKKESYERCIAQSFLKDELKLIFQKQREFGFSFSKKFEEEVLSVAFYKRALKDFSHLVGNCSFFTDEKRAPKNSPLAFMFVALTRIINLLNNLKNTEGILYTKDDLNALLNEVLKNGTLTYKQTKKLLGLSDDYEFKGEKGTYFIEFKKYKEFIKALGDHSLSQDDLNEIAKDITLIKDEIKLKKALAKYDLNQNQIDSLSKLEFKDHLNISFKALKLITPLMLEGKKYDEACNELNLKVAINEDKKDFLPAFNETYYKDEVTNPVVLRAIKEYRKVLNALLKKYGKVHKINIELAREVGKNYSQRAKIEKEQNENYKAKKDAELECEKLGLKINSKNILKLRLFKEQKEFCAYSGEKIKISDLQDEKMLEIDHIYPYSRSFDDSYMNKVLVFTKQNQEKLNQTPFEAFGNDSAKWQKIEVLAKNLPTKKQKRILDKNYKDKEQKDFKDRNLNDTRYIARLVLNYTKDYLDFLPLSDDENTKLNDTQKGSKVHVEAKSGMLTSALRHTWGFSAKDRNNHLHHAIDAVIIAYANNSIVKAFSDFKKEQESNSAELYAKKISELDYKNKRKFFEPFSGFRQKVLDKIDEIFVSKPERKKPSGALHEETFRKEEEFYQSYGGKEGVLKALELGKIRKVNGKIVKNGDMFRVDIFKHKKTNKFYAVPIYTMDFALKVLPNKAVARSKKGEIKDWILMDENYEFCFSLYKDSLILIQTKDMQEPELVYFNAFTSSTVSLIVSKHDNKFETLSKNQKILFKNANEKEVIAKSIGIQNLKVFEKYIVSALGEVTKAEFRQREDFKNELR

SEQ ID NO: 117 - protein, 987 aa, Campylobacter jejuni
  REGION 1..987: note = Campylobacter jejuni subsp. jejuni 1336
MARILAFDIGISSIGWAFSENDELKDCGVRIFTKAENPKTGESLALPRRLARSARKRLARRKARLNHLKHLIANEFKLNYEDYQSFDESLAKAYKGSLISPYELRFRALNELLSKQDFARVILHIAKRRGYDDIKNNGDEEKGKILKAIKQNEEKLVSYQSVGEYLYKEYFQKFKENSKEFINVRNKKESYERCIAQSFLKDELKLIFQKQREFGFSFSKKFEEEVLSVAFYKRALKDFSHLVGNCSFLLMKKERQKNSPLAFMFVALTRIINLLNNLKNTEGILYTKDDLNTLLNEALKNGTLTYKQTKKLLGLSNDYEFKGEKGTYFIEFQKYKEFVKALGEHNLSQDDLNEIAKDITLIKDEIKLKKALAKYDLNQNQIDSLSKLEFKDHLNISFKALKLITPLMLEGKKYDEACNELNLKVAINEDKKDFLPAFNETYYKDEVTNPVVLRAIKEYRKVLNALLKKYGKVHKINIELAREVGKNHSQRAKIEKEQNENYKAKKDAELECEKLGLKINSKNILKLRLFKEQKEFCVYSGEKIKISDLQDEKMLEIDHIYPYSRSFDDSYMNKVLVFTKQNQEKLNKTPFETFGNDRVKWQKIEVLAKNLPTKKQKRILDKNYKDKEQKDFKDRNLNDTRYIARLVLNYTKDYLDFLPLSDDENTKLNDTQKGSKVHVEAKSGMLTSTLRHTWGFSTKDRNNHLHHAIDAAIIAYANNSIVKAFSDFKKEQESNTAELYAKKISELDYKNKRKFFEPFSGFRQKLLDKIDEIFVSKPERKKPSGALHEETFRKEEEFYQSYGGKEGVLKALELGKIRKVNGKMVKNGDMFRVDIFKHKKTNKFYAVPIYTMDFALKVLPNKAVVQGKDKKSGLIKDWILMDENYEFCFSLYKDSLILIQTKDMQEPELVYYERLDSSNASLTVSKHDNKFETLSKNQKILFKNANEKEVIAKSIGIQNLKVFEKYIVSALGEVTKAEFRQREDFKK

SEQ ID NO: 118 - protein, 984 aa, Campylobacter jejuni
  REGION 1..984: note = Campylobacter jejuni subsp. jejuni 140-16
MARILAFDIGISSIGWAFSENDELKDCGVRIFTKVENPKTGESLALPRRLARSARKRLARRKARLNHLKHLIANEFKLNYEDYQSFDESLAKAYKGSLISPYELRFRALNELLSKQDFARVILHIAKRRGYDDIKNSDDKEKGAILKAIKQNEEKLANYQSVGEYLYKEYFQKFKENSKEFTNVRNKKESYERCIAQSFLKDELKLIFKKQREFGFSFSKKFEEEVLSVAFYKRALKDFSHLVGNCSFFTDEKRAPKNSPLAFMFVALTRIINLLNNLKNTEGILYTKDDLNALLNEVLKNGTLTYKQTKKLLGLSDDYEFKGEKGTYFIEFKKYKEFIKALGEHNLSQDDLNEIAKDITLIKDEIKLKKALAKYDLNQNQIDSLSKLEFKDHLNISFKALKLITPLMLEGKKYDEACNELNLKVAINEDKKDFLPAFNETYYKDEVTNPVVLRAIKEYRKVLNALLKKYGKVHKINIELAREVGKNHSQRAKIEKEQNENYKAKKDAELECEKLGLKINSKNILKLRLFKEQKEFCAYSGEKIKISDLQDEKMLEIDHIYPYSRSFDDSYMNKVLVFTKQNQEKLNKTPFEAFGNDSAKWQKIEVLAKNLPTKKQKRILDKNYKDKEQKDFKDRNLNDTRYIARLVLNYTKDYLDFLPLSDDENTKLNDTQKGSKVHVEAKSGMLTSALRHTWGFSTKDRNNHLHHAIDAVIIAYANNSIVKAFSDFKKEQESNSAELYAKKISELDYKNKRKFFEPFSGFRQKVLDKIDEIFVSKPERKKPSGALHEETFRKEEEFYQSYGGKEGVLKALELGKIRKVNGKIVKNGDMFRVDIFKHKKTNKFYAVPIYTMDFALKVLPNKAVARSKKGEIKDWILMDENYEFCFSLYKDSLILIQTKDMQEPEFVYYNAFTSSTVSLIVSKHDNKFETLSKNQKILFKNANEKEVIAKSIGIQNLKVFEKYIVSALGEVTKAEFIQREDFKK

SEQ ID NO: 119 - protein, 984 aa, Campylobacter jejuni
  REGION 1..984: note = Campylobacter jejuni subsp. jejuni 1577
MARILAFDIGISSIGWAFSENDELKDCGVRIFTKVENPKTGESLALPRRLARSARKRLARRKVRLNHLKHLIANEFKLNYEDYQSFDESLAKAYKGSLISPYELRFRALNELLSKQDFARVILHIAKRRGYDDIKNSDDKEKGAILKAIKQNEEKLANYQSVGEYLYKEYFQKFKENSKEFTNVRNKKESYERCIAQSFLKDELKLIFKKQREFGFSFSKKFEEEVLSVAFYKRALKDFSHLVGNCSFFTDEKRAPKNSPLAFMFVALTRIINLLNNLKNTEGILYTKDDLNALLNEVLKNGTLTYKQTKKLLGLSDDYEFKGEKGTYFIEFKKYKEFIKALGEHNLSQDDLNEIAKDITLIKDEIKLKKALAKYDLNQNQIDSLSKLEFKDHLNISFKALKLITPLMLEGKKYDEACNELNLKVAINEDKKDFLPAFNETYYKDEVTNPVVLRAIKEYRKVLNALLKKYGKVHKINIELAREVGKNHSQRAKIEKEQNENYKAKKDAELECEKLGLKINSKNILKLRLFKEQKEFCAYSGEKIKISDLQDEKMLEIDHIYPYSRSFDDSYMNKVLVFTKQNQEKLNKTPFEAFGNDSAKWQKIEVLAKNLPTKKQKRILDKNYKDKEQKDFKDRNLNDTRYIARLVLNYTKDYLDFLPLSDDENTKLNDTQKGSKVHVEAKSGMLTSALRHTWGFSTKDRNNHLHHAIDAVIIAYANNSIVKAFSDFKKEQESNSAELYAKKISELDYKNKRKFFEPFSGFRQKVLDKIDEIFVSKPERKKPSGALHEETFRKEEEFYQSYGGKEGVLKALELGKIRKVNGKIVKNGDMFRVDIFKHKKTNKFYAVPIYTMDFALKVLPNKAVARSKKGEIKDWILMDENYEFCFSLYKDSLILIQTKDMQEPEFVYYNAFTSSTVSLIVSKHDNKFETLSKNQKILFKNANEKEVIAKSIGIQNLKVFEKYIVSALGEVTKAEFRQREDFKK

SEQ ID NO: 120 - protein, 987 aa, Campylobacter jejuni
  REGION 1..987: note = Campylobacter jejuni subsp. jejuni 1854
MARILAFDIGISSIGWAFSENDELKDCGVRIFTKAENPKTGESLALPRRLARSARKRLARRKARLNHLKHLIANEFKLNYEDYQSFDESLAKAYKGSLISPYELRFRALNELLSKQDFARVILHIAKRRGYDDIKNSDDKEKGAILKAIKQNEEKLANYQSVGEYLYKEYFQKFKENSKEFTNVRNKKESYERCIAQSFLKDELKLIFKKQREFGFSFSKKFEEEVLSVAFYKRALKDFSHLVGNCSFFTDEKRAPKNSPLAFMFVALTRIINLLNNLKNTEGILYTKDDLNTLLNEVLKNGTLTYKQTKKLLGLSDDYEFKGEKGTYFIEFKKYKEFIKSLGDHSLSQDDLNEIAKDITLIKDEIKLKKALAKYDLNQNQIDSLSKLEFKDHLNISFKALKLITPLMLEGKKYDEACNELNLKVAINEDKKDFLPAFNETYYKDEVTNPVVLRAIKEYRKVLNALLKKYGKVHKINIELAREVGKNHSQRAKIEKEQNENYKAKKDAELECEKLGLKINSKNILKLRLFKEQKEFCAYSGEKIKISDLQDEKMLEIDHIYPYSRSFDDSYMNKVLVFTKQNQEKLNQTPFEAFGNDSAKWQKIEVLAKNLPTKKQKRILDKNYKDKEQKNFKDRNLNDTRYIARLVLNYTKDYLDFLPLSDDENTKLNDTQKGSKVHVEAKSGMLTSALRHTWGFSAKDRNNHLHHAIDAVIIAYANNSIVKAFSDFKKEQESNSAELYAKKISELDYKNKRKFFEPFSGFRQKVLDKIDEIFVSKPERKKPSGALHEETFRKEEEFYQSYGGKEGVLKALELGKIRKVNGKIVKNGDMFRVDIFKHKKTNKFYAVPIYTMDFALKVLPNKAVARSKKGEIKDWILMDENYEFCFSLYKDSLILIQTKDMQEPEFVYYNAFTSSTVSLIVSKHDNKFETLSKNQKILFKNANEKEVIAKSIGIQNLKVFEKYIVSALGEVTKAEFRQREDFKNELR

SEQ ID NO: 121 - protein, 984 aa, Campylobacter jejuni
  REGION 1..984: note = Campylobacter jejuni subsp. jejuni 1997-10
MARILAFDIGISSIGWAFSENDELKDCGVRIFTKAENPKTGESLALPRRLARSARKRLARRKARLNRLKHLIANEFKLNYEDYQSFDESLAKAYKGSLISPYELRFRALNELLSKQDFARVILHIAKRRGYDDIKNSDDKEKGAILKAIKQNEEKLANYQSVGEYLYKEYFQKFKENSKEFTNVRNKKESYERCIAQSFLKDELKLIFKKQREFGFSFSKKFEEEVLSVAFYKRALKDFSHLVGNCSFFTDEKRAPKNSPLAFMFVALTRIINLLNNLKNTEGILYTKDDLNALLNEVLKNGTLTYKQTKKLLGLSDDYEFKGEKGTYFIEFKKYKEFIKALGDHSLNQDDLNEIAKDITLIKDEIKLKKALAKYDLNQNQIDSLSKLEFKDHLNISFKALKLITPLMLEGKKYDEACNELNLKVAINEDKKDFLPAFNETYYKDEVTNPVVLRAIKEYRKVLNALLKKYGKVHKINIELAREVGKNYSQRAKIEKEQNENYKAKKDAELECEKLGLKINSKNILKLRLFKEQKEFCVYSGEKIKISDLQDEKMLEIDHIYPYSRSFDDSYMNKVLVFTKQNQEKLNQTPFEAFGNDSAKWQKIEVLAKNLPTKKQKRILDKNYKDKEQKDFKDRNLNDTRYIARLVLNYTKDYLDFLPLSDDENTKLNDTQKGSKVYVEAKSGMLTSALRHTWGFSTKDRNNHLHHAIDAVIIAYANNSIVKAFSDFKKEQESNSAELYAKKISELDYKNKRKFFEPFSGFRQKVLDKIDEIFVSKPERKKPSGALHEETFRKEEEFYQSYGGKEGVLKALELGKIRKVNGKIVKNGDMFRVDIFKHKKTNKFYAVPIYTMDFALKVLPNKAVARSKKGEIKDWILMDENYEFCFSLYKDSLILIQTKDMQEPEFVYYNAFTSSTVSLIVSKHDNKFETLSKNQKILFKNANEKEVIAKSIGIQNLKVFEKYIVSALGEVTKAEFRQREDFKK

SEQ ID NO: 122 - protein, 987 aa, Campylobacter jejuni
  REGION 1..987: note = Campylobacter jejuni subsp. jejuni 2008-1025
MARILAFDIGISSIGWAFSENDELKDCGVRIFTKAENPKTGESLALPRRLARSARKRLARRKARLNHLKHLIANEFKLNYEDYQSFDESLAKAYKGSLISPYELRFRALNELLSKQDFARVILHIAKRRGYDDIKNNGDEEKSEILKAIKQNEEKLVNYQSVGEYLYKEYFQKFKENSKEFINVRNKKESYERCIAQSFLKDELKLIFQKQREFGFSFSKKFEEEVLSVAFYKRALKDFSHLVGNCSFFTDEKRAPKNSPLAFMFVALTRIINLLNNLKNTEGILYTKDDLNTLLNEVLKNGTLTYKQTKKLLGLSDDYEFKGEKGTYFIEFKKYKEFIKALGEHNLSQDNLNEIAKDITLIKDEIKLKKALAKYDLNQNQIDSLSKLEFKDHLNISFKALKLITPLMLEGKKYDEAYNELNLKVAINEDKKDFLPAFNETYYKDEVTNPVVLRAIKEYRKVLNALLKKYGKVHKINIELAREVGKNHSQRAKIEKEQNENYKAKKDAELECEKLGLKINSKNILKLRLFKEQKEFCAYSGEKIKISDLQDEKMLEIDHIYPYSRSFDDSYMNKVLVFTKQNQEKLNQTPFEAFGNDSAKWQKIEVLAKNLPTKKQKRILDKNYKDKEQKDFKDRNLNDTRYIARLVLNYTKDYLDFLPLSDDENTKLNDTQKGSKVHVEAKSGMLTSALRHTWGFSAKDRNNHLHHAIDAVIIAYANNSIVKAFSDFKKEQESNSAELYAKKISELDYKNKRKFFEPFSGFRQKVLDKIDEIFVSKPERKKPSGALHEETFRKEEEFYQSYGGKEGVLKALELGKIRKVNGKIVKNGDMFRVDIFKHKKTNKFYAVPIYTMDFALKVLPNKAVVQGKDKKSGLIKDWILMDENYEFCFSLYKDSLILIQTKDMQEPELVYFNAFTSSTVSLIVSKHDNKFETLSKNQKILFKNANEKEVIAKSIGIQNLKVFEKYIVSALGEVTKAEFRQREDFKK

SEQ ID NO: 123 - protein, 984 aa, Campylobacter jejuni
  REGION 1..984: note = Campylobacter jejuni subsp. jejuni 2008-872
MARILAFDIGISSIGWAFSENDELKDCGVRIFTKVENPKTGESLALPRRLARSARKRLARRKARLNHLKHLIANEFKLNYEDYQSFDESLAKAYKGSLISPYELRFRALNELLSKQDFARVILHIAKRRGYDDIKNSDDKEKGAILKAIKQNEEKLANYQSVGEYLYKEYFQKFKENSKEFTNVRNKKESYERCIAQSFLKDELKLIFKKQREFGFSFSKKFEEEVLSVAFYKRALKDFSHLVGNCSFFTDEKRAPKNSPLAFMFVALTRIINLLNNLKNTEGILYTKDDLNALLNEVLKNGTLTYKQTKKLLGLSDDYEFKGEKGTYFIEFKKYKEFIKALGEHNLSQDDLNEIAKDITLIKDEIKLKKALAKYDLNQNQIDSLSKLEFKDHLNISFKALKLITPLMLEGKKYDEACNELNLKVAINEDKKDFLPAFNETYYKDEVTNPVVLRAIKEYRKVLNALLKKYGKVHKINIELAREVGKNHSQRAKIEKEQNENYKAKKDAELECEKLGLKINSKNILKLRLFKEQKEFCAYSGEKIKISDLQDEKMLEIDHIYPYSRSFDDSYMNKVLVFTKQNQEKLNKTPFEAFGNDSAKWQKIEVLAKNLPTKKQKRILDKNYKDKEQKDFKDRNLNDTRYIARLVLNYTKDYLDFLPLSDDENTKLNDTQKGSKVHVEAKSGMLTSALRHTWGFSTKDRNNHLHHAIDAVIIAYANNSIVKAFSDFKKEQESNSAELYAKKISELDYKNKRKFFEPFSGFRQKVLDKIDEIFVSKPERKKPSGALHEETFRKEEEFYQSYGGKEGVLKALELGKIRKVNGKIVKNGDMFRVDIFKHKKTNKFYAVPIYTMDFALKVLPNKAVARSKKGEIKDWILMDENYEFCFSLYKDSLILIQTKDMQEPEFVYYNAFTSSTVSLIVSKHDNKFETLSKNQKILFKNANEKEVIAKSIGIQNLKVFEKYIVSALGEVTKAEFRQREDFKK

SEQ ID NO: 124 - protein, 987 aa, Campylobacter jejuni
  REGION 1..987: note = Campylobacter jejuni subsp. jejuni 2008-979
MARILAFDIGISSIGWAFSENDELKDCGVRIFTKAENPKTGESLALPRRLARSARKRLARRKARLNHLKHLIANEFKLNYEDYQSFDESLAKAYKGSLISPYELRFRALNELLSKQDFARVILHIAKRRGYDDIKNSDDKEKGAILKAIKQNEEKLVNYQSVGEYLYKEYFQKFKENSKEFTNVRNKKESYERCIAQSFLKDELKLIFKKQREFGFSFSKKFEEEVLSVAFYKRALKDFSHLVGNCSFFTDEKRAPKNSPLAFMFVALTRIINLLNNLKNTEGILYTKDDLNALLNEVLKNGTLTYKQTKKLLGLSDDYEFKGEKGTYFIEFKKYKEFIKALGDHSLSQDDLNEIAKDITLIKDEIKLKKALAKYDLNQNQIDSLSKLEFKDHLNISFKALKLITPLMLEGKKYDEACNELNLKVAINEDKKDFLPAFNETYYKDEVTNPVVLRAIKEYRKVLNALLKKYGKVHKINIELAREVGKNYSQRAKIEKEQNENYKAKKDAELECEKLGLKINSKNILKLRLFKEQKEFCAYSGEKIKISDLQDEKMLEIDHIYPYSRSFDDSYMNKVLVFTKQNQEKLNQTPFEAFGNDSAKWQKIEVLAKNLPTKKQKRILDKNYKDKEQKDFKDRNLNDTRYIARLVLNYTKDYLDFLPLSDDENTKLNDTQKGSKVHVEAKSGMLTSALRHTWGFSAKDRNNHLHHAIDAVIIAYANNSIVKAFSDFKKEQESNSAELYAKKISELDYKNKRKFFEPFSGFRQKVLDKIDEIFVSKPERKKPSGALHEETFRKEEEFYQSYGGKEGVLKALELGKIRKVNGKIVKNGDMFRVDIFKHKKTNKFYAVPIYTMDFALKVLPNKAVARSEKGEIKDWILMDENYEFCFSLYKDSLILIQTKDMQEPELVYFNAFTSSTVSLIVSKHDNKFETLSKNQKILFKNANEKEVIAKSIGIQNLKVFEKYIVSALGEVTKAEFRQREDFKNELR

SEQ ID NO: 125 - protein, 965 aa, Campylobacter jejuni
  REGION 1..965: note = Campylobacter jejuni subsp. jejuni 2008-988
MKIIGFNLGIANIGWALRENDEIIDCGVRVFDIPENPKNGNSLALERRENKARMKIVKRKKARMLATKTFLKKELNVDLSKLFLIGSTQSIYELRAKALSSLISKEELSAIILHIAKHRGYDDSALKNENGTIIEALNKNKETMLKFKSVGEYFYKNFVQNKEVKKIRNTTEDYSNSVPRSLLKQELDLILDKQKELGLIKNADFKEKLFEIIFFKRPLKDFSNKIGNCIFFENEKRAAKNTISACEFVALGKVVNLLKSIEKDIGIVYEKDSINEIMSIILDKTSISYKKIRDILNLPQEINFKGLDYSKNNVENSKLVDLKKLNEFKKALGDGFANLDKDILDSIATDITLTKDTATLKEKLKNYNVLNAEQIEKLSELVFNDHINLSLKALKQIIPLMYEGKRYDEACELCNFTIAKNQEKSEYLPLFEKTRFAKDISSPVVIRAICEFRKLLNDIIRRYGSVHKIHLELTRDFGISFSDRKKIIKEIEQNEQSRIKALETIKELKLEETSKNIQIVRLFEDQKGICPYSGLKMDLNRLDELVIDYIRPYNRSLDDSYSNKVLTFKKLSDLKQGKTPFEAFGEDEKLWAEINERIKEYNGKKRFKIFDKFFKDKKPFDFTEQTLQDTRWLTKLVASYLNEYLSFLPISEDENTALGYGEKGSKQHVILSSGMITQMLRNFWYLGFKNHKDYKNNAMDAIIVAFTTNSIIFAFNNFKKELDLAKAEFYANKISESDYLLKRKFLPPFSGFKEQALEKVKNIFVSHSLKIKNKGTLHDLTPLKIKELKNTYGDLDLAVKLGKIRKYNDKYYANANGSLVRADLFVDKKNKFHAVSIYKADFSTKKLPNKTPATTSNGETKEGIEMNENYNFCMSLYKNTPISVKIKGMKEPIICYYHGFNTSGSKITYKKHDNNYHNLSEDEMVVFRKNDKESIAVGKILEIKKYSISPSGELSLIENEERKWF

SEQ ID NO: 126 - protein, 984 aa, Campylobacter jejuni
  REGION 1..984: note = Campylobacter jejuni subsp. jejuni 2008-988
MARILAFDIGISSIGWAFSENDELKDCGVRIFTKVENPKTGESLALPRRLARSARKRLARRKARLNHLKHLIANEFKLNYEDYQSFDESLAKAYKGSLISPYELRFRALNELLSKQDFARVILHIAKRRGYDDIKNSDDKEKGAILKAIKQNEEKLANYQSVGEYLYKEYFQKFKENSKEFTNVRNKKESYERCIAQSFLKDELKLIFKKQREFGFSFSKKFEEEVLSVAFYKRALKDFSHLVGNCSFFTDEKRAPKNSPLAFMFVTLTRIINLLNNLKNTEGILYTKDDLNALLNEVLKNGTLTYKQTKKLLGLSDDYEFKGEKGTYFIEFKKYKEFIKALGEHNLSQDDLNEIAKDITLIKDEIKLKKALAKYDLNQNQIDSLSKLEFKDHLNISFKALKLITPLMLEGKKYDEACNELNLKVAINEDKKDFLPAFNETYYKDEVTNPVVLRAIKEYRKVLNALLKKYGKVHKINIELAREVGKNHSQRAKIEKEQNENYKAKKDAELECEKLGLKINSKNILKLRLFKEQKEFCAYSGEKIKISDLQDEKMLEIDHIYPYSRSFDDSYMNKVLVFTKQNQEKLNKTPFEAFGNDSAKWQKIEVLAKNLPTKKQKRILDKNYKDKEQKDFKDRNLNDTRYIARLVLNYTKDYLDFLPLSDDENTKLNDTQKGSKVHVEAKSGMLTSALRHTWGFSTKDRNNHLHHAIDAVIIAYANNSIVKAFSDFKKEQESNSAELYAKKISELDYKNKRKFFEPFSGFRQKVLDKIDEIFVSKPERKKPSGALHEETFRKEEEFYQSYGGKEGVLKALELGKIRKVNGKIVKNGDMFRVDIFKHKKTNKFYAVPIYTMDFALKVLPNKAVARSKKGEIKDWILMDENYEFCFSLYKDSLILIQTKDMQEPEFVYYNAFTSSTVSLIVSKHDNKFETLSKNQKILFKNANEKEVIAKSIGIQNLKVFEKYIVSALGEVTKAEFRQREDFKK

SEQ ID NO: 127 - protein, 961 aa, Campylobacter jejuni
  REGION 1..961: note = Campylobacter jejuni subsp. jejuni 260.94
MARILAFDIGISSIGWAFSENDELKDCGVRIFTKAENPKTGESLALPRRLARSARKRLARRKARLNHLKHLIANEFKLNYEDYQSFDESLAKAYKGSLISPYELRFRALNELLSKQDFARVILHIAKRRGYDDIKNNGDEEKGKILKAIKQNEEKLVNYQSVGEYLYKEYFQKFKENSKEFINVRNKKESYERCITQSFLKYELKLIFQKQREFGFSFSKKFEEEVLSVAFYKRALKDFSHLVGNCSFFSDEKRAPKNSPLAFMFVALTRIINLLNNLKNTEGILYTKDDLNALLNEVLKNGTLTYKQTKKLLGLSDDYEFKGEKGTYFIEFKKYKEFIKALGEHNLSQDDLNEIAKDITLIKDEIKLKKALAKYDLNQNQIDSLSKLEFKDHLNIGFKALKLITPLMLEGKKYDEACNELNLKVAINEDKKDFLPAFNETYYKDEVTNPVVLRAIKEYRKVLNALLKKYGKVHKINIELAREVGKNHSQRAKIEKEQNENYKAKKDAELECEKLGLKINSKNILKLRLFKEQKEFCAYSGEKIKLSDLQDEKMLEIDHIYPYSRSFDDSYMNKVLVFTKQNQEKLNKTPFEAFGNDNVKWQKIEVLAKNLPEKKQKRILDKNYKDKEQKDFKDRNLNDTRYIARLVLNYTKDYLDFLPLSDDENTKLKGSKVHVEAKSGMLTSALRHTWGFSTKDRNNHLHHAIDAAIIAYANNSIVKDFSDFKKEQESNSAELYAKKISELDYKNKRKFFEPFSGFRQKVLDKIDEIFVSKPERKKPSGALHEETFRKEEEFYQSYGGKEGVLKALELGKIRKVNGKIVKNGDMFRVDIFKHKKTNKFYAVPIYTMDFALKVLPNKAVARSKKGEIKDWILMDENYEFCFSLYKDSLILIQTKDMQEPELVYFNAFTSSTVSLIVSKHDNKFETLSKNLKVFEKYIVSALGEVTKAEFRQREDFKNELR

SEQ ID NO: 128 - protein, 985 aa, Campylobacter jejuni
  REGION 1..985: note = Campylobacter jejuni subsp. jejuni 414
MAKILAFDIGISSIGWAFVENDELKDCGVRIFTKAENPKTGESLALPRRLARSARKRLARRKARLNHLKHLIANEFKLNYEDYQSFDESLAKAYKGTLISPYELRFKALNELLSKQDLARVILHIAKRRGYDNIKNSDDKEKGAILKAVKENEEKLANYKSVGEYLYKEYFQKFKENSKEFINVRNKKESYERCIAQSFLKDELKLIFQKQREFGFNFSKKFEEEVLSVAFYKRALKDFSHLVGNCSFFVDEKRAPKNSPLAFEFVALTRIVNLLNNLNKNNSYIKDDLNALLSEVLKNGTLTYKQTKKILGLSDDYEFKGQKGNYFIEFKKYKEFIKALCEHNLNQDDLNEIAKDITLVKDETKLKKALAKYDLNQNQIENLSKIEFKDHLNISFKALKLIVPLMREGKKYDEVCNELNLKTAINEDKKEFLPAFNETYYKDEVNNPVVLRAIKEYRKVLNSLLKKYGKVHKINIELAREVGKNHRERSKIEKEQNENFKAKKDAELECEKLGLKINSKNILKLRLFKEQKEFCVYSGEKIKISDLQDEKMLEIDHIYPYSRSFDDSYMNKVLVFTKQNQEKLNKTPFEAFGKDDVKWQKIETLAKNLPAKKQKRILDKNYKDKEQKDFKDRNLNDTRYIARLVLNYTKDYLEFLPLSDDENIKLNDTQKGSKVHVEAKSGMLTSVLRHTWGFSTKDRNNHLHHAIDAVIIAYANASVVKAFSDFKKEQENYTAELYAKKINELDFKNKRKFFEPFSNFRQKVLEKIDEIFVSKPERKKPSGALHEETFYKEEEFYKEYGGKEGVLKALELGKIRKVNGKIVSNANMFRVDIFKYKKTNKFYAVPIYTMDFALGILPNKAVVGGKDKQGIIKDWLLMDENYEFCFSLYKDSLILLQTKDMQEPELVYFKSFKSSTAGLVVSKHDNKFENLNENQKKLFKSANEKKVVAEGIGIQNLKVFEKYIVSALGEITKAEIKERENFKKK

SEQ ID NO: 129 - protein, 984 aa, Campylobacter jejuni
  REGION 1..984: note = Campylobacter jejuni subsp. jejuni 51037
MARILAFDIGISSIGWAFSENDELKDCGVRIFTKAENPKTGESLALPRRLARSARKRLARRKARLNHLKHLIANEFKLNYEDYQSFDESLAKAYKGSLISPYELRFRALNELLSKQDFARVILHIVKRRGYDDIKNSDDKEKGTILKAIKQNEEKLANYQSVGEYLYKEYFQKFKENSKEFTNVRNKKESYERCIAQSFLKDELKLIFKKQREFGFSFSKKFEEEVLSVAFYKRALKDFSHLVGNCSFFTDEKRAPKNSPLAFMFVALTRIINLLNNLKNTEGILYTKDDLNTLLNEVLKNGTLTYKQTKKLLGLSDDYEFKGEKGTYFIEFKKYKEFIKALGEHNLSQDDLNEIAKDITLIKDEIKLKKALAKYDLNQNQIDSLSKLEFKDHLNISFKALKLITPLMLEGKKYDEACNELNLKVAINEDKKDFLPAFNETYYKDEVTNPVVLRAIKEYRKVLNALLKKYGKVHKINIELAREVGKNYSQRAKIEKEQNENYKAKKDAELECEKLGLKINSKNILKLRLFKEQKEFCAYSGEKIKISDLQDEKMLEIDHIYPYSRSFDDSYMNKVLVFTKQNQEKLNQTPFEAFGNDSAKWQKIEVLAKNLPTKKQKRILDKNYKDKEQKDFKDRNLNDTRYIARLVLNYTKDYLDFLPLSDDENTKLNDTQKGSKVHVEAKSGMLTSALRHTWGFSAKDRNNHLHHAIDAVIIAYANNSIVKAFSDFKKEQESNSAELYAKKISELDYKNKRKFFEPFSGFRQKVLDKIDEIFVSKPERKKPSGALHEETFRKEEEFYQSYGGKEGVLKALELGKIRKVNGKIVKNGDMFRVDIFKHKKTNKFYAVPIYTMDFALKVLPNKAVARSKKGEIKDWILMDENYEFCFSLYKDSLILIQTKDMQEPEFVYYNAFTSSTVSLIVSKHDNKFETLSKNQKILFKNANEKEVIAKSIGIQNLKVFEKYIVSALGEVTKAEFRQREDFKK

SEQ ID NO: 130 - protein, 984 aa, Campylobacter jejuni
  REGION 1..984: note = Campylobacter jejuni subsp. jejuni 51494
MARILAFDIGISSIGWAFSENDELKDCGVRIFTKAENPKTGESLALPRRLARSARKRLARRKARLNHLKHLIANEFKLNYEDYQSFDESLAKAYKGSLISPYELRFRALNELLSKQDFARVILHIAKRRGYDDIKNSDDKEKGAILKAIKQNEEKLANYQSVGEYLYKEYFQKFKENSKEFTNVRNKKESYERCIAQSFLKDELKLIFKKQREFGFSFSKKFEEEVLSVAFYKRALKDFSHLVGNCSFFTDEKRAPKNSPLAFMFVALTRIINLLNNLKNTEGILYTKDDLNTLLNEVLKNGTLTYKQTKKLLGLSDDYEFKGEKGTYFIEFKKYKEFIKALGEHNLSQDDLNEIAKDITLIKDEIKLKKALAKYDLNQNQIDSLSKLEFKDHLNISFKALKLITPLMLEGKKYDEACNELNLKVAINEDKKDFLPAFNETYYKDEVTNPVVLRAIKEYRKVLNALLKKYGKVHKINIELAREVGKNYSQRAKIEKEQNENYKAKKDAELECEKLGLKINSKNILKLRLFKEQKEFCAYSGEKIKISDLQDEKMLEIDHIYPYSRSFDDSYMNKVLVFTKQNQEKLNKTPFEAFGNDSTKWQKIEVLAKNLPEKKQKRILDKNYKDKEQKDFKDRNLNDTRYIARLVLNYTKDYLDFLPLSDDENTKLNDTQKGLKVHVEAKSGMLTSALRHTWGFSAKDRNNHLHHAIDAVIIAYANNSIVKAFSDFKKEQESNSAELYAKKISELDYKNKRKFFEPFSGFRQKVLDKIDEIFVSKPERKKPSGALHEETFRKEEEFYQSYGGKEGVLKALELGKIRKVNGKIVKNGDMFRVDIFKHKKTNKFYAVPIYTMDFALKVLPNKAVARSKKGEIKDWILMDENYEFCFSLYKDSLILIQTKDMQEPEFVYYNAFTSSTVSLIVSKHDNKFETLSKNQKILFKNANEKEVIAKSIGIQNLKVFEKYIVSALGEVTKAEFRQREDFKK

SEQ ID NO: 131 - protein, 987 aa, Campylobacter jejuni
  REGION 1..987: note = Campylobacter jejuni subsp. jejuni 53161
MARILAFDIGISSIGWAFSENDELKDCGVRIFTKAENPKTGESLALPRRLARSARKRLARRKARLNHLKHLIANEFKLNYEDYQSFDEGLAKAYKGSLISPYELRFRALNELLSKQDFARVILHIAKRRGYDDIKNNGDEEKSEILKAIKQNEEKLVNYQSVGEYLYKEYFQKFKENSKEFINVRNKKESYERCIAQSFLKDELKLIFQKQREFGFSFSKKFEEEVLSVAFYKRALKDFSHLVGNCSFFTDEKRAPKNSPLAFMFVALTRIINLLNNLKNTEGILYTKDDLNTLLNEVLKNGTLTYKQTKKLLGLSDDYEFKGEKGTYFIEFKKYKEFIKALGEHNLSQDNLNEIAKDITLIKDEIKLKKALAKYDLNQNQIDSLSKLEFKDHLNISFKALKLITPLMLEGKKYDEAYNELNLKVAINEDKKDFLPAFNETYYKDEVTNPVVLRAIKEYRKVLNALLKKYGKVHKINIELAREVGKNHSQRAKIEKEQNENYKAKKDAELECEKLGLKINSKNILKLRLFKEQKEFCAYSGEKIKISDLQDEKMLEIDHIYPYSRSFDDSYMNKVLVFTKQNQEKLNQTPFEAFGNDSAKWQKIEVLAKNLPTKKQKRILDKNYKDKEQKDFKDRNLNDTRYIARLVLNYTKDYLDFLPLSDDENTKLNDTQKGSKVHVEAKSGMLTSALRHTWGFSAKDRNNHLHHAIDAVIIAYANNSIVKAFSDFKKEQESNSAELYAKKISELDYKNKRKFFEPFSGFRQKVLDKIDEIFVSKPERKKPSGALHEETFRKEEEFYQSYGGKEGVLKALELGKIRKVNGKIVKNGDMFRVDIFKHKKTNKFYAVPIYTMDFALKVLPNKAVVQGKDKKSGLIKDWILMDENYEFCFSLYKDSLILIQTKDMQEPELVYFNAFTSSTVSLIVSKHDNKFETLSKNQKILFKNANEKEVIAKSIGIQNLKVFEKYIVSALGEVTKAEFRQREDFKK

SEQ ID NO: 132 - protein, 984 aa, Campylobacter jejuni
  REGION 1..984: note = Campylobacter jejuni subsp. jejuni 60004
MARILAFDIGISSIGWAFSENDELKDCGVRIFTKAENPKTGESLALPRRLARSARKRLARRKARLNHLKHLIANEFKLNYEDYQSFDESLAKAYKGSLISPYELRFRALNELLSKQDFARVILHIAKRRGYDDIKNNGDEEKGKILKAIKQNEEKLVNYQSVGEYLYKEYFQKFKENSKEFINVRNKKESYERCITQSFLKYELKLIFQKQREFGFSFSKKFEEEVLSVAFYKRALKDFSHLVGNCSFFTDEKRAPKNSPLAFMFVALTRIINILNNLKNTEGILYTKDDLNALLNEVLKNGTLTYKQTKKLLGLSDDYEFKGEKGTYFIEFKKYKEFIKALGEHNLSQDDLNEIAKDITLIKDEIKLKKALAKYDLNQNQIDSLSKLEFKDHLNISFKALKLITPLMLEGKKYDEACNELNLKVAINEDKKDFLPAFNETYYKDEVTNPVVLRAIKEYRKILNALLKKYGKVHKINIELAREVGKNHSQRAKIEKEQNENYKAKKDAEIECEKLGLKINSKNILKLRLFKEQKEFCAYSGEKIKISDLQDEKMLEIDHIYPYSRSFDDSYMNKVLVFTKQNQEKLNQTPFEAFGNDSAKWQKIEVLAKNLPTKKQKRILDKNYKDKEQKDFKDRNLNDTRYIARLVLNYTKDYLDFLPLSDDENTKLNDTQKGSKVHVEAKSGMLTSALRHTWGFSAKDRNNHLHHAIDAVIIAYANNSIVKAFSDFKKEQESNSAELYAKKISELDYKNKRKFFEPFSGFRQKVLDKIDEIFVSKPERKKPSGALHEETFRKEEEFYQSYGGKEGVLKALELGKIRKVNGKIVKNGDMFRVDIFKHKKTNKFYAVPIYTMDFALKVLPNKAVARSKKGEIKDWILMDENYEFCFSLYKDSLILIQTKDMQEPEFVYYNAFTSSTVSLIVSKHDNKFETLSKNQKILFKNANEKEVIAKSIGIQNLKVFEKYIVSALGEVTKAEFRQREDFKK

SEQ ID NO: 133 - protein, 984 aa, Campylobacter jejuni
MARILAFDIGISSIGWAFSENDELKDCGVRIFTKAENPKTGESLALPRRLARSARKRLARRKARLNHLKHLIANEFKLNYEDYQSFDESLAKAYKGSLISPYELRFRALNELLSKQDFARVILHIAKRRGYDDIKNNGDEEKSEILKAIKQNEEKLVNYQSVGEYLYKEYFQKFKENSKEFINVRNKKESYERCITQSFLKDELKLIFQKQREFGFSFSKKFEEEVLSVAFYKRALKDFSHLVGNCSFFTDEKRAPKNSPLAFMFVALTRIINILNNLKNTEGILYTKDDLNALLNEVLKNGTLTYKQTKKLLGLSDDYEFKGEKGTYFIEFKKYKEFIKALGEHNLSQDDLNEIAKDITLIKDEIKLKKALAKYDLNQNQIDSLSKLEFKDHLNISFKALKLITPLMLEGKKYDEACNELNLKVAINEDKKDFLPAFNETYYKDEVTNPVVLRAIKEYRKILNALLKKYGKVHKINIELAREVGKNHSQRAKIEKEQNENYKAKKDAEIECEKLGLKINSKNILKLRLFKEQKEFCAYSGEKIKLSDLQDEKMLEIDHIYPYSRSFDDSYMNKVLVFTKQNQEKLNKTPFEAFGNDSTKWQKIEVLAKNLPEKKQKRILDKNYKDKEQKDFKDRNLNDTRYIARLVLNYTKDYLDFLPLSDDENTKLNDTQKGSKVHVEAKSGMLTSALRHTWGFSAKDRNNHLHHAIDAAIIAYANNSIVKAFSDFKKEQESNSVELYAKKISELDYKNKRKFFEPFSGFRQKVLDKIDEIFVSKPERKKPSGALHEETFRKEEEFYQSYGGKEGVLKALELGKIRKVNGKIVKNGDMFRVDIFKHKKTNKFYAVPIYTMDFALKVLPNKAVARSKKGEIKDWILMDENYEFCFSLYKDSLILIQTKDMQEPELVYFNAFTSSTVSLIVSKHDNKFETLSKNQKILFKNANEKEVIAKSIGIQNLKVFEKYIVSALGEVTKAEFRQREDFKK

SEQ ID NO: 134 - protein, 984 aa, Campylobacter jejuni
  REGION 1..984: note = Campylobacter jejuni subsp. jejuni 84-25
MVRILAFDIGISSIGWAFSENDELKDCGVRIFTKVENPKTGESLALPRRLARSARKRLARRKARLNHLKHLIANEFKLNYEDYQSFDESLAKAYKGSLISPYELRFRALNELLSKQDFARVILHIAKRRGYDDIKNSDDKEKGAILKAIKQNEEKLANYQSVGEYLYKEYFQKFKENSKEFTNVRNKKESYERCIAQSFLKDELKLIFKKQREFGFSFSKKFEEEVLSVAFYKRALKDFSHLVGNCSFFTDEKRAPKNSPLAFMFVALTRIINLLNNLKNTEGILYTKDDLNALLNEVLKNGTLTYKQTKKLLGLSDDYEFKGEKGTYFIEFKKYKEFIKALGEHNLSQDDLNEIAKDITLIKDEIKLKKALAKYDLNQNQIDSLSKLEFKDHLNISFKALKLITPLMLEGKKYDEACNELNLKVAINEDKKDFLPAFNETYYKDEVTNPVVLRAIKEYRKVLNALLKKYGKVHKINIELAREVGKNHSQRAKIEKEQNENYKAKKDAELECEKLGLKINSKNILKLRLFKEQKEFCAYSGEKIKISDLQDEKMLEIDHIYPYSRSFDDSYMNKVLVFTKQNQEKLNKTPFEAFGNDSAKWQKIEVLAKNLPTKKQKRILDKNYKDKEQKDFKDRNLNDTRYIARLVLNYTKDYLDFLPLSDDENTKLNDTQKGSKVHVEAKSGMLTSALRHTWGFSTKDRNNHLHHAIDAVIIAYANNSIVKAFSDFKKEQESNSAELYAKKISELDYKNKRKFFEPFSGFRQKVLDKIDEIFVSKPERKKPSGALHEETFRKEEEFYQSYGGKEGVLKALELGKIRKVNGKIVKNGDMFRVDIFKHKKTNKFYAVPIYTMDFALKVLPNKAVARSKKGEIKDWILMDENYEFCFSLYKDSLILIQTKDMQEPEFVYYNAFTSSTVSLIVSKHDNKFETLSKNQKILFKNANEKEVIAKSIGIQNLKVFEKYIVSALGEVTKAEFRQREDFKK

SEQ ID NO: 135 - protein, 984 aa, Campylobacter jejuni
  REGION 1..984: note = Campylobacter jejuni subsp. jejuni 87459
MARILAFDIGISSIGWAFSENDELKDCGVRIFTKAENPKTGESLALPRRLARSARKRLARRKARLNHLKHLIANEFKLNYEDYQSFDESLAKAYKGSLISPYELRFRALNELLSKQDFARVILHIAKRRGYDDIKNSDDKEKGAILKAIKQNEEKLANYQSVGEYLYKEYFQKFKENSKEFTNVRNKKESYERCIAQSFLKDELKLIFKKQREFGFSFSKKFEEEVLSVAFYKRALKDFSHLVGNCSFFTDEKRAPKNSPLAFMFVALTRIINLLNNLKNTEGILYTKDDLNTFLNEVLKNGTLTYKQTKKLLGLSDDYEFKGEKGTYFIEFKKYKEFIKALGDHNLSQDDLNEIAKDITLIKDEIKLKKALAKYDLNQNQIDSLSKLEFKDHLNISFKALKLITPLMLEGKKYDEACNELNLKVAINEDKKDFLPAFNETYYKDEVTNPVVLRAIKEYRKVLNALLKKYGKVHKINIELAREVGKNHSQRAKIEKEQNENYKAKKDAELECEKLGLKINSKNILKLRLFKEQKEFCAYSGEKIKISDLQDEKMLEIDHIYPYSRSFDDSYMNKVLVFTKQNQEKLNKTPFEAFGNDSAKWQKIEVLAKNLPTKKQKRILDKNYKDKEQKDFKDRNLNDTRYIARLVLNYTKDYLDFLPLSDDENTKLNDTQKGSKVHVEAKSGMLTSALRHTWGFSTKDRNNHLHHAIDAVIIAYANNSIVKAFSDFKKEQESNSAELYAKKISELDYKNKRKFFEPFSGFRQKVLDKIDEIFVSKPERKKPSGALHEETFRKEEEFYQSYGGKEGVLKALELGKIRKVNGKIVKNGDMFRVDIFKHKKTNKFYAVPIYTMDFALKVLPNKAVARSKKGEIKDWILMDENYEFCFSLYKDSLILIQTKDMQEPEFVYYNAFTSSTVSLIVSKHDNKFETLSKNQKILFKNANEKEVIAKSIGIQNLKVFEKYIVSALGEVTKAEFRQREDFKK

SEQ ID NO: 136 - protein, 984 aa, Campylobacter jejuni
  REGION 1..984: note = Campylobacter jejuni subsp. jejuni ATCC 33560
MARILAFDIGISSIGWAFSENDELKDCGVRIFTKAENPKTGESLALPRRLARSARKRLARRKARLNHLKHLIANEFKLNYEDYQSFDESLAKAYKGSLISPYELRFRALNELLSKQDFARVILHIAKRRGYDDIKNSDDKEKGAILKAIKQNEEKLANYQSVGEYLYKEYFQKFKENSKEFTNVRNKKESYERCIAQSFLKDELKLIFKKQREFGFSFSKKFEEEVLSVAFYKRALKDFSHLVGNCSFFTDEKRAPKNSPLAFMFVALTRIINLLNNLKNTEGILYTKDDLNALLNEVLKNGTLTYKQTKKLLGLSDDYEFKGEKGTYFIEFKKYKEFIKALGDHSLSQDDLNEIAKDITLIKDEIKLKKALAKYDLNQNQIDSLSKLEFKDHLNISFKALKLITPLMLEGKKYDEACNELNLKVAINEDKKDFLPAFNETYYKDEVTNPVVLRAIKEYRKVLNALLKKYGKVHKINIELAREVGKNYSQRAKIEKEQNENYKAKKDAELECEKLGLKINSKNILKLRLFKEQKEFCAYSGEKIKISDLQDEKMLEIDHIYPYSRSFDDSYMNKVLVFTKQNQEKLNQTPFEAFGNDSAKWQKIEVLAKNLPTKKQKRILDKNYKDKEQKNFKDRNLNDTRYIARLVLNYTKDYLDFLPLSDDENTKLNDTQKGSKVHVEAKSGMLTSALRHTWGFSAKDRNNHLHHTIDAVIIAYANNSIVKAFSDFKKEQESNSAELYAKKISELDYKNKRKFFEPFSGFRQKVLDKIDEIFVSKPERKKPSGALHEETFRKEEEFYQSYGGKEGVLKALELGKIRKVNGKIVKNGDMFRVDIFKHKKTNKFYAVPIYTMDFALKVLPNKAVARSKKGEIKDWILMDENYEFCFSLYKDSLILIQTKDMQEPEFVYYNAFTSSTVSLIVSKHDNKFETLSKNQKILFKNANEKEVIAKSIGIQNLKVFEKYIVSALGEVTKAEFRQREDFKK

SEQ ID NO: 137 - protein, 987 aa, Campylobacter jejuni
  REGION 1..987: note = Campylobacter jejuni subsp. jejuni CF93-6
MARILAFDIGISSIGWAFSENDELKDCGVRIFTKVENPKTGESLALPRRLARSARKRLARRKARLNHLKHLIANEFKLNYEDYQSFDESLAKAYKGSLISPYELRFRALNELLSKQDFARVILHIAKRRGYDDIKNSDDKEKGAILKAIKQNEEKLANYQSVGEYLYKEYFQKFKENSKEFTNVRNKKESYERCIAQSFLKDELKLIFKKQREFGFSFSKKFEEEVLSVAFYKRALKDFSHLVGNCSFFTDEKRVPKNSPLAFMFVALTRIINLLNNLKNTEGILYTKDDLNALLNEVLKNGTLTYKQTKKLLGLSDDYEFKGEKGTYFIEFKKYKEFIKALGEHNLSQDDLNEIAKDITLIKDEIKLKKALAKYDLNQNQIDSLSKLEFKDHLNISFKALKLITPLMLEGKKYDEACNELNLKVAINEDKKDFLPAFNETYYKDEVTNPVVLRAIKEYRKVLNALLKKYGKVHKINIELAREVGKNHSQRAKIEKEQNENYKAKKDAELECEKLGLKINSKNILKLRLFKEQKEFCAYSGEKIKISDLQDEKMLEIDHIYPYSRSFDDSYMNKVLVFTKQNQEKLNQTPFEAFGNDSAKWQKIEVLAKNLPTKKQKRILDKNYKDKEQKNFKDRNLNDTRYIARLVLNYTKDYLDFLPLSDDENTKLNDTQKGSKVHVEAKSGMLTSALRHTWGFSAKDRNNHLHHAIDAVIIAYANNSIVKAFSDFKKEQESNSAELYAKKISELDYKNKRKFFEPFSGFRQKVLDKIDEIFVSKPERKKPSGALHEETFRKEEEFYQSYGGKEGVLKALELGKIRKVNGKIVKNGDMFRVDIFKHKKTNKFYGVPIYTMDFALKVLPNKAVARSKKGEIKDWILMDENYEFCFSLYKDSLILIQTKDMQEPEFVYYNAFTSSTVSLIVSKHDNKFETLSKNQKILFKNANEKEVIAKSIGIQNLKVFEKYIVSALGEVTKAEFRQREDFKNELR

SEQ ID NO: 138 - protein, 984 aa, Campylobacter jejuni
  REGION 1..984: note = Campylobacter jejuni subsp. jejuni CG8486
MARILAFDIGISSIGWAFSENDELKDCGVRIFTKAENPKTGESLALPRRLARSARKRLARRKARLNHLKHLIANEFKLNYEDYQSFDESLAKAYKGSLISPYELRFRALNELLSKQDFARVILHIAKRRGYDDIKNSDDKEKGAILKAIKQNEEKLANYQSVGEYLYKEYFQKFKENSKEFTNVRNKKESYERCIAQSFLKDELKLIFKKQREFGFSFSKKFEEEVLSVAFYKRALKDFSHLVGNCSFFTDEKRAPKNSPLAFMFVALTRIINLLNNLKNTEGILYTKDDLNALLNEVLKNGTLTYKQTKKLLGLSDDYEFKGEKGTYFIEFKKYKEFIKALGDHSLSQDDLNEIAKDITLIKDEIKLKKALAKYDLNQNQIDSLSKLEFKDHLNISFKALKLITPLMLEGKKYDEACNELNLKVAINEDKKDFLPAFNETYYKDEVTNPVVLRAIKEYRKVLNALLKKYGKVHKINIELAREVGKNYSQRAKIEKEQNENYKAKKDAELECEKLGLKINSKNILKLRLFKEQKEFCAYSGEKIKISDLQDEKMLEIDHIYPYSRSFDDSYMNKVLVFTKQNQEKLNQTPFEAFGNDSAKWQKIEVLAKNLPTKKQKRILDKNYKDKEQKDFKDRNLNDTRYIARLVLNYTKDYLDFLPLSDDENTKLNDTQKGSKVHVEAKSGMLTSALRHTWGFSAKDRNNHLHHAIDAVIIAYANNSIVKAFSDFKKEQESNSAELYAKKISELDYKNKRKFFEPFSGFRQKVLDKIDEIFVSKPERKKPSGALHEETFRKEEEFYQSYGGKEGVLKALELGKIRKVNGKIVKNGDMFRVDIFKHKKTNKFYAVPIYTMDFALKVLPNKAVARSKKGEIKDWILMDENYEFCFSLYKDSLILIQTKDMQEPEFVYYNAFTSSTVSLIVSKHDNKFETLSKNQKILFKNANEKEVIAKSIGIQNLKVFEKYIVSALGEVTKAEFRQREDFKK

SEQ ID NO: 139 - protein, 984 aa, Campylobacter jejuni
  REGION 1..984: note = Campylobacter jejuni subsp. jejuni HB93-13
MARILAFDIGISSIGWAFSENDELKDCGVRIFTKVENPKTGESLALPRRLARSARKRLARRKARLNHLKHLIANEFKLNYEDYQSFDESLAKAYKGSLISPYELRFRALNELLSKQDFARVILHIAKRRGYDDIKNSDDKEKGAILKAIKQNEEKLANYQSVGEYLYKEYFQKFKENSKEFTNVRNKKESYERCIAQSFLKDELKLIFKKQREFGFSFLKKFEEEVLSVAFYKRALKDFSHLVGNCSFFTDEKRAPKNSPLAFMFVALTRIINLLNNLKNTEGILYTKDDLNALLNEVLKNGTLTYKQTKKLLGLSDDYEFKGEKGTYFIEFKKYKEFIKALGEHNLSQDDLNEIAKDITLIKDEIKLKKALAKYDLNQNQIDSLSKLEFKDHLNISFKALKLITPLMLEGKKYDEAYNELNLKVAINEDKKDFLPAFNETYYKDEVTNPVVLRAIKEYRKVLNALLKKYGKVHKINIELAREVGKNHSQRAKIEKEQNENYKAKKDAELECEKLGLKINSKNILKLRLFKEQKEFCAYSGEKIKISDLQDEKMLEIDHIYPYSRSFDDSYMNKVLVFTKQNQEKLNQTPFEAFGNDSAKWQKIEVLAKNLPTKKQKRILDKNYKDKEQKDFKDRNLNDTRYIARLVLNYTKDYLDFLPLSDDENTKLNDTQKGSKVHVEAKSGMLTSALRHTWGFSAKDRNNHLHHAIDAVIIAYANNSIVKAFSDFKKEQESNSAELYAKKISELDYKNKRKFFEPFSGFRQKVLDKIDEIFVSKPERKKPSGALHEETFRKEEEFYQSYGGKEGVLKALELGKIRKVNGKIVKNGDMFRVDIFKHKKTNKFYAVPIYTMDFALKVLPNKAVARSKKGEIKDWILMDENYEFCFSLYKDSLILIQTKDMQEPELVYFNAFTSSTVSLIVSKHDNKFETLSKNQKILFKNANEKEVIAKSIGIQNLKVFEKYIVSALGEVTKAEFRQREDFKK

SEQ ID NO: 140 - protein, 987 aa, Campylobacter jejuni
  REGION 1..987: note = Campylobacter jejuni subsp. jejuni LMG 23210
MARILAFDIGISSIGWAFSENDELKDCGVRIFTKAENPKTGESLALPRRLARSARKRLARRKARLNHLKHLIANEFKLNYEDYQSFDESLAKAYKGSLISPYELRFRALNELLSKQDFARVILHIAKRRGYDDIKNSDDKEKGAILKAIKQNEEKLANYQSVGEYLYKEYFQKFKENSKEFTNVRNKKESYERCIAQSFLKDELKLIFKKQREFGFSFSKKFEEEVLSVAFYKRALKDFSHLVGNCSFFTDEKRAPKNSPLAFMFVALTRIINLLNNLKNTEGILYTKDDLNALLNEVLKNGTLTYKQTKKLLGLSDDYEFKGEKGTYFIEFKKYKEFIKALGDHSLSQDDLNEIAKDITLIKDEIKLKKALVKYDLNQNQIDSLSKLEFKDHLNISFKALKLITPLMLEGKKYDEACNELNLKVAINEDKKDFLPAFNETYYKDEVTNPVVLRAIKEYRKVLNALLKKYGKVHKINIELAREVGKNYSQRAKIEKEQNENYKAKKDAELECEKLGLKINSKNILKLRLFKEQKEFCAYSGEKIKISDLQDEKMLEIDHIYPYSRSFDDSYMNKVLVFTKQNQEKLNQTPFEAFGNDSAKWQKIEVLAKNLPTKKQKRILDKNYKDKEQKDFKDRNLNDTRYIARLVLNYTKDYLDFLPLSDDENTKLNDTQKGSKVHVEAKSGMLTSALRHTWGFSAKDRNNHLHHAIDAVIIAYANNSIVKAFSDFKKEQESNSAELYAKKISELDYKNKRKFFEPFSGFRQKVLDKIDEIFVSKPERKKPSGALHEETFRKEEEFYQSYGGKEGVLKALELGKIRKVNGKIVKNGDMFRVDIFKHKKTNKFYAVPIYTMDFALKVLPNKAVARSKKGEIKDWILMDENYEFCFSLYKDSLILIQTKDMQEPELVYFNAFTSSTVSLIVSKHDNKFETLSKNQKILFKNANEKEVIAKSIGIQNLKVFEKYIVSALGEVTKAEFRQREDFKNELR

SEQ ID NO: 141 - protein, 984 aa, Campylobacter jejuni
  REGION 1..984: note = Campylobacter jejuni subsp. jejuni LMG 23211
MARILAFDIGISSIGWAFSENDELKDCGVRIFTKAENPKTGESLALPRRLARSARKRLARRKARLNHLKHLIANEFKLNYEDYQSFDESLAKAYKGSLISPYELRFRALNELLSKQDFARVILHIAKRRGYDDIKNNGDEEKSEILKAIKQNEEKLVNYQSVGEYLYKEYFQKFKENSKEFINVRNKKESYERCITQSFLKDELKLIFQKQREFGFSFSKKFEEEVLSVAFYKRALKDFSHLVGNCSFFTDEKRAPKNSPLAFMFVALTRIINLLNNLKNTEGILYTKDDLNALLNEVLKNGTLTYKQTKKLLGLSDDYEFKGEKGTYFIEFKKYKEFIKALDEHSLSQDDLNEIAKDITLIKDEIKLKKALAKYDLNQNQIDSLSKLEFKDHLNISFKALKLITPLMLEGKKYDEACNELNLKVAINEDKKDFLPAFNETYYKDEVTNPVVLRAIKEYRKILNALLKKYGKVHKINIELAREVGKNHSQRAKIEKEQNENYKAKKDAEIECEKLGLKINSKNILKLRLFKEQKEFCAYSGEKIKISDLQDEKMLEIDHIYPYSRSFDDSYMNKVLVFTKQNQEKLNKTPFEAFGNDGVKWQKIEVLAKNLPEKKQKRILDKNYKDKEQKDFKDRNLNDTRYIARLVLNYTKDYLDFLPLSDDENTKLNDTQKGSKVHVEAKSGMLTSALRHTWGFSTKDRNNHLHHAIDAAIIAYANNSIVKAFSDFKKEQESNSAELYAKKISELDYKNKRKFFEPFSGFRQKVLDKIDEIFVSKPERKKPSGALHEETFRKEEEFYQSYGGKEGVLKALELGKIRKVNGKIVKNGDMFRVDIFKHKKTNKFYAVPIYTMDFALKVLPNKAVARSKKGEIKDWILMDENYEFCFSLYKDSLILIQTKDMQEPELVYFNAFTSSTVSLVVSKHDNKFETLSKNQKILFKNANEKEVIAKSIGIQNLKVFEKYIVSALGEVTKAEFRQREDFKK

SEQ ID NO: 142 - protein, 984 aa, Campylobacter jejuni
  REGION 1..984: note = Campylobacter jejuni subsp. jejuni LMG 23263
MARILAFDIGISSIGWAFSENDELKDCGVRIFTKAENPKTGESLALPRRLARSARKRLARRKARLNHLKHLIANEFKLNYEDYQSFDESLAKAYKGSLISPYELRFRALNELLSKQDFARVILHIVKRRGYDDIKNSDDKEKGAILKAIKQNEEKLANYQSVGEYLYKEYFQKFKENSKEFTNVRNKKESYERCIAQSFLKDELKLIFKKQREFGFSFSKKFEEEVLSVAFYKRALKDFSHLVGNCSFFTDEKRAPKNSPLAFMFVALTRIINLLNNLKNTEGILYTKDDLNTLLNEVLKNGTLTYKQTKKLLGLSDDYEFKGEKGTYFIEFKKYKEFIKALGDHSLSQDDLNEIAKDITLIKDEIKLKKALAKYDLNQNQIDSLSKLEFKDHLNISFKALKLITPLMLEGKKYDEACNELNLKVAINEDKKDFLPAFNETYYKDEVTNPVVLRAIKEYRKVLNALLKKYGKVHKINIELAREVGKNHSQRAKIEKEQNENYKAKKDAEFECEKLGLKINSKNILKLRLFKEQKEFCAYSGEKIKISDLQDEKMLEIDHIYPYSRSFDDSYMNKVLVFTKQNQEKLNKTPFEAFGNDSAKWQKIEVLAKNLPTKKQKRILDKNYKDKEQKDFKDRNLNDTRYIARLVLNYTKDYLDFLPLSDDENTKLNDTQKGSKVHVEAKSGMLTSALRHTWGFSTKDRNNHLHHAIDAVIIAYANNSIVKAFSDFKKEQESNSAELYAKKISELDYKNKRKFFEPFSGFRQKVLDKIDEIFVSKPERKKPSGALHEETFRKEEEFYQSYGGKEGVLKALELGKIRKVNGKIVKNGDMFRVDIFKHKKTNKFYAVPIYTMDFALKVLPNKAVARSKKGEIKDWILMDENYEFCFSLYKDSLILIQTKDMQEPEFVYYNAFTSSTVSLIVSKHDNKFETLSKNQKILFKNANEKEVIAKSIGIQNLKVFEKYIVSALGEVTKAEFRQREDFKK

SEQ ID NO: 143 - protein, 984 aa, Campylobacter jejuni
  REGION 1..984: note = Campylobacter jejuni subsp. jejuni LMG 23264
MARILAFDIGISSIGWAFSENDELKDCGVRIFTKVENPKTGESLALPRRLARSARKRLARRKARLNHLKHLIANEFKLNYEDYQSFDESLAKAYKGSLISPYELRFRALNELLSKQDFARVILHIAKRRGYDDIKNSDDKEKGAILKAIKQNEEKLANYQSVGEYLYKEYFQKFKENSKEFTNVRNKKESYERCIAQSFLKDELKLIFKKQREFGFSFSKKFEEEVLSVAFYKRALKDFSHLVGNCSFFTDEKRAPKNSPLAFMFVALTRIINLLNNLKNTEGILYTKDDLNALLNEVLKNGTLTYKQTKKLLGLSDDYEFKGEKGTYFIEFKKYKEFIKALGEHNLSQDDLNEIAKDITLIKDEIKLKKALAKYDLNQNQIDSLSKLEFKDHLNISFKALKLITPLMLEGKKYDEACNELNLKVAINEDKKDFLPAFNETYYKDEVTNPVVLRAIKEYRKVLNALLKKYGKVHKINIELAREVGKNHSQRAKIEKEQNENYKAKKDAELECEKLGLKINSKNILKLRLFKEQKEFCAYSGEKIKISDLQDEKMLEIDHIYPYSRSFDDSYMNKVLVFTKQNQEKLNKTPFEAFGNDSAKWQKIEVLAKNLPTKKQKRILDKNYKDKEQKDFKDRNLNDTRYIARLVLNYTKDYLDFLPLSNDENTKLNDTQKGSKVHVEAKSGMLTSALRHTWGFSTKDRNNHLHHAIDAVIIAYANNSIVKAFSDFKKEQESNSAELYAKKISELDYKNKRKFFEPFSGFRQKVLDKIDEIFVSKPERKKPSGALHEETFRKEEEFYQSYGGKEGVLKALELGKIRKVNGKIVKNGDMFRVDIFKHKKTNKFYAVPIYTMDFALKVLPNKAVARSKKGEIKDWILMDENYEFCFSLYKDSLILIQTKDMQEPEFVYYNAFTSSTVSLIVSKHDNKFETLSKNQKILFKNANEKEVIAKSIGIQNLKVFEKYIVSALGEVTKAEFRQREDFKK

SEQ ID NO: 144 - protein, 987 aa, Campylobacter jejuni
  REGION 1..987: note = Campylobacter jejuni subsp. jejuni LMG 23269
MARILAFDIGISSIGWAFSENDELKDCGVRIFTKAENPKTGESLALPRRLARSARKRLARRKARLNHLKHLIANEFKLNYEDYQSFDESLAKAYKGSLISPYELRFRALNELLSKQDFARVILHIAKRRGYDDIKNNGDEEKSEILKAIKQNEEKLVNYQSVGEYLYKEYFQKFKENSKEFINVRNKKESYERCIAQSFLKDELKLIFQKQREFGFSFSKKFEEEVLSVAFYKRALKDFSHLVGNCSFFTDEKRAPKNSPLAFMFVALTRIINLLNNLKNTEGILYTKDDLNTLLNEVLKNGTLTYKQTKKLLGLSDDYEFKGEKGTYFIEFKKYKEFIKALGEHNLSQDNLNEIAKDITLIKDEIKLKKALAKYDLNQNQIDSLSKLEFKDHLNISFKALKLITPLMLEGKKYDEAYNELNLKVAINEDKKDFLPAFNETYYKDEVTNPVVLRAIKEYRKVLNALLKKYGKVHKINIELAREVGKNHSQRAKIEKEQNENYKAKKDAELECEKLGLKINSKNILKLRLFKEQKEFCAYSGEKIKISDLQDEKMLEIDHIYPYSRSFDDSYMNKVLVFTKQNQEKLNQTPFEAFGNDSAKWQKIEVLAKNLPTKKQKRILDKNYKDKEQKDFKDRNLNDTRYIARLVLNYTKDYLDFLPLSDDENTKLNDTQKGSKVHVEAKSGMLTSALRHTWGFSAKDRNNHLHHAIDAVIIAYANNSIVKAFSDFKKEQESNSAELYAKKISELDYKNKRKFFEPFSGFRQKVLDKIDEIFVSKPERKKPSGALHEETFRKEEEFHQSYGGKEGVLKALELGKIRKVNGKIVKNGDMFRVDIFKHKKTNKFYAVPIYTMDFALKVLPNKAVVQGKDKKSGLIKDWILMDENYEFCFSLYKDSLILIQTKDMQEPELVYFNAFTSSTVSLIVSKHDNKFETLSKNQKILFKNANEKEVIAKSIGIQNLKVFEKYIVSALGEVTKAEFRQREDFKK

SEQ ID NO: 145 - protein, 987 aa, Campylobacter jejuni
  REGION 1..987: note = Campylobacter jejuni subsp. jejuni LMG 23357
MARILAFDIGISSIGWAFSENDELKDCGVRIFTKAENPKTGESLALPRCLARSARKRLARRKARLNHLKHLIANEFKLNYEDYQSFDESLAKAYKGSLISPYELRFRALNELLSKQDFARVILHIAKRRGYDDIKNNGDEEKGEILKAIKQNEEKLVSYQSVGEYLYKEYFQKFKENSKEFINVRNKKESYERCIAQSFLKDELKLIFQKQRKFGFSFSKKFEEEVLSVAFYKRALKDFSHLVGNCSFFTDEKRAPKNSPLAFMFVALTRIINLLNNLKNTEGILYTKDDLNTLLNEVLKNGTLTYKQTKKLLGLSNDYEFKGEKGTYFIEFQKYKEFVKALGEHNLSQDDLNEIAKDITLIKDEIKLKKALAKYDLNQNQIDSLSKLEFKDHLNISFKALKLITPLMLEGKKYDEACNELNLKVAINEDKKDFLPAFNETYYKDEVTNPVVLRAIKEYRKVLNALLKKYGKVHKINIELAREVGKNHSQRAKIEKEQNENYKAKKDAELECEKLGLKINSKNILKLRLFKEQKEFCVYSGEKIKISDLQDEKMLEIDHIYPYSRSFDDSYMNKVLVFTKQNQEKLNKTPFETFGNDRVKWQKIEVLAKNLPTKKQKRILDKNYKDKEQKDFKDRNLNDTRYIARLVLNYTKDYLDFLPLSDDENTKLNDTQKGSKVHVEAKSGMLTSTLRHTWGFSTKDRNNHLHHAIDAAIIAYANNSIVKAFSDFKKEQESNTAELYAKKISELDYKNKRKFFEPFSGFRQKLLDKIDEIFVSKPERKKPSGALHEETFRKEEEFYQSYGGKEGVLKALELGKIRKVNGKIVSNGDMFRVDIFKHKKTNKFYAVPIYTMDFALKVLPNKAVVQGKDKKSGLIKDWILMDENYEFCFSLYKDSLILIQTKDMQEPELVYYERLDSSNASLTVSKHDNKFETLSKNQKILFKNANEKEVIAKSIGIQNLKVFEKYIVSALGEVTKAEFRQREDFKK

SEQ ID NO: 146 - protein, 984 aa, Campylobacter jejuni
  REGION 1..984: note = Campylobacter jejuni subsp. jejuni NCTC 11168 = ATCC 700819
MARILAFDIGISSIGWAFSENDELKDCGVRIFTKVENPKTGESLALPRRLARSARKRLARRKARLNHLKHLIANEFKLNYEDYQSFDESLAKAYKGSLISPYELRFRALNELLSKQDFARVILHIAKRRGYDDIKNSDDKEKGAILKAIKQNEEKLANYQSVGEYLYKEYFQKFKENSKEFTNVRNKKESYERCIAQSFLKDELKLIFKKQREFGFSFSKKFEEEVLSVAFYKRALKDFSHLVGNCSFFTDEKRAPKNSPLAFMFVALTRIINLLNNLKNTEGILYTKDDLNALLNEVLKNGTLTYKQTKKLLGLSDDYEFKGEKGTYFIEFKKYKEFIKALGEHNLSQDDLNEIAKDITLIKDEIKLKKALAKYDLNQNQIDSLSKLEFKDHLNISFKALKLVTPLMLEGKKYDEACNELNLKVAINEDKKDFLPAFNETYYKDEVTNPVVLRAIKEYRKVLNALLKKYGKVHKINIELAREVGKNHSQRAKIEKEQNENYKAKKDAELECEKLGLKINSKNILKLRLFKEQKEFCAYSGEKIKISDLQDEKMLEIDHIYPYSRSFDDSYMNKVLVFTKQNQEKLNQTPFEAFGNDSAKWQKIEVLAKNLPTKKQKRILDKNYKDKEQKNFKDRNLNDTRYIARLVLNYTKDYLDFLPLSDDENTKLNDTQKGSKVHVEAKSGMLTSALRHTWGFSAKDRNNHLHHAIDAVIIAYANNSIVKAFSDFKKEQESNSAELYAKKISELDYKNKRKFFEPFSGFRQKVLDKIDEIFVSKPERKKPSGALHEETFRKEEEFYQSYGGKEGVLKALELGKIRKVNGKIVKNGDMFRVDIFKHKKTNKFYAVPIYTMDFALKVLPNKAVARSKKGEIKDWILMDENYEFCFSLYKDSLILIQTKDMQEPEFVYYNAFTSSTVSLIVSKHDNKFETLSKNQKILFKNANEKEVIAKSIGIQNLKVFEKYIVSALGEVTKAEFRQREDFKK

SEQ ID NO: 147 - protein, 983 aa, Campylobacter jejuni
  REGION 1..983: note = Campylobacter jejuni subsp. jejuni NW
MARILAFDIGISSIGWAFSENDELKDCGVRIFTKAENPKTGESLALPRRLARSARKRLARRKARLNHLKHLIANEFKLNYEDYQSFDESLAKAYKGSLISPYELRFRALNELLSKQDFARVILHIAKRRGYDDIKNSDDKEKGAILKAIKQNEEKLANYQSVGEYLYKEYFQKFKENSKEFTNVRNKKESYERCIAQSFLKDELKLIFKKQREFGFSFSKKFEEEVLSVAFYKRALKDFSHLVGNCSFFTDEKRAPKNSPLAFMFVALTRIINLLNNLKNTEGILYTKDDLNALLNEVLKNGTLTYKQTKKLLGLSDDYEFKGEKGTYFIEFKKYKEFIKALGEHNLSQDDLNEIAKDITLIKDEIKLKKALAKYDLNQNQIDSLSKLEFKDHLNISFKALKLVTPLMLEGKKYDEACNELNLKVAINEDKKDFLPAFNETYYKDEVTNPVVLRAIKEYRKVLNALLKKYGKVHKINIELAREVGKNHSQRAKIEKEQNENYKAKKDAELECEKLGLKINSKNILKLRLFKEQKEFCAYSGEKIKISDLQDEKMLEIDHIYPYSRSFDDSYMNKVLVFTKQNQEKLNQTPFEAFGNDSAKWQKIEVLAKNLPTKKQKRILDKNYKDKEQKNFKDRNLNDTRYIARLVLNYTKDYLDFLPLSDDENTKLNDTQKGSKVHVEAKSGMLTSALRHTWGFSAKDRNNHLHHAIDAVIIAYANNSIVKAFSDFKKEQESNSAELYAKKISELDYKNKRKFFEPFSGFRQKVLDKIDEIFVSKPERKKPSGALHEETFRKEEFYQSYGGKEGVLKALELGKIRKVNGKIVKNGDMFRVDIFKHKKTNKFYAVPIYTMDFALKVLPNKAVARSKKGEIKDWILMDENYEFCFSLYKDSLILIQTKDMQEPEFVYYNAFTSSTVSLIVSKHDNKFETLSKNQKILFKNANEKEVIAKSIGIQNLKVFEKYIVSALGEVTKAEFRQREDFKK

SEQ ID NO: 148 - protein, 987 aa, Campylobacter jejuni
MARILAFDIGISSIGWAFSENDELKDCGVRIFTKAENPKTGESLALPRRLARSARKRLARRKARLNHLKHLIANEFKLNYEDYQSFDESLAKAYKGSLISPYELRFRALNELLSKQDFARVILHIAKRRGYDDIKNNGDEEKSEILKAIKQNEEKLVNYQSVGEYLYKEYFQKFKENSKEFINVRNKKESYERCIAQSFLKDELKLIFQKQREFGFSFSKKFEEEVLSVAFYKRALKDFSHLVGNCSFFTDEKRAPKNSPLAFMFVALTRIINLLNNLKNTEGILYTKDDLNTLLNEVLKNGTLTYKQTKKLLGLSDDYEFKGEKGTYFIEFKKYKEFIKALGEHNLSQDNLNEIAKDITLIKDEIKLKKALAKYDLNQNQIDSLSKLEFKDHLNISFKALKLITPLMLEGKKYDEAYNELNLKVAINEDKKDFLPAFNETYYKDEVTNPVVLRAIKEYRKVLNALLKKYGKVHKINIELAREVGKNHSQRAKIEKEQNENYKAKKDAELECEKLGLKINSKNILKLRLFKEQKEFCAYSGEKIKISDLQDEKMLEIDHIYPYSRSFDDSYMNKVLVFTKQNQEKLNQTPFEAFGNDSAKWQKIEVLAKNLPTKKQKRILDKNYKDKEQKDFKDRNLNDTRYIARLVLNYTKDYLDFLPLSDDENTKLNDTQKGSKVHVEAKSGMLTSALRHTWGFSAKDRNNHLHHAIDAVIIAYANNSIVKAFSDFKKEQESNSAELYAKKISELDYKNKRKFFEPFSGFRQKVLDKIDEIFVSKPERKKPSGALHEETFRKEEEFYQSYGGKEGVLKALELGKIRKVNGKIVKNGDMFRVDIFKHKKTNKFYPVPIYTMDFALKVLPNKAVVQGKDKKSGLIKDWILMDENYEFCFSLYKDSLILIQTKDMQEPELVYFNAFTSSTVSLIVSKHDNKFETLSKNQKILFKNANEKEVIAKSIGIQNLKVFEKYIVSALGEVTKAEFRQREDFKK

SEQ ID NO: 149 - protein, 1003 aa, Campylobacter lari
MRILGFDIGINSIGWAFVENDELKDCGVRIFTKAENPKNKESLALPRRNARSSRRRLKRRKARLIAIKRILAKELKLNYKDYVAADGELPKAYEGSLASVYELRYKALTQNLETKDLARVILHIAKHRGYMNKNEKKSNDAKKGKILSALKNNALKLENYQSVGEYFYKEFFQKYKKNTKNFIKIRNTKDNYNNCVLSSDLEKELKLILEKQKEFGYNYSEDFINEILKVAFFQRPLKDFSHLVGACTFFEEEKRACKNSYSAWEFVALTKIINEIKSLEKISGEIVPTQTINEVLNLILDKGSITYKKFRSCINLHESISFKSLKYDKENAENAKLIDFRKLVEFKKALGVHSLSRQELDQISTHITLIKDNVKLKTVLEKYNLSNEQINNLLEIEFNDYINLSFKALGMILPLMREGKRYDEACEIANLKPKTVDEKKDFLPAFCDSIFAHELSNPVVNRAISEYRKVLNALLKKYGKVHKIHLELARDVGLSKKAREKIEKEQKENQAVNAWALKECENIGLKASAKNILKLKLWKEQKEICIYSGNKISIEHLKDEKALEVDHIYPYSRSFDDSFINKVLVFTKENQEKLNKTPFEAFGKNIEKWSKIQTLAQNLPYKKKNKILDENFKDKQQEDFISRNLNDTRYIATLIAKYTKEYLNFLLLSENENANLKSGEKGSKIHVQTISGMLTSVLRHTWGFDKKDRNNHLHHALDAIIVAYSTNSIIKAFSDFRKNQELLKARFYAKELTSDNYKHQVKFFEPFKSFREKILSKIDEIFVSKPPRKRARRALHKDTFHSENKIIDKCSYNSKEGLQIALSCGRVRKIGTKYVENDTIVRVDIFKKQNKFYAIPIYAMDFALGILPNKIVITGKDKNNNPKQWQTIDESYEFCFSLYKNDLILLQKKNMQEPEFAYYNDFSISTSSICVEKHDNKFENLTSNQKLLFSNAKEGSVKVESLGIQNLKVFEKYIITPLGDKIKADFQPRENISLKTSKKYGLR

SEQ ID NO: 150 - protein, 1430 aa, Capnocytophaga canimorsus
MKHILGLDLGTNSIGWAVVKEAQNDNEQSEIVDVGVRVNPLTTDEKTNFEKGKPISTNADRTLKRSARRNLQRYKLRRKELIELLKEHQLISTDTILTENGKGTTFQTLELRAKSAKEKISLEELARVFLTINKKRGYKSSRKAKNEDEGQLIDGMEIAKRLYEENLTTGQLSLQLLKEGKKSLPDYYRSDLQFELDKVWNFQKQFHSHILTDEFYAQLKGKGQRATSALFLAKYQIYTAENKGSREDKKLQAYQWRVDALSKELTREQLAFVITEINNNLNNSSGYLGAISDRSKELYFNNETVGEYLWKQIAANPHTSLKNQVFYRQDYLDEFEQIWKTQSAFYPEILTDELKKELRDVVIFYQRKLKSQKSLVSFCEFENKEIEIKKEDGTSTKKVIGLKVAPKSSPLFQEFKIWQNLNNVLIRKKGSKTKKVDKNQQAVLFEEEKTIFELDLEAKQALFNELNLKGNLKAYYCLEILGYSPKEWEMNYSVLEGNRTNKALYEAYLKITDLEGYDAKNHLKVKLNKDEVELDDLKVPASEIKDMVQAIFKEAGINTDILHFNAELDGKDFENQASYQLWHLLYSYEGDDSKSGNELLYKLLETKFGFKKEYAQILANVSLSDDYGSLSTKAMRKIHPYIKENKFSTACELAGYRHSKHSLTKEENDNRVLKDSLEVLKKNSLRQPVVEKILNQMINLVNALLKKYRTENPNFKFDEIRIELARELKKNAEERANMTVNINKAKTEHEKIIKILKNEFGLPNPTRNDIIRYRLYEELKANGYKDLYTNEYIEKQDLFTKNIDIEHIIPKSRVFDDSFSNKTLSFRKTNLDKGERTAFDYIESKFGADKLEEYVARVEDLYKNNIISKAKYQKLLKKESEIGDGFVERDLRETQYIAKKAKEILLQITPNVLSTSGGITDRLREDWDLINVMKELNLPKYRALGLTQMEDRKYGQQVEVIIDWTKRNDHRHHAMDALTVAFTKHNHIQYLNYLNARKNEKHREHSNIMGIQQLETIKVTDKNGNEKRVFKAPMPNFRQVTKAFLENVLISHKAKNKVVTKNKNKVAGSNKVQEVLTPRGQLHKETVYGKYQYYVQKEEKIGGKFDLETIKKVANPLYQSLLKKRLEENGGDPKKAFTGKNSLAKNPIYLDDAQTEQLPEKVKLVWLENSFSIRKDITPENFKDEKLIDKILDEGVKRILKERLQSFGNDAKKAFSDLDKNPIWLNKEKGIAIKRVAISGVANAEPLHTKKDHLGKEILDKEGKSIPVDFISTGNNHHVAVYRDEKGNLQEKVVSVFEAVVRANQGLPIIDKTYNQHLGWEFLFTMKQNEMFVFSNESTGFNPNDIDLLDPKNKKIISPNLFRVQKFSKLQYGNSFVREFVFRHHLETTVEDRKELQGITYKQMKNSAFFNDIIKVRINHLGGIVSVGEY

SEQ ID NO: 151 - protein, 1436 aa, Capnocytophaga gingivalis
  REGION 1..1436: note = Capnocytophaga gingivalis ATCC 33624
MKYIKYILGLDIGSNSIGWALIQLDLLQKTKRIIAAGSRIIPMDQKVLSDFGKGITISPTAQRTSYRNARHCRERHLLRRERLHRVLHILGFLPTHYDKQIDFSKRYGKFVDNTEPKIAYNEGKFLFMDSFQEMLSDFKSHQPDLFYTKKNGEESKIPYDWTIYYLRKKALSQKISKEELAWIILNFNQKRGYYQLREEEGNKENDFEIISSKIISVIKKDKDKKYNKYWYDIILENGLVYQAAFYNDFVYNWINQDREFIIERTSLKNGAEKVKLSYLPTFDEIDKMDKKEQDKYYKKIKIKTENSIGNKTVGCYIYDHILQNPNEKIKGKLVRTIERKYYKEELKAILEKQIALQPELFTDQLLADCIRELYSKNEAQQRNLAARDFVHLLVEDIIFYQRPLRRQKSTLANCSLESRSYIDKDSHTRKEAPLKVCPKSNPYYQEFRVLQWLQNLKIYEIDSDQEVTHQFIKTLEDKQQLFEFLMAQKEIDCEELLKYFLNQTYPNAKEKALKSELKKWKDTYRWNYVYDIGEKSSKKYPMNETRYELKRHLEKVANLPDDFLSSEVEYLLWHLIYSVKDKVAYEKGLKKFAQKHHLDKDSFVESFKKFNPYPSEYGSFSEKAIRKLLPLMRFGAHWDFNHIDKNTQKRIEDLITGVENEEIRTILREKAEKYQLEKETDFQDLPLWLAQYIVYNRHAEASSLEKWTSVNDLETYLNEFKQHSLRNPIVEQVVMETLRVVRDIWQQYGQGQASFFNEIHIELGRELKKTAKEREKLSKQNQKNEDINLSIKEKLKELEKYNTRAYSITHQEKYKLWLEQKHISPYTGQIISPENLFTDNYEIEHIIPQSRFFDDSLSNKVVCESIVNKAPYKDRQLGLEFIKNQGGRIVKELSKENKTIKIFTEEQYRTFIKEHYSNNPEKTKKLLLEEIPEKMVARQMNDTCYISKFISEILSKIVRSDEQDEGVHSKNVILCTGKITSILRQDWGLNDIWDNLILPRFERMNNLLQKEKFTIYSIEKQKKIPVVPINDQFKSFQKKRIDHRHHAMDAIIIACTTREHINYINNQHALEKEKDKKEKQEERDKLREKLCIKKYNNRSEGNYSWIFKKPWDTFTQEVRVALEDIVVSFKQNLRVINKATNYYERWVEENGKYIKKMVKQEGTNWAIRKPLHEETISGKIYLDREKITKNDILTATRKTVDSSFDDKRIKKITDTGIQKILLNYLKYKGSPEIAFSPEGLEELNKNLSIYNDGKPHKPIYKVRIYEKGSGRFALGEKGRKYKKYVQGASNLYFGIYQGAKRSFATIPLNEVIERQKQGLPSVPEYNEKGDLLLFSLSPNDLVYVPIEGEIIENIDFRNLSKEQKERIYNVNDFSSTCYFTPNRIAKAIFPKEVDLQRKGDKLSGSYDTKTASLEGIQIKEVCIKLKVDRLGNISKA

SEQ ID NO: 152 - protein, 1426 aa, Capnocytophaga ochracea
MKNILGLDLGTTSIGFAHIVEDENKEKSEIKELGVRIVSLTTDEQSDFEKGKSITTNANRTLKHGARLNLDRYQQRRKYLIDLLQKANLITPSSILAENGKNTTHSTWQLRAKAVTERIEKEEFARILLAINKKRGYKSSRKAKTEDEGQAIDGMAIAKRLYDENLTPGQLSLQLLQQNKKLLPDFYRSDLQKEFDLVWNFQKQFYPDILTDIFYKELQGKGKDATSKAFSKRYHFDTTENKGSKESVRLQAYQWRAEAISKQLSKEEVAYVLTEINNNLNNASGYLGAISDRSKELYFNRQTVGQYLYAKLQENRHNSLKNKVFYRQDYLDEFERIWETQASFHKELTDELKKQIRDVVIFYQRKPKSQKGLISFCEFESKEIEIEKDGKTITKNIGARVVPKSSPLFQEFKIWQILNNVICKRKGIRKKKISAKTTQLDLLNESSQTIFSLDMECKQLLFDELNLKGDLKSDKVLKLLGYSPQEWEINYNQLEGNRTQKALYEAYLKIVEMEAHDVKDILQIKSAKDDWSLDESPLSASEIREKVKAIFQTLGICTKILYFDPLLPVKEFEEQDSYQLWHLLYSYESDDSTSGNETLYRILEKKYAFKREHARILANVALQDDYGSLSTKAIRKIYPNIKENQYSTACEKAGYKHSKLSLTTEELEARELKNIIPLLKKNALRNPVVEKILNQMINVVNALIEKNSERDAEGKITKYFHFDEIRIELARELKKNAQKRYEMTQNINKAKLEHQKISEILQKEFGIKNPTKSDIIRYRLYQELEHNGYKELYTNAPIARDMLFSKNIEIEHIVPKARVFDDSFSNKTLTFHRINSDKGEYTAFDYITSLNSEEELNQYLTRVENAYKTKSISPTKYKNLLKKASEIGDDFINRDLRDTQYIAKKAKEILFQVTKNVLSTSGSITDRLREDWGLVDVMKELNMPKYQSLGLTEVEERKDGNKVTVIKNWTKRNDHRHHAMDALTVAFTKPSYIQYLNHLNARKDENNKNYSVILAIEEKETIKVPTNNGKNKRVFIEPIPNFRQVAKKHLEEIFISHKAKNKVVTKNTNKPAGTDKQQITLTPRGQLHKETIYGKYQYYINKEEKIGVKFDERTIAKVSNPVYREALLKRLQANDNDPKKAFAGKNALSKNPIYLDESKTKTLPEKVNLTYLEEDFSIRKDISPDNFKDLKSIEKVIDQGVKRILIKRLQAYDNDPKKAFVDLEKNPIWLNKEKGIAIKRVTISGVNNAQPLHIGKDHLGKTTLNKEGKEIPVDYVSTGNNHHVAIYRDKEGNLQEQIVSFFDAVVRAQQGIPIIDKTYKQAEGWQFLFTMKQNEMFVFPNATTGFNPAEIDLLDPKNKKLISPNLFRVQKIATKDYFFRHHLETNVETDNILKNVTWKREGLSGLKDIVKVRINHLGDIVSIGEY

SEQ ID NO: 153 - protein, 1437 aa, Capnocytophaga sp.
  REGION 1..1437: note = Capnocytophaga sp. CM59
MKYIKYILGLDIGSNSIGWALIQLDLLQKTKRIIATGSRIIPMDQKVLSDFGKGITISPTAQRTSYRNARHCRERHLLRRERLHRVLHILGFLPTHYDKQIDFSKRYGKFVDNTEPKIAYNERKFLFMDSFQEMLADFKIHQPDLFYTKKNGEESKIPYDWTIYYLRKKALSRKISKEELAWIILNFNQKRGYYQLREEEEENKENDFEIISSKIISVIKKDKDKKYNKYWYDIILENGLVYQAAFYNDFVYNWINQDREFIIERISLKNGTEKVKLSYLPTFDEIDKMDKKEQDKYYKKIKIKTENSIGNKTVGCYIYDHILQNPNEKIKGKLVRTIERKYYKEELKAILEKQVALQPELFTDQLFADCIRELYSKNEAQQRNLAARDFVHLFVEDIIFYQRSLRRQKSTLANCSLESRSYIDKDSHTRKEAPLKVCPKSNPYYQEFRVLQWLQNLKIYEIDTDQEVTHEFIKTLEDKQQFFDFLMNQKEIDCEELLKYFLNQTYPNAREKALKSELKKWKDTYRWNYVYDIGEKSSKKYPMNETRYELKRHLEKVANLPDDFLSSEVEYLLWHLIYSVKDKVAYEKGLKTFAQKHHLDKDSFVESFKKFKPYPSEYGSFSEKAIRKLLPLMRFGSYWDFNHIDKNTQKRIEDLITGVENEEIRTILREKAEKYQLEKETDFQDLPLWLAQYIVYNRHAEASSLEKWTSVNDLETYLNEFKQYSLRNPIVEQVVMETLRVVRDIWQQYGQGQASFFDEIHIELGRELKKTAKEREKLSKQNQKNEDINLSIKEKLKELEKYNTRAYSITHQEKYKLWLEQKHISPYTGQIISPENLFTDNYEIEHIIPQSRFFDDSLSNKVVCESIVNKAPYKDRQLGLEFIKNQGGRIVKELSTENKTIKIFTEEQYRTFIKEHYSNNPEKTKKLLLEEIPEKMVARQMNDTCYISKFISEILSKIVRSDEQDEGVHSKNVILCTGKITSALKQDWGVNDVWNDLILPRFERMNDLTQSTLFTTYNEKYQKYLPTVPMEYSNGFQKKRIDHRHHAMDAIIIACATREHINYINNQHALEKGKDKKEKQKEHDKLREKLCIKKDNKGSEENYSWIFKKPWDTFTQEVQAALEGIVVSFKQNLRVINKATNYYERWVEENGKYIKKMVKQEGTNWAIRKPLHEETISGKIYLDREEITKNDILTATRKTVDSSFDEKRIKKITDTGIQKILLNYLKYKGSPEIAFSPEGLEELNKNLSIYNDGKPHKPIYKVRIYEKGSGRFALGEKGRKYKKYVQGAPNLYFGIYQGANKRSFATIPLNEVIERQKQGRPSIPEYNEKGDPLLFSLSPNDLVYVPVEGEIIEDIDFQNLSKEQKERIYNVNDFSSTCYFTPNRIAKAIFPKEVDLQRKGDKLPGSYDTKTASLEGIQIKEVCIKLKIDRLGNISKA

SEQ ID NO: 154 - protein, 1471 aa, Capnocytophaga sp.
  REGION 1..1471: note = Capnocytophaga sp. oral taxon 324 str. F0483
MCKYFYIKNFITFVLSKSIIPMKHILGLDLGSNSIGWAFVQQDFENKQGKIIATGSRIIPMDQGILGDFERGNTVSQTAERTTYRSTRRLRERHLLRRERLHRVLHILGFLPPHYDAQIDFTKRYGKFIDNAEPKIAYNNGNFIFMNSFNEMIEDFKKHQPQLFYKKSNGEESKIPYDWTIYYLRKKALSQKITQQELAWLILHFNQKRGYYQLRGEEETENPNKEVAFHSLKVVDVEAEAPNKKGEIWYTIRLENGWIYRRTSKIPLDDWKGKTRDFIVTTDLNDDGTIKVDKEGKEKRSFRAPDENDWNLLKKKTEHDIDFSGKTVGAYIYDHLLQNPNQKIKGKLVRTIERKYYKDELKAILAKQIALQPELFTETLLADCIRELYRKNETQQQNLLSKDFLHLFVEDIIFYQRPLRSKKSTIANCTLEKRSYIDKETNERKDAPIKVCAKSNPYYQEFRVLQWLQNLRIYEIETDREVTAEFIETPQDCEALFNFLMSQKEIDNKGLLKYFLFAKNPQIKDKAAKSELKKWLTTYRWNYVYDAADNSSKKYPMNETGYELQRYLQKVEGLPANFLTFDITYQLWHLLYSVKDKVEFEKALKKFAKKKQLDKTSFVDSFKNFKPYPNEYGSFSEKAIKKLLPLMRFGNHWDFNRIDVSTQKRIDDLINGVANEDIRTIIREKAEKYQLNSETCFQDLPLWLAQYVVYNRHAEATDIEKWTSVSDLEAYLEDFKQHSLRNPIVEQVVTETLRVVRDIWQQYGGGQANFFDEIHIELGRELKKTAEERKQLSDKNQENESTNLRIKKLLAELKEDASIQNVRPYSLVQQELLKIYEEGVFSATDEVEEDIQKIRKKAEPSKADLQRYKLWLEQKYKSPYTGEVISLTKLFTEEYEIEHIIPQSRYYDDSLSNKVICESAVNKLKTNQLGLEFIQNHHGEKVRITANKEVTIFTEEQYKEFVKKHYANNSAKQQKLLLNEIPEKMVARQLNDTRYISKYISEILSKIVRSDEKDEGVNSKNIIPCTGKITTALKQDWGLNDVWNKLILPRFERMNQLTQTQLFTSYNDRLQKNLPTVPIEYSQGFQKKRIDHRHHAMDALVIACATREHINYMNNQHALDKSKDKKEKQQSRIDLRTILCEKKNNNWQFKKPWSTFTQEAKEALEHIVVSFKQNLRVINKATNYYEKWEEKNGVLVKKKVKQEGTNWAIRKPLHKETVSGKIVLDRKIGKDKILTATRKAVDITFTEKIISSITDTGIQKILLNYLKYKGSPEVAFSTEGLEELNKNIAQYNNGKKHQPIYKVRIFEEGSKFPLGETGAKATKYVEAAKGTNLFFGVYQGKGKRTYATIPLNEVIERQKQGLPSVPERNEKGEPLLFSLSPNDLVYVPMEGEIAETIDFNNLSKEQKERIYKTVSFTGNQCFFVQEAVATPIVNKMEYSPLNKMERDILGTMIKEVCIKLKVDRLGNITKA

SEQ ID NO: 155 - protein, 1450 aa, Capnocytophaga sp.
  REGION 1..1450: note = Capnocytophaga sp. oral taxon 326 str. F0382
MKRILGLDLGSNSIGWAFVEQDFENKQGKIIATGSRIIPMDQGILGDFEKGNTVSQTAERTTYRSMRRLRERHLLRRERLHRVLHILGFLPPHYDAQIDFTKRYGKFIDNAEPKIAYNNGNFIFMNSFNEMIEDFKKYQPQLFYKKSNGEESKIPYDWTIYYLRKKVLSQKITQQELAWLILHFNQKRGYYQLRGEEETENPNKEVAFHSLKVVDVEAEAPNKKGEIWYTIRLENGWIYRRTSKIPLDDWKGKTRDFIVTTDLNDDGTIKVDKEGKEKRSFRAPDENDWNLLKKKTEHDIDFSGKTVGAYIYDHLLQNPNQKIKGKLVRTIERKYYKDELKAILAKQIALQPELFTETLLADCIRELYRKNETQQQNLLSKDFLHLFVEDIIFYQRPLRSKKSTIANCTLEKRSYIDKETNERKDTFIKVCAKSNPYYQEFRVLQWLQNLRIYEIETDREVTAEFIETAEDYEALFNFLMSQKEIDNEGLLKYFLFAKNPQIKDKVAKSELKKWLTTYRWNYVYDAADNSSKKYPMNETGYDLQRYLQKVEGLPANFLTFDITYRLWHLLYSVKDKVEFEKALKKFAQEYQLDEASFVDSFKNFKPYPNEYGSFSEKAIKKLLPLMRFGNHWDFNRIDVSTQKRIDDLINGVANDEIRTIIREKAEKYQLNSESCFQGLPLWLAQYVVYNRHAEATDIEKWTSVSDLETYLEDFKQHSLRNPIVEQVVTETLRVVRDIWQQYGGGQANFFDEIHIELGRELKKTAEERKQLSNRNQENENTNLRIKKLLAELKEDASIQNVRPYSPVQQELLKIYEEGVFSSTDQVEEDIQKIRKKAEPTTPEIQRYKLWLEQKYKSPYTGEVISLTKLFTEEYEIEHIIPQSRYYDDSLSNKVICESAVNKLKTNQLGLEFIQNHHGEKVRITGNKEVTIFTEEQYKEFVKKHYANNSAKQQKLLLNEIPEKMVARQLNDTRYISKYISEILSKIVRSDEKDEGVNSKNVIPCTGKITTALKQDWGLNDVWNELILPRFERMNQLTQTQLFTSYNDRFQKNLPTVPIEYSQGFQKKRIDHRHHAMDALVIACATREHINYMNNQHALDKNKDKKEKQQSRIDLRTILCEKKNNNWQFKKPWSTFTQETKEALEHIVVSFKQNLRVINKATNYYEKWEEKNGVLVKKKVKQEGTNWAIRKPLHKETVSGKIVLDRKIGKDKILTATRKEVDITFTEKIISSITDTGIQKILLNYLNYKGSPEVAFSAEGLEELNKNIAQYNDGKKHQPIYKVRIFEEGSKFPLGETGAKATKFVEAAKGTNLFFGVYQGKEKRSYATIPLNEVIERQKQGLPSVPERNEKGEPLLFSLSPNDLVYVPMEGEIAETIDFNNLSKEQKERIYKTVSFTGNQCFFVQEAVATPIVNKMEYSPLNKMERDILGTMIKEVCIKLKVDRLGNITKA

SEQ ID NO: 156 - protein, 1435 aa, Capnocytophaga sp.
  REGION 1..1435: note = Capnocytophaga sp. oral taxon 329 str. F0087
MKNILGLDLGTTSIGFAHIVEDENKEKSEIKELGVRIVSLATDEQSDFEKGKSISTNANRTLKHGARLNLDRYQQRRKFLIDLLQKANLITSASILAENGKNTTHSTWQLRAKAVTERIEKEEFARVLLAINKKRGYKNSRKTKTEDEGQAIDGMAIAKCLYDENLTPGQLSLQLLQQNKKLLPDFYRSDLQKEFDLVWNLQKQFYPDILTDSFYKELQGKGKDATSKAFSKRYHFDTAENKGSKESVRLQAYQWRAEAISKQLSKEEVAYVLTEINNNLNNSSGYLGAISDRSKELYFNRQTVGQYLYAQLQENRHNSLKNKVFYRQDYLDEFERIWETQASFHKELTDELKKQIRDVVIFYQRKLKSQKGLVSFCEFESKEIEIEKDGKAITKSIGARVVPKSSPLFQEFKIWQILNNVTCKRKGIRKKKSSAKSTELDLFNEPSQSIFSLDMECKQLLFDELNLKGDLKSDKVLKLLGYSPQEWEINYNQLEGNRTQKSLYEAYLKIIEIEGYEVKDILQIKSTKDDWSLDESPLSASEIRERVKVIFQTLGICTKILYFDPLLPVKEFEQQYSYQLWHLLYSYESDDSTSGNETLYRILEKKYAFKREHATILANVALQDDYGSLSTKAIRKIYPYIKENQYSTACELAGYKHSKLSLTTEELEARELKNIIPLLKKNALRNPVVEKILNQMINVVNALIEKNSERDAEGKITKYFHFDEIRIELARELKKNAQERYEMTQNINKAKLEHQKISEKLQKQFGIKNPTKSDIIRYRLYQELEHNGYKELYTNTYIAPDVLFSKNIDIEHIVPKARVFDDSFSNKTLAFKEFNIKKGESTAFDYITSLNCEGELNQYLTRVENAYKTKSISLTKYKNLLKKASEIGDGFINRDLRDTQYIAKKAKEILFQVTKNVLSTSGSITDRLREDWGLVDVMKELNMPKYQSLGLTEVEERKDGNKVTVIKDWTKRNDHRHHAMDALTVAFTKPSYIQYLNHLNARKDENNKNYSVILAIEKKETIKVPINNGKNKRVFIEPILNFRQVAKKHLEEIFISHKAKNKVVTKNINKPAGTDKQQITLTPRGQLHKETIYGKYQYYVNKEEKVGVKFDERTITKVSNPLYREALLKRLQANDNDPKKAFAGKNALSKNPIYLDEAKTKTLPEKVNLTYLEEDFSIRKDISPDNFKDLKSIEKVIDQGVKRILIKRLQAYDNDPKKAFVDLEKNPIWLNKEKGIAIKRVTISGVSNAQPLHIGKDHLGKTTLNKEGKEVPVDYVSTGNNHHVAIYRDKEGNLQEQIVSFFEAVVRAQQGLPIIDKNYKQAEGWQFMFTMKQNEMFVFPNEATGFNPAEIDLLDPKNKKLISPNLFRVQTISIVKYGNSVVRDFKFRHHLETTLQDDKILQGITFQQIKSLEPLRNIVKVRINHLGDIVNIGEY

SEQ ID NO: 157 - protein, 1426 aa, Capnocytophaga sp.
  REGION 1..1426: note = Capnocytophaga sp. oral taxon 335 str. F0486
MKNILGLDLGTTSIGFTHIVEDENKEKSEIKELGVRIVSLTTDEQSDFEKGKSISTNANRTLKHGARLNLDRYQQRRKFLIDLLQKANLITSSSILAENGKNTTHSTWQLRAKAVTERIEKEEFARVLLAINKKRGYKSSRKAKTEDEGQAIDGMAIAKRLYDENLTPGQLSLQLLQQNKKLLPDFYRSDLQKEFDLVWNFQKQFYPDILTDSFYKELQGKGKDATSKAFSKRYHFDTAENKGSRESVRLQAYQWRAEAISKQLSKEEVAYVLTEINNNLNNASGYLGAISDRSKELYFNRQTVGQYLYAQLQENKHNSLKNKVFYRQDYLDEFERIWETQASFHKELTEELKKQIRDVVIFYQRKLKSQKGLISFCEFESKEIEIEKDGKTITKSIGARVVPKSSPLFQEFKIWQILNNVTCKRKGIRKKKSSAKSTELDLFNEPSQTIFSLDMECKQLLFEELNLKGDLKSDKVLKLLGYSPQEWEINYNQLEGNRTQKALYEAYLKIVEMEAHDVKDILQIKSTKDDWALEESPLSASEIRERVKAIFQTLGICTKILYFDPLLPVKEFEEQDSYQLWHLLYSYESDDSTSGNETLYRILEKKYAFKREHATILANVTLQDDYGSLSTKAIRKIYPYIKENQYSTACEKAGYKHSKLSLTTEELEARELKNIIPLLKKNALRNPVVEKILNQMINVVNALIEKNSERDAEGKITKYFHFDEIRIELARELKKNAQERYEMTQNINKAKLEHQKISGILQKEFGIKNPTKSDITRYRLYQELAHNGYNDLYTNTYIPKELLFSKNIDIEHIVSKARVFDDSFSNKTLAFREFNIKKGESTAFDYITSLNNEEELNQYLNRVENAYKTKNISPAKYKNLLKKASEIGDGFINRDLRDTQYIAKKAKEILFQVTKNVLSTSGSITDRLREDWGLVDVMKELNMPKYQSLGLTEVEERKEGNKVTVIKNWTKRNDHRHHAMDALTVAFTKPSYIQYLNHLNARKDKNNKNYSVILAIEEKETIKVPTNNGKNKRVFIEPIPNFRQVAKKHLEEIFISHKAKNKVVTKNTNKPAGTDKQQITLTPRGQLHKETVYGKYQYYVNKEEKIGVKFDKETIAKVSNPVYREALLKRLQANDNDPKKAFAGKNALSKNPIYLDEAKTKTLTEKVNLTYLEEDFSIRKDISPDNFKDLKSIEKVIDQGVKRILIKRLQDYDNDPKKAFVDLEKNPIWLNKEKGIAIKRVTISGVNNAQPLHIGKDHLGKTTLNKEGKEIPVDYVSTGNNHHVAIYRDKEGNLQEQIVSFFEAVVGAQQGLPIVDKTYKQAEGWQFLFTMKQNEMFVFPNEATGFNPAEIDLLDPKNKKQISPNLFRVQKIATKDYFFRHHLETNVDTDNVLKNTTWKREGLSGLKDIVKVRINHLGDIVSIGEY

SEQ ID NO: 158 - protein, 1432 aa, Capnocytophaga sp.
  REGION 1..1432: note = Capnocytophaga sp. oral taxon 380 str. F0488
MKNILGLDLGTTSIGFAHIVEDENKEKSEIKELGVRIVSLTTDEQSDFEKGKSITTNANRTLKHGARLNLDRYQQRRKYLIDLLHKANLITPSSILAENGKNTTHSTWQLRAKAVTERIEKEEFARILLAINKKRGYKSSRKAKTEDEGQAIDGMAIAKRLYDENLTPGQLSLQLLQQNKKLLPDFYRSDLQKEFDLVWNFQKQFYPDILTDIFYKELQGKGKDATSKAFSKRYHFDTAENKGSKESVRLQAYQWRAEAVSKQLSKEEVAYVLTEINNNLNNASGYLGAISDRSKELYFNRQTVGQYLYAQLQENRHNSLKNKVFYRQDYLDEFERIWETQALFHKELTDELKKQIRDVVIFYQRKPKSQKGLISFCEFESKEIEIEKDGKTITKNIGARVVPKSSPLFQEFKIWQILNNVICKRKGIRKKKISAKTTQLDLLNESSQTIFSLDMECKQLLFDELNLKGDLKSDKVLKLLGYSPQEWEINYNQLEGNRTQKALYEAYLKIVEMEAHDVKDILQIKSTKDDWSLDESPLSASEIRESVKAIFQALGICTKILYFDPLLPVKDFEEQDSYQLWHLLYSYESDDSTSGNETLYRILEKKYAFKREHARILANVALQDDYGSLSTKAIRKIYPNIKENQYSTACEMAGYKHSKLSLTTEELEARELKNIIPLLKKNALRNPVVEKILNQMINVVNALIEKNSERDAEGKITKYFHFDEIRIELARELKKNAQKRYEMTQNINKAKSEHQKISEILQKEFGIKNPTKSDIIRYRLYKELEHNGYKELYTNTYIAPDVLFSKNIDIEHIVPKARVFDDSFSNKTLAFKDFNIKKGESTAFDYITSLKNEEKLNQYLARVENAYKTKNISPAKYKNLLKKASEIGDGFINRDLRDTQYIAKKAKEILFQVTKNVLSTSGSITDRLREDWSLVDVMKELNMPKYQSLGLTEVEERKDGNKVTVIKDWTKRNDHRHHAMDALTVAFTKPSYIQYLNHLNARKDENNKNYSVILAIEKKETIKVPTNNGKNKRVFIEPIPNFRQVAKKHLEEIFISHKAKNKVVTKNTNKPAGTNKQQITLTPRGQLHKETIYGKYQYYVNKEEKVGVKFDKETIAKVSNPLYREALLKRLQANDNDPKKAFTGKNALSKNPIYLDEAKTKTLPEKVNLTYLEEDFSVRKKIVPKNPTSKEFVPNLKSIEKVVDEGVRNILIERLRVYNNDPEKAFVDLEKNPIWLNKEKGIAIKRVTISGVNNAQPLHIGKDHLGKTTLNKEGKEIPVDYVSTGNNHHVAIYRDKEGNLQEQIVSFFEAVVRTQQGLPIIDKTYKQEEGWQFLFTMKQNEMFVFPNEATGFNPAEIDLLDPKNKKQISPNLFRVQKIATKDYFFRHHLETNVETDNVLKNTTWKREGLSGLKDIVKVRINHLGDIVSIGEY

SEQ ID NO: 159 - protein, 1450 aa, Capnocytophaga sp.
  REGION 1..1450: note = Capnocytophaga sp. oral taxon 412 str. F0487
MKHILGLDLGSNSIGWAFVQQDFENKQGKIIATGSRIIPMDQGILGDFERGNTVSQTAERTTYRNTRRLRERHLLRRERLHRVLHILGFLPPHYDSQIDFTKRYGKFIDNAEPKIAYNNGNFIFMNSFNEMIEDFKKYQPQLFYKKSNGEESKIPYDWTIYYLRKKALSQKITQQELAWLILHFNQKRGYYQLRGEEETENPNKEVAFHSLEVVDVEAEAPNKKGEIWYTIRLENGWIYRRTSKIPLDDWKGKTRDFIVTTDLNDDGTIKLDKEGKEKRSFRAPDENDWNLLKKKTEHDIDFSGKTVGAYIYDHLLQNPNQKIKGKLVRTIERKYYKDELKAILAKQIALQPELFTETLLADCIRELYRKNETQQQNLLSKDFLHLFVEDIIFYQRPLRSKKSTIANCTLEKRSYIDKETNERKDTPIKVCAKSNPYYQEFRVLQWLQNLRIYEIETDREVTAEFIETAQDNEALFNFLMSQKEIDNESLLKYFLFAKNPQIKDKVAKSELKKWLTTYRWNYVYDAADNSSKKYPMNETGYELQQYLQKVEGLPANFLTFDITYRLWHLLYSVKDKVEFEKALKKFAQEYQLDEASFVDSFKNFKPYPNEYGSFSEKAIKKLLPLMRFGNHWDFNRIDVSTQKRIDDLINGVANDEIRTIIREKAEKYQLNSETCFQGLPLWLAQYVVYNRHAEAADIEKWTSVNDLEAYLEDFKQHSLRNPIVEQVITETLRVVRDIWQRYGGGQANFFDEIHIELGRELKKTAEERKQLSNRNQENENTNLRIKKLLAELKEDASIQNVRPYSPVQQELLKIYEEGVFSATDEVEEDIQKIRKKAEPTTPEIQRYKLWLEQKYKSPYTGEVISLTKLFTEEYEIEHIIPQSRYYDDSLSNKVICESAVNKLKTNQLGLEFIQNHHGEKVRITANKEVTIFTEEQYKEFVKKHYANNSAKQQKLLLNEIPEKMVARQLNDTRYISKYISEILSKIVRSDEKDEGVNSKNIIPCTGKITTALKQDWGLNDVWNELILPRFERMNQLTQTQLFTSYNDRFQKNLPTVPIEYSQGFQKKRIDHRHHAMDALVIACATREHINYMNNQHALDKSKDKKEKQQSRIDLRTILCEKKNNNWQFKKPWSTFTQEAQEALEHIVVSFKQNLRVINKATNYYEKWEEKNGVLVKKKVKQEGTNWAIRKPLHKETVSGKIVLDRKIGKDKILTATRKSVDITFTEKIISSITDTGIQKILLNYLKYKGSPEVAFSAEGLEELNKNIAQYNDGKKHQPIYKVRIFEEGSKFPLGETGAKATKYVEAAKGTNLFFGVYQGKGKRTYATIPLNEVIERQKQGLPSVPERNEKGEPLLFSLSPNDLVYVPMEGEIAETIDFNNLSKEQKERIYKTVSFTGNQCFFVQEAVATPIVNKIEYSPLNKMERDILGTMIKEVCIKLKVDRLGNITKA

SEQ ID NO: 160 - protein, 1426 aa, Capnocytophaga sputigena
  REGION 1..1426: note = Capnocytophaga sputigena ATCC 33612
MKNILGLDLGITSISFAHIVEDENKEKSEIKELGVRIVSLTTDEQSDFEKGKSITTNANRTLKHGARLNLDRYQQRRKYLIDLLQKANLITSSSILAENGKNTTHSTWQLRAKAVTERIEKEEFARVLLAINKKRGYKSSRKAKTEDEGQAIDGMAIAKRLYDENLTPGQLSLQLLQQNKKLLPDFYRSDLQREFDLVWNFQKQFYPDILTDSFYKELQGKGKDATSKAFSKRYHFDTAENKGSKESVRLQAYQWRAEAISKQLSKEEVAYVLTEINNNLNNASGYLGAISDRSKELYFNRQTVGQYLYAQLQENRHNSLKNKVFYRQDYLDEFERIWETQASFHKELTDELKKQIRDVVIFYQRKLKSQKGLISFCEFESKEIEIEKDGKTITKTIGARVVPKSSPLFQEFKIWQILNNVTCKRKGIRKKKSSAKSTELDLFNEPSQTIFSLDMECKQLLFDELNLKGDLKSDKVLKLLGYSPQEWEINYNQLEGNRTQKALYEAYLKIVEMEAHDVKDILQIKSAKDDWSLDESPLSASEIKEKVKDIFQALGICTKILYFDPLLPVKEFEKQDSYQLWHLLYSYESDDSTSGNETLYRILEKKYAFKREHARILANVALQDDYGSLSTKAIRKIYPNIKENQYSKACELAGYKHSKLSLTTEELEARELKNIIPLLKKNALRNPVVEKILNQMINVVNALIEKNSERDAEGKITKYFHFDEIRIELARELKKNAQKRYEMTQNINKAKLEHQKISEILQKKFGIKNPTKSDIIRYRLYQELEHNGYKELYTNAPIARDMLFSKNIEIEHIVPKARVFDDSFSNKTLTFHRINSNKGEYTAFDYITSLNSEEELNQYLTRVENAYKTKSISLTKYKNLLKKASEIGDGFINRDLRDTQYIAKKAKEILFQVTKNVLSTSGSITDRLREDWGLVDVMKELNMPKYQSLGLTEVEERKEGNKVTVIKNWTKRNDHRHHAMDALTVAFTKPSYIQYLNHLNARKDENNKNYSVILAIEEKETIKVPTNNGKNKRVFIEPIPNFRQVAKKHLEEIFISHKAKNKVVTKNVNKPAGTDKQQITLTPRGQLHKETIYGKYQYYVNKEEKVGVKFDERTITKVSNPLYREALLKRLQANDNDPKKAFTGKNALSKNPIYLDETKTKTLPEKVNLTYLEEDFSIRKDISPDNFKDLKSIEKVIDQGVKRILIKRLQDYDNDPKKAFVDLEKNPIWLNKEKGIAIKRVTISGVSNAQPLHIGKDHLGKTTLNKEGNEIPVDYVSTGNNHHVAIYRDKEGNLQEQIVSFFEAVVRTQQGLPIIDKTYKQEEGWQFLFTMKQNEMFVFPNATTGFNPAEIDLLDPKNKKLISPNLFRVQKIATKDYFFRHHLETNVETDNVLKNTTWKREGLSGLKDIVKVRINHLGDIVSIGEY

SEQ ID NO: 161 - protein, 1140 aa, Catellicoccus marimammalium
  REGION 1..1140: note = Catellicoccus marimammalium M35/04/3
MKNMTKVNVGLDVGISSAGWSVINAETNQILESGVRLFSGSDADENVNRRNQRQGRRLFRRRKLRIQEAKKYLENVFQLKDIEPKDEWNPYEIRVRALNEKVSKEELSIALLNIVKHRGISYELEDVTDEEGTNTQSFQSGLDYNRRLLKTKTVGEIQYDRLQKYGQVRGQIQTEDGLLINIFPTKNYVEEVERILETQKKYHPEIDDVFIEKIISFVTRKREYFVGPGNEKSRTDYGIYRENGETLDNLFEILIGKDKFYPEEYRAAGSSYTAQIFNLLNDLNNLRIPTTEDHHLTKAQKEEIITELKNTSRLSGGMLKLISKVTKAPKEEISGYRKDEKDKPDLHSLAYYRKQKNMLEKEGIQIADFSEELLDELATMMTLNTEPGEIRKQLNKITNQYDILTPEVIEVLVKNHTAFVATSNHKWHRFSLKLMKEFIPELLETSKEQSTILCERGFIQNRASYLDENHHFNYAELRENLYNPVVRKSTCEMLKVFTAIQEKYPNIQNVIVELPRETNEDEQKRKIKKINDNNAKRKKEILKEAQAQSGLSEEALEEKLLKTKGLYLKLMLWYEQEGKCVYSGQEIPLSDLLQNKGGYEVDHIIPISISFDDRLCNKVLVRQQLNSQKSNQTPFEYMTTHTDGHLSFHELKELVGKNKRFSKEKRELLLAEIYSNDIETRKRFINRNLVDTSYTARIVLNALQQYKKENQLSMNVSVVRGAMTNILRKKVKLDKTRETFHHHAIDASLMAVIPNIEFFKERKEWLPKSANEEVVEVEVSEEETMPEKEFKVKMRLPESFIQDVQILQRNSFAKEEVSGPQTRERNLKIKFSHQVDQKMNRKVADDTIYGTRQAQLGKDKKEETYVIGKIKDIYNYDEYVRFKKRYDKNKESFLMYHHDPQTFEKLEEILAQYPEYIEDEKGKKKKVSPFALYREENGPVTKYAKKNNGPVIKQLKYYDSKLNRKIDISHKYSTKNRQVVLQSLKPYRTDVYRNQDTGEYTLVGIDQNDGKFVNGHYGIPKSRYEEIKANNKLSEHDEFVFSLYKNSMVKVIDENGESIVVRYLSRSMPNRKNNAEIKPVEKYQFEDGEVVPVYGKCRKQMQTVFVKKGWTLLKGNTDILGNTYFVEKESENPKKMIDDK

SEQ ID NO: 162 - protein, 1329 aa, Catenibacterium mitsuokai
  REGION 1..1329: note = Catenibacterium mitsuokai DSM 15897
IVDYCIGLDLGTGSVGWAVVDMNHRLMKRNGKHLWGSRLFSNAETAANRRASRSIRRRYNKRRERIRLLRAILQDMVLEKDPTFFIRLEHTSFLDEEDKAKYLGTDYKDNYNLFIDEDFNDYTYYHKYPTIYHLRKALCESTEKADPRLIYLALHHIVKYRGNFLYEGQKFNMDASNIEDKLSDIFTQFTSFNNIPYEDDEKKNLEILEILKKPLSKKAKVDEVMTLIAPEKDYKSAFKELVTGIAGNKMNVTKMILCEPIKQGDSEIKLKFSDSNYDDQFSEVEKDLGEYVEFVDALHNVYSWVELQTIMGATHTDNASISEAMVSRYNKHHDDLKLLKDCIKNNVPNKYFDMFRNDSEKSKGYYNYINRPSKAPVDEFYKYVKKCIEKVDTPEAKQILNDIELENFLLKQNSRTNGSVPYQMQLDEMIKIIDNQAEYYPILKEKREQLLSILTFRIPYYFGPLNETSEHAWIKRLEGKENQRILPWNYQDIVDVDATAEGFIKRMRSYCTYFPDEEVLPKNSLIVSKYEVYNELNKIRVDDKLLEVDVKNDIYNELFMKNKTVTEKKLKNWLVNNQCCSKDAEIKGFQKENQFSTSLTPWIDFTNIFGKIDQSNFDLIENIIYDLTVFEDKKIMKRRLKKKYALPDDKVKQILKLKYKDWSRLSKKLLDGIVADNRFGSSVTVLDVLEMSRLNLMEIINDKDLGYAQMIEEATSCPEDGKFTYEEVERLAGSPALKRGIWQSLQIVEEITKVMKCRPKYIYIEFERSEEAKERTESKIKKLENVYKDLDEQTKKEYKSVLEELKGFDNTKKISSDSLFLYFTQLGKCMYSGKKLDIDSLDKYQIDHIVPQSLVKDDSFDNRVLVVPSENQRKLDDLVVPFDIRDKMYRFWKLLFDHELISPKKFYSLIKTEYTERDEERFINRQLVETRQITKNVTQIIEDHYSTTKVAAIRANLSHEFRVKNHIYKNRDINDYHHAHDAYIVALIGGFMRDRYPNMHDSKAVYSEYMKMFRKNKNDQKRWKDGFVINSMNYPYEVDGKLIWNPDLINEIKKCFYYKDCYCTTKLDQKSGQLFNLTVLSNDAHADKGVTKAVVPVNKNRSDVHKYGGFSGLQYTIVAIEGQKKKGKKTELVKKISGVPLHLKAASINEKINYIEEKEGLSDVRIIKDNIPVNQMIEMDGGEYLLTSPTEYVNARQLVLNEKQCALIADIYNAIYKQDYDNLDDILMIQLYIELTNKMKVLYPAYRGIAEKFESMNENYVVISKEEKANIIKQMLIVMHRGPQNGNIVYDDFKISDRIGRLKTKNHNLNNIVFISQSPTGIYTKKYKL

SEQ ID NO: 163 - protein, 1419 aa, Chryseobacterium sp.
  REGION 1..1419: note = Chryseobacterium sp. CF314
MMIKNILGLDLGTNSIGWALIKQNFENKYGEILGMGSRIIPMSQDVLGEFGKGNSVSQTAARTGYRGVRRLRERFLLRRERLHRVLNVLNFLPEHYASQIDFEKRFGKFKYETEPKLAYNNDGFFFKNSFDEMLGDFKDHQFHLLENGRKVPYDWTIYYLRKKALSQKIEKEELAWILLNFNQKRGYYQLRGEDFEEEKDRVFVRLKVDRVVDSGENIKGKILYDVYFENGWKYEKQIVKTEDWIGRTKEFIVTESILKNGDTKRTFKAVDSEKDWIAIKTKTEQEIDKSHKTVGAYIYEALLQNPKQKIKGKLVRTIERKFYREELKKILERQKEFHPELQSDDLYNDCIRELYRNNEAHQITLSKKDFVHLLLNDLIFYQRPLRSQKSSVSNCTLEFRKYKDENGVEHAQYLKTIPKSNPYYQEFRVWQWMFNLNIYRKDDDTNVTKEFLSSTEDYETLFEFLNNRKEVDQKALLRHFKLNEKTHRWNYVEDKKYPCNETKTMISTRLEKVENYPSDFLTREMEQNIWHIIYSVNDKIEYEKALKSFAHKNNLDENSFFEAFKKFPPFKSEYGSFSEKAIKKLLPLLRLGKYWNWESIDRKSQGRIEKIITGEFDGNIKDKVREKAIHLTAENDFQGLQLWLAQYIVYGRHSEASMIGKWNSADDLEEFLKGFKQHSLRNPIVEQVITETLRVVKDIWLKYGNGAKDFFSEIHIELGREMKQTKDERVDATKRITENENTNLRIKALLAEMMNDNSVENIRPYSPMQQEILKIYEDGILKSDIEIDDDILKISKTAQPSSSDLKRYKLWLEQRYKSPYTGQIIPLNKLFTSEYEIEHIIPQSRYFDDSFSNKIICESAVNKLKDNYIGLGFIKQFGGMIVECGFGKSVEIFKAEEYEDFVKKHYANNRSKRNKLLLEEIPEKMIDRQLNDTRHISKYISGVLSNIVRQEDGTDEGVNSKNIVPGNGKITTQLKQDWGLNDVWNELILPRFERMNQLTNSTDFTSWNKNHQKFLPTVPIEFSKGFSKKRIDHRHHAMDALVIACATKDHINLLNNQSAKSDTKRYDLKRKLMKFERVVYSHSKTGEKIEKEVPKQFLKPWDNFTVDAKNKMETIIVSFKQNLRVINKATNHYEKWIEKDGIKRKELIKQEGTNWAIRKPMHKETVSGKVDLPGIKIPKGKILTATRKSLDTSFDLKTINSITDTGIQKILKNYLEFKGSSELAFSPEGIEDMNKNIEKFNDGKPHQSINKVRIFELGSKFSVGQTGNKKDKYVEAAKGTNLFFAVYEDKNGKRSYETIPLNEVIERQKQGLDSVSFKNKEDFLLCPNDLVYVPSEDELENIYNIDFKNLTTEKTGNIYKVVSFSGNQIFFIRQDIAISIVNKAEFSTLNKMERAIDGSMIKENCIKLKIDRLGNIAKI

SEQ ID NO: 164 - protein, 1021 aa, Clostridium cellulolyticum
MKYTLGLDVGIASVGWAVIDKDNNKIIDLGVRCFDKAEESKTGESLATARRIARGMRRRISRRSQRLRLVKKLFVQYEIIKDSSEFNRIFDTSRDGWKDPWELRYNALSRILKPYELVQVLTHITKRRGFKSNRKEDLSTTKEGVVITSIKNNSEMLRTKNYRTIGEMIFMETPENSNKRNKVDEYIHTIAREDLLNEIKYIFSIQRKLGSPFVTEKLEHDFLNIWEFQRPFASGDSILSKVGKCTLLKEELRAPTSCYTSEYFGLLQSINNLVLVEDNNTLTLNNDQRAKIIEYAHFKNEIKYSEIRKLLDIEPEILFKAHNLTHKNPSGNNESKKFYEMKSYHKLKSTLPTDIWGKLHSNKESLDNLFYCLTVYKNDNEIKDYLQANNLDYLIEYIAKLPTFNKFKHLSLVAMKRIIPFMEKGYKYSDACNMAELDFTGSSKLEKCNKLTVEPIIENVTNPVVIRALTQARKVINAIIQKYGLPYMVNIELAREAGMTRQDRDNLKKEHENNRKAREKISDLIRQNGRVASGLDILKWRLWEDQGGRCAYSGKPIPVCDLLNDSLTQIDHIYPYSRSMDDSYMNKVLVLTDENQNKRSYTPYEVWGSTEKWEDFEARIYSMHLPQSKEKRLLNRNFITKDLDSFISRNLNDTRYISRFLKNYIESYLQFSNDSPKSCVVCVNGQCTAQLRSRWGLNKNREESDLHHALDAAVIACADRKIIKEITNYYNERENHNYKVKYPLPWHSFRQDLMETLAGVFISRAPRRKITGPAHDETIRSPKHFNKGLTSVKIPLTTVTLEKLETMVKNTKGGISDKAVYNVLKNRLIEHNNKPLKAFAEKIYKPLKNGTNGAIIRSIRVETPSYTGVFRNEGKGISDNSLMVRVDVFKKKDKYYLVPIYVAHMIKKELPSKAIVPLKPESQWELIDSTHEFLFSLYQNDYLVIKTKKGITEGYYRSCHRGTGSLSLMPHFANNKNVKIDIGVRTAISIEKYNVDILGNKSIVKGEPRRGMEKYNSFKSN

SEQ ID NO: 165 - protein, 1065 aa, Clostridium perfringens
  REGION 1..1065: note = Clostridium perfringens C str. JGS1495
MNKDINYALGLDIGITSVGWAVINLDLNRIEDLGVRIFNAAENPKDGSSLALPRRLARGRRRLLRRKAYRVERVRKLIVKNNILTKEELEGLFKNKEVIDVWEARVKGLDYKLSREEWAKILINFCKRRGFKSNRKNETKDKEAGQILSSISYNIEKMKETNSRTIGEYIYNEVKNSDDSYAPLRNKFGEYKMCVSRDVLREEIHTLFEKQRELGNNFASDEIEDKYFEIFNSQRPFSNFEDLEKLVGFCTFERKKHKRAPKHCISSEEFTLYEGINKLSIIKDGEKRKLSEEERTLVVNEAFNKKEIKYTTLRKLLGLSEDELFSTLTYSIDKDISKTENTKFVSLKGYHEIKRAIEKGVSKKAWQDIENNRNLLNDIAYVLTLGKTDDEIEKQLRLRNVPEELFESLLDMSFSKFNNLSIYALEKILPFMKEGYQYNEACEKAGYNFKAIYEGVRTKKLPVIEIDEIVNPVVNRALAQTRKVINSVIDKYGSPVRINIELARDLAKNFKDRKLIEKEQKENRANLDKIRENLRELMDKEPTAVEVLKYRLWEQQRGECAYTQSQIALERLFSPGYCEIDHIIPFSRSFDDSLSNKILVLGSENQRKGNKIPYEYFGEDSERWNSFEIWVKGSYLNYKKKANLLKKKFTEEEQRDWKARNLQDTKYICRYISNFVNNRLEFKESENKQKVITVNGRATAYLRSRWGLNKVREDGDKHHALDAAVVGVTTQGMVQKISKYSKAHELYTVRKNDEFVDVETGECVDVDEYKEIRKDILPRPWRGFSEELKLRLSDNPLEELKKLPIETYNEEFIKENVKPIFVSRVPFRKISGKLFKETIYSERAFKDGYFVSKKSLVDLKRGDLDNFYNYECDKKLYDAISERMKEFNYNGKKAFESPFRKPTKSGKEGPVVRSVKIKSAAPFKDGIPMNEGLVAKEGMVRIDIYEKEGKYFVVPVYRYQLAKGIVPKRAAIAGKSELKWPIMDQTYNFKFSIFKNDLIEIKYAKKDGYFGYYDGFDRHTASLVIENHDNSDRYRGIGVKTGVVEFNKYEVDVLGNYHKVNLGGN

SEQ ID NO: 166 - protein, 1065 aa, Clostridium perfringens
  REGION 1..1065: note = Clostridium perfringens D str. JGS1721
MNKDINYALGLDIGITSVGWAVINLDLNRIEDLGVRIFNAAENLKDGSSLALPRRLARGRRRLLRRKAYRVERVRKLILKNNILTKEELEGLFKNKEVIDVWEARVKGLDYKLSREEWAKILINFCKRRGFKSNRKNEAKDKEAGQILSSISYNIEKMKETNSRTIGEYIYNEVKNSEDSYAPLRNKFGEYKMCVSRDVIREEIHTLFEKQRELGNNFASDEIEDKYFEIFNSQRPFSNFEDLEKLVGFCTFERKKHKRAPKHCISSEEFTLYEGINKLSIIKDGEKRKLSEEERTLVVNEAFNKKEIKYTTLRKLLGLSEEELFSTLTYSIDKDISKTENTKFVSLKGYHEIKRAIEKGVSKKAWQDIENNRNLLNDIAYVLTLGKTDDEIEKQLRLRNVPEELFESLLDMSFNKFNNLSIYALEKILPFMKEGYQYNEACEKAGYNFKAIYEGVRTKKLPVIEIDEIVNPVVNRALAQTRKVINSVIDKYGSPVRINIELARDLAKNFKDRKLIEKEQKENRANLDKIRENLRELMDKEPTVVEVLKYRLWEQQRGECAYTQSQIPLERLFSPGYCEIDHIIPFSRSFDDSLSNKILVLGSENQRKGNRTPYEYFGEDSERWNSFEIWVKGSYLNYKKKANLLKKKFSEEEQRDWKARNLQDTKYICRYISNFVNNRLEFKESENKQKVITVNGRATAYLRSRWGLNKVREDGDKHHALDAAVVGVTTQGMVQKISKYSKAHELYTVRKNDEFVDVETGECVDVDEYKEIRKDILPRPWRGFSEELKLRLSDNPLEELKKSPIETYNEEFIKENVKPIFVSRVPFRKISGKLFKETIYSERAFKDGYFVSKKSLVDLKRGDLDNFYNYECDKKLYDAISERMKEFNYNGKKAFESPFRKPTKSGKEGPVVRSVKIKSAVPFKDGIPMNEGLVAKEGMVRIDIYEKEGKYFVVPVYRYQLAKGIVPKRAAIAKKDELKWPIMDQTYNFKFSIYKNDLIEVKYDKKGVYFGYYDGFDRNSASLTIEKHDNSERYRSIGLKVGVLEINKYEVDVLGNYHKVKLGGN

SEQ ID NO: 167 - protein, 1116 aa, Clostridium spiroforme
  REGION 1..1116: note = Clostridium spiroforme DSM 1552
MVEFLLKEMKIMGRLVLGLDIGITSVGYGVIDIDKNEFVDYGVRLFKEGTAINNEERRSKRGARRLKRRKTNRIADMKKLLERNGLIDEQYTALNNPYEIRKKGLKNKLSNYELATAILHITKNRGTCLESNADETQDEESTKNILSKNALELKDKYICEIQLARLEESGKIRGINNNFKTEDYLKELSKILENQDLEKETIDKIKEIVARRRRYDQGPGSEKSPTPYGSYRMENGELVHVNLIDMMRGKCSVFPDQLRAPQQSYSAELFNLLNDLNNLKINGEKLSSTEKQKIIDFVNEKGGITVKQLLKLIDVGITEISGFRIDKNEKPLITEFKGYKKVLKVFKNYNQESLLNDKSIVDTIMDINTKIKSIDERSDQLKQVLPSLDTSIINDLASIKGVSGYHSLSLKALNLINNEMLKTEMNQMQVLHQLDIFDKNRVSLKGQRQIYADDNAILSPVAKRAHRETFKVINKLRSIYGEFDSIVIETTRDKNTQDQKKRIKNNQKNYEERNTEVNNFLKEAGYNPENINAKTKMKIRLYIEQDAKSAYTLQDINLKELIEDEKAYEIDHIIPISISLDDSFNNKVLTTHDENQEKGNLTPISAFLKGKFHNGNLNTYKVFIQNNKNLNRKKKEYLLCEDDITRYEVVQNFINRNLVDTSYACRTVMNTLVHYFKDNEINTKVHTIKGQATSTFRKRIGLIKDREEDYFHHAIDALIVASLKKMNLINSYLMKVDFNEMYDEETGEIFNVLPDNSYLDEKYISFVSNLKNIYEESNKYIRGVMIKEKMTYPLIKVSHKIDTKPNRKISDDTIYSTRNVDNQDMLVERIKNIYDPKENAANTLINDIINDNTDKYIMYHKDPQTFDKIKAIVLNHFNEFKTDKNCYIVTKEGLYKLKGTSPLALYYEEFGPITKYAKKNNGPTIHSMKFYSEKLGNHLSITHKYSTVNKKVITKQISPYRTDFYQSPEGKYKFVTVRYKDVAYNAKKDKYIIDHSWYREQKKLKKIADEWIFVCSVHRDELIGIMKADGQKRIFDSSTESDGETLYHDAKTYEILKFTATNNDITGRFEVKPIYCYCKKQLMVSIGTCRKIQKFATDVLGNLYIVKDNVLKLEFK

SEQ ID NO: 168 - protein, 1338 aa, Coprococcus catus
  REGION 1..1338: note = Coprococcus catus GD/7
MKQEYFLGLDMGTGSLGWAVTDSTYQVMRKHGKALWGTRLFESASTAEERRMFRTARRRLDRRNWRIQVLQEIFSEEISKVDPGFFLRMKESKYYPEDKRDAEGNCPELPYALFVDDNYTDKNYHKDYPTIYHLRKMLMETTEIPDIRLVYLVLHHMMKHRGHFLLSGDISQIKEFKSTFEQLIQNIQDEELEWHISLDDAAIQFVEHVLKDRNLTRSTKKSRLIKQLNAKSACEKAILNLLSGGTVKLSDIFNNKELDESERPKVSFADSGYDDYIGIVEAELAEQYYIIASAKAVYDWSVLVEILGNSVSISEAKIKVYQKHQADLKTLKKIVRQYMTKEDYKRVFVDTEEKLNNYSAYIGMTKKNGKKVDLKSKQCTQADFYDFLKKNVIKVIDHKEITQEIESEIEKENFLPKQVTKDNGVIPYQVHDYELKKILDNLGTRMPFIKENAEKIQQLFEFRIPYYVGPLNRVDDGKDGKFTWSVRKSDARIYPWNFTEVIDVEASAEKFIRRMTNKCTYLVGEDVLPKDSLVYSKFMVLNELNNLRLNGEKISVELKQRIYEELFCKYRKVTRKKLERYLVIEGIAKKGVEITGIDGDFKASLTAYHDFKERLTDVQLSQRAKEAIVLNVVLFGDDKKLLKQRLSKMYPNLTTGQLKGICSLSYQGWGRLSKTFLEEITVPAPGTGEVWNIMTALWQTNDNLMQLLSRNYGFTNEVEEFNTLKKETDLSYKTVDELYVSPAVKRQIWQTLKVVKEIQKVMGNAPKRVFVEMAREKQEGKRSDSRKKQLVELYRACKNEERDWITELNAQSDQQLRSDKLFLYYIQKGRCMYSGETIQLDELWDNTKYDIDHIYPQSKTMDDSLNNRVLVKKNYNAIKSDTYPLSLDIQKKMMSFWKMLQQQGFITKEKYVRLVRSDELSADELAGFIERQIVETRQSTKAVATILKEALPDTEIVYVKAGNVSNFRQTYELLKVREMNDLHHAKDAYLNIVVGNAYFVKFTKNAAWFIRNNPGRSYNLKRMFEFDIERSGEIAWKAGNKGSIVTVKKVMQKNNILVTRKAYEVKGGLFDQQIMKKGKGQVPIKGNDERLADIEKYGGYNKAAGTYFMLVKSLDKKGKEIRTIEFVPLYLKNQIEINHESAIQYLAQERGLNSPEILLSKIKIDTLFKVDGFKMWLSGRTGNQLIFKGANQLILSHQEAAILKGVVKYVNRKNENKDAKLSERDGMTEEKLLQLYDTFLDKLSNTVYSIRLSAQIKTLTEKRAKFIGLSNEDQCIVLNEILHMFQCQSGSANLKLIGGPGSAGILVMNNNITACKQISVINQSPTGIYEKEIDLIKL

SEQ ID NO: 169 - protein, 1384 aa, Coriobacterium glomerans
MKLRGIEDDYSIGLDMGTSSVGWAVTDERGTLAHFKRKPTWGSRLFREAQTAAVARMPRGQRRRYVRRRWRLDLLQKLFEQQMEQADPDFFIRLRQSRLLRDDRAEEHADYRWPLFNDCKFTERDYYQRFPTIYHVRSWLMETDEQADIRLIYLALHNIVKHRGNFLREGQSLSAKSARPDEALNHLRETLRVWSSERGFECSIADNGSILAMLTHPDLSPSDRRKKIAPLFDVKSDDAAADKKLGIALAGAVIGLKTEFKNIFGDFPCEDSSIYLSNDEAVDAVRSACPDDCAELFDRLCEVYSAYVLQGLLSYAPGQTISANMVEKYRRYGEDLALLKKLVKIYAPDQYRMFFSGATYPGTGIYDAAQARGYTKYNLGPKKSEYKPSESMQYDDFRKAVEKLFAKTDARADERYRMMMDRFDKQQFLRRLKTSDNGSIYHQLHLEELKAIVENQGRFYPFLKRDADKLVSLVSFRIPYYVGPLSTRNARTDQHGENRFAWSERKPGMQDEPIFPWNWESIIDRSKSAEKFILRMTGMCTYLQQEPVLPKSSLLYEEFCVLNELNGAHWSIDGDDEHRFDAADREGIIEELFRRKRTVSYGDVAGWMERERNQIGAHVCGGQGEKGFESKLGSYIFFCKDVFKVERLEQSDYPMIERIILWNTLFEDRKILSQRLKEEYGSRLSAEQIKTICKKRFTGWGRLSEKFLTGITVQVDEDSVSIMDVLREGCPVSGKRGRAMVMMEILRDEELGFQKKVDDFNRAFFAENAQALGVNELPGSPAVRRSLNQSIRIVDEIASIAGKAPANIFIEVTRDEDPKKKGRRTKRRYNDLKDALEAFKKEDPELWRELCETAPNDMDERLSLYFMQRGKCLYSGRAIDIHQLSNAGIYEVDHIIPRTYVKDDSLENKALVYREENQRKTDMLLIDPEIRRRMSGYWRMLHEAKLIGDKKFRNLLRSRIDDKALKGFIARQLVETGQMVKLVRSLLEARYPETNIISVKASISHDLRTAAELVKCREANDFHHAHDAFLACRVGLFIQKRHPCVYENPIGLSQVVRNYVRQQADIFKRCRTIPGSSGFIVNSFMTSGFDKETGEIFKDDWDAEAEVEGIRRSLNFRQCFISRMPFEDHGVFWDATIYSPRAKKTAALPLKQGLNPSRYGSFSREQFAYFFIYKARNPRKEQTLFEFAQVPVRLSAQIRQDENALERYARELAKDQGLEFIRIERSKILKNQLIEIDGDRLCITGKEEVRNACELAFAQDEMRVIRMLVSEKPVSRECVISLFNRILLHGDQASRRLSKQLKLALLSEAFSEASDNVQRNVVLGLIAIFNGSTNMVNLSDIGGSKFAGNVRIKYKKELASPKVNVHLIDQSVTGMFERRTKIGL

SEQ ID NO: 170 - protein, 1099 aa, Corynebacterium accolens
  REGION 1..1099: note = Corynebacterium accolens ATCC 49725
MSLSYRVGIDVGTYSLGCTAIEVDDNDQPVNILSSVSLIHDSGLDPDQQKRAVTRLASSGVARRTRRLYRRRRRRMINLEKFLTSQGWETRPFEHYSDPYLPWNARVALVNGYISDDAQRGMYLSIAFRHIANHRGWRNPYWKVSSLYSPDKPSDAFEQIRKELEESTGHKIPETVTVGQLISFAQFGKDRLRGGGKKKDEKKPQEQVNQAVISARLHQIDHAREINEICRVQKIDDALRKQILDLVFAAESPKGAQIGRVGKDPLQPKLPRALKASDAFQQYRIVALAGNLRIYRDGVSTPLDRDEKLIVFNYLINLSHKEEPSWLKVAEVLNIDRGQLHGTATMTDDGERAGAAPPVHDTNRTILGCKIKPLVHWWEGANDDERAAMLKALSNSEVEDFDSPAGAQTQAFFANLDESEQEKLDSLHLPIGRAAYSEDTLMRLTSRMLDENLDLYEARLAEFDIPKDWAPPAPRIGEPVGNPAVDRVLKGVARWLEAAADEWGAPKSVVIEHVRDGFISKSKANEIDRANNARHKRNRELFKQMQENLGIDGKLRSSDLWRYQSVQRQNCQCAYCGSPITYTTCEMDHIVPRAGEGSTNTRDNLVATCHRCNLAKKNIPFAVWAAQTNIPGVSVKEALDRTRHWSEDSGMTSKDFKKFRKNVCDRLKRTVVDEPLDARSMESVAWMANELRGRVAQRFQEENTVVNVYRGELTAEARRAAGISDKLRFIDGTGKSRLDRRHHAVDAAVVAFTQNYVAETLAIRSNKKREAQLLQAAEQWKEFTGSDAEHRAAWNAWLPKMQKLAVLLQKALDEDRIAVTSNLRLRLGNGRAHEDSIGELKTIRVGDAISVTDIDRASSEALWCALTREPDFDENNGLPENPDRRIRIHGTWYDAEDDIEVFPVGAGAIKVRGGYAELSRFHHARIYKIPGKKAPVYCMLRVYNADLIRHRHEDLFSVEIKPQTMSVRQAEPKLRKALAENTAEYLGWLVTDDELVIDTSNFNTGQIAEMQSELGQVRRWRLDGFYSPSTLRLRPLQMSAEGLREDTSIGAKKIIDRPGWLPAINKLFGEGHVTVVRRDALGRARLTSNAHLPISWKAE

SEQ ID NO: 171 - protein, 1099 aa, Corynebacterium accolens
  REGION 1..1099: note = Corynebacterium accolens ATCC 49726
MSLLYRVGIDVGTYSLGCTAIEVDDNDQPVSILSSVSLIHDSGLDPDQQKRAVTRLASSGVARRTRRLYRRRRRRMVKLENFLTAQGWETLPFERYSDPYLPWHARVALVNGYISDDTQRGQYLSIAFRHIANHRGWRNPYWKVSSLYSPDKPSDAFEQIRKELEASTGRQIPETATVGQLISFAQFGKDRLRGGGKQKDKKKPQEQVNQAVISARLHQIDHAREINEICRVQKIDDTLRKQILDLVFAAESPKGAQKGRVGKDPLQPKLFRALKASDAFQQYRIAALTGNLRIYRNGVTVPLDRDEKLIVFNYLVNLPKKEEPSWLKIAEILNIDRGQLRGTATMTDDGERAGATPPVHDTNRTILDSKVKPLAHWWENASDDERAAMLKSLSNSEVEDFDSPAGAQVQAFFADLDETEQEKLDSLHLPMGRAAYSEDTLMRLTNRMLDENLDLYEARLAEFGIPKDWAPPAPRIGEPVGNPAVDRVLKGVARWLEAAADEWGAPKSVVIEHVRDGFVSKSKAIEIDRANNNRHKRNRELFQKMQENLGIEGKVRSSDLWRYQSVQRQNCQCAYCGSPITYTTCEMDHIVPRAGEGSTNTRDNLVATCHRCNLAKKNIPFAVWAEKSTIPGVSVKEALDRTRHWSEDSGMSKKDFQKFRKNVCERLNRTVVDEPLDARSMESVAWMANELRGRVAQRFQEENTTVNVYRGALTAEARRAAGITDKLRFIDGTGKSRLDRRHHAVDAAVVAFIHNYVAETLAIRSNKKREAQLLQGTSQWKEFTGSDDKHRAVWNAWIPKMQKLAVLLQIALDEDRIVVTSNLRLRLGNGRAHEDTISELKTIRVGDAISVTDIDRASSEALWCALTREPDFDEKDGLPENPNRRIRVHGTWYDAEDEIEVFPVGAGAIKVRGGYAKLSRFHHARVYKIPGKKAPIYCMLRVYNTDLVQHRHEDLFSVELKPQTMSVRQAEPKLRKALAENTAEYLGWLVTDDELIIDTSTFRTGLIEEMQSEFGLVRRWRLDGFDSPSLLTLRPLHMSAEGLPDDCALGSRKIIDTKGWRVSINKVFNAGNTTVVRRDALGRARLTSNAHLPISWKEE

SEQ ID NO: 172 - protein, 1084 aa, Corynebacterium diphtheriae
MKYHVGIDVGTFSVGLAAIEVDDAGMPIKTLSLVSHIHDSGLDPDKIKSAVTRLASSGIARRTRRLYRRKRRRLQQLDKFIQRQGWPVIELEDYSDPLYPWKVRAELAASYIADEKERGEKLSVALRHIARHRGWRNPYAKVSSLYLPDEPSDAFKAIREEIKRASGQPVPETATVGQMVTLCELGTLKLRGEGGVLSARLQQSDHAREIQEICRMQEIGQELYRKIIDVVFAAESPKGSASSRVGKDPLQPGKNRALKASDAFQRYRIAALIGNLRVRVDGEKRILSVEEKNLVFDHLVNLAPKKEPEWVTIAEILGIDRGQLIGTATMTDDGERAGARPPTHDTNRSIVNSRIAPLVDWWKTASALEQHAMVKALSNAEVDDFDSPEGAKVQAFFADLDDDVHAKLDSLHLPVGRAAYSEDTLVRLTRRMLADGVDLYTARLQEFGIEPSWTPPAPRIGEPVGNPAVDRVLKTVSRWLKSATKTWGAPERVIIEHVREGFVTEKRAREMDGDMRRRAARNAKLFQEMQEKLNVQGKPSRADLWRYQSVQRQNCQCAYCGSPITFSNSEMDHIVPRAGQGSTNTRENLVAVCHRCNQSKGNTPFAIWAKNTSIEGVSVKEAVERTRHWVTDTGMRSTDFKKFTKAVVERFQRATMDEEIDARSMESVAWMANELRSRVAQHFASHGTTVRVYRGSLTAEARRASGISGKLEFLDGVGKSRLDRRHHAIDAAVIAFTSDYVAETLAVRSNLKQSQAHRQEAPQWREFTGKDAEHRAAWRVWCQKMEKLSALLTEDLRDDRVVVMSNVRLRLGNGSAHEETIGKLSKVKLGSQLSVSDIDKASSEALWCALTREPDFDPKDGLPANPERHIRVNGTHVYAGDNIGLFPVSAGSIALRGGYAELGSSFHHARVYKITSGKKPAFAMLRVYTIDLLPYRNQDLFSVELKPQTMSMRQAEKKLRDALATGNAEYLGWLVVDDELVVDTSKIATDQVKAVEAELGTIRRWRVDGFFGDTRLRLRPLQMSKEGIKKESAPELSKIIDRPGWLPAVNKLFSEGNVTVVRRDSLGRVRLESTAHLPVTWKVQ

SEQ ID NO: 173 - protein, 1084 aa, Corynebacterium diphtheriae
MKYHVGIDVGTFSVGLAAIEVDDAGMPIKTLSLVSHIHDSGLDPDKMKSAVTRLASSGIARRTRRLYRRKRRRLQQLDKFIQRQGWPVIELEDYSDPLYPWKVRAELAASYIADEKERGEKLSVALRHIARHRGWRNPYAKVSSLYLPDEPSDAFKSIREEIKRASGQPVPETATVGQMVTLCELGTLKLRGEGGVLSARLQQSDHAREIQEICRMQEIGQELYRKIIDVVFAAESPKGSASSRVGKDPLQPGKNRALKASDAFQRYRIAALIGNLRVRVDGEKRILSVEEKNLVFDHLVNLAPKKEPEWVTIAEILGIDRGQLIGTATMTDDGERAGARPPTHDTNRSIVNSRIAPLVDWWKTASALEQHAMVKALSNAEVDDFDSPEGAKVQAFFADLDDDVHAKLDSLHLPVGRAAYSEDTLVRLTRRMLADGVDLYTARLQEFGIEPSWTPPAPRIGEPVGNPAVDRVLKTVSRWLESATKTWGAPERVIIEHVREGFVTEKRAREMDGDMRRRAARNAKLFQEMQEKLNVQGKPSRADLWRYQSVQRQNCQCAYCGSPITFSNSEMDHIVPRAGQGSTNTRENLVAVCHRCNQSKGNTPFAIWAKNTSIEGVSVKEAVERTRHWVTDTGMRSTDFKKFTKAVVERFQRATMDEEIDARSMESVAWMANELRSRVAQHFASHGTTVRVYRGSLTAEARRASGISGKLEFLDGVGKSRLDRRHHAIDAAVIAFTSDYVAETLAVRSNLKQSQAHRQEAPQWREFTGKDAEHRAAWRVWCQKMEKLSALLTEDLRDDRVVVMSNVRLRLGNGSAHEETIGKLSKVKLGSQLSVSDIDKASSEALWCALTREPDFDPKDGLPANPERHIRVNGTHVYAGDNIGLFPVSAGSIALRGGYAELGSSFHHARVYKITSGKKPAFAMLRVYTIDLLPYRNQDLFSVELKPQTMSMRQAEKKLRDALATGNAEYLGWLVVDDELVVDTSKIATDQVKAVEAELGTIRRWRVDGFFGDTRLRLRPLQMSKEGIKKESAPELSKIIDRPGWLPAVNKLFSEGNVTVVRRDSLGRVRLESTAHLPVTWKVQ

SEQ ID NO: 174 - protein, 1084 aa, Corynebacterium diphtheriae
MKYHVGIDVGTFSVGLAAIEVDDAGMPIKTLSLVSHIHDSRLDPDKIKSAVTRLASSGIARRTRRLYRRKRRRLQQLDKFIQRQGWPVIELEDYSDPLYPWKVRAELAASYIADEKERGEKLSVALRHIARHRGWRNPYAKVSSLYLPDEPSDAFKAIREEIKRASGQPVPETATVGQMVTLCELGTLKLRGEGGVLSARLQQSDHAREIQEICRMQEIGQELYRKIIDVVFAAESPKGSASSRVGKDPLQPGKNRALKASDAFQRYRIAALIGNLRVRVDGEKRILSVEEKNLVFDHLVNLAPKKEPEWVTIAEILGIDRGQLIGTATMTDDGERAGARPPTHDTNRSIVNSRIAPLVDWWKTASALEQHAMVKALSNAEVDDFDSPEGAKVQAFFADLDDDVHAKLDSLHLPVGRAAYSEDTLVRLTRRMLADGVDLYTARLQEFGIEPSWTPPAPRIGEPVGNPAVDRVLKTVSRWLESATKTWGAPERVIIEHVREGFVTEKRAREMDGDMRRRAARNAKLFQEMQEKLNIQGKPSRADLWRYQSVQRQNCQCAYCGSPITFSNSEMDHIVPRAGQGSTNTRENLVAVCHRCNQSKGNTPFAIWAKNTSIEGVSVKEAVERTRHWVTDTGMRSTDFKKFTKAVVERFQRVTMDEEIDARSMESVAWMANELRSRVAQHFASRGTTVRVYRGSLTAEARRASGISGKLEFLDGVGKSRLDRRHHAIDAAVIAFTSDYVAETLAVRSNLKQSQAHRQEAPQWREFTGKDAEHRAAWRVWCQKMEKLSALLTEDLRDDRVVVMSNVRLRLGNGSAHEETIGKLSKVKLGSQLSVSDIDKASSEALWCALTREPDFDPKDGLPANPERHIRVNGTHVYAGDNIGLFPVSAGSIALRGGYAELGSSFHHARVYKITSGKKPAFAMLRVYTIDLLPYRNQDLFSVELKPQTMSMRQAEKKLRDALATGNAEYLGWLVVDDELVVDTSKIATDQVKAVEAELGTIRRWRVDGFFGDTRLRLRPLQMSKEGIKKESAPELSKIIDRPGWLPAVNKLFSEGNVTVVRRDSLGRVRLESTAHLPVTWKVQ

SEQ ID NO: 175 - protein, 1084 aa, Corynebacterium diphtheriae
  REGION 1..1084: note = Corynebacterium diphtheriae bv. intermedius str. NCTC 5011
MKYHVGIDVGTFSVGLAAIEVDDAGMPIKTLSLVSHIHDSGLDPDEIKSAVTRLASSGIARRTRRLYRRKRRRLQQLDKFIQRQGWPVIELEDYSDPLYPWKVRAELAASYIADEKERGEKLSVALRHIARHRGWRNPYAKVSSLYLPDGPSDAFKAIREEIKRASGQPVPETATVGQMVTLCELGTLKLRGEGGVLSARLQQSDHAREIQEICRMQEIGQELYRKIIDVVFAAESPKGSASSRVGKDPLQPGKNRALKASDAFQRYRIAALIGNLRVRVDGEKRILSVEEKNLVFDHLVNLAPKKEPEWVTIAEILGIDRGQLIGTATMTDDGERAGARPPTHDTNRSIVNSRIAPLVDWWKTASALEQHAMVKALSNAEVDDFDSPEGAKVQAFFADLDDDVHAKLDSLHLPVGRAAYSEDTLVRLTRRMLADGVDLYTARLQEFGIEPSWTPPAPRIGEPVGNPAVDRVLKTVSRWLESATKTWGAPERVIIEHVREGFVTEKRAREMDGDMQRRAARNAKLFQEMQEKLNVQGKPSRADLWRYQSVQRQNCQCAYCGSPITFSNSEMDHIVPRAGQGSTNTRENLVAVCHRCNQSKGNTPFAIWAKNTSIEGVSVKEAVERTRHWVTDTGMRSPDFKKFTKAVVERFQRATMDEEIDARSMESVAWMANELRSRVAQHFASHGTTVRVYRGSLTAEARRASGISGKLKFFDGVGKSRLDRRHHAIDAAVIAFTSDYVAETLAVRSNLKQSQAHRQEAPQWREFTGKDAEHRAAWRVWCQKMEKLSALLTEDLRDDRVVVMSNVRLRLGNGSAHKETIGKLSKVKLGSQLSVSDIDKASSEALWCALTREPDFDPKEGLPANPERHIRVNGTHVYAGDNIGLFPVSAGSIALRGGYAELGSSFHHARVYKITSGKKPAFAMLRVYTIDLLPYRNQDLFSVELKPQTMSMRQAEKKLRDALATGNAEYLGWLVVDDELVVDTSKIATDQVKAVEAELGTIRRWRVDGFFSPSKLRLRPLQMSKEGIKKESAPELSKIIDRPGWLPAVNKLFSDGNVTVVRRDSLGRVRLESTAHLPVTWKVQ

SEQ ID NO: 176 - protein, 1084 aa, Corynebacterium diphtheriae
MKYHVGIDVGTFSVGLAAIEVDDAGMPIKTLSLVSHIHDSGLDPDKIKSAVTRLASSGIARRTRRLYRRKRRRLQQLDKFIQRQGWPVIELEDYSDPLYPWKVRAELAASYIADEKERGEKLSVALRHIARHRGWRNPYAKVSSLYLPDEPSDAFKAIREEIKRASGQPVPETATVGQMVTLCELGTLKLRGEGGVLSARLQQSDHAREIQEICRMQEIGQELYRKIIDVVFAAESPKGSASSRVGKDPLQPGKNRALKASDAFQRYRIAALIGNLRVRVDGEKRILSVEEKNLVFDHLVNLAPKKEPEWVTIAEILGIDRGQLIGTATMTDDGERAGARPPTHDTNRSIVNSRIAPLVDWWKTASALEQHAMVKALSNAEVDDFDSPEGAKVQAFFADLDDDVHAKLDSLHLPVGRAAYSEDTLVRLTRRMLADGVDLYTARLQEFGIEPSWTPPAPRIGEPVGNPAVDRVLKTVSRWLESATKTWGAPERVIIEHVREGFVTEKRAREMDGDMRRRAARNAKLFQEMQEKLNVQGKPSRADLWRYQSVQRQNCQCAYCGSPITFSNSEMDHIVPRAGQGSTNTRENLVAVCHRCNQSKGNTPFAIWAKNTSIEGVSVKEAVERTRHWVTDTGMRSTDFKKFTKAVVERFQRATMDEEIDARSMESVAWMANELRSRVAQHFASHGTTVRVYRGSLTAEARRASGISGKLEFLDGVGKSRLDRRHHAIDAAVIAFTSDYVAETLAVRSNLKQSQAHRQEAPQWREFTGKDAEHRAAWRVWCQKMEKLSALLTEDLRDDRVVVMSNVRLRLGNGSAHEETIGKLSKVKLGSQLSVSDIDKASSEALWCALTREPDFDPKDGLPANPERHIRVNGTHVYAGDNIGLFPVSAGSIALRGGYAELGSSFHHARVYKITSGKKPAFAMLRVYTIDLLPYRNQDLFSVELKPQTMSMRQAEKKLRDALATGNAEYLGWLVVDDELVVDTSKIATDQVKAVEAELGTIRRWRVDGFFGDTRLRLRPLQMSKEGIKKESAPELSKIIDRPGWLPAVNKLFSEGNVTVVRRDSLGRVRLESTAHLPVTWKVQ

SEQ ID NO: 177 - protein, 1084 aa, Corynebacterium diphtheriae
MKYHVGIDVGTFSVGLAAIEVDDAGMPIKTLSLVSHIHDSGLDPDEIKSAVTRLASSGIARRTRRLYRRKRRRLQQLDKFIQRQGWPVIELEDYSDPLYPWKVRAELAASYIADEKERGEKLSVALRHIARHRGWRNPYAKVSSLYLPDGPSDAFKAIREEIKRASGQPVPETATVGQMVTLCELGTLKLRGEGGVLSARLQQSDHAREIQEICRMQEIGQELYRKIIDVVFAAESPKGSASSRVGKDPLQPGKNRALKASDAFQRYRIAALIGNLRVWVDGEKRILSVEEKNLVFDHLVNLTPKKEPEWVTIAEILGIDRGQLIGTATMTDDGERAGARPPTHDTNRSIVNSRIAPLVDWWKTASALEQHAMVKALSNAEVDDFDSPERAKVQAFFADLDDDVHAKLDSLHLPVGRAAYSEDTLVRLTRRMLSDGVDLYTARLQEFGIEPSWTPPTPRIGEPVGNPAVDRVLKTVSRWLESATKTWGAPERVIIEHVREGFVTEKRAREMDGDMRRRAARNAKLFQEMQEKLNVQGKPSRADLWRYQSVQRQNCQCAYCGSPITFSNSEMDHIVPRAGQGSTNTRENLVAVCHRCNQSKGNTPFAIWAKNTSIEGVSVKEAVERTRHWVTDTGMRSTDFKKFTKAVVERFQRATMDEEIDARSMESVAWMANELRSRVAQHFASHGTTVRVYRGSLTAEARRASGISGKLEFLDGVGKSRLDRRHHAIDAAVIAFTSDYVAETLAVRSNLKQSQAHRQEAPQWREFTGKDAEHRATWRVWCQKMEKLSALLTEDLRDDRVVVMSNVRLRLGNGSAHEETIGKLSKVKLGSQLSVSDIDKASSEALWCALTREPDFDPKDGLPANPERHIRVNGTHVYAGDNIGLFPVSAGSIALRGGYAELGSSFHHARVYKITSGKKPAFAMLRVYTIDLLPYRNQDLFSVELKPQTMSMRQAEKKLRDALATGNAEYLGWLVVDDELVVDTSKIATDQVKAVEAELGTIRRWRVDGFFGDTRLRLRPLQMSKEGIKKESAPELSKIIDRPGWLPAVNKLFSEGNVTVVRRDSLGRVRLESTAHLPVTWKVQ

SEQ ID NO: 178 - protein, 1084 aa, Corynebacterium diphtheriae
MKYHVGIDVGTFSVGLAAIEVDDAGMPIKTLSLVSHIHDSGLDPDEIKSAVTRLASSGIARRTRRLYRRKRRRLQQLDKFIQRQGWPVIELEDYSDPLYPWKVRAELAASYIADEKERGEKLSVALRHIARHRGWRNPYAKVSSLYLPDGPSDAFKAIREEIKRASGQPVPETATVGQMVTLCELGTLKLRGEGGVLSARLQQSDYAREIQEICRMQEIGQELYRKIIDVVFAAESPKGSASSRVGKDPLQPGKNRALKASDAFQRYRIAALIGNLRVRVDGEKRILSVEEKNLVFDHLVNLTPKKEPEWVTIAEILGIDRGQLIGTATMTDDGERAGARPPTHDTNRSIVNSRIAPLVDWWKTASALEQHAMVKALSNAEVDDFDSPEGAKVQAFFADLDDDVHAKLDSLHLPVGRAAYSEDTLVRLTRRMLSDGVDLYTARLQEFGIEPSWTPPTPRIGEPVGNPAVDRVLKTVSRWLESATKTWGAPERVIIEHVREGFVTEKRAREMDGDMRRRAARNAKLFQEMQEKLNVQGKPSRADLWRYQSVQRQNCQCAYCGSPITFSNSEMDHIVPRAGQGSTNTRENLVAVCHRCNQSKGNTPFAIWAKNTSIEGVSVKEAVERTRHWVTDTGMRSTDFKKFTKAVVERFQRATMDEEIDARSMESVAWMANELRSRVAQHFASHGTTVRVYRGSLTAEARRASGISGKLKFFDGVGKSRLDRRHHAIDAAVIAFTSDYVAETLAVRSNLKQSQAHRQEAPQWREFTGKDAEHRAAWRVWCQKMEKLSALLTEDLRDDRVVVMSNVRLRLGNGSAHKETIGKLSKVKLSSQLSVSDIDKASSEALWCALTREPGFDPKEGLPANPERHIRVNGTHVYAGDNIGLFPVSAGSIALRGGYAELGSSFHHARVYKITSGKKPAFAMLRVYTIDLLPYRNQDLFSVELKPQTMSMRQAEKKLRDALATGNAEYLGWLVVDDELVVDTSKIATDQVKAVEAELGTIRRWRVDGFFSPSKLRLRPLQMSKEGIKKESAPELSKIIDRPGWLPAVNKLFSDGNVTVVRRDSLGRVRLESTAHLPVTWKVQ

SEQ ID NO: 179 - protein, 1084 aa, Corynebacterium diphtheriae
MKYHVGIDVGTFSVGLAAIEVDDAGMPIKTLSLVSHIHDSGLDPDKMKSAVTRLASSGIARRTRRLYRRKRRRLQQLDKFIQRQGWPVIELEDYSDPLYPWKVRAELAASYIADEKERGEKLSVALRHIARHRGWRNPYAKVSSLYLPDEPSDAFKSIREEIKRASGQPVPETATVGQMVTLCELGTLKLRGEGGVLSARLQQSDHAREIQEICRMQEIGQELYRKIIDVVFAAESPKGSASSRVGKDPLQPGKNRALKASDSFQRYRIAALISNLRVRVDGEKRILSVEEKNLVFDHLVNLAPKKEPEWVTIAEILGIDRGQLIGTATMTDDGERAGARPPTHDTNRSIVNSRIAPLVDWWKTASALEQHAMVKALSNAEVDDFDSPEGAKVQAFFADLDDDVHAKLDSLHLPVGRAAYSEDTLVRLTRRMLADGVDLYTARLQEFGIEPSWTPPAPRIGEPVGNPAVDRVLKTVSRWLESATKTWGAPERVIIEHVRDGFVTEKRAREMDGDMRRRAARNAKLFQEMQEKLNVQGKPSRADLWRYQSVQRQNCQCAYCGSPITFSNSEMDHIVPRAGQGSTNTRENLVAVCHRCNQSKGNTPFAIWAKNTSIEGVSVKEAVERTRHWVTDTGMRSTDFKKFTKAVVERFQRATMDEEIDARSMESVAWMANELRSRVAQHFASHGTTVRVYRGSLTAEARRASGISGKLEFLDGVGKSRLDRRHHAIDAAVIAFTSDYVAETLAVRSNLKQSQAHRQEAPQWREFTGKDAEHRAAWRVWCQKMEKLSALLTEDLRDDRVVVMSNVRLRLGNGSAHEETIGKLSKVKLGSQLSVSDIDKASSEALWCALTREPDFDPKDGLPANPERHIRVNGTHVYAGDNIGLFPVSAGSIALRGGYAELGSSFHHARVYKITSGKKPAFAMLRVYTIDLLPYRNQDLFSVELKPQTMSMRQAEKKLRDALATGNAEYLGWLVVDDELVVDTSKIATDQVKAVEAELGTIRRWRVDGFFGDTRLRLRPLQMSKEGIKKELAPELSKIIDRPGWLPAVNKLFSEGNVTVVRRDSLGRVRLESTAHLPVTWKVQ

SEQ ID NO: 180 - protein, 1089 aa, Corynebacterium matruchotii
  REGION 1..1089: note = Corynebacterium matruchotii ATCC 14266
MNSANVNYRVGIDVGSYSLGMAAIAIDDDGKPTEILSAISLIHDSGVDPDSAKSAATRLATSGIARRTRRLYRRKRKRLAKLDKFISSQGWPLKEFEKYEDPFYPWRVRAELATTAITDQQELGEKLSIALRHIARHRGWRNPYSKVTALYTVTEPSDAFLAMQEECAKQLGRTIPETITVGQLVTGMNLGKTRLRGENSLLAARPRQSDNANEIHTIAKVQGLSNELVRQIIDHVFAAESPKGSAAEQVGKDPLQPTKKRALKASDAFQQYRIAALIGNLRIRGGKGNRRLTTEETRLVFDYLRSLPAKQEPTWQLVAEQLKIDRGNLVGTAIMTDDGERAGAKPPVHDTNRIMENTKIKPLATWWKSADADARAAMVKALSNAEVDDFDSQAGAQVQEFFFGISDEDQEKLDGLHLPIGRAAYSEDTLDRLTKRMIGEGMDLYEARQAEFKISNDWAPPAPEIGERVGNPAVDRVLKATARWLNAAERQWGAPKSVNIEHVRAAFMSESSARELDRDNQQRAKRNVKVVAEMQEKLGIEGRPSRADVWRFQSIQRQNGKCAYCGAEISFKNSEMDHIIPQAGEGSTNTRDNLVAVCRECNSSKSNIAFAVWAENTSRPGVSVQKAIERTHHWVTDSGLRKPEFDKFRKQVCDRLRRKATDEPIDARSLESVAWMANELRSRIAQKFKDGDTKVRVYKGALTAEARRASGISGKLEFVDGKGKSRLDRRHHAVDAAVVAFTSNYVAETLALRSNMKFDQELRRKAPQWREFTGSDHVHQVEWTKWKYRMQALAELLNNALVQDRIVVMHNLRLRLGNGAAHEDTIGKLTRLKVGDAISTTDIDRASSEALWCALTRDPDYDPKTGLPENPNRTIRIHGTHLTASDEITVFPVAAASIPIRDGFAKLGSNYHHVRLFRVPSGKKYKYCLMQVYTVDLLKFRKEDLFTVELKPQTISVRTCEALLRKALANGTAEYLGWLVSDDELLIDTSSFDTPGIVKLREEYGPVNRWRLAGLTSVTRLNLRPLYLSKEGLKPNVNPEIKKIIDNRSWIITVNKLFSSGHVKIIRRDALGRPRLHSAAHLPICWEVK

SEQ ID NO: 181 - protein, 1069 aa, Corynebacterium matruchotii
  REGION 1..1069: note = Corynebacterium matruchotii ATCC 33806
MAAIAIDDDGKPTEILSAISLIHDSGVDPDSAKSAATRLATSGIARRTRRLYRRKRKRLAKLDKFISSQGWPLKEFEKYEDPFYPWRVRAELATTAITDQQELGEKLSIALRHIARHRGWRNPYSKVTALYTVTEPSDAFLAMQEECAKQLGRTIPETITVGQLVTGMNLGKTRLRGENSLLAARPRQSDNANEIHTIAKVQGLSNELVRQIIDHVFAAESPKGSAAEQVGKDPLQPTKKRALKASDAFQQYRIAALIGNLRIRGGKGNRRLTTEETRLVFDYLRSLPAKQEPTWQLVAEQLKIDRGNLVGTAIMTDDGERAGAKPPVHDTNRIMENTKIKPLATWWKSADADARAAMVKALSNAEVDDFDSQAGAQVQEFFFGISDEDQEKLDGLHLPIGRAAYSEDTLDRLTKRMIGEGMDLYEARQAEFKISNDWAPPAPEIGERVGNPAVDRVLKATARWLNAAERQWGAPKSVNIEHVRAAFMSESSARELDRDNQQRAKRNVKVVAEMQEKLGIEGRPSRADVWRFQSIQRQNGKCAYCGAEISFKNSEMDHIIPQVGEGSTNTRDNLVAVCRECNSSKSNIAFAVWAENTSRPGVSVQKAIERTHHWVTDSGLRKPEFDKFRKQVCDRLRRKATDEPIDARSLESVAWMANELRSRIAQKFKDGDTKVRVYKGALTAEARRASGISGKLEFVDGKGKSRLDRRHHAVDAAVVAFTSNYVAETLALRSNMKFDQELRRKAPQWREFTGSDHVHQVEWTKWKYRMQALAELLNNALVQDRIVVMHNLRLRLGNGAAHEDTIGKLTRLKVGDAISTTDIDRASSEALWCALTRDPDYDPKTGLPENPNRTIRIHGTHLTASDEITVFPVAAASIPIRDGFAKLGSNYHHVRLFRVPSGKKYKYCLMQVYTVDLLKFRKEDLFTVELKPQTISVRTCEALLRKALANGTAEYLGWLVSDDELLIDTSSFDTPGIVKLREEYGPVNRWRLAGLTSVTRLNLRPLYLSKEGLKPNVNPEIKKIIDNRSWIITVNKLFSSGHVKIIRRDALGRPRLHSAAHLPICWEVK

SEQ ID NO: 182 - protein, 1079 aa, Dinoroseobacter shibae
MRLGLDIGTSSIGWWLYETDGAGSDARITGVVDGGVRIFSDGRDPKSGASLAVDRRAARAMRRRRDRYLRRRATLMKVLAETGLMPADPAEAKALEALDPFALRAAGLDEPLPLPHLGRALFHLNQRRGFKSNRKTDRGDNESGKIKDATARLDMEMMANGARTYGEFLHKRRQKATDPRHVPSVRTRLSIANRGGPDGKEEAGYDFYPDRRHLEEEFHKLWAAQGAHHPELTETLRDLLFEKIFFQRPLKEPEVGLCLFSGHHGVPPKDPRLPKAHPLTQRRVLYETVNQLRVTADGREARPLTREERDQVIHALDNKKPTKSLSSMVLKLPALAKVLKLRDGERFTLETGVRDAIACDPLRASPAHPDRFGPRWSILDADAQWEVISRIRRVQSDAEHAALVDWLTEAHGLDRAHAEATAHAPLPDGYGRLGLTATTRILYQLTADVVTYADAVKACGWHHSDGRTGECFDRLPYYGEVLERHVIPGSYHPDDDDITRFGRITNPTVHIGLNQLRRLVNRIIETHGKPHQIVVELARDLKKSEEQKRADIKRIRDTTEAAKKRSEKLEELEIEDNGRNRMLLRLWEDLNPDDAMRRFCPYTGTRISAAMIFDGSCDVDHILPYSRTLDDSFPNRTLCLREANRQKRNQTPWQAWGDTPHWHAIAANLKNLPENKRWRFAPDAMTRFEGENGFLDRALKDTQYLARISRSYLDTLFTKGGHVWVVPGRFTEMLRRHWGLNSLLSDAGRGAVKAKNRTDHRHHAIDAAVIAATDPGLLNRISRAAGQGEAAGQSAELIARDTPPPWEGFRDDLRVRLDRIIVSHRADHGRIDHAARKQGRDSTAGQLHQETAYSIVDDIHVASRTDLLSLKPAQLLDEPGRSGQVRDPQLRKALRVATGGKTGKDFENALRYFASKPGPYQAIRRVRIIKPLQAQARVPVPAQDPIKAYQGGSNHLFEIWRLPDGEIEAQVITSFEAHTLEGEKRPHPAAKRLLRVHKGDMVALERDGRRVVGHVQKMDIANGLFIVPHNEANADTRNNDKSDPFKWIQIGARPAIASGIRRVSVDEIGRLRDGGTRPI

SEQ ID NO: 183 - protein, 1332 aa, Dolosigranulum pigrum
  REGION 1..1332: note = Dolosigranulum pigrum ATCC 51524
MQKNYTIGLDIGTNSVGWAVMKDDYTLIRKRMKVLGNTDIKKIKKNFWGVRLFDEGETAKETRLKRGTRRRYQRRRNRLIYLQDIFQQPMLAIDENFFHRLDDSFFVPDDKSYDRHPIFGSLEEEVAYHNTYPTIYHLRKHLADNPEKADLRLVYTALAHIVKYRGHFLIEGELNTENTSISETFEQFLDTYSDIFKEQLVGDISKVEEILSSKQSRSRKHEQIMALFPNENKLGNFGRFMMLIVGNTSNFKPVFDLDDEYKLKLSDETYEEDLDTLLGMTDDVFLDVFMAAKNVYDAVEMSAIISTDTGNSKAVLSNQMINFYDEHKVDLAQLKQFFKTHLPDKYYECFSDPSKNGYAGYIDGKTNQEDFYKYIEKVMKTIKSDKKDYFLDKIDREVFLRKQRSFYNSVIPHQIHLQEMQAILDRQSQYYPFLAENRDKIESLVTFRIPYYVGPLTVSDQSEFAWMERQSDEPIRPWNFDEIVNKERSAEKFIERMTNMDTYLLEEKVLPKRSLLYQTFEVYNELTKVRYTNEQGKTEKLNRQQKAEIIETLFKQKNRVREKDIANYLEQYGYVDGTDIKGVEDKFNASLSTYNDLAKIDGAKAYLDDPEYADVWEDIIKILTIFEDKAMRKKQLQTYSDTLSPEILKKLERKHYTGWGRFSKKLINGLRDEGSNKTILDYLKSDEGSSGPTNRNFMQLIRDNTLSFKKKIEDAQTIEDTTHIYDTVAELPGSPAIKKGIRQALKIVEEIIDIIGYEPENIVVEMARESQTTKKGKDLSKERLEKLTEAIKEFDGPSDVKVKDLKNENLRNDRLYLYYLQNGRDMYTNEPLDINNLSKYDIDHIIPQSFTTDNSIDNKVLVSRTKNQGNKSDDVPSINIVHKMKPFWRQLHKAGLISDRKFKNLTKAEHGGLTEADRAHFLNRQLVETRQITKHVANLLDSQYNTAEEQRINIVLLKSSMTSRFRKEFKLYKVREINDYHHGHDAYLNAVVATTIMKVYPNLKPQFVYGQYKKTSMFKEEKATARKHFYSNITKFFKKEKVVNEETGEILWDTERHLSTIKRVLSWKQMNIVKKVEKQKGQLWKETIYPKGDSSKLIPVKEGMDPQKYGGLSQVSEAFAVVITHEKGKKKQLKSDLISIPIVDQKAYEQHPTAYLEEAGYNNPTVLHELFKYQLFELEDGSRRMIASAKEFQKGNQMVLPLELVELLYHANRYDKVKFPDSIEYVHDNLAKFDDLLEYVIDFSNKYINADKNVQKIQKIYKEHGTEDVELTVESFVNLMTFTAMGAPATFKFYGESITRSRYTSITEFRGSTLIFQSITGLYETRYKLEDN

SEQ ID NO: 184 - protein, 1340 aa, Dorea longicatena
  REGION 1..1340: note = Dorea longicatena DSM 13814
MEQEYYLGLDMGTGSVGWAVTDSEYHVLRKHGKALWGVRLFESASTAEERRMFRTSRRRLDRRNWRIEILQEIFAEEISKKDPGFFLRMKESKYYPEDKRDINGNCPELPYALFVDDDFTDKDYHKKFPTIYHLRKMLMNTEETPDIRLVYLAIHHMMKHRGHFLLSGDINEIKEFGTTFSKLLENIKNEELDWNLELGKEEYAVVESILKDNMLNRSTKKTRLIKALKAKSICEKAVLNLLAGGTVKLSDIFGLEELNETERPKISFADNGYDDYIGEVENELGEQFYIIETAKAVYDWAVLVEILGKYTSISEAKVATYEKHKSDLQFLKKIVRKYLTKEEYKDIFVSTSDKLKNYSAYIGMTKINGKKVDLQSKRCSKEEFYDFIKKNVLKKLEGQPEYEYLKEELERETFLPKQVNRDNGVIPYQIHLYELKKILGNLRDKIDLIKENEDKLVQLFEFRIPYYVGPLNKIDDGKEGKFTWAVRKSNEKIYPWNFENVVDIEASAEKFIRRMTNKCTYLMGEDVLPKDSLLYSKYMVLNELNNVKLDGEKLSVELKQRLYTDVFCKYRKVTVKKIKNYLKCEGIISGNVEITGIDGDFKASLTAYHDFKEILTGTELAKKDKENIITNIVLFGDDKKLLKKRLNRLYPQITPNQLKKICALSYTGWGRFSKKFLEEITAPDPETGEVWNIITALWESNNNLMQLLSNEYRFMEEVETYNMGKQTKTLSYETVENMYVSPSVKRQIWQTLKIVKELEKVMKESPKRVFIEMAREKQESKRTESRKKQLIDLYKACKNEEKDWVKELGDQEEQKLRSDKLYLYYTQKGRCMYSGEVIELKDLWDNTKYDIDHIYPQSKTMDDSLNNRVLVKKKYNATKSDKYPLNENIRHERKGFWKSLLDGGFISKEKYERLIRNTELSPEELAGFIERQIVETRQSTKAVAEILKQVFPESEIVYVKAGTVSRFRKDFELLKVREVNDLHHAKDAYLNIVVGNSYYVKFTKNASWFIKENPGRTYNLKKMFTSGWNIERNGEVAWEVGKKGTIVTVKQIMNKNNILVTRQVHEAKGGLFDQQIMKKGKGQIAIKETDERLASIEKYGGYNKAAGAYFMLVESKDKKGKTIRTIEFIPLYLKNKIESDESIALNFLEKGRGLKEPKILLKKIKIDTLFDVDGFKMWLSGRTGDRLLFKCANQLILDEKIIVTMKKIVKFIQRRQENRELKLSDKDGIDNEVLMEIYNTFVDKLENTVYRIRLSEQAKTLIDKQKEFERLSLEDKSSTLFEILHIFQCQSSAANLKMIGGPGKAGILVMNNNISKCNKISIINQSPTGIFENEIDLLKI

SEQ ID NO: 185 - protein, 1380 aa, Eggerthella sp.
  REGION 1..1380: note = Eggerthella sp. YY7918
MNLRHVGNYNIGLDMGTASVGWAAIDEQGELLHFKGKPTWGSRLFDSANTAATARMPRGQRRRYIRRRWRLDLLQKFFSEEMAEKDPEFFIRLRQSSLWPEDREGGHTAYHWPLFNDSDFNEKEYYEKFPTIFHLRQWLMETDEKADIRLIYLAFHNIVKHRGNFLQENNDSLSAQNANMRESLESFCIALEEWCDEKELTCSCDPQKLEHLFKEVKYRSDIRDGFAALLGLACSGENEVDVKAMAKEMGKAIVGYKADFSKIFTECDKEGSSFRLSDDEGPEAFLDICPDDGIALFEAIQMVYSSFILTGMLTEKGLSLSKISAYNQYGQDLESLKALVKEYVPNEYSSFFRGPTYSGSTEYDPSKAQGYTRYNLGPSKKGSGAKPMAYEDFKKSVEQLFANTNAINDERYKEMMGRFAEEKFLRRLRTSDNGRIPFQLNLEEMTAIIINQGKYYPFLLEQQEKLESLVRFRIPYYVGPLTRINARLDSKGNACFAWSKRKDGMDSASIKPWNWDEVIDKHASAQAFIERMTGTCTYLRGEPVLPRCSLLYEEYCVLNELNGARWTQDGDKFIRFDYKDRSDIIEELFKKRRGRIQYAAVADWMKQERSHANVHVSGGQGENAFESRLSSYHFFCNDVFGVDELPGSYVDMVEEIILWSTLFEDRSILREEIQRKYGDVLNEEQIKTICKKRFSGWGRLSRKLLCSLKAQTDNGPKSIMDILQEGDQNNGRVGRAMVFQEILHDEQLGFEQKIEEENTQSMLEGENLLIEDLPGSPAIRRSINQAVRIVDEIVGIAGHAPDNIFIEVTREDDTKKKGKRTTTRYSNIQKALEALKEEGAEALRELKTYKHNELDKRLSLYFMQNGKSLYSGIPLDIRRLSEYQIDHIIPQSYIKDDSYENMALVLPGENQSKADNLLISQDIRIKMKATWTALHKAGLMGDKKYNNLMNSSISDAKMKGFINRQLVETSQSVKLTQMMLSQKYPGAKVRPIKASISSQLRDACDLVKCREANDYHHAHDAYLACQVGRFVLKRHSSMFDNPIGMTKVIRDFVKRQGQEFKRNGKLPAYASRSGFIVQSFMRSGFDAETGELLRDDWNAPFEIARIKRCLNYRDCYISRMPMEDSGAFWDATIYSPKAGKKGALPVKQGLPVEKYGSYSREQFAYFFVYKAYNPKKKAYRLEFEAVPVRVASAVETRENALEEYAKSVAKQAGLEFVEVARPKVYKYQLIELGEDRLYITGKREVRNASQLAFSLDEIDLLKRLAEGEETSSEERERLFDVLIEKYARYAPRLARQLSVDSMSATFETLNAEEQLGILLSLVEIANGKRNMIDLSSAGGSKNAGCMNPTFSSELSSPGSNFTFIDQSVTGMFERRQRLEL

SEQ ID NO: 186 - protein, 1195 aa, Elusimicrobium minutum
MQKNINTKQNHIYIKQAQKIKEKLGDKPYRIGLDLGVGSIGFAIVSMEENDGNVLLPKEIIMVGSRIFKASAGAADRKLSRGQRNNHRHTRERMRYLWKVLAEQKLALPVPADLDRKENSSEGETSAKRFLGDVLQKDIYELRVKSLDERLSLQELGYVLYHIAGHRGSSAIRTFENDSEEAQKENTENKKIAGNIKRLMAKKNYRTYGEYLYKEFFENKEKHKREKISNAANNHKFSPTRDLVIKEAEAILKKQAGKDGFHKELTEEYIEKLTKAIGYESEKLIPESGFCPYLKDEKRLPASHKLNEERRLWETLNNARYSDPIVDIVTGEITGYYEKQFTKEQKQKLFDYLLTGSELTPAQTKKLLGLKNTNFEDIILQGRDKKAQKIKGYKLIKLESMPFWARLSEAQQDSFLYDWNSCPDEKLLTEKLSNEYHLTEEEIDNAFNEIVLSSSYAPLGKSAMLIILEKIKNDLSYTEAVEEALKEGKLTKEKQAIKDRLPYYGAVLQESTQKIIAKGFSPQFKDKGYKTPHTNKYELEYGRIANPVVHQTLNELRKLVNEIIDILGKKPCEIGLETARELKKSAEDRSKLSREQNDNESNRNRIYEIYIRPQQQVIITRRENPRNYILKFELLEEQKSQCPFCGGQISPNDIINNQADIEHLFPIAESEDNGRNNLVISHSACNADKAKRSPWAAFASAAKDSKYDYNRILSNVKENIPHKAWRFNQGAFEKFIENKPMAARFKTDNSYISKVAHKYLACLFEKPNIICVKGSLTAQLRMAWGLQGLMIPFAKQLITEKESESFNKDVNSNKKIRLDNRHHALDAIVIAYASRGYGNLLNKMAGKDYKINYSERNWLSKILLPPNNIVWENIDADLESFESSVKTALKNAFISVKHDHSDNGELVKGTMYKIFYSERGYTLTTYKKLSALKLTDPQKKKTPKDFLETALLKFKGRESEMKNEKIKSAIENNKRLFDVIQDNLEKAKKLLEEENEKSKAEGKKEKNINDASIYQKAISLSGDKYVQLSKKEPGKFFAISKPTPTTTGYGYDTGDSLCVDLYYDNKGKLCGEIIRKIDAQQKNPLKYKEQGFTLFERIYGGDILEVDFDIHSDKNSFRNNTGSAPENRVFIKVGTFTEITNNNIQIWFGNIIKSTGGQDDSFTINSMQQYNPRKLILSSCGFIKYRSPILKNKEG

SEQ ID NO: 187 - protein, 1337 aa, Enterococcus faecalis
  REGION 1..1337: note = Enterococcus faecalis ATCC 29200
MKKDYVIGLDIGTNSVGWAVMTEDYQLVKKKMPIYGNTEKKKIKKNFWGVRLFEEGHTAEDRRLKRTARRRISRRRNRLRYLQAFFEEAMTDLDENFFARLQESFLVPEDKKWHRHPIFAKLEDEVAYHETYPTIYHLRKKLADSSEQADLRLIYLALAHIVKYRGHFLIEGKLSTENISVKEQFQQFMIIYNQTFVNGESRLVSAPLPESVLIEEELTEKASRTKKSEKVLQQFPQEKANGLFGQFLKLMVGNKADFKKVFGLEEEAKITYASESYEEDLEGILAKVGDEYSDVFLAAKNVYDAVELSTILADSDKKSHAKLSSSMIVRFTEHQEDLKKFKRFIRENCPDEYDNLFKNEQKDGYAGYIAHAGKVSQLKFYQYVKKIIQDIAGAEYFLEKIAQENFLRKQRTFDNGVIPHQIHLAELQAIIHRQAAYYPFLKENQEKIEQLVTFRIPYYVGPLSKGDASTFAWLKRQSEEPIRPWNLQETVDLDQSATAFIERMTNFDTYLPSEKVLPKHSLLYEKFMVFNELTKISYTDDRGIKANFSGKEKEKIFDYLFKTRRKVKKKDIIQFYRNEYNTEIVTLSGLEEDQFNASFSTYQDLLKCGLTRAELDHPDNAEKLEDIIKILTIFEDRQRIRTQLSTFKGQFSAEVLKKLERKHYTGWGRLSKKLINGIYDKESGKTILGYLIKDDGVSKHYNRNFMQLINDSQLSFKNAIQKAQSSEHEETLSETVNELAGSPAIKKGIYQSLKIVDELVAIMGYAPKRIVVEMARENQTTSTGKRRSIQRLKIVEKAMAEIGSNLLKEQPTTNEQLRDTRLFLYYMQNGKDMYTGDELSLHRLSHYDIDHIIPQSFMKDDSLDNLVLVGSTENRGKSDDVPSKEVVKDMKAYWEKLYAAGLISQRKFQRLTKGEQGGLTLEDKAHFIQRQLVETRQITKNVAGILDQRYNANSKEKKVQIITLKASLTSQFRSIFGLYKVREVNDYHHGQDAYLNCVVATTLLKVYPNLAPEFVYGEYPKFQTFKENKATAKAIIYTNLLRFFTEDEPRFTKDGEILWSNSYLKTIKKELNYHQMNIVKKVEVQKGGFSKESIKPKGPSNKLIPVKNGLDPQKYGGFDSPIVAYTVLFTHEKGKKPLIKQEILGITIMEKTRFEQNPILFLEEKGFLRPRVLMKLPKYTLYEFPEGRRRLLASAKEAQKGNQMVLPEHLLTLLYHAKQCLLPNQSESLAYVEQHQPEFQEILERVVDFAEVHTLAKSKVQQIVKLFEANQTADVKEIAASFIQLMQFNAMGAPSTFKFFQKDIERARYTSIKEIFDATIIYQSTTGLYETRRKVVD

SEQ ID NO: 188 - protein, 1337 aa, Enterococcus faecalis
  REGION 1..1337: note = Enterococcus faecalis ATCC 4200
MKKDYVIGLDIGTNSVGWAVMTEDYQLVKKKMPIYGNTEKKKIKKNFWGVRLFEEGHTAEDRRLKRTARRRISRRRNRLRYLQAFFEEAMTALDENFFARLQESFLVPEDKKWHRHPIFAKLEDEVAYHETYPTIYHLRKKLADSSEQADLRLIYLALAHIVKYRGHFLIEGKLSTENISVKEQFQQFMIIYNQTFVNGESRLVSAPLPESVLIEEELTEKASRTKKSEKVLQQFPQEKANGLFGQFLKLMVGNKADFKKVFGLEEEAKITYASESYEEDLEGILAKVGDEYSDVFLAAKNVYDAVELSTILADSDKKSHAKLSSSMIVRFTEHQEDLKKFKRFIRENCPDEYDNLFKNEQKDGYAGYIAHAGKVSQLKFYQYVKKIIQDIAGAEYFLEKIAQENFLRKQRTFDNGVIPHQIHLAELQAIIHRQAAYYPFLKENQEKIEQLVTFRIPYYIGPLSKGDASTFAWLKRQSEEPIRPWNLQETVDLDQSATAFIERMTNFDTYLSSEKVLPKHSLLYEKFMVFNELTKISYTDDRGIKANFSGKEKEKIFDYLFKTRRKVKKKDIIQFYRNEYNTEIVTLSGLEEDQFNASFSTYQDLLKCGLTRAELDHPDNAEKLEDIIKILTIFEDRQRIRTQLSTFKGQFSAEVLKKLERKHYTGWGRLSKKLINGIYDKESGKTILGYLIKDDGVSKHYNRNFMQLINDSQLSFKNAIQKAQSSEHEETLSETVNELAGSPAIKKGIYQSLKIVDELVAIMGYAPKRIVVEMARENQTTSTGKRRSIQRLKIVEKAMAEIGSNLLKEQPTTNEQLRDTRLFLYYMQNGKDMYTGDELSLHRLSHYDIDHIIPQSFMKDDSLDNLVLVGSTENRGKSDDVPSKEVVKDMKAYWEKLYAAGLISQRKFQRLTKGEQGGLTLEDKAHFIQRQLVETRQITKNVAGILDQRYNANSKEKKVQIITLKASLTSQFRSIFGLYKVREVNDYHHGQDAYLNCVVATTLLKVYPNLAPEFVYGEYPKFQAFKENKATAKAIIYTNLLRFFTEDEPRFTKDGEILWSNSYLKTIKKELNYHQMNIVKKVEVQKGGFSKESIKPKGPSNKLIPVKNGLDPQKYGGFDSPVVAYTVLFTHEKGKKPLIKQEILGITIMEKTRFEQNPILFLEEKGFLRPRVLMKLPKYTLYEFPEGRRRLLASAKEAQKGNQMVLPEHLLTLLYHAKQCLLPNQSESLAYVEQHQPEFQEILERVVDFAEVHTLAKSKVQQIVKLFEANQTADVKEIAASFIQLMQFNAMGAPSTFKFFQKDIERARYTSIKEIFDATIIYQSTTGLYETRRKVVD

SEQ ID NO: 189 - protein, 1337 aa, Enterococcus faecalis
  REGION 1..1337: note = Enterococcus faecalis D6
MKKDYVIGLDIGTNSVGWAVMTEDYQLVKKKMPIYGNTEKKKIKKNFWGVRLFEEGHTAEDRRLKRTARRRISRRRNRLRYLQAFFEEAMTALDENFFARLQESFLVPEDKKWHRHPIFAKLEDEVAYHETYPTIYHLRKKLADSSEQADLRLIYLALAHIVKYRGHFLIEGKLSTENISVKEQFQQFMIIYNQTFVNGESRLVSAPLPESVLIEEELTEKASRTKKSEKVLQQFPQEKANGLFGQFLKLMVGNKADFKKVFGLEEEAKITYASESYEEDLEGILAKVGDEYSDVFLAAKNVYDAVELSTILADSDKKSHAKLSSSMIVRFTEHQEDLKNFKRFIRENCPDEYDNLFKNEQKDGYAGYITHAGKVSQLKFYQYVKKIIQDIAGAEYFLEKIAQENFLRKQRTFDNGVIPHQIHLAELQAIIHRQAAYYPFLKENQEKIEQLVTFRIPYYVGPLSKGDANTFAWLKRQSEEPIRPWNLQETVDLDQSATAFIERMTNFDTYLPSEKVLPKHSLLYEKFMVFNELTKISYTDDRGIKANFSGKEKEKIFDYLFKTRRKVKKKDIIQFYRNEYNTEIVTLSGLEEDQFNASFSTYQDLLKCGLTRAELDHPDNAEKLEDIIKILTIFEDRQRIRTQLSTFKGQFSAEVLKKLERKHYTGWGRLSKKLINGIYDKESGKTILDYLIKDDGVSKHYNRNFMQLINDSQLSFKNAIQKAQSSEHEETLSETVNELAGSPAIKKGIYQSLKIVDELVAIMGYAPKRIVVEMARENQTTSTGKRRSIQRLKIVEKAMAEIGSNLLKEQPTTNEQLRDTRLFLYYMQNGKDMYTGDELSLHRLSHYDIDHIIPQSFMKDDSLDNLVLVGSTENRGKSDDVPSKEVVKDMKAYWEKLYAAGLISQRKFQRLTKGEQGGLTLEDKAHFIQRQLVETRQITKNVAGILDQRYNAKSKEKKVQIITLKASLTSQFRSIFGLYKVREVNDYHHGQDAYLNCVVATTLLKVYPNLAPEFVYGEYPKFQTFKENKATAKAIIYTNLLRFFTEDEPRFTKDGEILWSNSYLKTIKKELNYHQMNIVKKVEVQKGGFSKESIKPKGPSNKLIPVKNGLDPQKYGGFDSPIVAYTVLFTHEKGKKPLIKQEILGITIMEKTRFEQNPILFLEEKGFLRPRVLMKLPKYTLYQFPEGRRRLLASAKEAQKGNQMVLPEHLLTLLYHAKQCLLPNQSESLAYVEQHQPEFQEILERVVDFAEVHTLAKSKVQQIVKLFEANQTADVKEIAASFIQLMQFNAMGAPSTFKFFQKDIERARYTSIKEIFDATIIYQSTTGLYETRRKVVD

SEQ ID NO: 190 - protein, 1337 aa, Enterococcus faecalis
  REGION 1..1337: note = Enterococcus faecalis E1Sol
MKKDYVIGLDIGTNSVGWAVMTEDYQLVKKKMPIYGNTEKKKIKKNFWGVRLFEEGHTAEDRRLKRTARRRISRRRNRLRYLQAFFEEAMTDLDENFFARLQESFLVPEDKKWHRHPIFAKLEDEVAYHETYPTIYHLRKKLADSSEQADLRLIYLALAHIVKYRGHFLIEGKLSTENTSVKEQFQQFMVIYNQTFVNGESRLVSAPLPESVLIEEELTEKASRTKKSEKVLQQFPQEKANGLFGQFLKLMVGNKADFKKVFGLEEEAKITYASESYEEDLEGILAKVGDEYSDVFLAAKNVYDAVELSTILADSDKKSHAKLSSSMIVRFTEHQEDLKKFKRFIRENCPDEYDNLFKNEQKDGYAGYIAHAGKVSQLKFYQYVKKIIQDIAGAEYFLEKIAQENFLRKQRTFDNGVIPHQIHLAELQAIIHRQAAYYPFLKENQEKIEQLVTFRIPYYVGPLSKGDASTFAWLKRQSEEPIRPWNLQETVDLDQSATAFIERMTNFDTYLPSEKVLPKHSLLYEKFMVFNELTKISYTDDRGIKANFSGKEKEKIFDYLFKTRRKVKKKDIIQFYRNEYNTEIVTLSGLEEDQFNASFSTYQDLLKCGLTRAELDHPDNAEKLEDIIKILTIFEDRQRIRTQLSTFKGQFSAEVLKKLERKHYTGWGRLSKKLINGIYDKESGKTILDYLVKDDGVSKHYNRNFMQLINDSQLSFKNAIQKAQSSEHEETLSETVNELAGSPAIKKGIYQSLKIVDELVAIMGYAPKRIVVEMARENQTTSTGKRRSIQRLKIVEKAMAEIGSNLLKEQPTTNEQLRDTRLFLYYMQNGKDMYTGDELSLHRLSHYDIDHIIPQSFMKDDSLDNLVLVGSTENRGKSDDVPSKKVVKKMKAYWEKLYAAGLISQRKFQRLTKGEQGGLTLEDKAHFIQRQLVETRQITKNVAGILDQRYNAKSKEKKVQIITLKASLTSQFRSIFGLYKVREVNDYHHGQDAYLNCVVATTLLKVYPNLAPEFVYGEYPKFQAFKENKATAKTIIYTNLMRFFTEDEPRFTKDSEILWSNSYLKTIKKELNYHQMNIVKKVEVQKGGFSKESIKPKGPSNKLIPVKNGLDPQKYGGFDSPVVAYTVLFTHEKGKKPLIKQEILGITIMEKTRFEQNPILFLEEKGFLRPRVLMKLPKYTLYEFPEGRRRLLASAKEAQKGNQMVLPEHLLTLLYHAKQCLLPNQSESLAYVEQHQPEFQEILERVVDFAEVHTLAKSKVQQIVKLFEANQTADVKEIAASFIQLMQFNAMGAPSTFKFFQKDIERARYTSIKEIFDATIIYQSTTGLYETRRKVVD

SEQ ID NO: 191 - protein, 1150 aa, Enterococcus faecalis
  REGION 1..1150: note = Enterococcus faecalis Fly1
MYSIGLDLGISSVGWSVIDERTGNVIDLGVRLFSAKNSEKNLERRTNRGGRRLIRRKTNRLKDAKKILAAVGFYEDKSLKNSCPYQLRVKGLTEPLSKGEIYKVTLHILKKRGISYLDEDDTEAAKESQDYKEQVRKNAQLLTKYTPGQIQLQRLKENNRVKTGINAQGNYQLNVFKVSAYANELATILKTQQAFYPNELTDDWIALFVQPGIAEEAGLIYRKRPYYHGPGNEANNSPYGRWSDFKKTGQPATNIFDRLIGKDFQGELRASGLSLSAQQYNLLNDLTNLKIDGEIPLSPEQKEYILAELMTKEFTRFGVNDVAKLLGVKKERLSGWRLDKKGKPEIHTLKGYRNWRKIFAESGIDLATLPTETIDCLAKVLTLNTEHEGIENTLAFELPELAESVKLLVLDRYKELSQSVSTQAWHRFSLKTLHLLIPELMNATSEQNTLLEQFQLKSDVRKRYSEYKKLPTKDVLTEIYNPTVNKTVSQAFKVIDALLVKYGKEQIRYITIEMPRDDNEEDEKKRIKELHAKNSQRKNDSQSYFMQKSGWSQEKFQTTIQKNRRFLAKLLYYYEQDGICAYTGLSISPELLVSDSTEIDHIIPISISLDDSINNKVLVLSKANQVKGQQTPYDAWMDGSFKKINGKFSNWDDYQKWVESRHFSHKKENNLLETRNIFDSEQVEKFLARNLNDTRYASRLVLNTLQSFFANHETKVRVVNGSFTHTLRKKWGADLDKTRETHHHHAVDATLCAVTPFVKVSRYHYAVKEETGEKVMREIDFETGEIVDEMSYQEFKKSKKYERKTYQVKWPNFREQLKPVNLHPRIKFSHQVDRKANRKLSDATIYSVREKTEVKTLKSGKQKITTDEYTIGKIKDIYTVDGWEAFKKKQDKLLMKDLDEKTYERLLSIAETTPDFQEVEEKNGKVKRVKRSPFAVYCEENDIPAIQKYAKKNNGPLIRSLKYYDGKLNKHINITKDSQGRPVEKTKNGRKVTLQSLKPYRYDIYQDLETKAYYTVQLYYSDLRFVEGKYGITEKEYMKKVAEQTKGQVVRFCFSLQKNDGLEIEWKDSQRYDVRFYNFQSANSINFKGLEQEMMPAENQFKQKPYNNGAINLNIAKYGKEGKKLRKFNTDILGKKHYLYYEKEPKNIIK

SEQ ID NO: 192 - protein, 1337 aa, Enterococcus faecalis
MKKDYVIGLDIGTNSVGWAVMTEDYQLVKKKMPIYGNTEKKKIKKNFWGVRLFEEGHTAEDRRLKRTARRRISRRRNRLRYLQAFFEEAMTDLDENFFARLQESFLVPEDKKWHRHPIFAKLEDEVAYHETYPTIYHLRKKLADSSEQADLRLIYLALAHIVKYRGHFLIEGKLSTENISVKEQFQQFMIIYNQTFVNGESRLVSAPLPESVLIEEELTEKASRTKKSEKVLQQFPQEKANGLFGQFLKLMVGNKADFKKVFGLEEEAKITYASESYEEDLEGILAKVGDEYSDVFLAAKNVYDAVELSTILADSDKKSHAKLSSSMIVRFTEHQEDLKKFKRFIRENCPDEYDNLFKNEQKDGYAGYIAHAGKVSQLKFYQYVKKIIQDIAGAEYFLEKIAQENFLRKQRTFDNGVIPHQIHLAELQAIIHRQAAYYPFLKENQEKIEQLVTFRIPYYVGPLSKGDASTFAWLKRQSEEPIRPWNLQETVDLDQSATAFIERMTNFDTYLPSEKVLPKHSLLYEKFMVFNELTKISYTDDRGIKANFSGKEKEKIFDYLFKTRRKVKKKDIIQFYRNEYNTEIVTLSGLEEDQFNASFSTYQDLLKCGLTRAELDHPDNAEKLEDIIKILTIFEDRQRIRTQLSTFKGQFSAEVLKKLERKHYTGWGRLSKKLINGIYDKESGKTILDYLVKDDGVSKHYNRNFMQLINDSQLSFKNAIQKAQSSEHEETLSETVNELAGSPAIKKGIYQSLKIVDELVAIMGYAPKRIVVEMARENQTTSTGKRRSIQRLKIVEKAMAEIGSNLLKEQPTTNEQLRDTRLFLYYMQNGKDMYTGDELSLHRLSHYDIDHIIPQSFMKDDSLDNLVLVGSTENRGKSDDVPSKEVVKDMKAYWEKLYAAGLISQRKFQRLTKGEQGGLTLEDKAHFIQRQLVETRQITKNVAGILNQRYNANSKEKKVQIITLKASLTSQFRSIFGLYKVREVNDYHHGQDAYLNCVVATTLLKVYPNLAPEFVYGEYPKFQTFKENKATAKAIIYTNLLRFFTEDEPRFTKDGEILWSNSYLKTIKKELNYHQMNIVKKVEVQKGGFSKESIKPKGPSNKLIPVKNGLDPQKYGGFDSPVVAYTVLFTHEKGKKPLIKQEILGITIMEKTRFEQNPILFLEEKGFLRPRVLMKLPKYTLYEFPEGRRRLLASAKEAQKGNQMVLPEHLLTLLYHAKQCLLPNQSESLAYVEQHQPEFQEILERVVDFAEVHTLAKSKVQQIVKLFEANQTADVKEIAASFIQLMQFNAMGAPSTFKFFQKDIERARYTSIKEIFDATIIYQSTTGLYETRRKVVD

SEQ ID NO: 193 - protein, 1150 aa, Enterococcus faecalis
  REGION 1..1150: note = Enterococcus faecalis R508
MYSIGLDLGISSVGWSVIDERTGNVIDLGVRLFSAKNSEKNLERRTNRGGRRLIRRKTNRLKDAKKILAAVGFYEDKSLKNSCPYQLRVKGLTEPLSKGEIYKVTLHILKKRGISYLDEDDTEAAKESQDYKEQVRKNAQLLTKYTPGQIQLQRLKENNRVKTGINVQGNYQLNVFKVSAYANELATILKTQQAFYPNELTDDWIALFVQPGIAEEAGLIYRKRPYYHGPGNEANNSPYGRWSDFQKTGEPATNIFDKLIGKDFQGELRASGLSLSAQQYNLLNDLTNLKIDGEVPLSSEQKEYILTELMTKEFTRFGVNDVVKLLGVKKERLSGWRLDKKGKPEIHTLKGYRNWRKIFAEAGIDLATLPTETIDCLAKVLTLNTEREGIENTLAFELPELSESVKLLVLDRYKELSQSISTQSWHRFSLKTLHLLIPELMNATSEQNTLLEQFQLKSDVRKRYSEYKKLPTKDVLAEIYNPTVNKTVSQAFKVIDALLVKYGKEQIRYITIEMPRDDNEEDEKKRIKELHAKNSQRKNDSQSYFMQKSGWSQEKFQTTIQKNRRFLAKLLYYYEQDGICAYTGLPISPELLVSDSTEIDHIIPISISLDDSINNKVLVLSKANQVKGQQTPYDAWMDGSFKKINGKFSNWDDYQKWVESRHFSHKKENNLLETRNIFDSEQVEKFLARNLNDTRYASRLVLNTLQSFFTNQETKVRVVNGSFTHTLRKKWGADLDKTRETHHHHAVDATLCAVTPFVKVSRYHYAVKEETGEKVMREIDFETGEIVNEMSYREFKKSKKYERKTYQVKWPNFREQLKPVNLHPRIKFSHQVDRKANRKLSDATIYSVREKTEVKTLKSGKQKITTDEYTIGKIKDIYTLDGWEAFKKKQDKLLMKDLDEKTYERLLSIAETTPDFQEVEEKNGKVKRVKRSPFAVYCEENDIPAIQKYAKKNNGPLIRSLKYYDGKLNKHINITKDSQGRPVEKTKNGRKVTLQSLKPYRYDIYQDLETKAYYTVQLYYSDLRFVEGKYGITEKEYMKKVAEQTKGQVVRFCFSLQKNDGLEIEWKDSQRYDVRFYNFQSANSINFKGLEQEIMPAENQFKQKPYNNGAINLNIAKYGKEGKKLRKFNTDILGKKHYLFYEKEPKNIIK

SEQ ID NO: 194 - protein, 1150 aa, Enterococcus faecalis
  REGION 1..1150: note = Enterococcus faecalis T11
MYSIGLDLGISSVGWSVIDERTGNVIDLGVRLFSAKNSEKNLERRTNRGGRRLIRRKTNRLKDAKKILAAVGFYEDKSLKNSCPYQLRVKGLTEPLSKGEIYKVTLHILKKRGISYLDEDDTEAAKESQDYKEQVRENAQLLTKYTPGQIQLQRLKENNRVKTGINAQGNYQLNVFKVSAYANELATILKTQQAFYPNELTDDWIALFVQPGIAEEAGLIYRKRPYYHGPGNEANNSPYGRWSDFKKTGQPATNIFDKLIGKDFQGELRASGLSLSAQQYNLLNDLTNLKIDGEIPLSPEQKEYILAELMTKEFTRFGVNDVVKLLGVKKERLSGWRLDKKGKPEIHTLKGYRNWRKIFAESGIDLAMLPTETIDCLAKILTLNTEREGIENTLAFELPELAESVKLLVLDRYKELSQSVSTQAWHRFSLKTLHLLIPELMNATSEQNTLLEQFQLKSDVRKRYSEYKKLPTKDVLTEIYNPTVNKTVSQAFKVIDALLVKYGKEQIRYITIEMPRDDNEEDEKKRIKELHAKNSQRKNDSQSYFMQKSGWSQEKFQTTIQKNRRFLAKLLYYYEQDGICAYTGLSISPELLVSDSTEIDHIIPISISLDDSINNKVLVLSKANQVKGQQTPYDAWMDGSFKKINGKFSNWDDYQKWVESRHFSHKKENNLLETRNIFDSEQVEKFLARNLNDTRYASRLVLNTLQSFFANQETKVRVVNGSFTHTLRKKWGADLDKTRETHHHHAVDATLCAVTPFVKVSRYHYAVKEETGEKVMREIDFETGEIVDEMSYREFKKSKKYERKTYQVKWPNFREQLKPVNLHPRIKFSHQVDRKANRKLSDATIYSVREKTEVKTLKSGKQKITTDEYTIGKIKDIYTVDGWEAFKKKQDKLLMKDLDEKTYERLLSIAETTPDFQEVEEKNGKVKRVKRSPFAVYCEENDIPAIRKYAKKNNGPLIRSLKYYDGKLNKHINITKDSQGRPVEKTKNGRKVTLQSLKPYRYDIYQDLETKAYYTVQLYYSDLRFVEGKYGITEKEYMKKVAEQTKGQVVRFCFSLQKNDGLEIEWKDSQRYDVRFYNFQSANSINFKGLEQEMMPAENQFKQKPYNNGAINLNIAKYGKEGKKLRKFNTDILGKKHYLYYEKEPKNIIK

SEQ ID NO: 195 - protein, 1150 aa, Enterococcus faecalis
  REGION 1..1150: note = Enterococcus faecalis TX0012
MYSIGLDLGISSVGWSVIDERTGNVIDLGVRLFSAKNSEKNLERRTNRGGRRLIRRKTNRLKDAKKILAAVGFYEDKSLKNSCPYQLRVKGLTEPLSRGEIYKVTLHILKKRGISYLDEVDTEAAKESQDYKEQVRKNAQLLTKYTPGQIQLQRLKENNRVKTGINAQGNYQLNVFKVSAYANELATILKTQQAFYPNELTDDWIALFVQPGIAEEAGLIYRKRPYYHGPGNEANNSPYGRWSDFQKTGEPATNIFDKLIGKDFQGELRASGLSLSAQQYNLLNDLTNLKIDGEVPLSSEQKEYILTELMTKEFTRFGVNDVVKLLGVKKERLSGWRLDKKGKPEIHTLKGYRNWRKIFAEAGIDLATLPTETIDCLAKVLTLNTEREGIENTLAFELPELSESVKLLVLDRYKELSQSISTQSWHRFSLKTLHLLIPELMNATSEQNTLLEQFQLKSDVRKRYSEYKKLPTKDVLAEIYNPTVNKTVSQAFKVIDALLVKYGKEQIRYITIEMPRDDNEEDEKKRIKELHAKNSQRKNDSQSYFMQKSGWSQEKFQTTIQKNRRFLAKLLYYYEQDGICAYTGLPISPELLVSDSTEIDHIIPISISLDDSINNKVLVLSKANQVKGQQTPYDAWMDGSFKKINGKFSNWDDYQKWVESRHFSHKKENNLLETRNIFDSEQVEKFLARNLNDTRYASRLVLNTLQSFFTNQETKVRVVNGSFTHTLRKKWGADLDKTRETHHHHAVDATLCAVTSFVKVSRYHYAVKEETGEKVMREIDFETGEIVNEMSYWEFKKSKKYERKTYQVKWPNFREQLKPVNLHPRIKFSHQVDRKANRKLSDATIYSVREKTEVKTLKSGKQKITTDEYTIGKIKDIYTLDGWEAFKKKQDKLLMKDLDEKTYERLLSIAETTPDFQEVEEKNGKVKRVKRSPFAVYCEENDIPAIQKYAKKNNGPLIRSLKYYDGKLNKHINITKDSQGRPVEKTKNGRKVTLQSLKPYRYDIYQDLETKAYYTVQLYYSDLRFVEGKYGITEKEYMKKVAEQTKGQVVRFCFSLQKNDGLEIEWKDSQRYDVRFYNFQSANSINFKGLEQEMMPAENQFKQKPYNNGAINLNIAKYGKEGKKLRKFNTDILGKKHYLFYEKEPKNIIK

SEQ ID NO: 196 - protein, 1150 aa, Enterococcus faecalis; identical to SEQ ID NO: 195
  REGION 1..1150: note = Enterococcus faecalis TX0012

SEQ ID NO: 197 - protein, 1337 aa, Enterococcus faecalis
  REGION 1..1337: note = Enterococcus faecalis TX0470
MKKDYVIGLDIGTNSVGWAVMTEDYQLVKKKMPIYGNTEKKKIKKNFWGVRLFEEGHTAEDRRLKRTARRRISRRRNRLRYLQAFFEEAMTALDENFFARLQESFLVPEDKKWHRHPIFAKLEDEVAYHETYPTIYHLRKKLADSSEQADLRLIYLALAHIVKYRGHFLIEGKLSTENISVKEQFQQFMIIYNQTFVNGESRLVSTPLPESVLIEEELTEKASRTKKSEKVLQQFPQEKANGLFGQFLKLMVGNKADFKKVFGLEEEAKITYASESYEEDLEGILAKVGDEYSDVFLAAKNVYDAVELSTILADSDKKSHAKLSSSMIVRFTEHQEDLKNFKRFIRENCPDEYDNLFKNEQKDGYAGYITHAGKVSQLKFYQYVKKIIQDIAGAEYFLEKIAQENFLRKQRTFDNGVIPHQIHLAELQAIIHRQAAYYPFLKENQEKIEQLVTFRIPYYVGPLSKGDASTFAWLKRQSEEPIRPWNLQETVDLDQSATAFIERMTNFDTYLPSEKVLPKHSLLYEKFMVFNELTKISYTDDRGIKANFSGKEKEKIFDYLFKTRRKVKKKDIIQFYRNEYNTEIVTLSGLEEDQFNASFSTYQDLLKCGLTRAELDHPDNAEKLEDIIKILTIFEDRQRIRTQLSTFKGQFSAEVLKKLERKHYTGWGRLSKKLINGIYDKESGKTILDYLVKDDGVSKHYNRNFMQLINDSQLSFKNAIQKAQSSEHEETLSETVNELAGSPAIKKGIYQSLKIVDELVAIMGYAPKRIVVEMARENQTTSTGKRRSIQRLKIVEKAMAEIGSNLLKEQPTTNEQLRDTRLFLYYMQNGKDMYTGDELSLHRLSHYDIDHIIPQSFMKDDSLDNLVLVGSTENRGKSDDVPSKEVVKDMKAYWEKLYAAGLISQRKFQRLTKGEQGGLTLEDKAHFIQRQLVETRQITKNVAGILDQRYNAKSKEKKVQIITLKASLTSQFRSIFGLYKVREVNDYHHGQDAYLNCVVATTLLKVYPNLAPEFVYGEYPKFQTFKENKATAKAIIYTNLLRFFTEDEPRFTKDGEILWSNSYLKTIKKELNYHQMNIVKKVEVQKGGFSKESIKPKGPSNKLIPVKNGLDPQKYGGFDSPIVAYTVLFTHEKGKKPLIKQEILGITIMEKTRFEQNPILFLEEKGFLRPRVLMKLPKYTLYEFPEGRRRLLASAKEAQKGNQMVLPEHLLTLLYHAKQCLLPNQSESLAYVEQHQPEFQEILERVVDFAEVHTLAKSKVQQIVKLFEANQTADVKEIAASFIQLMQFNAMGAPSTFKFFQKDIERARYTSIKEIFDATIIYQSTTGLYETRRKVVD

SEQ ID NO: 198 - protein, 1150 aa, Enterococcus faecalis
  REGION 1..1150: note = Enterococcus faecalis TX1342
MYSIGLDLGVSSVGWSVIDERTGNVIDLGVRLFSAKNSEKNLERRTNRGGRRLIRRKTNRLKDAKKILAAVGFYEDKSLKNSCPYQLRVKGLTEPLSKGEIYKVTLHILKKRGISYLDEDDTEAAKESQDYKEQVRENAQLLTKYTPGQIQLQRLKENNRVKTGINAQGNYQLNVFKVSAYANELATILKTQQAFYPNELTDDWIALFVQPGIAEEAGLIYRKRPYYHGPGNEANNSPYGRWSDFKKTGQPATNIFDKLIGKDFQGELRASGLSLSAQQYNLLNDLTNLKIDGEIPLSPEQKEYILAELMTKEFTRFGINDVAKLLGVKKERLSGWRLDKKGKPEIHTLKGYRNWRKIFAESGIDLATLPTETIDCLAKVLTLNTEREGIENTLAFELPELAESVKLLVLDRYKELSQSVSTQAWHRFSLKTLHLLIPELMNATSEQNTLLEQFQLKSDVRKRYSEYKKLPTKDVLTEIYNPTVNKTVSQAFKVIDALLVKYGKEQIRYITIEMPRDDNEEDEKKRIKELHAKNSQRKNDSQSYFMQKSGWSQEKFQTTIQKNRRFLAKLLYYYEQDGICAYTGLSISPELLVSDSTEIDHIIPISISLDDSINNKVLVLSKANQVKGQQTPYDAWMDGSFKKINGKFSNWDDYQKWVESRHFSHKKENNLLETRNIFDSEQVEKFLARNLNDTRYASRLVLNTLQSFFANQETKVRVVNGSFTHTLRKKWGADLDKTRETHHHHAVDATLCAVTPFVKVSRYHYAVKEETGEKVMREIDFETGEIVDEMSYREFKKSKKYERKTYQVKWPNFREQLKPVNLHPRIKFSHQVDRKANRKLSDATIYSVREKTEVKTLKSGKQKITTDEYTIGKIKDIYTVDGWEAFKKKQDKLLMKDLDEKTYERLLSIAETTPDFQEVEEKNGKVKRVKRSPFAVYCEENDIPAIRKYAKNNNGPLIRSLKYYDGKLNKHINITKDSQGRPVEKTKNGRKVTLQSLKPYRYDIYQDLETKAYYTVQLYYSDLRFVEGKYGITEKEYMKKVAEQTKGQVVRFCFSLQKNDGLEIEWKDSQCYDVRFYNFQSANSINFKGLEQEMMPAENQFKQKPYNNGAINLNIAKYGKEGKKLRKFNTDILGKKHYLYYEKEPKNIIK

SEQ ID NO: 199 - protein, 1337 aa, Enterococcus faecalis
  REGION 1..1337: note = Enterococcus faecalis TX4244
MKKDYVIGLDIGTNSVGWAVMTEDYQLVKKKMPIYGNTEKKKIKKNFWGVRLFEEGHTAEDRRLKRTARRRISRRRNRLRYLQAFFEEAMTDLDENFFARLQESFLVPEDKKWHRHPIFAKLEDEVAYHETYPTIYHLRKKLADSSEQADLRLIYLALAHIVKYRGHFLIEGKLSTENISVKEQFQQFMIIYNQTFVNGESRLVSAPLPESVLIEEELTEKASRTKKSEKVLQQFPQEKANGLFGQFLKLMVGNKADFKKVFGLEEEAKITYASESYEEDLEGILAKVGDEYSDVFLAAKNVYDAVELSTILADSDKKSHAKLSSSMIVRFTEHQEDLKKFKRFIRENCPDEYDNLFKNEQKDGYAGYIAHAGKVSQLKFYQYVKKIIQDIAGAEYFLEKIAQENFLRKQRTFDNGVIPHQIHLAELQAIIHRQAAYYPFLKENQEKIEQLVTFRIPYYVGPLSKGDASTFAWLKRQSEEPIRPWNLQETVDLDQSATAFIERMTNFDTYLPSEKVLPKHSLLYEKFMVFNELTKISYTDDRGIKANFSGKEKEKIFDYLFKTRRKVKKKDIIQFYRNEYNTEIVTLSGLEEDQFNASFSTYQDLLKCGLTRAELDHPDNAEKLEDIIKILTIFEDRQRIRTQLSTFKGQFSAEVLKKLERKHYTGWGRLSKKLINGIYDKESGKTILGYLIKDDGVSKHYNRNFMQLINDSQLSFKNAIQKAQSSEHEETLSETVNELAGSPAIKKGIYQSLKIVDELVAIMGYAPKRIVVEMARENQTTSTGKRRSIQRLKIVEKAMAEIGSNLLKEQPTTNEQLRDTRLFLYYMQNGKDMYTGDELSLHRLSHYDIDHIIPQSFMKDDSLDNLVLVGSTENLGKSDDVPSKEVVKDMKAYWEKLYAAGLISQRKFQRLTKGEQGGLTLEDKAHFIQRQLVETRQITKNVAGILDQRYNANSKEKKVQIITLKASLTSQFRSIFGLYKVREVNDYHHGQDAYLNCVVATTLLKVYPNLAPEFVYGEYPKFQTFKENKATAKAIIYTNLLRFFTEDEPRFTKDGEILWSNSYLKTIKKELNYHQMNIVKKVEVQKGGFSKESIKPKGPSNKLIPVKNGLDPQKYGGFDSPIVAYTVLFTHEKGKKPLIKQEILGITIMEKTRFEQNPILFLEEKGFLRPRVLMKLPKYTLYEFPEGRRRLLASAKEAQKGNQMVLPEHLLTLLYHAKQCLLPNQSESLAYVEQHQPEFQEILERVVDFAEVHTLAKSKVQQIVKLFEANQTADVKEIAASFIQLMQFNAMGAPSTFKFFQKDIERARYTSIKEIFDATIIYQSTTGLYETRRKVVD

SEQ ID NO: 200 - protein, 1339 aa, Enterococcus faecium
  REGION 1..1339: note = Enterococcus faecium 1,141,733
MKKEYTIGLDIGTNSVGWSVLTDDYRLVSKKMKVAGNTEKSSTKKNFWGVRLFDEGQTAEARRSKRTARRRLARRRQRILELQKIFAPEILKIDEHFFARLNESFLVLDEKKQSRHPVFATIKQEKSYHQTYPTIYHLRQALADSSEKADIRLVYLAMAHLLKYRGHFLIEGELNTENSSVTETFRQFLSTYNQQFSEADDKQTEKLDEAVDCSFVFTEKMSKTKKAETLLKYFPHEKSNGYLSQFIKLMVGNQGNFKNVFGLEEAKLQFSKETYEEDLEELLEKIGDDYIDLFVQAKNVYDAVLLSEILSDSTKNTRAKLSAGMIRRYDAHKEDLVLLKRFVKENLPKKYRAFFGDNSVNGYAGYIEGHATQEDFYKFVKKELTGIRGSEVFLTKIEQENFLRKQRTFDNGVIPHQIHLTELRAIIANQKKHYPFLKEEQEKLESLLTFKIPYYVGPLAKKQENSPFAWLIRKSEEKIKPWNLPEIVDMEGSAVRFIERMINTDMYMPHNKVLPKNSLLYQKFSIYNELTKVRYQDERGQMNYFSSIEKKEIFHELFEKNRKVTKKDLQEFLYLKYDIKHAELSGIEKAFNASYTTYHDFLTMSENKREMKQWLEDPELASMFEEIIKTLTVFEDREMIKTRLSHHEATLGKHIIKKLTKKHYTGWGRLSKELIQGIRDKQSNKTILDYLINDDDFPHHRNRNFMQLINDDSLSFKKEIKKAQMITDTENLEEIVKELTGSPAIKKGILQSLKIVDEIVGIMGYEPANIVVEMARENQTTGRGLKSSRPRLKALEESLKDFGSQLLKEYPTDNSSLQKDRLYLYYLQNGRDMYTGAPLDIHRLSDYDIDHIIPRSFTTDNSIDNKVLVSSKENRLKKDDVPSEKVVKKMRSFWYDLYSSKLISKRKLDNLTKIKLTEEDKAGFIKRQLVETRQITKHVAGILHHRFNKAEDTNEPIRKVRIITLKSALVSQFRNRFGIYKVREINEYHHAHDAYLNGVVALALLKKYPQLAPEFVYGEYLKFNAHKANKATVKKEFYSNIMKFFESDTPVCDENGEIFWDKSKSIAQVKKVINHHHMNIVKKTEIQKGGFSKETVEPKKDSSKLLPRKNNWDPAKYGGLGSPNVAYTVAFTYEKGKARKRTNALEGITIMEREAFEQSPVLFLKNKGYEQAEIEMKLPKYALFELENGRKRMVASNKEAQKANSFLLPEHLVTLLYHAKQYDEISHKESFDYVNEHHKEFSEVFARVLEFAGKYTLAEKNIEKLEKIYKENQTDDLAKLASSFVNLMQFNAMGAPADFKFFDVTIPRKRYTSLTEIWQSTIIHQSITGLYETRIRMGK

SEQ ID NO: 201 - protein, 1340 aa, Enterococcus faecium
  REGION 1..1340: note = Enterococcus faecium 1,231,408
MKKEYTIGLDIGTNSVGWSVLTDDYRLVSKKMKVAGNTEKSSTKKNFWGVRLFDEGQTAEARRSKRTARRRLARRRQRILELQKIFAPEILKIDEHFFARLNESFLVPDEKKQSRHPVFATIKQEKSYHQTYPTIYHLRQALADSSEKADIRLVYLAMAHLLKYRGHFLIEGELNTENSSVTETFRQFLSTYNQQFSEAGDKQTEKLDEAVDCSFVFTEKMSKTKKAETLLKYFPHEKSNGYLSQFIKLMVGNQGNFKNVFGLEEEAKLQFSKETYEEDLEELLEKIGDDYIDLFVQAKNVYDAVLLSEILSDSTKNTRAKLSAGMIRRYDAHKEDLVLLKRFVKENLPKKYRAFFGDNSVNGYAGYIEGHATQEAFYKFVKKELTGIRGSEVFLTKIEQENFLRKQRTFDNGVIPHQIHLSELRAIIANQKKHYPFLKEEQEKLESLLTFKIPYYVGPLAKKQENSPFAWLIRKSEEKIKPWNLPEIVDMEGSAVRFIERMINTDMYMPHNKVLPKNSLLYQKFSIYNELTKVRYQDERGQMNYFSSIEKKEIFHELFEKNRKVTKKDLQEFLYLKYDIKHAELSGIEKAFNASYTTYHDFLTMSENKREMKQWLEDPELASMFEEIIKTLTVFEDREMIKTRLSHHEATLGKHIIKKLTKKHYTGWGRLSKELIQGIRDKQSNKTILDYLINDDDFPHHRNRNFMQLINDDSLSFKKEIKKAQMITDTENLEEIVKELTGSPAIKKGILQSLKIVDEIVGIMGYEPANIVVEMARENQTTGRGLKSSRPRLKALEESLKDFGSQLLKEYPTDNSSLQKDRLYLYYLQNGRDMYTGAPLDIHRLSDYDIDHIIPRSFTTDNSIDNKVLVSSKENRLKKDDVPSEKVVKKMRSFWYDLYSSKLISKRKLDNLTKIKLTEEDKAGFIKRQLVETRQITKHVAGILHHRFNKAEDTNDPIRKVRIITLKSALVSQFRNRFGIYKVREINEYHHAHDAYLNGVVALALLKKYPQLAPEFVYGEYLKFNAHKANKATVKKEFYSNIMKFFESDTPVCDENGEIFWDKSKSIAQVKKVINHHHMNIVKKTEIQKGGFSKETVEPKKDSSKLLPRKNNWDPAKYGGLGSPNVAYTVAFTYEKGKARKRTNALEGITIMEREAFEQSPVLFLKNKGYEQAEIEMKLPKYALFELENGRKRMVASNKEAQKANSFLLPEHLVTLLYHAKQYDEISHKESFDYVNEHHKEFSEVFARVLEFAGKYTLAEKNIEKLEKIYKENQTDDLAKLASSFVNLMQFNAMGAPADFKFFDVTIPRKRYTSLTEIWQSTIIHQSITGLYETRIRMGK

SEQ ID NO: 202 - protein, 1339 aa, Enterococcus faecium
  REGION 1..1339: note = Enterococcus faecium E1133
MKKEYTIGLDIGTNSVGWSVLTDDYRLVSKKMKVAGNTEKSSTKKNFWGVRLFDEGQTAEARRSKRTARRRLARRRQRILELQKIFAPEILKIDEHFFARLNESFLVLDEKKQSRHPVFATIKQEKSYHQTYPTIYHLRQALADSSEKADIRLVYLAMAHLLKYRGHFLIEGELNTENSSVTETFRQFLSTYNQQFSEADDKQTEKLDEAVDCSFVFTEKMSKTKKAETLLKYFPHEKSNGYLSQFIKLMVGNQGNFKNVFGLEEAKLQFSKETYEEDLEELLEKIGDDYIDLFVQAKNVYDAVLLSEILSDSTKNTRAKLSAGMIRRYDAHKEDLVLLKRFVKENLPKKYRAFFGDNSVNGYAGYIEGHATQEDFYKFVKKELTGIRGSEVFLTKIEQENFLRKQRTFDNGVIPHQIHLTELRAIIANQKKHYPFLKEEQEKLESLLTFKIPYYVGPLAKKQENSPFAWLIRKSEEKIKPWNLPEIVDMEGSAVRFIERMINTDMYIPHNKVLPKNSLLYQKFSIYNELTKVRYQDERGQMNYFSSIEKKEIFHELFEKNRKVTKKDLQEFLYLKYDIKHAELSGIEKAFNASYTTYHDFLTMSENKREMKQWLEDPELASMFEEIIKTLTVFEDREMIKTRLSHHEATLGKHIIKKLTKKHYTGWGRLSKELIQGIRDKQSNKTILDYLINDDDFPHHRNRNFMQLINDDSLSFKKEIKKAQMITDTENLEEIVKELTGSPAIKKGILQSLKIVDEIVGIMGYEPANIVVEMARENQTTGRGLKSSRPRLKALEESLKDFGSQLLKEYPTDNSSLQKDRLYLYYLQNGRDMYTGAPLDIHRLSDYDIDHIIPRSFTTDNSIDNKVLVSSKENRLKKDDVPSEKVVKKMRSFWYDLYSSKLISKRKLDNLTKIKLTEEDKAGFIKRQLVETRQITKHVAGILHHRFNKAEDTNEPIRKVRIITLKSALVSQFRNRFGIYKVREINEYHHAHDAYLNGVVALALLKKYPQLAPEFVYGEYLKFNAHKANKATVKKEFYSNIMKFFESDTPVCDENGEIFWDKSKSIAQVKKVINHHHMNIVKKTEIQKGGFSEETVEPKKDSSKLLPRKNNWDPAKYGGLGSPNVAYTVAFTYEKGKARKRTNALEGITIMEREAFEQSPVLFLKNKGYEQAEIEMKLPKYALFELENGRKRMVASNKEAQKANSFLLPEHLVTLLYHAKQYDEISHKESFDYVNEHHKEFSEVFARVLEFAGKYTLAEKNIEKLEKIYKENQTDDLAKLASSFVNLMQFNAMGAPADFKFFDVTIPRKRYTSLTEIWQSTIIHQSITGLYETRIRMGK

SEQ ID NO: 203 - protein, 1340 aa, Enterococcus faecium
  REGION 1..1340: note = Enterococcus faecium E3083
MKKEYTIGLDIGTNSVGWSVLTDDYRLVSKKMKVAGNTEKSSTKKNFWGVRLFDEGQTAEARRSKRTARRRLARRRQRILELQKIFAPEILKIDEHFFARLNESFLVLDEKKQSRHPVFATIKQEKSYHQTYPTIYHLRQALADSSEKADIRLVYLAMAHLLKYRGHFLIEGELNTENSSVTETFRQFLSTYNQQFSEADDKQTEKLDEAVDCSFVFTEKMSKTKKAETLLKYFPHEKSNGYLSQFIKLMVGNQGNFKNVFGLEEEAKLQFSKETYEEDLEELLEKIGDDYIDLFVQAKNVYDAVLLSEILSDSTKNTRAKLSAGMIRRYDAHKEDLVLLKRFVKENLPKKYRAFFGDNSVNGYAGYIEGHATQEDFYKFVKKELTGIRGSEVFLTKIEQENFLRKQRTFDNGVIPHQIHLTELRAIIANQKKHYPFLKEEQEKLESLLTFKIPYYVGPLAKKQENSPFAWLIRKSEEKIKPWNLPEIVDMEGSAVRFIERMINTDMYIPHNKVLPKNSLLYQKFSIYNELTKVRYQDERGQMNYFSSIEKKEIFHELFEKNRKVTKKDLQEFLYLKYDIKHAELSGIEKAFNASYTTYHDFLTMSENKREMKQWLEDPELASMFEEIIKTLTVFEDREMIKTRLSHHEATLGKHIIKKLTKKHYTGWGRLSKELIQGIRDKQSNKTILDYLINDDDFPHHRNRNCMQLINDDSLSFKKEIKKAQMITDTENLEEIVKELTGSPAIKKGILQSLKIVDEIVGIMGYEPANIVVEMARENQTTGRGLKSSRPRLKALEESLKDFGSQLLKEYPTDNSSLQKDRLYLYYLQNGRDMYTGAPLDIHRLSDYDIDHIIPRSFTTDNSIDNKVLVSSKENRLKKDDVPSEKVVKKMRSFWYDLYSSKLISKRKLDNLTKIKLTEEDKAGFIKRQLVETRQITKHVAGILHHRFNKAEDTNEPIRKVRIITLKSALVSQFRNRFGIYKVREINEYHHAHDAYLNGVVALALLKKYPQLAPEFVYGEYLKFNAHKANKATVKKEFYSNIMKFFESDTPVCDENGEIFWDKSKSIAQVKKVINHHHMNIVKKTEIQKGGFSKETVEPKKDSSKLLPRKNNWDPTKYGGLGSPNVAYTVAFTYEKGKARKRTNALEGITIMEREAFEQSPVLFLKNKGYEQAEIEMKLPKYALFELENGRKRMVASNKEAQKANSFLLPEHLVTLLYHAKQYDEISHKESFDYVNEHHKEFSEVFARVLEFAGKYTLAEKNIEKLEKIYKENQTDDLAKLASSFVNLMQFNAMGAPADFKFFDVTIPRKRYTSLTEIWQSTIIHQSITGLYETRIRMGK

SEQ ID NO: 204 - protein, 1340 aa, Enterococcus faecium
  REGION 1..1340: note = Enterococcus faecium PC4.1
MKKEYTIGLDIGTNSVGWSVLTDDYRLVSKKMKVAGNTEKSSTKKNFWGVRLFDEGQTAEARRSKRTARRRLARRRQRILELQKIFAPEILKIDEHFFARLNESFLVLDEKKQSRHPVFATIKQEKSYHQTYPTIYHLRQALADSSEKADIRLVYLAMAHLLKYRGHFLIEGELNTENSSVTETFRQFLSTYNQQFSEADDKQTEKLDEAVDCSFVFTEKMSKTKKAETLLKYFPHEKSNGYLSQFIKLMVGNQGNFKNVFGLEEEAKLQFSKETYEEDLEELLEKIGDDYIDLFVQAKNVYDAVLLSEILSDSTKNTRAKLSAGMIRRYDAHKEDLVLLKRFVKENLPKKYRAFFGDNSVNGYAGYIEGHATQEDFYKFVKKELTGIRGSEVFLTKIEQENFLRKQRTFDNGVIPHQIHLTELRAIIANQKKHYPFLKEEQEKLESLLTFKIPYYVGPLAKKQENSPFAWLIRKSEEKIKPWNLPEIVDMEGSAVRFIERMINTDMYIPHNKVLPKNSLLYQKFSIYNELTKVRYQDERGQMNYFSSIEKKEIFHELFEKNRKVTKKDLQEFLYLKYDIKHAELSGIEKAFNASYTTYHDFLTMSENKREMKQWLEDPELASMFEEIIKTLTVFEDREMIKTRLSHHEATLGKHIIKKLTKKHYTGWGRLSKELIQGIRDKQSNKTILDYLINDDDFPHHRNRNFMQLINDDSLSFKKEIKKAQMITDTENLEEIVKELTGSPAIKKGILQSLKIVDEIVGIMGYEPANIVVEMARENQTTGRGLKSSRPRLKALEESLKDFGSQLLKEYPTDNSSLQKDRLYLYYLQNGRDMYTGAPLDIHRLSDYDIDHIIPRSFTTDNSIDNKVLVSSKENRLKKDDVPSEKVVKKMRSFWYDLYSSKLISKRKLDNLTKIKLTEEDKAGFIKRQLVETRQITKHVAGILHHRFNKAEDTNEPIRKVRIITLKSALVSQFRNRFGIYKVREINEYHHAHDAYLNGVVALALLKKYPQLAPEFVYGEYLKFNAHKANKATVKKEFYSNIMKFFESDTPVCDENGEIFWDKSKSIAQVKKVINHHHMNIVKKTEIQKGGFSKETVEPKKDSSKLLPRKNNWDPAKYGGLGSPNVAYTVAFTYEKGKARKRTNALEGITIMEREAFEQSPVLFLKNKGYEQAEIEMKLPKYALFELENGRKRMVASNKEAQKANSFLLPEHLVTLLYHAKQYDEISHKESFDYVNEHHKEFSEVFARVLEFAGKYTLAEKNIEKLEKIYKENQTDDLAKLASSFVNLMQFNAMGAPADFKFFDVTIPRKRYTSLTEIWQSTIIHQSITGLYETRIRMGK

SEQ ID NO: 205 - protein, 1340 aa, Enterococcus faecium
  REGION 1..1340: note = Enterococcus faecium TX1330
MKKEYTIGLDIGTNSVGWSVLTDDYRLVSKKMKVAGNTEKSSTKKNFWGVRLFDEGQTAEARRSKRTARRRLARRRQRILELQKIFAPEILKIDEHFFARLNESFLVLDEKKQSRHPVFATIKQEKSYHQTYPTIYHLRQALADSSEKADIRLVYLAMAHLLKYRGHFLIEGELNTENSSVTETFRQFLSTYNQQFSEADDKQTEKLDEAVDCSFVFTEKMSKTKKAETLLKYFPHEKSNGYLSQFIKLMVGNQGNFKNVFGLEEEAKLQFSKETYEEDLEELLEKIGDDYIDLFVQAKNVYDAVLLSEILSDSTKNTRAKLSAGMIRRYDAHKEDLVLLKRFVKENLPKKYRAFFGDNSVNGYAGYIEGHATQEDFYKFVKKELTGIRGSEVFLTKIEQENFLRKQRTFDNGVIPHQIHLTELRAIIANQKKHYPFLKEEQEKLESLLTFKIPYYVGPLAKKQENSPFAWLIRKSEEKIKPWNLPEIVDMEGSAVRFIERMNNTDMYIPHNKVLPKNSLLYQKFSIYNELTKVRYQDERGQMNYFSSIEKKEIFHELFEKNRKVTKKDLQEFLYLKYDIKHAELSGIEKAFNASYTTYHDFLTMSENKREMKQWLEDPELASMFEEIIKTLTVFEDREMIKTRLSHHEATLGKHIIKKLTKKHYTGWGRLSKELIQGIRDKQSNKTILDYLINDDDFPHHRNRNFMQLINDDSLSFKKEIKKAQMITDTENLEEIVKELTGSPAIKKGILQSLKIVDEIVGIMGYEPANIVVEMARENQTTGRGLKSSRPRLKALEESLKDFGSQLLKEYPTDNSSLQKDRLYLYYLQNGRDMYTGAPLDIHRLSDYDIDHIIPRSFTTDNSIDNKVLVSSKENRLKKDDVPSEKVVKKMRSFWYDLYSSKLISKRKLDNLTKIKLTEEDKAGFIKRQLVETRQITKHVAGILHHRFNKAEDTNEPIRKVRIITLKSALVSQFRNRFGIYKVREINEYHHAHDAYLNGVVALALLKKYPQLAPEFVYGEYLKFNAHKANKATVKKEFYSNIMKFFESDTPVCDENGEIFWDKSKSIAQVKKVINHHHMNIVKKTEIQKGGFSKETVEPKKDSSKLLPRKNNWDPAKYGGLGSPNVAYTVAFTYEKGKARKRTNALEGITIMEREAFEQSPVLFLKNKGYEQAEIEMKLPKYALFELENGRKRMVASNKEAQKANSFLLPEHLVTLLYHAKQYDEISHKESFDYVNEHHKEFSEVFARVLEFAGKYTLAEKNIEKLEKIYKENQTDDLAKLASSFVNLMQFNAMGAPADFKFFDVTIPRKRYTSLTEIWQSTIIHQSITGLYETRIRMGK

SEQ ID NO: 206 - protein, 1340 aa, Enterococcus faecium
  REGION 1..1340: note = Enterococcus faecium TX1337RF
MKKEYTIGLDIGTNSVGWSVLTDDYRLVSKKMKVAGNTEKSSTKKNFWGVRLFDEGQTAEARRSKRTARRRLARRRQRILELQKIFAPEILKIDEHFFARLNESFLVLDEKKQSRHPVFATIKQEKSYHQTYPTIYHLRQALADSSEKADIRLVYLAMAHLLKYRGHFLIEGELNTENSSVTETFRQFLSTYNQQFSEADDKQTEKLDEAVDCSFVFTEKMSKTKKAETLLKYFPHEKSNGYLSQFIKLMVGNQGNFKNVFGLEEEAKLQFSKETYEEDLEELLEKIGDDYIDLFVQAKNVYDAVLLSEILSDSTKNTRAKLSAGMIRRYDAHKEDLVLLKRFVKENLPKKYRAFFGDNSVNGYAGYIEGHATQEDFYKFVKKELTGIRGSEVFLTKIEQENFLRKQRTFDNGVIPHQIHLTELRAIIANQKKHYPFLKEEQEKLESLLTFKIPYYVGPLAKKQENSPFAWLIRKSEEKIKPWNLPEIVDMEGSAVRFIERMINTDMYMPHNKVLPKNSLLYQKFSIYNELTKVRYQDERGQMNYFSSIEKKEIFHELFEKNRKVTKKDLQEFLYLKYDIKHAELSGIEKAFNASYTTYHDFLTMSENKREMKQWLEDPELASMFEEIIKTLTVFEDREMIKTRLSHHEATLGKHIIKKLTKKHYTGWGRLSKELIQGIRDKQSNKTILDYLINDDDFPHHRNRNFMQLINDDSLSFKKEIKKAQMITDTENLEEIVKELTGSPAIKKGILQSLKIVDEIVGIMGYEPANIVVEMARENQTTGRGLKSSRPRLKALEESLKDFGSQLLKEYPTDNSSLQKDRLYLYYLQNGRDMYTGAPLDIHRLSDYDIDHIIPRSFTTDNSIDNKVLVSSKENRLKKDDVPSEKVVKKMRSFWYDLYSSKLISKRKLDNLTKIKLTEEDKAGFIKRQLVETRQITKHVAGILHHRFNKAEDTNEPIRKVRIITLKSALVSQFRNRFGIYKVREINEYHHAHDAYLNGVVALALLKKYPQLAPEFVYGEYLKFNAHKANKATVKKEFYSNIMKFFESDTPVCDENGEIFWDKSKSIAQVKKVINHHHMNIVKKTEIQKGGFSKETVEPKKDSSKLLPRKNNWDPAKYGGLGSPNVAYTVAFTYEKGKARKRTNALEGITIMEREAFEQSPVLFLKNKGYEQAEIEMKLPKYALFELENGRKRMVASNKEAQKANSFLLPEHLVTLLYHAKQYDEISHKESFDYVNEHHKEFSEVFARVLEFAGKYTLAEKNIEKLEKIYKENQTDDLAKLASSFVNLMQFNAMGAPADFKFFDVTIPRKRYTSLTEIWQSTIIHQSITGLYETRIRMGK

SEQ ID NO: 207 - protein, 1336 aa, Enterococcus hirae
MTKDYTIGLDIGTNSVGWAVLTDDYQLMKRKMSVHGNTEKKKIKKNFWGARLFDEGQTAEFRRTKRTNRRRLARRKYRLSKLQDLFAEELCKQDDCFFVRLEESFLVPEEKQYKPASIFPTLEEEKEYYQKYPTIYHLRQKLVDSTEKEDLRLVYLALAHLLKYRGHFLFEGDLDTENTSIEESFRVFLEQYSKQSDQPLIVHQPVLTILTDKLSKTKKVEEILKYYPTEKINSFFAQCLKLIVGNQANFKRIFDLEAEVKLQFSKETYEEDLESLLEKIGDEYLDIFLQAKKVHDAILLSEIISSTVKHTKAKLSSGMVERYERHKADLAKFKQFVKENVPQKATVFFKDTTKNGYAGYIKGKTTQEEFYKFVKKELSGVVGSEPFLEKIDQETFLLKQRTYTNGVIPHQVHLIELKAIIDQQKQHYPFLEEAGPKIIALFKFRIPYYVGPLAKEQEASSFAWIERKTAEKINPWNFSEVVDIEKSAMRFIQRMTKQDTYLPTEKVLPKNSLLYQKYMIFNELTKVSYKDERGVKQYFSGDEKQQIFKQLFQKERGKITVKKLQNFLYTHYHIENAQIFGIEKAFNASYSTYHDFMKLAKTNQKAMQEWLEQPEMEPIFEDIVKILTIFEDRQMIKHQLSKYQEVFGEKLLKEFARKHYTGWGRFSAKLIHGIRDRKTNKTILDYLINDDDVPANRNRNLMQLINDEHLSFKEEIAKATVFSKHKSLVDVIQDLPGSPAIKKGIWQSLKIVEELIAIIGYKPKNIVIEMARENQKTHRTSPRLKALENGLKQIGSTLLKEQPTDNKALQKERLYLYYLQNGRDMYTGEPLEIENLHQYEVDHIIPRSFIVDNSIDNKVLVASKQNQKKRDDVPKKQIVNEQRIFWNQLKEAKLISPKKYAYLTKIELTPEDKARFIQRQLVETRQITKHVANILHQSFNQEEEGTDCDGVQIITLKATLTSQFRQTFGLYKVREINPHHHAHDAYLNGFIANVLLKRYPKLAPEFVYGKYVKYSLARENKATAKKEFYSNILKFLESDEPFCDENGEIYWEKSHHLPRIKKVLSSHQVNVVKKVEQQKGGFYKETVNSKEKPDKLIERKNNWDVTKYGGFGSPVIAYAIAFVYAKGKTQKKTRAIEGITIMEQAAFEKDPTTFLKEKGFPQVTEFIKLPKYTLFEFDNGRRRFLASHKESQKGNPFILSDQLVTLLYHAQHYDKITYQESFDYVNTHLSDFSAILTEVLAFAEKYTLADKNIERIQELYEENKYGETSMIAQSFLQLLQFNAIGAPADFKFFGVTIPRKRYTSLTEIWDATIIYQSVTGLYETRIRMGDLWAGEQ

SEQ ID NO: 208 - protein, 1330 aa, Enterococcus italicus
  REGION 1..1330: note = Enterococcus italicus DSM 15952
MKNDYTIGLDIGTNSVGYSVVTDDYKVISKKMNVFGNTEKKSIKKNFWGVRLFESGQTAQEARMKRTSRRRIARRKNRICYLQEIFQPEMNHLDNNFFYRLNESFLVADDAKYDKHPIFGTLDEEIHFHEQFPTIYHLRKYLADGDEKADLRLVYLAIAHIIKFRGNFLIEGELNTENNSVIELSKVFVQLYNQTLSELEGFQFIDESIDFSEVLTQQLSKSERADNVLKLFPDEKGTGIFAQFIKLIVGNQGNFKKVFQLEEDQKLQLSTDDYEENIENLLAIIGDEYGDIFVAAQNLYQAILLAGILTSTEKTRAKLSASMIQRYEEHAKDLKLLKRFVKEHIPDKYAEIFNDATKNGYAGYIDGKTKEEEFYKYLKTTLVQKSGYQYFIEKIEQENFLRKQRIYDNGVIPHQVHAEELRAILRKQEKYYSFLKENHEKIEQIFKVRIPYYVGPLAKHNEQSRFAWNIRKSDEPIRPWNMNDVVDENASAVAFIERMTIKDIYLNENVLPRHSLIYEKFTVFNELTKVLYADDRGVFQRFSAEEKEDIFEKLFKSERKVTKKKLENYLRIELSISSPSVKGIEEQFNANFGTYLDLKKFDELHPYLDDEKYQDTLEEVIKVLTVFEDRSMIQNQLEQLPLNLSTKTIKALSRRKYTGWGRLSARLIDGIHDKNSGKTILDYLIEDESDSYIVNRNFMQLINDDHLSFKKIIEDSQPYKEQQSAEEIVSELSGSPAIKKGILQSLKIVDELVAIMGYKPKNIVVEMARENQTTGRGKQNSKPRLKGIENGLKEFSDSVLKGSSIDNKQLQNDRLYLYYLQNGKDMYTGHELDIDHLSTYDIDHIIPQSFLTDNSIDNRVLTTSKSNRGKSDNVPSEEVVRKMDRFWRKLLNAKLISERKYTNLTKKELTESDKAGFLKRQLVETRQITKHVATILDSKFNEDSNNRDVQIITLKSALVSEFRKTFNLYKVREINDLHHAHDAYLNAVVALSLLRVYPQLKPEFVYGEYGKNSIHDQNKATIKKQFYSNITRYFASKDYIINDDGEILWNKQETIAQVIKTLGMHQVNVVKKVEIQKGGFSKESIQPKGESQKLIRRKQQWNTKKYGGFDSPVVAYAILLSFDKGKRKARSFKIVGITIQDRESFEGNPILYLSKKDYHNPKVEAILPKYSLFEFENGRRRMVASASETQKGNQLIIPGHLMELLYHSKKIINGKNSDSVSYIQNNKEKFREIFEYIVDFSSKYISADANLNKIEKIFENNFHKASEQEIAKSFINLLTFTAMGAPADFEFFGEKIPRKRYVSISEIIDAVFIHQSITGLYETRVRLTEV

SEQ ID NO: 209 - protein, 1096 aa, Eubacterium dolichum
  REGION 1..1096: note = Eubacterium dolichum DSM 3991
MMEVFMGRLVLGLDIGITSVGFGIIDLDESEIVDYGVRLFKEGTAAENETRRTKRGGRRLKRRRVTRREDMLHLLKQAGIISTSFHPLNNPYDVRVKGLNERLNGEELATALLHLCKHRGSSVETIEDDEAKAKEAGETKKVLSMNDQLLKSGKYVCEIQKERLRTNGHIRGHENNFKTRAYVDEAFQILSHQDLSNELKSAIITIISRKRMYYDGPGGPLSPTPYGRYTYFGQKEPIDLIEKMRGKCSLFPNEPRAPKLAYSAELFNLLNDLNNLSIEGEKLTSEQKAMILKIVHEKGKITPKQLAKEVGVSLEQIRGFRIDTKGSPLLSELTGYKMIREVLEKSNDEHLEDHVFYDEIAEILTKTKDIEGRKKQISELSSDLNEESVHQLAGLTKFTAYHSLSFKALRLINEEMLKTELNQMQSITLFGLKQNNELSVKGMKNIQADDTAILSPVAKRAQRETFKVVNRLREIYGEFDSIVVEMAREKNSEEQRKAIRERQKFFEMRNKQVADIIGDDRKINAKLREKLVLYQEQDGKTAYSLEPIDLKLLIDDPNAYEVDHIIPISISLDDSITNKVLVTHRENQEKGNLTPISAFVKGRFTKGSLAQYKAYCLKLKEKNIKTNKGYRKKVEQYLLNENDIYKYDIQKEFINRNLVDTSYASRVVLNTLTTYFKQNEIPTKVFTVKGSLTNAFRRKINLKKDRDEDYGHHAIDALIIASMPKMRLLSTIFSRYKIEDIYDESTGEVFSSGDDSMYYDDRYFAFIASLKAIKVRKFSHKIDTKPNRSVADETIYSTRVIDGKEKVVKKYKDIYDPKFTALAEDILNNAYQEKYLMALHDPQTFDQIVKVVNYYFEEMSKSEKYFTKDKKGRIKISGMNPLSLYRDEHGMLKKYSKKGDGPAITQMKYFDGVLGNHIDISAHYQVRDKKVVLQQISPYRTDFYYSKENGYKFVTIRYKDVRWSEKKKKYVIDQQDYAMKKAEKKIDDTYEFQFSMHRDELIGITKAEGEALIYPDETWHNFNFFFHAGETPEILKFTATNNDKSNKIEVKPIHCYCKMRLMPTISKKIVRIDKYATDVVGNLYKVKKNTLKFEFD

SEQ ID NO: 210 - protein, 1114 aa, Eubacterium rectale
MNYTEKEKLFMKYILALDIGIASVGWAILDKESETVIEAGSNIFPEASAADNQLRRDMRGAKRNNRRLKTRINDFIKLWENNNLSIPQFKSTEIVGLKVRAITEEITLDELYLILYSYLKHRGISYLEDALDDTVSGSSAYANGLKLNAKELETHYPCEIQQERLNTIGKYRGQSQIINENGEVLDLSNVFTIGAYRKEIQRVFEIQKKYHPELTDEFCDGYMLIFNRKRKYYEGPGNEKSRTDYGRFTTKLDANGNYITEDNIFEKLIGKCSVYPDELRAAAASYTAQEYNVLNDLNNLTINGRKLEENEKHEIVERIKSSNTINMRKIISDCMGENIDDFAGARIDKSGKEIFHKFEVYNKMRKALLEIGIDISNYSREELDEIGYIMTINTDKEAMMEAFQKSWIDLSDDVKQCLINMRKTNGALFNKWQSFSLKIMNELIPEMYAQPKEQMTLLTEMGVTKGTQEEFAGLKYIPVDVVSEDIFNPVVRRSVRISFKILNAVLKKYKALDTIVIEMPRDRNSEEQKKRINDSQKLNEKEMEYIEKKLAVTYGIKLSPSDFSSQKQLSLKLKLWNEQDGICLYSGKTIDPNDIINNPQLFEIDHIIPRSISFDDARSNKVLVYRSENQKKGNQTPYYYLTHSHSEWSFEQYKATVMNLSKKKEYAISRKKIQNLLYSEDITKMDVLKGFINRNINDTSYASRLVLNTIQNFFMANEADTKVKVIKGSYTHQMRCNLKLDKNRDESYSHHAVDAMLIGYSELGYEAYHKLQGEFIDFETGEILRKDMWDENMSDEVYADYLYGKKWANIRNEVVKAEKNVKYWHYVMRKSNRGLCNQTIRGTREYDGKQYKINKLDIRTKEGIKVFAKLAFSKKDSDRERLLVYLNDRRTFDDLCKIYEDYSDAANPFVQYEKETGDIIRKYSKKHNGPRIDKLKYKDGEVGACIDISHKYGFEKGSKKVILESLVPYRMDVYYKEENHSYYLVGVKQSDIKFEKGRNVIDEEAYARILVNEKMIQPGQSRADLENLGFKFKLSFYKNDIIEYEKDGKIYTERLVSRTMPKQRNYIETKPIDKAKFEKQNLVGLGKTKFIKKYRYDILGNKYSCSEEKFTSFC

SEQ ID NO: 211 - protein, 1391 aa, Eubacterium sp.
  REGION 1..1391: note = Eubacterium sp. AS15
MENKQYYIGLDVGTNSVGWAVTDTSYNLLRAKGKDMWGARLFDEAKTAVERRTKRTSRRRSEREKARKAMLKELFADEINKVDPNFFIRLEESKFFLDDRSENNRQRYTLFNDAKFTDKDYYEKYKTIFHLRSALINSDEKFDVRLVFLAILNLFSHRGHFLNASLKGDGEIQGVDIFYNDLYEVCEEFEIDLPQISNIDNFEKILSQKGKSRTKILEELSEELSISKKEKIKYSLLKLICGMKIKVVDIYADEDIQEDDKKKDLGFRESDYEKSSLEVKEIIGDDHFELIERAKAVHDIGLLANIIGNSKYLCEARVEAYDNHHKDLQKIKELLKKYDIKAYTDMFRKMTDKNYSAYVGSVNSNIAKERRSVDNRKIEDLYEYIKKIALKNISDDNEDKIEILKKIETGEFLKKQLTASNGVIPNQLQSRELRAILKKAENYLPFLKEKGEKNLTVSEMIIQLFEFQIPYYVGPLDKNPKKDKNANSWAVIPSGGRILPWNFEDKVDVKGSRKEFIEKMVRKCTYLSEEHTLPKQSLLYEKFMVLNEINNIKIDGEKISVEAKQKIYNDLFMKGKKVSQKAIKQELISLNIMSKDSVLSGIDTVCNAYLSSIAKFRGVFDENVNNQSTIDMIEDIIFLKTVYSDEKRFVKEEIVEKYGDEIDKDKIKRILGFKFSNWGNISKSFLELEGADVGTGEIRSIIQSLWETNFNLMELLSSRFTYMDELEKRVKKLEKPLSEWTIEDLDDMYLSSPVKRMIWQSMKIVDEIQTVIGYAPKRIFVEMTRSEGEKVRTKSRKDRLKELYSAIKEDSKQWVKELDAKDESYFRSKKMYLYYLQKGRCMYSGEVIELDKLMDDNLYDIDHIYPRSFVKDDSLDNLVLVKKEINNRKQNDPITPQIQASCQGFWKVLHEQGFISNEKYSRLTRKTQEFSDEEKLSFINRQIVETGQATKCMAQILQKSMGEDVDVVFSKARLVSEFRHKFELFKSRLINDFHHANDAYLNIVVGNSYFVKFTRNPANFIKDARKNPDNPAYKYHMDRFFERDVKSKSEVAWIGQSEGNAGTIAIVKKTMSKNSPLITKKVEEGHGSITKETIVGVKEIKFGRNKVEKADKTPKKANLQAYRPIKTSDERLCNILRYGGRTSISISGYCLVEYVKKRKTIRSLEAIPVYLGRKDSLSEEKLLNYFRYNLNDGGKDSVSDIRLCLPFISTNSLVKIDGYLYYLGGKNDDRIQLYNAYQLKMKKEEVEYIRKIEKAVSMSKFDEIDREKNPVLTEEKNIELYNKIQDKFENTVFSKRMSLVKYNKKDLSFGDFLKNKKSKFEEIDLEKQCKVLYNIIFNLSNLKEVDLSDIGGSKSTGKCRCKKNITNYKEFKLIQQSITGLYSCEKDLMTI

SEQ ID NO: 212 - protein, 1107 aa, Eubacterium ventriosum
  REGION 1..1107: note = Eubacterium ventriosum ATCC 27560
MGYTVGLDIGVASVGVAVLDENDNIVEAVSNIFDEADTSNNKVRRTLREGRRTKRRQKTRIEDFKQLWETSGYIIPHKLHLNIIELRNKGLTELLSLDELYCVLLSMLKHRGISYLEDADDGEKGNAYKKGLAFNEKQLKEKMPCEIQLERMKKYGKYHGEFIIEINDEKEYQSNVFTTKAYKKELEKIFETQRCNGNKINTKFIKKYMEIYERKREYYIGPGNEKSRTDYGIYTTRTDEEGNFIDEKNIFGKLIGKCSVYPEEYRASSASYTAQEFNLLNDLNNLKINNEKLTEFQKKEIVEIIKDASSVNMRKIIKKVIDEDIEQYSGARIDKKGKEIYHTFEIYRKLKKELKTINVDIDSFTREELDKTMDILTLNTERESIVKAFDEQKFVYEENLIKKLIEFRKNNQRLFSGWHSFSYKAMLQLIPVMYKEPKEQMQLLTEMNVFKSKKEKYVNYKYIPENEVVKEIYNPVVVKSIRTTVKILNALIKKYGYPESVVIEMPRDKNSDDEKEKIDMNQKKNQEEYEKILNKIYDEKGIEITNKDYKKQKKLVLKLKLWNEQEGLCLYSGKKIAIEDLLNHPEFFEIDHIIPKSISLDDSRSNKVLVYKTENSIKENDTPYHYLTRINGKWGFDEYKANVLELRRRGKIDDKKVNNLLCMEDITKIDVVKGFINRNLNDTRYASRVVLNEMQSFFESRKYCNTKVKVIRGSLTYQMRQDLHLKKNREESYSHHAVDAMLIAFSQKGYEAYRKIQKDCYDFETGEILDKEKWNKYIDDDEFDDILYKERMNEIRKKIIEAEEKVKYNYKIDKKCNRGLCNQTIYGTREKDGKIHKISSYNIYDDKECNSLKKMINSGKGSDLLMYNNDPKTYRDMLKILETYSSEKNPFVAYNKETGDYFRKYSKNHNGPKVEKVKYYSGQINSCIDISHKYGHAKNSKKVVLVSLNPYRTDVYYDNDTGKYYLVGVKYNHIKCVGNKYVIDSETYNELLRKEGVLNSDENLEDLNSKNITYKFSLYKNDIIQYEKGGEYYTERFLSRIKEQKNLIETKPINKPNFQRKNKKGEWENTRNQIALAKTKYVGKLVTDVLGNCYIVNMEKFSLVVDK

SEQ ID NO: 213 - protein, 1391 aa, Eubacterium yurii
  REGION 1..1391: note = Eubacterium yurii subsp. margaretiae ATCC 43715
MENKQYYIGLDVGTNSVGWAVTDTSYNLLRAKGKDMWGARLFEKANTAAERRTKRTSRRRSEREKARKAMLKELFADEINRVDPSFFIRLEESKFFLDDRSENNRQRYTLFNDATFTDKDYYEKYKTIFHLRSALINSDEKFDVRLVFLAILNLFSHRGHFLNASLKGDGDIQGMDVFYNDLVESCEYFEIELPRITNIDNFEKILSQKGKSRTKILEELSEELSISKKDKSKYNLIKLISGLEASVVELYNIEDIQDENKKIKIGFRESDYEESSLKVKEIIGDEYFDLVERAKSVHDMGLLSNIIGNSKYLCEARVEAYENHHKDLLKIKELLKKYDKKAYNDMFRKMTDKNYSAYVGSVNSNIAKERRSVDKRKIEDLYKYIEDTALKNIPDDNKDKIEILEKIKLGEFLKKQLTASNGVIPNQLQSRELRAILKKAENYLPFLKEKGEKNLTVSEMIIQLFEFQIPYYVGPLDKNPKKDNKANSWAKIKQGGRILPWNFEDKVDVKGSRKEFIEKMVRKCTYISDEHTLPKQSLLYEKFMVLNEINNIKIDGEKISVEAKQKIYNDLFVKGKKVSQKDIKKELISLNIMDKDSVLSGTDTVCNAYLSSIGKFTGVFKEEINKQSIVDMIEDIIFLKTVYGDEKRFVKEEIVEKYGDEIDKDKIKRILGFKFSNWGNLSKSFLELEGADVGTGEVRSIIQSLWETNFNLMELLSSRFTYMDELEKRVKKLEKPLSEWTIEDLDDMYLSSPVKRMIWQSMKIVDEIQTVIGYAPKRIFVEMTRSEGEKVRTKSRKDRLKELYNGIKEDSKQWVKELDSKDESYFRSKKMYLYYLQKGRCMYSGEVIELDKLMDDNLYDIDHIYPRSFVKDDSLDNLVLVKKEINNRKQNDPITPQIQASCQGFWKILHDQGFMSNEKYSRLTRKTQEFSDEEKLSFINRQIVETGQATKCMAQILQKSMGEDVDVVFSKARLVSEFRHKFELFKSRLINDFHHANDAYLNIVVGNSYFVKFTRNPANFIKDARKNPDNPVYKYHMDRFFERDVKSKSEVAWIGQSEGNSGTIVIVKKTMAKNSPLITKKVEEGHGSITKETIVGVKEIKFGRNKVEKADKTPKKPNLQAYRPIKTSDERLCNILRYGGRTSISISGYCLVEYVKKRKTIRSLEAIPVYLGRKDSLSEEKLLNYFRYNLNDGGKDSVSDIRLCLPFISTNSLVKIDGYLYYLGGKNDDRIQLYNAYQLKMKKEEVEYIRKIEKAVSMSKFDEIDREKNPVLTEEKNIELYNKIQDKFENTVFSKRMSLVKYNKKDLSFGDFLKNKKSKFEEIDLEKQCKVLYNIIFNLSNLKEVDLSDIGGSKSTGKCRCKKNITNYKEFKLIQQSITGLYSCEKDLMTI

SEQ ID NO: 214 - protein, 1142 aa, Facklamia hominis
  REGION 1..1142: note = Facklamia hominis CCUG 36813
MYSVGLDIGIASCGYSIINDVNGNIVELGTLLFKSRNSDNNEERRTNRGSRRLINRRRTRLDDGKKLLAEKGFKQDSKLKHVCPYELRVKGLHEKLTQGEIYKVVLHILKKRGISYLDESDENSSGIDGASYKDQVNLNLNLQKELTPGQIQLKRLKENGRIKSGVTFENGYQLNVFSVSAYANELNKILTKQSEYYSEIDQIWIDRFTKNGYRKEAGLVYRKRPYYDGPGNEKNNSIYGRWANFKEDGHPKENIFDQLIGLDSVDSTQVRASASTLTAQKYNLLNDLNNLTIIEDDRKFTTDEKVSIINYLMTQDITRFGPKELAKFYQLEVDQIRGWRIDNKGNPEIHSLKVYRDWKKIFNTSSIDLTSIQTWVVDELANVITLNTEIPSTLATLKIKIPDIDQQILNFVENNFYELKKKTSKNSWHSFSLKTLNILIPELLNTSEEQNTILERLNLKFDLKNKYAEKNQIPVKELLEQIYNPTVTKSVHQSIKLFNEIIEKYGKNNISYVTIEMPRDKNDQDQKDTIKRINKLNSERKNDSEKYFLERSGWDTIRFESALKKPRFAEKLLFYYEQKGKCAYSGQDILAESLLNESCEVDHIIPLSISFDDSIHNKVLVTASSNQEKGQRTPYMAFIDGAKLGQSWDDFVAWVNSCGFHRKKVQNLLYEENIFNPDVQRGFVSRNLNDTRYASRIVLNAIQSFFYKQKDLTKVKVVNGSFTHTLRKKWGSSLDKNRDTYHHHAVDATLCAVTPFINIVKYEFFEEDGIKYMVDLTTGEKVAYSDYKKMKFYDKRAYVPIWDGFIKQLTPANLYPKIKFSHQVDSKWNRKISDATIYSTRKIVETKINKKGVAKETVKDIVIDKIKDIYTPEGWRKFKEKQDKLLMKNFDEKTYNKLIKIAKEYPEKKEVQTSNGKVSLVEVSPFKMYCEEQNVPAIRKYSKKGNGPYIRSLKFYDKELGKHINITKDSYGNDIERTIRNKKIILKNQNSWRTDVYYNSVNNCYELLGIKYCHLKFYRGKYGIPKSIYDELKKEDEISSESVFKFSLYRHDRVRFEKDGEYIEALFGSKNESNKNYLELSPIDKNKWLSKENVKFFGEVAASGRFIKGLKPGIKVIKQSTDYMGHVYAIHQEKLKFVLSDA

SEQ ID NO: 215 - protein, 1512 aa, Fibrobacter succinogenes
MKKILGLDLGTNSIGWAVVNADEITRDDGSRYLKPNGISAAGSRIIPMSADILGDFEKGNSISQTAERTRMRMARRLHERALLRRERLLRVLNLLDFLPKHFADKIDRYGKFTDDSEPKLAWRKNTEGKYEFIFQDAFNEMLAEFKDKQPEIVEEGKKIPYDWTIYYLRKKALEKALSKEELSWILLQFNQKRGYYQLRGEEEEIPQDKKIEYLAQKVVKVEATDQKKGDDVWYNVYLENGMIYRRTSKAPLDWEGKVKEFIVTTEVENDGETPKKDKEGNIKRSFRAPKEDDWTLLKKKTEADIENSHKTVGCYIYDSLLNNPKQKIIGKLVRTVERKFYKEELTQILKKQVELIPELRDDNLYKQCIEELYPINEAHRNTIAKTDFANLFINDILFYQRPLKSKKSQIDNCPYEERIFIDSKTGEKKKVPVKCIAKSNPLFQEFRLWQFIQNLRIYQREKEIDGKLLTDIDITSECLKSEEDYVRLFDWLNDRETIEQEDLLKHLFNTKKSKNKENPYRWNYVEDKVYPCNETRATILKGFSKCGINASVLSPELEMALWHILYSVEDKKEIETALTHFAQKQGWNDDFAKVFSKAKPFKKDYGSYSEKAIKKLLSLMRMGKYWNQDNIDKNTLDRIDKIINGEYDEKISNRVRDNAINLKDISDFRGLPVWLACYIVYDRHSEAKDCTKWNSPEEIDSYLKKFKQHSLRNPIVEQVVTETLRTVRDIWIQEEQIDEIHLELGRDLKNPADKRKKMSENILKNENTNLRIKAMLMEFMNPSMGIENVRPYSPSQQDILRIYEENALDNLTKDDKDFDFISKISKQAQPSKTDIIRYKCWLEQKYRSPYTGKTISLSKLFTPAYEIEHVIPQSLYFDDSFSNKVICEAEVNKLKDRQLGYKFIAEHHGEKVQLSQGEVVEILSVDAYEKFVKENYANNRIKMKKLLMESIPDEFIERQLNDSRYISKVVKGLLSNIVREKIDDENYEPEAVSKNLISCNGAITDRLKKDWGMNDVWNSIILPRFIRMNQITGKDCFTTTNAEGHLIPQMPLELQKGFNKKRIDHRHHAMDAIVIACTTRDHVNLLNNEAAHSKFNATRYQLQRKLRRFEKAVIDGKEREVAKEFLKPWDSFSSDSKNILENIIVSFKQNQRVINKTTNAFLHFDENGKKTFIKQGKGDSWAIRKSMHKDTVFGEINLRKVRSVSLNEAIKVPERVLNKKIKEKILELKNNKIDAKNIKKYIEENHTGGYGIDSSKIDVFYFTKETKERFFATRKTLDTSFNQAKIKDSIADSGIQKILLAHLKSKNGDAEQAFSPDGIDEMNKNIVELNNGKFHQPILKVRVYEKADKFAVGQKGNKKVKFVEAAKGTNLFFAIFEKDGKRSYLTIPLNVMIDCQKQYGNQWKNNIEAYLKEKELVEKDVKLQFILSPNDLVYLPTEGSIDKKRIYKVVSFTNNRLYAIPYAIAKSIVDKNEFTQLNKIEFTDNKESIKDACVPVIIDRLGNVIEFNGKRL

SEQ ID NO: 216 - protein, 1365 aa, Filifactor alocis
MTKEYYLGLDVGTNSVGWAVTDSQYNLCKFKKKDMWGIRLFESANTAKDRRLQRGNRRRLERKKQRIDLLQEIFSPEICKIDPTFFIRLNESRLHLEDKSNDFKYPLFIEKDYSDIEYYKEFPTIFHLRKHLIESEEKQDIRLIYLALHNIIKTRGHFLIDGDLQSAKQLRPILDTFLLSLQEEQNLSVSLSENQKDEYEEILKNRSIAKSEKVKKLKNLFEISDELEKEEKKAQSAVIENFCKFIVGNKGDVCKFLRVSKEELEIDSFSFSEGKYEDDIVKNLEEKVPEKVYLFEQMKAMYDWNILVDILETEEYISFAKVKQYEKHKTNLRLLRDIILKYCTKDEYNRMFNDEKEAGSYTAYVGKLKKNNKKYWIEKKRNPEEFYKSLGKLLDKIEPLKEDLEVLTMMIEECKNHTLLPIQKNKDNGVIPHQVHEVELKKILENAKKYYSFLTETDKDGYSVVQKIESIFRFRIPYYVGPLSTRHQEKGSNVWMVRKPGREDRIYPWNMEEIIDFEKSNENFITRMTNKCTYLIGEDVLPKHSLLYSKYMVLNELNNVKVRGKKLPTSLKQKVFEDLFENKSKVTGKNLLEYLQIQDKDIQIDDLSGFDKDFKTSLKSYLDFKKQIFGEEIEKESIQNMIEDIIKWITIYGNDKEMLKRVIRANYSNQLTEEQMKKITGFQYSGWGNFSKMFLKGISGSDVSTGETFDIITAMWETDNNLMQILSKKFTFMDNVEDFNSGKVGKIDKITYDSTVKEMFLSPENKRAVWQTIQVAEEIKKVMGCEPKKIFIEMARGGEKVKKRTKSRKAQLLELYAACEEDCRELIKEIEDRDERDFNSMKLFLYYTQFGKCMYSGDDIDINELIRGNSKWDRDHIYPQSKIKDDSIDNLVLVNKTYNAKKSNELLSEDIQKKMHSFWLSLLNKKLITKSKYDRLTRKGDFTDEELSGFIARQLVETRQSTKAIADIFKQIYSSEVVYVKSSLVSDFRKKPLNYLKSRRVNDYHHAKDAYLNIVVGNVYNKKFTSNPIQWMKKNRDTNYSLNKVFEHDVVINGEVIWEKCTYHEDTNTYDGGTLDRIRKIVERDNILYTEYAYCEKGELFNATIQNKNGNSTVSLKKGLDVKKYGGYFSANTSYFSLIEFEDKKGDRARHIIGVPIYIANMLEHSPSAFLEYCEQKGYQNVRILVEKIKKNSLLIINGYPLRIRGENEVDTSFKRAIQLKLDQKNYELVRNIEKFLEKYVEKKGNYPIDENRDHITHEKMNQLYEVLLSKMKKFNKKGMADPSDRIEKSKPKFIKLEDLIDKINVINKMLNLLRCDNDTKADLSLIELPKNAGSFVVKKNTIGKSKIILVNQSVTGLYENRREL

SEQ ID NO: 217 - protein, 1347 aa, Finegoldia magna
  REGION 1..1347: note = Finegoldia magna ACS-171-V-Col3
MKSEKKYYIGLDVGTNSVGWAVTDEFYNILRAKGKDLWGVRLFEKAKTAADTRTFRSGRRRNDRKGMRLQILREIFEDEIKKVDKDFYDRLDESKFWAEDKKVSGKYSLFNDKNFSDKQYFEKFPTIFHLRKYLMEEHGKVDIRYYFLAINQMMKRRGHFLIDGQISHVTDDKPLKEQLILLINDLLKIELEEELMDSIFEILADVNEKRTDKKNNLKELIKGQDFNKQEGNILNSIFESIVTGKAKIKNIISDEDILEKIKEDNKEDFVLTGDSYEENLQYFEEVLQENITLFNTLKSTYDFVILQSILKGKSTLSDAQVERYDEHKKDLEILKKVIKKYDEDGKLFKQVFKEDNGNGYVSYIGYYLNKNKKITAKKKISNIEFTKYVKGILEKQCDCEDEAVKYLLGKIEQENFLLKQISSINSVIPHQIHLFELDKILENLAKNYPSFNNKKEEFTKIEKIRKTFTFRIPYYVGPLNDYHKNNGGNAWIFRNKGEKIRPWNFEKIVDLHKSEEEFIKRMLNQCTYLPEETVLPKSSILYSEYMVLNELNNLRIKGKPLDTDVKLKLIEELFKKKTKVTLKSIRDYMIRNNFADKEDFDNSEKNLEIVSNMKSYIDFNNILGDKFELEMVEDLIEKITIHTGNKTLLKKYIEETYPDLSSSQIQKIINLKYKDWGRLSRKLLDGIKGRNKTDDVNTVINFMRNSSDNLMQIIEGKNYSFNEYIDNLRKKYIPQEISYEVVENLYVSPSVKKMIWQVIRVTEEITKVMGYDPDKIFIEMAKSEEEKKTTISRKNKLLDLYKAIKKDERDSQYEKLLTGLNKLDESELRSKKLYLYYTQMGRDMYTGEKIDLDKLFDSTHYDKDHIIPQSMKKDDSIINNLVLVNKNANQTTKGNIYPVPSSIRNNPDIYNYWKYLMEKEFISKEKYNRLIRNTPLTNEELGVFINRQLVETRQSTKAIKELFEKFYQKSKIIPVKASLASDLRKDMNTLKSREVNDLHHAHDAFLNIVAGDVWNREFTSNPINYVNENREGDKVKYSLSKYFTRPRKSKGKVIWTPEKGRKLIVDTLNKPSVLISNESHVKKGELFNATISGKKDYKKGKIYLPLKKDDRLKDVSKYGGYKAINGAFFFLVEHTKSKKRIRSIELFPLHLLSKFYEDKNTVLDYAINVLQLQDPKIIIDKINYRTEIIIDNFSYLISTKSNDGSITVKPNEQMYWRVDEISNLKKIENKYKKDAILTEEDRKIMESYIDKIYQQFKAGKYKNRRTTDTIIEKYEIIDLDTLDNKQLYQLLVAFISLSYKTSNNAVDFTVIGLGTECGKPRITNLPDNTYLVYKSITGIYEKRIRIK

SEQ ID NO: 218 - protein, 1348 aa, Finegoldia magna
MKSEKKYYIGLDVGTNSVGWAVTDEFYNILRAKGKDLWGVRLFEKADTAANTRIFRSGRRRNDRKGMRLQILREIFEDEIKKVDKDFYDRLDESKFWAEDKKVSGKYSLFNDKNFSDKQYFEKFPTIFHLRKYLMEEHGKVDIRYYFLAINQMMKRRGHFLIDGQISHVTDDKPLKEQLILLINDLLKIELEEELMDSIFEILADVNEKRTDKKNNLKELIKGQDFNKQEGNILNSIFESIVTGKAKIKNIISDEDILEKIKEDNKEDFVLTGDSYEENLQYFEEVLQENITLFNTLKSTYDFLILQSILKGKSTLSDAQVERYDEHKKDLEILKKVIKKYDEDGKLFKQVFKEDNGNGYVSYIGYYLNKNKKITAKKKISNIEFTKYVKGILEKQCDCEDEDVKYLLGKIEQENFLLKQISSINSVIPHQIHLFELDKILENLAKNYPSFNNKKEEFTKIEKIRKTFTFRIPYYVGPLNDYHKNNGGNAWIFRNKGEKIRPWNFEKIVDLHKSEEEFIKRMLNQCTYLPEETVLPKSSILYSEYMVLNELNNLRINGKPLDTDVKLKLIEELFKKKTKVTLKSIRDYMVRNNFADKEDFDNSEKNLEIASNMKSYIDFNNILEDKFDVEMVEDLIEKITIHTGNKKLLKKYIEETYPDLSSSQIQKIINLKYKDWGRLSRKLLDGIKGTKKETEKTDTVINFLRNSSDNLMQIIGSQNYSFNEYIDKLRKKYIPQEISYEVVENLYVSPSVKKMIWQVIRVTEEITKVMGYDPDKIFIEMAKSEEEKKTTISRKNKLLDLYKAIKKDERDSQYEKLLTGLNKLDDSDLRSRKLYLYYTQMGRDMYTGEKIDLDKLFDSTHYDKDHIIPQSMKKDDSIINNLVLVNKNANQTTKGNIYPVPSSIRNNPKIYNYWKYLMEKEFISKEKYNRLIRNTPLTNEELGGFINRQLVETRQSTKAIKELFEKFYQKSKIIPVKASLASDLRKDMNTLKSREVNDLHHAHDAFLNIVAGDVWNREFTSNPINYVKENREGDKVKYSLSKDFTRPRKSKGKVIWTPEKGRKLIVDTLNKPSVLISNESHVKKGELFNATIAGKKDYKKGKIYLPLKKDDRLQDVSKYGGYKAINGAFFFLVEHTKSKKRIRSIELFPLHLLSKFYEDKNTVLDYAINVLQLQDPKIIIDKINYRTEIIIDNFSYLISTKSNDGSITVKPNEQMYWRVDEISNLKKIENKYKKDAILTEEDRKIMESYIDKIYQQFKAGKYKNRRTTDTIIEKYEIIDLDTLDNKQLYQLLVAFISLSYKTSNNAVDFTVIGLGTECGKPRITNLPDNTYLVYKSITGIYEKRIRIK

SEQ ID NO: 219 - protein, 1348 aa, Finegoldia magna
  REGION 1..1348: note = Finegoldia magna SY403409CC001050417
MKSEKKYYIGLDVGTNSVGWAVTDEFYNILRAKGKDLWGVRLFEKAKTAADTRTFRSGRRRNDRKGVRLQILREIFEDEIKKVDKDFYDRLDESKFWAEDKKVSGKYSLFNDKNFSDKQYFEKFPTIFHLRKYLMEEHGKVDIRYYFLAINQMMKRRGHFLIDGQISHVTDDKPLKQQLILLINDLLKIELEEEFMDSIFEILADVNEKKTEKKNILKELINAQDFNKQEGKILYSIFESIVTGKAKIKNIISDEDILEKIKEDNKEDFVLTGDSYEENLQYFEEVLQENITLFNTLKSAYDFVILQSILKGKSTLSDAQVERYDEHKKDLEILKKVIKKYDEDGKLFKQVFKEDNGNGYVSYIGYYLNKNKKITAKKKISNIEFTKYVKGILEKQCDCEDEDVKYLLGKIEQENFLLKQISSINSVIPHQIHLFELDKILENLAKYYPSFNNKKEEFTKIEKIRKTFTFRIPYYVGPLNDYHKNNGGNAWIFRNKGEKIRPWNFEKIVDLHKSEEEFIKRMLNQCTYLPEETVLPKSSILYSEYMVLNELNNLRINGKPIDTDVKLKLIEELFKKKTKVTLKSIRDYMIRNNFADKEDFDNSEKNLEIVSNMKSYIDFNNILGDKFELEMVEDLIEKITIHTGNKKLLKKYIEETYPDLSSSQIQKIINLKYKDWGRLSRKLLDGITGTNIETGEIDTVINFLRNSSDNLMQIIGSQNYSFNNDIDKLRKKYIPQEISYEVVENLYVSPSVKKMIWQVIRITEEITKVMGYDPDKIFIEMAKSEEGKKTTISRKNKLLALYKAIKKDERDSQYEKLLTGLNKLDDSDLRSRKLYLYYTQMGRDMYTGEKIDLDKLFDSTHYDKDHIIPQSMKKDDSIINNLVLVNKNANQTTKGNIYPVPSSIRNNPKIYNYWKYLMEKEFISKEKYNRLIRNTPLTNEELGGFINRQLVETRQSTKAIKELFEKFYKKSKIIPVKAILASDLRKDMNTLKSREVNDLHHAHDAFLNIVAGDVWNREFTSNPINYVKENREGDKVKYSLSKYFTRPRKSKGKVIWTPEKGRKLIVDTLNKPSVLISNESHVKKGELFNATIAGKKDYKKGKIYLPLKKDDRLQDVSKYGGYKAINGAFFFLVEHTKSKKRIRSIELFPLHLLSKFYEDKNTVLDYAINVLQLQDPKIIIDKINYRTEIIIDNFSYLISTKSNDGSITVKPNEQMYWRVDEISNLKKIENKYKKDAILTEEDRKIMESYIDKIYQQFKAGKYKNRRTTDTIIEKYEIIDLDTLDNKQLYQLLVAFISLSYKTSNNAVDFTVIGLGTECGKPRITNLPDNTYLVYKSITGIYEKRIRIK

SEQ ID NO: 220 - protein, 1516 aa, Flavobacteriaceae bacterium
  REGION 1..1516: note = Flavobacteriaceae bacterium S85
MLKQQKDKIIGMNKKILGLDLGTNSIGWALVKQDLENKYGEIIGCGSRIIPMSQDVLGKFDAGISISQTAERTNYRSVRKLIQRNTLRRERLHRVLHQLDFLPKHYNDSIDFEKKLGQFKTDKETKLNYFVNQHGKHEFLFKDSFNEMVKEFKEEQPELFYIKNNGKETKIPYDWTIYYLRKKALSKKISKEELSWLVLNFNQKRGYYQLRGEIDEEKEKNKRYEKLYVSEVVKTNNTIKKTGEYLYDIYFDNGWKYEKQTTKPQDWLHKHKEFIITTTTLKNGETKRTFKTVDSEKDWIAIKSKTEQDIKESNKTVGAFIYDTLLKNPTQKIRGSLVKTIERKFYREEFEKILKEQIKHRPEINVNTAIGKENYTKCVTELYPRNEAHANNILTNDFNYLFTKDILFYQRPLKSKKSEIANCQYEYRTYIKKKEKTGKEERVKQPLKATPKSHPLFQEFRLWQFIHNLKIYIRETTVGNKPLFDVDITDTFFTSENDWATLFEYLNNKKEIEQKHVLEYLVSKKIISKSEKTDYRWNYVEDKKYPGNETRVDFINRLKKVENLNVDEFLTSELEFKLWHIIYSVTDKNEYEKALENFAIRQNIDKDSFVNSFKKFPPFKSDYGAYSTKAIKKLLPLMRLGKFWDGSEIPKVVVEKITDIKTRLTSVNYDESLFKKDEKKILETIVDDITPKQLLKSFVKLKGKNHLAGLNTYQACYLVYERHSESSDITQWENPDDIDSFLNHFKQHSLRNPIVEQVVTETLRTVRDIWKYYGNGSPNYFNEIHIELGREMKNPADKRKQMSAKINENENTNQRIKGILQELMNDGVQDIKPYSPSQQEILKIYEEGISQNPNVDYSKVSEDEITKIKKSNNPTLKEIQRYKLWLEQKYISPYTGKPIPLSELFTPAYQIEHIIPQSRYFDNSLSNKIICESEVNEDKSNKTAYEYLKTNGGSIVHGHHLLSLKEYEDHCQHYFKKNRTKLKNLLSEEIPEGFINRQLNDSRYISKLIKGLLSNIVREENEQEATSKNIVPVTGSITSKLKQDWGLNDKWNEIIAPRFKRLNKMTNSNDFGYFDEKINTFRIQVPDAISRGFNKKRIDHRHHTLDALVIACCTKKHIQYLNSLNNEIIKHELKPSILIKNAQGDYTKHFMLPWNNFPIDCKNAIENTIVSFKQNLRVINKTSNKYQSYKDENGNLRLGKDGKPKKGLTKQTKGNNWAVRKAMHEDTFYGEIVDGENKGKLKIKTLLDTSFDVKKIEDKVLDKSIRTILINYLKQDKYKNLSKPHEEAFSPNGIIEMNKNIISLNNNIPHKPIKRVTLKHEKGKKFSIKTLLDKKTKFAKSATGTNVFFCIYKNINGKIKYHTPSFEEIIEIQKQEFEIKYKSKLNVPETLFDKKESFELLFYLQPNDLVYLPNDEELKNRQLIDFNNLNKKQIKRIYKFTDGSGTTANFIPYQVAKVIFNLNKKEQAKSSFKYPIQNEFGVGSPQSKNQKSIEGILIKERCIKLKIDRLGNISKA

SEQ ID NO: 221 - protein, 1473 aa, Flavobacterium branchiophilum
MAKILGLDLGTNSIGWAVVERENIDFSLIDKGVRIFSEGVKSEKGIESSRAAERTGYRSARKIKYRRKLRKYETLKVLSLNRMCPLSIEEVEEWKKSGFKDYPLNPEFLKWLSTDEESNVNPYFFRDRASKHKVSLFELGRAFYHIAQRRGFLSNRLDQSAEGILEEHCPKIEAIVEDLISIDEISTNITDYFFETGILDSNEKNGYAKDLDEGDKKLVSLYKSLLAILKKNESDFENCKSEIIERLNKKDVLGKVKGKIKDISQAMLDGNYKTLGQYFYSLYSKEKIRNQYTSREEHYLSEFITICKVQGIDQINEEEKINEKKFDGLAKDLYKAIFFQRPLKSQKGLIGKCSFEKSKSRCAISHPDFEEYRMWTYLNTIKIGTQSDKKLRFLTQDEKLKLVPKFYRKNDFNFDVLAKELIEKGSSFGFYKSSKKNDFFYWFNYKPTDTVAACQVAASLKNAIGEDWKTKSFKYQTINSNKEQVSRTVDYKDLWHLLTVATSDVYLYEFAIDKLGLDEKNAKAFSKTKLKKDFASLSLSAINKILPYLKEGLLYSHAVFVANIENIVDENIWKDEKQRDYIKTQISEIIENYTLEKSRFEIINGLLKEYKSENEDGKRVYYSKEAEQSFENDLKKKLVLFYKSNEIENKEQQETIFNELLPIFIQQLKDYEFIKIQRLDQKVLIFLKGKNETGQIFCTEEKGTAEEKEKKIKNRLKKLYHPSDIEKFKKKIIKDEFGNEKIVLGSPLTPSIKNPMAMRALHQLRKVLNALILEGQIDEKTIIHIEMARELNDANKRKGIQDYQNDNKKFREDAIKEIKKLYFEDCKKEVEPTEDDILRYQLWMEQNRSEIYEEGKNISICDIIGSNPAYDIEHTIPRSRSQDNSQMNKTLCSQRFNREVKKQSMPIELNNHLEILPRIAHWKEEADNLTREIEIISRSIKAAATKEIKDKKIRRRHYLTLKRDYLQGKYDRFIWEEPKVGFKNSQIPDTGIITKYAQAYLKSYFKKVESVKGGMVAEFRKIWGIQESFIDENGMKHYKVKDRSKHTHHTIDAITIACMTKEKYDVLAHAWTLEDQQNKKEARSIIEASKPWKTFKEDLLKIEEEILVSHYTPDNVKKQAKKIVRVRGKKQFVAEVERDVNGKAVPKKAASGKTIYKLDGEGKKLPRLQQGDTIRGSLHQDSIYGAIKNPLNTDEIKYVIRKDLESIKGSDVESIVDEVVKEKIKEAIANKVLLLSSNAQQKNKLVGTVWMNEEKRIAINKVRIYANSVKNPLHIKEHSLLSKSKHVHKQKVYGQNDENYAMAIYELDGKRDFELINIFNLAKLIKQGQGFYPLHKKKEIKGKIVFVPIEKRNKRDVVLKRGQQVVFYDKEVENPKDISEIVDFKGRIYIIEGLSIQRIVRPSGKVDEYGVIMLRYFKEARKADDIKQDNFKPDGVFKLGENKPTRKMNHNQFTAFVEGIDFKVLPSGKFEKI

SEQ ID NO: 222 - protein, 1459 aa, Flavobacterium columnare
MKFNLGLDIGTNSIGWALVNEDYENKKGKIIAAGSRIIPMTQDILDKFGSGAITETQTALRTDYRSKRKLIQRFLLRRERLHRVLNVLDFLPKHYAESIDFEKYFGKFLPNTEPKLAYNQNQFIFQNSFLEMLKEFQEKHPELLTNNKKIPYDWTIYYLRKKALNQRIEKEELAWLLLQFNQKRGYNQLRDEEEESVPNKQVEFYSLKIIDVVADQPKEGRDKRWYSINLENGWTYRRESKTPLFNWEGKTKDFIVTTDLNQDGSIKKDKEGKEKRSFRAPSEGDWTLLKKKTEKEIYESGKTLGTYIYDALLNTPDLKIKGDFIRTIDRSIYKEELQQIINKQKEYHLELNSSKLYKACLEELYPKNEIYKSALKNKDIAYLFINDILYYQRPLKAPKYNIGKCTYESRTFKKEDKKIREYIPAVAKSHPLFQEFRLWQWIKNLKIYEKLSSDNCTDFFLTNEQDFENLFEFLWNKKEIDHKGILEYLVKTKFPDLKPKQVKTKVKEYRWNYVYDHEKDESKTYPCGETYFLLKNKLDKIYNAQDDFLDKERLYNLWHIIYSVTDKKQYEKALAKFALKNHLDTKSFVNTFKRIPPFKNDYAIYSLKAIKKLLPLMRVGKYWNYDDIDPITKQKIQCIITGEENDTISTLVREKTNHFSNENDFKNLPLWLAGYIVYNSHNESSEIEKWKSPQDIDTFLKKFKQHALRNPIVEQVVTETLRVVRDIWSKKGQGKKDFFNEIHIELGKDLKNPVDKRRKLSSTNTKNESTNTRIKALLIELFTQGVENVKPNSPKHQEILKIFEEGALNSGIEIEEDIIKISNTDQPTKKQLELYILWLEHKYKSPYTGQSIPLSKLFTPNYEIEHIIPRSKYYDDNLSNKVICETEINRLKNNQLGYEFINNHEIREVTLEEGKTIRLLSPEQYWNFVTTYYAKNKAKRENLLLKELPVQMVEKQLNDTRYVSKYVMQLLSKIVRKEDGTDNGINSTNILSISGKMTRALKNDWDLNDVWNDLLLYRFERLNTITKTNLFTTYSEQKQKRMPIVPDQYAKGFHKKRLDHRHHALDAIVIACITRNHINYMNNQNIQGEKLKKNAIEKENYREILQKSRLDIRAQLCEKKYNDNDPTKYNWVFIKPWADFTENTKDILESIIPSFKQNLRIINKTVNYYEKYNENGKKVKVRQIKGDNWAIRKPLHKETISGKVHLSYKTPAKGKILTATRKVLDSSMDFKSIEKITDTGIQKILKNYLEYKKSPELAFSPEGIEELNATITKYNNGFHHKPIYKVRIYEEGVKFPLGNKGNKKSKYVEAEKGTNLFFAIYKDQENNRYFETIPFNDVLETLKKGMSAVPEKNQEENTLVFALSPQDLVFVPTLDEIENPDIVDFKNLTKDQTNRIYKMVSSSGKQCFFIKAEVATSIVNKMEFSTSNKMENSIEGIQIKSNCWKLKLDRLGTITRVIK

SEQ ID NO: 223 - protein, 1535 aa, Flavobacterium columnare
MTKILGLDLGTNSIGWAIRDTENEGINQILDKGARIFSEGVKSENGKEISRAAERTAYRSARKIKYRRKLRKYETLKVLSINGMCPLSVEEVEQWKKSGFKEYPLNPEFLDWLRTNEDKNINPYLFRDKASKQKVTLFELGRALYHIAQRRGFLSNRLDQSAEGVFEEHNPQIQNLIEDLDSSNTILNELKEYYINLGIIDETEKSGFKKDLDEGEKKLKSLYNSLVAITKKNANDIETCKQELIARLNKKEDLGKVKGKIKDISQAMLDRNFKTLGQYFFSLYNKERIRNQYTSREEHYLEEFIIICQTQGIEGINTNEKLPEKKFTGLAKDLYRAIFFQRPLKSQKGLIGKCSFEKNKSRCAVSHPDYEEFRMWSYLNTIKIGTQSEKTLRFLTLEEKLKLVPKFYRKSDFNFEVLAKELVEKGASFGYYKSSKKNEFFYWFNYKPTDSVSACVVSASLENAIGKDWKIKTFEYQTRNTEKNEVTKSVDYKDLWHLLSVATSDTYLYDFAIEKLKLEPKNAKAFSKTKLKKDFASLSLAAIAKILPYLKQGLLYSHAVFMANIENIVDADIWKDEEQQKFIQSKIVELVDNYIVEKSKLELINGLLKIYNTEDKEGRKVYYSKEAESLFEADLRKKLVPFYKANIIIEEHEQEIIFQDLFPILMDQLKKQEFIKIGRLDKQIEAFLEGENEEGQIFCNHTDKLKKLYHPSDIEVFKKKTIKDEWGNEKVVLGSPLTTSIKNPMAMRALHQLRKVLNTLIANDQIDEDTRIHIEMARELNDANKRKGIQDFQNENKKFREEAIKEIKKLYLEECHKDVNPTEDDILRYQLWLEQGKCEIYEEGNNISICDIIGSNPSYDIEHTIPRSISQDNSQMNKTLCSLKFNRSIKKQKMPVELSNYNDILPRIAHWKKEAEELTRQIETISRSIKSAATKVAKDKNIRKRHYLTLKRDYILGKYERFTWEEPKVGFKNSQIPDTGIITKYAQAYLKSYFKRVESVKGGAVAEFRKLWGIQESFIDENWWKHYKDKDRDKHTHHTIDAITIACMPKDKYDLLAHAWRLEDEQDKKAAKVLIEQAKPWKTFKEDIEKIETEILVSHFTPDNVKKQSKSIIKNRGKKVYVLKNELPVNFKNKIEGKDYFKLKFDSKILYKIPKKKEKQTDTFYEELPKNYLNGVEGKDYFKINTTGKTFYKIPIFNQGDTIRGSLHQETTYGAIKLPDIDIETKKPLHTDKGGFILKKDIKGNEIVFFVVRKEISKISENDVQNIVDNVVRKKIENAIANSLITFKIVKKKKVAVIKEGVTIWMREPNIEKGIEGIPIKKVRIITNSVKNPIEIKVHSPLSKSRHKHKQKVYGQNDENYAMALYELDGKREFELINNFNLAKLLKQSQSYYPLHKEKEIKGKKILVPIEKRNNKDVILKRGQQVVFYDKTVENPKDISEIIDFRERIYIIEGLTIQRQKDKKTSKVNEYGIIQLRHFKEARKSEEISKDNFKPDGEFKINENKPTRKMNHNQFTAFVEGIDFKVLPSGKFQKI

SEQ ID NO: 224 - protein, 1354 aa, Flavobacterium psychrophilum
  REGION 1..1354: note = Flavobacterium psychrophilum JIP02/86
MKKILGLDLGTNSIGWAFINEAENEIEVSSIVNTGVRIVPLTTDEESDFKKGNTISINADRTLKRGARRGLQRFKQRREALLETFNRIKFIATDFVYAETGAATTFSSYQLRAKSAVEAVTKEELVKVLLMLNKKRGYKSSRKAKTAEEGDAIDGMKIAKEIFENNLTPGQWVYNSLSKGGKFIPDFYHSDLQKELEKIVRFQNQFHSEQINDKLLADIQGKSRTQTSQHFSKTLNIPLAENKGTREETKLQHYQWRNEALANELDMKILAFIITEINNQINQSSGYLGAISDRSKELYFNQETVGQYQYKQLQENVHAKLKNQVFYRQDYLDEFEKIWETQAKFHSELNEKLKAEIRDITIFYQRKLKSQKHLVSFCEFEKGHKAIPKSSPLFQEFRIWQNLNNVVVKNETTKEVFELSEELKQLIAEELQFKESMTDVQMLTFCELKKGTHTVNFKKIEGNRTNTSIYKAFEKILEVEGYEIDFSKMKPLEIKETVAPIFETLNINTVILDFDPTIQGNDFDKQPYYQLWHLLYSAEDDDKLKETLKTKFGFKENHLPFILNINLQADYGSLSAKAIKKILPHLMDGHIYDKACLMVGYNHSSSLTTAQNNDRVLKDTLELLKKNSLRNPVVEKILNQMINVINAIMKDPAMGKPDEIRVELARELKANNEQRKKATSDINTATTEHERIRKLLHSEFNIPRVTRNDIIRYKLWLETGGISLYTGNPIKASDLFSKNYDIEHIIPKSRLFDDSFSNKTLCERQLNIDKSNKTAYSFLQEKLSENDFAAYENRVKDLFKTGKIKSYTKYKKLLMADNEIPEGFIDRQLRETQYIAKKAKEILLEVSRNVTATIGSVTDKLRQDWELVDVMKELNWEKYDKLGLTHIEEGKNGERLSKIKDWTKRNDHRHHAMDAITVAFTKPAYIQYLNNLNAKTQGENKANSIIGIENKHLYRDKNNKLRFISPMKNFREEAKKQLESILISYKAKNKVVTKNKNTTKKSGGTNQKIQLTPRGRLHKETVYGKLQQYATKEEKVNASFTEDYIQKVAKKEYREALLKRLEENDNDPKKAFTGKNALNKTPIYISLKDNIIVPEKVKTVWLETDYTIRKDITPDLKIDKVIDVGIKRILQNRLNEFNGDPKKAFVNLGESPIWLNKEKGIAIKRVTISGVSNAQALHTKKDHLGNEILDKNGNPIPVDFISTGNNHHVAIYRDEKGNLQEEVVSFYDAVIRRNLGLSVINKNHEKGWEFLFSMKQNEFFIFPSDGFNPHEIDLLNPNNYHLISPNIFRVQKISTKNYMFNHHLETKAVDGEMLKSKKELSKTSYHFIQTPTNLNGIIKVRINHLGKIVHLGEY

SEQ ID NO: 225 - protein, 1458 aa, Fluviicola taffensis
MTKTILGLDLGTNSIGWALINQDFDNKKGEILGMGSRIIPMTQDIKDEFGKGNSISQTAERTRLRGVRRLIHRTLLRRERLHRVLNIIGFLPEHYANQIDFEKRFGKFKPESEPKISFDGNDVFLFEKSYQEMLVDFKIHQPQLVSNGKKIPHDWTIYYLRKKALSKKIEKEELAWILLNFNQKRGYYQLRGEEEEETPNKLVEFHSLKIVEVNADEPQKGKPEIWYSLVLENGWVYRRASKTPLFDWKDKIREFIVTTEINNDGTVKTDKEGTEKRSFRAPKPEDWTLQKKKTEFELSKSGNEVGAFIYESILQKPNQKIRGKLISTIERKFYKEELKTILKTQLFFHKELKDEKLYNACIEELYKNNEAHRSLLSNKGFEHLFINDILFYQRPLRSKKSQISNCPLEKRTYKKEGIEITEGIKVISKSNPIYQEFRLWQWISNLSLYCIEPTETNVTSTFLNSIEDYENLFEFLNNRKEIEQKHLLKYLLENQGFKGKLLTNELEKFRWNFVADKKYPCNETGSLLHTRLSKVKNISPDFLTKEIEHQLWHIIYSVTDKIEYEQALKTFARKNNLDVDSFFEHFKKIPPFESTYGAYSEKAIKKLLPLIRLGKYWNWEAIDSISKDRISKILSGEYDENIKNRVREKAVHLTSENNFQGLQEWLAKYIVYDRHSEGNDLGKWTSVSDLETYLKEFKQHSLRNPIVEQVITETLRVVKDIWIKHGKGTENFFDEIHVELGREMKNNSEDRKRLTNTITENENTNLRIKALLMEMMNDNDVENVRPYSPSQQEILKIYEDGALNSNIELDDEIVKISKKAEPTKSELQRYKLWLEQKYRSPYTGQVIPLNKLFTSEYEIEHVVPQSRFFDDSFSNKVICESAVNKRKDNQLGLQFIKNHSGEKVELGFGKVVQVFTEEQYLDFVKEHYSKNRSKHNKLLLEEIPEKMIERQLNDTRYISKFVSSILSNIVRSEKDDDGLNSKNILPGNGKITTELKRDWGLNDVWNDLILPRFERMNTITNSDLFTTYNDKYQKHLPTVPFEYSKGFQKKRIDHRHHAMDALVIACATRDHLNLMNNQSAKSELKRYDLQNKLRKKEPYFNQKENKQKEAFKDFIKPWGTFTEDSKNALEKIIISFKQNLRVINKATNSYESYKDEDGNLRIGKDGKPEKGLIKQKGLNWAIRKPLHKDTVSGQINLSRIKLPNGKILTATRKNLDTSFDLKTIENSITDTGIQKILKNYLLSKESPELAFSPEGLEEMNNEIEKYNNGKFHHPINKARIYELGSKFNVGQTGNRRDKFVEAAKGTNLFFAIYQDENKNRSYETIPLNEVIEHQKWRASLPKEEQEKIPLVPVNKLKGTFIFSLSPNDLVYVPSNDELERSASIDFSKLKKEQINRLYKMVSSSGSQCFFVKSEVATSVVNKMEYSSLNKMEKSIDNLMVKEICIKLKIDRLGNISKA

SEQ ID NO: 226 - protein, 1646 aa, Francisella tularensis
MNIKILPIAIDLGAKNTGVFSAFYQKGTSLESLDNKNGKVYELSKDSYTLLMNNRTARRHQRRGIDRKQLVKRLFKLIWTKQLNLEWNKDTQQTISFLLNRRGFSFITDGYSPEYLNIAPEAVKAILMSILDDYNGEDDLDSYLQSATENDSKIDELYNKLLQKALEFKLRKLCIDIKEDKVTTKTLKELSNTEFKLLANYLVDYDRILRTQKFSYTDKQGNLRELNYYHHDKYNIQEFLKRNIIINDVILEKLTDDLDIWNLNFDKFDFEKNLEKLENQEDKDYLQTHLHHFVFAVNKIKSEMASGGRHRSQYFQEITNVLVENNHQEGYLKNFCENLHNKKYSNLSVKNLVNLIGNLSNLELKPLRKYFNDKIHAKADYWDEQKFAETYSDWILGEWRVGAKDKDKKDGAKYSYKNLCDELKQKVGINQDGIINQTKSDFVDFLLELDPCRTIPPYLDNNNRKPPKCQSLILNPKFLDNKYPNWQQYLQELKKLQTVQNYLGNFEIDLKDLKSSKEQPYFVKYKSLNQQIASGQRDYKDLDARVLQFIFDRVKASDELLLNEIYSHAKKLKQNTSSELEKLELCKKLDEVIANSQLSQILKSQHVNGIFEQGTFLHLVCKYYKQRQRARDSRLYIMPEYRYDKKLDKYNNTGRFDDDNQLLTYCNHKPRQKRYQLLNDLAGVLQVSPNFLKDKIGSDDDLFISKWLVEHIRGFKKACEDSLKIQKDNRGLLNHKINIARNTKGKCEKEIFNLICKIEGSEDKKGNYKHGLAYELGVLLFGEPNQASKLEFDRKIKKFNSIYSFAQIQQIAFAERKGNANTCAVCSADNAHRMQQIKVAKPVEGNKDNIILSAKAQRLPAIPTRIVDGAVKKIATILARNIVDDNWDNIKQALSNNQQLHVPIITESNAFEFEPALADIKGKSLKDKRKKALERIDPENVFKDKNNRIKEFAKGISAYSDANLANGDFDGAKEELDHIIPRSHKKYGTLNDEANLICVTREDNQNRGNKAVFLYDLKPNYKLKQFNTTDDLEIEKKIADTIWDASKQDFKFGNYRSFINLTPQEQIAFRHALFLADKNPIKKAVIRAIDNRNRTFVNGTQRYFAEVLANNIYLRAKKENLATNRITFDYFGIETTNSNGRGIADVRKLYEKVDSDIQAYAKGDKPQDSYSHLIDAMIAFCVAADEHKNEGSIGLKMGNQYGLFPTPDKYDENTGEIISWHNDDIFRKIKVSDNQFSDKKLVRKKATEGFNTHRQMTRDGIYGESYLPILIHKNLNEVRKGYNWENSEEIKIFKGKKYDIQQLNNLVYCLKFVDKPISIDIQITTLEELRNILETNNISTTAEYYYINLKTQKLHEYYIENYNTALGYKKYTKEMEFLRSLAYRTERVKIKSIDDVSMILAKDSNFKAGKIELPFKTEWQRLYLEWQNTTIKDNHEFLKSYFSVKNATKQHKKVRKDFSLPISTNEGKLLVKRKTWDNNFIYQILNDSDSRADGTKPFIPAFDISKNEIVETIIKSFTSKNIFWLPKNIELQKVDNKSIFAIDTSRWFEVETPKDLIEIGVSTIQYKIDNNSRPKVRVKLDYVMDDDSKINYFMNHSLLKSRYPDKVLEILKQSTIIEFESSGFNKTIKEMLGMTLAGIYNETSNN

SEQ ID NO: 227 - protein, 1629 aa, Francisella tularensis
MNFKILPIAIDLGVKNTGVFSAFYQKGTSLERLDNKNGKVYELSKDSYTLLMNNRTARRHQRRGIDRKQLVKRLFKLIWTEQLNLEWDKDTQQAISFLFNRRGFSFITDGYSPEYLNIVPEQVKAILMDIFDDYNGEDDLDSYLKLATEQESKISEIYNKLMQKILEFKLRKLCTDIKDDKVSTKTLKEITSYEFELLADYLANYSEILKTQKFSYTDKQGNLKELSYYHHDKYNIQEFLKRHATINIQILDTLLTDDLDIWNFNFEKFDFDKNEEKLQNQEDKDHIQAHLHHFVFAVNKIKSEMASGGRHRSQYFQEITNVLDENNHQEGYLKNFCENLHNKKYSNLSVKNLVNLIGNLSNLELKPLRKYFNDKIHAKADHWDEQKFTETYCHWILGEWRVGVKDQDKKDGAKYSYKDLCNELKQKVTKAGLVDFLLELDPCRTIPPYLDNNNRKPPKCQSLILNPKFLDNQYPNWQQYLQELKKLQSIQNYLESFETDLKVLKSSKDQPYFVEYRSSNQQIASGQRDYKDLDARILQFIFDRVKASDELLLNEIYFQAKKLKQKASSELEKLESSKKLDEVIANSQLSQILKSQHTNGIFEQGTFLHLVCKYYKQRQRARDSRLYIMPEYRYDKKLHKYNNTGRFDDDNQLLTYCNHKPRQKRYQLLNDLAGVLQVSPNFLKDKIGSDDDLFISKWLVEHIRGFKKACEDSLKIQKDNRGLLNHKINIARNTKGKCEKEIFNLICKIEGSEDKKGNYKHGLAYELGVLLFGEPNEASKPEFDRKIKKFNSIYSFAQIQQIAFAERKGNANTCAVCSADNAHRMQQIKITEPVEDNKDKIILSAKAQRLPAITTRIVDGAVKKMATILAKNIVDDNWQNIKQVLSAKHQLHIPIITESNAFEFEPALADVKGKSLKDRRKKALERISPENIFKDKNNRIKEFAKGISAYSGANLTDGDFDGAKEELDHIIPRSHKKYGTLNDEANLICVTRGDNKNKGNRIFCLRDLANNYKLKQFETTDDLEIEKKIADTIWDANKKDFKFGNYRSFINLTPQEQKAFRHALFLADENPIKQAVIRAINNRNRTFVNGTQRYFAEVLANNIYLRAKKENLNTDKISFDYFGIPTIGNGRGIAEIRQLYEKVDSDIQAYAKGDKPQASYSHLIDAMLAFCIAADEHRNDGSIGLEIDKNYSLYPLDKNTGEVFTKDIFSQIKITDNEFSDKKLVRKKATEGFNTHRQMTRDGIYAENYLPILIHKELDEVRKGYTWKNSEEIKIFKGKKYDIQQLNNLLYCLKFVDKPISIDIQISTLEELRNILTTNNIAATAEYYYINLKTQKLHEYYIENYNTALGYKKYTKEMEFLRSLAYRSERVKIKSIDDVKQVLDKDSNFIIGKITLPFKKEWQRLYREWQNITIKDDYEFLKSFFNVKSITKLHKKVRKDFSLPISTNEGKFLVKRKTWDNNFIYQILNDSDSRVDGTKPFIPAFDISKNEIVEAIIDSFTSKNIFWLPKNIELQKVDNKNIFAIDTSKWFEVETPSDLRDIGVATIQYKIDNNSRPKVRVKLDYVIDDDSKINYFTNHSLLKSRYPDKVLEILKQSTIIEFESSGFNKTIKEMLGMTLAGIYNETSNN

SEQ ID NO: 228 - protein, 1629 aa, Francisella novicida
  REGION 1..1629: note = Francisella novicida FTG
MNFKILPIAIDLGVKNTGVFSAFYQKGTSLERLDNKNGKVYELSKDSYTLLMNNRTARRHQRRGIDRKQLVKRLFKLIWTEQLNLEWDKDTQQAISFLFNRRGFSFITDGYSPEYLNIVPEQVKAILMDIFDDYNGEDDLDSYLKLATEQESKISEIYNKLMQKILEFKLMKLCTDIKDDKVSTKTLKEITSYEFELLADYLANYSESLKTQKFSYTDKQGNLKELSYYHHDKYNIQEFLKRHATINDRILDTLLTDDLDIWNFNFEKFDFDKNEEKLQNQEDKDHIQAHLHHFVFAVNKIKSEMASGGRHRSQYFQEITNVLDENNHQEGYLKNFCENLHNKKYSNLSVKNLVNLIGNLSNLELKPLRKYFNDKIHAKADHWDEQKFTETYCHWILGEWRVGVKDQDKKDGAKYSYKDLCNELKQKVTKAGLVDFLLELDPCRTIPPYLDNNNRKPPKCQSLILNPKFLDNQYPNWQQYLQELKKLQSIQNYLDSFETDLKVLKSSKDQPYFVEYKSSNQQIASGQRDYKDLDARILQFIFDRVKASDELLLNEIYFQAKKLKQKASSELEKLESSKKLDEVIANSQLSQILKSQHTNGIFEQGTFLHLVCKYYKQRQRARDSRLYIMPEYRYDKKLHKYNNTGRFDDDNQLLTYCNHKPRQKRYQLLNDLAGVLQVSPNFLKDKIGSDDDLFISKWLVEHIRGFKKACEDSLKIQKDNRGLLNHKINIARNTKGKCEKEIFNLICKIEGSEDKKGNYKHGLAYELGVLLFGEPNEASKPEFDRKIKKFNSIYSFAQIQQIAFAERKGNANTCAVCSADNAHRMQQIKITEPVEDNKDKIILSAKAQRLPAIPTRIVDGAVKKMATILAKNIVDDNWQNIKQVLSAKHQLHIPIITESNAFEFEPALADVKGKSLKDRRKKALERISPENIFKDKNNRIKEFAKGISAYSGANLTDGDFDGAKEELDHIIPRSHKKYGTLNDEANLICVTRGDNKNKGNRIFCLRDLADNYKLKQFETTDDLEIEKKIADTIWDANKKDFKFGNYRSFINLTPQEQKAFRHALFLADENPIKQAVIRAINNRNRTFVNGTQRYFAEVLANNIYLRAKKENLNTDKISFDYFGIPTIGNGRGIAEIRQLYEKVDSDIQAYAKGDKPQASYSHLIDAMLAFCIAADEHRNDGSIGLEIDKNYSLYPLDKNTGEVFTKDIFSQIKITDNEFSDKKLVRKKAIEGFNTHRQMTRDGIYAENYLPILIHKELNEVRKGYTWKNSEEIKIFKGKKYDIQQLNNLVYCLKFVDKPISIDIQISTLEELRNILTTNNIAATAEYYYINLKTQKLHEYYIENYNTALGYKKYSKEMEFLRSLAYRSERVKIKSIDDVKQVLDKDSNFIIGKITLPFKKEWQRLYREWQNTTIKDDYEFLKSFFNVKSITKLHKKVRKDFSLPISTNEGKFLVKRKTWDNNFIYQILNDSDSRVDGTKPFIPAFDISKNEIVEAIIDSFTSKNIFWLPKNIELQKVDNKNIFAIDTSKWFEVETPSDLRDIGVATIQYKIDNNSRPKVRVKLDYVIDDDSKINYFTNHSLLKSRYPDKVLEILKQSTTIEFESSGFNKTIKEMLGMTLAGIYNETSNN

SEQ ID NO: 229 - protein, 1629 aa, Francisella novicida
  REGION 1..1629: note = Francisella novicida GA99-3548
MNFKILPIAIDLGVKNTGVFSAFYQKGTSLERLDNKNGKVYELSKDSYTLLMNNRTARRHQRRGIDRKQLVKKLFKLIWTEQLNLEWDKDTQQAISFLFNRRGFSFITDGYSPEYLNIVPEQVKAILMDIFDDYNGEDDLDSYLKLATEQESKISEIYNKLMQKILEFKLRKLCTDIKDDKVSTKTLKEITSYEFELLADYLANYSESLKTQKFSYTDKQGNLKELSYYHHDKYNIQEFLKRHATINDEILDTLLTDDLDIWNFNFEKFDFDKNEEKLQNQEDKDHTQAHLHHFVFAVNKIKSEMASGGRHRGQYFQEITNVLDENNHQEGYLKNFCENLHNKKYSNLSVKNLVNLIGNLSNLELKPLRKYFNDKIHAKADHWDEQKFTETYCHWILGEWRVGLKDQDKKEGAKYSYKDLCNELKQKVTNAGLIDFLLELDPCRTIPPYLDNNNRKPPKCQSLILNPKFLDNQYPNWQQYLQELKKLQIIQDYLESFETDLKVLKSSKDQPYFVEYKSSNQQIASGQRDYKDLDARILQFIFDRVKASDELLLNEIYFQAKKLKQKASSELEKLESSKKLDEVIANSQLSKILKSQHTNGIFEQGTFLHLVCKYYKQRQRARDSRLYIMPEYRYDKKLDKYNNTGRFDDDNQLLTYCNHKPRQKRYQLLNDLAGVLQVSPNFLKDKIGSDDDLFISKWLVEHIRGFKKACEDSLKIQKDNRGLLNHKINIARNTKGKCEKEIFNLICKIEGSEDKKGNYKHGLAYELGVLLFGEPNEASKPEFDRKIKKFNSIYSFAQIQQIAFAERKGNANTCAVCSADNAHRMQQIKITEPVEDNKDKIILSAKAQRLPAIPTRIVDGAVKKMATILAKNIVDDNWQNIKQVLSAKHQLHIPIITESNAFEFEPALADVKGKSLKDRRKKALERISPENIFKDKNNRIKEFAKGISAYSGANLTDGDFDGAKEELDHIIPRSHKKYGTLNDEANLICVTRDDNKNKGNRIFCLHDLANNYKLKQFETTDDLEIEKKIADTIWDASKKDFKFGNYRSFINLTPQEQKAFRHALFLADENPIKQAVIRAINNRNRTFVNGTQRYFAEVLANNIYLRAKKENLNTDKISFDYFGIPTIGNGRGIAEIRQLYEKVDSDIQVYAKGDKPQASYSHLIDAMLAFCIAADEHRNDGSIGLEIDKNYSLYPLDKNTGEVFTKDIFSQIKITDNEFSDKKLVRKKATEGFNTHRQMTRDGIYAENYLPILIHKELDEVRKGYTWKNSEEIKIFKGKKYDIQQLNNLLYCLKFVDKPISIDIQISTLEELRNILTTNNIAATAEYYYINLKTQKLHEYYIENYNTALGYKKYTKEMEFLRSLAYRSERVKIKSIDDVKQVLDKDSNFIIGKITLPFKKEWQRLYREWQNTTIKDDYEFLKSFFNVKSITKLHKKVRKDFSLPISTNEGKFLVKRKTWDNNFIYQILNDSDSRVDGTKPFIPAFDISKNEIVEAIIDSFTSKNIFWLPKNIELQKVDNKNIFAIDTSKWFEVETPSDLRDIGVATIQYKIDNNSRPKVRVKLDYVIDDDSKINYFTNHSLLKSRYPDKVLEILKQSTIIEFESSGFNKTIKEMLGMTLAGIYNETSNN

SEQ ID NO: 230 - protein, 1629 aa, Francisella tularensis; identical to SEQ ID NO: 30

SEQ ID NO: 231 - protein, 1629 aa, Francisella novicida
  REGION 1..1629: note = Francisella novicida GA99-3549
MNVKILPIAIDLGVKNTGVFSAFYQKGTSLERLDNKNGKVYELSKDSYTLLMNNRTARRHQRRGIDRKQLVKRLFKLIWTEQLNLEWDKDTQQAISFLFNRRGFSFITDGYSPEYLNIVPEQVKAILMDIFDDYNGEDDLDSYLKLATEQESKISEIYNKLMQKILEFKLRKLCTDIKDDKVSTKTLKEITSYEFELLADYLANYSEILKTQKFSYTDKQGNLKELSYYHHDKYNIQEFLKRHATINDEILDTLLTDDLDIWNFNFEKFDFDKNEEKLQNQEDKDHTQAHLHHFVFAVNKIKSEMASGGRHRGQYFQEITNVLDENNHQEGYLKNFCENLHNKKYSNLSVKNLVNLIGNLSNLELKPLRKYFNDKIHAKADHWDEQKFTETYCHWILGEWRVGVKDQDKKDGAKYSYKDLCNELKQKVTKAGLVDFLLELDPCRTIPPYLDNNNRKPPKCQSLILNPKFLDNQYPNWQQYLQELKKLQSIQNYLESFETDLKVLKSSKDQPYFVEYKSSNQQIASGQRDYKDLDARILQFIFDRVKASDELLLNEIYFQAKKLKQKASSELEKLESSKKLDEVIANSQLSQILKSQHTNGIFEQGTFLHLVCKYYKQRQRARDSRLYIMPEYRYDKKLDKYNNTGRFDDDNQLLTYCNHKPRQKRYQLLNDLAGVLQVSPNFLKDKIGSDDDLFISKWLVEHIRGFKKACEDSLKIQKDNRGLLNHKINIARNTKGKCEKEIFNLICKIEGSEDKKGNYKHGLAYELGVLLFGEPNEASKPEFDRKIKKFNSIYSFAQIQQIAFAERKGNANTCAVCSADNAHRMQQIKITEPVEDNKDKIILSAKAQRLPAIPTRIVDGAVKKMATILAKNIVDDNWQNIKQVLSAKHQLHIPIITESNAFEFEPALADVKGKSIKDRRKKALERISPENIFKDKNNRIKEFAKGISAYSGDNLASGDFDGAKEELDHIIPRSHKKYGTLNDEANLICVTRDDNKNKGNRIFCLHDLANNYKLKQFETTDDLEIEKKIADTIWDASKKDFKFGNYRSFINLTPQEQKAFRHALFLADENPIKQAVIRAINNRNRTFVNGTQRYFAEVLANNIYLRAKKENLNTDKISFDYFGIPTIGNGRGIVEIRQLYEKVDSDIQAYAKGDKPQASYSHLIDAMLAFCIAADEHRNDGSIGLEIDKNYSLYPLDKNTGEVFTKDIFSQIKITNNEFSDKKLVRKKATEGFNTHRQMTRDGIYAENYLPILIHKELDEVRKGYTWGNSEELKIHKGKKYDIQQLNNLVYCLKFIDKSISIDIQISTLEELRNILTTNNIATTAEYYYINLKTQKLHEYYIENYNTALGYKKYTKEMEFLRSLAYRSERVKIKSIDDVKQVLDKDSNFIIGKITLPFKKEWQRLYREWQNTTIKDDYEFLKSFFNVKSITKLHKKVRKDFSLPISTNEGKFLVKRKTWDNNFIYQILNDSDSRVDGTKPFIPAFDISKNEIVEAIIDSFTSKNIFWLPKNIELQKVDNKNIFAIDTSKWFEVETPSDLRDIGVATIQYKIDNNSRPKVRVKLDYVIDDDSKINYFTNHSLLKSRYPDKVLEILKQSTIIEFESSGFNKTIKEMLGMTLAGIYNETSNN

SEQ ID NO: 232 - protein, 1323 aa, Fructobacillus fructosus
  REGION 1..1323: note = Fructobacillus fructosus KCTC 3544
MVYDVGLDIGTGSVGWVALDENGKLARAKGKNLVGVRLFDTAQTAADRRGFRTTRRRLSRRKWRLRLLDELFSAEINEIDSSFFQRLKYSYVHPKDEENKAHYYGGYLFPTEEETKKFHRSYPTIYHLRQELMAQPNKRFDIREIYLAIHHLVKYRGHFLSSQEKITIGSTYNPEDLANAIEVYADEKGLSWELNNPEQLTEIISGEAGYGLNKSMKADEALKLFEFDNNQDKVAIKTLLAGLTGNQIDFAKLFGKDISDKDEAKLWKLKLDDEALEEKSQTILSQLTDEEIELFHAVVQAYDGFVLIGLLNGADSVSAAMVQLYDQHREDRKLLKSLAQKAGLKHKRFSEIYEQLALATDEATIKNGISTARELVEESNLSKEVKEDTLRRLDENEFLPKQRTKANSVIPHQLHLAELQKILQNQGQYYPFLLDTFEKEDGQDNKIEELLRFRIPYYVGPLVTKKDVEHAGGDADNHWVERNEGFEKSRVTPWNFDKVFNRDKAARDFIERLTGNDTYLIGEKTLPQNSLRYQLFTVLNELNNVRVNGKKFDSKTKADLINDLFKARKTVSLSALKDYLKAQGKGDVTITGLADESKFNSSLSSYNDLKKTFDAEYLENEDNQETLEKIIEIQTVFEDSKIASRELSKLPLDDDQVKKLSQTHYTGWGRLSEKLLDSKIIDERGQKVSILDKLKSTSQNFMSIINNDKYGVQAWITEQNTGSSKLTFDEKVNELTTSPANKRGIKQSFAVLNDIKKAMKEEPRRVYLEFAREDQTSVRSVPRYNQLKEKYQSKSLSEEAKVLKKTLDGNKNKMSDDRYFLYFQQQGKDMYTGRPINFERLSQDYDIDHIIPQAFTKDDSLDNRVLVSRPENARKSDSFAYTDEVQKQDGSLWTSLLKSGFINRKKYERLTKAGKYLDGQKTGFIARQLVETRQIIKNVASLIEGEYENSKAVAIRSEITADMRLLVGIKKHREINSFHHAFDALLITAAGQYMQNRYPDRDSTNVYNEFDRYTNDYLKNLRQLSSRDEVRRLKSFGFVVGTMRKGNEDWSEENTSYLRKVMMFKNILTTKKTEKDRGPLNKETIFSPKSGKKLIPLNSKRSDTALYGGYSNVYSAYMTLVRANGKNLLIKIPISIANQIEVGNLKINDYIVNNPAIKKFEKILISKLPLGQLVNEDGNLIYLASNEYRHNAKQLWLSTTDADKIASISENSSDEELLEAYDILTSENVKNRFPFFKKDIDKLSQVRDEFLDSDKRIAVIQTILRGLQIDAAYQAPVKIISKKVSDWHKLQQSGGIKLSDNSEMIYQSATGIFETRVKISDLL

SEQ ID NO: 233 - protein, 1374 aa, Fusobacterium nucleatum
  REGION 1..1374: note = Fusobacterium nucleatum subsp. vincentii ATCC 49256
MKKQKFSDYYLGFDIGTNSVGWCVTDLDYNVLRFNKKDMWGSRLFDEAKTAAERRVQRNSRRRLKRRKWRLNLLEEIFSDEIMKIDSNFFRRLKESSLWLEDKNSKEKFTLFNDDNYKDYDFYKQYPTIFHLRDELIKNPEKKDIRLIYLALHSIFKSRGHFLFEGQNLKEIKNFETLYNNLISFLEDNGINKSIDKDNIEKLEKIICDSGKGLKDKEKEFKGIFNSDKQLVAIFKLSVGSSVSLNDLFDTDEYKKEEVEKEKISFREQIYEDDKPIYYSILGEKIELLDIAKSFYDFMVLNNILSDSNYISEAKVKLYEEHKKDLKNLKYIIRKYNKENYDKLFKDKNENNYPAYIGLNKEKDKKEVVEKSRLKIDDLIKVIKGYLPKPERIEEKDKTIFNEILNKIELKTILPKQRISDNGTLPYQIHEVELEKILENQSKYYDFLNYEENGVSTKDKLLKTFKFRIPYYVGPLNSYHKDKGGNSWIVRKEEGKILPWNFEQKVDIEKSAEEFIKRMTNKCTYLNGEDVIPKDSFLYSEYIILNELNKVQVNDEFLNEENKRKIIDELFKENKKVSEKKFKEYLLVNQIANRTVELKGIKDSFNSNYVSYIKFKDIFGEKLNLDIYKEISEKSILWKCLYGDDKKIFEKKIKNEYGDILNKDEIKKINSFKFNTWGRLSEKLLTGIEFINLETGECYSSVMEALRRTNYNLMELLSSKFTLQESIDNENKEMNEVSYRDLIEESYVSPSLKRAILQTLKIYEEIKKITGRVPKKVFIEMARGGDESMKNKKIPARQEQLKKLYDSCGNDIANFSIDIKEMKNSLSSYDNNSLRQKKLYLYYLQFGKCMYTGREIDLDRLLQNNDTYDIDHIYPRSKVIKDDSFDNLVLVLKNENAEKSNEYPVKKEIQEKMKSFWRFLKEKNFISDEKYKRLTGKDDFELRGFMARQLVNVRQTTKEVGKILQQIEPEIKIVYSKAEIASSFREMFDFIKVRELNDTHHAKDAYLNIVAGNVYNTKFTEKPYRYLQEIKENYDVKKIYNYDIKNAWDKENSLEIVKKNMEKNTVNITRFIKEEKGELFNLNPIKKGETSNEIISIKPKLYDGKDNKLNEKYGYYTSLKAAYFIYVEHEKKNKKVKTFERITRIDSTLIKNEKNLIKYLVSQKKLLNPKIIKKIYKEQTLIIDSYPYTFTGVDSNKKVELKNKKQLYLEKKYEQILKNALKFVEDNQGETEENYKFIYLKKRNNNEKNETIDAVKERYNIEFNEMYDKFLEKLSSKDYKNYINNKLYTNFLNSKEKFKKLKLWEKSLILREFLKIFNKNTYGKYEIKDSQTKEKLFSFPEDTGRIRLGQSSLGNNKELLEESVTGLFVKKIKL

SEQ ID NO: 234 - protein, 1367 aa, Fusobacterium sp.
  REGION 1..1367: note = Fusobacterium sp. 1_1_41FAA
MKKQQFSDYYLGFDIGTNSVGWCVTDFNYNVLRFNKKDMWGSRLFDEAKTAAERRVQRNSRRRLKRRKWRLNLLEEIFSDEILKIDSNFFRRLKESSLWLEDKSSKEKFTLFNDDNYKDYDFYKQYPTIFHLRNELIKNPEKKDIRLVYLALHSIFKSRGHFLFEGQNLKDIKNFETLYNNLMAFLEDNDIYKNIDSSYIGNLENIICDSKKGLKDKEKEFKEIFNSDKQLVGFFKLSVGSSVSLNDLFDTDEYKKGEVEKEKISFREQIYEDDKPIYYSILGEKIEFLDIAKSFYDFMVLNNILADSQYISEAKVKLYDEHKRDLKNLKYIIRKYNKENYDKLFKDKNESNYSAYIGLNKEKGKKEVIEKSRLKIDDFAKIIKGYLPKAEKIDEKDRSIFNEILDKIELKTILPKQRISDNGTLPYQIHEAELEKILENQAKYYDFLNHEENGISTKDKLLMTFKFRIPYYVGPLNSYHKNKGGNSWIVRKEEGKILPWNFEQKVDIEKSAEEFIKRMTNKCTYLNGEDVIPKDSFLYSEYIILNELNKVQVNDEFLNKEIKKKIIEDLFKKSKKISEKNFREYLLVNQITNKTVELKGVKDAFNSNYVSYIKFKDIFGDKLNLDIYKEISEKSILWKCLYGDDKKIFEKKIKSVYGDILTKDEIKKINSFKFNTWGRLSEKLLTEIEFIDLETGECYSSVMDALRRTNYNLMELLSSKFTLQENIDNENKEVSEFSYRDLVEESYVSPSLKRAILQTLKIYEEIRKITGRIPKKVFIEMARGGDETMKNKKIPARQEQLKKLYDSCGKDISNFSIDIKEMKNSLNSYDNNSLRQKKLYLYYLQFGKCMYTGKEIDLNRLLQNNDTYDIDHIYPRSKVIKDDSFDNLVLVLKNENAEKSNEYPLKKEIQEKMKSFWKFLKEKNFISDEKYKRLTGKDEFELRGFMARQLVNVRQTTKEAGKILQQIEPEIKIVYSKAEIASSFREMFDFIKVRELNDTHHAKDAYLNIVAGNVYNTKFTEKPYRYLQEIKENYDVKKIYNYDIKNAWDKEKSLEIVKKNMEKNTVNITRFIKEEKGQLFDLNPIRKGETSNEIIAIKPKFYEGSTEKLNEKYGYYKSLNPAYFIYVEHKEKNKIIRSFERVNLVDVNKIKDEKSLIKYLIENKGLIEPKVIKKVYKRQVILINNFPYSIVALDSNKLMDFENLKPLFLERKYEKILKNAIKFLEDNQGKTEEYYKFLYLKKKDRNEKNETIDSVKERYNIEFNEMYDKFLEKLDSKDYKNYINNKKYSELVNVKEKFIKLNLFDKAFTLKSFLDLFNRKTMADFSKVGLTKYLGKIQKISSNVLSKNELHLLEESVTGLFVKKIKL

SEQ ID NO: 235 - protein, 1367 aa, Fusobacterium sp.
  REGION 1..1367: note = Fusobacterium sp. 3_1_27
MKKQKFSDYYLGFDIGTNSVGWCVTDLDYNVLRFNKKDMWGSRLFDEAKTAAERRVQRNSRRRLKRRKWRLNLLEEIFSDEIMKIDSNFFRRLKESSLWLEDKNSKEKFTLFNDDNYKDYDFYKQYPTIFHLRDELIKNPEKKDIRLIYLALHSIFKSRGHFLFEGQNLKEIKNFETLYNNLISFLEDNGINKSIDKDNIKKLEKIICDSGKGLKDKEKEFKEIFNSDKQLVAIFKLSVGSSVSLNDLFDTDEYKKEEVEKEKISFREQIYEDDKPIYYSILGEKIELLDIAKSFYDFMVLNNILSDSNYISEAKVKLYEEHKKDLKNLKYIIRKYNKENYDKLFKDKNENNYPAYIGLNKEKGKKEVVEKSGLKIDDLIKVIKGYLPKPERIEEKDKIIFNEILNKIELKTILPKQRISDNGTLPYQIHEVELEKILENQSKYYDFLNYEENGVSTKDKLLKTFKFRIPYYVGPLNSYHKDKGGNSWIVRKEEGKILPWNFEQKVDIEKSAEEFIKRMTNKCTYLNGEDVIPKDSFLYSEYIILNELNKVQVNDEFLNEENKRKIIDELFKENKKVSEKKFKEYLLVNQIANRTVELKGIKDSFNSNYVSYIKFKDIFGEKLNLDIYKEISEKSILWKCLYGDDKKIFEKKIKNEYGDILNKDEIKKINSFKFNTWGRLSEKLLTGIEFINLETGECYSSVMEALRRTNYNLMELLSSKFTLQESIDNGNKEMNEVSYRDLIEESYVSPSLKRAILQTLKIYEEIKKITGRVPKKVFIEMARGGDETMKNKKIPARQEQLKKLYDSCGNDIANFSIDIKKMKSSLSSYDNNSLRQKKLYLYYLQFGKCMYTGREIDLDRLLQNNDTYDIDHIYPRSKVIKDDSFDNLVLVLKNENAEKSNEYPVKKEIQEKMKSFWRFLKEKNFISDEKYKRLTGKDDFELRGFMARQLVNVRQTTKEVGKILQQIEPEIKIVYSKAEIASSFREMFDFIKVRELNDTHHAKDAYLNIVAGNVYNTKFTEKPYRYLQEIKENYDVKKIYNYDIKNAWDKENSLEIVKKNMKKNTVNITRFIKEEKGQLFDLNPIKKGETSNEIISIKPKLYNGKEEKLNEKYGYYKSLNPAYFLYVEHKEKNKRIKSFERVNLVDVNNIKDEKSLVKYLIENKKLVEPRLIKKVYKRQVILINDYPYSIVALDSNKLMDFENLKPLFLENKYEKILKNVIKFLEDNQGKSEENYKFIYLKKKDRYEKNETLESVKDRYNLEFNEMYDKFLEKLDSKDYKNYINNKKYKNLLDVKEKFIKLNLFDKAFTLKSFLDLFNRKTMADFSKVGLTKYLGKIQKISSNVLSKNELYLLEESVTGLFVKKIKL

SEQ ID NO: 236 - protein, 1367 aa, Fusobacterium sp.
  REGION 1..1367: note = Fusobacterium sp. 3_1_36A2
MKKQKFSDYYLGFDIGTNSVGWCVTDLDYNVLRFNKKDMWGSRLFDEAKTAAERRVQRNSRRRLKRRKWRLNLLEEIFSDEIMKIDSNFFRRLKESSLWLEDKNSKEKFTLFNDDNYKDYDFYKQYPTIFHLRDELIKNPEKKDIRLIYLALHSIFKSRGHFLFEGQNLKEIKNFETLYNNLISFLEDNGINKSIDKDNIKKLEKIICDSGKGLKDKEKEFKEIFNSDKQLVAIFKLSVGSSVSLNDLFDTDEYKKEEVEKEKISFREQIYEDDKPIYYSILGEKIELLDIAKSFYDFMVLNNILSDSNYISEAKVKLYEEHKKDLKNLKYIIRKYNKENYDKLFKDKNENNYPAYIGLNKEKGKKEVVEKSGLKIDDLIKVIKGYLPKPERIEEKDKTIFNEILNKIELKTILPKQRISDNGTLPYQIHEVELEKILENQSKYYDFLNYEENGVSTKDKLLKTFKFRIPYYVGPLNSYHKDKGGNSWIVRKEEGKILPWNFEQKVDIEKSAEEFIKRMTNKCTYLNGEDVIPKDSFLYSEYIILNELNKVQVNDEFLNEENKRKIIDELFKENKKVSEKKFKEYLLVNQIANRTVELKGIKDSFNSNYVSYIKFKDIFGEKLNLDIYKEISEKSILWKCLYGDDKKIFEKKIKNEYGDILNKDEIKKINSFKFNTWGRLSEKLLTGIEFINLETGECYSSVMEALRRTNYNLMELLSSKFTLQESIDNGNKEMNEVSYRDLIEESYVSPSLKRAILQTLKIYEEIKKITGRVPKKVFIEMARGGDETMKNKKIPARQEQLKKLYDSCGNDIANFSIDIKKMKSSLSSYDNNSLRQKKLYLYYLQFGKCMYTGREIDLDRLLQNNDTYDIDHIYPRSKVIKDDSFDNLVLVLKNENAEKSNEYPVKKEIQEKMKSFWRFLKEKNFISDEKYKRLTGKDDFELRGFMARQLVNVRQTTKEVGKILQQIEPEIKIVYSKAEIASSFREMFDFIKVRELNDTHHAKDAYLNIVAGNVYNTKFTEKPYRYLQEIKENYDVKKIYNYDIKNAWDKENSLEIVKKNMKKNTVNITRFIKEEKGQLFDLNPIKKGETSNEIISIKPKLYNGKEEKLNEKYGYYKSLNPAYFLYVEHKEKNKRIKSFERVNLVDVNNIKDEKSLVKYLIENKKLVEPRLIKKVYKRQVILINDYPYSIVALDSNKLMDFENLKPLFLENKYEKILKNVIKFLEDNQGKSEENYKFIYLKKKDRYEKNETLESVKDRYNLEFNEMYDKFLEKLDSKDYKNYINNKKYKNLLDVKEKFIKLNLFDKAFTLKSFLDLFNRKTMADFSKVGLTKYLGKIQKISSNVLSKNELYLLEESVTGLFVKKIKL

SEQ ID NO: 237 - protein, 1391 aa, Galbibacter sp.
  REGION 1..1391: note = Galbibacter sp. ck-I2-15
MKTILGLDLGTNSIGWALVKEAENENEVSDIIKLGVRVNPLTVDELTNFEGGKAYSNNAERTLKRGARRNLQRYKLRRENLIEILLKNGLINKDTALTEVGKETTHQTLKLRSKSANEKVSLEDLAKILLSINKKRGYKSSRKVNAEDDGVAIDGMEVAKLLYDENMTPGEYVLRLLESGKKHLPDFYRSDLQEEFNLVWKKQSEFYPLILTKELFFELHGKNKSQTWAICKEPLGIVGVKLKGSAKEQKFARYRLRKEALTQQIELEHLAIVLQDINNDSNKSSGYLGAISDRSKELFFNKETVGQYQYKQLQKDPNTSLKNQVFYRQDYLDEFEVIWRNQAKFYPQLTNELKQEIRDVVIFYQRKLKSQKNLISFCQFESTQQNYVEKETGKTKIRTIGRRVIPRSSPLFQEFKIWQSLNNLKFVNSESNQIIQFIELEDDVKKVVFDELNLRGDLKPNQVLKILSKYMKIGKLTQWKCNLEEIEGNRTNSALYNVFQMIAEEEGYGFNWGKKSALEIKSELKAIFSSIGINDSILDFDFSKKLDQQLSYQLWHLLYSAEEGNSKITEEDKFTYGNTGVALKKKLHLKFGFKPEYSTLISNLRFTSDYGNLSSKAISKILPFLRDGSDYSKACQYAGYNHSNSLSADELDNRELKPKLELLKKNSLRNPVVEKILNQMVNVVNQVIDNYGKPDEVRIELARELKKSAKERSQMTKNISDATRRNAEIKKYLSKEFGIPNPTKGDVIRYRLWEELASNGYKDLFRDKYIPKEKLFSNEIDIEHIIPKALLFDDSFSNKTLAFKVDNLKKADRTAFDFMSTDFSKDVDSYIGRIETLHKDGKISSSKYKKLMIPKSKLVDGFIERDLRNTQYIAKQARKMLLEVFKTVVPTTGKITDKLREDWDLINVMKELNFPKYKALGLTKKIERFDVGSEKIKSINVIEGWSKRNDHRHHAMDALAVAFTTHNHIQYLNYLNARKDIHHEMHGTIKSIENQIIGKDVMGKRRFIPPISDLRMKAKLQIESILISFKNKNKVVTWSVNKTKLKGKDNYNKRRQLTPRGQLHKETVYGKIKLIDPKPLKLNNKFTLVRASMIVDKVHREIVLQHLSKYDNNSEVAFDSKTIKIDPILIEGIGLKEVVCYEDVFKIRKKISGDNFKNEKHLEKVIDEKVKQILKDRVIKFQGNFKEAFSNLEENPIWLNKSKGIAVKSVAIKGVNNAESLHEGKDHFGDQILDKNKKQIPVDFVSTGNNHHVGIYEDKDGNLQERVVSFFEAVTRVNEGLPIIDKTYNSDIGWKFKFTMKQNEMFVFPSDDFDPNEFDLTDGKNAAKISPNLYRVQKIATKNYMFRHHLETVVTNDLEFTYKSIRSTGWLRNLVKVRINHLGEIVYVGEY

SEQ ID NO: 238 - protein, 1025 aa, unidentified
  REGION 1..1025: note = Description of Unknown: gamma proteobacterium HdN1 polypeptide
MGGYMPQLMRYRLALDIGSTSIGWAMIRLSMQNEPIAIIRMGVRIFSDGRNPKDGSSLAVTRRVARQMRRRRDRLLKRKTRLLNALVQKKFFPEDADARKALVVLNPYELRKEGLYRQLSGPEFGRALFHISQRRGFLSNRKTDKKDNDSSVLKKAIVDLRQQLEVENCQTIGEWLFKQQQSGKSVRARLRGKTQKDKAYDFYIDRAMIAHEFDTLWVSQAKYDPLLFNEDARAILRDILLYQRPLKPVKPGRCTLIPDESRAPLALPLTQQARIYQELNHLRITTPALGAQALTVAQRNTIAALLEKSDVTFVKIAKALGLTSTTEFNLQDIKRDRLKGNATAIILARNQYFGRRWHDFNADLQNLIVDKLVNEGSETALIEWLKANTDVDESAAERVSGVTLPEGYGSLSVAALRRLLPALKEDVVVYSEAVKRAGFDSHSALSLIEQTGELYQELPYYGEVLQRHVGFGSGDPNDSPERRFGKIANPTVHIGLNELRKIINALIKRYGNPAEVVVELARDLKLSREKRKEIQEEQKQRQDRNEKRIKDACEILGIDPLVIDRGKRREISQKMQLWDELNPKDAANRRCPYTGDQISIEKLLSAEVEIEHILPFSKTLDDSLNNKTVAMRRANRDKGNRTPYEAFGESLNPDYDYDAILQRASLMPREKRKRFASDGYQQWLRDDKDFLSRALNDTAYLSRIAKEYLTLICPPNSVRAIPGRMTAQLRAMFGLNRLLSEGGIKNREDHRHHAIDAAVIGVTDQGLLQKFSRASARTRELQLSRLVDDMPLPWDTYREHVTRALEHLVVSHKPDHGYQGKMHEDTAWGLRDNGQVTRRVRSEDGGPRQRLLENKNVVKINSTRDFSRHGIDEQGQVNAYKGYVGGSNYCIEIWIDEKGKWNSDVVSTFQAYQIVRELGEKAAWQKLRNPLLSLSAKPLVMRLIIDDVVKMQIAGQNKIMRVVKIAQNGQIFFAEHNEANVDARDKDKNNPFKYISKTAGSLQKAGGIHMAISPIGDARPVRYGR

SEQ ID NO: 239 - protein, 1397 aa, unidentified
  REGION 1..1397: note = Description of Unknown: gamma proteobacterium HTCC5015 polypeptide
MTKNYISPIAIDLGAKFTGVALYQYLEGADCTQEVAKGLLVDDRGNVTWSQEGRRGKRHQVRGYKRRKMAKRLLWLILDSEYGIKREEVTEPLLKFINGLLNRRGYTYISEEVDEESMNVSPLPFSEMMPDYFNSSAPLLEQLAKLLSDKNKLVRFRAEGKIPSNKNEFKKLLDTALDGKYKDEKKELSEAWGNILIASENVLKSTVDGHKSRSEYLANIKEDIKSNEELEKQISSKEIDGFYNLVGHLSNFQLRLLRKYFNDPNMSGVSYWDEKRLEKYFYQWVQGWHTKGGTDEAEKKNIILKTKGAPLLKTLKSLSADLTIPPYEDQNNRRPPKCQSVLLSDEKLTMHYPKWKEWVGQLVKQNDNAYLNENVTLANALHRIVERSRSIDPYQLRLLISITDAEKRNDLAGYKRLKLSLGSEVDEFLLLVKNIVDETKEAREGLWFETENKLFFKCGKTPPRKEKLKSTLLSAVLGKNLSDDEQSSFIEEFWKSGTPKIERRNVRGWCRLASQVQKTYGVYLKEYGLQQLHKLEAGKKLDDKPLALLYKNSGLIASKIGEALNIEPDEVSRFASPHSLAQIFNIIEGDVAGFNKTCRACTYENIWRMQEEKVESLLTNQLLSEIHGERKVPLKSAMCTRLSADSTRPFDGQMASIIEHIARKIAQHKIAQINDVPKEFSIDIPIIIESNQFSFTAELEEIKRGRGSAKAKKAKELGEKSKAGWVSKTERIKTSSEGICPYTGAPLGGSGEIDHIIPRSLTGRTKKTVFNSEANLIYCSSKGNHDKGNRVYVIEQLNDKYLKKQFSTSDVNLIKKKIKTTIQRFTEGGEKLRSFSELSREDQKAFRHALFVPELKSEVTSLLAVKNITRVNGTQAWLAKKIASLLAEHLDKQGRDYTLSAHQIDPWSVSKQRKMLASAEPIWAKKDPQPAASHVVDAVCTFLEALEQPHTASRLKTISSTSFEKTGWRSALIPDLIKVDALDRRPKYRRYNIGSTSLFKDGIYAERFLPILIDENGLMAGYDIDNSLKAKGADVVFESLSPFLLFKGEEVGAQSLSDWQERIDGRYLYMSIDKVKAFDYLQEKVGEKDIAAELLNSIHFTQRKTELRAKFSDDSGKKMKTLDAIRKSLKLTVTVNEIGKRKEKCGFSGTIGIPAKSAWENLLDEPLLETYWGTKMPPQEIWEKVYRKHFPRNIPNQAHRKVRKDFSLPVVDSVSGGFRVKRKTPNGYNYQLLAIDGYSAVGFKKEGDNVDFKSPALVPQIAESKSVTPISSELVHLDKNEIVYFDEWRKIDISDSDLKQFVSSLELAPGSQNRFYIRFTVDEDQFERHFKSALRVNGIQDLDTVNKTFDWNREIPSLLIPPRSNLFLLETGQKITFEYIANGANAEVKKAYSLRRA

SEQ ID NO: 240 - protein, 1186 aa, Gardnerella vaginalis
  REGION 1..1186: note = Gardnerella vaginalis 1500E
MEGNISYAIGIDVGLNSVGLAAIRLDNNGEPIRILKAMSVIHDAGIDPNGAKESDTRKAISGVARRVRRLYRQRRRRLQKLDFLLHSLGFPVVENKDLDFSDSFIPWIFRAKLADEYIADEKQRKQMLSVAIRHIARHRGWRNPYQSIKSMTQETEYSEFYNELLKNIEKFAPGVGCEGSTPAQLVRDYLLLQQGKASRRLRITTDEKRKNHPNSLNPILPRKLMQSDNMLEILNIFNVQHIDDKYVREQIINAVFYAKSPRGSAENRVGKDAITGKGKRALKASLAFQKYRIISTISNLRIRENSKERCLTIEEKQSVYKLLTTSTDESSKEKSAEAPLYTWIDVADCLGIERYKLRGVGSQIGDGESVGNRPPMLNSELAIIYANNKSLGKSLLTWWLDANRTQEDKEALIEILSNTVDIEAIHDNPEYQDKYGSAIAFIDSMDETEIAALENISLPDGRAAYSLETLDKLNKQMLETDDDLFEARKKLFNLPNNWRPSEAPIAEPTGNPSVDRVLKIVHRFLISAKNRWGNPERINIEHVRSGFKSKKMANSYKELLDKRTKGKENLKAMMRNSLHLGMSDSISDADIRRYEAVQRQNGQCLYCGSEITYHTCELDHIVPRKGPGSTNTRENLVATCSLCNAQKCNTPFSTWCEQSTYCKNHDISVDSAINRVRAFIFPPNSYDKRGANQFKKEVIARLKQKVGDEAFDNRSIESVAWMANELHRRIDWYYNSQNYQTNNGISDITNKAQTNVGVYAGSLTAIARRMSGIDGKLEFFDGRRKTRFDRRHHAVDASVIAMMTPGIAQILAIKCNLRETQLLQGNKVVPGGIDWKEYPTANDQGYQQYANWSVRMNALLKLLNEEMRADRIAVVNSIRLRYNNSSVHQYKVNALLKLHVGDEIDSGTIRRSSTPALYCALTRNPDYDVNNGLPENPNRAILLHDKKLNADDSITFFKAQAVQLFVREGSAEIGSSTHHLRIYEYFKKLKSGKIKKSYGMIRVFQNDLHRHIHEDLFSCDLPEQSISMRYADTEVAHAVQTGNSNYLGYLVPGDEIIVDFSHVKLSGNIGTFVEFLNKIGANCAAYNHWVVVGTDTEKVLILKPSMISSEGIDKLYSNCKRNNFDYSSYEKSINEILVGKGWRVSVNVLAKYNAETIRRNALGEVRWTSRSHLPISWSWNTGENRE

SEQ ID NO: 241 - protein, 1186 aa, Gardnerella vaginalis
  REGION 1..1186: note = Gardnerella vaginalis 284V
MEGNISYAIGIDVGLNSVGLAAIRLDDYGEPIRILKAMSVIHDAGIDPNGAKESDTRKAISGVARRVRRLYRQRRRRLQKLDFLLQSLGWPVVENKDLDFSDSFIPWIFRAKLADEYIADEEQRKQMLSVAIRHIARHRGWRNPYQSIKSMMQETEYSEFYNELLKNIEKLAPGVGCEGSTPAQLVRDYLLSQQGKASRRLRITTGGRRKNHPHSLDPVLPRKLMQSDNMLEILNIFNVQHIDDKYVREQIINAVFYAESPRGSAENRVGKDAITGKGKRALKASLAFQKYRIISTISNLRIRENSKERCLTIEEKQNVYKLLTTSIDKSSKRKSAEAPLYTWIDVADCLGIERYKLRGVGSQIGDGESVGNRPPMLNSELAILYANNKSLGQSLITWWLASNRTQEDKEALIEILSNTVDIEAIHDNPEYQDKYGSAIAFIDSMNETEIAALENISLPDGRAAYSLETLDELNKQMLETDDDLFEARKKLFNLPNNWRPAEAPIAEPTGNPSVDRVLKIVHRFLISAKNRWGNPERINIEHVRSGFQSKKMANSYKELLDKRTEGKENLKAMMRNSLHLGTSDSISDADIRRYEAVQRQNGQCLYCGSEITYHTCELDHIVPRKGPGSTNTRENLVATCSSCNAQKCNTPFATWCEQSTYCKNHDISADSAINRVRAFIFPPNSYDKRGANQFKKEVIARLKQKVGDEAFDNRSIESVAWMANELHRRIDWYYNSQNYQTNNGISDISNKAQTNVGVYAGSLTAIARRMSGIDGKLEFFDGRRKTRFDRRHHAVDASVIAMMTPGIAQILAIKCNLRETQLLQGNKVVPGGIDWKEYPTANDQGYQQYANWSVRMNALLKLLNEEMRADRIAVVNSIRLRYSNSSVHQYEVNALLKLHVGDEIDSETIRRSSTPALYCALTRNPDYDVNNGFPENPGRTILLHNKKLNADDSITFFKAQAVQLFVREGSAKIGNSIHHLRIYEYFEKLKSGKIKKSYGMIRVFQNDLHRHIHEDLFSCDLPEQSISMRYADTKVAHAVQTGNANYLGYLVPGDEIIVDFSHITLSENIGKFVEFLNKIGADCTAYRHWVVVGTDTEKVLILKPSMISSEGIDKLYSNCERNNFDYSSYEKSINEILAGKGWRVSVNVLAQYKAATIRRNALGEVRWASRSHLPISWSWDTGENRE

SEQ ID NO: 242 - protein, 1186 aa, Gardnerella vaginalis
  REGION 1..1186: note = Gardnerella vaginalis 5-1
MEGNISYAIGIDVGLNSVGLAAIRLDNNGEPIRILKAMSVIHDAGIDPNGAKESDTRKAISGVARRVRRLYRQRRRRLQKLDFLLHSLGFPVVENKDLDFSDSFTPWIFRAKLADEYIADEKQRKQMLSVAIRHIARHRGWRNPYQSIKSMTQETEYSEFYNELLKNIEKFAPGVSCEGSTPAQLVRDYLLSQQGKASRRLRITTDDRRKNHPNSLDPVLPRKLMQSDNMLEILNIFNVQHIDNKYVREQIINAVFYAKSPRGSAENRVGKDAITGKGKRALKASLAFQKYRIISTISNLRIRENSKERCLTIEEKQSVYKLLTTSTDEYSKEKSAEAPLYTWIDVADCLGIERYKLRGVGSQIEDGESVGNRPPMLNSELAILYANAKSLKQSLITWWLAANRTQEDKEAFIEILSNTVDIEAIHDNPEYQDKYGSVIAFIDSMDETEIAALENISLPNGRAAYSLETLDKLNKQMLETDDDLFEARKKLFNLPNNWRPSEAPIAEPTGNPSVDRVLKIVHRFLISAKNRWGNPERINIEHVRSGFQSKKMANSYKKLLDKRTEGKENLKAMMRNSLHLGTSDSISDADIRRYEAVQRQNGQCLYCGSEITYHTCELDHIVPRKGPGSTNTRENLVATCSSCNAQKCNTPFATWCEESTYCKNHDISVDSAINRVRAFIFPPNSYDKRGASQFKKEVIARLKQKVGDEAFDNRSIESVAWMANELHRRIDWYYNSQNYQTNNGISDITNKAQTNVGVYAGSLTAIARRMSGIDGKLEFFDGRRKTRFDRRHHAVDASVIAMMTPGIAQILAIKCNLRETQLLQGNKVVPGGIDWKEYPTANDQGYQQYANWSVRMNALLELLNEEMRADRIAVVNSIRLRYSNSSVHKDDVHALLKLHVGDEIDSETIRRASTPALYCALTRNPDYDVNNGLPENTDRTILLHDKKLNADDSITFFKSKAAQLFVREGSVEIGNSIHHLRIYEYFEKLKSGKVKKSYGMIRVFQDDLHRYIHEDLFSCDLPEQSISMRYADTKVAHAVQTGNANYLGYLVPGDEIIVDFSHVKLSGYIGEFVEFLNKIGANCAAYKHWVVAGTDDKTTLILKPSMISSEGIDKLYSNCERNNFDYASYEKSIDKILVDKGWRVSVNVLDQYKAATIRRNALGEPRWASRSHLPISWSWDTGENRE

SEQ ID NO: 243 - protein, 1392 aa, Gemella haemolysans
  REGION 1..1392: note = Gemella haemolysans ATCC 10379
MANKTWYLGLDIGSASVGWAATDTGYKIIRKNKKRLWGVRLFEEAKTAEDRRGYRSSRRRLARRKWRLNLLEELFTSEVKKVDENFFLRLKESQYHYEDKTHKVPYAIFNDKDYTDKDYYKDYPTIYHLRSKLMTEENPDIRKVFLAIHHIIKNRGHFLLQGQSFKDGNLNNLIKELLELDILHVGFEVTEEVVDKIADISLEKKTSKDKLNDIKELYPKEKQLLEVFRLIFGGKTSLDKLFAIDEYKELDAAIKSVSFKEKIYEEVRHDYEQVLSNYIELLDLAKLVYDSIILSDIKKEGKTLSESKVELFEKHRDDLLKLKNLVKNDSKLSEDKKVELYALIFKEDKDKGTNYVNYIRKSEEGKGCNYEDFKKFLVKELAKLEESSVKTEIIKDLELEQFLPLQRTKDNSVVPYQIHKEELVKILDNAARYHSFLNEKDESGYNVREKVIQLLEFRIPYYVGPLNSSKKAKEGGFAWSVRNTGYENTPVTPWNYSKVIDESASAEKFITNLTNKCTYLKGEDVLPKSSLLYSEFALLNELNALKYDGNRISLEARNTIIEKLFKQQGKKVTKTSIKNLLKAEGYIDGKGEITGIDITVKNDLKSYRDFKKILGNKFNSEHVENIILWITLYGESRKLIKAKIESVYGEVYSKDEITKMSRLVYKDWGRFSRKLLTELVSKKLYNEETGECLNIIGAMRQNNILFMELLADRFDYSKQIVEFNKELQEDVTEIAPEILDDLYVSPAVKRSIWQTVRIVEELKKIIGCAPAKIFVETTRSNQEKKKPTDSRKKQLELAYKAVKKDVKELEKEIGTINFDVLNDRLSSVEPSKLKAKKLYLYYTQLGRCMYSEEPINISELFDNNKYDIDHIYPQSKIKDDSFTNTVLVKRESNAAKTDRYPLGSDIQTPSNRRFWKFLKEKGLISDEKYNRLVRTEEFSDEELSGFIARQLVETSQSVKAVASILGELNPETSICYSKAENVSSFRQNFGKIKKGDRDSKNNDQLIKVREINDYHHAKDAYLNVVVGNVYDTKFTRNVFNFIKDKKDGRKYSLNKVFYENVSDSKTVAWEMDKTIHQVEKVMNNNNIMVTRRTSEQKGGLFDATVYKAKVAAKAKDGVYYPLKTSNSVVKDVAKYGGYTSIGIAYYSIFEYTIVNKKGEEKITRIIPIPIYISQNIKDSTALIEFGKSQIFCRAYEKIKDFKLLYRKLCIGSKININNYQYYIGGKSDERFYYDSAIQVTLDKKSEKYLKILSKYQNWKKENKDGELWENITKENNIELYNKLVEKMNSEIFTKKKSNKYNELNSEEIRNNFIKISVEEQAKVLLEILNLLTNKKSIFDLKSIDIKAARGKISFNLTSLIQFSIIEQSITGFYEKEITIIGDKGNDMENNNS

SEQ ID NO: 244 - protein, 1385 aa, Gemella morbillorum
  REGION 1..1385: note = Gemella morbillorum M424
MKNKTWYLGLGVGPTSIGWAATDSNYKLLRKNKKRLWGVRLFEEAKTAVDRRTFRAERRRLARRKWRISLLEELFAKEVSKNDPNFFLRLKESKYHFEDKSLMNEYILFNDKDYTDKDYYKEYPTIYHLRLSLTTEENPDIRKVYLAVHSMLKNRGHFLLQGQSFNDSNIDSVIKELLELETVKINFEVTDEVIHSLKKIALEKKNLSDKNNDVKKLYPKEKQLQEIFKLVFGGKTSLDKLYDIEEYKELDNSVKSISFKEKVYEEVRPDYEQILSNYIELLDLAKLVYDSIVLADIKKEGKTISESKVELYNKHKDDLANLKKLVKIDSKLSEDKKKEVYFTIFKEDKEKGTNYVNYTHRSQEGKSCSYEDFKKFLKKELEKLEDSPTKTTILEELDLETFLPLQRTKDNSVVPYQIHKEELVKILDNAAKYHSFLAEKDDSGYSTREKVVQLFEFRIPYYIGPLNAHHNTENGGYSWAIRKKGMESVPVTPWNFKDVIDESASAEAFVNNLKNKCAYLSGEDVLPKNSLLYSEYALLNELNALRYEGNRISVEARDVIVTKLFKEQGKKVTKKTIKELLKTEGFIDGKGEIVGIDNIVKNDLKSYRDFKKILADKFDKERVENIILWITLYGESRKLIKEKITKVYGDFYTVDEIEKMSRLTYKDWGILSRKLLTELVSEKLYNEETGECLNIIGAMRQGTILFMELLADKFDYMSQIKNHNKENKDDITEITPDILENLHASPAVKRSIWQTVRIVEELKTIIGCVPTKIFIETTKRNNAPYKVPTLNRNDLVTKYKTIREHEIFELEKELKNTLDFTLNKNRLINEEPSKLKATKLYLYYTQLGRCMYTGKKIDLGELFDNNNKYDIDHIYPQSKVKDGSFNNIVLVTKASNDMKADVFPLKSKFQTKENKIFWRFLKEKKLITEEKYNRLVRTEEFSNGELTGFITRQLVETSQAIKVISNVLRELNPETTICYSKAENVSSFRQSFGKIKEANRKAENNEKLIRVQEINDYYNAKDAYLSIVVGNVYDVKFTRNVHNFIKNNKDARRYSLNGLFYTDVKNANTIAWEMDKTVHVVEKTMNNNNILITRRTSEQKGALYDATLYKAKVAEKAKEGTYYPLKTTDSKIKDVGKYGGFTKIKIAYYSIFEYTLDGKKGKQKITRIVPIPIYISQNIKDDKALLEYAQTRLPGKDLKIKYRKLCIGSLVKINNFNYYIGGKTNNNFTFDSAVQVILDKDSESYIKELAKYLNWKKENKDGKLWESITEDKNIQLYDSLVKKMNTGIFIRKTPNKYTELLTLEVKNKFINIDIDEQVKLLLEILNLLTNKKFTSKLNEIGITASRGVCSFNLSNQSQFSIIEQSVTGVYEKEKLIIEKKKEGIL

SEQ ID NO: 245 - protein, 1003 aa, Gluconacetobacter diazotrophicus
MIDESLTFGIDLGIGSCGWAVLRRPSAFGRKGVIEGMGSWCFDVPETSKERTPTNQIRRSNRLLRRVIRRRRNRMAAIRRLLHAAGLLPSTDSDALKRPGHDPWELRARGLDKPLKPVEFAVVLGHIAKRRGFKSAAKRKATNISSDDKKMLTALEATRERLGRYRTVGEMFARDPDFASRRRNREGKYDRTTARDDLEHEVHALFAAQRRLGQGFASPELEEAFTASAFHQRPMQDSERLVGFCPFERTEKRAAKLTPSFERFRLLARLLNLRITTPDGERPLTVDEIALVTRDLGKTAKLSIKRVRTLIGLEDNQRFTTIRPEDEDRDIVARTGGAMTGTATLRKALGEALWTDMQERPEQLDAIVQVLSFFEANETITEKLREIGLTLAVLDVLLTALDAGVFAKFKGAAHISTKAARNLLPHLEQGRRYDEACTMAGYDHAASRLSHHGQIVAKTQFNALVTEIGESIANPIARKALIEGLKQIWAMRNHWGLPGSIHVELARDVGNSIEKRREIEKHIEKNTALRARERREVHDLLDLEDVNGDTLLRYRLWKEQGGKCLYTGKAIHIRQIAATDNSVQVDHILPWSRFGDDSFNNKTLCLASANQQKKRSTPYEWLSGQTGDAWNAFVQRIETNKELRGFKKRNYLLKNAKEAEEKFRSRNLNDTRYAARLFAEAVKLLYAFGERQEKGGNRRVFTRPGALTAALRQAWGVESLKKQDGKRINDDRHHALDALTVAAVDEAEIQRLTKSFHEWEQQGLGRPLRRVEPPWESFRADVEATYPEVFVARPERRRARGEGHAATIRQVKERECTPIVFERKAVSSLKEADLERIKDGERNEAIVEAIRSWIATGRPADAPPRSPRGDIITKIRLATTIKAAVPVRGGTAGRGEMVRADVFSKPNRRGKDEWYLVPVYPHQIMNRKAWPKPPMRSIVANKDEDEWTEVGPEHQFRFSLYPRSNIEIIRPSGEVIEGYFVGLHRNTGALIPTPVGPDSYVIA

SEQ ID NO: 246 - protein, 1050 aa, Gluconacetobacter diazotrophicus
MGENMIDESLTFGIDLGIGSCGWAVLRRPSAFGRKGVIEGMGSWCFDVPETSKERTPTNQIRRSNRLLRRVIRRRRNRMAAIRRLLHAAGLLPSTDSDALKRPGHDPWELRARGLDKPLKPVEFAVVLGHIAKRRGFKSAAKRKATNISSDDKKMLTALEATRERLGRYRTVGEMFARDPDFASRRRNREGKYDRTTARDDLEHEVHALFAAQRRLGQGFASPELEEAFTASAFHQRPMQDSERLVGFCPFERTEKRAAKLTPSFERFRLLARLLNLRITTPDGERPLTVDEIALVTRDLGKTAKLSIKRVRTLIGLEDNQRFTTIRPEDEDRDIVARTGGAMTGTATLRKALGEALWTDMQERPEQLDAIVQVLSFFEANETITEKLREIGLTLAVLDVLLTALDAGVFAKFKGAAHISTKAARNLLPHLEQGRRYDEACTMAGYDHAASRLSHHGQIVAKTQFNALVTEIGESIANPIARKALIEGLKQIWAMRNHWGLPGSIHVELARDVGNSIEKRREIEKHIEKNTALRARERREVHDLLDLEDVNGDTLLRYRLWKEQGGKCLYTGKAIHIRQIAATDNSVQVDHILPWSRFGDDSFNNKTLCLASANQQKKRSTPYEWLSGQTGDAWNAFVQRIETNKELRGFKKRNYLLKNAKEAEEKFRSRNLNDTRYAARLFAEAVKLLYAFGERQEKGGNRRVFTRPGALTAALRQAWGVESLKKQDGKRINDDRHHALDALTVAAVDEAEIQRLTKSFHEWEQQGLGRPLRRVEPPWESFRADVEATYPEVFVARPERRRARGEGHAATIRQVKERECTPIVFERKAVSSLKEADLERIKDGERNEAIVEAIRSWIATGRPADAPPRSPRGDIITKIRLATTIKAAVPVRGGTAGRGEMVRADVFSKPNRRGKDEWYLVPVYPHQIMNRKAWPKPPMRSIVANKDEDEWTEVGPEHQFRFSLYPRSNIEIIRPSGEVIEGYFVGLHRNTGALTISAHNDPKSIHSGIGTKTLLAISKYQVDRFGRKSPVRKEVRTWHGEACISPTPPG

SEQ ID NO: 247 - protein, 1371 aa, Gordonibacter pamelaeae
  REGION 1..1371: note = Gordonibacter pamelaeae 7-10-1-b
MNLRNVESYQVGLDIGTGSVGWAVLDDNGDLCRFKGKPTWGSRVFPTAETAAEARVHRGQRRRYDRRRQRIDLLQRFFADEVAKVDPEFFIRLNQARLHPENRDPAHADYRWPLFNGSNFTEKDYYRQFPTIYHLRAHLLKSDEPADIRLVYLALHNIVKHRGNFLHQDNPSLSARNANVGDAVEALCLALDEWCGAHDVECACDEAALAEALGDASLRPGEKRERAEAALGVEKAHKKLAKAVSSAVVGYAAEFGHVFFAESEGSKFALSNDEKVEAYVCPDEGRDLFDAMRAVHSSYVLMGILSEAQGELLSVCKVGEYERYKRDLETLKSLVRAYGPERYDEFFCGPFYEGTRDYDPGKAQGYTKYNLGASKLSHEDFLKEVQKLLKDIGAQADERYADIERAIEAGAFLRRLKTSDNGTIPYQLHLEEMDAIIERQAAFYPFLAQEKDKLKSLVSFRIPYYVGPLTQKNAARDGKGEARFAWSSRKPGMEDARVYPWNWEDVIDKDQSAEDFIRRMTGTCTYLKGEPVLARCSLDYELFCVLNELAGARWTQDGDKSYRFDAADRLGIVEDLFKKRKRVTYEAAEKWLARTHGPESGKSAGGAYHVSGGQGEDAFESQLSSHYDFCKILGVDELSDADEAMAEDIILWNTVFEDRSILKRKIKLAYGDRLGDAQVRKLCQKRYTGWGRLSGELLRGLRSATDNGPKTIMDILLEGDPNHARRMGAAMNLMEILHDDLLEFQAKIDEHNRERALAVGGMSVDEVTGSPALRRGINQALRVVDEIAGIAGKPPAHIYVEVTRDEGARNKGRRTTSRYRALEAALSSIKAQCADVYAELKERDPRALDDERLTLYFMQCGKCMYSGDALDINKLQTYQVDHILPQSYVKDDSFENKVLVRPDTNQRKGDTLLLDERLIARMRGFWRTLRDAELIGEKKFNNLTRTSVSDEQMKKFVSRQLVETGQMVKQVQQLLQARYPESEVQPVKAGVSHQLRVGCALAKSREINDFHHAHDAYLACQVGRFVQYRHSAVYSEPVKMAAVVKQFIKKQAEDYRRTRELPGSDGFIVSSFMTPGFDVKTGEVFRDAWDAGAEIDRIRRCFDYKDCFISRMPEETHGAFWDATIYSPRAAGKTLSLPLKRGLDPRKYGSYSREQFAYFFVYEAVKPKKKQRVLEFAPVPVRVASALANDPDALEDYARELAEAEGLVFERIRRRKVYKYQQIIVGDSRLYVTGREEVRNARQLAFSQDETKLICRIEQGEECEEGELLDLFRSMQRKYLACAPRLARLMKVAEMEEGFIAATASGKREVLLSLTSIAAAHRNSIDLKPIGRKGSSGQMKITFSKELSTNGILFVDSSVTGMFERRCRLGL

SEQ ID NO: 248 - protein, 1054 aa, Haemophilus parainfluenzae
  REGION 1..1054: note = Haemophilus parainfluenzae ATCC 33392
MENKNLNYILGLDLGIASVGWAVVEIDEKENPLRLIDVGVRTFERAEVPKTGESLALSRRLARSARRLTQRRVARLKKAKRLLKSENILLSTDERLPHQVWQLRVEGLDHKLERQEWAAVLLHLIKHRGYLSQRKNESKSENKELGALLSGVDNNHKLLQQATYRSPAELAVKKFEVEEGHIRNQQGAYTHTFSRLDLLAEMELLFSRQQHFGNPFASEKLLENLTALLMWQKPALSGEAILKMLGKCTFEDEYKAAKNTYSAERFVWITKLNNLRIQENGLERALNDNERLALMEQPYDKNRLFYSQVRSILKLSDEAIFKGLRYSGEDKKAIETKAVLMEMKAYHQIRKVLEGNNLKAEWAELKANPTLLDEIGTAFSLYKTDEDISAYLAGKLSQPVLNALLENLSFDKFIQLSLKALYKLLPLMQQGLRYDEACREIYGDHYGKKTEENHHFLPQIPADEIRNPVVLRTLTQARKVINGVVRLYGSPARIHIETGREVGKSYKDRRELEKRQEENRKQRENAIKEFKEYFPHFAGEPKAKDILKMRLYKQQNAKCLYSGKPIELHRLLEKGYVEVDHALPFSRTWDDSFNNKVLVLANENQNKGNLTPFEWLDGKHNSERWRAFKALVETSAFPYAKKQRILSQKLDEKGFIERNLNDTRYVARFLCNFIADNMHLTGEGKRKVFASNGQITALLRSRWGLAKSREDNDRHHALDAVVVACSTVAMQQKITRFVRFEAGDVFTGERIDRETGEIIPLHFPTPWQFFKQEVEIRIFSDNPKLELENRLPDRPQANHEFVQPLFVSRMPTRKMTGQGHMETVKSAKRLNEGISVIKMPLTKLKLKDLELMVNREREKDLYDTLKARLEAFNDDPAKAFAEPFIKKGGAIVKSVRVEQIQKSGVLVREGNGVADNASMVRVDVFTKGGKYFLVPIYTWQVAKGILPNKAATQYKDEEDWEVMDNSATFKFSLHPNDLVKLVTKKKTILGYFNGLNRATGNIDIKEHDLDKSKGKQGIFEGVGIKLALSFEKYQVDELGKNIRLCKPSKRQPVR

SEQ ID NO: 249 - protein, 1052 aa, Haemophilus sputorum
  REGION 1..1052: note = Haemophilus sputorum CCUG 13788
MKNTSLNYVLGLDLGISSVGWAVVEIDEKENPLSLIDVGVRTFERAETQKGESLALARRLARSARRLTQRRVARLKKAKRLLKSENILLSTDECLPHQVWQLRVEGLERKLERQEWAAVLLHLIKHRGYLSQRKNESKSENKELGALLSGVANNHKLLQQTTYRTPAELAVKKFEVEEGHIRNQQGSYTHTFSRLDLLSEMELLFSRQQHFGNPFTSEKLLENLTALLMWQKPALSGDAILKMLGKCTFENEYKAAKHTYSAERFIWITKLNNLRIQENGLERALNDNERLALMKQPYEKAKLTYAQVRSILNLSDEAIFKGLRYSGEDKKTSETKTVLMEMKAYHQIRLALEKNDLKTEWAELKVNSSLLDEIGTAFSLYKTDEDISTCLAGKLSQPVLNALLENLNFDKFIQLSLKALHKILPLMQQGLRYDEACAEIYGDHYGKKTEENHLLLPQIPADEIRNPVVLRTLTQARKVINGVVRLYSSPARIHIETGREVGKSYQDRRELEKRQEENRKQREKAISEIKTLFPNFSGEPKAKDILKMRLYYQQNAKCLYSGKPLELHRLLEQGYVEIDHALPFSRTWDDSFNNKVLVLANENQNKGNLTPFEWLDGKNNSERWKAFKALVETSAFPYTKKQRILSQKLDEKGFIERNLNDTRYVARFLCNFIADNMHLTGEGKRKVFASNGQITALLRGRWGLAKSREDNDRHHALDAVVVACSTVSMQQKITRFVRFEEGNVFTGERIDRETGEIIPLHFPAPWKFFREEVEIRIFSDNPKLELENRLIARPQANHEFVQPLFVSRMPTRKMIGQGHMETIKSAKRLNEGLSVIKMLLTKLRLKDLESMVNREREKELYEALKARLEAFNDEPAKAFAEPFMKKGGAIVKSVRVEQVQKSGVLVRDGNGVADNASMVRVDVFTKGGKYFLVPIYTWQVAKGILPNKAVIQGKNEEDWEVMDDATFRFSLHQNDLVKLVTKKKTIFGYFNGLNRATGNIDIKEHDLEKSKVKDGIHQSIGIKLALSFEKYQVDELGKNIRLCKSSKRQAVR

SEQ ID NO: 250 - protein, 1052 aa, Haemophilus parainfluenzae
MENKNLHYILGLDLGIASVGWAVVEIDEKENPLRLIDVGVRTFERAETQKGESLALSRRSARSARRLTQRRVARLKKAKRLLKSENILLSTDERLPHQVWQLRVEGLDRKLERQEWAAVLLHLIKHRGYLSQRKNESKSENKELGALLSGVASNHELLQQATYRTPAELAVKKFEVEEGHIRNQQGAYTHTFSRLDLLAEMELLFSRQQHFGNPFASEKLLENLTALLMWQKPALSGEDILKMLGKCTFEDEYKAAKNTYTAERFVWITKLNNLRIQENGLERALSDNERLMLIEQPYEKAKLTYAQVRSILNLSDDAIFKGVRYSGEDKKAIETKTTLMEMKAYHQIRKVLEGNNLKAEWVALKANPTLLDEIGTAFSLYKTDEDISAYLAGKLSQPVLNALLENLSFDKFIQLSLKALYKLLPLMQQGLRYDEACREIYGDHYGKKTEETHHFLPQIPADEIRNPVVLRTLTQARKVINGVVRLYGSPARIHIETGREVGKSYKDRHELKKRQEENRKQREKTISEIKTLFPNFSGEPKGKDILKMRLYYQQNAKCLYSGKPLELHRLFEQKYVEVDHALPLSRTWDDSFNNKVLVLANENQNKGNLTPFEWLDGKNNSERWRTFKALVETSAFPYAKKQRILSQKLDEKGFIERNLNDTRYVARFLCNFIADNMHLTGEGKRKVFASNGQITALLRRRWGLAKSREDNDRHHALDAVLVACSTVAMQQKITRFVRFKAGDVFTGERIDRETGEIIPLHFPTPWQFFKQEVEIRIFSDNPKLELENRLPDRPQANHEFVQPLFVSRMPTRKMTGQGHMETVKSAKRLNEGISMIKMPLTKLKLKDLELMVNREREKDLYDALKTRLEAFNDDPAKAFAEPFMKKGGAIVKSVRVEQVQKSGVLVRQGNGVADNASMVRVDVFTKDGKYFLVPIYTWQVAKGILPNKAVIQGKDEEDWEDIDDATFQFSLHPNDLISVKTKKDEFLGYFNGLNRHTGGINIRTHDLEKSKGKQGIFEGIGVKIALSFEKYQIDELGKNIRLCKPSKRQPVR

SEQ ID NO: 251 - protein, 1052 aa, Haemophilus sputorum
  REGION 1..1052: note = Haemophilus sputorum HK 2154
MKNTSLNYVLGLDLGISSVGWAVVEIDEKENPLSLIDVGVRTFERAETQKGESLALARRLARSARRLTQRRVARLKKAKRLLKSENILLSTDECLPHQVWQLRVEGLERKLERQEWAAVLLHLIKHRGYLSQRKNESKSENKELGALLSGVANNHKLLQQTTYRTPAELAVKKFEVEEGHIRNQQGSYTHTFSRLDLLSEMELLFSRQQHFGNPFTSEKLLENLTALLMWQKPALSGDAILKMLGKCTFENEYKAAKHTYSAERFIWITKLNNLRIQENGLERALNDNERLALMKQPYEKAKLTYAQVRSILNLSDEAIFKGLRYSGEDKKTSETKTVLMEMKAYHQIRLALEKNDLKTEWAELKVNSSLLDEIGTAFSLYKTDEDISTCLAGKLSQPVLNALLENLNFDKFIQLSLKALHKILPLMQQGLRYDEACAEIYGDHYGKKTEENHLLLPQIPADEIRNPVVLRTLTQARKVINGVVRLYSSPARIHIETGREVGKSYQDRRELEKRQEENRKQREKAISEIKTLFPNFSGEPKAKDILKMRLYYQQNAKCLYSGKPLELHRLLEQGYVEIDHALPFSRTWDDSFNNKVLVLANENQNKGNLTPFEWLDGKNNSERWKAFKALVETSAFPYTKKQRILSQKLDEKGFIERNLNDTRYVARFLCNFIADNMHLTGEGKRKVFASNGQITALLRGRWGLAKSREDNDRHHALDAVVVACSTVSMQQKITRFVRFEEGNVFTGERIDRETGEIIPLHFPAPWKFFREEVEIRIFSDNPKLELENRLIARPQANHEFVQPLFVSRMPTRKMTGQGHMETIKSAKRLNEGLSVIKMLLTKLRLKDLESMVNREREKELYEALKARLEAFNDEPAKAFAEPFMKKGGAIVKSVRVEQVQKSGVLVRDGNGVADNASMVRVDVFTKGGKYFLVPIYTWQVAKGILPNKAVIQGKNEEDWEVMDDATFRFSLHQNDLVKLVTKKKTIFGYFNGLNRATGNIDIKEHDLEKSKVKDGIHQSIGIKLALSFEKYQVDELGKNIRLCKSSKRQAVR

SEQ ID NO: 252 - protein, 1338 aa, Helcococcus kunzii
  REGION 1..1338: note = Helcococcus kunzii ATCC 51366
MQDYYLGLDIGTNSVGWAVTDENYNLLRKKGKDLWGVRLFKEAQPATERRGHRSSRRRTIRKSLRKQLLRELFEEEINAIDKDFFLRLDESKYWLEDKKIEGKYSLFNDENFTDKDYYEKFPTIFHLRKALIESDDKEDIRLYFLAINQMMKRRGHFLIDGKLSNVEDITPFKECIQNLINEELDTEIETEFYDKAIKIVSDYSLKKTEKKNLIKDLVKETDSIEDSKKIINIFNLLISGKSKVNGIFDDEEILEKIKEDNKEDFYLTSEKYEENLEYFSQLLDYRFELISSLKSIYDYIILQEVLKGKKYLSYAQVERYKNHKEDLRKLKQLIKKYDKNGKIYYQIFRDENFKKGYVAYLGYYKKNKKNVPVKKCDYDTFSKNIKSTLDKICDKEDPLYIELIDKIEKGGFLLKQIVSTNSVIPHQVHELELDKILENLEKNYPSFKEISDGVSKIDKIKMIFNFRIPYYVGPLNDYHKDKVNSNTWIVKNEGFENENIRPWNFSKIVDEHACEEEFIKRMINECSYIPGEKVLPKSSLLYSEYMVLNELNNLRVNGDKLNPKIKKEIVENIYKKERKVTLKKIRNFLIINNYVDSKVEFSGLSDGIKANMSSYIDFAEILDDNFDNNMVEDLIEQITIHVGNVKLLTEKISNKYPNLEKKQINKIVNLKFKDWARFSRKLLVGIEGTEKETGEINTIIGFLRETNENFMELMSNRYTFSEEISEIKKKYIPNKLSKQIVDDLYVSPAVKKMIWQVLNINDELIKVLGKQPKKIFIEMARGKEEKPEVKDSRKNKLIELYKNLGKEGKEWLNRIEDKTEADFRNRALYLYYTQMGRCMYTGEIIDIERLYDKELYDLDHIIPRKMKKDDSIHKNLVLVTRNSNQYEKKDNYPVPEVIKSRENVRHLWYALKKKGLITEEKYNRLTRINPLSDKELSEFIERQLVETRQTTKVVKDLFENYYTDSKIVTVKAGLVSELRRDFEVLKCREINDLNHAHDAFLNIIVGDVWSKKFTSNPYNFVKKNREKYTLNNIFTKNQKDLRGNEIWNCAEGKKRIIKTLNKPSVLFSVENFEQTGQLFDQNIIGKQDYKEKTSYVPIKGDERLQDISKYGGYRGISGAYFFIVEHTEKNKRVKTIESLPIYMKSYVEENGLLDFCTNEMKLVDPKIIVKKLNYKSEIIVDGFKYLISGKTENRLSLETNEYLYWNHTQTTDIKKILNINEKIELEKYNGDIESERENIIKYIQIILEKFKLKPFIKRRNLPNIEINFADYETEKLLQLLVNLIPLTTKYVSPVDLTVISGSKYAGKVLIPKKISNLNEVIFISKSITGIYESRRRII

SEQ ID NO: 253 - protein, 1007 aa, Helicobacter canadensis
  REGION 1..1007: note = Helicobacter canadensis MIT 98-5491
MKVLGFDIGINSIGWAFVENNELKDCGVRLFTKAENPKTKESLALPRRNARSSRVRLRRRRSRLLSLKHIISKEFGLHYEDYIALDGNLPKAYTGKIESIYKLRYEALSQAISKEDLARVILHIAKHRGYMNKNQKTSQDSEKGAILSAIKENSNKIKHYQTAGEYFYKELFENLRDGTKEFKNIRNKAMKNEKTGNMESTYYNTILASDLEKELKLILEKQQAYHNYSDTFIKEVLEIAFYQRPLKDFSHLVGSCTFYENEKRACKNSYSAWEFIALGKIINTLESIKKDTGEIFSNEIITQILKEVLDKGSLSYTKLRKMINLDEKVKFKGLKYDKEGVEKTNLIEFKKLKEFKKALGEHNLERKTLDEIATHITLTKDENQLKKQLEQYALSQNQIDALAELDFNDHINLSFKALYEILPLMEKGKRYDEACNELGLKAKTSNQKSEFLPAFCDSIFAQELTNPIVNRAISEYRKVLNRLLKKYGKMHKIHIELARDAGLSKEARNKIEKEQKENKDINDKAEKTCKEFGLKPNAKNILKIKLWREQGEICAYSGKKITIDDLKEDKALEVDHIYPYSRSYDDSYNNKVLVFIKENQLKLNQTPYEAFGSNQEKWSKIQVLAQKLPYKKKNRILDENFKNKDQIEFISRNLNDTRYATSLIAKYTKEYLEFLPLSDDEDISLKSGEKGSKTHVQTMNGMLTSVLRHAWGFSQKDRNNHLHHALDAIIIAYSTNSIIKAFSDFKKNQEILKAKLYAKKLTSEEYKNQSKFTGFEKYRSKILEKLDSIFVSKPPNKNTKGALHEQTFYSYQDILEEYKTQEGLKRALECGKVRKIGTKYVVNDRMVRLDIFKKDNKFYGIPIYTMDFALGVLPNKVVTIGTDKDKIKKEWKTIDETYEFCFSLYKGDLVLIQKKEMQESEFAYYNGFDISSASISLEKHDNKFENLTENQKLLFPKAKEGDVEVRGIGIQGLKVFKKYMVTPLGEIQETRTEARQNIQPRKKHGLR

SEQ ID NO: 254 - protein, 1023 aa, Helicobacter cinaedi
  REGION 1..1023: note = Helicobacter cinaedi CCUG 18818 = ATCC BAA-847
MKIYSFDIGVASIGWAFIENEVLQDCGIRIFTKAENPKNGASLALPRREARGVRKRLARRRGRLNTIKQLLCKEFGLQLEDYLSNDGELPKAYTASKANPLKSPYELRTLALSQKLDSKDLVRVILHIAKHRGYGNKHAKDSKDTESGKVKKAIEFNRKTLAEKGYRSVGEYLYREFFQQSRISQNNGATEFINVRNKAGNYEHCVAQDMLKEELESILNAQRQFGFSLKQDFESKLLTKIFEQRPLKSFADKVGNCCFIAGEKRAPKDSPSAIEFIALSRTINTLINLSKESGEIYNRAIILQIVESTLKKGEISYKELREIIRLDERLRFKDPRLDYSREIKEAEKVKFLEFKQLKGFKKALGESFTTLAISQLDEIAEHIALIKDRVKLNEKLESYALTKEQREALSNLSFSAHINLSLQALKQILPFMRGDNGEQCLDYDESVEKAGLKALSKDTLKGQMLPPLNEFEPYLSNPVVARALAEYRKVLNVLLKQYGSPHKIHIEYAREAKLSSTERQKYEKEQKDNYAANQAAHKKCQELGLEPSSTNLLKLKLWQEQGGLCLYSGAKITISYLQDPTALQVDHIYPYSRSFDDSYMNKCLVLTKANQEKGNRTPFEAFGTDSAKWGVITTLAQKLPHKKRRRILNTAFNDKEAGFKLRNLNDTSYIARLVADYTETYLEFLPLVESENTTLSKGQKGSKKHIAIVNGVLTSTMRYYLGFASKDRDNHLHHALDAVIIGFMNDSVIKAFSDFKKTQETSKAAYYAHTLSKQEYKKQRAFIQLPSGENFRVSVLEKVESVFVSKPPRKRVRGALHEATFYSPNDPKLLKNYGGTKGVERALALGKMRKVGAKIVSNGAMVRVDIFRHKSSGKFYGVPVYTMDFALGILPNKAVVVGKDQNGVIKDWLEMDSSYEFIFSLYKDDVILVQKKEMQRPELCYFVSFDTSGASIKVAKHDNNFSTLTENQKLLFSNATKEEVVGKSIGIQNLKVFEKWQVSVLGEVKRTQSYPRENISLASKAKK

SEQ ID NO: 255 - protein, 1023 aa, Helicobacter cinaedi
  REGION 1..1023: note = Helicobacter cinaedi CCUG 18818
MKIYSFDIGVASIGWAFIENEVLQDCGIRIFTKAENPKNGASLALPRREARGVRKRLARRRGRLNTIKQLLCKEFGLQLEDYLSNDGELPKAYTASKANPLKSPYELRTLALSQKLDSKDLVRVILHIAKHRGYGNKHAKDSKDTESGKVKKAIEFNRKTLAEKGYRSVGEYLYREFFQQSRISQNNGATEFINVRNKAGNYEHCVAQDMLKEELESILNAQRQFGFSLKQDFENKLLTKIFEQRPLKSFADKVGNCCFIAGEKRAPKDSPSAIEFIALSRTINTLINLSKESGEIYNRAIILQIVESTLKKGEISYKELREIIRLDERLRFKDPRLDYSREIKEAEKVKFLEFKQLKGFKKALGESFTTLAISQLDEIAEHIALIKDRVKLNEKLESYALTKEQREALSNLSFSAHINLSLQALKQILPFMRGDNGEQCLDYDESVEKAGLKALSKDTLKGQMLPPLNEFEPYLSNPVVARALAEYRKVLNVLLKQYGSPHKIHIEYAREAKLSSTERQKYEKEQKDNYAANQAAHKKCQELGLEPSSTNLLKLKLWQEQGGLCLYSGAKITISYLQDPTALQVDHIYPYSRSFDDSYMNKCLVLTKANQEKGNRTPFEAFGTDSAKWGVITTLAQKLPHKKRRRILNTAFNDKEAGFKLRNLNDTSYIARLVADYTETYLEFLPLVESENTTLSKGQKGSKKHIAIVNGVLTSTMRYYLGFASKDRDNHLHHALDAVIIGFMNDSVIKAFSDFKKTQETSKAAYYAHTLSKQEYKKQRAFIQLPSGENFRVSVLEKVESVFVSKPPRKRVRGALHEATFYSPNDPKLLKNYGGTKGVERALALGKMRKVGAKIVSNGAMVRVDIFRHKSSGKFYGVPVYTMDFALGILPNKAVVVGKDQNGVIKDWLEMDSSYEFIFSLYKDDVILVQKKEMQRPELCYFVSFDTSGASIKVAKHDNNFSTLTENQKLLFSNATKEEVVGKSIGIQNLKVFEKWQVSVLGEVKRTQSYPRENISLASKAKK

SEQ ID NO: 256 - protein, 1023 aa, Helicobacter cinaedi
MKIYSFDIGVASIGWAFIENEVLQDCGIRIFTKAENPKNGASLALPRREARGVRKRLARRRGRLNTIKQLLCKEFGLQLEDYLSNDGELPKAYTASKANPLKSPYELRTLALSQKLDSKDLVRVILHIAKHRGYGNKHAKDSKDTESGKVKKAIEFNRKTLAEKGYRSVGEYLYREFFQQSRISQNNGATEFINVRNKAGNYEHCVAQDMLKEELESILNAQRQFGFSLKQDFENKLLTKIFEQRPLKSFADKVGNCCFIAGEKRTPKDSLSAIEFIALSRTINTLINLSKESGEIYNRAIILQIVESTLKKGEISYKELREIIRLDERLRFKDPRLDYSREIKEAEKVKFLEFKQLKGFKKALGESFTTLARSQLDEIAEHIALIKDRVKLNEKLESYALTKEQREALSNLSFSAHINLSLQALKQILPFMRGDNGEQCLDYDESVEKAGLKALSKDTLKGQMLPPLNEFEPYLSNPVVARALAEYRKVLNALLKQYGSPHKIHIEYAREAKLSSTERQKYEKEQKDNYAANQAAHKKCQELGLEPSSTNLLKLKLWQEQGGLCLYSGAKITISYLQDPTALQVDHIYPYSRSFDDSYMNKCLVLTKANQEKGNRTPFEAFGTDSAKWGVITTLAQKLPHKKRRRILNTAFNDKEAGFKLRNLNDTSYIARLVADYTETYLEFLPLVESENTTLGKGQKGSKKHIAIVNGALTSTMRYYLGFASKDRDNHLHHALDAVIIGFMNDSVIKAFSDFKKTQETSKAAYYAHTLSKQEYKKQRAFIQLPSGENFRASVLEKVESVFVSKPPRKRVRGALHEATFYSPNDPKLLKNYGGTKGVERALALGKMRKVGAKIVSNGAMVRVDIFRHKSSGKFYGVPVYTMDFALGILPNKAVVVGKDKNGVIKDWLEMDSSYEFIFSLYKDDLLLVQKKEMAEPELCYFMSFNSSIAQISVAKHDNNFSTLTKNQKLLFSNATQEDVSGKSIGIQNLQVFEKWQVSVLGEVKRTQSYPRENISLASKAKK

SEQ ID NO: 257 - protein, 1024 aa, Helicobacter mustelae
MIRTLGIDIGIASIGWAVIEGEYTDKGLENKEIVASGVRVFTKAENPKNKESLALPRTLARSARRRNARKKGRIQQVKHYLSKALGLDLECFVQGEKLATLFQTSKDFLSPWELRERALYRVLDKEELARVILHIAKRRGYDDITYGVEDNDSGKIKKAIAENSKRIKEEQCKTIGEMMYKLYFQKSLNVRNKKESYNRCVGRSELREELKTIFQIQQELKSPWVNEELIYKLLGNPDAQSKQEREGLIFYQRPLKGFGDKIGKCSHIKKGENSPYRACKHAPSAEEFVALTKSINFLKNLTNRHGLCFSQEDMCVYLGKILQEAQKNEKGLTYSKLKLLLDLPSDFEFLGLDYSGKNPEKAVFLSLPSTFKLNKITQDRKTQDKIANILGANKDWEAILKELESLQLSKEQIQTIKDAKLNFSKHINLSLEALYHLLPLMREGKRYDEGVEILQERGIFSKPQPKNRQLLPPLSELAKEESYFDIPNPVLRRALSEFRKVVNALLEKYGGFHYFHIELTRDVCKAKSARMQLEKINKKNKSENDAASQLLEVLGLPNTYNNRLKCKLWKQQEEYCLYSGEKITIDHLKDQRALQIDHAFPLSRSLDDSQSNKVLCLTSSNQEKSNKTPYEWLGSDEKKWDMYVGRVYSSNFSPSKKRKLTQKNFKERNEEDFLARNLVDTGYIGRVTKEYIKHSLSFLPLPDGKKEHIRIISGSMTSTMRSFWGVQEKNRDHHLHHAQDAIIIACIEPSMIQKYTTYLKDKETHRLKSHQKAQILREGDHKLSLRWPMSNFKDKIQESIQNIIPSHHVSHKVTGELHQETVRTKEFYYQAFGGEEGVKKALKFGKIREINQGIVDNGAMVRVDIFKSKDKGKFYAVPIYTYDFAIGKLPNKAIVQGKKNGIIKDWLEMDENYEFCFSLFKNDCIKIQTKEMQEAVLAIYKSTNSAKATIELEHLSKYALKNEDEEKMFTDTDKEKNKTMTRESCGIQGLKVFQKVKLSVLGEVLEHKPRNRQNIALKTTPKHV

SEQ ID NO: 258 - protein, 1688 aa, Ignavibacterium album
MEFKKVLGLDIGTNSIGCALLSLPKSIQDYGKGGRLEWLTSRVIPLDADYMKAFIDGKNGLPQVITPAGKRRQKRGSRRLKHRYKLRRSRLIRVFKTLNWLPEDFPLDNPKRIKETISTEGKFSFRISDYVPISDESYREFYREFGYPENEIEQVIEEINFRRKTKGKNKNPMIKLLPEDWVVYYLRKKALIKPTTKEELIRIIYLFNQRRGFKSSRKDLTETAILDYDEFAKRLAEKEKYSAENYETKFVSITKVKEVVELKTDGRKGKKRFKVILEDSRIEPYEIERKEKPDWEGKEYTFLVTQKLEKGKFKQNKPDLPKEEDWALCTTALDNRMGSKHPGEFFFDELLKAFKEKRGYKIRQYPVNRWRYKKELEFIWTKQCQLNPELNNLNINKEILRKLATVLYPSQSKFFGPKIKEFENSDVLHIISEDIIYYQRDLKSQKSLISECRYEKRKGIDGEIYGLKCIPKSSPLYQEFRIWQDIHNIKVIRKESEVNGKKKINIDETQLYINENIKEKLFELFNSKDSLSEKDILELISLNIINSGIKISKKEEETTHRINLFANRKELKGNETKSRYRKVFKKLGFDGEYILNHPSKLNRLWHSDYSNDYADKEKTEKSILSSLGWKNRNGKWEKSKNYDVFNLPLEVAKAIANLPPLKKEYGSYSALAIRKMLVVMRDGKYWQHPDQIAKDQENTSLMLFDKNLIQLTNNQRKVLNKYLLTLAEVQKRSTLIKQKLNEIEHNPYKLELVSDQDLEKQVLKSFLEKKNESDYLKGLKTYQAGYLIYGKHSEKDVPIVNSPDELGEYIRKKLPNNSLRNPIVEQVIRETIFIVRDVWKSFGIIDEIHIELGRELKNNSEERKKTSESQEKNFQEKERARKLLKELLNSSNFEHYDENGNKIFSSFTVNPNPDSPLDIEKFRIWKNQSGLTDEELNKKLKDEKIPTEIEVKKYILWLTQKCRSPYTGKIIPLSKLFDSNVYEIEHIIPRSKMKNDSTNNLVICELGVNKAKGDRLAANFISESNGKCKFGEVEYTLLKYGDYLQYCKDTFKYQKAKYKNLLATEPPEDFIERQINDTRYIGRKLAELLTPVVKDSKNIIFTIGSITSELKITWGLNGVWKDILRPRFKRLESIINKKLIFQDEDDPNKYHFDLSINPQLDKEGLKRLDHRHHALDATIIAATTREHVRYLNSLNAADNDEEKREYFLSLCNHKIRDFKLPWENFTSEVKSKLLSCVVSYKESKPILSDPFNKYLKWEYKNGKWQKVFAIQIKNDRWKAVRRSMFKEPIGTVWIKKIKEVSLKEAIKIQAIWEEVKNDPVRKKKEKYIYDDYAQKVIAKIVQELGLSSSMRKQDDEKLNKFINEAKVSAGVNKNLNTTNKTIYNLEGRFYEKIKVAEYVLYKAKRMPLNKKEYIEKLSLQKMFNDLPNFILEKSILDNYPEILKELESDNKYIIEPHKKNNPVNRLLLEHILEYHNNPKEAFSTEGLEKLNKKAINKIGKPIKYITRLDGDINEEEIFRGAVFETDKGSNVYFVMYENNQTKDREFLKPNPSISVLKAIEHKNKIDFFAPNRLGFSRIILSPGDLVYVPTNDQYVLIKDNSSNETIINWDDNEFISNRIYQVKKFTGNSCYFLKNDIASLILSYSASNGVGEFGSQNISEYSVDDPPIRIKDVCIKIRVDRLGNVRPL

SEQ ID NO: 259 - protein, 1092 aa, Ilyobacter polytropus
MKYSIGLDIGIASVGWSVINKDKERIEDMGVRIFQKAENPKDGSSLASSRREKRGSRRRNRRKKHRLDRIKNILCESGLVKKNEIEKIYKNAYLKSPWELRAKSLEAKISNKEIAQILLHIAKRRGFKSFRKTDRNADDTGKLLSGIQENKKIMEEKGYLTIGDMVAKDPKFNTHVRNKAGSYLFSFSRKLLEDEVRKIQAKQKELGNTHFTDDVLEKYIEVFNSQRNFDEGPSKPSPYYSEIGQIAKMIGNCTFESSEKRTAKNTWSGERFVFLQKLNNFRIVGLSGKRPLTEEERDIVEKEVYLKKEVRYEKLRKILYLKEEERFGDLNYSKDEKQDKKTEKTKFISLIGNYTIKKLNLSEKLKSEIEEDKSKLDKIIEILTFNKSDKTIESNLKKLELSREDIEILLSEEFSGTLNLSLKAIKKILPYLEKGLSYNEACEKADYDYKNNGIKFKRGELLPVVDKDLIANPVVLRAISQTRKVVNAIIRKYGTPHTIHVEVARDLAKSYDDRQTIIKENKKRELENEKTKKFISEEFGIKNVKGKLLLKYRLYQEQEGRCAYSRKELSLSEVILDESMTDIDHIIPYSRSMDDSYSNKVLVLSGENRKKSNLLPKEYFDRQGRDWDTFVLNVKAMKIHPRKKSNLLKEKFTREDNKDWKSRALNDTRYISRFVANYLENALEYRDDSPKKRVFMIPGQLTAQLRARWRLNKVRENGDLHHALDAAVVAVTDQKAINNISNISRYKELKNCKDVIPSIEYHADEETGEVYFEEVKDTRFPMPWSGFDLELQKRLESENPREEFYNLLSDKRYLGWFNYEEGFIEKLRPVFVSRMPNRGVKGQAHQETIRSSKKISNQIAVSKKPLNSIKLKDLEKMQGRDTDRKLYEALKNRLEEYDDKPEKAFAEPFYKPTNSGKRGPLVRGIKVEEKQNVGVYVNGGQASNGSMVRIDVFRKNGKFYTVPIYVHQTLLKELPNRAINGKPYKDWDLIDGSFEFLYSFYPNDLIEIEFGKSKSIKNDNKLTKTEIPEVNLSEVLGYYRGMDTSTGAATIDTQDGKIQMRIGIKTVKNIKKYQVDVLGNVYKVKREKRQTF

SEQ ID NO: 260 - protein, 1354 aa, Indibacter alkaliphilus
  REGION 1..1354: note = Indibacter alkaliphilus LW1
MKKILGLDLGTTSIGWAFIKEPEKDVVGSEIVDMGVRIVPLSSDEENDFAKGNTISINADRTLKRGARRNLQRFKQRRNALLETFKEKNLIPSNFQYAEDGPSSTFSTLKLRDKAAKEKIELDDFVKVLLQINKKRGYKSSRKAMSEEDEGTAIDSMGIAKELYENDLTPGQWVYEALKNGRKNVPDFYRSDLQEEFKKIVNYQSEFYPDILNTSFVEDWMGKASTPTKQYFNKRGVQLAENKGKREERRLQEYKWRAEAVNFKIDLSEIALILSQINSQISNSSGYLGAISDRSKELYFKNLTVGQYLYQQVKKNPHTRLKGQVFYRQDYLDEFEKIWSVQSSFYPQLNDELKQEVRDVTIFFQRRLKSQKHLISNCEFEEHHKVVPKSHPIFQEFRIWQNLNNLTLIKKDNLNEKCELALEDKTALANELAFKKELSVKDALKVLGLKPSDWEFNFTKIEGNRTNHAFFEAFAKIIELEDGEPIDLGNLKADDILDQFSEAFLRIGIDTELLQVNSDIEGAEYEKQSYIQFWHLLYSSEDDQKLKQNLIRKFGFKPEHAKILASISLQDDHASLSSRAIKKILPHLQSGLIYDKACTYAGYNHSSSFTKDENEKRELRAELELLKKNSLRNPVVEKILNQMINVVNAILKDPNLGRPDEIRVEMARELKANAEQRKNMTSNIASATRDHEKYREILKKEFGLKRVTKNDLLRYKLWLETDGISLYTGKPIEASKLFSKEYDIEHIIPKARLFDDSFSNKTICERQLNIDKANVTAFSFLQNKLSADEFEQYQSRVKSLYGKLSKAKIQKLLMANDKIPEDFIARQLQETRYISKKAKEILFEITMRVSVTTGTITDKLREDWGLVEIMKELNWEKYDKLGLTYTIEGKHGERLNKIKDWNKRNDHRHHAMDALTVALTKPAYIQYLNNLNAKAIGNKKGTEIFAIEQKYLKRENGKLCFIPPIENIRAEAKKHLSKILVSYKAKNKVVTINKNKTKKKAGFNEQTALTPRGQLHKETVYGKSFHYSTKFEKIGASFDAQKINTVAKKEEREALLKRLAENGNDPKKAFTGKNSLNKMPIYLDLGKNIKLSEKVKTVVLEQNYTIRKNIDPDLKVDKVIDVGIKRILESRLEEFGGNAKLAFSNLEENPIWLNKEKGIPIKRVKISGVSNVESLHVKKDHFGEKILDEEGNEIPVDFVSTGNNHHVAIYEDEDGNLQDEVVNFYEAVIRRNQGESIIKYRHEEGWNFLYSIKQNEFFVFPSQDFNPNDFDLLDPKNYDLISPNLYRAQKFSKVMYGNSAVRDYVFRHHLETVLNDVKELKDVAYKQLKSLQYLNGIKKVRLNHLGQIIQVGEY

SEQ ID NO: 261 - protein, 1397 aa, Joostella marina
  REGION 1..1397: note = Joostella marina DSM 19592
MKKVLGLDLGTNSIGWALVNEATKEEKKEGKSSEIIKLGVRVNPLTVDEKTNFEKGRPLSTNADRTLKRSARRNLQRYKLRRRNLIEILIKNGFITKDTPLTETGKDTTHQTLKLRAKSAKEKVDLKDFAKILLTINKKRGYKSSRKVNSDEDGLAIDGMAVAKHLYEQNLTPGQYVLNLLQKNKKYVPDFYRSDLQEEFKNIWNNQKTYYFDILTDTLFEELKDKNKSQTWAICKKPFDIAGIKQIGKASDKRLERYKWRTEGLTQKLNLEYLAIALQEINNDINKSSGYLGAISDRSKELFFNKETVGENLYRQLVKTPHTSLRNQVFYRQDYLDEFETIWETQAKFYPQLTHTLKEEIRDVIIFYQRKLKSQKSLISFCQFESWEQTYIEKETGKSKTRTVGRKVIPKSSPLFQEFKIWQNLNSLEFRNSDEGEIIEFIKLDEDIRQTVFEELNLRGNLKPNDVLKILGNYISLGKVSQWKCNFEEIEGNRTNAALYNVYQIIAENEGYGFDWAKKTASEINKELKNIFPQLGIDASILDFDFTQANFDKQTSYQLWHLLYSAEEDFKISEEDKVLYGNSSVSLKKKLHQKYGFKPEYTKLLTNISLQPDYGNLSAKAICNILPYLKENNVYSEACDLTGYNHSNFLTAEEQAKRPLKPILELLKKNSLRNPVVEKILNQMVNVVNQVIETYGKPDEIRIELTRELKKSAKERANMTKSIADATRRNDDYRKTIIKEFGIPNPTKSDVVRYRLWQELASRGYKDIFTDTEIKPQELFSNKIDIEHIIPKALLFDDSFSNKTLAFKKDNLKKANRTAYDFIANDYAPNLENYIERVESLHKDRKITRAKRNKLLMLQSKLPDGFIERDLRNSQYITKEAKKMLYEVCRTVVSTSGSITDKLREDWDLINVMKELNFPKYKALGLTEKIERYDIGAEKMKEVEIIEDWNKRNDHRHHAIDALTVAFSTHSHIQYLNHLNARRDEGHKKHAAIIAIESTITEKEGNKKRRFIAPLPNFRLQAKEHIESILVSFKNKNKVVTNNINKTKRIKKDKFNTKVQLTPRGQLHKETIYGKIKQPLEKHIKLNKSFTLEQAKLIIDKRQREKVLNHLEKYAHNSDIAFNSKTLKKNPLLISDEPLKEVLCFEEVFTIRKDISYDNFKNEKQLDKVIDEKVKQALKERINQYNGDFREAFSDIERNPIWLNKAKGICVKRATIKGVSNAEPLHTAKNHLGEEVLTENKEQIPVDYVSTGNNHHVAIYEDEDGNLQEKVVSFYEAVIRVNEGLPIIDKEYNKSLGWTFKFTMKQNEMFVFPSEDFNPTEIDLLDQKNASLISPNLFRVQKFTIKDYFFRHHLETTVENNNTLKNTTWRREGLSGIYGIIKIRLNHLGEIVQVGEY

SEQ ID NO: 262 - protein, 1060 aa, Kingella kingae
  REGION 1..1060: note = Kingella kingae PYKK081
MAAKSLNYILGLDLGIASCGWAVVEMDEQENPLRLIDVGVRTFEEAENPKDGSSLAETRRLARAQRRLISRRANRMNKLCRLLKQENVLQANDYDEKGLIIGLPNQAWELRAQGLDRKLEPKEWAAVLIHLVKHRGYLSQRKNESQTADKELGALLSGMNHNHQLLQSQSNQYRTPAELAIKQFATQDGHIRNQRGAYTHTFNRLDLQNELNQLFDAQTRLGNPHVSGSLKTAINDLLMNQKAALSGDAILEMLGRCTFEPSEYKAAKNTYSAERFVWLGKLTNLRIQDNGLESALSREQRELLLNEPYNKTKLTYQQVRKLLRLPETAFFKGLRYGKDNAESATFMEMKSYHAIRKSLENKSLKSEWEKLKTQPKLLDLIGTAFSIYKTDDEIAGCLKNQLPENVIIALQGQLNFSNFMELSLKALEKLLPLMEQGLRYDEACTQIYGNRHEKIADKTEKFLPNIPADKLRNPVVLRTLTQARKVINAIIRRYGSPARVHIETGREVGKSFSDRDKLKKQQEENQEQRRRAIDEWKQFFPNAAHEPKAVDILKLRLYQLQQGKCLYSGLPIDVRRLPEKGYVEIDHALPFSRTWDDSFNNKILVLASENQNKGNQTPYEYLRGADNSESWRLFVENVQNCQFSPNKKQKIMAKQLDEKGFLERNLNDTRYVSRFLCQFISEHLHLTGKGKKRVFASNGQITALLRGRWGLSKNREENDRHHAVDAVVVACSTVAMQQKITQFVRYQKGNVFTGERIDKETGEVISIHFPTPWEHFREEVMIRVFDDNPLRTLPEKLPNRPEALHEYVMPLFVSRMPTRKMTGQGHKETIKSAKRLDEKISVLRVPLTQLKLNDLENMVNREREPALYEALKARLEQFKNDPAKAFAEPFFKQGGQQVKAVRVEIVQKSGMLLRKINGVADNGSMVRVDVFEKSGKFYLVPIYAWQVAEGILPNYAVVAHKDESDWILMDESYHFKFALYKNDLLEVQTKKGGIMGYFASLDRATGAITIREHDRDKKKCKDGEHRSIGVKMASSFKKLQVDELGKNIHETRSRKRPNIG

SEQ ID NO: 263 - protein, 1391 aa, Kordia algicida
  REGION 1..1391: note = Kordia algicida OT-1
MKKILGLDLGTNSIGWALVNEAEHEHEQSSIVKLGVRVNPLSVDEKTNFEKGRPLSINADRTSKRSARRNLQRFKLRRKNLINLLLKHHIISNETILTEVGKNTTHQTLKLRSKATQEKISLEEFARILLSINKKRGYKSSRKEKNEDEGFTIDGMAIAKELYDNQLTPGQYVYNILQDGKNYIPDFYRSDLQAEFDDVWQFQKKFYSSILTDEFYLKLKGQGKENTRKLFLAIHQVYTAENKGKRDAVKLQYYKWRSEAVKKQLSIEEVAYVLVEINNNINKSSGYLGAISDRSKALYFNNETVGEYLYGQLVKNRHNSLRNQVFYRQDYLDEFEKIWETQAKFYDELTNELKQEIRDVVIFYQRKLKSQKHLISDCLFEKHHKAIPKSSPLFQEFKIWQNLNYLEFVHTQSKEKIFFSELDDETRQFVFAELNIRGTLKIKEIKKLIGLETPVYWKSNFDEIEGNRTNQVLYNVYQNIADDLGYGFDWSKKHAFEINAELQAIFKDVGIDTAILNFDASIEENDFDKQKSYQLWHLLYSAEDTDKATEEDKLIYGNINTKLKKQLHQKYGFEAKYGNLLANISLQQDYGNLSAKAIKKILPYLESGNSFYEACTIVGYNPSNSLTKEQQQNRKLKDKLELLPKNSLRNPVVEKILNQKVNLINQLIDEYGKPDEVRIELARELKKSAKQRADLSKHINDATLKNQNIRKTLQKDFGIQNPSKNDVIRYKLYDELKDNGYKTLFTNKYIPKEQLFSKDVDIEHIIPKAILFDDSFSNKTLAYRNVNLAKADATAFDFISSKHLDDLDNYKARVETLFQSKRISKGKYKKLLMTRQNLPEDFIERDLRNSQYIAKKATAMLKEVFRSVVPTSGRITDKLREDWDLVNVMKELNLPKYRTLGLTEFIERKNGNKIEQIIDWTKRNDHRHHAMDALTVAFTTHNHIQYLNNLNVTHGLNGVDTDHEKSRLYAIKQAITKVYIVGKTKKRKFIPPMENFRSHAKNHLEGILISFKNKNKVVTKNKNRTKTKTKGVFNEKIQLTPRGQLHKETIYGHAKKVIVTKEKVSSKFTHEKILQVTKPAYREALLKRLASFKNDPKKAFSGKNALSKNPLYFDITSGKKVPDTVKLSYFENSYVIRKEVNSDNFKNEKSLQKVLDVGIRRILEKRLADYNGNAKEAFSNLEKNPIWKDKEKGVCIKKVRIEALKNAEPLHVKKDHLGKIILDDENKSTPVDFISTGNNHHVAIYEDKDGKLHDKVVSFYEVVSRVNLGLPIIDKSFNSHLDWKFLFSMKQNEMFVFPSEDFNPKEIDIGNPKNNELISKYLFRVQKFSKVTYGNSAVRDYVFRHHLETELIDKKELKGITYYQLKSIGMLEKLVKVRINHIGKIVHIGEY

SEQ ID NO: 264 - protein, 1314 aa, Lactobacillus animalis
  REGION 1..1314: note = Lactobacillus animalis KCTC 3501
MLKKDYSIGLDIGTNSVGHAVVTDDYKVPTKKMKVFGDTSKKTIKKNMLGVLLFNEGQTAADTRLKRGTRRRYTRRKNRLRYLQEIFAPELAKVDPNFLYRLEESSLVAEDKKYDVYPIFGKREEELLYHDTYKTIYHLRSALANNDQPADLRLVYLALAHIIKYRGNFLLEGEIDLRTTDINKVFAEFSETLNENSDENLGKLDVADIFKNNTFSKTKKSEELLKLSGAKKNQLAHQLFKMMVGNMGSFKKVLGTDEEHKLSFGKDTYEDDLNDLLAEAGDQYLDIFVAAKKVYDAAILASILDVKDTQTKTVFSQAMIERYEEHQKDLIELKRVFKKYLPEKCHDFFSEPKISGYAGYIDGKVSEEDFYKYTKKTLKGIPETEEILQKIDANNYLRKQRTFDNGAIPHQVHLKELVAIVENQGKYYPFLRENKDKFEKILNFRIPYYVGPLARGNSKFAWLTRAGEGKITPYNFDEMIDKETSAEDFIKHMTINDLYLPTEPVLPKHSLLYERYTIFNELAGVRYVTENGEAKYFDAQTKRSIFELFKLDRKVSEKMVIKHLKVVMPAIRIQALKGLDNGKFNASYGTYKDLVDMGVAPELLNDEVNSEKWEDIIKTLTIFEGRKLIKRRLENYRDFLGEDILRKLSRKKYTGWGRLSAKLLDGIYDKKTHKTILDCLMTEDYSQNFMQLINDDNYSFKETIKNAQVIEKEETLAKTVQELPGSPAIKKGILQSLEIVDEIIKVMGYKPKSIVVEMARETQKTHGTRKREDRVQQIVENLKDANELPEKLPSNAELSDERKYLYCLQNGRDMYTGAPLDYDHLQFYDVDHIIPQSFLKDDSIENKVLTIKKENVRKTNGLPSEAVIQKMGSFWKKLLDAGAMTNKKYDNLRRNLHGGLNEKLKERFIERQLVETRQITKYVAQLLDQRLNYDGNGVELDEKIAIVTLKAQLASQFRSEFKLRKVRALNNLHHAHDAYLNAIVANLIMAKYPELEPEFVYGKYRKAKFKGLGKATAKNTLYANVLYFLKENEVYPFWDKARDLPTIKRYLYRAQVNKVRKAERQIGGFSDEMLVPKSDSGKLLPRKEGLDPVKYGGYAKAVESYAVLITADEVKKGKTKKVKTLVNIPIIDSKKYEADPTAYLASRGYTNVTNSFILPKYSLLEDPEGRRRYLASFKEFQKANELILPQHLVELLYWVNAKDGEQKLEDHKAEFKELFDKIMEFADKYVVAPKNSEKIRRLYEENQDATPMELGKNFVELLRYTADGAASDFKFFGENIPRKRYNSAGSLLNGTLIYQSKTGLYETRIDLGKL

SEQ ID NO: 265 - protein, 1377 aa, Lactobacillus brevis
  REGION 1..1377: note = Lactobacillus brevis subsp. gravesensis ATCC 27305
MESNHDGEQVKYTLGLDIGTSSIGYAAIDKHQKPIRAKGKHVIGVRLFQEGQTAADRRAFRTTRRRLKRRKWRLNLLNRLFDPYLSEVDPNFLPRLRQSNLSPKDDNKHFNGSTLFPDKTDAAFYRQYPTMYHLRYALMTEKRKFDIREVYLAIHHIVKYRGNFLNSATVDSFKTSNIDFTSQFDRLNELYRQVILDEPFQINMDQVDEMTNKLLDNDALKLDTQKQVAKLLPVIYNDKPIDKQYTRIATEFSKAILGYKTKLDVILNLDTQNAKDWVIRLDDEDIDDKLPALVENLDESRQEIVTIIRDLYAQITLNAIVPKGKSLSESMVDKYNDHKDHLDLLMGLIHELGDDSAKGIKLREAYTQYVGKSDDKTLNQDDFYAAIKKNLDEDSKRSPKIQRLIEQASFMPKQRTSANGVIPHQLHQLELDRIIENQGRYYPFLKKPNPNTHKPNGGKYKLDELVAFRIPYYVGPLITKRDQEKTSGADFAWMIRKPGQEGEITPWNFDQKVDRMASANRFIRRMTTKDSYLVAEDVLPDASLIYEKFKALNELNMLKVNDSRLSPSQKQDLFNNLFKKQKTIRTKKLQTYIRTNWELPSVMISGLADPDKFNSSLSTYIDFRDIFGEKVDDPNRQADYEEIIEWSTVFEDRKIYQAKLNQLDWLTEPQRKALLTKRYTGWGRLSKKLLTGLKDQNGDSILDQLWKTNDNFMQIQSRDEFAKQIHDENAKQFHEANNVDDILDDAFTSPQNKKAIRQVDKVVQDVVKAVGYAPDKIAIEFTRSLENNPQRTVSRQRQLQAAYKNIPREIMKSGLMAELGSVADSKKVLSDKLYLYFTQMGKDMYEDKTINIDNLPNYDIDHILPQAFIKDDSIDNRVLISKEENARKSNRVPLKFFGAKRMGFWKDLLNNGLISNRKFQNLTTDPEKISKYSAKGFIHRQLVETSQVIRLVANILGNEYSQAGTTIIEVSAKMNRQLREDFHLIKNRNVNDYHHAMDAYLTAYVGDYLYLRYPKLRPYFVYGDFKKAEDQDLNIRNFNFLHDLKDNESLDKIVDSETGEIVWEKHGSVKQLKKVYHYKFMLVSQEVYTRQDALFNQTIYPASDADKRKLIPIKNSKPVDVYGGYSGNIDAYMAIVRVHGKKEDNYKVVGIPMRAVTKLKKAEKEGHDSYLNAVHEVLKPQFTKKKKNRKTGEITETVDEFDVLLGKVYYRQLIVDGNKKFMLGSSSYQYNAKQLVLSDKAMQVLSKNGKVKSQDENQNLIDVYDEILEKVDQYFELYDQRHYRESLHKGRGIFVNLPLSNQYDGSKLTSYGKYETIDAILNGLHANATMSNLRYLGISSPFGKMQASNGLTIDPDSIICYQSPTGLFERQIKLSDL

SEQ ID NO: 266 - protein, 1371 aa, Lactobacillus buchneri
MKVNNYHIGLDIGTSSIGWVAIGKDGKPLRVKGKTAIGARLFQEGNPAADRRMFRTTRRRLSRRKWRLKLLEEIFDPYITPVDSTFFARLKQSNLSPKDSRKEFKGSMLFPDLTDMQYHKNYPTIYHLRHALMTQDKKFDIRMVYLAIHHIVKYRGNFLNSTPVDSFKASKVDFVDQFKKLNELYAAINPEESFKINLANSEDIGHQFLDPSIRKFDKKKQIPKIVPVMMNDKVTDRLNGKIASEIIHAILGYKAKLDVVLQCTPVDSKPWALKFDDEDIDAKLEKILPEMDENQQSIVAILQNLYSQVTLNQIVPNGMSLSESMIEKYNDHHDHLKLYKKLIDQLADPKKKAVLKKAYSQYVGDDGKVIEQAEFWSSVKKNLDDSELSKQIMDLIDAEKFMPKQRTSQNGVIPHQLHQRELDEIIEHQSKYYPWLVEINPNKHDLHLAKYKIEQLVAFRVPYYVGPMITPKDQAESAETVFSWMERKGTETGQITPWNFDEKVDRKASANRFIKRMTTKDTYLIGEDVLPDESLLYEKFKVLNELNMVRVNGKLLKVADKQAIFQDLFENYKHVSVKKLQNYIKAKTGLPSDPEISGLSDPEHFNNSLGTYNDFKKLFGSKVDEPDLQDDFEKIVEWSTVFEDKKILREKLNEITWLSDQQKDVLESSRYQGWGRLSKKLLTGIVNDQGERIIDKLWNTNKNFMQIQSDDDFAKRIHEANADQMQAVDVEDVLADAYTSPQNKKAIRQVVKVVDDIQKAMGGVAPKYISIEFTRSEDRNPRRTISRQRQLENTLKDTAKSLAKSINPELLSELDNAAKSKKGLTDRLYLYFTQLGKDIYTGEPINIDELNKYDIDHILPQAFIKDNSLDNRVLVLTAVNNGKSDNVPLRMFGAKMGHFWKQLAEAGLISKRKLKNLQTDPDTISKYAMHGFIRRQLVETSQVIKLVANILGDKYRNDDTKIIEITARMNHQMRDEFGFIKNREINDYHHAFDAYLTAFLGRYLYHRYIKLRPYFVYGDFKKFREDKVTMRNFNFLHDLTDDTQEKIADAETGEVIWDRENSIQQLKDVYHYKFMLISHEVYTLRGAMFNQTVYPASDAGKRKLIPVKADRPVNVYGGYSGSADAYMAIVRIHNKKGDKYRVVGVPMRALDRLDAAKNVSDADFDRALKDVLAPQLTKTKKSRKTGEITQVIEDFEIVLGKVMYRQLMIDGDKKFMLGSSTYQYNAKQLVLSDQSVKTLASKGRLDPLQESMDYNNVYTEILDKVNQYFSLYDMNKFRHKLNLGFSKFISFPNHNVLDGNTKVSSGKREILQEILNGLHANPTFGNLKDVGITTPFGQLQQPNGILLSDETKIRYQSPTGLFERTVSLKDL

SEQ ID NO: 267 - protein, 1371 aa, Lactobacillus buchneri
MKVNNYHIGLDIGTSSIGWVAIGEDGKPLRIKGKTAIGARLFQEGNPAADRRMFRTTRRRLSRRKWRLKLLEEIFDPYITPVDSTFFARLKQSNLSPKDSRKEFKGSMLFPDLTDMQYHKDYPTIYHLRHALMTQDEKFDIRMVYLAIHHIVKYRGNFLNSTPVDSFKASKVNFVDQFKKLNELYTAINPEESFQINLANSEDIGHQFLDPSIRKFDKKKQIPKIVPVSVDDKATDKINGKIASEIINAILGYKSKLDVVVQCTPVDSKSWALKFDEEDIDAKLQKILPEMDENQQSIIAILQNLYSQVTLNQIVPNGMSLSESMIEKYNDHHDHLKLYKKIIDQLADPKKKAALKKAYSQYVGDDGKVIEQADFWSSVKKNLDDSDLSKQIMDLIDAEKFMPKQRTSQNGVIPHQLHQRELDEIIEHQSKYYPWLAEINPNKHDLHLAKYKIEELVAFRVPYYVGPMITPDDQAKSAETVFSWMERKGKEAGQITPWNFDEKVDRNASANRFIKRMTTKDTYLIGEDVLPDESLLYEKFKVLNELNMVRVNGKLLKVADKQAIFQDLFENYKHISVKKLQNYIKSKTGLPSDPEISGLSDPEYFNNSLGTYNDFKKLFGNKVDEPDLQDDFEKIVEWSTVFEDKRILREKLNEITWLSDQQKDVLESSRYQGWGRLSKKLLTGIVNDQGERIIDELWNTNKNFMQIQSDNDFAKRIHEANADQMKAVDVEDVLADAYTSPQNKKAIRQVVKVVDDIQKAMGGVAPKYISIEFTRSEDRNPRRTISRQRQLENTLKDTAKSLAKSINPELLSELDNAAKSKKGLTDRLYLYFTQLGKDIYTGKPINIDEISTYDIDHILPQAFVKDDSLNNRVLVSKAINNGKSDNVPVQLFGAKMGHFWKQLAEAGLISKRKLKNLQTDPDTISKYAMHGFIRRQLVETSQVIKLVANILGDKYRNDNTKIIEITARMNHQMRDEFGFIKNREINDYHHAFDAYLTAFLGRYLYHRYIKLRPYFVYGDFKKFKEDKVTMRNFNFLHDLTDDTQEKIADAETGEVIWDRENSIQQLKDVYHYKFMLISHEVYTLRGAMFNQTVYPASDAGKRKLIPIKADRPINVYGGYSGSADAYMAIVRIHNKKGDKYRVVGVPMRARDRLDAAKKVSDADCDRALKDVLTPQLTKTKKSRKTGEITQVVEDFEIVLGKVMYRQLMIDGDKKFMLGSSTYQYNAKQLVLSDQSVKTLASKGRLDPLQESMDYNNVYTEILDKVNQYFSLYDMNKFRHKLNLGFSKFISFPNHNVFDGNTKASSGKREILEEVLNGLHANPTFGNLKDIGITTPFGQLQQPNGILLSDEAKIRYQSPTGLFERTVSLKDL

SEQ ID NO: 268 - protein, 1361 aa, Lactobacillus casei
  REGION 1..1361: note = Lactobacillus casei BL23
MTKLGKPYGIGVDIGSNSIGFAAVDENSHLIRLKGKTVIGARLFEEGKAAADRRASRTTRRRLSRNRWRLSFLRDFFESHITPTGPNFFMRQKYSEISPKDKARYKYEKRLFNDRTDAEFYQQYPTMYHLRNRLLTDPSKADVREIYFAIHHILKSRGHFLTSGYAKDFNTNKVALNEIFPALQDAYAQVYPDLDITFDENKVNEFKTVLLNEKATPSDTQRALVNLLLAEDGDKDILKQQKQVLTEFAKAVVGLKTKLNVALGTEVDSSEATVWNFSLGQLDDKWAGIESAMTDEGTEILDQIRDLYRARLLNGIVPAGKTLSQAKVDDYAQHHEDLELFKDYLKQLEDDGTAKAIRQLYDRYIDGDDAKPFVREDFVKALTKEVTAHPNAKSPELLERLAQPDFMLKQRNKANGAIPVQMQQRELDQIIKNQSVYYDWLAAPNPVEKHRKSMPYQLDELLNFRIPYYVGPLVTAKEQKAAQGGVFAWMVRKDPDGNITPYNFDEKVDREASANTFIQRMKTTDTYLIGEDVLPKQSLLYQRYEVLNELNNVRVNNEKLSIEQKQQVIRELFERHNSVTIKQFAENLRAHGDYAHIPEIRGLADEKRFLSSLSTYRQLKSLLPDAIDDPAKQADIENIIAWSTVFEDAAIFKTKLKEINWLDSQTITKLSNIRYRGWGQFSHKFLNGLTLGNGHTIIQELFLSNNNLMQILTDETLQKKMTELNADKLKAANINDAIDDAYTSPSNKKALRQVLRVIEDIKRAADGQDPSWLYVETADGGGTPGKRTRARQHQLQEIYANAAHELIDSAVRGELEDKIADKADFNDRLVLYFMQGGRDIYTGTPLNIDQLSSYDIDHILPQSLIKDNSLDNRVLVHAIINREKNATFASTIYAQKMNATWRQWHEAGLISGRKLRNLQMRPDQIDKYASGFVARQLVETRQIIKLTEQIVAAQYPETKIIAVKAGLSHQLREELEFPKNRDVNHYHHAFDAFLAARIGTYLLKRFPNLQAFFTYGKFKKADVKKLRGFNFIRDITHAEDKIVVKDTGEVIWDKKRDVDELDRIYNFKRMLITHEVHFEKADLFKQTVYGAKDSKEAGGKKQLISKKKGYPVDIYGGYTQETGSYLSVVRLTKKAMYAVVKVSTRDAAKLAVAKSISEQKENETLNDIIDEKLSKISKNGKITHELFEVVLPRVGQKTLFKNSKYNLFLVNSDTYMHNYQELWMPREYQKMWKDISLSKYGDAQTEDQLDQIFGFIVSQVNSYFNLYDINQFRKKLNDAADKFATLPMRDTDDMQGKIATIGQLLIGLQANAARSDLRNLDIKTPLGLLQIPNGISLDSDTSVVYQSPTGLLEREVHLSDL

SEQ ID NO: 269 - protein, 1361 aa, Lactobacillus casei
  REGION 1..1361: note = Lactobacillus casei Lc-10
MTKLGKPYGIGVDIGSNSIGFAAVDENSHLIRLKGKTVIGARLFEEGKAAADRRASRTTRRRLSRNRWRLSFLRDFFESHITPTGPNFFMRQKYSEISPKDKARYKYEKRLFNDRTDAEFYQQYPTMYHLRNRLLTDPSKADVREIYFAIHHILKSRGHFLTSGYAKDFNTNKVALNEIFPALQDAYAQVYPDLDITFDENKVNEFKTVLLNEKATPSDTQRALVNLLLAEDGDKDILKQQKQVLTEFAKAVVGLKTKLNVALGTEVDSSEATVWNFSLGQLDDKWAGIESAMTDEGTEILDQIRDLYRARLLNGIVPAGNTLSQAKVDDYAQHHEDLELFKDYLKQLEDDGTAKAIRQLYDRYIDGDDAKPFVREDFVKALTKEVTAHPNAKSPELLERLAQPDFMLKQRNKANGAIPVQMQQRELDQIIKNQSVYYDWLAAPNPVEKHRKSMPYQLDELLNFRIPYYVGPLVTAKEQKAAQGGVFAWMVRKDPDGNITPYNFDEKVDREASANTFIQRMKTTDTYLIGEDVLPKQSLLYQRYEVLNELNNVRVNNEKLSIEQKQQVIRELFERHNSVTIKQFAENLRAHGDYAHIPEIRGLADEKRFLSSLSTYRQLKSLLPDAIDDPAKQADIENIIAWSTVFEDAAIFKTKLKEINWLDSQTITKLSNIRYRGWGQFSHKFLNGLTLGNGHTIIQELFLSNNNLMQILTDETLQKKMTELNADKLKAANINDAIDDAYTSPSNKKALRQVLRVIEDIKRAADGQDPSWLYVETADGGGTPGKRTRARQHQLQEIYANAAHELIDSAVRGELEDKIADKADFNDRLVLYFMQGGRDIYTGTPLNIDQLSSYDIDHILPQSLIKDNSLDNRVLVHAIINREKNATFASTIYAQKMNATWRQWHEAGLISGRKLRNLQMRPDQIDKYASGFVARQLVETRQIIKLTEQIVAAQYPETKIIAVKAGLSHQLREELEFPKNRDVNHYHHAFDAFLAARIGTYLLKRFPNLQAFFTYGKFKKADVKKLRGFNFIRDITHAEDKIVVKDTGEVIWDKKRDVDELDRIYNFKRMLITHEVHFEKADLFKQTVYGAKDSKEAGGKKQLISKKKGYPVDIYGGYTQETGSYLSVVRLTKKAMYAVVKVSTRDAAKLAVAKSISEQKENETLNDIIDEKLSKISKNGKITHELFEVVLPRVGQKTLFKNSKYNLFLVNSDTYMHNYQELWMPREYQKMWKDISLSKYGDAQTEDQLDQIFGFIVSQVNSYFNLYDINQFRKKLNDAADKFATLPMRDTDDMQGKIATIGQLLIGLQANAARSDLRNLDIKTPLGLLQIPNGISLDSDTSVVYQSPTGLLEREVHLSDL

SEQ ID NO: 270 - protein, 1363 aa, Lactobacillus casei
  REGION 1..1363: note = Lactobacillus casei M36
MTKLGKPYGIGVDIGSNSIGFAAVDENSHLIRLKGKTVIGARLFEEGKAAADRRASRTTRRRLSRNRWRLSFLRDFFESHITPTDPNFFMRQKYSEISPKDKARYKYEKRLFNDRTDAEFYQQYPTMYHLRNRLLTDPSKADVREIYFAIHHILKSRGHFLTSGYAKDFNTNKVALNEIFPALQDAYAQVYPDLDITFDENKVNEFKTVLLDEKATPSDTQRALVNLLLAEDGDKDILKQQKQVLTEFAKAVVGLKMKLNVALGTEVDSSEATAWNFSLGQLDDKWAGIESAMTDEGTEILDQIRDLYRARLLNGIVPAGKTLSQAKVDDYEQHHEDLELFKDYLKQLEDDGMAKVIRQLYDRYIDGDDAKPFVREDFVKALTKEVTAHPNAKSPELLERLVQPDFMLKQRNKANGAIPVQMQQRELDQIIKNQSVYYDWLAAPNPVEKHRQSMPYQLDELLNFRIPYYVGPLVTAKEQKAAQGGVFAWMVRKDPDGNITPYNFDEKVDREASANTFIQRMKTTDTYLIGEDVLPKQSLLYQSYEVLNELNNVRVNDNKLSFDQKQQVLGELFERHNTVTIKQFVDNLLAHGDYDRIPEVRGLADEKRFLSSLSTYNQLKGILHEAIDDSDKQTDIEKIIAWSTIFEDKAIFKTKLNEISWLTAGMINSLANIRYRGWGQFSHKLLNELTLSTGRTVFEELLISSHNLMQILTDEVLKQKIAELNAHELKASGIYAAIDDAYTSPSNKKALRQVLSVIDDITNAAGQAPNWLYIETADGDGVPGKRTNSRQRKIQEIYANAAQELITGSVRGELEDKIASRADFTDRLVLYFMQGGRDIYTGEPLNIDNLSSYDIDHILPQSLIKDNSLDNRVLVHPLVNREKDTIFASTRFAKQMNGMWRQWHAAGLISSRKLRNLQMRPDEIDKYASGFVARQLVETRQIIKLTEQIVADQYPDAKIIAVKAGLSSQLRKELDFPKNREVNHYHHAFDAFLAARIGTYLLKRYPNLEPFFTYGKFKKTEVKKLKSLKSFNFIRDMTHAKDKIVAKETGEIVWDNASDINELDRIYNFKRMLITHEVRFETASLFKQTLYAAKNSKNRGGSRQLIPKKKGYLVDIYGGYTQETGSYLSVVRLTKKAMYAVVKVSTRDAAKLAVAKSISEQKENETLKKIIDGKLSKTSKKGKTTHQLFEIVLPRVGQKTLFKNSKYNQFLVNSDTYMHNYQELWMPREYQRMWKDILLSNHGDAQLEGQLDQIFKFIVSQVNSYFNLYDINQFRKKIADATDKFAKLPTHDTDNARGKIATIGQLLIGLQANAMRSDLRNLDIKTPFGLLQIGTGITLDLDTSIIYQSPTGLFEREVPLTDL

SEQ ID NO: 271 - protein, 1361 aa, Lactobacillus casei; identical to SEQ ID NO: 268
  REGION 1..1361: note = Lactobacillus casei group

SEQ ID NO: 272 - protein, 1360 aa, Lactobacillus casei
  REGION 1..1360: note = Lactobacillus casei T71499
MTKLGKPYGIGVDIGSNSIGFAAVDENSHLIRLKGKTVIGARLFEEGKAAADRRASRTTRRRLSRNRWRLSFLRDFFESHITPTDPNFFMRQKYSEISPKDKARYKYEKRLFNDRTDAEFYQQYPTMYHLRTRLLTDPSKADVREIYFAIHHILKSRGHFLTPGYAKDFNTNKVALNEIFPALQDAYAQVYPDLDITFDENKVNEFKTVLLNEKATPSDTQRALVNLLLAEDGDKDILKQQKQVLTEFAKAVVGLKTKLNVALGTEVDSSEATVWNFSLGQLDDKWAGIESAMTDEGTEILDQIRDLYRARLLNGIVPAGKTLSQAKVDDYAQHHEDLELFKDYLKQLEDDGTAKAIRQLYDRYIDGDDAKPFVREDFVKALTKEVTAHPNAKSPELLERLAQPDFMLKQRNKANGAIPVQMQQRELDQIIKNQSVYYDWLAAPNPVEKHRKSMPYQLDELLNFRIPYYVGPLVTAKEQKAAQGGVFAWMVRKDPDGNITPYNFDEKVDREASANTFIQRMKTTDTYLIGEDVLPKQSLLYQSYEVLNELNNVRVNDNKLSFDQKQQVLGELFERHNTVTIKQFVDNLLAHGDYDRIPEVRGLADEKRFLSSLSTYNQLKGILHEAIDDADKQTDIENIIAWSTIFEDKAIFKTKLNEISWLNAGMINSLANIRYRGWGQFSHKLLNELTLSTGRTVFEELLISSRNLMQILTDEVLKQKIAELNAHELKASGIYAAIDDAYTSPSNKKALRQVLSVIDDITNAAGQAPNWLYIETADGDGVPGKRTNSRQRKIQEIYANAAQELITGSVRGELEDKIASRADFTDRLVLYFMQGGRDIYTGEPLNIDNLSSYDIDHILPQSLIKDNSLDNRVLVHPLVNREKDTIFASTRFAKQMNGMWRQWHAAGLISSRKLRNLQMRPDEIDKYASGFVARQLVETRQIIKLTEQIVADQYPDTKIIAVKAGLSSQLRKELDFPKNREVNHYHHAFDAFLAARIGTYLLKRYPNLEPFFTYGKFKKTEVKKLKSFNFIRDMTHAKDKIVAKETGEIVWDNASDINELDRIYNFKRMLITHEVRFETASLFKQTLYAAKNSKNRGGSRQLIPKKKGYLVDIYGGYTQETGSYLSVVRLTKKAMYAVVKVSTRDAAKLAVAKSISEQKENETLKKIIDGKLSKTSKKGKTTHQLFEIVLPRVGQKTLFKNSKYNQFLVNSDTYMHNYQELWMPREYQRMWKDILLSNHGDAQLEGQLDQIFKFIVSQVNSYFNLYDINQFRKKIADATDKFAKLPTHDTDNARGKIATIGQLLIGLQANAMRSDLRNLDIKTPFGLLQIGTGITLDLDTSIIYQSPTGLFEREVPLTDL

SEQ ID NO: 273 - protein, 1366 aa, Lactobacillus casei
  REGION 1..1366: note = Lactobacillus casei UCD174
MTKLGKPYGIGVDIGSNSIGFAAVDENSHLIRLKGKTVIGARLFEEGKAAAYRRASRTTRRRLSRNRWRLSFLRDFFESHITPTDPNFFMRQKYSEISPKDKARYKYEKRLFNDRTDAEFYQQYPTMYHLRTRLLTDPSKADVREIYFAIHHILKSRGHFLTPGYAKDFNTNKVALNEIFPALQDAYAQVYPDLDITFDENKVNEFKTVLLNEKATPSDTQRALVNLLLAKEGDRDILKQQKQVLTEFAKAVVGLKTKLNVALGTEVDSSEATAWNFSLGQLDDKWAGIESAMTDEGTEILDQIRDLYRARLLNGIVPAGKTLSQAKVDDYAQHHEDLELFKDYLKQLEDDGTAKAIRQLYDRYIDGDDAKPFVREDFVKALTKEVTAHPNAKSPELLERLAQPDFMLKQRNKANGAIPVQMQQRELDQIIKNQAVYYDWLAAPNPVEKHRQSMTYQLDELLNFRIPYYVGPLVTAKEQKAAQGGVFAWMVRKDPDGNITPYNFDEKVDREASANTFIQRMKTTDTYLIGEDVLPKQSLLYQSYEVLNELNNVRVNDNKLSFDQKQQVLGELFERHNTVTIKQFVDNLLAHGDYDRIPEVRGLADEKRFLSSLSTYNQLKGILHEAIDDADKQTDIENIIAWSTIFEDKAIFKTKLNEISWLNAGMINSLANIRYRGWGQFSHKLLNELTLSTGRTVFEELLISSRNLMQILTDEVLKQKIAELNAHELKASGIYAAIDDAYTSPSNKKALRQVLSVIDDITNAAGQAPNWLYIETADGDGVPGKRTNSRQRKIQEIYANAAQELITGSVRGEFEDKIASRADFTDRLVLYFMQGGRDIYTGEPLNIDNLSSYDIDHILPQSLIKDNSLDNRVLVHPLVNREKDTIFASTRFAKQMNGMWRQWHAAGLISSRKLRNLQMRPDEIDKYASGFVARQLVETRQIIKLTEQIVADQYPDTKIIAVKAGLSSQLRKELDFPKNREVNHYHHAFDAFLAARIGTYLLKRYPNLEPFFTYGKFKKTEVKKLKSLKSLKSFNFIRDMTHAKDKIVAKETGEIVWDNASDINELDRIYNFKRMLITHEVRFETASLFKQTLYAAKNSKNRGGSRQLIPKKKGYLVDIYGGYTQETGSYLSVVRLTKKAMYAVVKVSTRDAAKLAVAKSISEQKENETLKKIIDGKLSKTSKKGKTTHQLFEIVLPRVGQKTLFKNSKYNQFLVNSDTYMHNYQELWMPREYQRMWKDILLSNHGDAQIEGQLDQIFKFIVSQVNSYFNLYDINQFRKKIADATDKFAKLPTHDTDNARGKIATIGQLLIGLQANAMRSDLRNLDIKTPFGLLQIGTGITLDLDTSIIYQSPTGLFEREVPLTDL

SEQ ID NO: 274 - protein, 1389 aa, Lactobacillus casei
MIIRTYELKTITTIAILKMFQLLTGGLSMTKLGKPYGIGVDIGSNSIGFAAVDENSHLIRLKGKTVIGARLFEEGKAAADRRASRTTRRRLSRNRWRLSFLRDFFESHITPTGPNFFMRQKYSEISPKDKARYKYEKRLFNDRTDAEFYQQYPTMYHLRNRLLTDPSKADVREIYFAIHHILKSRGHFLTSGYAKDFNTNKVALNEIFPALQDAYAQVYPDLDITFDENKVNEFKTVLLNEKATPSDTQRALVNLLLAEDGDKDILKQQKQVLTEFAKAVVGLKTKLNVALGTEVDSSEATVWNFSLGQLDDKWAGIESAMTDEGTEILDQIRDLYRARLLNGIVPAGKTLSQAKVDDYAQHHEDLELFKDYLKQLEDDGTAKAIRQLYDRYIDGDDAKPFVREDFVKALTKEVTAHPNAKSPELLERLAQPDFMLKQRNKANGAIPVQMQQRELDQIIKNQSVYYDWLAAPNPVEKHRKSMPYQLDELLNFRIPYYVGPLVTAKEQKAAQGGVFAWMVRKDPDGNITPYNFDEKVDREASANTFIQRMKTTDTYLIGEDVLPKQSLLYQRYEVLNELNNVRVNNEKLSIEQKQQVIRELFERHNSVTIKQFAENLRAHGDYAHIPEIRGLADEKRFLSSLSTYRQLKSLLPDAIDDPAKQADIENIIAWSTVFEDAAIFKTKLKEINWLDSQTITKLSNIRYRGWGQFSHKFLNGLTLGNGHTIIQELFLSNNNLMQILTDETLQKKMTELNADKLKAANINDAIDDAYTSPSNKKALRQVLRVIEDIKRAADGQDPSWLYVETADGGGTPGKRTRARQHQLQEIYANAAHELIDSAVRGELEDKIADKADFNDRLVLYFMQGGRDIYTGTPLNIDQLSSYDIDHILPQSLIKDNSLDNRVLVHAIINREKNATFASTIYAQKMNATWRQWHEAGLISGRKLRNLQMRPDQIDKYASGFVARQLVETRQIIKLTEQIVAAQYPETKIIAVKAGLSHQLREELEFPKNRDVNHYHHAFDAFLAARIGTYLLKRFPNLQAFFTYGKFKKADVKKLRGFNFIRDITHAEDKIVVKDTGEVIWDKKRDVDELDRIYNFKRMLITHEVHFEKADLFKQTVYGAKDSKEAGGKKQLISKKKGYPVDIYGGYTQETGSYLSVVRLTKKAMYAVVKVSTRDAAKLAVAKSISEQKENETLNDIIDEKLSKISKNGKITHELFEVVLPRVGQKTLFKNSKYNLFLVNSDTYMHNYQELWMPREYQKMWKDISLSKYGDAQTEDQLDQIFGFIVSQVNSYFNLYDINQFRKKLNDAADKFATLPMRDTDDMQGKIATIGQLLIGLQANAARSDLRNLDIKTPLGLLQIPNGISLDSDTSVVYQSPTGLLEREVHLSDL

SEQ ID NO: 275 - protein, 1354 aa, Lactobacillus coryniformis
  REGION 1..1354: note = Lactobacillus coryniformis subsp. coryniformis KCTC 3167
MTLHYNVGLDIGTNSVGYTIVDDNGKILQVKGKNGYGVRVFKEGATAAERRIFRTTHRRLKRRKWRLRLLQDFFEPYILPQDDGFFIRRKESNLVLNDRDEDTASLFNDRSDRDFYQAYPTIYHLRQALMTEKRQFDVREIYLAMHHIIKYRGHFLLNGTVNNFTNNKIDLHSDFEELNALLLNVIPELKFQIDLDHSTMFQTTLLNTTISRSGRQRDLVKSFYNGSDDKQLAKQQKSVATELLKAILGLKAKFHKLFNLDLLETTEWEFSFDAEDIDDKLAKLEPLMTENQQQVMDILQRIFAAITLNGIVPEGKTLSASKVDSYQKHKQDLKLLKAIAQHSDKKTATVLQTAYNEYINGIASKPLKQEDFYKRLTNAVKKSSDPQVADMLALIDQEKFLPKQRTKENGAIPHQLHQLELERIIDNQKDYYPWLAELNPNQARQKVAKYKLSELVAFRVPYYVGPLIEPEVQQATSNAHFAWMARKEAGPITPWNFDQKVDRNVSAERFIKRMTTKDTYLLAEDVLPLHSLLYQRFIVLNELNNVRVNGQKLTKKQKQAVYQDLFKRQPHVTKKQFKSYLVQTGEFAESSKIEGLANETSFNSGLTTENELRKIFGAQLDEARYQVDFEQIIEWATLFEDAKILRTKLAEITWLTTEQIEKLAGIRYRGWGRFSRKLLAGLRDQNGQQIIDLLWDTPNNFMVIVSQAAFSEAITKENEKLIDRRGAQDVITDLYTSPQNKKALRQVLAIVADVQKAMGGVPPQRIFIEFAREDEKNPRRSVERSRQLEKLYQTISNEFLINSEVRQELKEAVDQKVNFKDRLFLYFLQGGVDLYSGKRINIDQLSHYDIDHILPQSFIKDDSLDNRVLVSQKLNRSKSDSVPLSEFANYKFGPAMQAKWLQLKEAGLLSKRKYDNLTLDPTKLSKFAPLGFVNRQLVETRQVIKLAANLLASEETKVVTIKANMTHQVRKELDFPKNRNVNNYHHAFDAYLTAFVGIFLSKRYPKLKPYFTYGDFQKGNKLPDLKNFNFLYELKNKDRSIDSNTGEIIWDKQRDLAYMNKIYNFKKVTVVHEVLTKSGALYNQTLYKASEDKASGRGTKQLIRKKDNMPTELYGGYTGSTSAFMSIVRLWKKDKPYYKVVGIPTRMAAKLANQAQLLDYLTKKFTTRKLVKKTGDYKTTVERFELVVPKVGFNQLVIDGGQPFMLGSATYQYNARELFISKEAVKALNKQLSTHVDLVQVFDEILVQVNRWFPLYDTNGFREKLSHGRDRFMKLNDSFEEKSDTQIDVLNRILIGFHANAARTNLKILGLGTDLGFMTQQAGIRLTEKAILVHQSPSGLFERKVALRDLKGLR

SEQ ID NO: 276 - protein, 1119 aa, Lactobacillus coryniformis
  REGION 1..1119: note = Lactobacillus coryniformis subsp. torquens KCTC 3535
MGYRIGLDVGITSTGYAVLKTDKNGLPYKILTLDSVIYPRAENPQTGASLAEPRRIKRGLRRRTRRTKFRKQRTQQLFIHSGLLSKPEIEQILATPQAKYSVYELRVAGLDRRLTNSELFRVLYFFIGHRGFKSNRKAELNPENEADKKQMGQLLNSIEEIRKAIAEKGYRTVGELYLKDPKYNDHKRNKGYIDGYLSTPNRQMLVDEIKQILDKQRELGNEKLTDEFYATYLLGDENRAGIFQAQRDFDEGPGAGPYAGDQIKKMVGKDIFEPTEDRAAKATYTFQYFNLLQKMTSLNYQNTTGDTWHTLNGLDRQAIIDAVFAKAEKPTKTYKPTDFGELRKLLKLPDDARFNLVNYGSLQTQKEIETVEKKTRFVDFKAYHDLVKVLPEEMWQSRQLLDHIGTALTLYSSDKRRRRYFAEELNLPAELIEKLLPLNFSKFGHLSIKSMQNIIPYLEMGQVYSEATTNTGYDFRKKQISKDTIREEITNPVVRRAVTKTIKIVEQIIRRYGKPDGINIELARELGRNFKERGDIQKRQDKNRQTNDKIAAELTELGIPVNGQNIIRYKLHKEQNGVDPYTGDQIPFERAFSEGYEVDHIIPYSISWDDSYTNKVLTSAKCNREKGNRIPMVYLANNEQRLNALTNIADNIIRNSRKRQKLLKQKLSDEELKDWKQRNINDTRFITRVLYNYFRQAIEFNPELEKKQRVLPLNGEVTSKIRSRWGFLKVREDGDLHHAIDATVIAAITPKFIQQVTKYSQHQEVKNNQALWHDAEIKDAEYAAEAQRMDADLFNKIFNGFPLPWPEFLDELLARISDNPVEMMKSRSWNTYTPIEIAKLKPVFVVRLANHKISGPAHLDTIRSAKLFDEKGIVLSRVSITKLKINKKGQVATGDGIYDPENSNNGDKVVYSAIRQALEAHNGSGELAFPDGYLEYVDHGTKKLVRKVRVAKKVSLPVRLKNKAAADNGSMVRIDVFNTGKKFVFVPIYIKDTVEQVLPNKAIARGKSLWYQITESDQFCFSLYPGDMVHIESKTGIKPKYSNKENNTSVVPIKNFYGYFDGADIATASILVRAHDSSYTARSIGIAGLLKFEKYQVDYFGRYHKVHEKKRQLFVKRDE

SEQ ID NO: 277 - protein, 1368 aa, Lactobacillus curvatus
  REGION 1..1368: note = Lactobacillus curvatus CRL 705
MSRPYNIGLDIGTSSIGWSVVDDQSKLVSVRGKYGYGVRLYDEGQTAAERRSFRTTRRRLKRRKWRLGLLREIFEPYITPIDDTFFLRQKQSNLSPKDQRKLYTQTSLFNDRTDRAFYDDYPTIYHLRYRLMTEKRQFDIREIYLAMHHIVKYRGHFLNEAPVSSFKSSEINLVAHFDRLNTIFADLFSESGFQLETDKLAEVKALLLDNQQSASNRQRQALSLIYTPSTNKAVEKQNKAIATELLKAILGLKAKFNVLTGIEAEDVKAWTLTFNAENFDEEMVKLESSLDDNAHQIIESLQELYSGVLLAGIVPENQSLSQAMITKYDDHQKHLKMLKAVREALAPGDRQRLKQAYDQYVDGQENTKAYSKEDFYGDITKALKNNPDHPIVSEIKKLIELDQFMPKQRTKDNGAIPHQLHQQELDRIIENQQQYYPWLAELNPNSKRQTVAKYKLDELVAFRVPYYVGPLITAEQQRQSSDAKFAWLIRKAEGRITPWNFDDKVDRQASANEFIKRMTTTDTYLLAEDVLPKQSLIYQRFEVLNELNGLKIDDQPITTELKQAIFTDLFMQKISVTVKNIQDYLVSEKRYASRPAITGLSDENKFNSRLSTYHDLKMIVGDAVDDVDKQADLEKCIEWSTIFEDGKIYSAKLNEIDWLTDQQRVQLAAKRYRGWGRLSAKLLTQIVNANGQRIMDLLWDTTDNFMRIVHSEDFDKLITEANQMMLAENDVQDVINDLYTSPQNKKALRQILLVVNDIQKAMKGQAPERILIEFAREDEVNSRLSVQRKRQVEQVYQNISNELLNNTEIRNELKDLSNSALSNTRLFLYFMQGGRDMYTGDSLNIDRLSTYDIDHILPQSFIKDNSLDNRVLVSQKMNRSKADQVPTDFTSVELGQKMQIQWEQMLRAGLITKKKYDNLTLNPDHISKYAMKGFINRQLVETRQVIKLATNLLMEQYGEDNIELITVKSGLTHQMRTEFDFPKNRNLNNHHHAFDAYLTAFVGLYLLKRYPKLKPYFVYGEYQKASQQDKWRNFNFLNGLKKDELVDENTEAVIWDKESGLAYLNKIYQFKKILVTRGVHENSGALFNQTLYAAKDDKASGQGGKQLIPAKQDRSTALYGGYSGKTVAYMCIVRIKNKKGDLYKVCGVETSWLAQLKQLTDEDSQKAFLEQKISPQFTKVKKQKGNIIEAVEEFEVIAPHILINQRFFDNGQELTLGSATYKHNEQELILDKTAVKLLNGALPLTQSEELAEQVYDEILDQVMHYFPLYDTNQFRAKLSTGKAAFMKLPWKSQWDGNKMVQVGQQVILDRILIGLHANAAMSDLKVLKMTTPFGMIQQSTGITLSADTQIIYQSPTGLFERRVALRDL

SEQ ID NO: 278 - protein, 1126 aa, Lactobacillus farciminis
  REGION 1..1126: note = Lactobacillus farciminis KCTC 3681
MADRISLGLDIGVASVGFSVLDIDKGKVIELGARLFSATVAAGNQDRRDMRGARRLLNRNKQRRQDTGKLFKKFGLIDDFDKGSFYDNFNQNLNPYELRVKGLTEQLTKEELAESLYQIVKHRGISYALKDADVDEGGTDYSVSLKINSQELAEKTPAQIQLQRLNDYGKVRGQVVIGDDPDNQKVLLNVFPTSAYEKEAKQIIATQQQFYPESLTDKFTEEYCQILTRKRDYFVGPGNEKSRTDYGIYKTDGRTLDNLFEELIGHDKIYPEELRASAASYTAQLFNVLNDLNNLRILNYEDGKLTKEDKEKIIAEIKNNTTTINMLNVIKKVAGCSKDDIKGFRVNEKDKPEISSMPVYRKIHKDLLKAGVDISDWPVEFIDELSFILTLNTENGEIRKQLNNRLAPKFDFLNADLIQLIIDNKDSFEIKTNNKWHRFSVKTMNKLIPEMMERPVEQMTLLNEMGLVKKDKKRFENNKYLPYKEIAKDIFNPVASKSVREALKIVNAVLKKYGHIDYLVVEMPRDKNLKEEQDNIKEFQNKNKKAKDAAFEAFVKSVGSEQRVKEALSKNRKLQMKMRLWYQQQEIDPYNGKTIDATDLINNPDKFEIDHIIPQSISFYDSINNKTLCFASMNQVKGQKTPYEFMLEGHGQSYDKFKATVMANKNFGKAKRANYLFEENVSDIETRKRFLSRNLVDTRYSSRVVLNSLQDFFREKSADTKVTVIRGKFTSNMRKHWHIDKTRETFHHHAIDASIIAATPFLRMWKKGGTIFPVKVGEESIDIETGEILDDKNFDKAMYEEPYSGFVSEIMNADDRIKFSHQVDKKMNRKVSDATIYSTRTGKLAKDKKDAEYIVAKVKDIYSVDGFKKFKKVYDKDKTKFLLYKYDPRTFSKLERIISDCPDKVEKVQTNGKVKAVDISPFEMYRRDHGMIKKYSKKGNGPAIKQLKYLDKKLGSHIDITPANANGKHVILQSLKPWRTDVYLNHETGEYEIMGIKYSDLKFNKNEGYGIKKDKYLEIKKVEEVSEKSEFMFSLYRKDRVKVQDMKTGESVELLFWSRNFSNKKYAELKPISQAENDKKLPVYGKGRLIKRLIPKNCKIWKVNTTILGDPYYLEKESDSPKDILD

SEQ ID NO: 279 - protein, 1356 aa, Lactobacillus farciminis
  REGION 1..1356: note = Lactobacillus farciminis KCTC 3681
MTKKEQPYNIGLDIGTSSVGWAVTNDNYDLLNIKKKNLWGVRLFEEAQTAKETRLNRSTRRRYRRRKNRINWLNEIFSEELAKTDPSFLIRLQNSWVSKKDPDRKRDKYNLFIDGPYTDKEYYREFPTIFHLRKELILNKDKADIRLIYLALHNILKYRGNFTYEHQKFNISNLNNNLSKELIELNQQLIKYDISFPDDCDWNHISDILIGRGNATQKSSNILKDFTLDKETKKLLKEVINLILGNVAHLNTIFKTSLTKDEEKLNFSGKDIESKLDDLDSILDDDQFTVLDAANRIYSTITLNEILNGESYFSMAKVNQYENHAIDLCKLRDMWHTTKNEEAVEQSRQAYDDYINKPKYGTKELYTSLKKFLKVALPTNLAKEAEEKISKGTYLVKPRNSENGVVPYQLNKIEMEKIIDNQSQYYPFLKENKEKLLSILSFRIPYYVGPLQSAEKNPFAWMERKSNGHARPWNFDEIVDREKSSNKFIRRMTVTDSYLVGEPVLPKNSLIYQRYEVLNELNNIRITENLKTNPIGSRLTVETKQRIYNELFKKYKKVTVKKLTKWLIAQGYYKNPILIGLSQKDEFNSTLTTYLDMKKIFGSSFMEDNKNYDQIEELIEWLTIFEDKQILNEKLHSSKYSYTPDQIKKISNMRYKGWGRLSKKILMDITTETNTPQLLQLSNYSILDLMWATNNNFISIMSNDKYDFKNYIENHNLNKNEDQNISDLVNDIHVSPALKRGITQSIKIVQEIVKFMGHAPKHIFIEVTRETKKSEITTSREKRIKRLQSKLLNKANDFKPQLREYLVPNKKIQEELKKHKNDLSSERIMLYFLQNGKSLYSEESLNINKLSDYQVDHILPRTYIPDDSLENKALVLAKENQRKADDLLLNSNVIDRNLERWTYMLNNNMIGLKKFKNLTRRVITDKDKLGFIHRQLVQTSQMVKGVANILDNMYKNQGTTCIQARANLSTAFRKALSGQDDTYHFKHPELVKNRNVNDFHHAQDAYLASFLGTYRLRRFPTNEMLLMNGEYNKFYGQVKELYSKKKKLPDSRKNGFIISPLVNGTTQYDRNTGEIIWNVGFRDKILKIFNYHQCNVTRKTEIKTGQFYDQTIYSPKNPKYKKLIAQKKDMDPNIYGGFSGDNKSSITIVKIDNNKIKPVAIPIRLINDLKDKKTLQNWLEENVKHKKSIQIIKNNVPIGQIIYSKKVGLLSLNSDREVANRQQLILPPEHSALLRLLQIPDEDLDQILAFYDKNILVEILQELITKMKKFYPFYKGEREFLIANIENFNQATTSEKVNSLEELITLLHANSTSAHLIFNNIEKKAFGRKTHGLTLNNTDFIYQSVTGLYETRIHIE

SEQ ID NO: 280 - protein, 1313 aa, Lactobacillus fermentum
  REGION 1..1313: note = Lactobacillus fermentum 28-3-CHN
MHYLDEIFAPHLQEVDENFLRRLKQSNIHPEDPAKNQAFIGKLLFPDLLKKNERGYPTLIKMRDELPVEQRAHYPVTNIYKLREAMINEDRQFDLREVYLAVHHIMKYRGHFLNNASVDKFKVGRIDFYKSFNVLNEAYEELQNGEGSFTIEPSKVEKIGQLLLDTKMRKLNRQKAVAKLLEVKVADKEETKRNKQIATAMSKLVLGYKADFATVAMANGNEWKIDLSSETSEDEIEKFREELSDAQNDILTEITSLFSQIMLNEIVPNGMSISESMMDRYWTHERQLAEVKEYLATQPASARKEFDQVYNKYIGQAPKERGFDLEKGLKKILSKKENWKEIDELLKAGDFLPKQRTSANGVIPHQMHQQELDRIIEKQAKYYPWLATENPATGERDRHQAKYELDQLVSFRIPYYVGPLVTPEVQKATSGAKFAWAKRKEDGEITPWNLWDKIDRAESAEAFIKRMTVKDTYLLNEDVLPANSLLYQKYNVLNELNNVRVNGRRLSVGIKQDIYTELFKKKKTVKVSDVASLVMAKTRGVNKPSVEGLSDPKKFNSNLATYLDLKSIVGDKVDDNRYQTDLENIIEWRSVFEDGEIFADKLTEVEWLTDQQRSALVKKRYKGWGRLSKKLLTGIVDENGQRIIDLMWNTDQNFMQIVNQPVFKEQIDQLNQKAITNDGMTLREWVESVLDGAYTSPQNKKAIWQVVRVVEDIVKAVGNAPKSISIEFARNEGNKGEITRSRRTQLQKLFEDQAHELVKDTSLTEELEKAPDLSDRYYLYFTQGGKDMYTGDPINFDEISTKYDIDHILPQSFVKDDSLDNRVLVSRAENNKKSDRVPAKLYAAKMKPYWNQLLKQGLITQRKFENLTMDVDQNIKYRSLGFVKRQLVETRQVIKLTANILGSMYQEAGTDIIETRAGLTKQLREEFDLPKVREVNDYHHAVDAYLTTFAGQYLNRRYPKLRSFFVYGEYMKFKHGSDLKLRNFNFFHELMEGDKSQGKVVDQQTGELITTRDEVAKSFDRLLNMKYMLVSKEVHDRSDQLYGATIVTAKESGKLTSPIEIKKKRPVDLYGAYTNGTSAFMTIIKFTGNKPKYKVIGVPTTSAVGLKRVGKPGSESYNQELHRIIKSNPKVKKDFEIVVPHVSYSQLIVDDDCKFTLASDTYQHPATQLVLSKESMEIIADDFKFVKENTATADEQLVRVFDEIVNQMNHYFTIFDQRSNRQKVTKARDKFVSLPTESEYEGAKKTQVGKTEVITNLLMGLHANSAQGDLKVLGLSTFGFFQSSGGLNLSEDAMIVYQSPTGLFERRICLKDI

SEQ ID NO: 281 - protein, 1381 aa, Lactobacillus fermentum
  REGION 1..1381: note = Lactobacillus fermentum ATCC 14931
MDYVKEYHIGLDIGTSSIGWAVTDSQFKLMRIKGKTAIGVRLFEEGKTAAERRTFRTTRRRLKRRKWRLHYLDKIFAPHLQEVDENFLRRLKQSNIHPEDPAKNQAFIGKLLFPDLLKKNERGYPTLIKMRDELPVEQRAHYPVTNIYKLREAMINEDRQFDLREVYLAVHHIVKYRGHFLNNASVDKFKVGRIDFDKSFNVLNEAYEELQNGEGSFTIEPSKVEKIGQLLLDTKMRKLDRQKAVAKLLEVKVADKEETKRNKQIATAMSKLVLGYKADFATVAMANGNEWKIDLSSETSEDEIEKFREELSDAQNDILTEITSLFSQIMLNAIVPNGMSISESMMDRYWTHERQLAEVKEYLATQPASARKEFDQVYNKYIGQVPKEKGFDLEKGLKKILSKKENWKEIDELLKAGDFLPKQRTSANGVIPHQMHQQELDRIIEKQAKYYPWLATENPATGERDRHQAKYELDQLVSFRIPYYVGPLVTPEVQKATSGAKFAWAKRKEDGEITPWNLWDKIDRAESAEAFIKRMTVKDTYLLNEDVLPANSLLYQKYNVLNELNNVRVNGRRLSVGIKQDIYTELFKKKKTVKAGDVASLVMAKTRGVNKPSVEGLSDPKKFNSNLATYLDLKSIMGDKVDDNRYQMDLENIIEWRSVFEDGEIFADKLTEVEWLTDEQRSALVKKRYKGWGRLSKKLLTGIVDENGQRIIDLMWNTDQNFMQIVNQPVFKEQIDQLNQKAITNDGMTLRERVESVLDDAYTSPQNKKAIWQVVRVVEDIVKAVGNAPKSISIEFARNEGNKGEITRSRRTQLQKLFEDQAHELVKDTSLTEELEKAPDLSDRYYFYFTQGGKDMYTGDPINFDEISTKYDIDHILPQSFVKDDSLDNRVLVSRAENNKKSDRVPAKLYAAKMKPYWNQLLKQGLITQRKFENLTMDVDQNIKYRSLGFVKRQLVETRQVIKLTANILGSMYQEAGTDIIETRAGLTKQLREEFDLPKVREVNDYHHAVDAYLTTFAGQYLNRRYPKLRSFFVYGEYMKFKHGSDLKLRNFNFFHELMEGDKSQGKVVDQQTGELITTRDEVAKSFDRLLNMKYMLVSKEVHDRSDQLYGATIVTAKESGKLTSPIEIKKNRPVDLYGAYTNGTSAFMTIIKFTGNKPKYKVIGVPTTSAVGLKRVGKPGSESYNQELHRIIKSNPKVKKDFEIVVPHVSYSQLIVDGDCKFTLASDTYQHPATQLVLSKESMEIIADDFKFVKENPATADEQLVRVFDEIVNQMNHYFTIFDQRSNRQKVTKARDKFVSLPTESEYEGAKKTQVGKTEVITNLLMGLHANAAQGDLKVLGLSTFGFFQSSGGLNLSEDAMIVYQSPTGLFERRICLKDI

SEQ ID NO: 282 - protein, 1327 aa, Lactobacillus florum
  REGION 1..1327: note = Lactobacillus florum 2F
MTEQQQPYNIGLDIGTSSIGWAVTDQNDKLLHIRGHNGIGVRLFKEGESAAERRGFRTTRRRLSRRRWRLRFLDRIFDAELAKVDPNFLARLKQSNISPLDPNKQMFGNILFDDPQFDDQKFHQQYPTIYHLRSALAQPDAPQADVRLIYLALHHMIKFRGHFLNGAAVEKFHGGQLHLESEFQELNQIFSNQQRDHVQLQTSSLDEVATILKDNQRTPSDRQRELSARLFVPVDKTIDKENKKLATELLKAVLGLKAKFDVILGVEATDPQAFKLQFSSDDFDDKIAELASELTDEANEILTVLQRLYFSLNLADILTNRQTKQVADSISTAMINRYDDHKHHLKMLKELEAQVTQEQRDGLKKAYDEYIDGDKPTIDTFYTNIKKNLDDSELANQIKSLIDLQAFMPKQRSKENGSIPHQLHQRELDQLIEVQGKYYPWLLAAKDKLDALIAFRVPYYVGPMIDPNQSDDPQNTKFAWMVRKEAGEITPWNFEEKVDKTSSATNFIKRMTTTDTYLLGEPVLPKNSLLYQQFTVLNELNKLKVNGKALTVDQKKYLYEHVCKKQRRVTLKKLSDCLMARGDFPMGAIFTGTTDQKNMNNTLKTYQDFQEIFGDEIDNPDRQVDFEKMIEWSAIFEDREIFKLKLAELNWLTSEQLERVSKKRYQGWGRLSQKLLTHIVNENGERIIDQLWNTNQNFMEIMGQDSVKQAIQEHNGANVAQTGINETIDELYTSPQNKKAIRQILLVVDDIKKAVGYAPANIMMEFAREDRDDHRLIASRARQLEKTYQEISKNWFDNESVTQELKDQIKNKTKFTDRLYLYFIQGGIDLYTGHPLNIDQLSSYDIDHILPQSFLLDNSLNNRVLTSQAENRVHKEDRLPGETVANKMRPTWKMMREQGLMTQRKYNNLTLKPDQISKFNNRGQFINRQLVETRQVIKLAADIMSQKYQADQTKVVTVKANLTHHMREKFNFYKSRNVNDYHHAFDAYLTLFVGNWLLKEYPKLQPYFVYGDFAKTGTNNLKSFNFLYRFERDHKLNDKGAIDTDKDQQLGYMKRIYRFKKMLVTKQLETNEGALYGQTLYPAPKNDKKTRNLINSKKNRPSDIYGGYSNENGSFLTLVKLKKGSKYDYRLVAVPVSKISEIKESELATIEKAIAPQFLKSSGKYRDFQVVLSKILINQKVIDDGMIFTIGSKSYKHNAKQVVLSDNSIQIVSTLSRISDKEKLITVFDEIVDITSKYLPWYKVNDVEKTKMLFRQMQDIDEMKKIIDNSLIGLHCNASITDLGKVGLSKYWGRFVLTAGISLTVDAQLIYQSPTGLFEHRVKVSDL

SEQ ID NO: 283 - protein, 1391 aa, Lactobacillus gasseri
  REGION 1..1391: note = Lactobacillus gasseri JV-V03
MTKIKNEYIVGLDVGTNSCGWVAMDFQNTILRMHGKTAIGSHLFDAGNSAADRRAFRTTRRRIKRRKWRLKLLEEIFDPYMTEVDPYFFARLKESGLSPLDKRKNVSSIVFPTALEDKKFYCNYPTIYHLRYDLMSEDKKFDLREIYLAIHHIVKYRGNFLYNTPVKDFEASKIDVKDSLEKLNELYERLDSEFTVELDSSNALEIEKIIRDKKVFKINKVKSIHQLLSLKTENKERTKLIKDVSKQIINAILGYKTKFETILLKNISKDEADDWEFKLTDVDADNKFENLIGDLNENEQEILLEIRNLANAITLSNIVEEGKTLSESMIDKYNKHSDDLELLKQVISDHPDRDKAKKLALAYDLYVNNRHGKLLQAKDVLGSKKTLSKEDFYKEVKKNLDDSKASQEILDTIALDSFMPKQRTNENGVIPYQLHQLELDRIIKNQGKYYPFLKEVNPVSSHLKEAPYKLDELIRFRVPYYVGPLISPNESTKNKQTKKNQNFAWMIRKEQGQITPWNFDQKVDRMASANKFIKRMTTKDTYLLGEDVLPANSLLYQKFTVLNELNNIKINGKRISVPLKEELYNNLFKKNSTVTTNKLKSYLKENYNLINVEIKGLADEKKFNSGLTTYNKLRNLKIFDQQLDDLNYDKDFERIIEWSTIFEDKAIYKDKLKTIKWLSDRQIDKLSKIRMQGWGQLSKKLLSQLTDNNGQTIIEQLWDSQNNFMQIVNQSDFKDAIAVANQNLLVNTSVEDILNEAYTSPANKKAIRQVVKVVDDIVKAASGKVPKQIAIEFTRDADDKAKISQTRANKLRKVYKELSNELASETIRNELERVAKDQKLLKDKYYLYFMQLGRDAYTGEPINIDDLGQYDIDHILPQSFIKDDSLENRVLVKKAVNNGKSDNVPVKLYGNRMAADLGMTIRHMWEKWKDQGLITKTKYNNLIIDPDKINKYESSGFIHRQLVETSQIIKLVSTILQSKYPDTEIIVVKARYNHYLRKHLNLYKSREVNDYHHAIDAYLSAICGNLLYQVYPYLRPFFVYGQYKKFSSDPKKEKIIYDKTRKYNFISQIFENKSNDIISLETKKKVFDKKDIIEKLKHAYNYKYMLVSRETETHDQEMFKMTVYPRLSRDTKKSRNLISKKKDMPTEIYGGYTNNSDAYMVIARINKKKGTEYRVFGVPMRELVNLRKAEKNGRYNAYLKQVLEPEIMYSKNGKKNKTISSFEIVKAKVPYKQVILDGDKKFMLASSTYVQNAKQLTLSQNSMQAITDNCENDTEEEKALEEKALIEAYDEILTNIDKYLPLFDINKFREKLHAGREKFINLSLDVKKDTILQVLNGLHDNAVMPKIKSLGLSTPLGFMQFSSGVPLSENAKLIYQSPTGLFEKRVKISDL

SEQ ID NO: 284 - protein, 1386 aa, Lactobacillus hominis
  REGION 1..1386: note = Lactobacillus hominis CRBIP 24.179
MTKITEDYIVGLDIGTNSCGWVAMDSKNTILRMHGKTAIGSHLFDAGNSAADRRAFRTTRRRIKRRKWRLKLLEEIFDSHLAKVDPYFFARLKESGLSPLDTRKNVSSIIYPTSLEDKKFYVDNPTIYHLRYKLMTEDRKFDLREVYLAIHHIVKYRGNFLYNTPVKAFEASKIDVKGSLKKLNELYEGLDSEFNVELDSNNALEIENIIRDKKIFKINKVKEINQLLSLKTEDKERTKLMKDVSKQIVNAILGYKTKFETILLKDVSKDEADDWEFKLTDVDADNKFENLIGDLNENEQEILLVIRKLANAITLSNIVEEGKTLSESMKDKYKKHSDDLKLLKQVISDHPDRDKAKKLALAYDLYVNNRHGKILQAKDILEKKKTLSKEDFYKEIKKNLDDSKESQEILDAISLDSFMPKQRTNENGVIPYQLHQLELDKIIENQGKYYPFLKEVNPVSSHLKQAPYKLDELIRFRVPYYVGPLISPNESTKNKQTKKNQNFAWMIRKEQGQITPWNFDQKVDRMASANKFIKRMTTIDTYLLGEDVLPANSLLYQKFTVLNELNNVKINGKRISVPLKQELYNNLFKKNSTVTTNKLKSYLKENYKLIKVEIKGLSDEKKFNSGLTTYNKLKNLKIFDQQIDDPNYNKDFERIIEWSTIFEDKAIYKEKLKTIDWLSDRQIDKLSKIRMQGWGQLSKKLLSQLTDNNGQTIIEQLWDSQNNFMQIVNQADFKDAIAVANQNLLVDTSVEDILNEAYTSPANKKAIRQVVKVVDDIVKATSGKVPKQIAIEFTRDADDNAKISQSRANKLRKVYKEMSNELASETIRNELERVAKDQKLLKDKHYLYFMQLGRDAYTGELIDIDNLEQYDIDHVLPQSFIKDDSLENRVLVKKAVNNGKSDNVPVKLYGNRMATDLGMTIRHMWEKWKEQGLITKTKYNNLIIDPDKINKYESSGFIHRQLVETSQIIKLVSTILQSKYPDTEIIVVKARYNHYLRKRLNLYKSREVNDYHHAIDAYLSAICGNLLYQVYPYLRPFFVYGQYKKFSSEPEKEKIIYDKTRRYNFISQIFENKDNDIISRETKKKVFDKKDIIEKLKRAYNYKYMLVSRETETHDQEMFKMTVYPRLSRDTKKSRNLIPKKKDMPTEIYGGYTNNSDAYMIIARINKKKGPEYRVFGVPMRELVNLRKAEKNGHYKAYLKQVLEPEIMYSKNGKKNKTISSFEIVKAKVPYKQVILDGDKKFMLASSTYVQNAKQLTLSQYSMQAITDNCENDTEEEKALVEAYDEILTNIDKYLPLFDINKFREKLHAGREKFVDLPLAEKKETILQVLNGLHDNAVMPKIKSLGLSTPLGFMQFHTGVSLSENAKLIYQSPTGLFEKRLKISDL

SEQ ID NO: 285 - protein, 1369 aa, Lactobacillus iners
  REGION 1..1369: note = Lactobacillus iners LactinV 11V1-d
MNNNYYLGLDLGTNSVGWAVTDDHYNIIKFHGKHMWGMRLFEEAETAKDRRLHRQARRRRQRLVERINLLEELFDKEISKVDQGFFARKKESDLHFEDKTTKSEYALFNDKSYTDRDYYKQYPTIFHLIMDLIENDKKRDIRLVYLACHYLIKHRGHFIFDGKNFTVDNSFENLLDKLITYLKDNDDITLSFPKDQLINIFKNSNLNSTEKSDQLKPFFGRTNLEKGIIKLLSGGKQDLSNMFRDETLKNSNYKNLKFSDNRFDDERDGYAADLGDRIDLLILLKQIYDASILESMMSQARVSIDGHKYISSAKVCAYEKHKSDLKRLKSLIKKYLPSEYNNIFRKITEKDNYVAYSKSNITNNKREKALKYVKYVDFTKYLTKKLKTIKTQDAEDDQEIFEIKGELEKQSFLPKQRTLDNSIIPYQLHLMELKKILDNQSKYYDFLLAKDDQEGITVKDKIISLLTFRLPYYIGPVNPAVHGKFAWVKRLANGKVTPWNYKEKIDIDASHEEFIKTKLSKCSFLIGCDVLPKNSLLYQKYMVLSELNTIKFNGVNISEKLKDDIYQNLFKNIQKVTKKRLQNYIKEHENIIGDVIVTGIDNAFKQGLVSYLKFKKIIGDKVDDDRYQKVLEKIIRDITLYDECAGKKIKKEYKDSDLFTEDELNKIVKLTFNDWGRLSAELLDQLEGEDTVSGETGKIIEFMQKHNYNLMQLMSKKFTFKSKIDEINKSYYQHDKFNYKSMIDSLYVSPATKRILWQSLKVVHEISKIMKHDPEKIFIEMARSKEDHPKRKLSRKADLKQVYKDSKKQIISIIGKDKYQDLSNELDNKDDRDLRWDNLYLYYTQLGRSMYSLKPIDISELMNKNLYDQDHIFPKSKKYDDSIENRVLVEKELNVKKSDIYPISDANIIPQKIKGQVESFWKMLYDHKLIGDKKYARLIRSKAFTDDELAGFIARQLVETRQATKETADLLKRLCPKSRIVYAKAQNASIFRQKFDIPKSRTINDLHHAQDAYLNIVVGNIFDTKFTQDPRNFIKNTKDSRNYNLEKIYDYNVERNNYVAWIAPDGETNGTIANVKCNLSTKDFRVTRPSFYKKGALFNQNLSRKGSNLAPIKEHSPKSNPLKYGGYSGKNNSFFVVVAGKDNKGKDIVKLIPVNTLIYNKMLHCDYKAKQELLTSYVANNFAINNFRIVKDDIKMYSLVKIDGAYYYLVGGTDERIEVKNAMQLLLSKDSIKAVKILEKESKDQFANIKNYKDIDIKLGRTFNEVVSKYTNSVFGKSMLISDKYRKDIFKSVEKSILEFNHLDTIGKADNLLKFVTLMRPSGSAHSLKMVGLIERIRKSNVISNFNEFKLINQSVTGLFENEEDLLKL

SEQ ID NO: 286 - protein, 1391 aa, Lactobacillus jensenii
  REGION 1..1391: note = Lactobacillus jensenii 269-3
MKEIKDYIIGLDIGTNSCGYVVTDKQNNILKLKGKTAIGARLFKEGEAAADRRAFRTTRRRLARRRWRLSLLEEIFDEEMNKVDPSFFRRLKESDYSPKDRRKQFNSIVFESSEADKAFYEKYPTIYHLRNALMHDNQKHDLREIFLAVHHIVKYRGNFLREDSVKAFKAAKFTLQGEDGIGPVDKLNDLLKEIYIEAAPELATDNLSKIEDIIKDKKLYKQDKLKQIANLLPKAVDSKDKAKLNKDIAKQVANALMGYMFRLDTLFSFTDVDVKDYKLKFSDANIDESLDALTSLLTDAQIEFVLELQSIYNTIVLNEIVPDGMSLSESMVKKYDDHKKDLKLYKEYIDSLSDQKKAKQLEAAYALYVNYRKADLLAAKKLFEKKKIGDKKFVDVISNFEVFGKFVSDNLDDSELANKIKARLDLGEFLPKQRTNQNGVIPYQLHQVELTQILEKQGKYYPFLITPNPVESHRNNAPYEISELVSFRVPYYVGPLIDNQSIKDKQNKNKFAWMVRQKQGQITPWNFEEMVDTTESANQFIKRMTRKDTYLLAEDVLPKSSLIYQKFMILDELNRIKIDGKKLTSKLKHDIFEKLFKKQKSINLDNLKNYLLAEGNIPGLIEGLSDGINFNNSFSTYIDYRNIFGDEIDNPNKQADFEKMIEWSTVFEDRKIFKRKLKEITWLTPEQIKQVSSKRYSGWGRLSKKLLTQITDENGVNILQRLWNEPETLTEVLANPVIKRKISEANSLFVQINKVENILDDAYTSPQNKKAIRQVIRVVDDIIAAAHGKKPSQIAIEFARSSQNKAKVPDTRKKQLDKIYNKISSEILDSSIKNELKNLKSNKYLSKDKLFLYFKQMGRDAYTGDKLSLDQLQNYDIDHIFPRSFIKDDSLDNRVLTQKPINAKKSDYGIPALEFGNKYVPDLGITVKEMWKLWQENGLISKSKLINLCTNPKKIGSKRASGFINRQLVETSQVIKLVAIILQAEFPDTEIIEVKALQNTTLRESFHLYKNRSVNDYHHAIDAYLTTIVGNYLYQVYPKLRPYFVYGQFKKFNQEKNIDILKRLKNFNFLRQLIFNTDDNIYISGTKEIVFNKKDIIHKLETAYGYKYMNISRECYQETSSLFNQTLYAHNSSVKNSLIPKKKGLPTEIYGGYSGNKDSFFVLVKIVKKRTNLYRIVGIPTRELAKLNSSNNYNQALNKIVESKLCLKETESFKILIKRLLYGTLIVDNGQKFRIGSFKEKHNVQQLVLQLKSMKYIKFYIDGGQNYFTDVERKKLEKQDRDKCLLYVFDDIMNVVNKRFTLFDMSKYEKDGDSLREKFNCLDFNDKVSILSDLLKAFHANSDRTSITKLKITNLGRHQAGKNGITLTTNAQIIYQSPTGLFERRIKIKDL

SEQ ID NO: 287 - protein, 1395 aa, Lactobacillus jensenii
  REGION 1..1395: note = Lactobacillus jensenii 27-2-CHN
MKEIKDYIIGLDIGTNSCGYVVTDKQNNILKLKGKTAIGARLFKEGQAAADRRSFRTTRRRLARRHWRLGLLEEIFDPEMEKIDPNFFRRLKESDYSPKDSRKQFNAIVFKSIKADKRFYKKYPTIYHLRNALMHDNQKHDLREIFMAVHHIVKYRGNFLREDSVNAFKAAKFSLRGEDGIGPVDKLNDLLKEIYSEYSPELATNNLSKIEDIIKDKNLYKQDKLKQVATLLIKEADSKDKAKLNKDIAKQVANSFMGYMFRLDTLFSLTDVDVKDYKLKFSDANIDESLDDLTSLLTDAQIEFVLELQSIYNTIVLNEIVPDGMSLSESMIKKYDDHKEDLKIFKEYIDSLSDQKKAKKLLSAYNLYVNYRKSDLVEAKNLFKNKKVGDKNFADVISNFEVFGKFVSDNLDDSELANKIKARLDLGEFLPKQRTNQNGVIPYQLHQVELTQILEKQGKYYPFLITPNPVESHRNNAPYEISELVSFRVPYYVGPLIDNQSIKDKQNKNKFAWMVRQKQGQITPWNLEEMVDTTESANQFIKRMTRKDTYLLAEDVLPKSSLVYQKFMILDELNRIKIDGKKLTSELKHDIFEKLFKKQKSINLDNLKNYLLVEGNIPGLIEGLSDGINFNNSFSTYIDYRNIFGDEIDNPNKQADFEKMIEWSTVFEDRKIFKRKLKEITWLTSEQIKQVSSKRYSGWGRLSKKLLTQITDENGVNILQRLWNEPETLTEVLANPVIKRKIVEANSSFTKAKDMKDILVEAYTSPQNKKAIRQVMRVVDDIIAAAHGKKPSQIAIEFAREDQDNPQMTKSRKAQLDQIYAKISDEFLDDAVKNELKNMKDNKPLAKDKVFLYFKQMGRDAYSGEKLSLDNLQDYDIDHIYPQSFIKDDSFDNRVLVQRAYNNGKSDNVPVLLFGNKIAAGLGITIRQMWKKWLELGLISKRKFNNLITDPEKISRNMASGFVNRQLVETSQVIKLVANILQAKLPDTEIIEVKASYNSILRKEFNLYKSREVNDYHHAIDAYLTTIVGNYLYQVYPKLRPYFVYGQFKKFGKAENQEDDPVKKIKKFNFIYQLIWGKDDAICISHTNQQVFSKKDIIDKLTTAYNFKYMNISHAVYTRNNNMFKQTLFPIIERTTAKTKSLIPKKLDRPTDIYGGYSNNNDAYLALVKVDKKRGSEYRVVGIPMRAAAMLKASKNYDEDLRKVIEPMVMFDKNGKAKRGIEGFRVLVGKMPFKQAVLDGNKKFMLTGTVDTPNLKQLVLSQQNMKYILDYIEDVDCRKHKFGDKVQNPDKCLLEVFDEIIEIVDKYFELFDSRDFREKLRNSRNKFIKLEASKKADTILAILKGLQAKSTRATIKELNISDFGRIITSSISPEAQLIYQSPTGLFERRVKVKDL

SEQ ID NO: 288 - protein, 1375 aa, Lactobacillus johnsonii
MTKIKDDYIVGLDIGTDSCGWVAMNSNNDILKLQGKTAIGSRLFEGGKSAAERRLFRTTHRRIKRRRWRLKLLEEFFDPYMAEVDPYFFARLKESGLSPLDKRKTVSSIVFPTSAEDKKFYDDYPTIYHLRYKLMTEDEKFDLREVYLAIHHIIKYRGNFLYNTSVKDFKASKIDVKSSIEKLNELYENLGLDLNVEFNISNTAEIEKVLKDKQIFKRDKVKKIAELFAIKTDNKEQSKRIKDISKQVANAVLGYKTRFDTIALKEISKDELSDWNFKLSDIDADSKFEALMGNLDENEQAILLTIKELFNEVTLNGIVEDGNTLSESMINKYNDHRDDLKLLKEVIENHIDRKKAKELALAYDLYVNNRHGQLLQAKKKLGKIKPRSKEDFYKVVNKNLDDSRASKEIKKKIELDSFMPKQRTNANGVIPYQLQQLELDKIIENQSKYYPFLKEINPVSSHLKEAPYKLDELIRFRVPYYVGPLISPNESTKDIQTKKNQNFAWMIRKEEGRITPWNFDQKVDRIESANKFIKRMTTKDTYLFGEDVLPANSLLYQKFTVLNELNNIRINGKRISVDLKQEIYENLFKKHTTVTVKKLENYLKENHNLVKVEIKGLADEKKFNSGLTTYNRFKNLNIFDNQIDDLKYRNDFEKIIEWSTIFEDKSIYKEKLRSIDWLNEKQINALSNIRLQGWGRLSKKLLAQLHDHNGQTIIEQLWDSQNNFMQIVTQADFKDAIAKANQNLLVATSVEDILNNAYTSPANKKAIRQVIKVVDDIVKAASGKVPKQIAIEFTRDADENPKRSQTRGSKLQKVYKDLSTELASKTIAEELNEAIKDKKLVQDKYYLYFMQLGRDAYTGEPINIDEIQKYDIDHILPQSFIKDDALDNRVLVSRAVNNGKSDNVPVKLFGNEMAANLGMTIRKMWEEWKNIGLISKTKYNNLLTDPDHINKYKSAGFIRRQLVETSQIIKLVSTILQSRYPNTEIITVKAKYNHYLREKFDLYKSREVNDYHHAIDAYLSAICGNLLYQNYPNLRPFFVYGQYKKFSSDPDKEKAIFNKTRKFSFISQLLKNKSENSKEIAKKLKRAYQFKYMLVSRETETRDQEMFKMTVYPRFSHDTVKAPRNLIPKKMGMSPDIYGGYTNNSDAYMVIVRIDKKKGTEYKILGIPTRELVNLKKAEKEDHYKSYLKEILTPRILYNKNGKRDKKITSFEIVKSKIPYKQVIQDGDKKFMLGSSTYVYNAKQLTLSTESMKAITNNFDKDSDENDALIKAYDEILDKVDKYLPLFDINKFREKLHSGREKFIKLSLEDKKDTILKVLEGLHDNAVMTKIPTIGLSTPLGFMQFPNGVILSENAKLIYQSPTGLFKKSVKISDL

SEQ ID NO: 289 - protein, 1382 aa, Lactobacillus mucosae
  REGION 1..1382: note = Lactobacillus mucosae LM1
MDIGTNSIGWTAIDDHFSLLRVKGKNAIGVRTFKEGETAADRRGFRTARRRLSRRRWRLQFLDEFFAPYLAEVDPNFLARLKQSDISAKDPAKNQEYMGKLLFPDQEAASDGNGYPTLIQMRKAMPAEKAADFPVFNIYQLRYALMNEKRKFDLREIYLAVHHIVKYRGNFLNNTSVDKFKADQIDFNKSFETLNDLFRQVQPIAPFQIDLTKVDELGKLLLDTKQKKLDRQKAVAKLLPLIEDGTDKEIVKAHQQTAREISKLILGYKAKVGLILQNNLDQTLDMSTENSDDQLMQIAEELDDYQMELINQLSLLYSQIMLNEIVPNGETVSASMLNRYYKHRCQLKELKDYGAAQDKKTREQLDHLYAEYIGQIPKDSKFDFTKDLKKLMDKSDLGQKIKDEIEAGDYLPKQRTSANGVIPHQMHQQELDQIIENQKEYYPWLAEPNPVEKNIKNAKYKLDQLVSFRVPYYVGPMITLADQQKTSKASFAWAVRKKAGKITPWNFYDMIDREKSANNFIKRMTNKDTYLLSEDVLPASSLLYQKFTVLNELNNIRVNGRKLQPALKQAIYTDLFQKRKTVNLKTLTNFLAIHEPTLTKPKIEGLSNGRSFNSSLGTYIDMSKILGDSLDDLNYRDDIEKIIEWSTVFEDSEIYGVKLQEIQWLTNEQREKLVRKRYQGWGRLSKKLLTGITDENGQRIIDLMWDTSKNFMQIVHQPVFEEQIAELNQQLLQDADKAPLEVVDDILADAYTSPQNKKAIRQVVKVVADVVKAVGNAPASISIEFARNEDRNKELKNSRRHSIEKLYHETAEKLVKQTNLLEELGNVKDLNDRYYLYFTQAGRDMYDGTPINIDEISTHYEIDHILPQSFLKDNSLDNRVLVKKSENAAKSDRVPAKLYGAKMRAFWKQLKESQLISNRKYLNLTTDPEQVDKYQMQGFVHRQLVETRQIIKLAANIFGSLYPDSAVIETRAELTKQLREKFSLYKVRDVNDYHHAVDAYLTAFAGHYLYQRYPKLRPMFVYGDYAKIYADDLKRLRSVNLFHDLEKDQYNSGTAVNPETKEKIVDVDWLSDYVSKIQHFKYMLISKAVYTQHGQLYGATILPVAQVDKISAPIGIKDDKPVDIYGAYTNEVAAYMAIVRVNGKKPKYKVVSVPVRMLQRLKMAEQKGHDQYMQTLHDVLLRNFTSLKKNRKTGLKEAVVKDFDVLVPCVRYNQLVIDGDTKFTLGSATYQHNAKQLVLCNHSLETLANNFEYVRKHPDEADERMIMLYDDILDQVNHYFTLYDKNKFREKLNAGRDKYLKLPTFSQFENNKKTAIGKSEAIINILRGLHANAAITNLKCLGVSTPFGQLQSPSGIELSENAKLVYQSPTGLFSREVLLKDL

SEQ ID NO: 290 - protein, 1362 aa, Lactobacillus paracasei
  REGION 1..1362: note = Lactobacillus paracasei subsp. paracasei 8700:2
MTKLGKPYGIGVDIGSNSIGFAAVDENSHLIRLKGKTVIGARLFEEGKAAAKRRAGRTTRRRLSRNRWRLSFLRDFFESHITPTDPNFFMRQKYSEISPKDKARYKYEKRLFNDRTDAEFYQQYSTMYHLRNRLMTDPSRADVREIYFAIHHILKSRGHFLTPGDAKDFNTNDVALDEIFPALQDAYAQVYPDLGITFDEDKANEFKTILLNEIATSIDTQRALVKLLLAEEDDKDILKQQKQVLTEFAKAVVGLKTKLNLALGTEVDSSEATAWNFSLGQLDDKWAGIESAMTDEGTEILDQIRDLYRARLLNGIVPTGKTLSQAKVDDYTQHHEDLQLFKAYLKQLEDDGTAKAIRQLYDRYIDGDDAAPFLRENFVKALTKDVTAHPNTKSPELLERLAQPDFMLKQRNKANGAIPVQMQQRELDQIIKNQAVYYDWLAAPNPVEKHRKSMPYQLDELLNFRIPYYVGPLVTAKEQKAAQGGVFAWMVRKDPEGNITPYNFDEKVDREASANTFIQRMKTTDTYLIGEDVLPKQSLLYQRYEVLNELNNVRVNNEKLSIEQKQQVIRELFERHNSVTIKQFAENLRAHGDYAHIPEIRGLADEKRFLSSLSTYRQLKSLLPEAIDDPAKQADIENIIAWSTVFEDAAIFKTKLKEISWLGSEAITKLSNIRYRGWGQFSRKFLNGLTLGNGHTIIQELLLSTNNLMQILTDETLQKKMTELNADKLKTANINDAIDNAYTSPSNKKALRQVLRVVDDIKRAADGQDPSWLYVETADGGGTPGKRTRARQHQLQEIYANAAHELIDTAVRGELEDKISDKADFNDRLVLYFMQGGRDIYTGAPLNIDQLSSYDIDHILPQSLIKDNSLDNRVLVHAIINREKNATFASTIYAQKMNATWRQWHEAGLISGRKLRNLQMRPDQIDKYASGFVARQLVETRQIIKLTEQIVAAQYPDTKIIAVKAGLSHQLREELEFPKNRDVNHYHHAFDAFLAARIGTYLLKRFPNLQAFFTYGKFTKADVKKLRGFNFIRDITHAEDKIVAKDTGEVVWDKQRDVDELDRIYNFKRMLITHEVRFETADLFKQTVYGARDSKEAGGSKQLIPKKKGYPVDIYGGYFRENTAYLAVVKVTKKTETIFKVVKIATSQVAALNKARSRSTAEELSVLTELLKPKFSKVGKNGKITDTPFEVVLPRVPREQLFYNAKYGFFMVNSDTMFHNFQEIWVSRSDQKILQQIRKAKIDYPNVDQDLDNLFHNLADQIVKYFDLYSIAGFKEKISQSQNTFNDLAVDDTDQSVGKITVINELLKGAQANGMTGSLKVLKISTPFGFTQDKSGVLTKDSSIIYQSPTGLFERSVRLTDL

SEQ ID NO: 291 - protein, 1382 aa, Lactobacillus pentosus
  REGION 1..1382: note = Lactobacillus pentosus IG1
MKKIVNYNLGLDIGTSSIGYAAIDDQGRPVRHQNKTVMGVRLFKEGKTAESTRIFRGTRRRLSHRHWRLGYLDRIFDNEIAKVDENFLPRLKASKRARSDEKRSFRGSLLFPETGDDAYYQKYPTIYHLRYALITQKKQFDIRLIYLALHHMIKYRGNFLDTTPVSAFNIHDIDLTDQFASLNDCYQLLDMDFEFQFDLNNIEQVQKLLLDETLSKTKRQAAVSKVLVMSTGNKAFDDQQNGIASEFIKALLGGPFDLSKILNLSVADVKSWKLHMTDKDVDDTLNSLVEELDENHKQIVNLLQMIYSQVMMLGLLNGQQSISASMIERYDDHAKHWAALKKLLPALGEQEQSTIIHAYTAYTGHSRTKQLSRAEFYTKVNSILKKHENIAEATGLIELIDRNEFMPKQRDAVNGVIPHQLHQRELQLIIQNQQKYYPFLAAKAYPDADETMIEQLLSFRVPYYAGPLVDRDFINESSDQEQAMQNTKFSWLKRREAGEITPWNFEQKVDVQETANRFIKRLTTKDTYLMTEDVLPKESLIYQRFEVLNELNAIRINDRRLTAENKQLAFQQLFMAGNTKNVSIKKFRNFVFDSLKFPEKVKITGFAGQHNFLAKLSTYHDFKKIFGERVDHTDLQPDFERIVEWCTIFEDRHIYREKLKEIQWLSQSEIDQLVLIRNHGWGRLSKRLLTGIRDSDGRTVMDQLWFGTDNFMRIISQSDFAAAIANENRTQLNQHGLEDVLDSAFMSPQNKKAIRQVLKVVDDIEQTLGCPPKKVMIEFTRSPDKKKQRTVTRLEKVQQAYKAVADQLAGQSIVSELDQYANTHSKLSDTYYLYFMQLGRDLYSGKPIDIDSPMLDDDHILPRAFMKDNSLDNRALTEKPINNTKAAKFPSKVFGQQKEVTDFWKLLRRCGLMSNIKEKHLYLDPDNVDKWTRRGFIHRQLVETSQVIKIVANILNDRYQQSQTEVLEVPARLGTELRECFGWYKVREVNDYHHVFDAYLAAFIGNYLYRRYPKLQPYFVYGNFAELNKAQLKNIKSFNFLYNITDNKRVVKDIETGQTLWDDQIRQQIQHIYEYKYMLTSHEAFTQHKELYGQTIYPRREFKPGTLKAIKQDQPQELYGGYKNLTAAYMCIVKIQARKRRAAEYRVVRVATESLSALQQAKRLGVQAYERCLRQELVRNNEILRTNADPNSAPREFEVLLDRVLCHQMIISDGQKYLLGSHAYKINCMQLVLSNNSMKILSTSIVKLKQMTNEPLVQVYREILDVVNKYFTLYDVNSFRENLNQFFDKFRTLPITNEYESSKSGKKLIHRGQLETLTLILRGLHANSDKVQYGDQSTLLGGFQTKDGIKLSKDSVIQYTSPAGLNVRTVKLRDLEQKEAQK

SEQ ID NO: 292 - protein, 1361 aa, Lactobacillus pentosus
  REGION 1..1361: note = Lactobacillus pentosus KCA1
MNEPYGVGLDIGTNSVGWTVVDMNGRVRKVKGKTALGARLFKEGATAEDRRGFRTTRRRLKRVKWRLRLLREFFDQPISKIDPNFFARRKYSDISPRDPNYNGLAKTLFNDRTDKEFYDDYATIYHLRDKLMTSNRKFDIREIYLAIHHIVKYRGNFLRTGPASQYGSASLHLATSFQKLNDLFAQSEETLNLKLVTDEALLQQIQQILVRTDLSRSEQQRQIWPLMAVLTGASAAEKKRQKNVVVELSKALVGLKAKMNVVTLTEVDAAVVKDWTFTMEESQDKLPEIEEQLSEVGQQIMDEVIQLYASVNLAQLIPAGKRFSQHMVEKYKHHEKNLELLKAYIHSQSDSKRGREIRATYDRYIDGVDSKPVTQEMFYKDLMKYVEADATSNHLAAEIKDEIDSEQFMPKLRTKQNGSIPYQVQQYELDQIISHQKKYYPWLGEENPVAERRGKFPYKLDELVGFRVPYYVGPLITKEDQQATSGAGFAWMVRKADGPITPWNFDQKVDRIASATAFIQRMQTTDTYLIGEDVLPARSLIYQRFMVLNELNNMRVEDRKLAPQQKQRLYNQVFKQHQHVSVKNIQQNLMDAGEYRKTPQITGLADPKGFNSSLSTYHDFKKILLEAIADEHKRADIEKIILWSTTFEDSAIFKQKLEEVAWLTDAQRKQLSGLRYRGWGQLSHKLLTAFKDDKGRSIMDGLWETSDNFMQLRKQPAIETQIKEANQANLTDADIQDTINELYTSPQNKKAIREVMLVLDDIKNAMHGQTPSWIFVEAARGGGVAGRRTQSRSSQIVEAYKGTAKEIVSEKVQHELNEKIKAKADFNTRLVLYFLQNGRDLYTNEAINIDRLSEYDIDHILPQSLVKDDSLDNRVLTSARINREKNDTFASEKFGRKMGAQWRELHRNGLMTQRKLKHLLMRPDEISKHATDFINRQLVETRQVIKLVEELISSEYPAASIVAVKANLTHQFRQTFNFPKLREVNDYHHAFDASLTAFIGMYLLKQYPKLERFFVYGKFAKQPINLTRFNIIRKLAVAEKPIANIETGEILWDKTADIKYFEKLYNYKRLLVTHEVRENYGAMFKQTLFKASYNKSKTLVPKKNHMETSVYGGYSNQETAYLAIVRIPFKSGFKFIVVGIPTRMVAKIKHYQSLGATLNQATHKVIEPKFTKISRKTKQTVISDYEVVLPKVYLDQVVRDQVKGQMYRFSLGSDKEYHNVQELYLPLSIQQAFVGHYDESDDQRSNDLVKVYDAALKQLQRYFPLHLSRNFDQVASQAHQSFEGLKNNVQTSDKQLGKKEVLNSLFVGLHANATRSNLSVLGMSKDFGRIKSNGITLTDQAEIIYQSPTGLFERKVALKDL

SEQ ID NO: 293 - protein, 1358 aa, Lactobacillus pentosus
  REGION 1..1358: note = Lactobacillus pentosus MP-10
MNEPYGVGLDIGTNSVGWTVVDMNGRVRKVKGKTALGARLFKEGATAEDRRGFRTTRRRLKRVKWRLRLLREFFDQPISKIDPNFFARRKYSDISPRDPNYNGLAKTLFNDRTDQEFYHDYPTIYHLRDKLMTSDRKFDIREIYLAIHHIVKYRGNFLRTGPASQYGSASLHLATSFQKLNDLFAQSEESLNFKLVTDEAQLQQIQQILVRTDLSRSEQQRQIWPLMVVLMGATAAEKKRQKDFAKELANALVGLKAKLNVVTLTNVDTTVVKDWTFTLEESQDKLPEIEEQLSEVGQQIMDEVIQLYASVNLAQLIPAGKRFSQHMVEKYNHHEKNLELLKAYIHSQSDSKRGREIRATYDRYIDGVKSKPVTQEMFYKDLMKYVEADATSNHLAAEIKDEIDSEQFMPKLRTKQNGSIPYQVQQYELDQIISHQKKYYPWLGEENPVAERRGKFPYKLDELVGFRVPYYVGPLITKEDQQATSGAGFAWMVRKADGPITPWNFDQKVDRIASATAFIQRMQTTDTYLIGEDVLPARSLIYQRFMVLNELNNMRVEDQKLAPRQKQRLYNQVFKQHQHVSVKNIQQNLMDAGEYRETPKITGLADPKGFNSSLSTYHDFKKILPEAIADEHKRADIEKIILWSTTFEDSAIFKQKLEEVAWLTDAQRKQLSGLRYRGWGQLSHKLLTAFKDDNGRSVMDGLWETSDNFMQLRKQPAIETQIKEANQANLTDADIQDTINELYTSPQNKKAIREVMLVLDDIKNAMHGQTPSWIFIEAARGGGVAGRRTQSRSKQIVEAYKSTAKEIVSEKVQHELNEKIKAKADFNTRLVLYFLQNGRDLYTNEAINIDRLSEYDIDHILPQSLVKDDSLDNRVLTSARINREKNDTFASEKFGRKMGAQWRELHRNGLMTQRKLKHLLMRPDEISKHATDFINRQLVETRQVIKLVEELISSEYPSASIVAVKANLTHQFRQTFNFPKLREVNDYHHAFDASLTAFIGMYLLKQYPKLERFFVYGKFAKQPINLTRFNVIRKLAVAEEPIANIETGEILWDKTADIKCFEKLYNYKRLLVTHEVRENYGAMFDQTIFKATDSRKRLIQKKKGFATETYGGYTGRTLAYLAIVKVVTNKDTQYQVVGIPTTMVTQIQQLEASGLTSKQAVTKAIGAMINENNKKLQSYEVLLPKVRFEQVVRDEVKGHIHRFALGTDTYYHNIQELYLPLTIQRAFLGKRNDTDAQTEQNLLTVFETTLAQVNRYFPLYEMNKFKQILNSAQEKFAALPTKNKTVKNKLVTGKDGVLNNLFIGLHANASLGDLKILGMKIGFGKLQVPGGLKLTDQAEIIYQSPTGLFERKVALKDL

SEQ ID NO: 294 - protein, 1358 aa, Lactobacillus plantarum
MKEPYGVGLDIGTNSVGWTVVDASGHVRKIKGQTGIGVRLFKEGAAAADRRGFRTTRRRLKRVKWRLRLLREFFDQPISKVDINFFARRKYSDVSPRDPNYNGLEKTLFNDRSDQDFYHDYPTIYHLREALMTQHRKFDVREIYLAIHHIVKYRGNFLRNDAATAYRSGTLDLQQHFETLNHLFSQADLELNLNLTTDVALLDSIKQTLVRTDISRSDRQKLIMPLLAVLTGATTAEKKRQKAVVTEFAKALVGNKTKIDVLTLTDIDATEAKDWAFSLEENQDKLPGIEDRFSEVGQQIIDEVIRLYASVNLAQLIPEGKRFSQSMVEKYKRHGEDLKLLKAYIRSQSDAKRGRAIRATYDQYIDGVKSKQVTQEAFQKALGKFVDADVDLNSWAAQIKQAIDSEQFMPKLRTKQNGAIPYQVQQNELDQIISNQKEYYPWLGEENPVIKRRGKFPYKLDELFGFRVPYYVGPLITKEMQAATANAGFAWMVRKADGPITPWNFDDKVDRVASATAFIQRMQTTDTYLIGEEVLPARSLIYQRFMVLNELNNIRVDDGQLTPRQKQRLYNQVFKKHKRVTAKNIQDNLVAAREFPTAPRITGLADPKVFNSSLSTYHDLKQVLPEAMSDVRKQADIEKIILWSTIFEDSTIFKQKLTEISWLTAAQLKQLGQLRYRGWGQLLRKLLTGLKDDNNRSIMDGLWETNANFMQLRSQPAIENQIKSANQANLTTADLQDTINELYTSPQNKKAIREVMVVLADIKDAMHGQTPNWIFVEAARGGGVAGRRTQSRSKQIVAAYQGTAQAIVRDQVQRELKEKIKNKANFNTRLVLYFLQNGRDLYTGDAINIDRLSEYDIDHILPQSLVKDDSLDNRVLTNARINREKNDTFASEKFGKKMGAKWKEMHRMGLMTKRKLDHLLMRPDEISKYATGFINRQLVETRQVIKLVEELINAEYPSTAIVSVKANLTHQFRQTFDFPKIREVNDYHHAFDAALTAFIGTYLLKRYPKLERFFVYGKFAKQPVNLTRFNVIRKLAKTDTPITDIDTGEVLWDKLTDIKYFETLYDYKRLLVTREVSENYGAMFDQTLLKASDNGKRLIRKKQSFDTAIYGGYTGKTLAYMAIVKVSTKKDVQYQVVGVPTTMVTQIEQLEQQGMTNKQAVTKVIEPLIAANNKKMLTYEVLLPKVRFEQVVRDRIKGQTHRFALGTDTYYHNIQELYLPLTLQRAFLGKQNESEVQLNQNLLTVFDATLAQVNRYFPLYEMNKFKKILNSARDQIELLEAKNQFVKNKLVLGKQGILTNMFIGLHANASYGDLKVLGVKIDFGKLQVPGGIKLTGDAEIIYQSPTGLFERKIALKDL

SEQ ID NO: 295 - protein, 1363 aa, Lactobacillus rhamnosus
MTKLNQPYGIGLDIGSNSIGFAVVDANSHLLRLKGETAIGARLFREGQSAADRRGSRTTRRRLSRTRWRLSFLRDFFAPHITKIDPDFFLRQKYSEISPKDKDRFKYEKRLFNDRTDAEFYEDYPSMYHLRLHLMTHTHKADPREIFLAIHHILKSRGHFLTPGAAKDFNTDKVDLEDIFPALTEAYAQVYPDLELTFDLAKADDFKAKLLDEQATPSDTQKALVNLLLSSDGEKEIVKKRKQVLTEFAKAITGLKTKFNLALGTEVDEADASNWQFSMGQLDDKWSNIETSMTDQGTEIFEQIQELYRARLLNGIVPAGMSLSQAKVADYGQHKEDLELFKTYLKKLNDHELAKTIRGLYDRYINGDDAKPFLREDFVKALTKEVTAHPNEVSEQLLNRMGQANFMLKQRTKANGAIPIQLQQRELDQIIANQSKYYDWLAAPNPVEAHRWKMPYQLDELLNFHIPYYVGPLITPKQQAESGENVFAWMVRKDPSGNITPYNFDEKVDREASANTFIQRMKTTDTYLIGEDVLPKQSLLYQKYEVLNELNNVRINNECLGTDQKQRLIREVFERHSSVTIKQVADNLVAHGDFARRPEIRGLADEKRFLSSLSTYHQLKEILHEAIDDPTKLLDIENIITWSTVFEDHTIFETKLAEIEWLDPKKINELSGIRYRGWGQFSRKLLDGLKLGNGHTVIQELMLSNHNLMQILADETLKETMTELNQDKLKTDDIEDVINDAYTSPSNKKALRQVLRVVEDIKHAANGQDPSWLFIETADGTGTAGKRTQSRQKQIQTVYANAAQELIDSAVRGELEDKIADKASFTDRLVLYFMQGGRDIYTGAPLNIDQLSHYDIDHILPQSLIKDDSLDNRVLVNATINREKNNVFASTLFAGKMKATWRKWHEAGLISGRKLRNLMLRPDEIDKFAKGFVARQLVETRQIIKLTEQIAAAQYPNTKIIAVKAGLSHQLREELDFPKNRDVNHYHHAFDAFLAARIGTYLLKRYPKLAPFFTYGEFAKVDVKKFREFNFIGALTHAKKNIIAKDTGEIVWDKERDIRELDRIYNFKRMLITHEVYFETADLFKQTIYAAKDSKERGGSKQLIPKKQGYPTQVYGGYTQESGSYNALVRVAEADTTAYQVIKISAQNASKIASANLKSREKGKQLLNEIVVKQLAKRRKNWKPSANSFKIVIPRFGMGTLFQNAKYGLFMVNSDTYYRNYQELWLSRENQKLLKKLFSIKYEKTQMNHDALQVYKAIIDQVEKFFKLYDINQFRAKLSDAIERFEKLPINTDGNKIGKTETLRQILIGLQANGTRSNVKNLGIKTDLGLLQVGSGIKLDKDTQIVYQSPSGLFKRRIPLADL

SEQ ID NO: 296 - protein, 1361 aa, Lactobacillus rhamnosus
  REGION 1..1361: note = Lactobacillus rhamnosus HN001
MTKLNQPYGIGLDIGSNSIGFAVVDANSHLLRLKGETAIGARLFREGQSAAERRESRTTRRRLSRTRWRLSFLRDFFAPHITKIDPDFFLRQKYSEISPKDKDRFKYEKRLFNDRTDAEFYEDYPSMYHLRLHLMTHTHKADPREIFLAIHHILKSRGHFLTPGAAKDFNTDKVDLEDIFPALTEAYAQVYPDLELTFDLAKADDFKAKLLDEQATPSDTQKALVNLLLSSDGEKEIVKKRKQVLTEFAKAITGLKTKFNLALGTEVDEADASNWQFSMGQLDDKWSNIETSMTDQGTEIFEQIQEHYRARLLNGIVPAGMSLSQAKVADYGQHKEDLELFKTYLKKLNDHELAKTIRGLYDRYINGDDAKPFLREDFVKALTKEVTAHPNEVSEQLLNRMGQANFMLKQRTKANGAIPVQLQQRELDQIIANQSKYYDWLAKPNPVEKHRASKPYQLDELLTFRIPYYVGPLITPKEQAESRENVFAWMIRKDPSGNITPYNFDEKVDCPASANMFIQRMKNTDTYLIGEDVLPKRSLLYQKYEVLNELNNVSIDGRRLGADQKQRLIREVFERHSSVTIKQVAENLVAHGDFAKRPEIRGLADEKRFLSSLSTYHQLKKILHEAIDDPTKEHDIENIITWSTVFEDAAIFKTELAKISWLDSDTIKALSNIRYRGWGQFSRKLLDGLKLGNGHTVIQELMLSNHNLMQILTDETLKTTMAELNQDKLKADDIEDVINDAYTSPSNKKALRQVLRVVEDIKHAANGQDPSWLYIETADGPGTAGKRTQSRQKQIQTVYANAAQELIDSAVRGELEDKIADKASFTDRLVLYFMQGGRDIYTGAPLNIDQLSHYDIDHILPQSLIKDDSLDNRVLVNATINREKNNVFASTLFASKMAATWRKWHEAGLISGRKLRNLMLRPDEIDKFAHGFVARQLVETRQIIKLTEQIAAAQYPNTKIIAVKAGLSHQLREELDFPKNRDVNHYHHAFDAFLAARIGTYLLKRYPKLAPFFTYGEFAKVDVKKFREFNFIGALTHAKKNIVAKDTGEIVWDKERDIQELDRIYNFKRMLITHEVYFETADLFKQTIYAAKDSKERGGSKQLIPKKQGYPTQVYGGYTRENTAYLAVVKTVEKKADVYRVVRIATSQVAALKEARAQSTVKERELLKKFLTTKFTKIGKNGKKAITPFDIVIPRVPREQLFHNKRYGFFMVNSDTLMHNYQELWMSRSDQQILSKLVKSAKTVENGQVGRLFENIVEQINKYFPLYDINQFRKKLDQSKDIFSKLPLEGNGTTSGKRETIQNILTGAGTGAKNGDLKNLGIKTPFGFLQVPSGIVLDDDTTLIYQSPTGMLNRIVRLSEL

SEQ ID NO: 297 - protein, 1361 aa, Lactobacillus rhamnosus
  REGION 1..1361: note = Lactobacillus rhamnosus R0011
MTKLNQPYGIGLDIGSNSIGFAVVDANSHLLRLKGETAIGARLFREGQSAAERRESRTTRRRLSRTRWRLSFLRDFFAPHITKIDPDFFLRQKYSEISPKDKDRFKYEKRLFNDRTDAEFYEDYPSMYHLRLHLMTHTHKADPREIFLAIHHILKSRGHFLTPGAAKDFNTDKVDLEDIFPALTEAYAQVYPDLELTFDLAKADDFKAKLLDEQATPSDTQKALVNLLLSSDGEKEIVKKRKQVLTEFAKAITGLKTKFNLALGTEVDEADASNWQFSMGQLDDKWSNIETSMTDQGTEIFEQIQELYRARLLNGIVPAGMSLSQAKVADYGQHKEDLELFKTYLKKLNDHELAKTIRGLYDRYINGDDAKPFLREDFVKALTKEVTAHPNEVSEQLLNRMGQANFMLKQRTKANGAIPVQLQQRELDQIIANQSKYYDWLAKPNPVEKHRASKPYQLDELLTFRIPYYVGPLITPKEQAESRENVFAWMIRKDPSGNITPYNFDEKVDCPASANMFIQRMKNTDTYLIGEDVLPKRSLLYQKYEVLNELNNVSIDGRRLGADQKQRLIREVFERHSSVTIKQVAENLVAHGDFAKRPEIRGLADEKRFLSSLSTYHQLKKILHEAIDDPTKEHDIENIITWSTVFEDAAIFKTELAKISWLDSDTIKALSNIRYRGWGQFSRKLLDGLKLGNGHTVIQELMLSNHNLMQILTDETLKTTMAELNQDKLKADDIEDVINDAYTSPSNKKALRQVLRVVEDIKHAANGQDPSWLYIETADGPGTAGKRTQSRQKQIQTVYANAAQELIDSAVRGELEDKIADKASFTDRLVLYFMQGGRDIYTGAPLNIDQLSHYDIDHILPQSLIKDDSLDNRVLVNATINREKNNVFASTLFASKMAATWRKWHEAGLISGRKLRNLMLRPDEIDKFAHGFVARQLVETRQIIKLTEQIAAAQYPNTKIIAVKAGLSHQLREELDFPKNRDVNHYHHAFDAFLAARIGTYLLKRYPKLAPFFTYGEFAKVDVKKFREFNFIGALTHAKKNIVAKDTGEIVWDKERDIQELDRIYNFKRMLITHEVYFETADLFKQTIYAAKDSKERGGSKQLIPKKQGYPTQVYGGYTRENTAYLAVVKTVEKKADVYRVVRIATSQVAALKEARAQSTVKERELLKKFLTTKFTKIGKNGKKAITPFDIVIPRVPREQLFHNKRYGFFMVNSDTLMHNYQELWMSRSDQQILSKLVKSAKTVENGQVGRLFENIVEQINKYFPLYDINQFRKKLDQSKDIFSKLPLEGNGTTSGKRETIQNILTGAGTGAKNGDLKNLGIKTPFGFLQVPSGIVLDDDTTLIYQSPTGMLNRIVRLSEL

SEQ ID NO: 298 - protein, 1375 aa, Lactobacillus ruminis
  REGION 1..1375: note = Lactobacillus ruminis ATCC 25644
MRKNQEPYNIGLDIGTSSIGWSIMNDNFDLMRVKGKKGIGVRLYNEGQSAAERRMHRTARRRYGRRKWRLRLLEDFFDEHMAEVDDTFFARLKDSNISPKDDKKYRKSLLFPKSKGVTYQDDGEFYKKYPTMYHLRYALMTEHRKFDLREIYLAFHHMVKYRGNFLYDTSVDSFEAKNLDIKGKFDEINDLLSSYTDFYVDNSNAALVESILLEKNTTRKDKSKKIAKLLHVEDKEKGKNKKAKDLATQISNAVLGLKCNFHLIFELQQKYSFDLCSEKTEENIAKLSEVLDENQKMLLMILKEVQDQVMLNAFVPSGMSLSEAMMQKYDDYGEQLKIYHELEHSVSDDSAAKLRGAYRDYNDNIIKRIDGDNKKDTFYKRVKNILTKISKEYVDQDVLESCGKLKKLIDENKLFIRQRTAANGVLPHQLHQIEMRKIIDNQKEYYPWLAEPNPNEKRRVYSKYKVEELIAFRIPYYVGPLVDPNNADKNKEARFSWMVRKKDGEITPWNFYDKVDWAESANNFIERMKSKDTYLLGEDVVPKESMLYQKYEVLNELNNLRINDSGLSDSFEDVKLKQAIYNDLFKKQKIVKITDLQNYLVQNHKYLVKPKISGLADENRFLSSLSTYSDLKTIFGDKVDDRTYFNDFEKMVEYSTVFEDGHDYNQKLDEYTWLTKEEKYKIGKKRYRGWGKLSKKLLTGLRDKNNHTIMDNLWETNRNFMQIQTADEFSKQIAEENERHLKGSVSDAINDMYTSPANKKAIRQVLRVVDDIQKAMGYAPSSISLEFAREDGPSVRTVSRANRMKSIYEKYASEVSEEVMKDLDGVIKDKKGLNDRLYLYFEQQGKDMYSGHPLDFDKVISGQEYDIDHILPQAVIKDDSLDNRVLTTKALNNDVKSKGVPCRMFNGMHSFWKNLYDKGFISRRKFNNLTTNPENIDKYKMKGFVNRQLVETRQIIKLVANVLNDKYQNDDVDIIEVRAELTHDVRKHFKFYKNRNVNDYHHAFDAYLTSFIGHYLFKKYPNLRPLFDYNDFMKVSDNVFKQLRGNNFLGEFLNKTGDIISTDGNFVLNKEEMINKLNKAYAFKKILVTKEVGQRTGAMFNETRYPAPNSRKAALKYRRMPKPDSLISVKDYKNTDIYGGYSGKNDAYMVIVDMGKQYMVVGVPVRYTEKLDKLRIKHSELYRDELRKVLSRDKTLLDSKGNVKRFDIVLDRVLYGQLIEDGNELFTLGSSKYKRNFRQLFLDKQCIEILDSSATPQPTDEELIWVYDQILDKVDKYFELYDINRQRETLRKGRAAFCSLPNISMKKDDVTKKKILNEILVALHANESESNCEKIGKKVFGRLQVPGGIKLSKEAKLIYQSPTGLFERVVYLKDL

SEQ ID NO: 299 - protein, 1339 aa, Lactobacillus salivarius
  REGION 1..1339: note = Lactobacillus salivarius SMXD51
MERYHIGLDIGTSSIGWAVIGDDFKIKKKKGKNLIGTRLFNEGATAAERRGFRTQRRRLNRRKWRLKLLEEIFDPYMAEVDEYFFARLKSSNLSPKDSNKKYLGSLLFPDKSDSNFYDKYPTIYHLRRDLMEKDEKFDLREIYLAIHHIVKYRGNFLEKVPAKNYKNSGASIGFLLEEVNSLYKDIIGDESIAILNSEKFEDVEKIILDEETRNLDKQKSVGKLLVEDKKKKNIVTAFSKAIFGYKFNIEDLLLIENDEKNKLTFNDENIDDIFNELSHSLDDKQMDLLTKTREIYFKFKLNMIVPTGYTLSESMIEKYEMHKAHLKMYKEFINTLNTKDRKILKNAYSDYINTEKAKAANAQENFYKTVKKIIKDNNSDTAKKIIVLIDEGNFMPKQRTGENGVIPHQLHQIELDRIIENQAKYYPWLAEANPVEKNRKFAKYKLDELVTFRVPYYVGPLIDKTESNKNEKETKFAWMVRKAKGTITPWNFENLVDRTESANRFIKRMTSKDTYIIGEDVLPASSLLYEKFKVLNELNNIKVNEKKLDIEQKQDIYLNLFTTAKNVTKKSLATYLNCSADSISGLSDGEKFNSSLSSYIDLKAILGNIVDDCNKNEDLEKIIEYSTVFEDGNIYKEKLSEISWLTDEQIEKLSNIHFKGWGRLSKKLLTQITNENGERIIDALWNTSNNFMQIINDESIQAKLAEINGKYAGKSDLEDILSEAYTSPQNKKAIRQVMKVVEDIEKAMQCEPTSISIEFTRKKQKSRLTNTRYKKISDVYEKIADEVISEYELRKLQSELDSNANNMRDRYYLYFMQLGRDMYTGEKINIDELHQRYDIDHILPQSFIKDDSINNRVLTRKDVNNKEKSDKTAADLYAVEMSDFWRKLRKQGLITEQKYKNLLTKSDSIDKYAKKGFIKRQLVETSQVVKLVANILQDKYSDTKIIEVRAKLNSNLREEYKLIKNRAVNDYHHAIDGYLTTFIGQYLYKTYPKLRSYFVYNDFKKLDSNYLKHMKKFNFLWQLQDDKTIDIYDNVNNKFVLNVPEMKKYIQKIYNYKYMLVSKEVTTKNGAFYDQTKYNAKTVNLIPIKKNKPTNIYGGYKGKVSSYMMLVKIRKKKEVIYKFVGVPRLWTDELDRLKDTTERKILLNEIAKNSLSKTEQDFEVILDKVYYGQLIIDGNQKYTLGSSEYKYNAMQLHLSKHALEVLAKENVKDAEITDKDLVSVYEEILSVVNKYFELYDINKFRQKLNEGLEIFRKLPVYNVYESNKIKQVGKFEVLNRILMGLHANAMITDLKVLGIKTKLGQMQVNGGIKLSPDAKLIYQSPTGIFSRAVRVKDLG

SEQ ID NO: 300 - protein, 1331 aa, Lactobacillus sanfranciscensis
MNKQPYNIGLDIGTSSVGWSATELDNRLLHIKGHNGIGVRLFKEGESAADRRGFRTTRRRLARRKWRLRLLNEIFATEIAKVDPSFFARLKQSNVSPKDPNKTMFENILFDDENLDDQKFHHDYKTIYHLRQAIINHPEQKFDIRLIYLAMHHIIKYRGHFLNQANVQDFKGGKIDLEKSFKALNDIFENQGRDLRLVTDKANQYVKVLSDNAKTRSDRKKELSKLLYVPIDKDTDKNSKKVTGEILKAILGNKAKFDVIFGIEVENPKEWVLTFNSDDFDDKIEGLSSQMTDEDSEILLILKELYFALNLSDILNNSVTDKNAKTLSEAMINRYDDHKNQLAMLKKVIDSSDKKHAKELKEAYSAYIDGENNKKISFEDLKKRIQKNLVDSELSQKINDLLDHDYFLPKQRSKENGAIPHQLQQQELDQIIESQKQYYPFLAELNPNEKRSRQAKYKLDELVAFRVPYYVGPMVEVTDSNQENNGKFAWMIRKEQGEITPWNFDEKVDRTETATKFITRMTTTDTYLIGEPVLPKNSLLYQKFVVLNELNNLKINQEIITPGQKQYLYEHVMKKNKRVTLKKIADALVIKGDYPYAPEVKGTTDQKNLNNGLTTYIDLAKIFGNELDDVDREADFEKIIEWSTIFEDQHIFALKLQELKWLTEKQRNQVVKLRYQGWGKLSKELLAGLVDDNGQRIIDLLWSDNQNFMQIVNQKSFKESIADHNGAHLEEKNLKDVINDLYTSPQNKKAIRQVILVVDDIINAVGYEPANIMMEFAREDSNDHRLTNSRSRQLENVYKDITNSWFDNDSVKDELEDKIKNKDKFTDRLYLYFTQGGKDLYTGEPLNIDDLSSYDIDHILPQSFILDNSLDNRVLTSQRNNRVSKEDQLPGELFGTKMHAFWKRLKAAHLISNKKYYNLTLTPNSISKFNNQGRFINRQLVETRQVIKLAAEILHNRYSEEKGTNIVTIKANLTHHMREKFNFYKNRNVNDYHHAFDAYLTAFVGNWLLQQYPKLKPYFVYGDFAKTEINNLKSFNMLYKFEQAHQLNEKDGKIAKDADALLGYMKNVYHFKKMLVTKKLETNHGALFKQTLYPSPAHDIKKRQLIKPKDNRPTDIYGGYTHEERKYMSLVKVIGKKDNEYRMANVPLLKINKNNDIKEILKSQFSNKKFEIVLPKVLKNQLFSENGALFVIGSKGYKYNANQLVLSDLDMKLLNDLSNNKSIDEVTINQLFKNIVDSTNKYMPLYEIKNLNEVVEKFNNLEFNDKKKTITDFLLATHANPTMSNLKNIGLPSYFGRFTSGNAGIKLSENANVIYQSPTGLFSRKVKISDF

SEQ ID NO: 301 - protein, 1419 aa, Lactobacillus sp.
  REGION 1..1419: note = Lactobacillus sp. 66c
MAKPQNYTIGLDIGTNSVGWTVTDDQNNILRIKSKKAIGARLFEEGKVAAERRSFRTTRRRLSRRKWRIKLLEELFDEEISKVDPNFFARSHESWISPKDKRERYSAIVFPTPEEDKKFHNEYPTIYHLRDRLMKDDQKHDIREIYVAIHHIMKYRGNFLHDESIETYRSGMSSLGGGDERTILNTKILDDLNDAFADNLATQGISVNSASADQINEIVTSGHLNVDSQKAIAKLLLPTTLSSDDKKQDKKIKKLATDAAKNVASAWLGYKANFAAILNIQEVDKDKKKIYSFALQGADEEDKVETLESVLSQDQIEIVDRIIRIRHAIVLGEIIPVGMTLSEAMIEKYDQHAKDLKNLKTVIRNLKDRKNAVKLQAIYDLYVNNRHADTAKAMKLAGVKKRTELLEPEEFNKSIEKLLDDSPVSAEIKKRIAEKDFLPLQRSNSNGVIPNQLHQIELDEIIKKQSKYYPFLGETNEHASADVARKAPTKLDQLLTFRVPYYVGPLITKEEQEEQDGHSFAWMIRKNPKDHEKITPWNFDEKVDRMASATQFIKRMTTKDTYLLGEDVLPSSSLKYQLFTVLNELNNLRINHKKLTREEKEQVIEDLFKKYKTVKADKFKNYWQKGHAGLDVKIQGMADPEKFNSTMSTYIDLQKIFGDQLDDAQRQNDFEKIIEYSTIFEDRKILGEKLRADFVWLSEDQIKRLCRLRLQGWGRLSLKLLTRLTDADGQNVLERLLNSNDNFMQIVKDPVIKAKIEQKNQKLLRADWSENATESILDEAYTSPQNKKAIRQVMRVVHDIVKACDGNLPAKFAIEFARSQDDDPKRTVARADRLQKIYAQISDEVVSQGVKDQLSGMKSLKDRYYLYFMQGGRDAYTGKPLNIDRLSDYDIDHIMPQSFIKDDSLDNRVLVTRAVNNQKSDNVPVLLYGNHLVADLGITIREMWDRWQKSGMISKRKLANLLTDPATLSEYRAEGFINRQLVETSQVIKLTATILQSEFPDSKIIEVPAKYNSILRKQFDLYKSREVNDYHHAIDAYLSTIVGNYLYQVYPNLRRLFVYGEFKKFSHGEEESSHQAVRRVKSMNFLDDLLRGKHGDDIYCRVTGEVIFSRKDIISKLKQAYSFKQMLVTQEVFTKKSALFDQTVYPSPARDSKTRSGLIPRKQGMDTEIYGGYSGNKDAYFVLAQVVKSKGHTLQVVGVPIRALRALANCSNYSEQLLKIVKAQVLFNKKTGKAKKGISDVRILLDKIPYRQPVLDGSAFYMLGSSTYKYNLKQISLSQQSMKYILDYIDDPNFNKHEMTKIDQQNEKECLLSVYDEILDKMDKYLSLYDINGFRKKLHVGRDKFIKLEVEKQAEAIKNVLRGFHANSDMTKLSDLGLSTSLGFMQASDGIKLSDNAVFIYQSPTGLFERRVKVSDLLK

SEQ ID NO: 302 - protein, 1289 aa, Lactobacillus versmoldensis
  REGION 1..1289: note = Lactobacillus versmoldensis KCTC 3814
MRRRYRRRRNRLNWLDELFADELAKIDPSFLLRMKNSWVSKKESTRKRDPYNLFIDEKYNDVDYFNQYPTIFHLRKELITEDKKVDIRLIYLAIHNIIKYRGNFTLENQNFDISQLSSNFSQQISDFFALFSDFGVIMPEDFDPDKISDILLNPNLSPSGKVSEAIATISPKTNVKAKIKIILLLLVGNNGDLKKLFDLETTEKIAVKLSSRHIDSELPIILSELNEQQENIITIANSIFGSIILKDFLGDETSISAAKVISFEDHKQDLQKLKTMWRETSNKEAVKAGKKAYEDYIGHEDSETFYKKIKKFLEKAQPVDLANKALAEIELENYLPKQRNRNNTVIPYQLNENELIAILDHQEKYYPFLKENRDKILSLLTFRIPYYVGPLQDSNNNRFSWMTRKASGAIRPWNFSEKVNVEQSSNDFIKRMRSTDTYLIGEPVLPKKSLIYQCYEVLSELNNTRVKDGSSNPKRLDVTIKQRIYNEIFKNQKSVSVKVLQNWLIKESYFKSPEISGLADKKKYLSSLSTYIDFKKIFGQRFVDDPVNSPQLEELAEWLTLFEDKKILLIKLQNSKYSYDQATINKLSTMRYQGTGKLSKKLLVDLKTTKKSIGKSGAESLSILDLMWSTKDNFMQIIHDADYTFEQQIKEFNYDTEDELTPLEKVANLHGSPALKRGLNQSIKVVADIVKFMGHDPEKIFIEFTRSDDFSKLTISRYRRIKKQYLEIAKAIKKIPAEFKDIKEYQTQLEENKGKLASERLMLYFLQCGHSLYSNKPIDLNMINSSKYHVDHILPQSYIKDDSLENKALVLASENENKIDNMLISHDIIATNLPRWQALKDQNLMGSKKFADLTRTTVTENQKKGFIQRQLVQTSQIVKNITLILNDLYKNTSCIETRATLSSEFRKAFSNFDETTYHYQFPEFVKNRDVNDFHHAQDAFLACVIGEYQLKKYPKDNLRLVYDQYSKFLDSLKKDTRKKNGRMPRYTQNGFIIGSMFNGKTYVDDNGEIIWDQKIKESIRKTFNYHQFNVVRQTIEQHGKLFNDTIQPHSDRYKLIPLKTNRDPAIYGGYNNDNNAYSVVLDVDGKKKINGIPIRIANQLKSDELDLSSWLENNIKHKKPMTILIDKVPKYQRIINEETGDLLITSANEVINNVQLFLPSMYTALISLLDSTKTEMYSKLLSNYEANILIDIYDYLLTKLKNNYPLYRKEWAKLAEHRDDFIESDLVTQASTLQQLIKFMHADPSNVNLKFGNFKGNRFGRKNGNIKLSKTDFIYESPTGLFKSIKHID

SEQ ID NO: 303 - protein, 1372 aa, Legionella pneumophila
  REGION 1..1372: note = Legionella pneumophila 130b
MESSQILSPIGIDLGGKFTGVCLSHLEAFAELPNHANTKYSVILIDHNNFQLSQAQRRATRHRVRNKKRNQFVKRVALQLFQHILSRDLNAKEETALCHYLNNRGYTYVDTDLDEYIKDETTINLLKELLPSESEHNFIDWFLQKMQSSEFRKILVSKVEEKKDDKELKNAVKNIKNFITGFEKNSVEGHRHRKVYFENIKSDITKDNQLDSIKKKIPSVCLSNLLGHLSNLQWKNLHRYLAKNPKQFDEQTFGNEFLRMLKNFRHLKGSQESLAVRNLIQQLEQSQDYISILEKTPPEITIPPYEARTNTGMEKDQSLLLNPEKLNNLYPNWRNLIPGIIDAHPFLEKDLEHTKLRDRKRIISPSKQDEKRDSYILQRYLDLNKKIDKFKIKKQLSFLGQGKQLPANLIETQKEMETHFNSSLVSVLIQIASAYNKEREDAAQGIWFDNAFSLCELSNINPPRKQKILPLLVGAILSEDFINNKDKWAKFKNFWNTHKIGRTSLKSKCKEIEEARKNSGNAFKIDYEEALNHPEHSNNKALIKIIQTIPDIIQAIQSHLGHNDSQALIYHNPFSLSQLYTILETKRDGFHKNCVAVTCENYWRSQKTEIDPEISYASRLPADSVRPFDGVLARMMQRLAYEIAMAKWEQIKHIPDNSSLLIPIYLEQNRFEFEESFKKIKGGSSDKTLEQAIEKQNIQWEEKFQRIINASMNICPYKGASIGGQGEIDHIYPRSLSKKHFGVIFNSEANLIYCSSQGNREKKEEHYLLEHLSPLYLKHQFGTDNVSDIKNFISQNVANIKKYISFHLLTPEQQKAARHALFLDYDDEAFKTITKFLMSQQKARVNGTQKFLGKQIMEFLSTLADSKQLQLEFSIKQITAEEVHDHRELLSKQEPKLVKSRQQSFPSHAIDATLTMSIGLKEFPQFSQELDNSWFINHLMPDEVHLNPVRSKEKYNKPNISSTPLFKDSLYAERFIPVWVKGETFAIGFSEKDLFEIKPSNKEKLFTLLKTYSTKNPGESLQELQAKSKAKWLYFPINKTLALEFLHHYFHKEIVTPDDTTVCHFINSLRYYTKKESITVKILKEPMPVLSVKFESSKKNVLGSFKHTIALPATKDWERLFNHPNFLALKANPAPNPKEFNEFIRKYFLSDNNPNSDIPNNGHNIKPQKHKAVRKVFSLPVIPGNAGTMMRIRRKDNKGQPLYQLQTIDDTPSMGIQINEDRLVKQEVLMDAYKTRNLSTIDGINNSEGQAYATFDNWLTLPVSTFKPEIIKLEMKPHSKTRRYIRITQSLADFIKTIDEALMIKPSDSIDDPLNMPNEIVCKNKLFGNELKPRDGKMKIVSTGKIVTYEFESDSTPQWIQTLYVTQLKKQP

SEQ ID NO: 304 - protein, 1372 aa, Legionella pneumophila
MESSQILSPIGIDLGGKFTGVCLSHLEAFAELPNHANTKYSVILIDHNNFQLSQAQRRATRHRVRNKKRNQFVKRVALQLFQHILSRDLNAKEETALCHYLNNRGYTYVDTDLDEYIKDETTINLLKELLPSESEHNFIDWFLQKMQSSEFRKILVSKVEEKKDDKELKNAVKNIKNFITGFEKNSVEGHRHRKVYFENIKSDITKDNQLDSIKKKIPSVCLSNLLGHLSNLQWKNLHRYLAKNPKQFDEQTFGNEFLRMLKNFRHLKGSQESLAVRNLIQQLEQSQDYISILEKTPPEITIPPYEARTNTGMEKDQSLLLNPEKLNNLYPNWRNLIPGIIDAHPFLEKDLEHTKLRDRKRIISPSKQDEKRDSYILQRYLDLNKKIDKFKIKKQLSFLGQGKQLPANLIETQKEMETHFNSSLVSVLIQIASAYNKEREDAAQGIWFDNAFSLCELSNINPPRKQKILPLLVGAILSEDFINNKDKWAKFKIFWNTHKIGRTSLKSKCKEIEEARKNSGNAFKIDYEEALNHPEHSNNKALIKIIQTIPDIIQAIQSHLGHNDSQALIYHNPFSLSQLYTILETKRDGFHKNCVAVTCENYWRSQKTEIDPEISYASRLPADSVRPFDGVLARMMQRLAYEIAMAKWEQIKHIPDNSSLLIPIYLEQNRFEFEESFKKIKGSSSDKTLEQAIEKQNIQWEEKFQRIINASMNICPYKGASIGGQGEIDHIYPRSLSKKHFGVIFNSEVNLIYCSSQGNREKKEEHYLLEHLSPLYLKHQFGTDNVSDIKNFISQNVANIKKYISFHLLTPEQQKAARHALFLDYDDEAFKTITKFLMSQQKARVNGTQKFLGKQIMEFLSTLADSKQLQLEFSIKQITAEEVHDHRELLSKQEPKLVKSRQQSFPSHAIDATLTMSIGLKEFPQFSQELDNSWFINHLMPDEVHLNPVRSKEKYNKPNISSTPLFKDSLYAERFIPVWVKGETFAIGFSEKDLFEIKPSNKEKLFTLLKTYSTKNPGESLQELQAKSKAKWLYFPINKTLALEFLHHYFHKEIVTPDDTTVCHFINSLRYYTKKESITVKILKEPMPVLSVKFESSKKNVLGSFKHTIALPATKDWERLFNHPNFLALKANPAPNPKEFNEFIRKYFLSDNNPNSDIPNNGHNIKPQKHKAVRKVFSLPVIPGNAGTMMRIRRKDNKGQPLYQLQTIDDTPSMGIQINEDRLVKQEVLMDAYKTRNLSTIDGINNSEGQAYATFDNWLTLPVSTFKPEIIKLEMKPHSKTRRYIRITQSLADFIKTIDEALMIKPSDSIDDPLNMPNEIVCKNKLFGNELKPRDGKMKIVSTGKIVTYEFESDSTPQWIQTLYVTQLKKQP

SEQ ID NO: 305 - protein, 1355 aa, Leuconostoc gelidum
  REGION 1..1355: note = Leuconostoc gelidum KCTC 3527
MTYSIGLDIGTGSVGWAVIGDDYRLKRAKGKNLIGVRLFDSATTAAERRGYRTTRRRLSRRHWRLRLLNDIFASDLAEQDENFLPRLKYSWVNPDDEQNPQLNSDVANGALFGSSETDKAFHKNYPTIYHLRHELMTDTAKHDLREVYLAIHHIVKYRGNFLNTADKINAENSFNVDLFIAALDEYNEFLETPITSIKDAQLFSDKLTDINARNKSVRVENAMSETYDDKSKIFKAILTALVGNTANFQTIFDLSDLEKDEAKNFKFKLDLEDVETKLDVVRAKLSDEQNAFLEAVLIAYDGITLKMILGDYKSISQSMIESYKSHQRDWKYIKNNVRLNEQKIEPDKNSVKFFKLDPKKLIYPSNLAYLQVISSNEDEHRKGLDYFKTAIQDADILQRIENDTFLPRQRTKRNGVLPYQLHLAELEQIIKKQSKYYPFLANIYTQDNKTENKLIGLLKFRVPYYVGPLVEAEKVTGDGKNHWLIKKELQENTPITPFNFDDVVDKDKSGEQFIKRITGTDSYLIGEPTLPENSLLYQKYNVLQELNNVRNERHQRLPIKVKQDIFEHVFKIDKNVNAKKVMAYLKLNGYGDFQIAGLSDTRTGKFNSNLSSYNYFVDLLGREKTEKIREDRLEEIIEIQTVFEDKILVAKRLSNLDFLTPQEKSKLSAKHYTGWGRLSQKLLTTQFIKTALSEAGDIIPQSHSIIDLLYYTDKNLMEILNDKTFNVRNWLTEQNKGTESGNSLYDQIDALAGPKDIKRGITQVFSIIDDIKKAMGSNPETVYLEFARETQTSRLTNSRLNRVQEIYNSPELKTEFAYLAKKLEAETKESIHDDRLYLYYLQEGRDMYTGKEIPFDQISSNYDIDHIIPQAFTKDDSLDNRVLVNRATNARKSNSPTFTNDIIDNRKSWWQSLVKRGLMSKEKFERLTDKRKTFSENQTNHFIARQLVETRQIIKNVADLIKNNYDGTQAVAIRASLTGEMRRYLDWPKNRDMNDYHHAHDALMMATVGKYVDRRGFFDNGSVSDGAGNAYNLYTKDWLVAARVGTRNDSQRVNPYGFIVGSMNSKAVRQQVNKETGEIVWGNENLDYLRHVLSYKKILVTRRLSGSSGRLYAETLFSPNPKAKLIAQKANRSVALYGGFTKAESAYTALVEFNKKGDRSYKLIKVPMAIANRVNDKQITVTAYIASLNLRDFSRVVLEHLPLGTLIRESDGSEFYAASSEYKHNAKELWAPKEILRSSKKLDKATADNLIDIFDFLTNDKTISNFKFYEKDLLHLKNVRDKFVEASDEIKIKVLSDVIYELHNDAGWRDPFKHIQEKPAWTMLQVKGGIKLSEKAAIVYQSPTGLFETITIVGE

SEQ ID NO: 306 - protein, 1337 aa, Listeria innocua
  REGION 1..1337: note = Listeria innocua ATCC 33091
MKNMKKPYTIGLDIGTNSVGWAVLTDQYDLVKRKMKIAGDSEKKQIKKNFWGVRLFDEGQTAADRRMARTARRRIERRRNRISYLQGIFAEEMSKTDANFFCRLSDSFYVDNEKRNSRHPFFATIEEEVEYHKNYPTIYHLREELVNSSEKADLRLVYLALAHIIKYRGNFLIEGALDTQNTSVDGIYKQFIQTYNQVFASGIEDGSLKKLEDNKDVAKILVEKVTRKEKLERILKLYPGEKSAGMFAQFISLIVGSKGNFQKPFDLIEKSDIECAKDSYEEDLESLLALIGDEYAELFVAAKNAYSAVVLSSIITVAETETNAKLSASMIERFDTHEEDLGELKAFIKLHLPKHYEEIFSNTEKHGYAGYIDGKTKQADFYKYMKMTLENIEGADYFIAKIEKENFLRKQRTFDNGAIPHQLHLEELEAILHQQAKYYPFLKENYDKIKSLVTFRIPYFVGPLANGQSEFAWLTRKADGEIRPWNIEEKVDFGKSAVDFIEKMTNKDTYLPKENVLPKHSLCYQKYLVYNELTKVRYINDQGKTSYFSGQEKEQIFNDLFKQKRKVKKKDLELFLRNMSHVESPTIEGLEDSFNSSYSTYHDLLKVGIKQEILDNPVNTEMLENIVKILTVFEDKRMIKEQLQQFSDVLDGVVLKKLERRHYTGWGRLSAKLLMGIRDKQSHLTILDYLMNDDGLNRNLMQLINDSNLSFKSIIEKEQVTTADKDIQSIVADLAGSPAIKKGILQSLKIVDELVSVMGYPPQTIVVEMARENQTTGKGKNNSRPRYKSLEKAIKEFGSQILKEHPTDNQELRNNRLYLYYLQNGKDMYTGQDLDIHNLSNYDIDHIVPQSFITDNSIDNLVLTSSAGNREKGDDVPPLEIVRKRKVFWEKLYQGNLMSKRKFDYLTKAERGGLTEADKARFIHRQLVETRQITKNVANILHQRFNYEKDDHGNTMKQVRIVTLKSALVSQFRKQFQLYKVRDVNDYHHAHDAYLNGVVANTLLKVYPQLEPEFVYGDYHQFDWFKANKATAKKQFYTNIMLFFAQKDRIIDENGEILWDKKYLDTVKKVMSYRQMNIVKKTEIQKGEFSKATIKPKGNSSKLISRKTNWDPMKYGGLDSPNMAYAVVIEYAKGKNKLVFEKKIIRVTIMERKAFEKDEKAFLEEQGYRQPKVLAKLPKYTLYECEEGRRRMLASANEAQKGNQQVLPNHLVTLLHHVANCEVSDGKSLDYIESNREMFAELLAHVSEFAKRYTLAEANLNKINQLFEQNKEGDIKAIAQSFVDLMAFNAMGAPASFKFFETTIERKRYNNLKELLNSTIIYQSITGLYESRKRLDD

SEQ ID NO: 307 - protein, 1334 aa, Listeria innocua
MKKPYTIGLDIGTNSVGWAVLTDQYDLVKRKMKIAGDSEKKQIKKNFWGVRLFDEGQTAADRRMARTARRRIERRRNRISYLQGIFAEEMSKTDANFFCRLSDSFYVDNEKRNSRHPFFATIEEEVEYHKNYPTIYHLREELVNSSEKADLRLVYLALAHIIKYRGNFLIEGALDTQNTSVDGIYKQFIQTYNQVFASGIEDGSLKKLEDNKDVAKILVEKVTRKEKLERILKLYPGEKSAGMFAQFISLIVGSKGNFQKPFDLIEKSDIECAKDSYEEDLESLLALIGDEYAELFVAAKNAYSAVVLSSIITVAETETNAKLSASMIERFDTHEEDLGELKAFIKLHLPKHYEEIFSNTEKHGYAGYIDGKTKQADFYKYMKMTLENIEGADYFIAKIEKENFLRKQRTFDNGAIPHQLHLEELEAILHQQAKYYPFLKENYDKIKSLVTFRIPYFVGPLANGQSEFAWLTRKADGEIRPWNIEEKVDFGKSAVDFIEKMTNKDTYLPKENVLPKHSLCYQKYLVYNELTKVRYINDQGKTSYFSGQEKEQIFNDLFKQKRKVKKKDLELFLRNMSHVESPTIEGLEDSFNSSYSTYHDLLKVGIKQEILDNPVNTEMLENIVKILTVFEDKRMIKEQLQQFSDVLDGVVLKKLERRHYTGWGRLSAKLLMGIRDKQSHLTILDYLMNDDGLNRNLMQLINDSNLSFKSIIEKEQVTTADKDIQSIVADLAGSPAIKKGILQSLKIVDELVSVMGYPPQTIVVEMARENQTTGKGKNNSRPRYKSLEKAIKEFGSQILKEHPTDNQELRNNRLYLYYLQNGKDMYTGQDLDIHNLSNYDIDHIVPQSFITDNSIDNLVLTSSAGNREKGDDVPPLEIVRKRKVFWEKLYQGNLMSKRKFDYLTKAERGGLTEADKARFIHRQLVETRQITKNVANILHQRFNYEKDDHGNTMKQVRIVTLKSALVSQFRKQFQLYKVRDVNDYHHAHDAYLNGVVANTLLKVYPQLEPEFVYGDYHQFDWFKANKATAKKQFYTNIMLFFAQKDRIIDENGEILWDKKYLDTVKKVMSYRQMNIVKKTEIQKGEFSKATIKPKGNSSKLIPRKTNWDPMKYGGLDSPNMAYAVVIEYAKGKNKLVFEKKIIRVTIMERKAFEKDEKAFLEEQGYRQPKVLAKLPKYTLYECEEGRRRMLASANEAQKGNQQVLPNHLVTLLHHAANCEVSDGKSLDYIESNREMFAELLAHVSEFAKRYTLAEANLNKINQLFEQNKEGDIKAIAQSFVDLMAFNAMGAPASFKFFETTIERKRYNNLKELLNSTIIYQSITGLYESRKRLDD

SEQ ID NO: 308 - protein, 1334 aa, Listeria monocytogenes
MKNPYTIGLDIGTNSVGWAVLTNQYDLVKRKMKVAGNSDKKQIKKNFWGVRLFDDGQTAVDRRMNRTARRRIERRRNRISYLQEIFAVEMANIDANFFCRLNDSFYVDSEKRNSRHPFFATIEEEVAYHKNYRTIYHLREELVNSSEKADLRLVYLALAHIIKYRGNFLIEGALDTKNTSVDGVYEQFIQTYNQVFMSNIEEGTLAKVEENIEVANILAGKFTRREKFERILQLYPGEKSTGMFAQFISLIVGSKGNFQKVFDLIEKTDIECAKDSYEEDLEALLAIIGDEYAELFVAAKNTYNAVVLSSIITVTATETNAKLSASMIERFDAHEKDLGELKAFIKLHLPKQYQEIFNNAAIDGYAGYIDGKTKQVDFYKYLKTILENIEGADYFIAKIEEENFLRKQRTFDNGAIPHQLHLEELEAIIHQQAKYYPFLREDYEKIKSLVTFRIPYFVGPLAKGQSEFAWLTRKADGEIRPWNIEEKVDFGKSAVDFIEKMTNKDTYLPKENVLPKHSLCYQKYMVYNELTKVRYIDDQGKTNYFSGQEKQQIFNDLFKQKRKVKKKDLELFLRNINHIESPTIEGLEDSFNASYATYHDLLKVGMKQEILDNPLNTEMLEDIVKILTVFEDKPMIKEQLQQFSDVLDGGVLKKLERRHYTGWGRLSAKLLVGIREKQSHLTILDYLMNDDGLNRNLMQLINDSNLSFKSIIEKEQVSTTDKDLQSIVADLAGSPAIKKGILQSLKIVDELVSIMGYPPQTIVVEMARENQTTGKGKNNSKPRYKSLEKAIKEFGSKILKEHPTDNQELKNNRLYLYYLQNGKDMYTGQELDIHNLSNYDIDHIVPQSFITDNSIDNLVLTSSAGNREKGGDVPPLEIVRKRKVFWEKLYQGNLMSKRKFDYLTKAERGGLTDADKARFIHRQLVETRQITKNVANILHQRFNNETDNHGNTMEQVRIVTLKSALVSQFRKQFQLYKVREVNDYHHAHDAYLNGVVANTLLKVYPQLEPEFVYGEYHQFDWFKANKATAKKQFYTNIMLFFGQKERIIDENGEILWDKKYLETIKKVLDYRQMNIVKKTEIQKGEFSKATIKPKGNSSKLIPRKENWDPMKYGGLDSPNMAYAVIIEHAKGKKKLIFEKKIIRITIMERKMFEKDEEAFLEEKGYRHPKVLTKLPKYTLYECEKGRRRMLASANEAQKGNQLVLSNHLVSLLYHAKNCEASDGKSLKYIEAHRETFSELLAQVSEFATRYTLADANLSKINNLFEQNKEGDIQAIAQSFVDLMAFNAMGAPASFKFFEATIDRKRYTNLKELLSSTIIYQSITGLYESRKRLDD

SEQ ID NO: 309 - protein, 1334 aa, Listeria monocytogenes
  REGION 1..1334: note = Listeria monocytogenes FSL J1-194
MKNPYTIGLDIGTNSVGWAVLTDQYDLVKRKMKVAGNSDKKQIKKNFWGVRLFDDGQTAVDRRMNRTARRRIERRRNRISYLQEIFAVEMANIDANFFCRLNDSFYVDSEKRNSRHPFFATIEEEVAYHKNYRTIYHLREELVNSSEKADLRLVYLALAHIIKYRGNFLIEGALDTKNTSVDEVYKQFIQTYNQVFMSNIEEGALAKVEENTEVASILAGKFTRREKFERILRLYPGEKSTGMFAQFISLIVGNKGNFQKVFNLVEKTDIECAKDSYEEDLEALLAIIGDEYAELFVAAKNTYNAVVLSSIITVTATETNAKLSASMIERFDAHEKELGELKAFIKLHLPKQYQEIFNNAEIDGYAGYIDGKTKQVDFYKYLKTTLENVEGADYFITKIEEENFLRKQRTFDNGVIPHQLHLEELEAILHQQAKYYPFLREGYDKIKSLVTFRIPYFVGPLANGQSEFAWLTRKDDGEIRPWNIEEKVDFGKSAVDFIEKMTNKDTYLPKENVLPKHSLCYQKYMVYNELTKIRYIDDQGKTNYFSGREKQQIFNDLFKQKRKVKKKDLELFLRNINHIESPTIEGLEDSFNASYATYHDLLKVGLKQEILDNPLNTEILEDIVKILTVFEDKRMIKEQLEQFSDVLDGVVLKKLERRHYTGWGRLSAKLLVGIRDKQSHLTILDYLMNDDGLNRNLMQLINDSNLSFKSIIEKEQVSTTDKDLQSIVADLAGSPAIKKGILQSLKIVDELVSIMGYPPQTIVVEMARENQTTGKGKNNSKPRYKSLEKAIKDFGSQILKEHPTDNQELKNNRLYLYYLQNGKDIYTGQELDIHNLSNYDIDHIVPQSFITDNSIDNLVLTSSAGNREKGGDVPPLEIVRKRKVFWEKLYQGNLMSKRKFDYLTKAERGGLTEADKARFIHRQLVETRQITKNVANILHQRFNKETDNHGNTMEQVRIVTLKSALVSQFRKQFQLYKVREVNDYHHAHDAYLNGVVANTLLKVYPQLEPEFVYGEYHQFDWFKANKATAKKQFYTNIMLFFAQKERIIDENGEILWDKKYLETIKKVLDYRQINIVKKTEIQKGEFSKATIKPKGNSSKLIPRKENWDPMKYGGLDSPNMAYAVIIEHAKGKKKIVIEKKLIQINIMERKMFEKDEEAFLEEKGYHQPKVLTKLPKYTLYECEKGRRRMLSSANEAQKGNQLVLSNHLVSLLYHAKNCEASDGKSLKYIEAHRETFSELLAQVSEFATKYTLADANLSKINNLFEQNKEGDIKAIAQSFVDLMAFNAMGAPASFKFFEATIDRKRYTNLKELLSSTIIYQSITGLYESRKRLDD

SEQ ID NO: 310 - protein, 1334 aa, Listeria monocytogenes
  REGION 1..1334: note = Listeria monocytogenes FSL J1-208
MKNPYTIGLDIGTNSVGWAVLTDQYDLVKRKMKVAGNSDKKQIKKNFWGVRLFDEGETAADRRMNRTARRRIERRRNRISYLQEIFALEMANIDANFFCRLNDSFYVDSEKRNSRHPFFATIEEEVAYHKNYRTIYHLREELVNSSEKADLRLVYLALAHIIKYRGNFLIEGALDTKNTSVDGVYKQFIQTYNQVFISNIEEGTLAKMEENTTVADILAGKFTRKEKLERILQLYPGEKSTGMFAQFISLIVGSKGNFQKVFDLVEKTDIECAKDSYEEDLEALLAIIGDEYAELFVAAKNTYNAVVLSSIITVTDTETNAKLSASMIERFDAHEKDLSELKAFIKLHLPKQYEEIFSNVAIDGYAGYIDGKTKQVDFYKYLKTLLENIEGADYFIAKIEEENFLRKQRTFDNGAIPHQLHLEELEAILHQQAKYYPFLKEAYDKIKSLVTFRIPYFVGPLANGQSDFAWLTRKADGEIRPWNIEEKVDFGKSAVDFIEKMTNKDTYLPKENVLPKHSLYYQKYMVYNELTKVRYIDDQGKTNYFSGQEKQQIFNDYFKQKRKVSKKDLEQFLRNMSHIESPTIEGLEDSFNSSYATYHDLLKVGIKQEVLENPLNTEMLEDIVKILTVFEDKRMIKEQLQQFSDVLDGAVLKKLERRHYTGWGRLSAKLLVGIRDKQSHLTILDYLMNDDGLNRNLMQLINDSNLSFKSIIEKEQVSTTDKDLQSIVADLAGSPAIKKGILQSLKIVDELVSIMGYPPQTIVVEMARENQTTVKGKNNSRPRYKSLEKAIKEFGSQILKEHPTDNQELRNNRLYLYYLQNGKDMYTGQELDIHNLSNYDIDHIVPQSFITDNSIDNLVLTSSAGNREKGDDVPPLEIVRKRKVFWEKLFQGNLMSKRKFDYLTKAERGGLTEADKATFIHRQLVETRQITKNVANILHQRFNNETDNHGNNMEQVRIVMLKSALVSQFRKQFQLYKVREVNDYHHAHDAYLNGVVANTLLKVYPQLEPEFVYGEYHQFDWFKANKATAKKQFYTNIMLFFAQKERIIDENGEILWDKKYLETIKKVLDYRQMNIVKKTEIQKGEFSKATIKPKGNSSKLIPRKENWDPMKYGGLDSPNMAYAVIIEHAKGKKKVVFEKKIIRITIMERKAFEKDEKSFLEKQGYRQPKVLTKLPKYTLYECENGRRRMLASANEAQKGNQQVLKGQLITLLHHAKNCEASDGKSLDYIESNREMFGELLAHVSEFAKRYTLADANLSKINQLFEQNKDNDIKVIAQSFVNLMAFNAMGAPASFKFFEATIERKRYTNLKELLSATIIYQSITGLYEARKRLDG

SEQ ID NO: 311 - protein, 1334 aa, Listeria monocytogenes
  REGION 1..1334: note = Listeria monocytogenes FSL N3-165
MKKPYTIGLDIGTNSVGWAVLTDQYDLVKRKMKISGDSEKKQIKKNFWGVRLFEKGETAAKRRMSRTARRRIERRRNRISYLQEIFAIQMNEVDDNFFNRLKESFYAESDKKYNRHPFFGTVEEEVAYYKDFPTIYHLRKELIDSQKKADLRLVYLALAHIIKYRGHFLIEGALDTKNTSIDEMFKQFLQIYNQVFANDIEEASLKKTEKNQEVAQILAEKFTRKDKLDKILSLYPGEKTTGVFAQFVNIIVGSTGKFKKHFNLHEKKDINCAEDTYDTDLESLLAIIGDEFAEVFVAAKNAYNAVVLSNIITVTDSTTRAKLSASLIERFENHKEDLKKMKRFVRTYLPEKYDEIFDDTEKHGYAGYISGKTKQADFYKYMKATLEKIEGADYFIAKIEEENFLRKQRTFDNGVIPHQLHLEELEAILHQQAKYYPFLREDYEKIKSLVTFRIPYFVGPLAKGQSEFAWLTRKADGEIRPWNIEEKVDFGKSAVDFIEKMTNKDTYLPKENVLPKHSLCYQKYMVYNELTKVRYIDDQGKTNYFSGQEKQQIFNDLFKQKRKVKKKDLELFLRNINQIESPTIEGLEDSFNASYATYHDLLKVGMKQEILDNPLNTEMLEDIVKILTVFEDKRMIKEQLQQFSDVLDGTVLKKLERRHYTGWGRLSAKLLVGIRDKQSHLTILDYLMNDDGLNRNLMQLINDSNLSFKSIIEKEQVSTTDKDLQSIVAELAGSPAIKKGILQSLKIVDELVSVMGYPPQTIVVEMARENQTTNKGKNNSKPRYKSLEKAIKEFGSQILKEHPTDNQELKNNRLYLYYLQNGKDMYTGQELDIHNLSNYDIDHIVPQSFITDNSVDNLVLTSSAGNREKGDNVPPLEIVQKRKIFWEKLYQGNLMSKRKFDYLTKAERGGLTEADKARFIHRQLVETRQITKNVANILHQRFNYKTDGNKDTMETVRIVTLKSALVSQFRKQFQFYKVREVNDYHHAHDAYLNGVVANTLLKVYPQLEPEFVYGEYHQFGWFKANKATAKKQFYTNIMLFFAQKDRIIDENGEILWDKRYLETVKKVLGYRQMNIVKKTEIQKGEFSNVTPNPKGKSNKLIPRKKDWDPIKYGGFDGSKMAYAIIIEYEKQKRKVRIEKKLIQINIMEREAFEKDEKTFLEEKGYHQPKVLIKVPKYTLYECKNGRRRMLGSANEAHKGNQMLLPNHLMALLYHAEKYEAIDGESLAYIEVHRALFDELLAYISEFARKYTLSNDRLDEINMLYERNKDGDVKSIAESFVSLKKFNAFGVHQDFSFFGTKIERKRDRKLNELLNSTIIYQSITGLYESRKRLDN

SEQ ID NO: 312 - protein, 1334 aa, Listeria monocytogenes
  REGION 1..1334: note = Listeria monocytogenes FSL R2-503
MKNPYTIGLDIGTNSVGWAVLTDQYDLVKRKMKVAGNSDKKQIKKNFWGVRLFDDGQTAVDRRMNRTARRRIERRRNRISYLQEIFAVEMANIDANFFCRLNDSFYVDSEKRNSRHPFFATIEEEVAYHKNYRTIYHLREELVNSSEKADLRLVYLALAHIIKYRGNFLIEGALDTKNTSVDEVYKQFIQTYNQVFMSNIEEGALAKVEENTEVASILAGKFTRREKFERILRLYPGEKSTGMFAQFISLIVGNKGNFQKVFNLVEKTDIECAKDSYEEDLEALLAIIGDEYAELFVAAKNTYNAVVLSSIITVTATETNAKLSASMIERFDAHEKELGELKAFIKLHLPKQYQEIFNNAEIDGYAGYIDGKTKQVDFYKYLKTTLENVEGADYFITKIEEENFLRKQRTFDNGVIPHQLHLEELEAILHQQAKYYPFLREGYDKIKSLVTFRIPYFVGPLANGQSEFAWLTRKDDGEIRPWNIEEKVDFGKSAVDFIEKMTNKDTYLPKENVLPKHSLCYQKYMVYNELTKIRYIDDQGKTNYFSGREKQQIFNDLFKQKRKVKKKDLELFLRNINHIESPTIEGLEDSFNASYATYHDLLKVGLKQEILDNPLNTEILEDIVKILTVFEDKRMIKEQLEQFSDVLDGVVLKKLERRHYTGWGRLSAKLLVGIRDKQSHLTILDYLMNDDGLNRNLMQLINDSNLSFKSIIEKEQVSTTDKDLQSIVADLAGSPAIKKGILQSLKIVDELVSIMGYPPQTIVVEMARENQTTGKGKNNSKPRYKSLEKAIKDFGSQILKEHPTDNQELKNNRLYLYYLQNGKDIYTGQELDIHNLSNYDIDHIVPQSFITDNSIDNLVLTSSAGNREKGGDVPPLEIVRKRKVFWEKLYQGNLMSKRKFDYLTKAERGGLTEADKARFIHRQLVETRQITKNVANILHQRFNKETDNHGNTMEQVRIVTLKSALVSQFRKQFQLYKVREVNDYHHAHDAYLNGVVANTLLKVYPQLEPEFVYGEYHQFDWFKANKATAKKQFYTNIMLFFAQKERIIDENGEILWDKKYLETIKKVLDYRQINIVKKTEIQKGEFSKATIKPKGNSSKLIPRKENWDPVKYGGLDSPNMAYAVIIEHAKGKKKIVIEKKLIQINIMERKMFEKDEEAFLEEKGYHQPKVLTKLPKYTLYECEKGRRRMLSSANEAQKGNQLVLSNHLVSLLYHAKNCEASDGKSLKYIEAHRETFSELLAQVSEFATKYTLADANLSKINNLFEQNKEGDIKAIAQSFVDLMAFNAMGAPASFKFFEATIDRKRYTNLKELLSSTIIYQSITGLYESRKRLDD

SEQ ID NO: 313 - protein, 1334 aa, Listeria monocytogenes
  REGION 1..1334: note = Listeria monocytogenes serotype 1/2a str. F6854
MKNPYTIGLDIGTNSVGWAVLTNQYDLVKRKMKVAGNSDKKQIKKNFWGVRLFDDGQTAVDRRMNRTARRRIERRRNRISYLQEIFAVEMANIDANFFCRLNDSFYVDSEKRNSRHPFFATIEEEVAYHDNYRTIYHLREKLVNSSEKADLRLVYLALAHIIKYRGNFLIEGALDTKNTSVDEVYKQFIETYNQVFMSNIEEGALAKVEENIEVANILAGKFTRREKFERILQLYPGEKSTGMFAQFISLIVGSKGNFQKVFDLIEKTDIECAKDSYEEDLETLLAIIGDEYAELFVAAKNTYNAVVLSSIITVTDTETNAKLSASMIERFDAHEKDLVELKAFIKLNLPKQYEEIFSNAAIDGYAGYIDGKTKQVDFYKYLKTILENIEGSDYFIAKIEEENFLRKQRTFDNGAIPHQLHLEELEAIIHQQAKYYPFLKEDYDKIKSLVTFRIPYFVGPLANGQSEFAWLTRKADGEIRPWNIEEKVDFGKSAVDFIEKMTNKDTYLPKENVLPKHSLCYQKYMVYNELTKIRYIDDQGKTNYFSGREKQQVFNDLFKQKRKVKKKDLELFLRNINHIESPTIEGLEDSFNASYATYHDLLKVGMKQEILDNPLNTEMLEDIVKILTVFEDKPMIKEQLQQFSDVLDGGVLKKLERRHYTGWGRLSAKLLVGIREKQSHLTILDYLMNDDGLNRNLMQLINDSNLSFKSIIEKEQVSTTDKDLQSIVAELAGSPAIKKGILQSLKIVDELVSIMGYPPQTIVVEMARENQTTGKGKNNSKPRYKSLEKAIKEFGSQILKEHPTDNQELKNNRLYLYYLQNGKDMYTGQELDIHNLSNYDIDHIVPQSFITDNSIDNLVLTSSAGNREKGGDVPPLEIVRKRKVFWEKLYQGNLMSKRKFDYLTKAERGGLTEADKARFIHRQLVETRQITKNVANILYQRFNKETDNHGNTMEQVRIVTLKSALVSQFRKQFQLYKVREVNGYHHAHDAYLNGVVANTLLKVYPQLEPEFVYGEYHQFDWFKANKATAKKQFYTNIMLFFAQKERIIDENGEILWDKKYLETIKKVLDYRQMNIVKKTEIQKGEFSKATIKPKGNSSKLIPRKENWDPMKYGGLDSPNMAYAVIIEHAKGKKKIVIEKKLIQINIMERKMFEKDEEAFLEEKGYRHPKVLTKLPKYTLYECEKGRRRMLASANEAQKGNQLVLSNHLVSLLYHAKNCEASDGKSLKYIEAHRETFSELLAQVSEFATRYTLADANLSKINNLFEQNKEGDIKAIAQSFVDLMAFNAMGAPASFKFFEATIDRKRYTNLKELLSSTIIYQSITGLYESRKRLDD

SEQ ID NO: 314 - protein, 1087 aa, Listeriaceae bacterium
  REGION 1..1087: note = Listeriaceae bacterium TTU M1-001
MKKLVLGLDIGVASVGWGIIDAENGDVVDTGVRLFSSRDASENESRRTSRQSRRLSRRKKHRRERIKQLLLAHDMDICDIVNENPYELRVKGLNEKLEVSEIYVALTHLAKRRGVSYLDDVVEEGGTIKSEHLNKNMEEIKSGKMPCEIQLERFEKYGQVRGMIEINQDTEESSFLVNIFRTSDYIKEAKTILATQQKFHKQITNEFIDEYIHIMASKRDYFIGPGNEKSRTDYGVYRTNGDTWDNLFEILIGKCSVFPEETRAARSSYVAQEFNLLNDLNNLKISNLESGKLSASQKHDIVEKVKNSKKFGTKDLLKYIASVCECKIEDIGGCRVDKNRKPIMHTFENYRKVHNALNEAGVDLRLSETDYDELMKIMTLNSETLEIKKQCKEKLPQLTEDYLNVCLVLNKKGAFSGWHALSLKAMKLMMPELYGTSKNQMQIIHTMQLGKAYLKPLNQQKYLNSEAILEEIYNPIAARSIRQTIKVTNAILKKYGHLDSVIIEMPRDYQTSEDERKMIEKMQKENEKEKKAALKRAREEYPFPDEAFRNHKELATKLRLWYQQDQFCVYSGRKISVVDLVRNPNQFEIDHIIPQSVSLDDSLNNKVLCFSEENQKKGQQTPFYYHKGKSGNWTYEQYKLFVEKLFDKKKISNKKRELLLFEEDINKWDVRRGFIARNLVDTRYASRVILNSYQQYFGNHEMGTKVKVVRGKFTSQLRKKWRIFKDRNESHSHHAIDALIVAATANLRLWKKNTLGVSDEGKVYDKETGEILPFEKLTESEYNEMMNKEPYLNFKTKLQNIETKVKYSYRVSKKVNRKISDATIYSTRERDGIDYIVGKIKNIYDVKTYKDQFLKRYKKNKEQFLMYQHDPQTFAILENIMATYQDAENPFLAYKKEYGVIRKYSKKGGGSPVTSLKFIDKVLGQKIDLTAKNQAALPKNKKVVLQSITPYRADVYYDEIDKRYHLIGVKYSLFSFSKQGYVINPIAYQKLLEKEQIHSEMKFCFSLYREDIIEFGEDPDSLTRYRFWSKNESGKNKIEVKPIEKPNFEKQTVLTITKKIKILNKYQTDVLGNSFKAQEEKDPRNIE

SEQ ID NO: 315 - protein, 1345 aa, Marinilabilia sp.
  REGION 1..1345: note = Marinilabilia sp. AK2
MKKILGLDLGTTSIGWAFIKEPEKDVVGSEIVDMGVRIVALSSDEENDFAKGNTISINADRTLKRGARRNLQRFKLRRDALLEIFKEMKLIPSNFKYAEDGPSSTFSTLKLRDKAAKEKIELDDLVKVLLQINKKRGYRSSRKAKSEEDDGSAIDSMGIAKELYENDLTPGQWVFEALQKGRKNVPDFYRSDLQEEFKKIVNYQSEFYPDVLNSSFVEDWMGKASTPTKQYFNKKGVHLAENKGKREERRLQEYNWRAVAVNSKIDLSEIALILSQINSQISNSSGYLGAISDRSKELYFKNQTVGQYLYQQIKINPHTRLKGQVFYRQDYLDEFEKIWSVQSGFHPQLNDALKKEIRDITIFFQRRLKSQKHLISNCEFEDYHKVVPKSHPIFQEFRIWQNLNNLTLIKKDNLNEKSELALEDKIALANELAFKREQSVKDALNILGLKSSEWEFNFTKIEGNRTNHAFFEAFAKIIEIEDGEPLDLGNLKADDILDQFSEAFLRIGIDPGLLQVNNDIEGPNYEKQPYIQFWHLLYSSEDDQKLKQNLIKKFGFKPDHAKILASISLQDDHASLSSRAIKKILPHLQSGLIYDKACTYAGYNHSSSFTKEENEKRELSSELDLLKKNSLRNPVVEKILNQMINVVNAILKDPNLGKPDEIRVEMARELKANAEQRKNMTSNIASATRDHEKYREILKKEFGLKRVTKNDLLRYKLWLETDGISLYTGKPIEASKLFSKEYDIEHIIPKTRLFDDSFSNKTICERQLNIDKANVTAFSFLQNKLSGDEFEQYQSRVKSLFGKLSKAKIQKLLMANDKIPEDFIARQLQETRYISKKAKEILFEITRRVSVTTGTITDKLREDWGLVEIMKELNWEKYDKLGLTYTIEGKHGERLNKIKDWSKRNDHRHHAMDALTVALTKPAYIQYLNNLNAKELNGKKSTEIFAIEQKYLKRENGKLCFIPPVENIRTEAKKHLSKVLISYKAKNKVVTINKNRTNKKAGFNEQIALTPRGQLHKETVYGKAFHYSTKFEKIGASFDVQKINAVAKKEEREALLKRLAENGDDPKKAFTGKNSLSKMPIYLDLKRNIKLPEKVKTVVLEQNYTIRKNIDPDLKLDKVIDVGVKRILENRLKEFGGNAKLALSNLDENPIWLNKEKGITIKRVKISGVSNVESLHVKKDHFGEPILDQVGNEIPVDFVSTGNNHHVAIYEDEKGNLQEEVVSFFEAVVRQNQGLPIINKNHSLGWKFLFTLKQNEYFVFPSDDFDPTDVDLMDEENYHLISPNLFRVQKFTTKDYFFRHHLETTVEDKSELKGVSFKRLGLPGLNCIKKIRINHLGKIIQVGEY

SEQ ID NO: 316 - protein, 1352 aa, Megasphaera sp.
  REGION 1..1352: note = Megasphaera sp. UPII 135-E
MKKRNREEYYVGLDIGTSSVGWAVATPDYRIPKFRGHKMWGSRLFAEGKRAAERRQFRTNRRRLARRRDRLQILEELFAEEMAKVDNTFFMRLKESKFFLEDKTVKEKHILFSTDKFDADRFYKDNPTIYHVRKRLMEEEPQDIRELFLAVHHILKYRGHFLFAGSLEQNGASIEELVRTLLGKQGLAILDDTIDSNEMVNILKNTGETKSDRKKDVQELWNPLKDKVKKAQAAEMAGLVLGLKSDISKLFANSDYKDLDSSIKNINFSSGDYEEKRDDYANSIGDDIVLLDTMKALYDTLILSQILQGKRSISAAKVEDYNTHKEQLRALKAILKPHKRLYNEMFRENNKKDLSNYVAYISSYSEGKRVNREGFYKYVQAVLKQVDDSDSKQAILEAIRLETFLPLLRVKDNAVIPHQIHQAELEAILETARKKYNFLNDVSDGVSVKDKIIQLFTFRIPYYVGPLNPHSGETVADRKQGTGWVVRKQRGKVYPWNFADMVDVKASAEAFITNLTNKCTYLIGEDVLPKRSLLYSEFMLLNELNMIKYDGHELPVAIKQLYIEQVFKQEHKKQTKGRVLDFLKRNGLITGSATAVITGMDDAIKGDLQSYRDMVRIFGAGFDHSMAERIIRWVTLFGEAKDILENKIREVYGNSISDSQMRAIKKLKYADWGRLSQAFLIAVKGCDKSGVERNIITCLRASSQNLMEILSDQGTYIKQIKAWNHQHTTNMMDTLDYQLVDDLYVAPSVKRSIWQSLCIVEELVKIMGQAPKKIFVEVTRTKQAEKTKKDSRKKRLVELYTAIGKEGAAWKKEIEAHQAGDFRRKKLYLYYTQMGRCMYSNEPIAMDALFTSAYDIDHIYPQSLTKDGSWDNLVLVKSQLNKEKSDQYPLRPAIREKNKAHWQYLCRAGFISEKKYERLMRTTELTAEELSGFIARQLVETSQATKAVTGLLERIYTNTEICFVKAETVSQFRHQHNFIKIRELNNYHHAKDAYLNIVVGNVYHEKFTKNPWEFIARSTERRPYNLNRMYDFDLLKQGRVIWQVPKSLETVQAMMKSNDVRITKKLLVQKGELYDATITKAHKAKEGTYFPLKGADARLRDVHRYGGYEKIKIAYYSVFSCREKASNTIHTLIIPIPVYKAGLLQTEADLTAYAWQTKQKTKPIKDIYSAITPIYKKLCINTVVKIDGFKYFLGGKTGDYMWLDPAIPVVLDEQAAAYLKAISKVGRADDVENTAQAIDLITAEANEAFYDVLLKKMEAKIFAKAYQTIVEKLASETARERFRELSIGAQCSCLLEILNLLANNKTTFTFFKDKMGVTMSRRKQPMDLTKLEECIVYETSITGLYEKAVSLL

SEQ ID NO: 317 - protein, 1080 aa, Methylocystis sp.
  REGION 1..1080: note = Methylocystis sp. ATCC 49242
MRVLGLDGGIASIGWALIEIFEDHEPSDGRIIDTGAWMFDAPEEKSQTGTKLKSELRRIFRGQRRVIRRRRQRMNEVRRILHRHGLLSSDNRDALKQPGLDPWKIRAEGIDRLLSPIEFAVALGHIARHRGFKSNSKGAKTSDLDAESSRMKKAVGETREKLARFGSPAKLLVEDEGFVLRQTKLKSGALETVRRFRNRDGDYSRSLLRDDLAAEVRALFRAQARLQSTFAKVELEAEFTQAAFFQRPLQDSERLVGPCPFEPAEKRSPKRGYSFELFRFLSRLNHLTLREGSEERTLTVEELRTAAADFGGVAKFTFSTLRKRLALPDIAIFVGIKADDEKKLDVVARSGEAATGTARLRRVVIDALGELAWGALISAPERLDKITEIITFRSDLDRIRAGLIEAGFDTPLIEAIVRAAADGKLDAFTGVGHISAKAARNIIPGLMRGMTYDKACAAAGYDHTASRERDAFDVGMHGKEALKKILQEERISRELVGSPSARKALIEAVKQVKAIIEKYGVPDRIHVELARDVGKSIEERRDIHFGIEKRSRQKDKLRELFGKEVGHLPQDGERGKEELLRFELWNEQMGRCLYTDEYINPKQLVASDNSVQVDHILPWSRFGDDSYLNKTLCTAKANQDKKGRTPYEWFRADKPEAEWDAFVARVESIQFMKGLKKRNYKLKNAEEAAEKFRSRNLNDTRWTCRLLAEALKQLYPKGEKDKDGKERRRVFTRPGALTNRLRRAWSLQRRKKSEKGERIADDRHHALDAIIVAATTESLLIRATREVQDIERKGLHYDLTKNITQPWPGFADEALDAVEKVFVARAERRRARGKAHDATIRHIAVRDDEAKVYERKKVGDIKLGDLIRVKDAERNAPLIENLRKWIEAGSPRDNPPLSPKGDPVSKVRLVTKNKVNITLDTGNPERLATVDRGEMARVDVFRKANRKGKYEYYLVPIYPHEIATMETPPMRAVQGGGDDDKWPEIDSTFEFLWSINQLSLLELTKPDGEVIRSYFRSLDRNTGALTVSGIANSTATRKGIGTRTLIDFKKLHVDRLGQIFEVERELRTWRGETWRGKDCI

SEQ ID NO: 318 - protein, 1082 aa, Methylosinus trichosporium
  REGION 1..1082: note = Methylosinus trichosporium OB3b
MRVLGLDAGIASLGWALIEIEESNRGELSQGTIIGAGTWMFDAPEEKTQAGAKLKSEQRRTFRGQRRVVRRRRQRMNEVRRILHSHGLLPSSDRDALKQPGLDPWRIRAEALDRLLGPVELAVALGHIARHRGFKSNSKGAKTNDPADDTSKMKRAVNETREKLARFGSAAKMLVEDESFVLRQTPTKNGASEIVRRFRNREGDYSRSLLRDDLAAEMRALFTAQARFQSAIATADLQTAFTKAAFFQRPLQDSEKLVGPCPFEVDEKRAPKRGYSFELFRFLSRLNHVTLRDGKQERTLTRDELALAAADFGAAAKVSFTALRKKLKLPETTVFVGVKADEESKLDVVARSGKAAEGTARLRSVIVDALGELAWGALLCSPEKLDKIAEVISFRSDIGRISEGLAQAGCNAPLVDALTAAASDGRFDPFTGAGHISSKAARNILSGLRQGMTYDKACCAADYDHTASRERGAFDVGGHGREALKRILQEERISRELVGSPTARKALIESIKQVKAIVERYGVPDRIHVELARDVGKSIEEREEITRGIEKRNRQKDKLRGLFEKEVGRPPQDGARGKEELLRFELWSEQMGRCLYTDDYISPSQLVATDDAVQVDHILPWSRFADDSYANKTLCMAKANQDKKGRTPYEWFKAEKTDTEWDAFIVRVEALADMKGFKKRNYKLRNAEEAAAKFRNRNLNDTRWACRLLAEALKQLYPKGEKDKDGKERRRVFSRPGALTDRLRRAWGLQWMKKSTKGDRIPDDRHHALDAIVIAATTESLLQRATREVQEIEDKGLHYDLVKNVTPPWPGFREQAVEAVEKVFVARAERRRARGKAHDATIRHIAVREGEQRVYERRKVAELKLADLDRVKDAERNARLIEKLRNWIEAGSPKDDPPLSPKGDPIFKVRLVTKSKVNIALDTGNPKRPGTVDRGEMARVDVFRKASKKGKYEYYLVPIYPHDIATMKTPPIRAVQAYKPEDEWPEMDSSYEFCWSLVPMTYLQVISSKGEIFEGYYRGMNRSVGAIQLSAHSNSSDVVQGIGARTLTEFKKFNVDRFGRKHEVERELRTWRGETWRGKAYI

SEQ ID NO: 319 - protein, 1123 aa, Mobiluncus curtisii
  REGION 1..1123: note = Mobiluncus curtisii subsp. holmesii ATCC 35242
MFVYLNSPRGFGPATFLTDLPHFCIIFGNNDFMDNRKYHVGIDVGTNSVGFAAVEVGDSGSPIRFLNTMVVIHDSGVDPEQKKYAITRLASAGTARRTRRLYRTRRQRLRELDDFISNELGYPLVNLENFADPYEPWKVRADLATIKLPADELPEAMSIALRHMARHRGWRSPYQRVEALHLHAEISEEFSALKKRVMEKTGDVFSDDATPAEVLVDLMGRQKIRGADGMLSGKLRQSDNANELRKIASVQGIDDETLNRIIDRVFFSRSPKGKASERVGMDALPGQGSKPRALKAMPSFQKFRIVSVICNLRIKDSGDDNRPLSMEEKEQLIGYLMSSTTDDHVTWTDVAELLHVKRSNLQGTAKEGPDGERPYTRPPVNSAWSKIKDSKIKSLVALWKTGDVDVQSAIVEALSNASVLEDARPGADIVVAYLESLDDKELESLDKVGLPAGRASYSEDSLERLTERMLQDDCDLFEARKREFGVSDDWKPPADPIYAPVGNPGVDRVLKIVNRLLMAAEREWGAPTQINIEHVRSGFSSELMQREFERENERRRAQNEEAVKAILTEKGGNSHVSKYDIIRYYAVKRQNCQCLYCGTPITFSDCELDHIVPRKGVGSTNSRVNLAAACRSCNRDKSNLPFAVWAGKTSNFDVSIDGAVSRVKQWQRSQNEGAREFRAFQNEVISRLLKTTEDPEIDSRSLESVAWMARELHHRVEYYFQSKGAQTQVSVYRGAVTAQARKSSGLEDKVKMIGGGGKTRLDRRHHAMDAATIALMTPGISTTLSEKNNLRDAQKFTGQSETWKDYCGRTETAREHFAVWKSNMERLTDLFNDKLENDAIPVVQPLRLRLSDSKAHDDGIGKLDSKKLGSVWSLADIDRAATPQIWTALTRCDDFDPTKGLPENANRVIRAQGVKYESEDNIPVFPSNVAAIAVRDGYAEIGSTIHHARIYRIDDGKKIFYSMIRVFAVDLLKHQAEDLFTVKLPPSAISIRTCEDSLRRALSNGTAEYLGWLVPGDEIIVDTSDKAFHTGQIGDLLRNFPVNSFRLTGFPSNSRLRLKPVLLAGEGLRDDAEDSIKKILSGQGWRPAINVLFSKGKPRIVRRNSLGIERPSSNNGLPFSWEA

SEQ ID NO: 320 - protein, 1091 aa, Mobiluncus mulieris
  REGION 1..1091: note = Mobiluncus mulieris 28-1
MDSRKYRVGIDVGTNSVGFAAVEEDDSGSPTRFLNTMVVIHDSGVDPEQKKYAITRLASAGTARRTRRLYRTRRQRLRELDDFISNELGYPLVNLENFADPYEPWKVRADLATTKLPNDELPEAMSIALRHMARHRGWRSPYQRVEALHLHAEISKEFAALKERVVEKTGDVFSDDATPAEVLVDLMGRQKVRGADGVLSGKLRQSDNANELRKIASVQGIDDETLNRIIDRVFSSKSPKGKASERVGMDALPGQGSKPRALKAMPSFQKFRVVSVICNLRIKDSGGDARPLSMEEKEKLIDYLMSSTTDDHVTWTDVADLLHVKRSQLQGTAKEGFDGERPYTRPPVNSTWSKIKDSKIKSLVALWKTGDVDVQSAIVEALSNASVLEDSRPGADIVVAYLESLDDKELESLDKVGLPAGRASYSEDSLERLTERMLRDDCDLFEARKREFNVADDWKPPADPIYAPVGNPGVDRVLKIVNRLLMAAEREWGAPTQINIEHVRSGFSSELMQREFERENERRRAQNEEAVKAILTEKGGNSRVSKYDITRYYAVKRQHCQCLYCGTPITFSDCELDHIVPRKGVGSTNTRVNLAAACRSCNRDKSNLPFAVWAGKASNFDVSIDDAVSRVKQWQRSQNEGVREFRAFQNEVISRLLKTTEDPEIDSRSLESVAWMARELHHRVEYYFQSKGAQTQVSVYRGAVTAQARKSSGLEDKVKMIGGGGKTRLDRRHHAMDAATIALMTPGISTTLSEKNNLRDAQKFTGQSETWKDYCGRTETARKHFAVWKSNMERLTDLFNDKLENDAIPVVQPLRLRLSNSKAHDDGIGKLDSKKLGSVWSLADIDRAATPQIWTALTRCDDFDPTKGLPENANRVIRAQGVKYESEDNIPVFPSNVAAIAVRDGYAEIGSTIHHARIYRIDDGKKTFYSMIRVFAVDLLKHQAEDLFTVKLPPSAISIRTCEDSLRRALSNGTAEYLGWLVPGDEIIVDTSDKAFHTGQIGDLLRNFPVNSFRLTGFPSNSRLRLKPVLLAGEGLRDDAEDSIKKILLGQGWRPAINVLFSKGKPRIVRRNSLGIERPSSNNGLPFSWEA

SEQ ID NO: 321 - protein, 1091 aa, Mobiluncus mulieris
  REGION 1..1091: note = Mobiluncus mulieris FB024-16
MDSRKYRVGIDVGTNSVGFAAVEEDDSGSPTRFLNTMVVIHDSGVDSEQKKYAITRLASAGTARRTRRLYRTRRQRLRELDDFISNELGYPLVNLENFADPYEPWKVRADLATTKLPNDELPEAMSIALRHMARHRGWRSPYQRVEALHLHAEISKEFAALKERVVEKTGDVFSDDATPAEVLVDLMGRQKVRGADGVLSGKLRQSDNANELRKIASVQGIDDETLNRIIDRVFSSKSPKGKASERVGMDALPGQGSKPRALKAMPSFQKFRVVSVICNLRIKDSGGDARPLSMEEKEKLIDYLMSSTTDDHVTWTDVADLLHVKRSQLQGTAKEGFDGERPYTRPPVNSTWSKIKDSKIKSLVALWKTGDVDVQSAIVEALSNASVLEDSRPGADIVVAYLESLDDKELESLDKVGLPAGRASYSEDSLERLTERMLRDDCDLFEARKREFNVADDWKPPADPIYAPVGNPGVDRVLKIVNRLLMAAEREWGAPTQINIEHVRSGFSSELMQREFERENERRRAQNEEAVKAILTEKGGNSRVSKYDITRYYAVKRQHCQCLYCGTPITFSDCELDHIVPRKGVGSTNTRVNLAAACRSCNRDKSNLPFAVWAGKASNFDVSIDDAVSRVKQWQRSQNEGVREFRAFQNEVISRLLKTTEDPEIDSRSLESVAWMARELHHRVEYYFQSKGAQTQVSVYRGAVTAQARKSSGLEDKVKMIGGGGKTRLDRRHHAMDAATIALMTPGISTTLSEKNNLRDAQKFTGQSETWKDYCGRTETARKHFAVWKSNMERLTDLFNDKLENDAIPVVQPLRLRLSNSKAHDDGIGKLDSKKLGSVWSLADIDRAATPQIWTALTRCDDFDPTKGLPENANRVIRAQGVKYESEDNIPVFPSNVAAIAVRDGYAEIGSTIHHARIYRIDDGKKTFYSMIRVFAVDLLKHQAEDLFTVKLPPSAISIRTCEDSLRRALSNGTAEYLGWLVPGDEIIVDTSDKAFHTGQIGDLLRNFPVNSFRLTGFPSNSRLRLKPVLLAGEGLRDDAEDSIKKILLGQGWRPAINVLFSKGKPRIVRRNSLGIERPSSNNGLPFSWEA

SEQ ID NO: 322 - protein, 1473 aa, Mucilaginibacter paludis
  REGION 1..1473: note = Mucilaginibacter paludis DSM 18603
MKNILGLDLGTNSIGWALIEKDTDQKNGNILGTGSRIIPMSQDIKDEFGKGNSISQTADRTKFRSVRRLRERHLLRRERLHRVLNVLGFLPKHYADQIDFKKRLGKLVNETEPKLVYDNKNFIFKKSFEAMLSDFNQHQPLLLADGKKVPFDWTIYYLRKKALTEKIEKEELAWLILNFNQKRGYYQLRGEEEEENPNKMVAFHSLKIVEVIADESQKGKAETWYSLILENGWIYRRSSKTPLYDWKGKQRDFIVTTDLNDDGSIKTDKEGLEKRSFRAPVEDDWTLVKKKTEQEINRSHKTVGTYIYENLLQDPKQKIKGKLVRTIEREFYKDELKMILKNQQKFHPELNDEHLYINCVRELYRNNQAHQTILSKKDFVHLFIDDIIFYQRPLRSQKSSISNCTLEFRKYKNENGTDQTDYLKAIPKSHPLFQEFRLWQWIYNLGIYQKEDDTNVTDELIKNIDGYQDLFDFLNNKKEIRQDILIKFLVEQTGLKGKPLSSVVAKYRWNFVEDKIYPCNETGTQIRTRLAKVENTPEDFLTAETEIKLWHIIYSVNDKADYEKALKTFAEKHNLDTHSFVENFKKFPPFKSEYGSFSEKAIKKLLPLIRLGKYWSWENIDKKTQERIEKILTGEFDEAIKSRVRDKAIHLTEEDHFQGLQLWLASYVVYGRHSEADNLDKWHTVADLEDYLAEFRQHSLRNPIVEQVITETLRVVKDIWLQYGQGAKDFFSEIHIELAREMKNTGDERKRLTSLVTDNENTNLRIKVLLSELLNDGNVENVRPYSPMQQEALKIFEDGVLNSDIEIEDDILKISKMAQPTNTELKRYKLWLEQKYRSPYTGQIIPLNRLFTADYEIEHIIPQSRFFDDSFSNKIICESAVNQLKDKQLGLEFIKNHSGTIVKLGMGKTAKILDVESYNEFVKGNYTKNISKRNKLMLEEIPDKMIERQLNDTRYISKFIISALSNIVRSESNDDGFNSKNVLPGNGKITSRLKQDWGMNDIWNELILPRFERMNKITDSAVFTAWNENNQKFLPIVPLEFSKGFQKKRIDHRHHALDALVIAASTREHINLLNNEHAKSDKRFDLNRKLRKFEKVAYNDPKTGKRIEKEVPTIFLKPWETFTVDAKNSLESIIVSFKQNLRVINRATNYSESYNDENGALRLGKDGNPLKEKIKQSKGDSWAIRKPMHKDFVYGKVHLQNVKLPKDKFITAIRKSLDVTFDLKRIETITDTGIQKILKNYLHSKENKVELAFSPEGIEDMNQHIERYNDGKKHQPIHKVRVFEIGSRFSLGESGNKKTKFVEAAKGTNLFFAVYQDDNKGKRNYETIPLNIVIERQKLGLHSVPTEDAKGGKLLFHLSPNDMVYVPTSEELEDNLASVNIKRLNTAQRKRIYKVEKASGVECYFIRQDIAYLIKNYDAKTKIGELESQNKLQTTMTDDRLKITDVCVKLNIDRLGSIAETFLGNQYGASKKT

SEQ ID NO: 323 - protein, 1233 aa, Mycoplasma canis
  REGION 1..1233: note = Mycoplasma canis PG 14
MEKKRKVTLGFDLGIASVGWAIVDSETNQVYKLGSRLFDAPDTNLERRTQRGTRRLLRRRKYRNQKFYNLVKRTEVFGLSSREAIENRFRELSIKYPNIIELKTKALSQEVCPDEIAWILHDYLKNRGYFYDEKETKEDFDQQTVESMPSYKLNEFYKKYGYFKGALSQPTESEMKDNKDLKEAFFFDFSNKEWLKEINYFFNVQKNILSETFIEEFKKIFSFTRDISKGPGSDNMPSPYGIFGEFGDNGQGGRYEHIWDKNIGKCSIFTNEQRAPKYLPSALIFNFLNELANIRLYSTDKKNIQPLWKLSSVDKLNILLNLFNLPISEKKKKLTSTNINDIVKKESIKSIMISVEDIDMIKDEWAGKEPNVYGVGLSGLNIEESAKENKFKFQDLKILNVLINLLDNVGIKFEFKDRNDIIKNLELLDNLYLFLIYQKESNNKDSSIDLFIAKNESLNIENLKLKLKEFLLGAGNEFENHNSKTHSLSKKAIDEILPKLLDNNEGWNLEAIKNYDEEIKSQIEDNSSLMAKQDKKYLNDNFLKDAILPPNVKVTFQQAILIFNKIIQKFSKDFEIDKVVIELAREMTQDQENDALKGIAKAQKSKKSLVEERLEANNIDKSVFNDKYEKLIYKIFLWISQDFKDPYTGAQISVNEIVNNKVEIDHIIPYSLCFDDSSANKVLVHKQSNQEKSNSLPYEYIKQGHSGWNWDEFTKYVKRVFVNNVDSILSKKERLKKSENLLTASYDGYDKLGFLARNLNDTRYATILFRDQLNNYAEHHLIDNKKMFKVIAMNGAVTSFIRKNMSYDNKLRLKDRSDFSHHAYDAAIIALFSNKTKTLYNLIDPSLNGIISKRSEGYWVIEDRYTGEIKELKKEDWTSIKNNVQARKIAKEIEEYLIDLDDEVFFSRKTKRKTNRQLYNETIYGIATKTDEDGITNYYKKEKFSILDDKDIYLRLLREREKFVINQSNPEVIDQIIEIIESYGKENNIPSRDEAINIKYTKNKINYNLYLKQYMRSLTKSLDQFSEEFINQMIANKTFVLYNPTKNTTRKIKFLRLVNDVKINDIRKNQVINKFNGKNNEPKAFYENINSLGAIVFKNSANNFKTLSINTQIAIFGDKNWDIEDFKTYNMEKIEKYKEIYGIDKTYNFHSFIFPGTILLDKQNKEFYYISSIQTVRDIIEIKFLNKIEFKDENKNQDTSKTPKRLMFGIKSIMNNYEQVDISPFGINKKIFE

SEQ ID NO: 324 - protein, 1233 aa, Mycoplasma canis; identical to SEQ ID NO: 323
  REGION 1..1233: note = Mycoplasma canis PG 14

SEQ ID NO: 325 - protein, 1233 aa, Mycoplasma canis
  REGION 1..1233: note = Mycoplasma canis UF31
MEKKRKVTLGFDLGIASIGWAIVDSETNQVYKLGSRLFDAPDTNLERRTQRGTRRLLRRRKYRNQKFYNLVKRTEVFGLSSREAIENRFRELSIKYPNIIELKTKALSQEVCPDEIAWILHDYLKNRGYFYDEKETKEDFDQQTVESMPSYKLNEFYKKYGYFKGALSQPTESEMKDNKDLKEAFFFDFSNKEWLKEINYFFNVQKNILSETFIEEFKKIFSFTRDISKGPGSDNMPSPYGIFGEFGDNGQGGRYEHIWDKNIGKCSIFTNEQRAPKYLPSALIFNFLNELANIRLYSTDKKNIQPLWKLSSIDKLNILLNLFNLPISEKKKKLTNANINDIVKKESTKSIMLSVEDIDMIKDEWAGKEPNVYGVGLSGLNIEESAKENKFKFQDLKILNVLINLLDNVGIKFEFKDRNDIIKNLELLDNLYLFLIYQKESNNKDSSIDLFIAKNELLNIENLKLKLKEFLLGAGNEFENHNSKTHSLSKKAIDAILPKLLDNNEGWNLEAIKNYDEEIKSQIEDNSSLMAKQDKKYLNDNFLKDAILPPNVKVTFQQAILIFNKIIQKFSKDFEIDKVVIELAREMTQDQENDALKGIAKAQKSKKSLVEERLEANNIDKSVFNDKYEKLIYKIFLWISQDFKDPYTGAQISTNEIVNNKVEIDHIIPYSLCFDDSSANKVLVHKQSNQEKSNSLPYEYIKQGHSGWNWDEFTKYVKRVFVNNVDSILSKKERLKKSENLLTTSYDGYDKLGFLARNLNDTRYATILFRDQLNNYAEHHLIDNKKMFKVIAMNGAVTSFIRKNMSYDNKLRLKDRSDFSHHAYDAAIIALFSNKTKTLYNLIDPSLNGIISKRSEGYWVIEDRYTGEIKELKKEDWTSIKNNVQARKIAKEIEEYLIDLDDEVFFSRKTKRKTNRQLYNETIYGIAAKTDEDGITNYYKKEKFSILDDKDIYLRLLREREKFVINQSNPEVIDQIIEIIESYGKENNIPSRDEAINIKYTKNKINYNLYLKQYMRSLTKSLDQFSEEFINQMIANKTFVLYNPTKNTTRKIKFLRLVNDVKINDIRKNQVINKFNGKNNEPKAFYENINSLGAIVFKNSANNFKTLSINTQIAIFGDKNWDIEDFKTYNMEKIEKYKEIYGIDKTYNFHSFIFPGTILLDKQNKEFYYISSIQTVRDIIEIKFLNKIEFKDENKNPDTSKTPKRLMFGIKSIMNNYEQVDISPFGINKKIFE

SEQ ID NO: 326 - protein, 1233 aa, Mycoplasma canis
  REGION 1..1233: note = Mycoplasma canis UF33
MEKKRKVTLGFDLGIASVGWAIVDSETNQVYKLGSRLFDAPDTNLERRTQRGTRRLLRRRKYRNQKFYNLVKRTEVFGLSSREAIENRFRELSIKYPNIIELKTKALSQEVCPDEIAWILHDYLKNRGYFYDEKETKEDFDQQTVESMPSYKLNEFYKKYGYFKGALSQPTESEMKDNKDLKEAFFFDFSNKEWLKEINYFFNVQKNILSETFIEEFKKIFSFTRDISKGPGSDNMPSPYGIFGEFGDNGQGGRYEHIWDKNIGKCSIFTNEQRAPKYLPSALIFNFLNELANIRLYSTDKKNIQPLWKLSSVDKLNILLNLFNLPISEKKKKLTSTNINDIVKKESIKSIMISVEDIDMIKDEWAGKEPNVYGVGLSGLNIEENAKENKFKFQDLKILNVLINLLDNVGIKFEFKDRNDIIKNLELLDNLYLFLIYQKESNNKDSSIDLFIAKNKSLNIENLKLKLKEFLLGAGNEFENHNSKSHSLSKKAIDAILPKLLDNNEGWNLEAIKNYDEEIKSQIEDNSSLMAKQDKKYLNDNFLKDAILPPNVKVTFQQAILIFNKIIQKFSKDFEIDKVVIELAREMTQDQENDALKGMAKAQKSKKSLVEERLEANNIDKSVFNDKYEKLIYKIFLWISQDFKDPYTGAQISVNEIVNNKVEIDHIIPYSLCFDDSSANKVLVHKQSNQEKSNSLPYEYIKQGHSGWNWDEFTKYVKRVFVNNVDSILSKKERLKKSENLLTTSYDGYDKLGFLARNLNDTRYATILFRDQLNNYAEHHLIDNKKMFKVIAMNGAVTSFIRKNMSYDNKLRLKDRSDFSHHAYDAAIIALFSNKTKTLYNLIDPSLNGIISKRSEGYWVIEDRYTGEIKELKKEDWTSIKNNVQARKIAKEIEEYLIDLDDEVFFSRKTKRKTNRQLYNETIYGIAAKTDEDGITNYYKKEKFSILDDKDIYLRLLREREKFVINQSNPEVIDQIIEIIESYGKENNIPSRDEAINIKYTKNKINYNLYLKQYMRSLTKSLDKFSEEFINQMIANKTFVLYNPTKNTTRKIKFLRLVNDVKINDIRKNQVINKFNGKNNEPKAFYENINSLGAIVFKNSANNFKTLSINTQIAIFGDKNWDIEDFKTYNMEKIEKYKEIYGIDKTYNFHSFIFPGTILLDKQNKEFYYISSIQTVRDIIEIKFLNKIEFKDENKNQDTSKTPKRLMFGIKSIMNNYEQVDISPFGINKKIFE

SEQ ID NO: 327 - protein, 1233 aa, Mycoplasma canis
  REGION 1..1233: note = Mycoplasma canis UFG1
MEKKRKVTLGFDLGIASVGWAIVDSETNQVYKLGSRLFDAPDTNLERRTQRGTRRLLRRRKYRNQKFYNLVKRTEVFGLSSREAIENRFRELSIKYPNIIELKTKALSQEVCPDEIAWILHDYLKNRGYFYDEKETKEDFDQQTVESMPSYKLNEFYKKYGYFKGALSQPTESEMKDNKDLKEAFFFDFSNKEWLKEINYFFNVQKNILSETFIEEFKKIFSFTRDISKGPGSDNMPSPYGIFGEFGDNGQGGRYEHIWDKNIGKCSIFTNEQRAPKYLPSALIFNFLNELANIRLYSTDKKNIQPLWKLSSVDKLNILLNLFNLPISEKKKKLTSTNINDIVKKESIKSIMLSVEDIDMIKYEWAGKEPNVYGVGLSGLNIEESAKENKFKFQDLKILNVLINLLDNVGIKFEFKDRNDIIKNLELLDNLYLFLIYQKESNNKDSSIDLFIAKNKSLNIENLKLKLKEFLLGAGNEFENHNSKTHSLSKKAIDAILPKLLDNNEGWNLEAIKNYDEEIKSQIEDNSSLMAKQDKKYLNDNFLKDAILPPNVKVTFQQAILIFNKIIQKFSKDFEIDKVVIELAREMTQDQENDALKGIAKAQKSKKSLVEERLEANNIDKSVFDDKYEKLIYKIFLWISQDFKDPYTGAKISANEIVNNKVEIDHIIPYSLCFDDSSANKVLVHKQSNQEKSNSLPYEYIKQGHSGWNWDEFTKYVKRVFVNNVDSILSKKERLKKSENLLTTSYDGYDKLGFLARNLNDTRYATILFRDQLNNYAEHHLIDNKKMFKVIAMNGAVTSFIRKNMSYDNKLRLKDRSDFSHHAYDAAIIALFSNKTKTLYNLIDPSLNGIISKRSEGYWVIEDRYTGEIKELKKEDWTSIKNNVQARKIAKEIEEYLIDLDDEVFFSRKTKRKTNRQLYNETIYGIAAKTDEDGITNYYKKEKFSILDDKDIYLRLLREREKFVINQSNPEVIDQIIEIIESYGKENNIPSRDEAINIKYTKNKINYNLYLKQYMRSLTKSLDQFSEEFINQMIANKTFVLYNPTKNTTRKIKFLRLVNDVKINDIRKNQVINKFNGKNNEPKAFYENINSLGAIVFKNSANNFKTLSINTQIAIFGDKNWDIEDFKTYNMEKIEKYKEIYGIDKTYNFHSFIFPGTILLDKQNKEFYYISSIQTVRDIIEIKFLNKIEFKDENKNQDTSKTPKRLMFGIKSIMNNYEQVDISPFGINKKIFE

SEQ ID NO: 328 - protein, 1233 aa, Mycoplasma canis
  REGION 1..1233: note = Mycoplasma canis UFG4
MEKKRKVTLGFDLGIASVGWAIVDSETNQVYKLGSRLFDAPDTNLERRTQRGTRRLLRRRKYRNQKFYNLVKRTEVFGLSSREAIENRFRELSIKYPNIIELKTKALSQEVCPDEIAWILHDYLKNRGYFYDEKETKEDFDQQTIESMPSYKLNEFYKKYGYFKGALSQPTESEMKDNKDLKEAFFFDFSNKEWLKEINYFFNVQKNILSETFIEEFKKIFSFTRDISKGPGSDNMPSPYGIFGEFGDNGQGGRYEHIWDKNIGKCSIFTNEQRAPKYLPSALIFNFLNELANIRLYSTDKKNIQPLWKLSSIDKLNILLNLFNLPISEKKKKLTSANINDIVKKESTKSIMLSVEDIDMIKDEWAGKEPNVYGVGLSGLNIEESAKENKFKFQDLKILNVLINLLDNVGIKFEFKDRNDIIKNLELLDNLYLFLIYQKESNNKDSSIDLFIAKNESLNIENLKLKLKEFLLGAGNEFENHNSKTHSLSKKAIDAILPKLLDNNEGWNLEAIKNYDEEIKSQIEDNSFLMAKQDKKYLNDNFLKDAILPPNVKVTFQQAILIFNKIIQKFSKDFEIDKVVIELAREMTQDQENDALKGIAKAQKSKKSLVEERLEANNIDKSVFNEKYEKLIYKIFLWISQDFKDPYTGAKISANEIVDNKVEIDHIIPYSLCFDDSSANKVLVHKQSNQEKSNSLPYEYIKQGHSGWNWDEFTKYVKRVFVNNVDSILSKKERLKKSENLLTTSYDGYDKLGFLARNLNDTRYATILFRDQLNNYAEHHLIDDKKMFKVIAMNGAVTSFIRKNMSYDNKLRLKNRNDFSHHAYDAAIIALFSNKTKTLYNLIDPSLNGIISKRSEGYWVIEDRYTGEIKELKKEDWTSIKNNVQARKIAKEIEEYLIDLDDEVFFSRKTKRKTNRQLYNETIYGIAAKTDEDGITNYYKKEKLSILDDKDIYLRLLREREKFVINQSNPEVIDQIIEIIESYGKENNIPSRDEAINIKYTKNKINYNLYLKQYMRSLTKSLDQFSEEFINQMIANKTFVLYNPTKNTTRKIKFLRLVNDVKINDIRKNQVINKFNGKNNEPKAFYENINSLGAIVFKNSANNFKTLSINTQIAIFGDKNWDIEDFKTYNMEKIEKYKEIYGIDKTYNFHSFIFPGTILLDKQNKEFYYISSIQTVRDIIEIKFLNKIEFKDENKNQDTSKTPKRLMFGIKSIMNNYEQVDISPFGINKKIFE

SEQ ID NO: 329 - protein, 1239 aa, Mycoplasma cynos
MEEKRKVTLGFDLGVASVGWAIVDSETNEVYKLGSRLFDIPDTNIDRRAKRGSRRLVRRRSYRNQKFYNLIKRTKTFGFLDKEAIEKEFVLLSIKYPNIIELKVKGLQEEVSKSEAVWILHDYLKNRGYFYDDKEEKDDLENPSIESMPSYKLYEFYKEYGYFKGALSSPTESEKNKDSDLEKAIFFNFSNKEWTKEINHFFKIQKNIFSEDFKAKFMEFFSFIRDISKGPGSENMPSQYSIFGKYGDDGMGGKYQHIWDKNIGKCSIFKDKVRAPKYLPSALFFNLLNELSNIRLYSVDKREKSVLWRLSSKDKINIILNILQIILFKNDGKISNLDINKIVKNESIKSIILNEIDLDLIKDMWFEKEPNVYGIGLSGLNIEENKKENRFKFQDLKIFSVFIDLLKKSNINIEFNNEKDIIHNLKLLDELYFFLITQKYSRDKYGSIKKFILNNKSFNIDNLDEKLNIFLSISDDEFDNHNSKTHSLSKEAIYFIFPKLLHNNEGWNLEAIKNYDIDVREEISKHSFGIKKQDKKYLDDAFLDDAILPPSVKVTIKQSILIFNKIIKKFSNKFQIDNVVIELAREMTQEKEMDAQKSLNRLKKSRKKIIEERLNANNIDSKMFRDKTGEISPNYIYKIYLWISQNFKDPYTGENISANDILKNNVEIDHIIPYSLCFDDSSSNKVLVFKHSNQSKGNFLPFDMISTFSENSVWNWKEYTQYVEKTFKTNLESILDKKERVKKADNLLTSSYDGYDKLGFLARNLNDTRYATILFRDQLINYSENHLIDSKKMFKVIAMNGGVTSFIRKNMSFDSGLKVKDRSIFSHHAYDAAIIALFSNKTKILYNLINPSLDGIISKRSEGYWVLEDRLTGEIRKLNYNDWQSIKNNVEVKKIAREIESHLSNLDNVVMFSRKSKRKTNKELYNETLYGIATRIDENGIKNYYKKEKFNILEDENIYLRLLNERENFIINRSNPEVIDAIIEIFETIDKNKIPARDVAKNIKYTDNKIKYNLYLKDYMRKLVDEFPDKFRKDFIEQMIAKKIFILFNPIKNTTRKIKSLRSINNNKIEDIRKKQVLEKFNTAKNEPRSFYESLNSLGAIIFKNNLNIYKKMSISSQIATFGDKNWKIDDINTYNKEKLNKYKEIYGIDETYDFYSFIFPGTILLDEKNKEFLYISSIQTLKDKIELKFLDRIEFEKKNVNSNLKPKIKREIISTKKLMSDYKIIKISPLGINKKIFE

SEQ ID NO: 330 - protein, 1269 aa, Mycoplasma gallisepticum
MNNSIKSKPEVTIGLDLGVGSVGWAIVDNETNIIHHLGSRLFSQAKTAEDRRSFRGARRLIRRRKYKLKRFINLIWKYNSYFGFKNKEDILNNYQEQQKLHNTVLNLKLEALNAKIDPKALSWILHDYLKNRGHFYEDNRDFNVYPTEELANYFGEYGYYKGIIDSKEDNDDKLEEGLTKYKFSNQHWLEEIKKVLSNQTGLPEKFKEEYESLFSYVRNYSEGPGSINSVSPYGIYHLDEKEGKVVQKYNNIWDKTIGKCSIFPDEYRAPKNSPIAMIFNEINELSTIRSYSIYLTGWFINQEFKKAYLNKLLDLLIKTNSEKPIDARQFKKLREETIAESIGKETLKDVEREEKLEKEDHKWKLKGLKLNTNGKIQYNDLSSLAKFVHKLKQHLKLDFLLEDQYTTLDKINFLQSLFVYLGKHLRYSNRVDSANLKEFSDSNKLFERVLQEQKDDLFKLFEQTDKDDEKILAQTHSLSTKAMLLAITRMTNLDNDEDNQKNNDKGWNFEAIKNFDQKFIDITKKNNNLSLKQDKRYLDDRFINDAILSPGVKRILREATKVFNAILKQFSEEYDVTKVVIELARELSEEKELENTKNYEKLIKKNSDKISERLEALDIAEDKIEDILKSPTKSYKVLLWLQQDHIDPYSQKEIAFEDILTKTEKTEIDHIIPYSISFDDSSSNKLLVLAESNQAKSNQTPYEFITSGNAGIKWEDYEAYCRKFKDGDTSLLDSTQRSKKFAKMMKTDTSSKYDIGFLARNLNDTRYATIVFRDALKDYANNHLVEDKPMFKVVCINGGVTSFLRKNFDKSWYAKKDRDKNIHHAVDASIISIFSNETKTLFNQLTQFADYKLFKNTDGSWKKIDPKTGVVTEVTDENWKQIRVRNQVSEIAKVINKCIQDSNIERKARYSRKIENKTNISLFNDTVYSAKKVGYEDQIKRKNLKTLDIHESAEENKNSKVKKQFVYRKLVNVSLLNNDKLADLFAEKEDILMYRANPWVINLAEQIFNEYTENKKIKSQNVFEKYMLDLTKEFPEKFSEAFVKSMLRNKTAIIYNVEKKVVHRIKRLKILSSELKENKLSNVIIRSKNESGTKLSYQDTINSIALMIMRSIDPTAKKQYIRVPLNTLNLHLGDQDFDLHNIDAYLKKPKFVKYLKANEIGDEYKPWRVLTSGTLLIHKKDKKLMYISSFQNLKDVIEIKNLIETEYKENDDSDPKKKKKANRFLMTLSTILNDYILLDAKDNFDILGLSKNRIDEILNSKLGLDKITK

SEQ ID NO: 331 - protein, 1224 aa, Mycoplasma gallisepticum
MNNSIKSKPEVTIGLDLGVGSVGWAIVDNETNIIHHLGSRLFSQAKTAEDRRSFRGARRLIRRRKYKLKRFINLIWKYNSYFGFKNKEDILNNYQEQQKLHNTVLNLKLEALNAKIDPKALSWILHDYLKNRGHFYEDNRDFNVYPTEELANYFGEYGYYKGIIDSKEDNDDKLEEGLTKYKFSNQHWLEEIKKVLSNQTGLPEKFKEEYESLFSYVRNYSEGPGSINSVSPYGIYHLDEKEGKVVQKYNNIWDKTIGKCSIFPDEYRAPKNSPIAMIFNEINELSTIRSYSIYLTGWFINQEFKKAYLNKLLDLLIKTNSEKPIDARQFKKLREETIAESIGKETLKDVEREEKLEKEDHKWKLKGLKLNTNGKIQYNDLSSLAKFVHKLKQHLKLDFLLEDQYTTLDKINFLQSLFVYLGKHLRYSNRVDSANLKEFSDSNKLFERVLQEQKDDLFKLFEQTDKDDEKILAQTHSLSTKAMLLAITRMTNLDNDEDNQKNNDKGWNFEAIKNFDQKFIDITKKNNNLSLKQDKRYLDDRFINDAILSPGVKRILREATKVFNAILKQFSEEYDVTKVVIELARELSEEKELENTKNYEKLIKKNSDKISERLEALDIAEDKIEDILKSPTKSYKVLLWLQQDHIDPYSQKEIAFEDILTKTEKTEIDHIIPYSISFDDSSSNKLLVLAESNQAKSNQTPYEFITSGNAGIKWEDYEAYCRKFKDGDTSLLDSTQRSKKFAKMMKTDTSSKYDIGFLARNLNDTRYATIVFRDALKDYANNHLVEDKPMFKVVCINGGVTSFLRKNFDKSWYAKKDRDKNIHHAVDASIISIFSNETKTLFNQLTQFADYKLFKNTDGSWKKIDPKTGVVTEVTDENWKQIRVRNQVSEIAKVINKCIQDSNIERKARYSRKIENKTNISLFNDTVYSAKKVGYEDQIKRKNLKTLDIHESAEENKNSKVKKQFVYRKLVNVSLLNNDKLADLFAEKEDILMYRANPWVINLAEQIFNEYTENKKIKSQNVFEKYMLDLTKEFPEKFSEAFVKSMLRNKTAIIYNVEKKVVHRIKRLKILSSELKENKLSNVIIRSKNESGTKLSYQDTINSIALMIMRSIDPTAKKQYIRVPLNTLNLHLGDQDFDLHNIDAYLKKPKFVKYLKANEIGDEYKPWRVLTSGTLLIHKKDKKLMYISSFQNLKDVIEIKNLIETEYKENDDSDPKKRRKQIGS

SEQ ID NO: 332 - protein, 1269 aa, Mycoplasma gallisepticum
MNNSIKSKPEVTIGLDLGVGSVGWAIVDNETNIIHHLGSRLFSQAKTAEDRRSFRGVRRLIRRRKYKLKRFVNLIWKYNSYFGFKNKEDILNNYQEQQKLHNTVLNLKSEALNAKIDPKALSWILHDYLKNRGHFYEDNRDFNVYPTKELAKYFDKYGYYKGIIDSKEDNDNKLEEELTKYKFSNKHWLEEVKKVLSNQTGLPEKFKEEYESLFSYVRNYSEGPGSINSVSPYGIYHLDEKEGKVVQKYNNIWDKTIGKCNIFPDEYRAPKNSPIAMIFNEINELSTIRSYSIYLTGWFINQEFKKAYLNKLLDLLIKTNGEKPIDARQFKKLREETIAESIGKETLKDVENEEKLEKEDHKWKLKGLKLNTNGKIQYNDLSSLAKFVHKLKQHLKLDFLLEDQYATLDKINFLQSLFVYLGKHLRYSNRVDSANLKEFSDSNKLFERILQKQKDGLFKLFEQTDKDDEKILAQTHSLSTKAMLLAITRMTNLDNDEDNQKNNDKGWNFEAIKNFDQKFIDITKKNNNLSLKQNKRYLDDRFINDAILSPGVKRILREATKVFNAILKQFSEEYDVTKVVIELARELSEEKELENTKNYKKLIKKNGDKISEGLKALGISEDEIKDILKSPTKSYKFLLWLQQDHIDPYSLKEIAFDDIFTKTEKFEIDHIIPYSISFDDSSSNKLLVLAESNQAKSNQTPYEFISSGNAGIKWEDYEAYCRKFKDGDSSLLDSTQRSKKFAKMMKTDTSSKYDIGFLARNLNDTRYATIVFRDALEDYANNHLVEDKPMFKVVCINGSVTSFLRKNFDDSSYAKKDRDKNIHHAVDASIISIFSNETKTLFNQLTQFADYKLFKNTDGSWKKIDPKTGVVTEVTDENWKQIRVRNQVSEIAKVIEKYIQDSNIERKARYSRKIENKTNISLFNDTVYSAKKVGYEDQIKRKNLKTLDIHESAKENKNSKVKRQFVYRKLVNVSLLNNDKLADLFAEKEDILMYRANPWVINLAEQIFNEYTENKKIKSQNVFEKYMLDLTKEFPEKFSEFLVKSMLRNKTAIIYDDKKNIVHRIKRLKMLSSELKENKLSNVIIRSKNQSGTKLSYQDTINSLALMIMRSIDPTAKKQYIRVPLNTLNLHLGDHDFDLHNMDAYLKKPKFVKYLKANEIGDEYKPWRVLTSGTLLIHKKDKKLMYISSFQNLNDVIEIKNLIETEYKENDDSDSKKKKKANRFLMTLSTILNDYILLDAKDNFDILGLSKNRIDEILNSKLGLDKIVK

SEQ ID NO: 333 - protein, 1269 aa, Mycoplasma gallisepticum; identical to SEQ ID NO: 332
  REGION 1..1269: note = Mycoplasma gallisepticum str. F

SEQ ID NO: 334 - protein, 1270 aa, Mycoplasma gallisepticum
MNNSIKSKPEVTIGLDLGVGSVGWAIVDNETNIIHHLGSRLFSQAKTAEDRRSFRGVRRLIRRRKYKLKRFVNLIWKYNSYFGFKNKEDILNNYQEQQKLHNTVLNLKLEALNAKIDPKALSWILHDYLKNRGHFYEDNRDFNVYPTEELANYFDEFGYYKGIIDSKNDDDDKLEEGLTKYKFSNQHWLEEVKKVLSNQTGLPEKFKEEYESLFSYVRNYSEGPGSINSVSPYGIYHLDEKEGKVVQKYNNIWDKTIGKCSIFPDEYRAPKNSPIAMIFNEINELSTIRSYSIYLTGWFINQEFKKAYLNKLLDLLIKTNSEKPIDARQFKKLREETIAESIGKETLKDVESEEKLEKDDHKWKLKGLKLNTNGKIQYNDLSSLAKFVHKLKQHLKLDFLLEDQYTPLDKINFLQSLYVYLGKHLRYSNRVDSANLKEFSDSSRLFERVLQEQKDGLFKLFEQTDKDDEKILTQTHSLSTKAMLLAITRMTNLDNDEDNQKNNDKGWNFEAIKNFDQKFIDITKTNNNLSLKQDKRYLDDQFINDAILSPGVKRILREATKVFNAILKQFSEEYDVTKVVIELARELSEEKELENTKNYKKLIKKNGDKISEGLKALGIAEDKIEEILKSPTKSYKVLLWLQQDHIDPYSQKEIAFDDILTKTEKTEIDHIIPYSISFDDSSSNKLLVLAESNQAKSNQTPYEFINSGKAEITWEVYEAYCHKFKNGDSSLLDSTQRSKKFAKMMKTDTSSKYDIGFLARNLNDTRYATIVFRDALKDYANNHLVEDKPMFKVVCINGGVTSFLRKNFDPKSWYAKKDRDKNIHHAVDASIISIFSNETKTLFNQLTKFADYKLFKNTDGSWKKIDPKTGVVSEVTDENWKQIRVRNQVSEIAKVIDKYIQDSNIERKARYSRKIENKTNISLFNDTVYSAKKVGYEDQIKRKNLKTLDIHESAEENKNSKVKKQFVYRKLVNVSLLNNDKLADLFAEKEDILMYRANPWVINLAEQIFNEYTENKKIKSQNVFEKYMLDLTKEFPEKFSEAFVKSMIRNKTAIIYNVEKDVVHRIKRLKILSSELKENKWSNVIIRSKNESGTKLSYQDTINSIALMIMRSIDPTAKKQYIRVPLNTLNLHLGDQDFDLHNIDAYLKKPKFVKYLKANEIGDEYKPWRVLTSGTLLIHKKDKKLMYISSFQNLNDLIEIKNLIETEYKENVDSDPKKKKKASQILRSLSVILNDYILLDAKYNFDILGLSKNKIDEILNSKLDLDKIAK

SEQ ID NO: 335 - protein, 1236 aa, Mycoplasma mobile
MYFYKNKENKLNKKVVLGLDLGIASVGWCLTDISQKEDNKFPIILHGVRLFETVDDSDDKLLNETRRKKRGQRRRNRRLFTRKRDFIKYLIDNNIIELEFDKNPKILVRNFIEKYINPFSKNLELKYKSVTNLPIGFHNLRKAAINEKYKLDKSELIVLLYFYLSLRGAFFDNPEDTKSKEMNKNEIEIFDKNESIKNAEFPIDKIIEFYKISGKIRSTINLKFGHQDYLKEIKQVFEKQNIDFMNYEKFAMEEKSFFSRIRNYSEGPGNEKSFSKYGLYANENGNPELIINEKGQKIYTKIFKTLWESKIGKCSYDKKLYRAPKNSFSAKVFDITNKLTDWKHKNEYISERLKRKILLSRFLNKDSKSAVEKILKEENIKFENLSEIAYNKDDNKINLPIINAYHSLTTIFKKHLINFENYLISNENDLSKLMSFYKQQSEKLFVPNEKGSYEINQNNNVLHIFDAISNILNKFSTIQDRIRILEGYFEFSNLKKDVKSSEIYSEIAKLREFSGTSSLSFGAYYKFIPNLISEGSKNYSTISYEEKALQNQKNNFSHSNLFEKTWVEDLIASPTVKRSLRQTMNLLKEIFKYSEKNNLEIEKIVVEVTRSSNNKHERKKIEGINKYRKEKYEELKKVYDLPNENTTLLKKLWLLRQQQGYDAYSLRKIEANDVINKPWNYDIDHIVPRSISFDDSFSNLVIVNKLDNAKKSNDLSAKQFIEKIYGIEKLKEAKENWGNWYLRNANGKAFNDKGKFIKLYTIDNLDEFDNSDFINRNLSDTSYITNALVNHLTFSNSKYKYSVVSVNGKQTSNLRNQIAFVGIKNNKETEREWKRPEGFKSINSNDFLIREEGKNDVKDDVLIKDRSFNGHHAEDAYFITIISQYFRSFKRIERLNVNYRKETRELDDLEKNNIKFKEKASFDNFLLINALDELNEKLNQMRFSRMVITKKNTQLFNETLYSGKYDKGKNTIKKVEKLNLLDNRTDKIKKIEEFFDEDKLKENELTKLHIFNHDKNLYETLKIIWNEVKIEIKNKNLNEKNYFKYFVNKKLQEGKISFNEWVPILDNDFKIIRKIRYIKFSSEEKETDEIIFSQSNFLKIDQRQNFSFHNTLYWVQIWVYKNQKDQYCFISIDARNSKFEKDEIKINYEKLKTQKEKLQIINEEPILKINKGDLFENEEKELFYIVGRDEKPQKLEIKYILGKKIKDQKQIQKPVKKYFPNWKKVNLTYMGEIFKK

SEQ ID NO: 336 - protein, 1265 aa, Mycoplasma ovipneumoniae
  REGION 1..1265: note = Mycoplasma ovipneumoniae SC01
MHNKKNITIGFDLGIASIGWAIIDSTTSKILDWGTRTFEERKTANERRAFRSTRRNIRRKAYRNQRFINLILKYKDLFELKNISDIQRANKKDTENYEKIISFFTEIYKKCAAKHSNILEVKVKALDSKIEKLDLIWILHDYLENRGFFYDLEEENVADKYEGIEHPSILLYDFFKKNGFFKSNSSIPKDLGGYSFSNLQWVNEIKKLFEVQEINPEFSEKFLNLFTSVRDYAKGPGSEHSASEYGIFQKDEKGKVFKKYDNIWDKTIGKCSFFVEENRSPVNYPSYEIFNLLNQLINLSTDLKTTNKKIWQLSSNDRNELLDELLKVKEKAKIISISLKKNEIKKIILKDFGFEKSDIDDQDTIEGRKIIKEEPTTKLEVTKHLLATIYSHSSDSNWININNILEFLPYLDAICIILDREKSRGQDEVLKKLTEKNIFEVLKIDREKQLDFVKSIFSNTKFNFKKIGNFSLKAIREFLPKMFEQNKNSEYLKWKDEEIRRKWEEQKSKLGKTDKKTKYLNPRIFQDEIISPGTKNTFEQAVLVLNQIIKKYSKENIIDAIIIESPREKNDKKTIEEIKKRNKKGKGKTLEKLFQILNLENKGYKLSDLETKPAKLLDRLRFYHQQDGIDLYTLDKINIDQLINGSQKYEIEHIIPYSMSYDNSQANKILTEKAENLKKGKLIASEYIKRNGDEFYNKYYEKAKELFINKYKKNKKLDSYVDLDEDSAKNRFRFLTLQDYDEFQVEFLARNLNDTRYSTKLFYHALVEHFENNEFFTYIDENSSKHKVKISTIKGHVTKYFRAKPVQKNNGPNENLNNNKPEKIEKNRENNEHHAVDAAIVAIIGNKNPQIANLLTLADNKTDKKFLLHDENYKENIETGELVKIPKFEVDKLAKVEDLKKIIQEKYEEAKKHTAIKFSRKTRTILNGGLSDETLYGFKYDEKEDKYFKIIKKKLVTSKNEELKKYFENPFGKKADGKSEYTVLMAQSHLSEFNKLKEIFEKYNGFSNKTGNAFVEYMNDLALKEPTLKAEIESAKSVEKLLYYNFKPSDQFTYHDNINNKSFKRFYKNIRIIEYKSIPIKFKILSKHDGGKSFKDTLFSLYSLVYKVYENGKESYKSIPVTSQMRNFGIDEFDFLDENLYNKEKLDIYKSDFAKPIPVNCKPVFVLKKGSILKKKSLDIDDFKETKETEEGNYYFISTISKRFNRDTAYGLKPLKLSVVKPVAEPSTNPIFKEYIPIHLDELGNEYPVKIKEHTDDEKLMCTIK

SEQ ID NO: 337 - protein, 1314 aa, Mycoplasma synoviae
MLRLYCANNLVLNNVQNLWKYLLLLIFDKKIIFLFKIKVILIRRYMENNNKEKIVIGFDLGVASVGWSIVNAETKEVIDLGVRLFSEPEKADYRRAKRTTRRLLRRKKFKREKFHKLILKNAEIFGLQSRNEILNVYKDQSSKYRNILKLKINALKEEIKPSELVWILRDYLQNRGYFYKNEKLTDEFVSNSFPSKKLHEHYEKYGFFRGSVKLDNKLDNKKDKAKEKDEEEESDAKKESEELIFSNKQWINEIVKVFENQSYLTESFKEEYLKLFNYVRPFNKGPGSKNSRTAYGVFSTDIDPETNKFKDYSNIWDKTIGKCSLFEEEIRAPKNLPSALIFNLQNEICTIKNEFTEFKNWWLNAEQKSEILKFVFTELFNWKDKKYSDKKFNKNLQDKIKKYLLNFALENFNLNEEILKNRDLENDTVLGLKGVKYYEKSNATADAALEFSSLKPLYVFIKFLKEKKLDLNYLLGLENTEILYFLDSIYLAISYSSDLKERNEWFKKLLKELYPKIKNNNLEIIENVEDIFEITDQEKFESFSKTHSLSREAFNHIIPLLLSNNEGKNYESLKHSNEELKKRTEKAELKAQQNQKYLKDNFLKEALVPLSVKTSVLQAIKIFNQIIKNFGKKYEISQVVIEMARELTKPNLEKLLNNATNSNIKILKEKLDQTEKFDDFTKKKFIDKIENSVVFRNKLFLWFEQDRKDPYTQLDIKINEIEDETEIDHVIPYSKSADDSWFNKLLVKKSTNQLKKNKTVWEYYQNESDPEAKWNKFVAWAKRIYLVQKSDKESKDNSEKNSIFKNKKPNLKFKNITKKLFDPYKDLGFLARNLNDTRYATKVFRDQLNNYSKHHSKDDENKLFKVVCMNGSITSFLRKSMWRKNEEQVYRFNFWKKDRDQFFHHAVDASIIAIFSLLTKTLYNKLRVYESYDVQRREDGVYLINKETGEVKKADKDYWKDQHNFLKIRENAIEIKNVLNNVDFQNQVRYSRKANTKLNTQLFNETLYGVKEFENNFYKLEKVNLFSRKDLRKFILEDLNEESEKNKKNENGSRKRILTEKYIVDEILQILENEEFKDSKSDINALNKYMDSLPSKFSEFFSQDFINKCKKENSLILTFDAIKHNDPKKVIKIKNLKFFREDATLKNKQAVHKDSKNQIKSFYESYKCVGFIWLKNKNDLEESIFVPINSRVIHFGDKDKDIFDFDSYNKEKLLNEINLKRPENKKFNSINEIEFVKFVKPGALLLNFENQQIYYISTLESSSLRAKIKLLNKMDKGKAVSMKKITNPDEYKIIEHVNPLGINLNWTKKLENNN

SEQ ID NO: 338 - protein, 1304 aa, Mycoplasma synoviae
  REGION 1..1304: note = Mycoplasma synoviae 53
MLNNVQNLWKYLLLLIFDKKIIFLFKIKVILIRRYMENNNKEKIVIGFDLGVASVGWSIVNAETKEVIDLGVRLFSEPEKADYRRAKRTTRRLLRRKKFKREKFHKLILKNAEIFGLQSRNEILNVYKDQSSKYRNILKLKINALKEEIKPSELVWILRDYLQNRGYFYKNEKLTDEFVSNSFPSKKLHEHYEKYGFFRGSVKLDNKLDNKKDKAKEKDEEEESDAKKESEELIFSNKQWINEIVKVFENQSYLTESFKEEYLKLFNYVRPFNKGPGSKNSRTAYGVFSTDIDPETNKFKDYSNIWDKTIGKCSLFEEEIRAPKNLPSALIFNLQNEICTIKNEFTEFKNWWLNAEQKSEILKFVFTELFNWKDKKYSDKKFNKNLQDKIKKYLLNFALENFNLNEEILKNRDLENDTVLGLKGVKYYEKSNATADAALEFSSLKPLYVFIKFLKEKKLDLNYLLGLENTEILYFLDSIYLAISYSSDLKERNEWFKKLLKELYPKIKNNNLEIIENVEDIFEITDQEKFESFSKTHSLSREAFNHIIPLLLSNNEGKNYESLKHSNEELKKRTEKAELKAQQNQKYLKDNFLKEALVPLSVKTSVLQAIKIFNQIIKNFGKKYEISQVVIEMARELTKPNLEKLLNNATNSNIKILKEKLDQTEKFDDFTKKKFIDKIENSVVFRNKLFLWFEQDRKDPYTQLDIKINEIEDETEIDHVIPYSKSADDSWFNKLLVKKSTNQLKKNKTVWEYYQNESDPEAKWNKFVAWAKRIYLVQKSDKESKDNSEKNSIFKNKKPNLKFKNITKKLFDPYKDLGFLARNLNDTRYATKVFRDQLNNYSKHHSKDDENKLFKVVCMNGSITSFLRKSMWRKNEEQVYRFNFWKKDRDQFFHHAVDASIIAIFSLLTKTLYNKLRVYESYDVQRREDGVYLINKETGEVKKADKDYWKDQHNFLKIRENAIEIKNVLNNVDFQNQVRYSRKANTKLNTQLFNETLYGVKEFENNFYKLEKVNLFSRKDLRKFILEDLNEESEKNKKNENGSRKRILTEKYIVDEILQILENEEFKDSKSDINALNKYMDSLPSKFSEFFSQDFINKCKKENSLILTFDAIKHNDPKKVIKIKNLKFFREDATLKNKQAVHKDSKNQIKSFYESYKCVGFIWLKNKNDLEESIFVPINSRVIHFGDKDKDIFDFDSYNKEKLLNEINLKRPENKKFNSINEIEFVKFVKPGALLLNFENQQIYYISTLESSSLRAKIKLLNKMDKGKAVSMKKITNPDEYKIIEHVNPLGINLNWTKKLENNN

SEQ ID NO: 339 - protein, 1401 aa, Myroides injenensis
  REGION 1..1401: note = Myroides injenensis M09-0166
MKRILGLDLGTTSIGWAYVHEAENVNETSSIQKVGVRVNPLTTEEQTNFEKGKPITTNASRTLARSARRNLQRYKLRRDNLIQILKENNWINNTTSLTETGNHSTFETYELRNKAASEKLTLDQLSRVLLMLNKKRGYKSSRKVNSKEEGQLIDGMEVAKKLYHEQLTPGQLSLQLMNQGVKKLPDYYRSDLNQELESIWNFQQQFYPNILTDKFKEEINGKGLTSTSSAFWNIYNFNTAENKGSRDEKKKQALQWRSEALSKQLSKEIVAYIIADLNGQIYNSSGYLGAISDRSKELYFNNLTVGQYLFKQLKSNPHTSLKNQVFYRQDYLNEFEKIWETQSKFYPKELTAALKREIRDVIIFYQRKLKSQKGLISFCEFEQKQKTINGKTKTIGHRVIPKSSPLFQEFKIWQQLHNVVLRNKKTNEIVSLADEQKVHLFEELNLKGKLKSNQVLKLIENKPKDWELNYTELEGNNTNKALYNAYLDILDIEGYDVRNELKVKLNKDDIELSDLDVNASEIKEMIFSVFKHLGINTEILEFDATLEDKVFEKQASYQLWHLLYSYEEDNSPTGLDRLYNLLHKKFGFKLNHAKLIGNVLFQDDYGSLSSKAIKNIFPYITENNYYTACELAGYKHSKHSLTKEENETRELKNRLTILPKNSLRNPVVEKIINQMINVVNTLIDEENNILIAQGKEPNFQFDEIRIELARELKKNAKEREELTKSINKSKTDHEKIIKILQKEDGIKNPTRNDIVRFKLYSELKNNGYKDLYTNEYIERKDIFTKEYDIEHIIPQSKLFDDSFSNKTLVRRNVNLKKGNQTAYDFILCEYGQEKANEFETRITNLYNLGKDEGISKSKFKKLLMQESEIGNGFIERDLRETQYIAKKAKSLLLEITRNVISTSGSITDRLREDWGLINVMKELNLQKYRDAGLTEFVKMKDGNKKEVIIDWTKRNDHRHHAMDALTIAFTKHNHIQYLNHLNARKNVNNELHNNIIAIEKLETTLVSDERGNKKRIFKEPIANFRTIAKSHLEAILVSHKAKNKVVTKNINKISGKKISQQTLTPRGQLHKETIYGKIRQYVSKQEKVGPKFTIEVIEQVSNPTYRNLLLKRLEENNNDPKKAFGGKNSLNKNPIYINLEKNIKVPEVLKLVWLEDNYTIRKEISPDLKIDKVIDQGVKQILQNRLAQYKGDSKLAFSNLDANPIWLNEDKGIAIKRVTISGIATAQPLHRKKDHLGQPILDHNGQEIPVDFISTGNNHHVAIYEDENGKLQESVVSHFEAVERVNQKLPIIDKTFNQHLGWKFLFTMKQNELFLFPSDDFNPNEIDLFDKQNYTVISKHLFRIQKLSTKDYSFRHHLETNVEEIKDLKTITWRREGLNGIQNIIKVRTNHLGEIIHIGEY

SEQ ID NO: 340 - protein, 1466 aa, Myroides odoratus
  REGION 1..1466: note = Myroides odoratus DSM 2801
MKNILGLDLGTNSIGWALVKEDFENKQGEILGLGSRIIPMSQDILGEFGRGNSISQTADRTGYRGVRRLRERHLLRRERLHRVLNILGFLPNHYAKEIDFTKRLGKFINHAEPKLSFDKEFIFKDSFNEMLKDFQQNQPGFIINKHGEEALVPYDWTIYYLRKKALTQKIDKEELAWILLNFNQKRGYYQLRGEEEEENTNKLVEFYSLKIIDVIADNEVNKKGEVWYSLHLENGWIYRRSSKISLVDWKDKVRDFIVTTDVNDDGSEKLDKDGVVKRSFRAPSADDWTLLKKKTEQDIDNSNKTVGAYIYENLLLNPKQKIKGKLVRTIERKFYKDELKQILEKQKEFHQELQNEQLLQDCVRELYKYNEQHQQMLESKDFVHLFLNDIIFYQRPLRSQKSLISNCTLEKRVSRDGVVFPIKVISKSNPYYQEFRLLQWLQNLAIYRKDDDVNVTQEFLNSIESWENLLQFLNAKKEIKQEQLIKFLLEQKGLKGNSLKTAILTYRWNYVTDKVYPMNETRSLIQDKLKKVENVATDFLSFDNEMALWHIIYSVNDKIEYEKALAKFASKHNLDEISFVESFKKFPPFKSDYGSFSEKAIKKLLPLMRFGSVWNKNNIVPSVLDRIDKILTGEYDEKIKIRVREKAEQFQLNQIEDFQNLPLWLAQYVVYDRHSEAEIAGKWNSVKDLENYLKEFKQHSLRNPIVEQIITETLRVVKDIWQQYGNGVQNFFDEIHIELGREMKNTADERKRITNSVTENENTNLRIKALLVELKEDTNIENVRPHSPMQQEILKIYEEGVLNAVENIDEDILKISKTAQPSKSELIRYKLWLEQKYQSPYTGEMIPLSRLFTSDYEIEHVIPQSRYFDDSLSNKVICEAAVNKRKDNQLGLEFIKNHHSEKIELGNGRTAQVLEVEAYESFVKKNYDKNRGKRNKLLLEDVPEKMIERQLNDTRYISKFVTHLLSNIVRKDEVNSKDDGINSKNIIPGNGKITSQLKQDWGLNDVWNELILPRFERMNNLTNSTDFTSTNTNGKIIPTVPLEYSKGFSKKRIDHRHHALDALVIALATRDHVNLLNNESALPKKDRTKEEQKSFRFDLQVNLRNKEKYFNVKEGREKEKFTTFKKPWNTLTQDTRDALENMVVSFKQNLRVINKATNYYESYTDENGNLRLDKYGNPKKELISQKGTNWAIRKSLHKETVSGQIHLDRVKVTKGKIVTATRKSLDSSFNEKSIESITDTGIQKILRNYLKAKDNKPDVAFSPEGIEELNKSISVYNEGKNHQPIIKVRIFEQGSKFPVGETGNKIAKFVEAAKGTNLFFGIYQDKTGKRSYDTIPLNLVIERLKQGLSPVPETNEKGHQLLFHLSPNDLVYVPTIDDNEQLDSNRVYKFTDSSDTTCNFIPSNISAIIFNINSKEQEKRGINYPIQNELGVGSPQSKNQKSFDGFMIKEVCIKLKVDRLGNISKT

SEQ ID NO: 341 - protein, 1077 aa, Neisseria bacilliformis
  REGION 1..1077: note = Neisseria bacilliformis ATCC BAA-1200
MQQKPQRYILGLDLGIASVGWACVWADENEHPTGLLDCGVRTFERAEVPKTGDSLALARRQARSVRRLIRRRAHRLLRLRRLLKREGVLLSADFNENGLVRGLPIDAWALRVAGLDRKLSNKEWAAVLLHLVKHRGYLSQRKNETQSKDKELGRLLAGVNGNREALQNRSDEYRTAAELAVKKFAAENNGSLRNKGGDYSHTFDRKDLQRELHLLFERQRALDNPFTSSEMEAAVDELLMKQRSALQGEAVLKMLGRCTFEPSEYKAAKNTYSAERFVWLTKLNNLRIQYNGEERALSEAERRLLLDEPYQKAKLTYKQVRTILELPESAVFKGLRYGHGEDGLKAESGTLMEMKAYHAVRKALKDAGLEGEWENRIRNPELLDAIGTAFSLYKTDEDIRANLAAFRLSENVLEALLAGLNFDKFVHLSLKALAKILPLMEQGMRYDEACKEAYGDHYGAKEQEDHRLLPPFVADDIRNPVVFRTLTQARKIVNEIVRRYGSPLRVHIETGREVGKSFSDRKEIEKRQEENRKERERAAAHFKELFPNFAGEPKAQDILKLRLYEQQHGKCLYSGKEIDLRRLPEKGYVEIDHALPFSRTWDDSFNNKVLVLGKENQDKRNRTPYEYLDGKGNSGAWRAFAERVSGCRFPYAKKQRLLTQKLDEKTEQGFLERNLNDTRYVARFLCQFIEEKMHLEGAGKKRVFASNGQITALLRGFWGLKKVREENDRHHALDAVVVACSSVSMQQKITRHFRYREELEHIDRETGEVIHGFPQPWEFFRQEVMTRVFSDDPVSELAEKLDSRPEAVHEFVTPLFVSRAPHRKVTGQGHLETIRSAKRLDEKISVVKLPLTQLKTKDIERIVGYPNREPALYDALAARLAAFKDDPAKAFSEPFYKTGKDGKCGVLVKAVRVENVQKSGLLVRKDESGKMQGVADNATMVRVDVFGKNGKNYLVPVYAWQVEKGELPNRAVVAYADEEDWDEMDDSFEFKFSLYPNDLVEVVTKKDKFFGYYSGFNRATGAINIKEHDLSKSKVKNGVYEGIGVKTAQSFQKYQVDTLGKTIRLCKPEKRMGFKKK

SEQ ID NO: 342 - protein, 1082 aa, Neisseria cinerea
  REGION 1..1082: note = Neisseria cinerea ATCC 14685
MAAFKPNPMNYILGLDIGIASVGWAIVEIDEEENPIRLIDLGVRVFERAEVPKTGDSLAAARRLARSVRRLTRRRAHRLLRARRLLKREGVLQAADFDENGLIKSLPNTPWQLRAAALDRKLTPLEWSAVLLHLIKHRGYLSQRKNEGETADKELGALLKGVADNTHALQTGDFRTPAELALNKFEKESGHIRNQRGDYSHTFNRKDLQAELNLLFEKQKEFGNPHVSDGLKEGIETLLMTQRPALSGDAVQKMLGHCTFEPTEPKAAKNTYTAERFVWLTKLNNLRILEQGSERPLTDTERATLMDEPYRKSKLTYAQARKLLDLDDTAFFKGLRYGKDNAEASTLMEMKAYHAISRALEKEGLKDKKSPLNLSPELQDEIGTAFSLFKTDEDITGRLKDRVQPEILEALLKHISFDKFVQISLKALRRIVPLMEQGNRYDEACTEIYGDHYGKKNTEEKIYLPPIPADEIRNPVVLRALSQARKVINGVVRRYGSPARIHIETAREVGKSFKDRKEIEKRQEENRKDREKSAAKFREYFPNFVGEPKSKDILKLRLYEQQHGKCLYSGKEINLGRLNEKGYVEIDHALPFSRTWDDSFNNKVLALGSENQNKGNQTPYEYFNGKDNSREWQEFKARVETSRFPRSKKQRILLQKFDEDGFKERNLNDTRYINRFLCQFVADHMLLTGKGKRRVFASNGQITNLLRGFWGLRKVRAENDRHHALDAVVVACSTIAMQQKITRFVRYKEMNAFDGKTIDKETGEVLHQKAHFPQPWEFFAQEVMIRVFGKPDGKPEFEEADTPEKLRTLLAEKLSSRPEAVHKYVTPLFISRAPNRKMSGQGHMETVKSAKRLDEGISVLRVPLTQLKLKDLEKMVNREREPKLYEALKARLEAHKDDPAKAFAEPFYKYDKAGNRTQQVKAVRVEQVQKTGVWVHNHNGIADNATIVRVDVFEKGGKYYLVPIYSWQVAKGILPDRAVVQGKDEEDWTVMDDSFEFKFVLYANDLIKLTAKKNEFLGYFVSLNRATGAIDIRTHDTDSTKGKNGIFQSVGVKTALSFQKYQIDELGKEIRPCRLKKRPPVR

SEQ ID NO: 343 - protein, 1081 aa, Neisseria flavescens
  REGION 1..1081: note = Neisseria flavescens SK114
MTAFKPNPINYILGLDIGIASVGWAMVEIDEEENPIRLIDLGVRVFERAEVPKTGDSLAAARRLARSVRRLTRRRAHRLLRARRLLKREGVLQAADFDENGLIKSLPNTPWQLRAAALDRKLTPLEWSAVLLHLIKHRGYLSQRKNEGETADKELGALLKGVADNAHALQTGDFRTPAELAVNKFEKESGHIRNQRGDYSHTFSRKDLQAELVLLFEKQKEFGNPHISDGLKEGIETLLMAQRPALSGDAVQKMLGYCTFEPTEPKAAKNTYTAERFIWLTKLNNLRILEQGSERPLTDTERATLIDMPYKNKLTYAKARELLGLDDTAFFKGLRYGKDNAESATLMEMKAYHAIRRALEKEGLKDKKSPLSLSPELQDEIGTAFSLFKTDEDITGRLKGCLQPEILDALLKHINFDKFVQISLKALRRIVPLMEQGKRYDEACAETYGDHYGEKNSEEMLYLPPIPADEIRNPVVLRALSQARKVINGVVRRYGSPARIHIETAREVGKSFKDRKEIEKRQEENRKDREKAAAKFREYFPNFVGEPKSKDILKLRLYEQQHGKCLYSGKAIDIRRLNGKGYVEIDHALPFSRTWDDSFNNKVLVLGSENQNKGNRTPYEYLNGKDNSREWLEFKARVETSRFPHSKKQRVLLQKFDEKGFKERNLNDTRYVNRFLCQFVADHMQLTGKGKRRVFASNGQITNLLRGFWGLHKVRAENDRHHALDAVVVACSTVAMQQKITCFVRYKEMNAFDGKTVDKETGEVLHQKTHFPQPWEFFAQEVMIRVFGKPDGKPEFEEADTPEKLRALLAEKLSSRPEAVHEYVTPLFVSRAPNRKMSGAHKDTLRSAKRFVKHNEKISVKRVWLTEIKLADLENMVNYKNGREIELYEALKARLGAYGGNAKQAFDPKDNPFYKKGGQLVKAVRVEKTQESGVLLNKKNAYTIADNGDMVRVDVFCKVDKKGKNQYFIVPIYAWQVAENILPDIDCKGYRIDDSYTFCFSLHKYDLIAFQKDEKSKVEFAYYINCDSSNGRFYLAWHDKGSKEQQFRISTQNLVLMQKYQIDELGKEIRPCRLKKRPPVR

SEQ ID NO: 344 - protein, 1082 aa, Neisseria lactamica
MAAFKPNPMNYILGLDIGIASVGWAMVEIDKEENPIRLIDLGVRVFERAEVPKTGDSLAMARRLARSVRRLTRRRAHRLLRARRLLKREGVLQDADFDENGLVKSLPNTPWQLRAAALDRKLTCLEWSAVLLHLIKHRGYLSQRKNEGETADKELGALLKGVADNAHALQTGDFRTPAELALNKFEKESGHIRNQRGDYSHTFSRKDLQAELNLLFEKQKEFSNPHVSDSLKEGIETLLMAQRPALSGDAVQKMLGHCTFEPAEPKAAKNTYTAERFIWLTKLNNLRILEQGSERPLTDTERATLMDEPYRKSKLTYAQARKLLGLEDTAFFKGLRYGKDNAEAPTLMEMKAYHAISRALEKEGLKDKKSPLNLSTELQDEIGTAFSLFKTDKDITGRLKDRVQPEILEALLKHISFDKFVQISLKALRRIVPLMEQGKRYDEACAEIYGDHYCKKNAEEKIYLPPIPADEIRNPVVLRALSQARKVINCVVRRYGSPARIHIETAREVGKSFKDRKEIEKRQEENRKDREKAAAKFREYFPNFVGEPKSKDILKLRLYEQQHGKCLYSGKEINLVRLNEKGYVEIDHALPFSRTWDDSFNNKVLVLGSENQNKGNQTPYEYFNGKDNSREWQEFKARVETSRFPRSKKQRILLQKFDEEGFKERNLNDTRYVNRFLCQFVADHILLTGKGKRRVFASNGQITNLLRGFWGLRKVRAENDRHHALDAVVVACSTVAMQQKITRFVRYKEMNAFDGKTIDKETGEVLHQKAHFPQPWEFFAQEVMIRVFGKPDGKPEFEEADTPEKLRTLLAEKLSSRPEAVHEYVTPLFVSRAPNRKMSGQGHMETVKSAKRLDEGISVLRVPLTQLKLKGLEKMVNREREPKLYDALKAQLETHKDNPAKAFAEPFYKYDKAGNRTQQVKAVRIEQVQKTGVWVRNHNGIADNATMVRVDVFEKGGKYYLVPIYSWQVAKGILPDRAVVAFKDEEDWTVMDDSFEFRFVLYANDLIKLTAKKNEFLGYFVSLNRATGAIDIRTHDTDSTKGKNGIFQSVGVKTALSFQKNQIDELGKEIRPCRLKKRPPVR

SEQ ID NO: 345 - protein, 1082 aa, Neisseria meningitidis
MAAFKPNPINYILGLDIGIASVGWAMVEIDEDENPICLIDLGVRVFERAEVPKTGDSLAMARRLARSVRRLTRRRAHRLLRARRLLKREGVLQAADFDENGLIKSLPNTPWQLRAAALDRKLTPLEWSAVLLHLIKHRGYLSQRKNEGETADKELGALLKGVADNAHALQTGDFRTPAELALNKFEKESGHIRNQRGDYSHTFSRKDLQAELNLLFEKQKEFGNPHISDGLKEGIETLLMTQRPALSGDAVQKMLGHCTFEPAEPKAAKNTYTAERFIWLTKLNNLRILEQGSERPLTDTERTTLIDEPYRKSKLTYAQARKLLELDNTAFFKGLRYGKDNAEASTLMEMKAYHAISRALEKEGLKDKKSPLNLSPELQDEIGTAFSLFKTDEDITGRLKDRVQPEILEALLKHISFDKFVQISLKALRRIVPLMEQGKRYDEACAEIYGDHYGKKNTEEKIDLPPIPADEIRNPVVLRALSQARKVINGVVRRYGSPARIHIETAREVGKSFKDRKEIEKRQEENRKDREKAATKFREYFPNFVGEPKSKDILKLRLYEQQHGKCLYSGKEINLGRLNEKGYVEIDHALPFSRTWDDSFNNKVLVLGSENQNKGNQTPYEYFNGKDNSREWQEFKARVETSRFPRSKKQRILLQKFDEEGFKERNLNDTRYVNRFLCQFVADHMLLTGKGKRRVFASNGQITNLLRGFWGLRKVRAENDRHHALDAVVVACSTVAMQQKITRFVRYKEMNAFDGKTIDKETGEVLHQKTHFPQPWEFFAQEVMIRVFGKPDGKPEFEEADTPEKLRTLLAEKLSSRPEAVHEYVTPLFVSRAPNRKMSGQGHMETVKSAKRLDEGVSVLRVPLTQLKLKDLEKMVNREREPKLYEALKARLEAHKDDPAKAFAEPFYKYDKAGNRTQQVKAVRVEQVQKTGVWVRNHNGIADNATMVRVDVFEKGDKYYLVPIYSWQVAKGILPDRAVVQGKDEEDWQLIDDSFNFKFSLHPNDLVEVITKKARMFGYFASCHRGTGNINIRIHDLDHKIGKNGILEGIGVKTALSFQKYQIDELGKEIRPCRLKKRPPVR

SEQ ID NO: 346 - protein, 1082 aa, Neisseria meningitidis
  REGION 1..1082: note = Neisseria meningitidis 2007056
MAAFKPNPINYILGLDIGIASVGWAMVEIDEDENPICLIDLGVRVFERAEVPKTGDSLAMARRLARSVRRLTRRRAHRLLRARRLLKREGVLQAADFDENGLIKSLPNTPWQLRAAALDRKLTPLEWSAVLLHLIKHRGYLSQRKNEGETADKELGALLKGVADNAHALQTGDFRTPAELALNKFEKESGHIRNQRGDYSHTFSRKDLQAELILLFEKQKEFGNPHVSGGLKEGIETLLMTQRPALSGDAVQKMLGHCTFEPAEPKAAKNTYTAERFIWLTKLNNLRILEQGSERPLTDTERATLMDEPYRKSKLTYAQARKLLGLEDTAFFKGLRYGKDNAEASTLMEMKAYHAISRALEKEGLKDKKSPLNLSPELQDEIGTAFSLFKTDEDITGRLKDRIQPEILEALLKHISFDKFVQISLKALRRIVPLMEQGKRYDEACAEIYGDHYGKKNTEEKIYLPPIPADEIRNPVVLRALSQARKVINGVVRRYGSPARIHIETAREVGKSFKDRKEIEKRQEENRKDREKAAAKFREYFPNFVGEPKSKDILKLRLYEQQHGKCLYSGKEINLGRLNEKGYVEIDHALPFSRTWDDSFNNKVLVLGSENQNKGNQTPYEYFNGKDNSREWQEFKARVETSRFPRSKKQRILLQKFDEDGFKERNLNDTRYVNRFLCQFVADRMRLTGKGKKRVFASNGQITNLLRGFWGLRKVRAENDRHHALDAVVVACSTVAMQQKITRFVRYKEMNAFDGKTIDKETGEVLHQKTHFPQPWEFFAQEVMIRVFGKPDGKPEFEEADTPEKLRTLLAEKLSSRPEAVHEYVTPLFVSRAPNRKMSGQGHMETVKSAKRLDEGVSVLRVPLTQLKLKDLEKMVNREREPKLYEALKARLEAHKDDPAKAFAEPFYKYDKAGNRTQQVKAVRVEQVQKTGVWVRNHNGIADNATMVRVDVFEKGDKYYLVPIYSWQVAKGILPDRAVVQGKDEEDWQLIDDSFNFKFSLHPNDLVEVITKKARMFGYFASCHRGTGNINIRIHDLDHKIGKNGILEGIGVKTALSFQKYQIDELGEEIRPCRLKKRPPVR

SEQ ID NO: 347 - protein, 1082 aa, Neisseria meningitidis
  REGION 1..1082: note = Neisseria meningitidis 63049
MAAFKPNPINYILGLDIGIASVGWAMVEIDEEENPIRLIDLSVRVFERAEVPKTGDSLAMARRLARSVRRLTRRRAHRLLRARRLLKREGVLQAADFDENGLIKSLPNTPWQLRAAALDRKLTPLEWSAVLLHLIKHRGYLSQRKNEGETADKELGALLKGVADNAHALQTGDFRTPAELALNKFEKESGHIRNQRGDYSHTFSRKDLQAELILLFEKQKEFGNPHVSGGLKEGIETLLMTQRPALSGDAVQKMLGHCTFEPAEPKAAKNTYTAERFVWLTKLNNLRILEQGSERPLTDTERATLMDEPYRKSKLTYAQARKLLGLEDTAFFKGLRYGKDNAEASTLMEMKAYHAISRALEKEGLKDKKSPLRLSPELQDEIGTAFSLFKTDEDITGRLKDRVQPEILEALLKHISFDKFVQISLKALRRIVPLMEQGKRYDEACAEIYGDHYGKKNAEEKIYLPPIPADEIRNPVVLRALSQARKVINGVVRRYGSPARIHIETAREVGKSFKDRKEIEKRQEENRKDREKAAAKFREYFPNFVGEPKSKDILKLRLYEQQHGKCLYSGKEINLGRLNEKGYVEIDHALPFSRTWDDSFNNKVLVLGSENQNKGNQTPYEYFNGKDNSREWQEFKARVETSRFPRSKKQRILLQKFDEDGFKERNLNDTRYVNRFLCQFVADRMRLTGKGKKRVFASNGQITNLLRGFWGLRKVRAENDRHHALDAVVVACSTVAMQQKITRFVRYKEMNAFDGKTIDKETGEVLHQKTHFPQPWEFFAQEVMIRVFGKPDGKPEFEEADTPEKLRTLLAEKLSSRPEAVHEYVTPLFVSRAPNRKMSGQGHMETVKSAKRLDEGVSVLRVPLTQLKLKDLEKMVNREREPKLYEALKARLEAHKDDPAKAFAEPFYKYDKAGNRTQQVKAVRVEQVQKTGVWVRNHNGIADNATMVRVDVFEKGDKYYLVPIYSWQVAKGILPDRAVVQGKDEEDWQLIDDSFNFKFSLHPNDLVEVITKKARMFGYFASCHRGTGNINIRIHDLDHKIGKNGILEGIGVKTALSFQKYQIDELGKEIRPCRLKKRPPVR

SEQ ID NO: 348 - protein, 1082 aa, Neisseria meningitidis
MAAFKPNSINYILGLDIGIASVGWAMVEIDEEENPIRLIDLGVRVFERAEVPKTGDSLAMARRLARSVRRLTRRRAHRLLRTRRLLKREGVLQAANFDENGLIKSLPNTPWQLRAAALDRKLTPLEWSAVLLHLIKHRGYLSQRKNEGETADKELGALLKGVAGNAHALQTGDFRTPAELALNKFEKESGHIRNQRSDYSHTFSRKDLQAELILLFEKQKEFGNPHVSGGLKEGIETLLMTQRPALSGDAVQKMLGHCTFEPAEPKAAKNTYTAERFIWLTKLNNLRILEQGSERPLTDTERATLMDEPYRKSKLTYAQARKLLGLEDTAFFKGLRYGKDNAEASTLMEMKAYHAISRALEKEGLKDKKSPLNLSPELQDEIGTAFSLFKTDEDITGRLKDRIQPEILEALLKHISFDKFVQISLKALRRIVPLMEQGKRYDEACAEIYGDHYGKKNTEEKIYLPPIPADEIRNPVVLRALSQARKVINGVVRRYGSPARIHIETAREVGKSFKDRKEIEKRQEENRKDREKAAAKFREYFPNFVGEPKSKDILKLRLYEQQHGKCLYSGKEINLGRLNEKGYVEIDHALPFSRTWDDSFNNKVLVLGSENQNKGNQTPYEYFNGKDNSREWQEFKARVETSRFPRSKKQRILLQKFDEDGFKERNLNDTRYVNRFLCQFVADRMRLTGKGKKRVFASNGQITNLLRGFWGLRKVRAENDRHHALDAVVVACSTVAMQQKITRFVRYKEMNAFDGKTIDKETGEVLHQKTHFPQPWEFFAQEVMIRVFGKPDGKPEFEEADTLEKLRTLLAEKLSSRPEAVHEYVTPLFVSRAPNRKMSGQGHMETVKSAKRLDEGVSVLRVPLTQLKLKDLEKMVNREREPKLYEALKARLEAHKDDPAKAFAEPFYKYDKAGNRTQQVKAVRVEQVQKTGVWVRNHNGIADNATMVRVDVFEKGDKYYLVPIYSWQVAKGILPDRAVVQGKDEEDWQLIDDSFNFKFSLHPNDLVEVITKKARMFGYFASCHRGTGNINIRIHDLDHKIGKNGILEGIGVKTALSFQKYQIDELGKEIRPCRLKKRPPVR

SEQ ID NO: 349 - protein, 1082 aa, Neisseria meningitidis
  REGION 1..1082: note = Neisseria meningitidis 92045
MAAFKPNPINYILGLDIGIASVGWAMVEIDEEENPIRLIDLGVRVFERAEVPKTGDSLAMARRLARSVRRLTRRRAHRLLRARRLLKREGVLQAADFDENGLIKSLPNTPWQLRAAALDRKLTPLEWSAVLLHLIKHRGYLSQRKNEGETADKELGALLKGVADNAHALQTGDFRTPAELALNKFEKECGHIRNQRGDYSHTFSRKDLQAELNLLFEKQKEFGNPHVSGGLKEGIETLLMTQRPALSGDAVQKMLGHCTFEPAEPKAAKNTYTAERFIWLTKLNNLRILEQGSERPLTDTERATLMDEPYRKSKLTYAQARKLLGLEDTAFFKGLRYGKDNAEASTLMEMKAYHAISRALEKEGLKDKKSPLNLSPELQDEIGTAFSLFKTDEDITGRLKDRIQPEILEALLKHISFDKFVQISLKALRRIVPLMEQGKRYDEACAEIYGDHYGKKNTEEKIYLPPIPADEIRNPVVLRALSQARKVINGVVRRYGSPARIHIETAREVGKSFKDRKEIEKRQEENRKDREKAAAKFREYFPNFVGEPKSKDILKLRLYEQQHGKCLYSGKEINLVRLNEKGYVEIDHALPFSRTWDDSFNNKVLVLGSENQNKGNQTPYEYFNGKDNSREWQEFKARVETSRFPRSKKQRILLQKFDEEGFKERNLNDTRYVNRFLCQFVADHILLTGKGKRRVFASNGQITNLLRGFWGLRKVRAENDRHHALDAVVVACSTVAMQQKITRFVRYKEMNAFDGKTIDKETGEVLHQKTHFPQPWEFFAQEVMIRVFGKPDGKPEFEEADTPEKLRTLLAEKLSSRPEAVHEYVTPLFVSRAPNRKMSGQGHMETVKSAKRLDEGVSVLRVPLTQLKLKDLEKMVNREREPKLYEALKARLEAHKDDPAKAFAEPFYKYDKAGNRTQQVKAVRVEQVQKTGVWVRNHNGIADNATMVRVDVFEKGGKYYLVPIYSWQVAKGILPDRAVVQGKDEEDWQLIDDSFNFKFSLHPNDLVEVITKKARMFGYFASCHRGTGNINIRIHDLDHKIGKNGILEGIGVKTALSFQKYQIDELGKEIRPCRLKKRPPVR

SEQ ID NO: 350 - protein, 1081 aa, Neisseria meningitidis
  REGION 1..1081: note = Neisseria meningitidis 93003
MAAFKPNPINYILGLDIGIASVGWAMVEIDEEENPIRLIDLGVRVFERAEVPKTGDSLAMARRLARSVRRLTRRRAHRLLRARRLLKREGVLQAADFDENGLIKSLPNTPWQLRAAALDRKLTPLEWSAVLLHLIKHRGYLSQRKNEGETADKELGALLKGVADNAHALQTGDFRTPAELALNKFEKESGHIRNQRGDYSHTFSRKDLQAELILLFEKQKEFGNPHVSGGLKEGIETLLMTQRPALSGDAVQKMLGHCTFEPAEPKAAKNTYTAERFIWLTKLNNLRILEQGSERPLTDTERATLMDEPYRKSKLTYAQARKLLGLEDTAFFKGLRYGKDNAEASTLMEMKAYHAISRALEKEGLKDKKSPLNLSPELQDEIGTAFSLFKTDEDITGRLKDRVQPEILEALLKHISFDKFVQISLKALRRIVPLMEQGKRYDEACAEIYGDHYGKKNTEEEIYLPPITADEIRNPVVLRALSQARKVINAVVRRYGSPARIHIETAREVGKSFKDRKEIEKRQEENRKDREKAAAKFREYFPNFVGEPKSKDILKLRLYEQQHGKCLYSGKEINLVRLNEKGYVEIDHALPFSRTWDDSFNNKVLVLGSENQNKGNQTPYEYFNGKENSREWQEFKARVETSRFPRSKKQRILLQKFDEDGFKERNLNDTRYVNRFLCQFVADRMRLTGKGKKRVFASNGQITNLLRGFWGLHKVRAENDRHHALDAVVVACSTIAMQQKITRFVRYKEMNAFDGKTIDKETGEVLHQKAHFPQPWEFFAQEVMIRVFGKPDGKPEFEEADTPEKLRTLLAEKLSSRPEAVHEYVTPLFVSRAPNRKMSGQGHMETVKSAKRLDEGISVLRVPLTQLKLKDLEKMVNRAREPKLYEALKARLEAHKDDPAKAFAEPFYKYDKAGNRTQQVKAVRVEQVQKTGVWVRNHNGIADNATMVRVDVFEKAGKYYLVPIYSWQVAKGILPDRAVVAYADEEDWTVIDESFRFKFVLYSNDLIKVQLKKDSFLGYFSGLDRATGAISLREHDLEKSKGKDGMHRIGVKTALSFQKYQIDEMGKEIRPCRLKKRPPVR

SEQ ID NO: 351 - protein, 1081 aa, Neisseria meningitidis
  REGION 1..1081: note = Neisseria meningitidis 93004
MAAFKPNPINYILGLDIGIASVGWAMVEIDEDENPICLIDLGVRVFERAEVPKTGDSLAMARRLARSVRRLTRRRAHRLLRARRLLKREGVLQAADFDENGLIKSLPNTPWQLRAAALDRKLTPLEWSAVLLHLIKHRGYLSQRKNEGETADKELGALLKGVADNAHALQTGDFRTPAKLALNKFEKESGHIRNQRGDYSHTFSRKDLQAELNLLFEKQKEFGNPHISDGLKEGIETLLMTQRPALSGDAVQKMLGHCTFEPTEPKAAKNTYTAERFVWLTKLNNLRILEQGSEQPLTDTQRAKLMDEPYRKSKLTYAQARKLLGLEDTAFFKGLRYGKDNAEASTLMEMKAYHAISRALEKEGLKDKKSPLNLSPELQDEIGTAFSLFKTDEDITGRLKDRVQPEILEALLKHISFDKFVQISLKALRRIVPLMEQGKRYNEACAEIYGDHYGKKNTEEKIYLPPIPADEIRNPVVLRALSQARKVINGVVRRYGSPARIHIETAREVGKSFKDRKEIEKRQEENRKDREKAAAKFQEYFPNFVGEPKSKDILKLRLYEQQHGKCLYSGKEINLGRLNEKGYVEIDHALPFSRTWDDSFNNKVLVLGSENQNKGNQTPYEYFNGKDNSREWQEFKARVETSRFPRSKKQRILLQKFDEDGFKERNLNDTRYVNRFLCQFVADRMRLTGKGKKRVFASNGQITNLLRGFWGLRKVRAENDRHHALDAVVVACSTVAMQQKITRFVRYKEMNAFDGKTIDKETGEVLHQKTHFPQPWEFFAQEVMIRVFGKPDGKPEFEEADTPEKLRTLLAEKLSSRPEAVHEYVTPLFVSRAPNRKMSGQGHMETVKSAKRLDEGVSVLRVPLTQLKLKDLEKMVNREREPKLYEALKARLEAHKDDPAKAFAEPFYKYDKAGNRTQQVKAVRVEQVQKTGVWVRNHNGIADNATMVRVDVFEKGDKYYLVPIYSWQVAKGILPDRAVVAYADEEDWTVIDESFRFKFVLYSNDLIKVQLKKDSFLGYFSGLDRATGAISLREHDLEKSKGKDGMHRIGVKTALSFQKYQIDEMGKEIRPCRLKKRPPVR

SEQ ID NO: 352 - protein, 1082 aa, Neisseria meningitidis
  REGION 1..1082: note = Neisseria meningitidis 96023
MAAFKPNPINYILGLDIGIASVGWAMVEIDEDENPICLIDLGVRVFERAEVPKTGDSLAMARRLARSVRRLTRRRAHRLLRARRLLKREGVLQAADFDENGLIKSLPNTPWQLRAAALDRKLTPLEWSAVLLHLIKHRGYLSQRKNEGETADKELGALLKGVADNAHALQTGDFRTPAELALNKFEKESGHIRNQRGDYSHTFSRKDLQAELILLFEKQKEFGNPHVSGGLKEGIETLLMTQRPALSSDAVQKMLGHCTFEPAEPKAAKNTYTAERFIWLTKLNNLRILEQGSERPLTDTERATLMDEPYRKSKLTYAQARKLLGLEDTAFFKGLRYGKDNAEASTLMEMKAYHAISRALEKEGLKDKKSPLNLSPELQDEIGTAFSLFKTDEDITGRLKDRIQPEILEALLKHISFDKFVQISLKALRRIVPLMEQGKRYDEACAEIYGDHYGKKNTEEKIYLPPIPADEIRNPVVLRALSQARKVINGVVRRYGSPARIHIETAREVGKSFKDRKEIEKRQEENRKDREKAAAKFREYFPNFVGEPKSKDILKLRLYEQQHGKCLYSGKEINLGRLNEKGYVEIDHALPFSRTWDDSFNNKVLVLGSENQNKGNQTPYEYFNGKDNSREWQEFKARVETSRFPRSKKQRILLQKFDEDGFKERNLNDTRYVNRFLYQFVADRMRLTGKGKKRVFASNGQITNLLRGFWGLRKVRAENDRHHALDAVVVACSTVAMQQKITRFVRYKEMNAFDGKTIDKETGEVLHQKTHFPQPWEFFAQEVMIRVFGKPDGKPEFEEADTPEKLRTLLAEKLSSRPEAVHEYVTPLFVSRAPNRKMSGQGHMETVKSAKRLDEGVSVLRVPLTQLKLKDLEKMVNREREPKLYEALKARLEAHKDDPAKAFAEPFYKYDKAGNRTQQVKAVRVEQVQKTGVWVRNHNGIADNATMVRVDVFEKGDKYYLVPIYSWQVAKGILPDRAVVQGKDEEDWQLIDDSFNFKFSLHPNDLVEVITKKARMFGYFASCHRGTGNINIRIHDLDHKIGKNGILEGIGVKTALSFQKYQIDELGKEIRPCRLKKRPPVR

SEQ ID NO: 353 - protein, 1081 aa, Neisseria meningitidis
  REGION 1..1081: note = Neisseria meningitidis 98008
MAAFKPNPINYILGLDIGIASVGWAMVEIDEDENPICLIDLGVRVFERAEVPKTGDSLAAARRLARSVRRLTRRRAHRLLRARRLLKREGVLQAADFDENGLIKSLPNTPWQLRSAALDRKLTPLEWSAVLLHLIKHRGYLSQRKNEGETADKELGALLKGVANNAHALQTGDFRTPAELALNKFEKESGHIRNQRGDYSHTFSRKDLQAELILLFEKQKEFGNPHVSGGLKEGIETLLMTQRPALSGDAVQKMLGHCTFEPAEPKAAKNTYTAERFIWLTKLNNLRILEQGSERPLTDTERATLMDEPYRKSKLTYAQARKLLGLEDTAFFKGLRYGKDNAEASTLMEMKAYHAISRALEKEGLKDKKSPLNLSPELQDEIGTAFSLFKTDEDITGRLKDRIQPEILEALLKHISFDKFVQISLKALRRIVPLMEQGKRYDEACAEIYGDHYGKKNTEEKIYLPPIPADEIRNPVVLRALSQARKVINGVVRRYGSPARIHIETAREVGKSFKDRKEIEKRQEENRKDREKAAAKFREYFPNFVGEPKSKDILKLRLYEQQHGKCLYSGKEINLGRLNEKGYVEIDHALPFSRTWDDSFNNKVLVLGSENQNKGNQTPYEYFNGKDNSREWQEFKARVETSRFPRSKKQRILLQKFDEDGFKERNLNDTRYVNRFLCQFVADRMRLTGKGKKRVFASNGQITNLLRGFWGLRKVRAENDRHHALDAVVVACSTVAMQQKITRFVRYKEMNAFDGKTIDKETGEVLHQKTHFPQPWEFFAQEVMIRVFGKPDGKPEFEEADTPEKLRTLLAEKLSSRPEAVHEYVTPLFVSRAPNRKMSGQGHMETVKSAKRLDEGVSVLRVPLTQLKLKDLEKMVNREREPKLYEALKARLEAHKDDPAKAFAEPFYKYDKAGNRTQQVKAVRVEQVQKTGVWVRNHNGIADNATMVRVDVFEKAGKYYLVPIYSWQVAKGILPDRAVVAYADEEGWTVIDESFRFKFVLYSNDLIKVQLKKDSFLGYFSGLDRATGAISLREHDLEKSKGKDGMHRIGVKTALSFQKYQIDEMGKEIRLCRLKKRPPVR

SEQ ID NO: 354 - protein, 1082 aa, Neisseria meningitidis
MAAFKPNPINYILGLDIGIASVGWAMVEIDEEENPIRLIDLGVRVFERAEVPKTGDSLAMVRRLARSVRRLTRRRAHRLLRARRLLKREGVLQAADFDENGLIKSLPNTPWQLRAAALDRKLTPLEWSAVLLHLIKHRGYLSQRKNEGETADKELGALLKGVADNAHALQTGDFRTPAELALNKFEKESGHIRNQRGDYSHTFSRKDLQAELILLFEKQKEFGNPHISGGLKEGIETLLMTQRPALSGDAVQKMLGHCTFEPAEPKAAKNTYTAERFIWLTKLNNLRILEQGSERPLTDTERATLMDEPYRKSKLTYAQARKLLGLEDTAFFKGLRYGKDNAEASTLMEMKAYHAISRALEKEGLKDKKSPLNLSPELQDEIGTAFSLFKTDEDITGRLKDRIQPEILEALLKHISFDKFVQISLKALRRIVPLMEQGKRYDEACAEIYGDHYGKKNTEEKIYLPPIPADEIRNPVVLRALSQARKVINGVVRRYGSPARIHIETAREVGKSFKDRKEIEKRQEENRKDREKAAAKFREYFPNFVGEPKSKDILKLRLYEQQHGKCLYSGKEINLGRLNEKGYVEIDHALPFSRTWDDSFNNKVLVLGSENQNKGNQTPYEYFNGKDNSREWQEFKARVETSRFPRSKKQRILLQKFDEDGFKERNLNDTRYVNRFLCQFVADRMRLTGKGKKRVFASNGQITNLLRGFWGLRKVRAENDRHHALDAVVVACSTVAMQQKITRFVRYKEMNAFDGKTIDKETGEVLHQKTHFPQPWEFFAQEVMIRVFGKPDGKPEFEEADTPEKLRTLLAEKLSSRPEAVHEYVTPLFVSRAPNRKMSGQGHMETVKSAKRLDEGVSVLRVPLTQLKLKDLEKMVNREREPKLYEALKARLEAHKDDPAKAFAEPFYKYDKAGNRTQQVKAVRVEQVQKTGVWVRNHNGIADNATMVRVDVFEKGDKYYLVPIYSWQVAKGILPDRAVVQGKDEEDWQLIDDSFNFKFSLHPNDLVEVITKKARMFGYFASCHRGTGNINIRIHDLDHKIGKNGILEGIGVKTALSFQKYQIDELGKEIRPCRLKKRPPVR

SEQ ID NO: 355 - protein, 1082 aa, Neisseria meningitidis
  REGION 1..1082: note = Neisseria meningitidis alpha275
MAAFKPNPINYILGLDIGIASVGWAMVEIDEDENPICLIDLGVRVFERAEVPKTGDSLAAARRLARSVRRLTRRRAHRLLRARRLLKREGVLQAADFDENGLIKSLPNTPWQLRAAALDRKLTPLEWSAVLLHLIKHRGYLSQRKNEGETADKELGALLKGVADNAHALQTGDFRTPAELALNKFEKESGHIRNQRGDYSHTFSRKDLQAELILLFEKQKEFGNPHVSGGLKEGIETLLMTQRPALSGDAVQKMLGHCTFEPAEPKAAKNTYTAERFIWLTKLNNLRILEQGSERPLTDTERATLMDEPYRKSKLTYAQARKLLGLEDTAFFKGLRYGKDNAEASTLMEMKAYHAISRALEKEGLKDKKSPLNLSPELQDEIGTAFSLFKTDEDITGRLKDRVQPEILEALLKHISFDKFVQISLKALRRIVPLMEQGKRYDEACAEIYGDHYGKKNTEEKIYLPPIPADEIRNPVVLRALSQARKVINGVVRRYGSPARIHIETAREVGKSFKDRKEIEKRQEENRKDREKAAAKFREYFPNFVGEPKSKDILKLRLYEQQHGKCLYSGKEINLGRLNEKGYVEIDHALPFSRTWDDSFNNKVLVLGSENQNKGNQTPYEYFNGKDNSREWQEFKARVETSRFPRSKKQRILLQKFDEDGFKERNLNDTRYVNRFLCQFVADRMRLTGKGKKRVFASNGQITNLLRGFWGLRKVRAENDRHHALDAVVVACSTVAMQQKITRFVRYKEMNAFDGKTIDKETGEVLHQKTHFPQPWEFFAQEVMIRVFGKPDGKPEFEEADTPEKLRTLLAEKLSSRPEAVHEYVTPLFVSRAPNRKMSGQGHMETVKSAKRLDEGVSVLRVPLTQLKLKDLEKMVNREREPKLYEALKARLEAHKDDPAKAFAEPFYKYDKAGNRTQQVKAVRVEQVQKTGVWVRNHNGIADNATMVRVDVFEKGDKYYLVPIYSWQVAKGILPDRAVVQGKDEEDWQLIDDSFNFKFSLHPNDLVEVITKKARMFGYFASCHRGTGNINIRIHDLDHKIGKNGILEGIGVKTALSFQKYQIDELGKEIRPCRLKKRPPVR

SEQ ID NO: 356 - protein, 1082 aa, Neisseria meningitidis
  REGION 1..1082: note = Neisseria meningitidis ATCC 13091
MAAFKPNPINYILGLDIGIASVGWAMVEIDEEENPIRLIDLGVRVFERAEVPKTGDSLAMARRLARSVRRLTRRRAHRLLRTRRLLKREGVLQAANFDENGLIKSLPNTLWQLRAAALDRKLTPLEWSAVLLHLIKHRGYLSQRKNEGETADKELGALLKGVAGNAHALQTGDFRTPAELALNKFEKESGHIRNQRGDYSHTFSRKDLQAELNLLFEKQKEFGNPHISDGLKEGIETLLMTQRPALSGDAVQKMLGHCTFEPTEPKAAKNTYTTERFIWLTKLNNLRILEQGSERPLTDTERATLMDEPYRKSKLTYAQARKLLELDDIAFFKGLRYGKDNAEASTLMEMKAYHAISRALEKEGLKDKKSPLNLSPELQDEIGTAFSLFKTDEDITGRLKDRIQPEILEALLKHINFDKFVQISLKALRRIVPLMEQGKRYDEACAEIYGDHYGKKNTEEKIDLPPIPADEIHNPVVLRALSQARKVINGVVRRYGSPARIHIETAREVGKSFKDRKEIEKRQEENRKDREKAAAKFREYFPNFVGEPKSKDILKLRLYEQQHGKCLYSGKEINLGRLNEKGYVEIDHALPFSRTWDDSFNNKVLVLGSENQNKGNQTPYEYFNGKDNSREWQEFKARVETSRFPRSKKQRILLQKFDEDGFKERNLNDTRYVNRFLCQFVADRMRLTGKGKKRVFASNGQITNLLRGFWGLRKVRAENDRHHALDAVVVACSTVAMQQKITRFVRYKEMNAFDGKTIDKETGEVLHQKTHFPQPWEFFAQEVMIRVFGKPDGKPEFEEADTPEKLRTLLTEKLSSRPEAVHEYVTPLFVSRAPNRKMSGQGHMETVKSAKRLDEGISVLRVPLTQLKLKDLEKMVNREREPKLYEALKARLEAHKDDPAKAFAEPFYKYDKAGNRTQQVKAMRVEQVQKTGVWVRNHNGIADNATMVRVDVFEKGDKYYLVPIYSWQVAKGILPDRAVVQGKDEEDWQLIDDSFNFKFSLHPNDLVEVITKKARMFGYFASCHRGTGNINIRIHDLDHKIGKNGILEGIGVKTALSFQKYQIDELGKEIRPCRLKKRPPVR

SEQ ID NO: 357 - protein, 1081 aa, Neisseria meningitidis
  REGION 1..1081: note = Neisseria meningitidis N1568
MAAFKPNPINYILGLDIGIASVGWAMVEIDEEENPIRLIDLGVRVFERAEVPKTGDSLAMARRLARSVRRLTRRRAHRLLRARRLLKREGVLQAADFDENGLIKSLPNTPWQLRAAALDRKLTPLEWSAVLLHLIKHRGYLSQRKNEGETADKELGALLKGVADNAHALQTGDFRTPAELALNKFEKECGHIRNQRGDYSHTFSRKDLQAELNLLFEKQKEFGNPHVSGGLKEGIETLLMTQRPALSGDAVQKMLGHCTFEPAEPKAAKNTYTAERFIWLTKLNNLRILEQGSERPLTDTERATLMDEPYRKSKLTYAQARKLLSLEDTAFFKGLRYGKDNAEASTLMEMKAYHTISRALEKEGLKDKKSPLNLSPELQDEIGTAFSLFKTDEDITGRLKDRIQPEILEALLKHISFDKFVQISLKALRRIVPLMEQGKRYDEACAEIYGDHYGKKNTEEKIYLPPIPADEIRNPVVLRALSQARKVINGVVRRYGSPARIHIETAREVGKSFKDRKEIEKRQEENRKDREKAAAKFREYFPNFVGEPKSKDILKLRLYEQQHGKCLYSGKEINLGRLNEKGYVEIDHALPFSRTWDDSFNNKVLVLGSENQNKGNQTPYEYFNGKDNSREWQEFKARVETSRFPRSKKQRILLQKFDEDGFKERNLNDTRYVNRFLCQFVADRMRLTGKGKKRVFASNGQITNLLRGFWGLRKVRAENDRHHALDAVVVACSTVAMQQKITRFVRYKEMNAFDGKTIDKETGEVLHQKTHFPQPWEFFAQEVMIRVFGKPDGKPEFEEADTPEKLRTLLAEKLSSRPEAVHEYVTPLFVSRAPNRKMSGQGHMETVKSAKRLDEGVSVLRVPLTQLKLKDLEKMVNREREPKLYEALKARLEAHKDDPAKAFAEPFYKYDKAGNRTQQVKAVRVEQVQKTGVWVRNHNGIADNATMVRVDVFEKGDKYYLVPIYSWQVAKGILPDRAVVAYADEEDWTVIDESFRFKFVLYSNDLIKVQLKKDSFLGYFSGLDRATGAISLREHDLEKSKGKDGMHRIGVKTALSFQKYQIDEMGKEIRPCRLKKRPPVR

SEQ ID NO: 358 - protein, 1081 aa, Neisseria meningitidis
  REGION 1..1081: note = Neisseria meningitidis NM140
MAAFKPNPINYILGLDIGIASVGWAMVEIDEDENPICLIDLGVRVFERAEVPKTGDSLAAARRLARSVRRLTRRRAHRLLRARRLLKREGVLQAADFDENGLIKSLPNTPWQLRSAALDRKLTPLEWSAVLLHLIKHRGYLSQRKNEGETADKELGALLKGVADNAHALQTGDFRTPAELALNKFEKESGHIRNRRGDYSHTFSRKDLQAELDLLFEKQKEFGNPHISDDLKEGIETLLMTQRPALSGDAVQKMLGHCTFEPTEPKAAKNTYTAERFVWLTKLNNLRILEQGSERPLTDTERATLMDEPYRKSKLTYAQARKLLELDDTAFFKGLRYGKDNAEASTLMEMKAYHAISRALEKEGLKDKKSPLNLSPELQDEIGTAFSLFKTDEDITGRLKDRVQPEILEVLLKHISFDKFVQISLKALRRIVPLMEQGKRYDEACAEIYGDHDGKKNTEEKIYLPPIPADEIRNPVVLRALSQARKVINAVVRRYGSPARIHIETAREVGKSFKDRKEIEKRQEENRKDREKAAAKFREYFPNFVGEPKSKDILKLRLYEQQHGKCLYSGKEINLGRLNEKGYVEIDHALPFSRTWDDSFNNKVLVLGSENQNKGNQTPYEYFNGKDNSREWQEFKARVETSRFPRSKKQRILLQKFDEEGFKERNLNDTRYVNRFLCQFVADHMLLTGKGKRRVFASNGQITNLLRGFWGLRKVRAENNRHHALDAVVVACSTVAMQQKITRFVRYKEMNAFDGKTIDKETGEVLHQKTHFPQPWEFFAQEVMIRVFGKPDGKPEFEEADTPEKLRTLLAEKLSSRPEAVHEYVTPLFVSRAPNRKMSGQGHMETVKSAKRLDEGVSVLRVPLTQLKLKDLEKMVNREREPKLYEALKARLEAHKDDPAKAFAEPFYKYDKAGNRTQQVKAVRVEQVQKTGVWVRNHNGIADNATMVRVDVFEKAGKYYLVPIYSWQVAKGILPDRAVVAYADEEGWTVIDESFRFKFVLYSNDLIKVQLKKDSFLGYFSGLDRATGAISLREHDLEKSKGKDGMHRIGVKTALSFQKYQIDEMGKEIRLCRLKKRPPVR

SEQ ID NO: 359 - protein, 1082 aa, Neisseria meningitidis
  REGION 1..1082: note = Neisseria meningitidis NM220
MAAFKPNPINYILGLDIGIASVGWAMVEIDEEENPIRLIDLGVRVFERAEVPKTGDSLAMARRLARSVRRLTRRRAHRLLRARRLLKREGVLQAADFDENGLIKSLPNTPWQLRAAALDRKLTPLEWSAVLLHLIKHRGYLSQRKNEGETADKELGALLKGVANNAHALQTGDFRTPAELALNKFEKESGHIRNQRGDYSHTFSRKDLQAELILLFEKQKEFGNPHVSGGLKEGIETLLMTQRPALSGDAVQKMLGHCTFEPAEPKAAKNTYTAERFIWLTKLNNLRILEQGSERPLTDTERATLMDEPYRKSKLTYAQARKLLGLEDTAFFKGLRYGKDNAEASTLMEMKAYHAISRALEKEGLKDKKSPLNLSSELQDEIGTAFSLFKTDEDITGRLKDRVQPEILEALLKHISFDKFVQISLKALRRIVPLMEQGKRYDEACAEIYGDHYGKKNTEEKIYLPPIPADEIRNPVVLRALSQARKVINGVVRRYGSPARIHIETAREVGKSFKDRKEIEKRQEENRKDREKAAAKFREYFPNFVGEPKSKDILKLRLYEQQHGKCLYSGKEINLVRLNEKGYVEIDHALPFSRTWDDSFNNKVLVLGSENQNKGNQTPYEYFNGKDNSREWQEFKARVETSRFPRSKKQRILLQKFDEDGFKECNLNDTRYVNRFLCQFVADHILLTGKGKRRVFASNGQITNLLRGFWGLRKVRAENDRHHALDAVVVACSTVAMQQKITRFVRYKEMNAFDGKTIDKETGKVLHQKTHFPQPWEFFAQEVMIRVFGKPDGKPEFEEADTPEKLRTLLAEKLSSRPEAVHEYVTPLFVSRAPNRKMSGAHKDTLRSAKRFVKHNEKISVKRVWLTEIKLADLENMVNYKNGREIELYEALKARLEAYGGNAKQAFDPKDNPFYKKGGQLVKAVRVEKTQESGVLLNKKNAYTIADNGDMVRVDVFCKVDKKGKNQYFIVPIYAWQVAENILPDIDCKGYRIDDSYTFCFSLHKYDLIAFQKDEKSKVEFAYYINCDSSNGRFYLAWHDKGSKEQQFRISTQNLVLIQKYQVNELGKEIRPCRLKKRPPVR

SEQ ID NO: 360 - protein, 1082 aa, Neisseria meningitidis
  REGION 1..1082: note = Neisseria meningitidis NM233
MAAFKPNPINYILGLDIGIASVGWAMVEIDEEENPIRLIDLGVRVFERAEVPKTGDSLAMARRLARSVRRLTRRRAHRLLRARRLLKREGVLQAADFDENGLIKSLPNTPWQLRAAALDRKLTPLEWSAVLLHLIKHRGYLSQRKNEGETADKELGALLKGVANNAHALQTGDFRTPAELALNKFEKESGHIRNQRGDYSHTFSRKDLQAELILLFEKQKEFGNPHVSGGLKEGIETLLMTQRPALSGDAVQKMLGHCTFEPAEPKAAKNTYTAERFIWLTKLNNLRILEQGSERPLTDTERATLMDEPYRKSKLTYAQARKLLGLEDTAFFKGLRYGKDNAEASTLMEMKAYHAISRALEKEGLKDKKSPLNLSSELQDEIGTAFSLFKTDEDITGRLKDRVQPEILEALLKHISFDKFVQISLKALRRIVPLMEQGKRYDEACAEIYGDHYGKKNTEEKIYLPPIPADKIRNPVVLRALSQARKVINGVVRRYGSPARIHIETAREVGKSFKDRKEIEKRQEENRKDREKAAAKFREYFPNFVGEPKSKDILKLRLYEQQHGKCLYSGKEINLVRLNEKGYVEIDHALPFSRTWDDSFNNKVLVLGSENQNKGNQTPYEYFNGKDNSREWQEFKARVETSRFPRSKKQRILLQKFDEDGFKECNLNDTRYVNRFLCQFVADHILLTGKGKRRVFASNGQITNLLRGFWGLRKVRAENDRHHALDAVVVACSTVAMQQKITRFVRYKEMNAFDGKTIDKETGKVLHQKTHFPQPWEFFAQEVMIRVFGKPDGKPEFEEADTPEKLRTLLAEKLSSRPEAVHEYVTPLFVSRAPNRKMSGAHKDTLRSAKRFVKHNEKISVKRVWLTEIKLADLENMVNYKNGREIELYEALKARLEAYGGNAKQAFDPKDNPFYKKGGQLVKAVRVEKTQESGVLLNKKNAYTIADNGDMVRVDVFCKVDKKGKNQYFIVPIYAWQVAENILPDIDCKGYRIDDSYTFCFSLHKYDLIAFQKDEKSKVEFAYYINCDSSNGRFYLAWHDKGSKEQQFRISTQNLVLIQKYQVNELGKEIRPCRLKKRPPVR

SEQ ID NO: 361 - protein, 1082 aa, Neisseria meningitidis
MAAFKPNPINYILGLDIGIASVGWAMVEIDEDENPICLIDLGVRVFERAEVPKTGDSLAMARRLARSVRRLTRRRAHRLLRARRLLKREGVLQAADFDENGLIKSLPNTPWQLRAAALDRKLTPLEWSAVLLHLIKHRGYLSQRKNEGETADKELGALLKGVADNAHALQTGDFRTPAELALNKFEKESGHIRNQRGDYSHTFSRKDLQAELILLFEKQKEFGNPHVSGGLKEGIETLLMTQRPALSSDAVQKMLGHCTFEPAEPKAAKNTYTAERFIWLTKLNNLRILEQGSERPLTDTERATLMDEPYRKSKLTYAQARKLLGLEDTAFFKGLRYGKDNAEASTLMEMKAYHAISRALEKEGLKDKKSPLNLSPELQDEIGTAFSLFKTDEDITGRLKDRIQPEILEALLKHISFDKFVQISLKALRRIVPLMEQGKRYDEACAEIYGDHYGKKNTEEKIYLPPIPADEIRNPVVLRALSQARKVINGVVRRYGSPARIHIETAREVGKSFKDRKEIEKRQEENRKDREKAAAKFREYFPNFVGEPKSKDILKLRLYEQQHGKCLYSGKEINLGRLNEKGYVEIDHALPFSRTWDDSFNNKVLVLGSENQNKGNQTPYEYFNGKDNSREWQEFKARVETSRFPRSKKQRILLQKFDEDGFKERNLNDTRYVNRFLCQFVADRMRLTGKGKKRVFASNGQITNLLRGFWGLRKVRAENDRHHALDAVVVACSTVAMQQKITRFVRYKEMNAFDGKTIDKETGEVLHQKTHFPQPWEFFAQEVMIRVFGKPDGKPEFEEADTPEKLRTLLAEKLSSRPEAVHEYVTPLFVSRAPNRKMSGQGHMETVKSAKRLDEGVSVLRVPLTQLKLKDLEKMVNREREPKLYEALKARLEAHKDDPAKAFAEPFYKYDKAGNRTQQVKAVRVEQVQKTGVWVRNHNGIADNATMVRVDVFEKGDKYYLVPIYSWQVAKGILPDRAVVQGKDEEDWQLIDDSFNFKFSLHPNDLVEVITKKARMFGYFASCHRGTGNINIRIHDLDHKIGKNGILEGIGVKTALSFQKYQIDELGKEIRPCRLKKRPPVR

SEQ ID NO: 362 - protein, 1082 aa, Neisseria meningitidis
MAAFKPNPINYILGLDIGIASVGWAMVEIDEDENPICLIDLGVRVFERAEVPKTGDSLAMARRLARSVRRLTRRRAHRLLRARRLLKREGVLQAADFDENGLIKSLPNTPWQLRAAALDRKLTPLEWSAVLLHLIKHRGYLSQRKNEGETADKELGALLKGVADNAHALQTGDFRTPAELALNKFEKESGHIRNQRGDYSHTFSRKDLQAELILLFEKQKEFGNPHVSGGLKEGIETLLMTQRPALSGDAVQKMLGHCTFEPAEPKAAKNTYTAERFIWLTKLNNLRILEQGSERPLTDTERATLMDEPYRKSKLTYAQARKLLGLEDTAFFKGLRYGKDNAEASTLMEMKAYHAISRALEKEGLKDKKSPLNLSPELQDEIGTAFSLFKTDEDITGRLKDRIQPEILEALLKHISFDKFVQISLKALRRIVPLMEQGKRYDEACAEIYGDHYGKKNTEEKIYLPPIPADEIRNPVVLRALSQARKVINGVVRRYGSPARIHIETAREVGKSFKDRKEIEKRQEENRKDREKAAAKFREYFPNFVGEPKSKDILKLRLYEQQHGKCLYSGKEINLGRLNEKGYVEIDHALPFSRTWDDSFNNKVLVLGSENQNKGNQTPYEYFNGKDNSREWQEFKARVETSRFPRSKKQRILLQKFDEDGFKERNLNDTRYVNRFLCQFVADRMRLTGKGKKRVFASNGQITNLLRGFWGLRKVRAENDRHHALDAVVVACSTVAMQQKITRFVRYKEMNAFDGKTIDKETGEVLHQKTHFPQPWEFFAQEVMIRVFGKPDGKPEFEEADTPEKLRTLLAEKLSSRPEAVHEYVTPLFVSRAPNRKMSGQGHMETVKSAKRLDEGVSVLRVPLTQLKLKDLEKMVNREREPKLYEALKARLEAHKDDPAKAFAEPFYKYDKAGNRTQQVKAVRVEQVQKTGVWVRNHNGIADNATMVRVDVFEKGDKYYLVPIYSWQVAKGILPDRAVVQGKDEEDWQLIDDSFNFKFSLHPNDLVEVITKKARMFGYFASCHRGTGNINIRIHDLDHKIGKNGILEGIGVKTALSFQKYQIDELGKEIRPCRLKKRPPVR

SEQ ID NO: 363 - protein, 1089 aa, Neisseria sp.
  REGION 1..1089: note = Neisseria sp. oral taxon 014 str. F0314
MTAFKPNPLNYILGLDIGIASVGWAMVEIDDKENPVRLIDLGVRVFERAEMPKTGDSLAAARRLARSVRRLTRRRAHRLLRARRLLKHEGVLKPEDFDENGLVKPLPYIPKQPRNTPWQLRAAALDRKLTPLEWAAVLLHLVKHRGYLSQRKNEGETDDKELGALLKGVADNTHALQAGNFRTPAELALNKFEKESGHIRNQRGDYSHTFSRKDLQAELVLLFEKQKEFGNPYVSDDLKNGIENLLMTQRPALSGDAIQKMLGHCTFEPAEPKAAKNTYTAERFIWLTKLNNLRILNQGNERPLTDAERTTLMDEPYKKSKLTYAQARKLLDLDDTAFFKGLRYGKDNAESATLMEMKAYHAISRALEKEGLKDKKSPLSLSPELQDEIGTAFSLFKTDEEITGRLKGCLQPEILDALLKHISFDKFVQISLKALRRIVPLMEQGKRYDEACAEIYGDHHGRRNSEETLYLPPIPADEIRNPVVLRALSQARKVINGVGRRYGSPARIHIETAREVGKSFKDRKEIEKRQEENRKDREKAAAEFQEYFPNFVGEPKSKDILKLRLYRQQNCKCLYSGKEINLGRLNEKGYVEIDHALPFSRTWDDSFNNKVLVLGSENQNKGNRTPYEYLNGKDNSREWQEFKARVETSRFPHSKKQRILLQKFDEEGFKERNLNDTRYVNRFLCKFVADHMQLTGKGKRRVFASNGQITNLLRGFWGLRKVRAENDRHHALDAVVVACSTVAMQQRITRFVRYKEMNAFDGKTVDKETGEVLHQKTHFPQPWEFFAQEVMIRVFGKPDGKPELEEADTPEKLRALLAEKLSSRPEAVHEYVAPLFVSRAPNRKMSGQGHMETIKSPKRLDEGISVVRVPLTQLKLKDLEKMVNREREPKLYEALKARLEAHKDDPAKAFAEPFYKQDKAGNRTQQVKAVRIEQVQKTGVWVRNQNGIADNATMVRVDVFEKGGKYYLVPIYSWQVAKGILPDKAIIAFKDEEEWQLIDDSFNFKFPLHPNDLVEVITKKARIFGYFASCHRGTGNINIRIHDLDNKVGKNGILEGIGVKTALSFQKYQIDELGKEIRPCRLKKRPPVR

SEQ ID NO: 364 - protein, 1097 aa, Neisseria wadsworthii
  REGION 1..1097: note = Neisseria wadsworthii 9715
MKKQPQRYILGLDLGIASVGWALILVDGAENPVGLLDCGVRTFERAEVPKTGDSLALARRQARSVRRLIRRRAHRLLRLRRLLKREGILSAADFNSDGLPNLPIDAWQLRVAGLERKLTNQEWAAVLLHLVKHRGYLSQRKSETQTENKELGRLLAGVAENSKLLSESSEQYRTPAELAVKLFAEQSGHLRNKGGEYTHTFNRLDLQKELHLLFERQYALGNPFASAELQSKVDELLMTQRSALQGEAVLKMLGKCTFEPSEYKAAKNTYSAERFIWLTKLNNLRILYNGEERALDEGDRKKLLDEPYKKAKLTYKQVRSILNLPESAVFKGLRYGKDSDGLKAENGTLMEMKAYHKIRTILDKAGLKGEWENRIRNPEILDKIGTAFSLYKTDEDIQAALADLRLPENVLDALLAGLNFDKFIQLSLKALRNILPLMERGIRYDEACKEVYGDHRALAESKNQVLLPPIPADEIRNPVVLRTLTQARKVINAIIRRYGSPQRVHIETARELGKSKQERDKIDRKNKENQNDRNRLASDIRKHFNFEPTPKDILKLRLYEQQHGKCLYSDLREEKGECLYTGNVIELHRLFEDGYVEIDHALPLSRTWDNSLNNKVLVLKSSNQNKGNKTPYEWLDGANNSRRWREFQARVQGCHFPYVKKQRIQTAKLDSKAEQGFLERNLNDTRYISKFMCQFITANLRLAETSNALMEEVAGENPYWKERKRQRVFAPSGSIIALLRGLWGLKKVREDNDRHHALDAIVVACSTVSMQQKITKAMQRRETLETVDSETGEVKTRIPQPWDFFRQEVMIRVFSDSPREELAEKLNSRPEALHDFVSPLFVSRAPNRKMTGQGHLETVKSAKRLSENISVVRKPLTALKLKDIENIVGYPDREPALYQALRERLLAHKDDPVKAFADKPFYKPAKDGGQGSLVKAVRIIENTKHGLKIRNGITDTNGDMVRTDVYQKTDKKGKRQYFIVPVYAWQVEKNELPTVDCKGYEIDDNYEFCFSLYKYDLIEIQNPNDINQELRAYYINCDSSDGRFWLAYHDKSAKEQQFRISTQNQPIIKKYQVDTLGKEIRLCKAEKRTALNGKKKK

SEQ ID NO: 365 - protein, 1426 aa, Niabella soli
  REGION 1..1426: note = Niabella soli DSM 19437
MPRKNILGLDLGTTSIGFAKIIEDDDYQCSSVELIGVRVNPLTTDEQTNFEKGKPVSVNADRTLKRGMRRNLDRYQLRRDYLIEILRTHHIITADTKLAEDGKNTTHTTYALRALAATAEIPLEAFVRVLLAINKKRGYKSSRKAKNEDEGQLIDGMAIARRLYEESLTPGQFSYQLLKEGKKYLPDFYRSDLNTELNKVWNFQKQFYPEILTDEFKRHLEGKGQRATAVAFWGQHGFSMAENKGSREEKKLHAYKWRSEAAHKQLTKEEVAFVITEINNDLNKSSGYLGAISDRSKELFFNKQTVGQYLHQQLKENPHTRLKGQVFYRQDYLDEFETIWEMQAKFYSALTLELKEEVRDVVIFYQRKLKSQMGLISLCEFESKEIEIEKNGEKAKKRIGLRVAPKSSPLFQEFKIWQVLNNLEFRNKKTKEVFVPEMAAKQQLFDELNIKGNLLASEAIKILGYKTKDWEANYHTLEGNRTNKSLYDAWLKILELEGYDENLLKLSGSDDIDVSKIEKPALEIRQMVLAVFEVLGISGAILDFDAEADGKAFEQQPAYQLWHLLYSAEDDGKKYSQEDIFTYGHDNIGLKKKLCEKFGFRPEHTKILVNVVFSDDYGNLSSKAMRRIYPFIKELTYDKACAEAGYRHSAASLTKEEIAARPLQNRLDLLKKNELRSPVVEKILNQMVNVVNTLVDDENQNRKARGLSEDFHFDEIRIELARELKKNAKERAEMTTNINTAKQSHEKIIRILQTEFGVPNPSRNDIVRYKLYEELKNNGYKDLYTNTYISRDILFSKQIDVDHIIPQMSLFDDSFSNKTVVFRKDNQDKGNKTAYDYILGKYGEQALEEYISRITSLFELGKKNKEEGIGKAKFQKLQKRLVDIGDGFIERDLRESQYIAKKANNMLYAICRSVVSTSGEITARLREDWDLVNVMQEINLPKFRALGLTEMVEKKDGAQKERITDWTKRNDHRHHAMDALAIAFTRHSHIQYLNHLNARKDEANKWHPVVSKIEEKETVLIYDDLGNRKRKFKAPMPNFREVVKEHLENVLISHKAKNKVVTKNKNKIKTVRGEKVKTELTPRGQLHKETIYGRYRYYESKEEKIGPKFDAEMIGMVTNPQYKKLLLERLAANGNDPKKAFWGKNALNKNPLYVDEARQELLPEKILLRWLNDDYSIRKDVTPENLKDIKTIEKILDKGVKKILLKRLADFGNDPKKAFSDLDKNPIWQNEAKRIAIKRVTISGIKNAAPLHHKKDHLGNDILDEKGKQIPSSFVSTGNNHHVAIYRDAEGNLQERVVSLFDAVQLVNGGEPVIDKEYNKGIGWQFLFTMKQNEMFVFPDEKTGFNPREVDLLSSGNRKLISPNLFRVQKLASKNYFFRHHLETSVEEKKELKNIAYKPQLGLNALSNIVKVRINHIGEIVSVGEY

SEQ ID NO: 366 - protein, 1132 aa, Nitratifractor salsuginis
MKKILGVDLGITSFGYAILQETGKDLYRCLDNSVVMRNNPYDEKSGESSQSIRSTQKSMRRLIEKRKKRIRCVAQTMERYGILDYSETMKINDPKNNPIKNRWQLRAVDAWKRPLSPQELFAIFAHMAKHRGYKSIATEDLIYELELELGLNDPEKESEKKADERRQVYNALRHLEELRKKYGGETIAQTIHRAVEAGDLRSYRNHDDYEKMIRREDIEEEIEKVLLRQAELGALGLPEEQVSELIDELKACITDQEMPTIDESLFGKCTFYKDELAAPAYSYLYDLYRLYKKLADLNIDGYEVTQEDREKVIEWVEKKIAQGKNLKKITHKDLRKILGLAPEQKIFGVEDERIVKGKKEPRTFVPFFFLADIAKFKELFASIQKHPDALQIFRELAEILQRSKTPQEALDRLRALMAGKGIDTDDRELLELFKNKRSGTRELSHRYILEALPLFLEGYDEKEVQRILGFDDREDYSRYPKSLRHLHLREGNLFEKEENPINNHAVKSLASWALGLIADLSWRYGPFDEIILETTRDALPEKIRKEIDKAMREREKALDKIIGKYKKEFPSIDKRLARKIQLWERQKGLDLYSGKVINLSQLLDGSADIEHIVPQSLGGLSTDYNTIVTLKSVNAAKGNRLPGDWLAGNPDYRERIGMLSEKGLIDWKKRKNLLAQSLDEIYTENTHSKGIRATSYLEALVAQVLKRYYPFPDPELRKNGIGVRMIPGKVTSKTRSLLGIKSKSRETNFHHAEDALILSTLTRGWQNRLHRMLRDNYGKSEAELKELWKKYMPHIEGLTLADYIDEAFRRFMSKGEESLFYRDMFDTIRSISYWVDKKPLSASSHKETVYSSRHEVPTLRKNILEAFDSLNVIKDRHKLTTEEFMKRYDKEIRQKLWLHRIGNTNDESYRAVEERATQIAQILTRYQLMDAQNDKEIDEKFQQALKELITSPIEVTGKLLRKMRFVYDKLNAMQIDRGLVETDKNMLGIHISKGPNEKLIFRRMDVNNAHELQKERSGILCYLNEMLFIFNKKGLIHYGCLRSYLEKGQGSKYIALFNPRFPANPKAQPSKFTSDSKIKQVGIGSATGIIKAHLDLDGHVRSYEVFGTLPEGSIEWFKEESGYGRVEDDPHH

SEQ ID NO: 367 - protein, 1166 aa, Nitrobacter hamburgensis
MHVEIDFPHFSRGDSHLAMNKNEILRGSSVLYRLGLDLGSNSLGWFVTHLEKRGDRHEPVALGPGGVRIFPDGRDPQSGTSNAVDRRMARGARKRRDRFVERRKELIAALIKYNLLPDDARERRALEVLDPYALRKTALTDTLPAHHVGRALFHLNQRRGFQSNRKTDSKQSEDGAIKQAASRLATDKGNETLGVFFADMHLRKSYEDRQTAIRAELVRLGKDHLTGNARKKIWAKVRKRLFGDEVLPRADAPHGVRARATITGTKASYDYYPTRDMLRDEFNAIWAGQSAHHATITDEARTEIEHIIFYQRPLKPAIVGKCTLDPATRPFKEDPEGYRAPWSHPLAQRFRILSEARNLEIRDTGKGSRRLTKEQSDLVVAALLANREVKFDKLRTLLKLPAEARFNLESDRRAALDGDQTAARLSDKKGFNKAWRGFPPERQIAIVARLEETEDENELIAWLEKECALDGAAAARVANTTLPDGHCRLGLRAIKKIVPIMQDGLDEDGVAGAGYHIAAKRAGYDHAKLPTGEQLGRLPYYGQWLQDAVVGSGDARDQKEKQYGQFPNPTVHIGLGQLRRVVNDLIDKYGPPTEISIEFTRALKLSEQQKAERQREQRRNQDKNKARAEELAKFGRPANPRNLLKMRLWEELAHDPLDRKCVYTGEQISIERLLSDEVDIDHILPVAMTLDDSPANKIICMRYANRHKRKQTPSEAFGSSPTLQGHRYNWDDIAARATGLPRNKRWRFDANAREEFDKRGGFLARQLNETGWLARLAKQYLGAVTDPNQIWVVPGRLTSMLRGKWGLNGLLPSDNYAGVQDKAEEFLASTDDMEFSGVKNRADHRHHAIDGLVTALTDRSLLWKMANAYDEEHEKFVIEPPWPTMRDDLKAALEKMVVSHKPDHGIEGKLHEDSAYGFVKPLDATGLKEEEAGNLVYRKAIESLNENEVDRIRDIQLRTIVRDHVNVEKTKGVALADALRQLQAPSDDYPQFKHGLRHVRILKKEKGDYLVPIANRASGVAYKAYSAGENFCVEVFETAGGKWDGEAVRRFDANKKNAGPKIAHAPQWRDANEGAKLVMRIHKGDLIRLDHEGRARIMVVHRLDAAAGRFKLADHNETGNLDKRHATNNDIDPFRWLMASYNTLKKLAAVPVRVDELGRVWRVMPN

SEQ ID NO: 368 - protein, 1044 aa, Nitrosomonas sp.
  REGION 1..1044: note = Nitrosomonas sp. AL212
MLHKMRYRLALDLGSTSLGWAMVRLNANQQPCAVIKAGVRIFSNGRNPKDGSSLAVTRREARSMRRRRDRLLKRKARMMRTLIEYGFFPANETQRKALENLNPYALRAKGLDEALTPSEFARALFHINQRRGFKSNRKTDKKDSDSGALKTAIKQLHSVLDPQGNDGKPRTVGELLYKRFTDLSKLPKDRTVRARYRQDKIVKDDGKTKIDKYYDLYIDRAMIEQEFDALWKKQSELNPILFTENARADLKDVLLYQRSLKPVKPGRCTFMSEEERAPLALPSTQRFRMYQEVNNLRILREGLKEESLTLQQRDDLINALEKNNRRTFTQIKKLLGVGGSVQFNFEDPKREELKGNTTSAILGKSEHFGEAWFAFNEAKQDAIVLQLIKEENEAKLVRWLQDETGIDEKRAEVIANAGLPEGYGSLCIEALARILPELRRDVVTYDKAVQAAGFEHHSKLNRNEEIPDITFKIESIDRNSGEIKQFHLHKELPYYGEYLQRHVGFGSGKPEDSIEKRYGKIANPTVHIGLNQVRVVVNALIKRYGHPSEIIVEVARDLKQSKDRRDEENKRQAENQKRNERLRKDIADILGISEERVRRDDIEKMILWEELSFDPADRRCPYSGVQVSTVMLLSDEVEVEHILPFSQTLDDSLNNKTVALRQANRIKGNRTPWEAFGTSNISGFDYSGILTRAELMPKAKRYRFAEDGYQRWLKDDAGFLARALNDTRHLSKIAREYMSLICPNTRVIPGQMTAMLRRNFGLNDVLGLNGEKNRNDHRHHAVDACVIAVTDQGLLQRFAAASASARERQLNRLVENMPLPWESYREHVRRAIDGIWVSHRPDHSHEGAMHNDTAYGLRGNGRVSFHKMVEGKREYIEDNLKVIEITDTKAIDRHGLLPTGKPRPYKGYKGDSNYCIEIVRNEKGRWEGEIISTFDAYQLVRKYGIVQLRYPVLSVSGKPLVMRLIRNDFVRLEHEGITRTLRVCKMREDGQVALADVTEANVDARTRTKEICYVFKTGGSLQKAKARRITISPIGELRDPGFKE

SEQ ID NO: 369 - protein, 1498 aa, Odoribacter laneus
  REGION 1..1498: note = Odoribacter laneus YIT 12061
METTLGIDLGTNSIGLALVDQEEHQILYSGVRIFPEGINKDTIGLGEKEESRNATRRAKRQMRRQYFRKKLRKAKLLELLIAYDMCPLKPEDVRRWKNWDKQQKSTVRQFPDTPAFREWLKQNPYELRKQAVTEDVTRPELGRILYQMIQRRGFLSSRKGKEEGKIFTGKDRMVGIDETRKNLQKQTLGAYLYDIAPKNGEKYRFRTERVRARYTLRDMYIREFEIIWQRQAGHLGLAHEQATRKKNIFLEGSATNVRNSKLITHLQAKYGRGHVLIEDTRITVTFQLPLKEVLGGKIEIEEEQLKFKSNESVLFWQRPLRSQKSLLSKCVFEGRNFYDPVHQKWIIAGPTPAPLSHPEFEEFRAYQFINNIIYGKNEHLTAIQREAVFELMCTESKDFNFEKIPKHLKLFEKFNFDDTTKVPACTTISQLRKLFPHPVWEEKREEIWHCFYFYDDNTLLFEKLQKDYALQTNDLEKIKKIRLSESYGNVSLKAIRRINPYLKKGYAYSTAVLLGGIRNSFGKRFEYFKEYEPEIEKAVCRILKEKNAEGEVIRKIKDYLVHNRFGFAKNDRAFQKLYHHSQAITTQAQKERLPETGNLRNPIVQQGLNELRRTVNKLLATCREKYGPSFKFDHIHVEMGRELRSSKTEREKQSRQIRENEKKNEAAKVKLAEYGLKAYRDNIQKYLLYKEIEEKGGTVCCPYTGKTLNISHTLGSDNSVQIEHIIPYSISLDDSLANKTLCDATFNREKGELTPYDFYQKDPSPEKWGASSWEEIEDRAFRLLPYAKAQRFIRRKPQESNEFISRQLNDTRYISKKAVEYLSAICSDVKAFPGQLTAELRHLWGLNNILQSAPDITFPLPVSATENHREYYVITNEQNEVIRLFPKQGETPRTEKGELLLTGEVERKVFRCKGMQEFQTDVSDGKYWRRIKLSSSVTWSPLFAPKPISADGQIVLKGRIEKGVFVCNQLKQKLKTGLPDGSYWISLPVISQTFKEGESVNNSKLTSQQVQLFGRVREGIFRCHNYQCPASGADGNFWCTLDTDTAQPAFTPIKNAPPGVGGGQIILTGDVDDKGIFHADDDLHYELPASLPKGKYYGIFTVESCDPTLIPIELSAPKTSKGENLIEGNIWVDEHTGEVRFDPKKNREDQRHHAIDAIVIALSSQSLFQRLSTYNARRENKKRGLDSTEHFPSPWPGFAQDVRQSVVPLLVSYKQNPKTLCKISKTLYKDGKKIHSCGNAVRGQLHKETVYGQRTAPGATEKSYHIRKDIRELKTSKHIGKVVDITIRQMLLKHLQENYHIDITQEFNIPSNAFFKEGVYRIFLPNKHGEPVPIKKIRMKEELGNAERLKDNINQYVNPRNNHHVMIYQDADGNLKEEIVSFWSVIERQNQGQPIYQLPREGRNIVSILQINDTFLIGLKEEEPEVYRNDLSTLSKHLYRVQKLSGMYYTFRHHLASTLNNEREEFRIQSLEAWKRANPVKVQIDEIGRITFLNGPLC

SEQ ID NO: 370 - protein, 1389 aa, Oenococcus kitaharae
  REGION 1..1389: note = Oenococcus kitaharae DSM 17330
MARDYSVGLDIGTSSVGWAAIDNKYHLIRAKSKNLIGVRLFDSAVTAEKRRGYRTTRRRLSRRHWRLRLLNDIFAGPLTDFGDENFLARLKYSWVHPQDQSNQAHFAAGLLFDSKEQDKDFYRKYPTIYHLRLALMNDDQKHDLREVYLAIHHLVKYRGHFLIEGDVKADSAFDVHTFADAIQRYAESNNSDENLLGKIDEKKLSAALTDKHGSKSQRAETAETAFDILDLQSKKQIQAILKSVVGNQANLMAIFGLDSSAISKDEQKNYKFSFDDADIDEKIADSEALLSDTEFEFLCDLKAAFDGLTLKMLLGDDKTVSAAMVRRFNEHQKDWEYIKSHIRNAKNAGNGLYEKSKKFDGINAAYLALQSDNEDDRKKAKKIFQDEISSADIPDDVKADFLKKIDDDQFLPIQRTKNNGTIPHQLHRNELEQIIEKQGIYYPFLKDTYQENSHELNKITALINFRVPYYVGPLVEEEQKIADDGKNIPDPTNHWMVRKSNDTITPWNLSQVVDLDKSGRRFIERLTGTDTYLIGEPTLPKNSLLYQKFDVLQELNNIRVSGRRLDIRAKQDAFEHLFKVQKTVSATNLKDFLVQAGYISEDTQIEGLADVNGKNFNNALTTYNYLVSVLGREFVENPSNEELLEEITELQTVFEDKKVLRRQLDQLDGLSDHNREKLSRKHYTGWGRISKKLLTTKIVQNADKIDNQTFDVPRMNQSIIDTLYNTKMNLMEIINNAEDDFGVRAWIDKQNTTDGDEQDVYSLIDELAGPKEIKRGIVQSFRILDDITKAVGYAPKRVYLEFARKTQESHLTNSRKNQLSTLLKNAGLSELVTQVSQYDAAALQNDRLYLYFLQQGKDMYSGEKLNLDNLSNYDIDHIIPQAYTKDNSLDNRVLVSNITNRRKSDSSNYLPALIDKMRPFWSVLSKQGLLSKHKFANLTRTRDFDDMEKERFIARSLVETRQIIKNVASLIDSHFGGETKAVAIRSSLTADMRRYVDIPKNRDINDYHHAFDALLFSTVGQYTENSGLMKKGQLSDSAGNQYNRYIKEWIHAARLNAQSQRVNPFGFVVGSMRNAAPGKLNPETGEITPEENADWSIADLDYLHKVMNFRKITVTRRLKDQKGQLYDESRYPSVLHDAKSKASINFDKHKPVDLYGGFSSAKPAYAALIKFKNKFRLVNVLRQWTYSDKNSEDYILEQIRGKYPKAEMVLSHIPYGQLVKKDGALVTISSATELHNFEQLWLPLADYKLINTLLKTKEDNLVDILHNRLDLPEMTIESAFYKAFDSILSFAFNRYALHQNALVKLQAHRDDFNALNYEDKQQTLERILDALHASPASSDLKKINLSSGFGRLFSPSHFTLADTDEFIFQSVTGLFSTQKTVAQLYQETK

SEQ ID NO: 371 - protein, 1389 aa, Oenococcus kitaharae; identical to SEQ ID NO: 370
  REGION 1..1389: note = Oenococcus kitaharae DSM 17330

SEQ ID NO: 372 - protein, 1399 aa, Olsenella uli
MNLRNTTDEYNIGLDMGTNSVGWAVTDKAGAIAHFKGKPTLGSRLFDAAQTAAGARIHRSQRRRYVRRRWRLDLLQSLFQDEVSKVDSEFFCRLRQSRLYVGDREKGHADYTWPIFNDSDFNEVDYYKRFPTIYHLRKWLMETDEKADIRLIYLATHNIVKHRGNFLRENNKSLSSRDANPAQAVKSLRLALNDWCSERDYECAWKGEEDDGAIDEAILNVLADGEKGRSDQAKEIAKLTGVDCGDAKQSKQCNEAIAKAIVGLKVEMKNIFGEFPAEKTSYIYLSSDEDVEAVRESCPDDSGELFQALCKLYSAYILQELLSYADPSGQTISANMVAKYKQYGRDLRLLKELTRTYAPQKYDLFFRGETYAGSSDYVVDEARGYTRYNLGTTKANYDDFQKSVKELFKGTDALQDERYQEMMVAFGEQKFLRRLKTSDNGSIYYQLHLEELHTILENQGKHYPFLLSEEDKIESLVSFRIPYYVGPLTRKNAAIGHDGKERFAWSSRKDGMEHAVITPWNWEEIIDRDKSAEDFIMRMTGDCTYLQGEPVLPKCSLLYEEFCALNEFNGAHWTVDGDDERRFDAAQRERIMCDLFRRTRSVTYNKVSDWLERKYNFTGARVRGGQGEHGFESKLGSYIFFCKDVFKTDGLDEADYTMIEQIILWSTLFEDRDILKRKIEEAYGGDRLTSEQIKVICKKRFTGWGRLSKRLLTDIKVNTDTGRKSIMDVLREGNPNNGQRSRTMVFMEVLRDEDLGFQKAIDGLNRDYFREHNNGLMDVNDLPGSPAIRRSINQAVRIVDEIASIARKEPTNIFIEVTREEDDPRKKGKRTKRRYDAIKSALEKFKKDDPSLWKELCEKAPGDMDERLSLYFMQRGKCMYSGRPIKIEELHTGKYEVDHIIPRSYIKDDSFENKVLVYREENQHKTDALLIDSSIRQKMGGYWRMLHDAKLVGDKKFRNLFRNHIDDKAMKGFVARQIVETSQMVKLVQTLFEARYPNTRIVPVKAGISHDLREAAGLVKCREANDFHHAHDAFLACRIGLFIQKRHPSVYDNPIGLARIMRDYARMQAREYKKSHCLAHTQGFIVNSFLSSGFDEETGEIFKDDWDAKAEVEGIRRVLNCRQCFISRMPVEGDTRYGGRYWGETIYSPKGKHKHEIPLKQGLDPNLYGGYSDLLYSYFLIYEASDVSSGERVLRFIGIPTSIAARMANQKRLEEYVSRLALQENLEHVRMVRKIMKKQLIEVDNCRLLVTAADAVTNATELAFSLDEMKIISTCAKCINGADPSAIDKIGNAQDSFFDNLKRRGSDRCALLFSQLKLDKLSQNFYMISSDDKSKILISILDRIRAKSNSVDLSLVGGAKHAAQMKFDFNAKLNNPASSFVLIDQSVTGMFERRTRIGL

SEQ ID NO: 373 - protein, 1535 aa, Ornithobacterium rhinotracheale
MNTILGLDLGTNSIGWALIKVLNDKTRLPLEIIDLGVVVIPTDQRTLDKFSKGESISKTAERTKQKGVRKLYERKKLRRERLHRVLNILGFLPEHYSKKIDFKKHLGQFFGNSQPKISYVENDHGKHEFIFMDSYREMLKEFSKHNIKNVPYDWTIYYLRKKALSQKISKEELAWVILNFNKKRGYYQFRDDNADENKENKIEKYYALKVTNVKKEDAQNYTITLENGWIYKNKSKISLLDWVGSTKEFISTEKFDNKGNIIKKKNGEDDRTLKLVDSEKDWIAIKKSTEDRIENYGKTVGTYLYEHLLKDPNQKLNGELINIIDRKFYKNELKQILEKQKEFHPELLNEDLFQKSIIELYPKNSTRQKELKNKDLCYLLIDDVIYYQRDLKKKNSTINKCSFESREYYLNGEKQIQKINCIAKSKPLYQEFRTLQFIKNLKVYEIIDGLEKDITSKLLPDFETKEHFFEWLNDKEKIDQLQLLSYKCFDLHDNVKNDLIAKGIKRPTEKAIRTELLEKYRWNYSKDNDRNFLLNETRFKILKYLKKVDKKLTLTNEQIESLWLLLYSAKDERELKNGLQKFSEKNKLPKKFSDIFISFPPFKKEYGAYSEKALKKLLSLVRFGKYWSFNKIDNNIQNKIMNILNGEVDDSISDRVREKTILLQDKNDFQDLPLWLASYVAYNRFSEVSEIKYWDSPDKIEFLKQHSIGNPIVEKIINETLKLIKDIWVIHGKSCKNFFSEIHIELSREIKSSSKKRAQITNNNTKNQKLNNLIKSLLIEMASDTKYENVTPYSPSQQEILKIYDEGIYSKEENSEKIKEINKIRNNNKISKSDITKYKLWLEQGYISPYTGKIIPLTKLFTAKYQKEHIIPQTKFFDDSFNNKVICEAEVNKLKDNSLAMNFIKAKGGKAVKLSDGETVTILNQEEYKQLVRTSFKKNSIKLRNLLLEEIPDTFTKRQLNDTKYISKLVLSLLSNIVREKGELESTAKRIVSTNGQITSILRNDWGLNNIWNKLITPRFERLNNINKNKIYGNWENKKGKNVFQINYLNDNLSTLNTKRIDHRHHALDALIVACTTRNHINFLNNQYAKSRNQRHDLRAKLKRRETITTEGSKKQVFKDFIKPWESFTQDALKKLETTIVNFKVNKRIINKTINWYKKWEKQKDGTYKKIQKKQTKGDAWAIRKPLHIDTIYGIVCKKLPLKSALENYKNIIDENLKHKIKELKEVNKFDNNQIINFFKECNFIFEDNNIQKVEVYDFKDNRDKTILSSSRQLIDESFTPKKIGKVLDPTIRNILLKHLNSTKYNNKFDSDGNPIKPEKLAFSPEGLKDLNKNIKHLNNNKEHQPIKRVKLFETLGNKIKVGYTQQKNKKFAETATGTNLFLGIYSDNNKRDFKTIPLILAIQREKEGLNPCPDTDEKGNQLLFSLSPNELVFVPNNEERKNPNLVDFENLSKDQIDRIYKFVSCTGSEAYFVPSRTAKPIIENENGTNNKSQRIIEFNEKTSIKNEKNEPVLIKTICWKIEVNRLGKIIKVIK

SEQ ID NO: 374 - protein, 1443 aa, Parabacteroides johnsonii
  REGION 1..1443: note = Parabacteroides johnsonii DSM 18315
MIKLLYLEKLKQYTMKKILGLDLGTSSIGWALVNEAENSDEVSSIIKLGVRVNPLTVDEMQNFEKGKSITTNADRTLKRSMRRNLQRYKLRRDALIELLKKVGFITDKTILSEQGNRTTFETYRLRAKAAEEEISLKELARVLLMINKKRGYKSSRKAKGEEEGALIDGMEIAKKLYDEDLTPGQLCLQLLESGKKFFPDFYRSDLQEEFNKIWDFQKQFNLFSFCDVAKEEVKGKNKSQTWAILAKYFVETKKVNVWNEHEAQTENREEVYKLVGLKRTVKGEELKKENYRWRVQALTEQLDLEKIAVVLQEINGQISASSGYLGAISDRSKVLYFNRQTVGQYQMAELNKNPNMSLRNMVFYRQDYLDEFNVIWEKQAEFHKELTPELKKEIRDIIIFYQRRLKSQKGLISFCEFENREVVVEKEGKKQTKIIGCKVIPRSHPLFQEFKIWQTLNNIEVFVGEKKGKRKKSNVSSDLFGDTEDALITEGRRFLYQEEKKILAKELSIKKGLTKAEILRLLFENPQELDINFKQIDGNQTGFALFSAYSNMIEKYGYEPLDFKKPAEDLISQLKTVFTDLGWNTDLLFIDLDKENKEWEKQPYFRLWHLLYSFEGDNTPTGNGKLIEKIMQLCGIEKEYAIELANVSLQDDYGSLSAKAIKKILLYLKEGNQYDMACEYAGYRHSKSSLTKEEIENKVLKDKLEILPKNSLRNPVVEKILNQMVNVINTVMEVYGRPDEIRVELARELKKSAKEREELTKAVAKNTREHEEIRKVLQSEFGMINVSRNDIIRYKLYEELKDNGYKTLYSNQYIPREKLFSKEIDIEHIIPQSRLFDDSLSNKTLEYKSINIEKGNKTAYDFVKEKYGEEGLQQYLNRCENLCKDKKAKLRKLKMELNEIPDGFIDRDLRNTQYIAKKALSMLTEICRRVVATTGSITDKLREDWQLVDVMKELNLPKYEALGLVEVYEDKDGRKIKRIKDWTKRNDHRHHAMDALTVAFTKDVFIQYFNNKNAAWESDSKEHTNIVGIKTRYFESGKAVPPIPLGQFRVEAKCHLENLLVSIKAKNKVVTTNVNCIKKKGGTYKNTQQTPRGQLHLETIYGSHNQYVTKIEKVNASFDAVKIATVSKQDYRNALLKRLEVFGNDPKKAFTGKNSLEKNPIYLDRAQTIQVPDKVQTVELETAYTIRKPVDPTLNVDKVVDKKIRLILEQRLKEYGGDAKKAFVNLDENPIWLNEEKGISIKRVTIRGISKAQALHDKKDKDGNFILDETGKRIPVDFVNTGNNHHVAIYRKPVLDKKGQVIFDDEGNPMYELDEDVVPFFEAVTRANLGIPIIDKDYKKSEGWQFLFSMKQNEYFVFPNEKTGFNPKEVDLLDPDNYAMISPNLFRVQKIGLNDYTFRHHLETTIQNDLKFITWIRCGKSGIKDIVKVRINHIGQIVSVGEY

SEQ ID NO: 375 - protein, 1424 aa, Parabacteroides sp.
  REGION 1..1424: note = Parabacteroides sp. D13
MKRILGLDLGTNSIGWALVNEAETDEEVSSIIRLGVRVNPLTVDETQNFEKGKSITTNAERTLKRSMRRNLQRYKLRRDALVEFLKELGFITDETILSEQGNRTTFETCRLRAKAAEEEISLEELSRVLLMINKKRGYKSSRKVKKEEDGVLIDGMEIAKKLYEEDLTPGQLCSQLLESGKKVLPDFYRSDLQEELDRIWSVQKQFHPDVFCDAAKEEIKGKNRSQTWAILANYFVWKEEVVGWNDREAKNETIEKECKLVGLKRTTKGYELKKENYRWRAQALTEQLGLEEIAVVLQEINGQINASSGYLGAISDRSKVLYFNHQTVGQYQMAELDKNPHASLRNMVFYRQDYLDEFDRIWEKQAEFHKELTAELKKEIRDMIIFYQRRLKSQKGLISFCEFERLEIVVEKDGKKQTKVIGCKVIPRSHPLFQEFKVWQTLNDIKVLGREKKRNALSASESRALYPEEKEILARELAIKENMKKADVLKLLFENPQELDLNFKQIDGNRTGFSLFSAYSKMIEKYGYEPLDFKKPADEIIGQLRTIFTDLGWNTNLFTIDLTKEGKELEMQPYFRLWHLLYSFEGDNTSTGNGKLIEKIMQLCGVEKEYAVELASLSFQDDYGSLSAKAIKRILPYLKEGNLYDVACEYAGYRHSKSSLTKEEIENKVLKGKLEVLPKNSLRNPVVEKILSQMVNVINTIIDTYGKPDEIRVELARELKKSAKEREELTKAIAKSTREHEEIRKLLQDEFGMMNVSRNDIIRYKLYEELKDNGYKTLYSNQYIPKEKIFSKEIDIEHIIPQSRLFDDSLSNKTLEYKAINIEKGNKTAYDFVKEKYGEEGLQQYINRCESLFNDKKAKLRKLKMEQKDIPDGFIDRDLRNTQYIAKKALAMLNEICRRVVATTGSITDQLREDWQLVDVMKELNLPKYEALGFVETYEDKDGRKIKRIKDWTKRNDHRHHAMDALTVAFTKDAFIQYFNNKNAAQDSGNRNHTNIIGIKTRYFDKGRALPPIPLEQFRIEAKQHLEKLLVSIKAKNKVVTVNVNRTKKRKGENTKIQQTPRGQLHLETVYGSHKQYVTKIEKVNASFDAAKIATVSKRAYRNALLKRLETFGNDPKKAFTGKNALEKNPLYADKYQTIRVPEKVQTVEFETIYTIRKPVDPALNVDKVVDVKVRAILERRLKEYGGDPKKAFVNFWENPIWLNKEKGISIKRVSIRGINNAQSIHVKKDKNGNPIWDENGKQIPVDFVNTGNNHHVAIYRKPVLDKKGQVTFDEDGNLMYELDEVVVPFFEAVTRANLGLPIIDKDYRKSEGWQFLFSMKQNEYFVFPNEKTGFNPKEVDLLNPDNYAMISPNLFRVQTMSKVMYGNNVVRDYKFRHHLETTVKDMKELKDIAYKQYKTLSFGNSVVKIRINHIGQIVSVGEY

SEQ ID NO: 376 - protein, 1428 aa, Parasutterella excrementihominis
  REGION 1..1428: note = Parasutterella excrementihominis YIT 11859
MGKTHIIGVGLDLGGTYTGTFITSHPSDEAEHRDHSSAFTVVNSEKLSFSSKSRTAVRHRVRSYKGFDLRRRLLLLVAEYQLLQKKQTLAPEERENLRIALSGYLKRRGYARTEAETDTSVLESLDPSVFSSAPSFTNFFNDSEPLNIQWEAIANSPETTKALNKELSGQKEADFKKYIKTSFPEYSAKEILANYVEGRRAILDASKYIANLQSLGHKHRSKYLSDILQDMKRDSRITRLSEAFGSTDNLWRIIGNISNLQERAVRWYFNDAKFEQGQEQLDAVKLKNVLVRALKYLRSDDKEWSASQKQIIQSLEQSGDVLDVLAGLDPDRTIPPYEDQNNRRPPEDQTLYLNPKALSSEYGEKWKSWANKFAGAYPLLTEDLTEILKNTDRKSRIKIRSDVLPDSDYRLAYILQRAFDRSIALDECSIRRTAEDFENGVVIKNEKLEDVLSGHQLEEFLEFANRYYQETAKAKNGLWFPENALLERADLHPPMKNKILNVIVGQALGVSPAEGTDFIEEIWNSKVKGRSTVRSICNAIENERKTYGPYFSEDYKFVKTALKEGKTEKELSKKFAAVIKVLKMVSEVVPFIGKELRLSDEAQSKFDNLYSLAQLYNLIETERNGFSKVSLAAHLENAWRMTMTDGSAQCCRLPADCVRPFDGFIRKAIDRNSWEVAKRIAEEVKKSVDFTNGTVKIPVAIEANSFNFTASLTDLKYIQLKEQKLKKKLEDIQRNEENQEKRWLSKEERIRADSHGICAYTGRPLDDVGEIDHIIPRSLTLKKSESIYNSEVNLIFVSAQGNQEKKNNIYLLSNLAKNYLAAVFGTSDLSQITNEIESTVLQLKAAGRLGYFDLLSEKERACARHALFLNSDSEARRAVIDVLGSRRKASVNGTQAWFVRSIFSKVRQALAAWTQETGNELIFDAISVPAADSSEMRKRFAEYRPEFRKPKVQPVASHSIDAMCIYLAACSDPFKTKRMGSQLAIYEPINFDNLFTGSCQVIQNTPRNFSDKTNIANSPIFKETIYAERFLDIIVSRGEIFIGYPSNMPFEEKPNRISIGGKDPFSILSVLGAYLDKAPSSEKEKLTIYRVVKNKAFELFSKVAGSKFTAEEDKAAKILEALHFVTVKQDVAATVSDLIKSKKELSKDSIENLAKQKGCLKKVEYSSKEFKFKGSLIIPAAVEWGKVLWNVFKENTAEELKDENALRKALEAAWPSSFGTRNLHSKAKRVFSLPVVATQSGAVRIRRKTAFGDFVYQSQDTNNLYSSFPVKNGKLDWSSPIIHPALQNRNLTAYGYRFVDHDRSISMSEFREVYNKDDLMRIELAQGTSSRRYLRVEMPGEKFLAWFGENSISLGSSFKFSVSEVFDNKIYTENAEFTKFLPKPREDNKHNGTIFFELVGPRVIFNYIVGGAASSLKEIFSEAGKERS

SEQ ID NO: 377 - protein, 1037 aa, Parvibaculum lavamentivorans
MERIFGFDIGTTSIGFSVIDYSSTQSAGNIQRLGVRIFPEARDPDGTPLNQQRRQKRMMRRQLRRRRIRRKALNETLHEAGFLPAYGSADWPVVMADEPYELRRRGLEEGLSAYEFGRAIYHLAQHRHFKGRELEESDTPDPDVDDEKEAANERAATLKALKNEQTTLGAWLARRPPSDRKRGIHAHRNVVAEEFERLWEVQSKFHPALKSEEMRARISDTIFAQRPVFWRKNTLGECRFMPGEPLCPKGSWLSQQRRMLEKLNNLAIAGGNARPLDAEERDAILSKLQQQASMSWPGVRSALKALYKQRGEPGAEKSLKFNLELGGESKLLGNALEAKLADMFGPDWPAHPRKQEIRHAVHERLWAADYGETPDKKRVIILSEKDRKAHREAAANSFVADFGITGEQAAQLQALKLPTGWEPYSIPALNLFLAELEKGERFGALVNGPDWEGWRRTNFPHRNQPTGEILDKLPSPASKEERERISQLRNPTVVRTQNELRKVVNNLIGLYGKPDRIRIEVGRDVGKSKREREEIQSGIRRNEKQRKKATEDLIKNGIANPSRDDVEKWILWKEGQERCPYTGDQIGFNALFREGRYEVEHIWPRSRSFDNSPRNKTLCRKDVNIEKGNRMPFEAFGHDEDRWSAIQIRLQGMVSAKGGTGMSPGKVKRFLAKTMPEDFAARQLNDTRYAAKQILAQLKRLWPDMGPEAPVKVEAVTGQVTAQLRKLWTLNNILADDGEKTRADHRHHAIDALTVACTHPGMTNKLSRYWQLRDDPRAEKPALTPPWDTIRADAEKAVSEIVVSHRVRKKVSGPLHKETTYGDTGTDIKTKSGTYRQFVTRKKIESLSKGELDEIRDPRIKEIVAAHVAGRGGDPKKAFPPYPCVSPGGPEIRKVRLTSKQQLNLMAQTGNGYADLGSNHHIAIYRLPDGKADFEIVSLFDASRRLAQRNPIVQRTRADGASFVMSLAAGEAIMIPEGSKKGIWIVQGVWASGQVVLERDTDADHSTTTRPMPNPILKDDAKKVSIDPIGRVRPSND

SEQ ID NO: 378 - protein, 1058 aa, Pasteurella multocida
  REGION 1..1058: note = Pasteurella multocida subsp. gallicida X73
MQTTNLSYILGLDLGIASVGWAVVEINENEDPIGLIDVGVRIFERAEVPKTGESLALSRRLARSTRRLIRRRAHRLLLAKRFLKREGILSTTDLEKGLPNQAWELRVAGLERRLSAIEWGAVLLHLIKHRGYLSKRKNESQTNNKELGALLSGVAQNHQLLQSDDYRTPAELALKKFAKEEGHIRNQRGAYTHTFNRLDLLAELNLLFAQQHQFGNPHCKEHIQQYMTELLMWQKPALSGEAILKMLGKCTHEKNEFKAAKHTYSAERFVWLTKLNNLRILEDGAERALNEEERQLLINHPYEKSKLTYAQVRKLLGLSEQAIFKHLRYSKESAESATFMELKAWHAIRKALENQGLKDTWQDLAKKPDLLDEIGTAFSLYKTDEDIQQYLEGKLPDSVINALLVSLNFDKFIELSLKSLRKILPLMEQGKRYDQACHEIYGHHYGEKNQQISQLLPVIPTQEIRNPVVLRTLSQARKVINAIIRQYGSPARVHIETGRELGKSFKERREIQKQQEDNRTKRESAVQKFKELFSDFSSEPKSKDILKFRLYEQQHGKCLYSGKEINIHRLNEKGYVEIDHALPFSRTWDDSFNNKVLVLASENQNKGNQTPYEWLQGKINSERWKNFVALVLGSQCSAAKKQRLLTQVIDDNKFIDRNLNDTRYIARFLSNYIQENLLLVGKNKKNVFTPNGQITALLRSRWGLIKVRENNDRHHALDAIVVACATPSMQQKITRFIRFKEVHPYKIENRYEMVDQESGEIISPHFPEPWAYFRQEVNIRVFDNHPDTVLKEMLPDRPQANHQFVQPLFVSRAPTRKMSGQGHMETIKSAKRLAEGISVLRIPLTQLKPNLLENMVNKEREPALYVGLKARLAEFNQDPAKAFATPFYKQGGQQVKAIRVELVQKSGVLVRQGNGVADNAPGSIVRTDVFIKNNKFFLVPIYTWQVAKGILPNKAIVAHKNEDEWEEMDEGAKFKFSIFPNDLIELRTKTECFLGYYIGPDRHNGSISLREHDSEISKGNAGVYRVGVKLALSLEKYHIDELGKNRRICRPHQRRPVR

SEQ ID NO: 379 - protein, 1056 aa, Pasteurella multocida
  REGION 1..1056: note = Pasteurella multocida subsp. multocida str. P52VAC
MQTTNLSYILGLDLGIASVGWAVVEINENEDPIGLIDVGVRIFERAEVPKTGESLALSRRLARSTRRLIRRRARRLLLAKRFLKREGILSTTDLEKGLPNQAWELRVAGLERRLSAIEWGAVLLHLIKHRGYLSKRKNESQTNNKELGALLSGVAQNHQLLQSDDYRTPAELALKKFAKEEGHIRNQRGAYTHTFNRLDLLAELNLLFAQQHQFGNPHCKEHIQQYMTELLMWQKPALSGEAILKMLGKCTHEKNEFKAAKHTYSAERFVWLTKLNNLRILEDGAERALNEEERQLLINHPYEKSKLTYAQVRKLLGLSEQAIFKHLRYSKENAESATFMELKAWHAIRKALENQGLKDTWQDLAKKPDLLDEIGTAFSLYKTDEDIQQYLTNKVPNSVINALLVFLNFDKFIELALKSLRKILPLMEQGKRYDQACREIYGHHYGEANQKTSQLLPAIPAQEIRNPVVLRTLSQARKVINAIIRQYGSPARVHIETGRELGKSFKERREIQKQQEDNRTKRESAVQKFKELFSDFSSEPKSKDILKFRLYEQQHGKCLYSGKEINIHRLNEKGYVEIDHALPFSRTWDDSFNNKVLVLASENQNKGNQTPYEWLQGKINSERWKNFVALVLGSQCSAAKKQRLLTQVIDDNKFIDRNLNDTRYIARFLSNYIQENLLLVGKNKKNVFTPNGQITALLRSRWGLIKIRENNDRHHALDAIVVACATPSMQQKITRFIRFKEVHPYKIENRYEMVDQESGEIISPHFPEPWAYFRQEVNIRVFDNHPDTVLKEMLPDRPQANHQFVQPLFVSRAPTRKMSGQGHMETIKSAKRLAEGISVLRIPLTQLKPNLLENMVNKEREPALYAGLKARLAEFNQDPAKAFTTPFYKQGGQQVKAIRVEQVQKSGVLVRENNGVADNASIVRTDVFIKNNKFFLVPIYTWQVAKGILPNKAIVAHKNEDEWEEMDEGAKFKFSLFPNDLVELKTKKEYFFGYYIGLDRATGNISLKEHDGEISKGKDGVYRVGVKLALSFEKYQVDELGKNRQICRPQQRQPVR

SEQ ID NO: 380 - protein, 1056 aa, Pasteurella multocida
MQTTNLSYILGLDLGIASVGWAVVEINENEDPIGLIDVGVRIFERAEVPKTGESLALSRRLARSTRRLIRRRAHRLLLAKRFLKREGILSTIDLEKGLPNQAWELRVAGLERRLSAIEWGAVLLHLIKHRGYLSKRKNESQTNNKELGALLSGVAQNHQLLQSDDYRTPAELALKKFAKEEGHIRNQRGAYTHTFNRLDLLAELNLLFAQQHQFGNPHCKEHIQQYMTELLMWQKPALSGEAILKMLGKCTHEKNEFKAAKHTYSAERFVWLTKLNNLRILEDGAERALNEEERQLLINHPYEKSKLTYAQVRKLLGLSEQAIFKHLRYSKENAESATFMELKAWHAIRKALENQGLKDTWQDLAKKPDLLDEIGTAFSLYKTDEDIQQYLTNKVPNSVINALLVSLNFDKFIELSLKSLRKILPLMEQGKRYDQACREIYGHHYGEANQKTSQLLPAIPAQEIRNPVVLRTLSQARKVINAIIRQYGSPARVHIETGRELGKSFKERREIQKQQEDNRTKRESAVQKFKELFSDFSSEPKSKDILKFRLYEQQHGKCLYSGKEINIHRLNEKGYVEIDHALPFSRTWDDSFNNKVLVLASENQNKGNQTPYEWLQGKINSERWKNFVALVLGSQCSAAKKQRLLTQVIDDNKFIDRNLNDTRYIARFLSNYIQENLLLVGKNKKNVFTPNGQITALLRSRWGLIKARENNNRHHALDAIVVACATPSMQQKITRFIRFKEVHPYKIENRYEMVDQESGEIISPHFPEPWAYFRQEVNIRVFDNHPDTVLKEMLPDRPQANHQFVQPLFVSRAPTRKMSGQGHMETIKSAKRLAEGISVLRIPLTQLKPNLLENMVNKEREPALYAGLKARLAEFNQDPAKAFATPFYKQGGQQVKAIRVEQVQKSGVLVRENNGVADNASIVRTDVFIKNNKFFLVPIYTWQVAKGILPNKAIVAHKNEDEWEEMDEGAKFKFSLFPNDLVELKTKKEYFFGYYIGLDRATGNISLKEHDGEISKGKDGVYRVGVKLALSFEKYQVDELGKNRQICRPQQRQPVR

SEQ ID NO: 381 - protein, 1364 aa, Pediococcus acidilactici
  REGION 1..1364: note = Pediococcus acidilactici DSM 20284
MGDRKYNLGLDIGTSSIGFAAVDENNQPIRVKGKTAIGVRLFEEGKTAADRRGFRTTRRRLSRRRWRINLLNEIFDAHLAEVDPTFLARLKESNRSNLDPKKSFQGSLLFPERKDYQFYEEYPTIYHLRKALMEKDRKFDFREIYLAVHHIIKYRGNFLNGTPMRSFKVENIELDTLFDQLNQLYAEIVPDNELAFDLAQVADVKDVLSSTTIYKMDKKKQLVKMMLLPASNKALQSENKKIVTQFVNAILNYKFKLDVLLQVETDADWSLKLNDEGADDKLEEFTGDLDENRLEIIDLLQRLHNWFSLNEITKDGNSLSAAMVEKYENHHHHLGLLKKVIENHPDAKKAKALKETYTAYVGKTDDKTQNQDDFYKAVEKNLDDSPDAKEIKRLIQLDQFMPKQRTGQNGAIPHQLHQQELDQIIEKQSKYYPFLAEPNPNVKRRKDAPYKLDELIAFKIPYYVGPLVTPEEQAQNGENVFAWMKRKAAGPITPWNFDEKVDRMESANRFIRRMTTKDTYLFGEDVLPAESMIYQKFVVLNELNNLKINGRHLSLKDKQDVYNDLFKQQKTVSIKALQNYYVTKKKAATAPTVGGLADPKKFLSSLSTYIDFKNMFGERVNDPQFQEDLEQIVEWSTIFEDRGIFKAKLQALGWLSEKQIQQLVAKRYKGWGRLSKKLLTGLKNAEGYSILDEMWRSTGNFMQIQSRPEFAALIQQANEKQFEGNDPDNVWENIENILGDAYTSPQNKKAIRQVVKVVQDIEKAVGNPPEKIAIEFTREAAANPQRTQSRLRTLEKLYESAEEVVDAGLTAELAEFKENKHVLSDKYYLYFTQLGRDVYTGDTISLDKLNDYDVDHILPQSFIKDDSLDNRVLTIRAVNNGKSDNVPAKMFGKKMGSFWRYLLDNGMISKRKYNNLITDPDNISKYAQKGFINRQLVETSQVIKLTANILNGIYDKDTEIIEVPAKMNSQMRKMFDLVKVREVNDYHHAFDAYLTIFIGNYLYKCYPKLQPYFVYDNFKKFGNKEDIGHKRFNFLGKIEREKKVVAPETGEILWSNVAPNETIKQIKKVYDYKFMIVSREITTRRAELFNQTVYPKNYHGKLIPIKEDRPTDLYGGYSGNTDAYLAIVALEDKKKGKYFKVVGIPTRVAAKLEKLKQQDSQQYLQALHKVIAPQFTKSTKKGIKKTEFEIVLDKVHYRQLVQDGPVKMMLGSSTYKYNAKQLVLSEKALQVIADDRKFDETQKDDNLIAVYDEILSIVNQSFDLYDINGFRKKLNDNRDQFIDLPAETKYEGRKVVAHGKREMILEILKGLHANAAFGNLKPIGFSTAFGQLQVPNGIILSKNAILIHQSPSGLFERKIKLSDL

SEQ ID NO: 382 - protein, 1366 aa, Pediococcus acidilactici
  REGION 1..1366: note = Pediococcus acidilactici MA18/5M
MGDRKYNLGLDIGTSSIGFAAVDENNQPIRVKGKTAIGVRLFEEGKTAADRRGFRTTRRRLSRRRWRINLLNEIFDAHLAEVDPTFLARLKESNRSNLDPKKSFQGSLLFPERKDYQFYEEYPTIYHLRKALMEEDRKFDIREIYLAVHHIIKYRGNFLNGTPMRSFKVENIELDTLFDQLNQLYAEIVPDNELAFDLAQVADVKDVLSSTTIYKMDKKKQLVKMMLLPASNKALQSENKKIVTQFVNAILNYKFKLDVLLQVETDADWSLKLNDEGADDKLEEFTGDLDENRLEIIDLLQRLHNWFSLNEITKDGNSLSAAMVEKYENHHHHLGLLKKVIENHPDAKKAKALKETYTAYVGKTDDKTQNQDDFYKAVEKNLDDSPDAKEIKRLIQLDQFMPKQRTGQNGAIPHQLHQQELDQIIEKQSKYYPFLAEPNPNVKRRKDAPYKLDELIAFKIPYYVGPLVTPEEQAQNKENVFAWMKRKAAGPITPWNFDEKVDRMESANRFIRRMTTKDTYLFGEDVLPAESMIYQKFVVLNELNNLKINGRHLSLKDKQDVYNDLFKQQKTVSIKALQNYYVTKKKAATAPTVGGLADPKKFLSSLSTYIDFKNMFGERVNDPQFQEDLEQIVEWSTIFEDRGIFKAKLQALGWLSEKQIQQLVAKRYKGWGRLSKKLLTGLKNAEGYSILDEMWRSTENFMQIQTRPEFAALIQQANEKQFEGNDPNNVWENIESILGDAYTSPQNKKAIRQVVKVVQDIEKAVGNPPEKIAIEFTREAAANPQRTQSRLRTLEKLYESAEEVVDAGLTAELAEFKENKHVLSDKYYLYFTQLGRDVYTGDTISLDKLNDYDVDHILPQSFIKDDSLDNRVLTIRAVNNGKSDNVPAKMFGKKMGSFWRYLLDNGMISKRKYNNLITDPDNISKYAQKGFINRQLVETSQVIKLTANILNGIYDKDTEIIEVPAKMNSQMRKMFDLVKVREVNDYHHAFDAYLTIFIGKYLYKCYPKLRPYFVYGKFKKFGDNEDIEVGDGRFNFLNRIERLKNVTDPETGEILWSNVAPNETIKQIKKVYNYKFMLVSRETTTRRAELFNQTVYPKNYRGKLIPIKEDRPTDLYGGYSGNTDAYLAIVALEDKKKGKYFKVVGIPTRAAAKLEKLKQQDSQQYLQALHKVIAPQFTKSTKKGIKKTEFEIVLDKVHYRQLVQDGPVKMMLGSSTYKYNAKQLVLSEKALQVIADDRKFDETQKDDNLIAVYDEILSIVNQSFDLYDINGFRKKLNDNRDQFIDLPAETKYEGRKVVAHGKREMILEILKGLHANAAFGNLKPIGFSTAFGQLQVPNGIILSKNAILIHQSPSGLFERKIKLSDL

SEQ ID NO: 383 - protein, 1364 aa, Peptoniphilus duerdenii
  REGION 1..1364: note = Peptoniphilus duerdenii ATCC BAA-1640
MKNLKEYYIGLDIGTASVGWAVTDESYNIPKFNGKKMWGVRLFDDAKTAEERRTQRGSRRRLNRRKERINLLQDLFATEISKVDPNFFLRLDNSDLYREDKDEKLKSKYTLFNDKDFKDRDYHKKYPTIHHLIMDLIEDEGKKDIRLLYLACHYLLKNRGHFIFEGQKFDTKNSFDKSINDLKIHLRDEYNIDLEFNNEDLIEIITDTTLNKTNKKKELKNIVGDTKFLKAISAIMIGSSQKLVDLFEDGEFEETTVKSVDFSTTAFDDKYSEYEEALGDTISLLNILKSIYDSSILENLLKDADKSKDGNKYISKAFVKKFNKHGKDLKTLKRIIKKYLPSEYANIFRNKSINDNYVAYTKSNITSNKRTKASKFTKQEDFYKFIKKHLDTIKETKLNSSENEDLKLIDEMLTDIEFKTFIPKLKSSDNGVIPYQLKLMELKKILDNQSKYYDFLNESDEYGTVKDKVESIMEFRIPYYVGPLNPDSKYAWIKRENTKITPWNFKDIVDLDSSREEFIDRLIGRCTYLKEEKVLPKASLIYNEFMVLNELNNLKLNEFLITEEMKKAIFEELFKTKKKVTLKAVSNLLKKEFNLTGDILLSGTDGDFKQGLNSYIDFKNIIGDKVDRDDYRIKIEEIIKLIVLYEDDKTYLKKKIKSAYKNDFTDDEIKKIAALNYKDWGRLSKRFLTGIEGVDKTTGEKGSIIYFMREYNLNLMELMSGHYTFTEEVEKLNPVENRELCYEMVDELYLSPSVKRMLWQSLRVVDEIKRIIGKDPKKIFIEMARAKEAKNSRKESRKNKLLEFYKFGKKAFINEIGEERYNYLLNEINSEEESKFRWDNLYLYYTQLGRCMYSLEPIDLADLKSNNIYDQDHIYPKSKIYDDSLENRVLVKKNLNHEKGNQYPIPEKVLNKNAYGFWKILFDKGLIGQKKYTRLTRRTPFEERELAEFIERQIVETRQATKETANLLKNICQDSEIVYSKAENASRFRQEFDIIKCRTVNDLHHMHDAYLNIVVGNVYNTKFTKNPLNFIKDKDNVRSYNLENMFKYDVVRGSYTAWIADDSEGNVKAATIKKVKRELEGKNYRFTRMSYIGTGGLYDQNLMRKGKGQIPQKENTNKSNIEKYGGYNKASSAYFALIESDGKAGRERTLETIPIMVYNQEKYGNTEAVDKYLKDNLELQDPKILKDKIKINSLIKLDGFLYNIKGKTGDSLSIAGSVQLIVNKEEQKLIKKMDKFLVKKKDNKDIKVTSFDNIKEEELIKLYKTLSDKLNNGIYSNKRNNQAKNISEALDKFKEISIEEKIDVLNQIILLFQSYNNGCNLKSIGLSAKTGVVFIPKKLNYKECKLINQSITGLFENEVDLLNL

SEQ ID NO: 384 - protein, 1087 aa, Phascolarctobacterium succinatutens
  REGION 1..1087: note = Phascolarctobacterium succinatutens YIT 12067
MLRMKYAIGLDIGIASVGYAVLALDHEENPWGIIRLGSRIFDVAENPKDGASLALPRREARSVRRRLRRHHHRLERIKNLLINTEFITKDELLHLYDGNLSDVYELRVKALDYSVTNAELTRILLHLAQRRGFKSNRKSDANDKEAGQLLEAVSANAKRMQENHYRTVGEMFYKDDLFSKYKRNKGGTYLTTVHRDMIAAEARTILEKQFALGNNICTQDFIDKYLSILLSQRQFDEGPGEPSPYAGNQIANMIGKCTFEPNEYRAAKASYSFERFNLLQKVNHLRLLLEGKSIALDNEQRKKIIALAHDKADLRYSHIRKALGLDEKVLFNTITYNDDVSVIEKKTKFNFLQAYHQIKKVLAEDMQKLTTEQLDNIGQILSTYKSDNKRTEELSALGLEKKIIDALLGINGLSKFAHLSLKALRKINPYLEEGKIYNEACTAAGYDFKAHANTQKTELLPAYKEEMDDITSPVARRAIAQSIKVINAIIREQKGSPLYINIELAREMAKGFDERTQIDKANKENQAKNERIMERIRTEFHKANPTGMDLIKLKLWEEQDGRSPYSQKAISINRLFEPGYVDIDHIVPYSISFDDSFKNKVLVFSDENRDKGNRLPIAYLQSKFGAKAAENFMIWVQSNIKDYKKRQKLLKREITEEDINKFKERNLQDTKTISRFLYNYINDYLLFAPSDTGKKKRVTAVNGTITAYLRKRWGINKIRANGDKHHAVDAVVIACTTDKMIKDLSSFSRYHELEYTHTDTESFLVNSLTGEILKRFPYPWEDFRPELMARLSDNPADALRKLNLIFYHGIDLSTIKPIFVSRMPRHKVTGAAHKATIKSARCLDNGIVICKTSLQNLKLDKEGEIANYYAPESDTILYNALKERLRSYDNKPAKAFAEPFYKPKADGTPGPLVKKVKVYEKSTLNVAVQQNTAVADNDSMVRVDVFHVKGNGYYLVPIYIADTLKKELPNKAIVAYKPYADWPVMDDSNFIFSLYPNDLIKFEHKNSVKFAKVNKESTLNDFYSTKSEIVYFKGCNINTGAITIINHENTYVVSSLGVKTLPSLEKYQADVLGNYTKVKKEVRKPFR

SEQ ID NO: 385 - protein, 1333 aa, Planococcus antarcticus
  REGION 1..1333: note = Planococcus antarcticus DSM 14505
MKNYTIGLDIGVASVGWVCIDENYKILNYNNRHAFGVHEFESAESAAGRRLKRGMRRRYNRRKKRLQLLQSLFDSYITDSGFFSKTDSQHFWKNNNEFENRSLTEVLSSLRISSRKYPTIYHLRSDLIESNKKMDLRLVYLALHNLVKYRGHFLQEGNWSEAASAEGMDDQLLELVTRYAELENLSPLDLSESQWKAAETLLLNRNLTKTDQSKELTAMFGKEYEPFCKLVAGLGVSLHQLFPSSEQALAYKETKTKVQLSNENVEEVMELLLEEESALLEAVQPFYQQVVLYELLKGETYVAKAKVSAFKQYQKDMASLKNLLDKTFGEKVYRSYFISDKNSQREYQKSHKVEVLCKLDQFNKEAKFAETFYKDLKKLLEDKSKTSIGTTEKDEMLRIIKAIDSNQFLQKQKGIQNAAIPHQNSLYEAEKILRNQQAHYPFITTEWIEKVKQILAFRIPYYIGPLVKDTTQSPFSWVERKGDAPITPWNFDEQIDKAASAEAFISRMRKTCTYLKGQEVLPKSSLTYERFEVLNELNGIQLRTTGAESDFRHRLSYEMKCWIIDNVFKQYKTVSTKRLLQELKKSPYADELYDEHTGEIKEVFGTQKENAFATSLSGYISMKSILGAVVDDNPAMTEELIYWIAVFEDREILHLKIQEKYPSITDVQRQKLALVKLPGWGRFSRLLIDGLPLDEQGQSVLDHMEQYSSVFMEVLKNKGFGLEKKIQKMNQHQVDGTKKIRYEDIEELAGSPALKRGIWRSVKIVEELVSIFGEPANIVLEVAREDGEKKRTKSRKDQWEELTKTTLKNDPDLKSFIGEIKSQGDQRFNEQRFWLYVTQQGKCLYTGKALDIQNLSMYEVDHILPQNFVKDDSLDNLALVMPEANQRKNQVGQNKMPLEIIEANQQYAMRTLWERLHELKLISSGKLGRLKKPSFDEVDKDKFIARQLVETRQIIKHVRDLLDERFSKSDIHLVKAGIVSKFRRFSEIPKIRDYNNKHHAMDALFAAALIQSILGKYGKNFLAFDLSKKDRQKQWRSVKGSNKEFFLFKNFGNLRLQSPVTGEEVSGVEYMKHVYFELPWQTTKMTQTGDGMFYKESIFSPKVKQAKYVSPKTEKFVHDEVKNHSICLVEFTFMKKEKEVQETKFIDLKVIEHHQFLKEPESQLAKFLAEKETNSPIIHARIIRTIPKYQKIWIEHFPYYFISTRELHNARQFEISYELMEKVKQLSERSSVEELKIVFGLLIDQMNDNYPIYTKSSIQDRVQKFVDTQLYDFKSFEIGFEELKKAVAANAQRSDTFGSRISKKPKPEEVAIGYESITGLKYRKPRSVVGTKR

SEQ ID NO: 386 - protein, 1197 aa, Porphyromonas sp.
  REGION 1..1197: note = Porphyromonas sp. oral taxon 279 str. F0450
MLMSKHVLGLDLGVGSIGWCLIALDAQGDPAEILGMGSRVVPLNNATKAIEAFNAGAAFTASQERTARRTMRRGFARYQLRRYRLRRELEKVGMLPDAALIQLPLLELWELRERAATAGRRLTLPELGRVLCHINQKRGYRHVKSDAAAIVGDEGEKKKDSNSAYLAGIRANDEKLQAEHKTVGQYFAEQLRQNQSESPTGGISYRIKDQIFSRQCYIDEYDQIMAVQRVHYPDILTDEFIRMLRDEVIFMQRPLKSCKHLVSLCEFEKQERVMRVQQDDGKGGWQLVERRVKFGPKVAPKSSPLFQLCCIYEAVNNIRLTRPNGSPCDITPEERAKIVAHLQSSASLSFAALKKLLKEKALIADQLTSKSGLKGNSTRVALASALQPYPQYHHLLDMELETRMMTVQLTDEETGEVTEREVAVVTDSYVRKPLYRLWHILYSIEEREAMRRALITQLGMKEEDLDGGLLDQLYRLDFVKPGYGNKSAKFICKLLPQLQQGLGYSEACAAVGYRHSNSPTSEEITERTLLEKIPLLQRNELRQPLVEKILNQMINLVNALKAEYGIDEVRVELARELKMSREERERMARNNKDREERNKGVAAKIRECGLYPTKPRIQKYMLWKEAGRQCLYCGRSIEEEQCLREGGMEVEHIIPKSVLYDDSYGNKTCACRRCNKEKGNRTALEYIRAKGREAEYMKRINDLLKEKKISYSKHQRLRWLKEDIPSDFLERQLRLTQYISRQAMAILQQGIRRVSASEGGVTARLRSLWGYGKILHTLNLDRYDSMGETERVSREGEATEELHITNWSKRMDHRHHAIDALVVACTRQSYIQRLNRLSSEFGREDKKKEDQEAQEQQATETGRLSNLERWLTQRPHFSVRTVSDKVAEILISYRPGQRVVTRGRNIYRKKMADGREVSCVQRGVLVPRGELMEASFYGKILSQGRVRIVKRYPLHDLKGEVVDPHLRELITTYNQELKSREKGAPIPPLCLDKDKKQEVRSVRCYAKTLSLDKAIPMCFDEKGEPTAFVKSASNHHLALYRTPKGKLVESIVTFWDAVDRARYGIPLVITHPREVMEQVLQRGDIPEQVLSLLPPSDWVFVDSLQQDEMVVIGLSDEELQRALEAQNYRKISEHLYRVQKMSSSYYVFRYHLETSVADDKNTSGRIPKFHRVQSLKAYEERNIRKVRVDLLGRISLL

SEQ ID NO: 387 - protein, 1485 aa, Prevotella bivia
  REGION 1..1485: note = Prevotella bivia JCVIHMP010
MKNILGLDLGTNSIGWAKISIDDNGKYIKDSIKLGSRIIPMSQDVLSNFSKGVTLSQTSERTSFRGARRLRERTLLRRERLHRILHLLGFLPKHYEKAIGWDRNDNKTYGKFINHAEPKLAWCKDNNGKMRFLFMDSFHDMLSEFSEKHPELLANGKKIPLDWTIYYLRKKALYKAITKEELAWILLNFNQKRGYYQLRGEEDRDSEANKKEYLELKVIGVEATGEKKGNDIWYNIHLENGWIYRRSSKNPLNDWLGKVKSFIVTTDLDADGNPKKDKDGNIKRSFRAPSEGDWTLIKKRTESLLENSGQTVGQFIYNHILEEPSAKIRGNFIRTIERKYYKDELKAILEKQKEFHHELSSESLLTECAKELYKRNIAHQEVLLKKGIIHLLLNDILFYQRPLKIKKSLIDNCPYENYKYVDKKSGDIKVKSIKCIAKSNPFFQEFRLWQFVSNLRLYRKSDDKDVTSEHLVTTDDYANLFTYLNNRKDIKQSVLLKEYFKIKKVKTINGAEYPVRWNYIDDDNKTYPCNETRYDILHALSKTELKSEWLTPERTYRLWHLLYSIESKEETKKALNKLNLSDDFTEAFLTIKPFKKEYGSYSEKAIKKLLSLMRMGYLWSEDEAIKQVGAEIEKTIEGELPDYVLQRLEKSQHNYNKISDFSGLPLWLASYIIYGRHSEAKEIIHWDNPESMMAYIKDFRQHSMRNPIVEQCVLETLRTVHDIWKEIGHIDEIHIELGREMKSTSEQRKAITQNVLHNQNTNIRIKLLLQELKNDNNITGVRPYSPMQQEILRIYEEGALQGLTKEDKDYNDILKISQTAQPTSNELTRYKLWLEQKYRSPYTGKAISLSKLFTSAYQIEHVIPQSRYFDDSLSNKVICESEVNTLKKAMLGMEFIKTCGGQKVHCTLLGDVEIYNEEDYKAFVNEHYSNNRTKRNKLLMEDIPQEFINRQLNDSRYISKMVKQLLSAIVRGQEEVEATSKFVIPCTGGITDRLKKDWGLNDIWNNLVSPRFQRMNALTGSEYFGHWENKEGKRVFQTTMPIQLQQGFSKKRIDHRHHAMDALVIACASRNIISYLNNETAQDTERRRDLRQKLCDKGGSVRKPWDSFTQDTQYALKDIIVTFKNYVRIINKATNYYEHYKTDGKKGMISQKGDELWAIRKPMHKETVFGKVNLRRPKRVSLSKAIDSVDIICNRKLKKYIKARLNEGLQKKQILNIFKELNNVWEGIDVNKIDIWEMSNDKEPMVATRKQLDTSFDEKKIRSISDTGIQKILLNYLITKNNNPELAFTPEGIQEMNSNISEYNDHKKHQPIYKVRVTEPLGAKYPIGTMGNNPKKFVEAQAGTNLYFAIYEDKEGKRNYDTIPLNIAAERLNQQLSPVPETNENNTPLKFYLSPNDLVYVPSEEERHSGNNIQLDKNRIYKMVSSTSKRCFFIHHRVAISLVDKKEFSAQNKMERSIDNEQVMIKSVCWKLITDRLGNIIKVIK

SEQ ID NO: 388 - protein, 1457 aa, Prevotella buccae
  REGION 1..1457: note = Prevotella buccae ATCC 33574
MKTILGLDLGTNSIGWAKVSVDDYGNYLHDIKLGSRIIPMSQDVLGNFDSGVTVSQTAQRTEFRSKRRLVQRNLQRRERLHRVLHVLDFLPAHYDAAIGWDRTEAVTYGKFLNHAEPKLAWEELGNGKRRFLFMDSFHEMVADFARCQPALVADGKKIPLDWTIYYLRKKALTQAITKEELAWILLNFNQKRGYYQLRGEEEEENPTKQEEYYELKVVSVEATDSRKGNDTWYNVHLENGWIYRRSSKISLDDWVGKVKQFIVTTEYEKDGATLKTDKEGYVKRSFRAPNENDWGLRKKRTETLLEMSGKTVGAFIYDHLLQEPADKIRGNFIRTIERHYYKAELEAILAEQCKYHIELRDKEMLEACARELYLNNLPHQRSLMKKDMTYLLLYDLIFYQRPLKSKKALIANCPYEYYEYVDKETGEIKRQNIKCIAKSNPYFQEFRLWQFVLNLRLFDRVEDKEVTANYLPTADDHARLFTYLNDRKEINQETLLKDYFKLKKVKIGNEKEYPIRWNYIEDKEKKYPCNETRYELLMALDRAGIEHKWLDDNNLEYRLWHLLYSVEVKSESETALRKLKNDDAFVNSFLKVKPFKKEYGAYSEKAIKRLLAVMRKGFLWNEQDICDETRKRIEIIIKGDVDEKVKERMGHAAYSFDRVSDFQGLPEWLACYVVYGRHSEAMDIQHWDSPERLMAYINNFKQYSLRNPIVEQCILETLRTVHDIWKETGQIDEIHVELGREMKSTSEERARRTQNVLRNENTNLRIKSLLIELKNDTDICNVHPYSPMQQEILRIYEEGALQELNREDEDFEEISKISQMSQPSGKELNRYKLWLEQKYRSPYTGKAISLAKLFTPAYQIEHVIPQSRYFDDSFTNKVICEAEVNTLKSNLLGYEFIKKHGGEIIHCTTLGDVRIFSESEYKAFVMDHYANNKSKKDKLLMEDIPQEFLSRQMNDSRYISKVVKTLLSNIVRMADESEATSKSVIVCTGGVTDRLKKDWGLNDVWNSIVYSRFERLNRLTGTEAFGHWENKDGKRVFQTSMPLELQRGFRKKRIDHRHHAMDALVIACASRNIVNYLNNESANNPKKREDLRRQLCDKNRVIRKPWETFTQDAYNALENVVVSFKNYVRVINKATNRYEHYDENGKKRFVQQKGSELWAIRKPMHKETYYGHVNLRRKELVTLQKALDDIPSICDKKLRDYISALVEKHFNKRQLLAHFKSTDYYWQKQYVNKVYVWTFSDDIKPLVATRKLLDTSFDAKRIGTITDTGIQKILRNYLEAKGGNATLAFTPEGIAEMNQNISKYNDGKPHQPILKVRITEPMGAKYRVGQTGNKMAKYVEAQSGTNLYFAIYEDSEGKRSYTTVPLDEVAERLKQRLSPVPEKDENDVPLKFYLSPNDLVYVPTEEELQLRECKLNKDRIYKMVSSTGNECHFIPYYVANVIYNKGGFNMQMHRPQS

SEQ ID NO: 389 - protein, 1218 aa, Prevotella buccalis
  REGION 1..1218: note = Prevotella buccalis ATCC 35310
MNKRILGLDTGTNSLGWAVVDWDEHAQSYELIKYGDVIFQEGVKIEKGIESSKAAERSGYKAIRKQYFRRRLRKIQVLKVLVKYHLCPYLSDDDLRQWHLQKQYPKSDELMLWQRTSDEEGKNPYYDRHRCLHEKLDLTVEADRYTLGRALYHLTQRRGFLSNRLDTSADNKEDGVVKSGISQLSTEMEEAGCEYLGDYFYKLYHEQGNKVRIRQRYTDRKKHYQHEFDAICEKQELSSELIEDLQRAIFFQLPLKSQRHGVGRCTFERGKPRCADSHPDYEEFRMLCFVNNIQVKGPHDLELRPLTYEEREKIEHLFFRKSKPNFDFEDIAKELAGKKNYAWIHDKEERAYKFNYRMTQGVPGCPTTAQLKSIFGDDWKTGIAETYTLIQKKNGSKSLQEMVDDVWNVLYSFSSVEKLKEFAHHKLQLDEENAEKFAKIKLSHSFAALSLKAIRKFLPFLRKGMYYTHASFFANIPTIVGKEIWNNEQSRKYIMENVGELVFNYQPKHRDVQGTIEMLIKDFLANNFELPAGATDKLYHPSMIETYPHALRNEFGILQLGSPRTNAIRNPMAMRSLHVLRRVVNQLLKESIIDENTEVHVEYARELNDANKRRAIADRQKEQDKQHKKYGDEIRKLYKEETGKDIEPTQTDVLKFQLWEEQNHYCLYTGEQIGITDFIGSNPKFDIEHTIPQSVGGDSTQMNLTLCDNRFNREVKKAKLPTELANHEEILTRIEPWKNKYEQLVKERDKQRTFAGMDKAVKDIRIQKRHKLQMEIDYWRGKYERFTMTEVPEGFSRRQGTGIGLISRYAGLYLKSLFHQADSRNKSNVYVVKGVATAEFRKMWGLQSEYEKKCRDNHSHHCMDAITIACIGKREYDLMAEYYHMEETFRQGRGSKPKFSKPWATFTEDVLNIYKNLLVVHDTPNNMPKHTKKYVQTSKGKVLAQGDTARGSLHLDTYYGAIERDGEIRYVVRRPLSSFTNPKELENIVDETVKRTIKEAIADKNFKQAIAEPIYMNEDKGILIKKVRCFANSVKQPINIRQHRDLSKKEYKQQYHVMNENNYLLAIYEGLVKNKVVREFEIVSYIEAAKYYKRSQDRNIFSSIVPTHSTKYGLPLKTKLLMGQQVLMFEENPDEIQVDNTKDLVKRLYKVVGIEKDGRIKFKHHQEARKEGLTIYSTPYKNNDDYVPIFRQSIKNINILVDGIDFNIDILGKVTLKE

SEQ ID NO: 390 - protein, 1422 aa, Prevotella denticola
  REGION 1..1422: note = Prevotella denticola CRIS 18C-A
MTQKVLGLDLGTNSIGSSVRNLDLSDDLKGQLEFFSSDIFRSSVNKESNGREYSLAAQRSAHSRSRGLNEARRRKLWATLDLLIKYGFCPMSPESLMRWRTYDKQRGLFREYPIDDKNFNAWILLDFDGDGKPDYSSPYQLRRELVIRQFDFDQPIERYKLGRALYHIAQHRGFKSSKGETLSQQETNSKQSLTDDTADVAGEMKASEEKLSKGLSTYMKENNLLTVGAAFAQLEDEGVRVRNNNDYRAIRSQFQREIETIFKFQQGLSVENELYERLVSEKKNIGTIFYKRPLRSQRGNVGKCTLERTKPRCAIGHPLFEKFRAWTLINNIKVRMSEEEQAEQLPMKLRFELYNDCFLAFVRAEFKFEDIRKYLEKRLGVHFSYNDKTINYKDSTSVAGCPITARFRKLLGEDWESFHVDGQKQRQAHGKNNASFHTVSYSTNDIWHFCYDAEEPEAVLSFAQDNLKWEKKKAEELVRIWSAIPQGYAMLSQKAIRNINKMLILGLKYSDAVLLAKVPEIVEITDGEILSVTEDYHRVEAQVGYEKQINNIVNALIAKYKSASEEYRFADHNYEYQLDKSDEKDIIKQIESNIGTRKWSLLDADEQTDILQKVRDKYQNFFRSHERKFVESPKLGECFEEYLMKKFPMVEGERWKKLYHPSQIAIYRPVPANKDRSALRLGNPDIGAIKNPTVLRVLNTLRKRVNQLLDDGIISPDETRVVVETARELNDANRKWALDTYNRIRHDENEKIKKILAEFYPKRDNISTVDIDKARYVIDQREMDYFTEAKTYHKDIKKYKLWLEQGGQCMYTGRTINLSNLFDPNSFDVEHTIPESISFDSSDMNLTLCDAHYNRFIKKNHIPADLPNYDKSVVIDGKEYSPIKPRLQRWADRVERLNRNVEYWRGQARRAQNKDRKDQCMREMHLWKMELEYWTKKLERFTITEVTDEFKNSQLVDTRVITRHAVLYLKSIFPHVDVQRGDVTAKFRKILGIQSVDEKKDRSLHSHHAIDATTLTIIPGAAKRERMLELFAKIEEVNKMLSFSGNEDRTGLKQELDGLKNQLNKEVKACRIGHNVSEIGTFINDNIIINHHVKNQALTPVRRRLRKRGHIVGGMDNPRWQTGDALRGEIHKASYYGAITQYAKDKEGKVLMKEGRPQINPTIKFVIRRELKYKKSSTDSGFASWDDLGKAIVDKELFALMKGQFPEGTSFKDACEQGIYMIKKGKNGEVDTKLYRIRHIRCKTKQKNALKIKEQAYKSEKEYKRYFYAAVGDLYAMCCYTNGKTREFKIYSLYDISCHRKVGVEDIPEFITDKKGNRLMLDYKLHTGDMILLYKENPEELYDLDNVSLSKLLYKINGFENDGLRIRMVNHLVAKEAMGESVKDYAKLPDIIRCGVKTIKFLVMGENRDFVIKNGKISFNHR

SEQ ID NO: 391 - protein, 1375 aa, Prevotella histicola
  REGION 1..1375: note = Prevotella histicola F0411
MKKILGLDLGTTSIGWALVYESENTDEKSSIVRLGVRVNPLSVDEKGNFEKGKAITTNADRQQTHGARINLQRYKLRRENLKDCLQKQGWIGTEALCEEGKTSTFETYMLRAKAAEEEISLHELCRVLFMMNKKRGYKSNRKANNKEDGKLFDGMTVAKKLYEEHLTPAEYSFQLLSSGKKFKQEYYRSDLKEEFDRIWNEQQKYYPEILTDDFKQQLQGKSKGNTSKIFLGKYGIYSADLKGLDRKLQPLKWRVEALKQQVDKEVLAFVISDLNGQIASTSGLLGAISDRSKELYFNKQTVGQYLWTSLKETPHVSIKNKPFYRQDYLDEFEKIWETQATYHKELTPELKQEIRDIIIFYQRPLKSKKGLISVCELEQRKVKVTIDGKEKEISIGPKVAPKSSPMFQEFRIWQNLNNILLIDKGNNSIHPLYEEEKNLLYEELSVKEKLSKAEALKVLNKNSKQWDLNYKEIEGNRTQAVLYDCYNRIIVMTGHEEYNFKKLKASEIRSYVKTTFTGLGFNTDILEFDSSLTGHELEKQPMYQLWHLLYSYESDNSRTGNDALLRKLETAFGFPKEYAAVLSDVVFEDSYGNLSVKAMRKILPHLQAGLNYSQACEEAGYKHSRRSLTKNELDQKEYKEKLELLPKNSLHNPVVEKILNQMINVINAVIDEYGKPDEIRIELARELKIGAAERENMTRSINQGNAENKRIREILEKEFALSYISRNDIIKYKLYEELKSNGFKTLYSDTYISKDKLFSKDFDIEHIIPKARLFDDSLSNKTIEARDVNIAKSNKTAFDFISEKYDQQGIEAYKKKLDILLQDGSISKAKYNRLLMKEADIPSGFIDRDLRDTQYIAKKAYEILSDLVRNVTPTTGAVTSRLREDWQLVDVMKELNFEKYQKLGLVEVIEDRDGRKIKRIKDWTKRNDHRHHAMDALTIAFTKPSYIQYLNNLNARSDKNSSIYGIENKELHREDNKLRFNAPLPINEFRAEARRHLKSILVSVKAKNKVMTQNVNVIKTKHGVIKKVQLTPRGELHNATFYGTKKRPIIKMVKVGAALDEVTIKKVSSSFIREALLDRLHEYNGDAKKAFTGRNSIDKNPIYIDEEHKKTVPALVKTIEWEMYHPTRKLISPDLKIDKVIDKGIREILKTRLAKFNGDAQKAFSNLDENPIYKDEAKKITLKRVSLEGVSSVIPLHTLKDREGKLVVGKDGKPVLGDYVQTSNNHHIAFYMDENGNLQDNVVSFFEAAERKSQGVPVIDKNYNHDKGWNFLFTMKQNEYFVFPNEVTGFNPSEVDLMDEANYSIISPNLYRVQKMSKASGRDYWFRHHLEAMLNDDPKLRNSMFKRITSLKALEGIVKVRINCIGKIVAVGEYD

SEQ ID NO: 392 - protein, 1380 aa, Prevotella intermedia
MKRILGLDLGTTSIGWALVNEAENNNEASSIVRLGVRVNPLTVDEKSNFEKGKAITTNADRQLRHGARINLQRYKLRRQNLHDCLQKQGWLGTEAMYEEGKASTFETYKLRAKAAEEEISLHEFARVLFMLNKKRGYKSNRKANNKEDGQLFDGMTIAKKLYEEHLTPAEYSLQLLNKGKKFTQGYYRSDLNAELERIWDEQKKYYPEILTDEFKQQLEGKTKTNTSKIFLAKYGIYSADLKGLDRKFQPLKWRVEALQQQVDKEVLAFVISDLKGQIANTSGLLGAISDRSKELYFNKQTVGQYLWASLEENPHISIKNKPFYRQDYLDEFEKIWETQAAFHKQLTPELKQEIRDIIIFYQRPLKSKKSLISVCELEQRKVKATIDGKEKEITIGPKVAPKSSPVFQEFRIWQNLNNVLLIDNDTNEKRPLDEVERNLLYKELSIKAKLSKTEALKILNKKGKQWDLNYRELEGNRTQAILFDCYNRIITLTGHEECDFKKIKASEIRHYVSTIFKNLGFSTEILDFDPSLKKHELEKQPMYQLWHLLYSYESDNSRTGNESLLRKLETTFGFPEEYATVLCDVVFEEDYGNLSVKAMREILPYLQAGNDYSQACAYAGYNHSRHSLTKEELDQKVYKERLELLPKNSLRNPVVEKILNQMINVINAIIDEYGKPDEIRIEMARELKSSAADRKKTTHAISQGNAENQRIREILEKEFSLSYISRNDIIKYKLYEELEPNYYKTLYSDTYITKDKLFSKDFDIEHIIPKARLFDDSFSNKTLEARNINLEKSNKTAFDFIKEKYGEDGAEAYKKKLDMLLENDAISRPKYNNLLRAEADIPSDFINRDLRNTQYIAKKACEILGELVKTVTPTTGKITNRLREDWQLVDVMKELNFEKYEKLGLTEIVEDRDGRKIKRIKDWTKRNDHRHHAMDALAIAFTKPSFIQYLNNLNARSNKGDSIYAIENKELHYEEGKLRFNAPIPVNEFRAEAKRHLSAILVSIKAKNKVMTQNVNKIKTKHGIIKKIQLTPRGPLHNETIYGTKMRPIIKMVKVGAALDEATINKVSSPAIREALLKRLNEYSGNAKKAFTGKNTLEKNPIYLNAGRTKTVPSLVKTVEWESFHPTRKLIDKDLNVDKVVDKGIREILKARLEEFNGDAKKAFSNLEENPIYLDEAKKIALKRVSIEGVLSAIPLHTLKNQAGKPITGKDGKPVLGNYVQTSNNHHIAFYYDEDGNLQDNAVSFFEAAERKSQGIPVIDKDYNRDKGWRFLFTMKQNEYFVFPNEATGFIPSEVDLTDEANYGIISPNLYRVQKVSRIDKGTSASRDYWFRHHLETILNDDAKLKNLAFKRIRGLLELKDIIKVRINSTGKIVAVGEYD

SEQ ID NO: 393 - protein, 1425 aa, Prevotella micans
  REGION 1..1425: note = Prevotella micans F0438
MIQKIFGLDLGTNSIGSSVRNLELGENLTEQLEFFSSDIFGSSVSKNSNGREYSLAGNRSAHRRSRGLNEARRRKLWATLDLLIEHGLCPMSPDSLMQWRTYDKQKGLYRQYPIEDKDFNAWIMLDFNGDGKPDYSSPYQLRRELVVRQFDFDQPIERYKLGRALYHIAQHRGFKSSKGETIADQEKNEKKPIAEEGADIANEMKASETKLSKGLVAYMQENHLKTVGEAFAKLEDERVRIRNNESYRAIRSQYQDEIKEIFTYQKKLSVESELYERLTSEKKGVGTIFYKRPLRSQRGNVGKCTLERNKPRCPIGRPEFEEFRAWTLINNIKIRETAGEPYKQLPIKLRQELLKDCFLSKVKADFKFEDIRKYIEKRLGLSFSNDDKTINYKDSVSIAACPVTVRMKKLLGENWANCRIDGEKRRQAHGKNNNNEHIVSYTEEDIWHVCYNAEDPEEVSNFARKALHWDENKIKELVRLWTSIPQGYAMLSLKAIRNINRMLLLGLKYSDAVLLAKLPDIVPVSDEDILAITKEFLQLEDKLNQEKQINNIVNSLIANYKSKLEENRFADHNYQYQLGEGDDEDINTQIKSHIGAKLWVQIGADEQTKIFQAVRSKYQDFFKSYKRKFVESPKLGELLVAFLTEKFPNVKSKQWERLYHPSQIAIYRPIPVDNDRSKLRLGNPNIGAIKNPTVMRVLNTLRRRVNQLLDDGVISPDETRVVVETARELNDANTKWALDRYNRIRRDENEKIRKILKELNPTTNSISEQDIDKARYIFEQCETDFYTDGKVPYYNKDIKKYKLWLEQGGQCLYTGQTINLTNLFNPNAFDMEHTIPKSISFDNSDQNLTLCESYYNRFIKKNNIPTDMPNYDKDVTINGKEYTAIKPRLQRWKERVDRLSRNVDFWKGQARRAQDKDRKDECIREKHLWDMELAYWKGKLERFTMTDVTDGFKNSQLVDTRVITRHAVLYLKSIFNHVEVQRGETTAEFRKILGLQSIDEKKDRSLHSHHAIDATMLTVIPSAAKRDRMLELFYKIEETKKALKNYNDNNKTGLNLELKGLEEKLDKEKKDCRVGRRVNDLDRFINENIIVSHHTKDQALTPAHRRLRKRGKIVGGKEHPRWQTGDSLRGEIHKASYYGAITQFAKDANGKVLMKDGQAQIDPTIYYVIRRELKYKRSTQDSGFTNWEDLEKVIVDTDLFGLMKGQFPEGTSFKDACEQGFYMIKKGKNGEGDVKTHRIRHVRCKAVKTALRIKEQTYKSSKDYKQFFYAAVGDLYVMCYYTDGKKRDFKIYSLYDISNHRKSGTEDIPKFITDKKGNHLPLDYKLRTGDMVLLYKDNPEELKDLDQVNLKRRLYKVNRFESEGLIILLTHHLSTTTERGCSIGKIENYQNLPTAIRCGIKTIKFLIMGKHRDFVIRNGNIEFKH

SEQ ID NO: 394 - protein, 1506 aa, Prevotella nigrescens
  REGION 1..1506: note = Prevotella nigrescens ATCC 33563
MKTILGLDLGPNSIGWAKVEVDDEGNYLRNIKLGSRIIPMTQDMLGDFDKGVKVSQTAIRTDFRGNRRLIERHLLRRERLHRVLHALKFLPKHYEDAIGWDRNEPATYGKFVNNSEPKLAWERQEDGSMRFLFMESFNEMVADFAQNQPSLVSDGKKIPLDWTIYYLRKKALTRPIKKEELAWILLNFNQKRGYYQLRGEEEEDNLTKRKEYYKLKVVGVEADGAPKGGKTWYNIHLENGWTARCQSKIPLDDWVGKVKEYIVTTEYEDDGKTPKCDKEGKVKRSFKSPEKDDWQLIKTRTEKFIDDSNKTVGAFIYDYLLEKPFDKIRGKYIRTIERKYYKNELREILREQTKYHEGLHSLEALKICAEELYKNNQQHQEYLLKKDMTFLLLNDLIFYQRPLKSKKSLIADCPYEVYKYDDKLTGKKGQKKIKCIAKSNPYYQEFRLWQFIANLRLFSVTDGKEVTAEYLKTEEDYVRLFSFLNDRKDIKQETFLRSFLKLKKESIGSEKIYPIRWNYIEDANKSYPCNATRHELLLAFDRADIPRELLDVEEREYRLWHLLYSIEAKEETESALRKLKANKAFGDLNIDDAFVNSFLKIKPFEKEYGAYSEKAIKKLLAVMRRGSLWKEADICEATKQNIAKILQNDIDEKLKKKIEAAVSSFNKLSDFQGLPTWLACYVVYGRHSEAAQIQCWQSPEDLKTYINKFKQHSLRNPIVEQCLLETLRTVYDIWKDAGQIDEIHIELGRNMKSTAEQRARKTKDILRNENTNLRIKNLLVELKNDDKIENVRPYSPSQQEILRIYEEGALQELSKEDEMFEDISKISKMAQPSPTELSRYKLWLEQKYRSPYTGRVIPLSKLFTTAYQIEHIIPQSRYFDDSFNNKVICESEVNSLKDNMLGYEFIKECGGRIVHCTLLGDVKIFTKEEYKDFVTKHYIDNTYKRDKLLLEDIPQEFSARQLNDSRYISKMVQTVLSNIVRAENEQEATSKFVVSCNGAITNRLKKDWGLNDVWSSIVCPRFKRLNEITKTNAFGHWEDKAGKHVFQTTVPLELQRGFSKKRIDHRHHAMDALVIACASRNIVNYLNNESANSPEKREDLRKKLCDEKRKIRKPWKTFTQDAREALSDVVVSFKNYVRVINKATNYYEHYSSSGNKVMISQKGNDMWAIRKPLHKESVFGRVNLCRKVIVSLKKALENIPAICDKTLRDYINALVEKHFNTRQLLAHFKSINYRLNRQCVEKVEVWQFSDEKIEMVARRKSLDTSFDDKQISSITDTGIQKILLNYLQTKDGNAEIAFTPEGIEEMNKNISLYNDGKAHQPILKVRVATPKGMKYPVGQTGNKATKFVVAEKGTNLYFAIYENELGVRSYDTIPLNIVVERLKEGLSPVPQANEADIPLKFYLSPNDLVYVPTKENEDELCRDRIYKFVDSSGTTANFVPHTSANTIYNVDKEYAEKCCNGAVFLNEYGLGSPQSKNQRALTGEMIKEICWKLKVDRLGNIIKVIK

SEQ ID NO: 395 - protein, 1380 aa, Prevotella nigrescens
  REGION 1..1380: note = Prevotella nigrescens F0103
MKRILGLDLGTTSIGWALVNEAESNNEASSIVRLGVRVNPLTVDEKSNFEKGKAITTNADRQLRHGARINLQRYKLRRQNLHDCLQKQGWLGTEAMYEEGKASTFETYKLRAKAAEEEISLHEFARVLFMLNKKRGYKSNRKANNKEDGQLFDGMTIAKKLYEEHLTPAEYSLQLLNKGKKFTQGYYRSDLNAELERIWDEQKKYYPEILTDEFKQQLEGKTKTNTSKIFLAKYGIYSADLKGLDRKLQPLKWRVEALKQQVDKEVLAFVISDLKGQIANTSGLLGAISDRSKELYFNKQTVGQYLWASLEENPHISIKNKPFYRQDYLDEFEKIWETQATFHKQLTPELKQEIRDIIIFYQRPLKSKKSLISVCELEQRKVKATIDGKEKEITIGPKVAPKSSPVFQEFRIWQNLNNVLLIDNDTNEKRPLDEDERYLLYKELSIKAKLSKTEALKILNKKGKQWDLNYKELEGNRTQAILFDCYNRIITLTGHEECDFKKIKASEIRHYVSTIFKNLGFSTEILDFDPSLEKHELEKQPMYQLWHLLYSYESDNSRTGNESLLRKLETTFGFPEEYATVLCDVVFEEDYGNLSVKAMRKILPYLQAGNDYSQACAYAGYNHSRHSLTKEELDQKVYKERLELLPKNSLRNPVVEKILNQMINVINAIIDEYGKPDEIRIEMARELKSSAADRKKTTHAINQGNDENQCIREILEKEFALSYISRNDIIKYKLYEELKPNGFKTLYSDTYIPKDKLFSKDFDIEHIIPKARLFDDSYSNKTLEARDINLAKSNKTAFDFVKEKYGEQGAEAYKKKLDMLLGNNVISKPKYNKLLMTEADIPSDFINRDLRNTQYIARKACEILGELVRTVTPTTGKITNRLREDWQLVDVMKELNFEKYEKLGLTEIVEDRDGRKIKRIKDWTKRNDHRHHAMDALAIAFTKPSYIQYLNNLNARSNKGDSIYAIENKELHYEEGKLRFNAPIPVNVFRAEAKRHLSAILVSIKAKNKVMTQNVNKIKTKHGIIKKIQLTPRGPLHNETIYGTKMRPIIKKVKVGAALDEATINKVSSPAIREVLLKRLNEYSGNAKKAFTGKNTLDKNPIYLNAERTKTVPASVKTVEWENYHPIRKPITPDLKVDKVIDKGIGEILKARLEEFNGDAKKAFSNLEENPIYLDQTKKIALKRVSIEGVLSTIPLHTLKNQAGKPIMGKDGKPVLGNYVQTSNNHHIAFYYDEDGNLQDNAVSFFEAAERKSQGISVIDKDYNRDKGWRFLFTMKQNEYFVFPNEATGFIPSEVDLTDEANYGIISPNLYRVQKMSRIEKGTSVSRDYWFRHHLETILNDDSRLKNSAFKRINSLKPLEGIIKVRINSIGKIVAVGEYD

SEQ ID NO: 396 - protein, 1391 aa, Prevotella oralis
  REGION 1..1391: note = Prevotella oralis ATCC 33269
MKKILGLDLGTTSIGWALVNEKENNEELSSIIRLGVRVNPLTVDEKSNFEKGKDITTNADRTKCRSARRNLQRFKLRREALADCLKRHGLMTDETPLCETNNSIIFKTYSNRAKAVCEKIALDDFVRVLFMINKKRGYKSSRKLNTDDEGTLVDGMDVAKLLYNEQITPGEYLLRLFKKGKKTRPDFYLSDLKAELERIWDFQRTFYPEILCNALKEDLKGKSRTQSSAIFYAKYKVSTAKIAGKDKRLQELTWRTDALRKQLTIDEVAYVICSINGEVNGSSQRLSMISDRSKLLYFNHQTIGQYLMQRLEENPNAGLKNIIFYRQDYEDEFNDIWNSQATYHKELTPELKKEVKDIIFYQRGLKSCKWLINYCELEHEEIEVKTPEGKLRKITIGSKTCPKSSPLFQEFKIWQVLNNLQVSPLNSRRKAKRKKDEEPSLFSDEDMNTACRYLNEEEKLTLFKELSIKKELKKKDALKLLFENYKELDLNYKVISGNVTMANLYRAFQDIISLTGNGEFDFQAMPAEEAEKTVEEIFGGLGYKTAFLHFDASLHDKEFERQPAYRLWHLLYSYAGDQSKTGIEALVKRIQELCGFEPEYARILANISFIPDYGNLSSKAMRKILPYMQDGYEYSEACSKAGYRHSASSLTKEEINKKNYKTHLDEIKRNSLRNPIVEKILNQMVNVVNSVIDTYSNIDEIRIEMARELKKSKPEREDMSFAISKATKETERIKGILEQEFKIQHVTRNDIIRYRLYEELKPNGYKTLYSNTYIPREDLFSKKFDIEHIIPKARLFDDSYSNKTLELRDINIEKGNQTAYDFVLSKYGEEGLYKYEQRVEEFKKNNEQAGTKCRKLLMREADIPSDFLNRDLNDSQYIAKKAHELLREIVPTVTATTGSITNRLREDWKLVNVMKELNWEKYDKLGLTEEYKDKDGNTVRHIKDWTKRNDHRHHAMDALTIAFTKPSFIQYLNNLNARSNRGGSIYGIEQKELERENNKLVFIPPIDPKIFRKQAKEHLSNILISIKAKNKVVTKNVNKTKSKSGTNRKVQLTPRGQLHLETVYGKIRTYKTEEIKVGTKLTEELIAKVADKKIREALMQRLSEYGGNIKKAFQNISKHPIWLNGSHTKHVPEKVKIVFFEDVFTIRKAITPDIKIDKVIDSKIRRILQERLNEFGGEASKAFSNLDENPIWFNRDKGIAIKSVKIRGIAKGTAIRVKKDIHGKTIIGNNGYPVANDYVNTGNNHHVAIFRDKDGNLQEHIVSFYEATARAIQNLPIVDRNYNSEKDWKFLFSMKQNEYFVFPNPNTGFNPSEISLKDEKNYALISPNLFRVQKLSHYYYVFRHHLETNVDTNLQLKDITWKRITAVNNLTGAVKVRIDHLGRIVDVGEYK

SEQ ID NO: 397 - protein, 1204 aa, Prevotella ruminicola
MERILGIDTGTNSLGWAIVDKDENQYHLVAKGTNIFSEGVKIEKGIESSKAAERTEHRSVRKHYWRRKIRKIRLLTILSDNDLCPRLKHEQLRQWRLKKVYPTDDTFMEWQRTEDKAQVNPYKFRYICLTQKLDLSDITQRFILGRALYHLNQRRGFLSNRKEATKESEGTVKEGISSLSKDMKDSGCEYLGEYFYQLYQQGKKIRNHYTARKEHYLKEFKAICSKQELDDALIEKLEKAIFDQRPLKSQKGQVGTCTFEKGKSRCPSSHPLYEDFRMYSFINNIKVQVDTLYDKGERSLTDEEKQLIIPLFKRKSKRTFPFEDIAKKIAGKNNYCYIKSNEEKAYKFNYQMDTQVSGSPVNAQLEEIFGEDWLSSVCEVYTLANNKSRFQIMNDVWHVLFFYDDEDKLKEFAKDRLQLDDELAEKFSKISIPNDYAALSLKAIRKIMPYLRDYGLIYSEAVFLANLVDVLPQHVWGIKEMREAAIENVIDVMHSYDKNNIDGITLEGCVKTFLKERYQVSDDNLKKLYHPSMLDPYPRQRPNDEGVFQLGSPRISSVKNPMAMHSLFRLRKVVNLMLKKGYITPDTKVHIEFSRDLNDANKRWAIQTWQRENEKERERCRKEIEKYIASPSDTDILKYQLWEEQNHKCLYTGDEIRITDFLGDNPKYDIEHTIPRSAGGDSTKMNLTLCSSRFNRDEKKTKLPAELVNHDEILERISNWKEKYEDIDKQIRKISTKGATSKEDKDSKIRRRHYLILQRDYWRGKYQRFTMTEVPEGFSRRQGTDISVISRYARMYLKSVFKQVYIVKGIATSDFRKMWGIQDEYAKKERVNHVHHCIDAITIACIGKAEYDKLADYRHQYDDYLFQGKTKPTFDKPWPSFVIDIKHIQDELLIAHYAKDNLEKFTKKNLRGKDGRIIRDKFGNKLQMKGDTSRNSLHNDKFYGAINHEGEIKYVYRTNIEALDAKSIGNIVDPTVRSIIESAIAIHGSLKAAINKGIWMNEEKHIPIKKVRVFRNDVKKPIELKDQRDLSDKDYKQHYYVTNDGNYMMLIFSKLNNKGREIRQHVVINSLEATEVIKSHKRSQVGKVVWESYYSKEGFDLIYKLKSGTMILLYENNRDEVWDLDIRNLQKRLYIITKMKYDGRIYMMHHQEAREKKDLEEKSGSFKINEDYRPLIVNSYNQFNALVQDLDFEINDLGEIRRLI

SEQ ID NO: 398 - protein, 1424 aa, Prevotella sp.
  REGION 1..1424: note = Prevotella sp. C561
MTQKVLGLDLGTNSIGSAVRNLDLSDDLQWQLEFFSSDIFRSSVNKESNGREYSLAAQRSAHRRSRGLNEVRRRRLWATLNLLIKHGFCPMSSESLMRWCTYDKRKGLFREYPIDDKDFNAWILLDFNGDGRPDYSSPYQLRRELVTRQFDFEQPIERYKLGRALYHIAQHRGFKSSKGETLSQQETNSKPSSTDEIPDVAGAMKASEEKLSKGLSTYMKEHNLLTVGAAFAQLEDEGVRVRNNNDYRAIRSQFQHEIETIFKFQQGLSVESELYERLISEKKNVGTIFYKRPLRSQRGNVGKCTLERSKPRCAIGHPLFEKFRAWTLINNIKVRMSVDTLDEQLPMKLRLDLYNECFLAFVRTEFKFEDIRKYLEKRLGIHFSYNDKTINYKDSTSVAGCPITARFRKMLGEEWESFRVEGQKERQAHSKNNISFHRVSYSIEDIWHFCYDAEEPEAVLAFAQETLRLERKKAEELVRIWSAMPQGYAMLSQKAIRNINKILMLGLKYSDAVILAKVPELVDVSDEELLSIAKDYYLVEAQVNYDKRINSIVNGLIAKYKSVSEEYRFADHNYEYLLDESDEKDIIRQIENSLGARRWSLMDANEQTDILQKVRDRYQDFFRSHERKFVESPKLGESFENYLTKKFPMVEREQWKKLYHPSQITIYRPVSVGKDRSVLRLGNPDIGAIKNPTVLRVLNTLRRRVNQLLDDGVISPDETRVVVETARELNDANRKWALDTYNRIRHDENEKIKKILEEFYPKRDGISTDDIDKARYVIDQREVDYFTGSKTYNKDIKKYKFWLEQGGQCMYTGRTINLSNLFDPNAFDIEHTIPESLSFDSSDMNLTLCDAHYNRFIKKNHIPTDMPNYDKAITIDGKEYPAITSQLQRWVERVERLNRNVEYWKGQARRAQNKDRKDQCMREMHLWKMELEYWKKKLERFTVTEVTDGFKNSQLVDTRVITRHAVLYLKSIFPHVDVQRGDVTAKFRKILGIQSVDEKKDRSLHSHHAIDATTLTIIPVSAKRDRMLELFAKIEEINKMLSFSGSEDRTGLIQELEGLKNKLQMEVKVCRIGHNVSEIGTFINDNIIVNHHIKNQALTPVRRRLRKKGYIVGGVDNPRWQTGDALRGEIHKASYYGAITQFAKDDEGKVLMKEGRPQVNPTIKFVIRRELKYKKSAADSGFASWDDLGKAIVDKELFALMKGQFPAETSFKDACEQGIYMIKKGKNGMPDIKLHHIRHVRCEAPQSGLKIKEQTYKSEKEYKRYFYAAVGDLYAMCCYTNGKIREFRIYSLYDVSCHRKSDIEDIPEFITDKKGNRLMLDYKLRTGDMILLYKDNPAELYDLDNVNLSRRLYKINRFESQSNLVLMTHHLSTSKERGRSLGKTVDYQNLPESIRSSVKSLNFLIMGENRDFVIKNGKIIFNHR

SEQ ID NO: 399 - protein, 1483 aa, Prevotella sp.
  REGION 1..1483: note = Prevotella sp. MSX73
MKTILGLDLGTNSIGWAKVSVDDYGNYLHDIKLGSRIIPMSQDVLGNFDSGVTVSQTAQRTEFRSKRRLVQRNLQRRERLHRVLHVLDFLPAHYDAAIGWDRTEAVTYGKFLNHAEPKLAWEELGNGKRRFLFMDSFHEMVADFARCQPALVADGKKIPLDWTIYYLRKKALTQAITKEELAWILLNFNQKRGYYQLRGEEEEENPTKQEEYYELKVVSVEATDSRKGNDTWYNVHLENGWIYRRSSKISLDDWVGKVKQFIVTTEYEKDGTTLKTDKEGNVKRSFRAPNENDWGLRKKRTETLLEMSGKTVGAFIYDHLLQEPADKIRGNFIRTIERHYYKAELEAILAEQCKYHIELRDKEMLEACARELYLNNLPHQRSLMKKDMTYLLLYDLIFYQRPLKSKKALIANCPYEYYEYVDKETGEIKRQNIKCIAKSNPYFQEFRLWQFVLNLRLFDRVEDKEVTANYLPTADDHARLFTYLNDRKEINQETLLKDYFKLKKVKIGNEKEYPIRWNYIEDKEKKYPCNETRYELLMALDRAGIEHKWLDDNNLEYRLWHLLYSVEVKSESETALRKLKNDDAFVNSFLKVKPFKKEYGAYSEKAIKRLLAVMRKGFLWNEQDICDETRKRIEIIIKGDVDEKVKERMGHAAYSFDRVSDFQGLPEWLACYVVYGRHSEAMDIQRWDSPERLMAYINNFKQYSLRNPIVEQCILETLRTVHDIWKETGQIDEIHVELGREMKSTSEERARRTQNVLRNENTNLRIKSLLIELKNDTDICNVHPYSPMQQEILRIYEEGALQELNREDEDFEEISKISQMSQPSGKELNRYKLWLEQKYRSPYTGKAISLAKLFTPAYQIEHVIPQSRYFDDSFTNKVICEAEVNTLKSNLLGYEFIKKHGGEIIHCTTLGDVRIFSESEYKAFVMDHYANNKSKKDKLLMEDIPQEFLSRQMNDSRYISKVVKTLLSNIVRMADESEATSKSVIVCTGGVTDRLKKDWGLNDVWNSIVYSRFERLNRLTGTEAFGHWENKDGKRVFQTSMPLELQRGFRKKRIDHRHHAMDALVIACASRNIVNYLNNESANNPKKREDLRRQLCDKNRVIRKPWETFTQDAYNALENVVVSFKNYVRVINKATNRYEHYDENGKKRFVQQKGSELWAIRKPMHKETYYGHVNLRRKELVTLQKALDDIPSICDKKLRDYISALVEKHFNKRQLLAHFKSTDYYWQKQYVNKVYVWTFSDDIKPLVATRKLLDTSFDAKRIGTITDTGIQKILRNYLEAKGGNATLAFTPEGIVEMNQNISKYNDGKPHQPILKVRITEPMGAKYRVGQTENKMAKYVEAQSGTNLYFAIYEDSEGKRSYTTVPLDEVAERLKQRLSPVPEKDENDVPLKFYLSPNDLVYVPTEEELQLRECKLNKDRIYKMVSSTGSECHFIPYYVANVIYNKVEFEAKNKIGRALTGEMIKAVCWKLEIDRLGNILKVIK

SEQ ID NO: 400 - protein, 1375 aa, Prevotella sp.
  REGION 1..1375: note = Prevotella sp. oral taxon 306 str. F0472
MKKILGLDLGTTSIGWALVNESENKDEQSSIVRLGVRVIPLTVDEKGNFEKGKAITTNADRQQVHAARINLQRYKLRRENLRDCLQKQGWIGSEPMCEDGKSSTFETYKLRAKAAVEEVSLHEFARVLFMLNKKRGYKSNRKANDKEEGKLFDGMTIAKKLYEEHLTPAEYSLQLLNTGRKFTPEYYRSDLIEEFEKIWNEQQKYYPEILTDEFKQQLEGKAKSNTSKLFLGKYGIYSADTKGLDRRLQPLKWRVEAMKQQVDKDVLAFVISDLKGQIANTSGLLGAISDRSKELYFSKQTIGQYLWASLQENPHISIKNQPFYRQDYLDEFEKIWETQATYHKELTSELKQEIRDIIIFYQRPLKSKKNLIAVCELEQRKVKVTVDGKEKEITIGPKIAPKSSPMFQEFRIWQNLNNILLLDHETNSKRPLYEEERNLLYEELSVKEKLSKTEALKVLGKKSKQWDLNYKELEGNRTQAVLYDCYNRIIVMSGHEECNFKKLKASDIRHYVKMIFKNLAFNTDILCFDSSLKGHELERQPMCQLWHLLYSYEGDNSRTGNDALLRKLETSFGFPKEYAAVLADVIFEDSYGNLSVKAMRNILPHLQAGKDYSQACEEAGYKHSRRSLTKEELNQKVYKEKLELLPKNSLHNPVVEKILNQMVNVINAVIEEYGKPDEIRIELARDLKIGAAERENMTRSINQGNAENKRIREILEKEFALSYLSRNDIIKYKLYEELKSNGFKTLYSDTYISKDKLFSKDFDIEHIIPKARLFDDSLSNKTIEARDVNIAKSNKTAFDFILERYGEQGVKTYKTKLLRLLEDGAISNKKYNNLLKTEADIPSGFIDRDLRNTQYIAKKAYEILSELVKIVTPTTGSVTNRLREDWQLVDVMKELNFEKYQKLGLADVIEDRDGRKVKRIKDWTKRNDHRHHAMDALTIAFTKPSYIQYLNNLNARSDKSSSIYGIEVKELHREEGKFRFNAPLPINEFRAEAKRHLKSVLVSIKAKKKVMTQNVNKIKTKHGIIKKVQLTPRGELHNATYYGTKKRPLVRMVKVGAALDEATIKRVCSPAIRAALLKRLNAYNGDAKEAFTGRNSIDKNPIYLDIEQTKLVPVLVKTIEWGMYHPIRKRITPDLKIDKVIDKGIREKLKARLAEFNGDAQKAFSNLDENPIYMDEAKRITLKRVSIEGVLSAIPLHTLKDKAGKPVIGSDGKPVFGDYVQTSNNHHIAFYIDDKGNLQDNPVSFFEAAERKSQGVPVIDRRYNCDKGWHFVFTMKQNEYFVFPNEATGFIPSEVDLLDEANYCIISPNLYRVQKLSKASGRDYWFRHHLETMLNDDLRLKNSTFKRIQSLKGLEDIVKVRINSIGKIVAVGKYD

SEQ ID NO: 401 - protein, 1216 aa, Prevotella stercorea
  REGION 1..1216: note = Prevotella stercorea DSM 18206
MTKILGIDTGTNSLGWAIVDKTADNYNLLDKGVNIFQEGVKIEKGIESSKAAERTEHRATRVRYYRIKLRKIRLLRILSDNHLCPPLSQEELSTWRLKKVYPKNELFMQWQRTDDDTEKTPYAYRHKCIHEKLDLSDVTDRYILGRAFYHIIQRRGFLSNRKEQGGEDSGKVKEGISTLTHEMNEAGYEYLGDYFYALYNKGEKIRKHYTARNEHFLSEFKAICEKQDLEKELGSEVVRNIEKAIFDQRPLKSQKGQVGKCVFEKNKTKCPSSHPMYEEFRMLTFINNIKIKTPNDDVLRPLNTGEREKIMPLFFRKSKKQFDFEDITKKLAPKKMYGFYKKEEDAEMPFLFNYPMDTSVSGCPVTAALKDVFGDDWITAICETYTLGEGKSRFDIVNDIWHALYFYSDKDKLAEFAINRLQLSEDEAKIFSEISLPADYASLSLKAICKILPYLRRGLIYSHAVFLGNLCEVMPKYEWSIKEMRETIIDNIIMEMDKCDTKDKRTFEVCIKDYLKGQYNVSDNSLKKLYHPSMIETYPRVQYTNEHGVYQLGSPRIDSVRNPMAMRSMFRLRKLVNRLLVEGKIDQNTEVHIEFARELNDANKRNAIALFVKENQSANDEARKQIITLFKKETGTDIEPTDKDILKYVLWEEQNHICLYTGKQIRISDFIGANPKFDIEHTIPRSVGGDSTKMNLTLCDSRFNREVKKTKLPVELPNHDEIMERIKEWKKNYELLDIQIRKNKKLSKGATTKEQKDTIIRKRHLLELRRDYWRGKYERFTMESVPEGFSRRQGTDISVISKYARLYLKSLFNRVYTVKGIATSDFRKIWGIQDIYSKKERINHVHHCIDAIVIACIGLDEYNKLGAYYHDEENNKWYGMSKASFKKPWATFVEDIKKIQDEILVYHYTPDNMPKQGRRRIKIDGKKILCKGDAARGSLHNDTYYGAIENDGAVKYVKRIDLASLEEKDVKNIVDDTVRSIIEAAIKEKGFKDAMASTIWMNEEKRVPIKKVRCFTPSITKPLNIRKQRDVSIKEYKQQYHVANDSNYLLALYIGTDNKGKEKREFEIVNILQAAQYYRTSNDKEVVDRHIVPIKSEHDYPFAYTLKIGTMVLLYEKSPNEVWDATIKERNRRLYKVTGLSTMRMKGRNGEYAYATVKLIHNEEARPSKDIKAKNGEYEQGEEFRPAIIMLHTQLNALVQGYDFEINELGEIRRLR

SEQ ID NO: 402 - protein, 1234 aa, Prevotella tannerae
  REGION 1..1234: note = Prevotella tannerae ATCC 51259
MPNFWSIFTENLQTYLMKTRILGLDTGTNSLGWAVVDRDENNQYTPICRGDLIFTEGVKQEKGIEFSLAAERTSYRASRRHYFRRRLRKVEVLKVLVKHKLCPPLSDEALNRWHTKKEYPLDEDFILWQRTNEADNKNPYHDRHICLHRKLNLKDSQTDRYTLGRALYHLTQRRGFLSNRLDQNEEAEETGKVKSAISELSKEMKEAGCEFLGDYFYLLYRTEGNRVRIRSRYTDREKHYLQEFKEICRVQELDEDLAKALEKTIFFQRPLKSQRQGVGKCTMEKGHSRCAVSHPLYEEYRLLCYLNNIRIKTPSDDRLRPLNAEEREKITPLFYKEKNFDFEKIAKKLAGKTPFGWIRDAEDWPYQFNYRMTQEAPACPTTAQLIKVFGEDWKAALAETYTMSAKQDGTLKTEDEICTDIWNVLYSFSSKEKLKEFGLKKLQLDEVQAKAFSEIRLTRDFASLSLKAIRKILFFLRTGEDYSKAIFLANIPTIVGEEIWNDIERRSRLLYKVDLALRPQEERDAEEHRTIAERIKAAVAAEVPDAPIDLLYHPSMIEAYPDAKRNERFDCYQLGSPKTNAVRNPMAMRSLHMVRKVINHLLRKHIIDEKTEIHIEYARELNDANKRQAIADWQRELSKRHTAYAQNIRQLYKAETGLVIEPTKADILKYQLWEEQQHVCLYTGKKIGIADFLGANPKFDIEHTIPRSRGGDSTQENLTLCESKFNRDIKRDKLPTELANYEEILARIEHWKKQCYALKLKRDGIRTHSGLEKSIKDSRIRRRHLVGLEYGYLKGKYDRFTMKEVPEGFSRRQGAGIGLISKYAGLFLKSLFKDPKNPNRSNVYVVKGAITAEFRKLWGLQQADEAKSRENHTHHCIDAYTIACIGPCEYAALAAYYRSDEEFKYGRRREKPQFEKPWPTFTEDLLKLQEELLIVHQTTDKLGKRDRRKVKTPRGKFLTGGDSARGRLHQETYYGAINYDGNIKYVVRKPLDSLTEKDLDKIVDETVMGIVKGAVEAKGSLKEALADGIYMNKEKGILIKRVRIFSDVSEPINLKQLRDVSTKEYKRHIHLRKDENYLFAIYEGIDKKKNKKQTETATVDYLDAAKFYKDSKRRDKANSLVGDYSKKNKLPLKCILKKRQMVLFYEHSPEEIRFKDKKDLSRRLYIVTSIAKDGRVKFLHHQAATATGIQSSPSPFTNDGEHQPYYRLSASNIKVLVAGIDFDINILGEITPKL

SEQ ID NO: 403 - protein, 1487 aa, Prevotella timonensis
  REGION 1..1487: note = Prevotella timonensis CRIS 5C-B1
MKNILGLDLGSNSVGWALVKVEENGNPIGSIKMGSRIIPMSQDILGSFEKGDTVSQTAQRTLYRGKRRLIERHVLRRERLCRVLHIMNFLPAHFDRLLGWDKTDNKTYGKFIDDSEPKLAWRQNKNEMGKMEFVFMDSFHEMLSDFAKHQPQLIANGKKVPLDWTIYYLRKKALTQLISKEELAWILLNFNKKRGYYQLRGEEEEEQPTKKEEYKVLKVISVDADEGQKGNGIWYNIHLEDGGIYKKKSDIPLYDWVGKTLQLIVVTTYEKDGKTPKIFDSGKQNPSYRLPKEDDWGLVKKRTESQLQSSGKTVGAFIYDNILSKPDDKIRGNLVRTIERKYYKKELIEILQQQAKYHDELHNQNLLESCAKELYAHNDVHYNEVIKSNMINLLVNDIIFYQRPLKSKKSLIANCKYESYEYVDKETGEIKEMPIKCIAKSNPYYQEFRLWQFIHNLRLSDVVTREDVTAQYLSTPQDYCNLFTYLNDRKEIKQDILLKDFFKIKKVQIDKEKVFPIEWNYIKDATKSYPCNETRYELLSALKRAGMDKQWLDDTPNMQYRLWHLLYSVEEKEESAKALRKLYDDDKFVTSFLKIKPFNKCYGAYSEKAIKRLLTLMRMGKAWNEQAIDAKTLKCIQQIITDNVDSKLKEKIDDSRYVLHHVSDFQGLPTYLASYVIYGRHSEVTDIQCWDSPEDLLKFIRDFKQHSLRNPIVEQVILETLRVVYDIWKAEKHIDEIHVEVAREMKLTAQQRNEANLRNLNNEATNLRIKYLLEELKNDTFIKDVRPLSPIHQEKMRIYEQAVLGNLNKQDKDYDDIIKISKKEHPTNAELIRYKLWLEQRYCSPYTGKAISLSKLFTTAYEIEHIIPQSRYFDNSFNNKVICEAEVNKAKGNMLGYEFIKKQGGQKIYCTQLGKAVTILKEEAYKQFVNEHYAHNKRKRDNLLAENIPESFSSRQLNDTRYITKTIMSLLSNVVRQQSEEEATAKNLLPSSGSVTDRLKNDWGLKDVWNTIVTPRFERLNKLSGTNDFGEMKEENGNRYFQTNVPLEYEKGFKKKRIDHRHHAMDALVIACTTRNMVNYISNANANSPKQREDLRQLLCDKNRIINKPWDTFTQDALKALNDIVVSFKNNVRIINRATNRYQRYDKNGKKIIFSQKGDDMWAIRKSMHKETVFGRVNLIRKEVLPIAKALDNISAICNAQLRAYVNDLVDKHFNKKQLVAHFKSLNYKWNRQDVSKVEVWISSDNKTPMVAVRKPLDTSFDKKKIASITDTGIQTILLNYLESKGGDASVAFAPEGIQEMNSNIELYNNGKAHKPIKNVRLSEPLGAKYQVGERGAKTKKYVEADKGTNLFFAIYEDEEGKRYYYSVPLREAIERQKQKLSPVPEYNEKGVALKFYLSPNDLVYVPTEEERTMGTCHIDKARIYKMVSSTGCSCYFVPSTFAKVIVDKVELQSLNKMEKAITDECIKEVCWKLKVDRLGNIINVIK

SEQ ID NO: 404 - protein, 1218 aa, Prevotella timonensis
  REGION 1..1218: note = Prevotella timonensis CRIS 5C-B1
MNKRILGLDTGTNSLGWAVVDWDEHAQSYELIKYGDVIFQEGVKIEKGIESSKAAERSGYKAIRKQYFRRRLRKIQVLKVLVKYHLCPYLSDDDLRQWHLQKQYPKSDELMLWQRTSDEEGKNPYYDRHRCLHEKLDLTVEADRYTLGRALYHLTQRRGFLSNRLDTSADNKEDGVVKSGISQLSTEMEEAGCEYLGDYFYKLYDAQGNKVRIRQRYTDRNKHYQHEFDAICEKQELSSELIEDLQRAIFFQLPLKSQRHGVGRCTFERGKPRCADSHPDYEEFRMLCFVNNIQVKGPHDLELRPLTYEEREKIEPLFFRKSKPNFDFEDIAKALAGKKNYAWIHDKEERAYKFNYRMTQGVPGCPTIAQLKSIFGDDWKTGIAETYTLIQKKNGSKSLQEMVDDVWNVLYSFSSVEKLKEFAHHKLQLDEESAEKFAKIKLSHSFAALSLKAIRKFLPFLRKGMYYTHASFFANIPTIVGKEIWNKEQNRKYIMENVGELVFNYQPKHREVQGTIEMLIKDFLANNFELPAGATDKLYHPSMIETYPNAQRNEFGILQLGSPRTNAIRNPMAMRSLHILRRVVNQLLKESIIDENTEVHVEYARELNDANKRRAIADRQKEQDKQHKKYGDEIRKLYKEETGKDIEPTQTDVLKFQLWEEQNHHCLYTGEQIGITDFIGSNPKFDIEHTIPQSVGGDSTQMNLTLCDNRFNREVKKAKLPTELANHEEILTRIEPWKNKYEQLVKERDKQRTFAGMDKAVKDIRIQKRHKLQMEIDYWRGKYERFTMTEVPEGFSRRQGTGIGLISRYAGLYLKSLFHQADSRNKSNVYVVKGVATAEFRKMWGLQSEYEKKCRDNHSHHCMDAITIACIGKREYDLMAEYYRMEETFKQGRGSKPKFSKPWATFTEDVLNIYKNLLVVHDTPNNMPKHTKKYVQTSIGKVLAQGDTARGSLHLDTYYGAIERDGEIRYVVRRPLSSFTKPEELENIVDETVKRTIKEAIADKNFKQAIAEPIYMNEEKGILIKKVRCFAKSVKQPINIRQHRDLSKKEYKQQYHVMNENNYLLAIYEGLVKNKVVREFEIVSYIEAAKYYKRSQDRNIFSSIVPTHSTKYGLPLKTKLLMGQLVLMFEENPDEIQVDNTKDLVKRLYKVVGIEKDGRIKFKYHQEARKEGLPIFSTPYKNNDDYAPIFRQSINNINILVDGIDFTIDILGKVTLKE

SEQ ID NO: 405 - protein, 1496 aa, Prevotella veroralis
  REGION 1..1496: note = Prevotella veroralis F0319
MKTILGLDLGTNSIGWAKVCVDDNGNYLRDIKLGSRIIPMSQDVLGNFDKGVTESQTSVRTGFRGVRRIRERSLLRRERLHRVLHVLGYLPPHYDSAIGWNKNEPSTYGKFLNHGEPKLAWEHKEDGSMRFLFMESFHEMMADFAKSQPSLVSDGKKIPLDWTIYYLRKKALSQPIRKEELAWLLLNFNQKRGYYQLRGEEDDDNPTKCEEYYELKVVGIEADEEGKNGNTWYNVKLENGWIYRRQSKIPLDDWIGKVREFIVTTEYEKDGITLKKDKNGDVKRSFRSPSEDDWGLRKKRTEKLLDSSKMTVGAFVYDHLLAEPSDKIRGKFIRTIERKYYKKELYAILCEQSKYHEELRSGDYLNKCAEELYKNNQPHRNSLLTKDLAYLLLEDLIFYQRPLKTKKSLIAECPYEAYKYVDKETGEIKRQGIKCIAKSNPYYQEFRLWQFISNLRLFNKADDKEVTADYLPTQDDYVRLFAYLNDRKEINQETLLKEFFKLKKITVNSEKVFPIRWNYIEDKEKKYPCNETRHELLLALDRARIDHSWLEKPGQEYRLWHLLYSVESKEETKEALRKLKDDDAFVESFLKVKPFKREYGAYSEKAIKKLLAVMRMGSLWRETDICDTTKGNITKILQGEIDEKLKEKISASVSSYNQLSDFQGLPVWLACYVVYGRHSEAAEIQHWKTPESLLAYINGFKQHSLRNPIVEQCILETLRTVHDIWKEVGHIDEIHVELGRNMKSTADQRARISENVLRNENTNLRIKSLLLELKNDPNIKDVRPYSPMQQEKLRIYEEGVLQELTKDDKDFTEITKISTMAQPSAKELQRYKLWLEQKYRSPYTGKSISLTKLFTSAYQIEHVIPQSRYFDDSFSNKVICESEVNSLKDNMLGYEFIKNHGGEIIHCTMLGDVKVLSESEYKAFVNDHYAHNKRKRENLLLEDIPQEFLNRQMNDSRYISKVVKALLSNIVRAEGEEEATSKFVVSCSGGITDRLKKDWGLNDVWNKIVYPRFERLNRLTGTEAFGQWENKDGKRVFQTAVPLELQRGFNKKRIDHRHHAMDALVIACTSRNIINYLNNESANNPKKREDLRQKLCDKNRTIRKPWETFTQDATAALEDVIVSFKNYVRIINKATNYYERYDVEGKKVIAEQRGDDMWAIRKPMHEATYYGRVNLRRKKKVNLRVALENISSICDNKLRIYINGLVEKGFNTKQILDKFKNTNDHFSMQKIDKVEIWQFTNEEEKLVATRKPLDTSFDTKKIASITDTGIQTILLNYLETKGGDSTIAFTPEGIVEMNQNISKYNNGKEHMPILKVRLYTKLGKKIPVGQTGCKAKQFVIAEAGTNLYFAIYEDEEGKRSYRTIPLNEVVERLKQGLSPVPEKNDKDVHLKFYLSPNDLVYVPIEDEHESLAKDHIYKFVDSSGTTANFIPHRSANVIFELNKKDAEKFCSGSIIQNEYGVGSSQSKNQKAITGEMIKAVCRKLEVDRLGNVIKVI

SEQ ID NO: 406 - protein, 1062 aa, Ralstonia syzygii
  REGION 1..1062: note = Ralstonia syzygii R24
MAEKQHRWGLDIGTNSIGWAVIALIEGRPAGLVATGSRIFSDGRNPKDGSSLAVERRGPRQMRRRRDRYLRRRDRFMQALINVGLMPGDAAARKALVTENPYVLRQRGLDQALTLPEFGRALFHLNQRRGFQSNRKTDRATAKESGKVKNAIAAFRAGMGNARTVGEALARRLEDGRPVRARMVGQGKDEHYELYIAREWIAQEFDALWASQQRFHAEVLADAARDRLRAILLFQRKLLPVPVGKCFLEPNQPRVAAALPSAQRFRLMQELNHLRVMTLADKRERPLSFQERNDLLAQLVARPKCGFDMLRKIVFGANKEAYRFTIESERRKELKGCDTAAKLAKVNALGTRWQALSLDEQDRLVCLLLDGENDAVLADALREHYGLTDAQIDTLLGLSFEDGHMRLGRSALLRVLDALESGRDEQGLPLSYDKAVVAAGYPAHTADLENGERDALPYYGELLWRYTQDAPTAKNDAERKFGKIANPTVHIGLNQLRKLVNALIQRYGKPAQIVVELARNLKAGLEEKERIKKQQTANLERNERIRQKLQDAGVPDNRENRLRMRLFEELGQGNGLGTPCIYSGRQISLQRLFSNDVQVDHILPFSKTLDDSFANKVLAQHDANRYKGNRGPFEAFGANRDGYAWDDIRARAAVLPRNKRNRFAETAMQDWLHNETDFLARQLTDTAYLSRVARQYLTAICSKDDVYVSPGRLTAMLRAKWGLNRVLDGVMEEQGRPAVKNRDDHRHHAIDAVVIGATDRAMLQQVATLAARAREQDAERLIGDMPTPWPNFLEDVRAAVARCVVSHKPDHGPEGGLHNDTAYGIVAGPFEDGRYRVRHRVSLFDLKPGDLSNVRCDAPLQAELEPIFEQDDARAREVALTALAERYRQRKVWLEELMSVLPIRPRGEDGKTLPDSAPYKAYKGDSNYCYELFINERGRWDGELISTFRANQAAYRRFRNDPARFRRYTAGGRPLLMRLCINDYIAVGTAAERTIFRVVKMSENKITLAEHFEGGTLKQRDADKDDPFKYLTKSPGALRDLGARRIFVDLIGRVLDPGIKGD

SEQ ID NO: 407 - protein, 1066 aa, Rhodopseudomonas palustris
MSERVVRRILGIDLGIASCGWGVVDISGAGGGIIATGVRCFDAPLIDKTGEPKSATRRTARGQRRIVRRRRQRMNGVRRLLCEFGLLPDPRPDALNQAMRRISTASAAAQVTPWTLRAAAHQRLLSNEELAVVLGHIARHRGFRSNAKNEAGANAADETSKMKKAMEATREGLAKYHAFGDMIANDPKFANRKRNRDKDYSHTAKRSDLEDEVRAILRAQLRFGSAAATETLAQTFADVAFFQRPLQDSEDRVGDCPFEPGQKRAARRAPSFELFRFLSRLANLKLAVGRSPERRLTAEEIALAAKGFGETKKTITFKSLREALDLDPNARFSGIGKDKEASLDVVARTGGAAYGTKTLKDALGDAPWRSLSRTPETLDRIAEILSFREDITSIRNGLEDLGLDSLVVEALMQAAANGDFKEFTRAGHISARAARNIIPGLREGLVYSEACARVGYDHAARLSVPLDQVGSPVTRKALSEALKQVRAVAREYGPIDYFHIELARSVGKSAEERKQLTDGIEARNVEKAKRRKQAEEHLGRAPSDDELLRYELAKEQNFKCIYSGDAIDPAGVAANDTRYQVDHILPWSRFGDDSYLNKTLCTARSNQNKRGRTPFEWFEADKTDVEWMEYVARVENLQEVKGRKKRNYSIKDAAAIEDKFKARNLTDTQWATRLLADELSRMFPPRECERAICGRADGGNDGLTIVEERRVFTRPGAITSKLRRAWGLEGLKKQDGKRVEDDRHHAVDALVLAATTESLLQRLTVEVQRREREGRPDDIFHCAEPWRGFRADVRRTVYGSETMPGIFVSRAERRRARGKAHDATIKQIREIEGERLVFERKPVEKLTDKDLEKIPIPKPYGQVSDPKRLRDELVESLRAWIAAGKPKDRPPLSPKGDVIRKVRIQTNDKVSVEINGGTVDRGDMARVDVFRKKNKKAVWEYYVVPIYPHQIVALNDPPDRAVIAYAEDKDWKEIDSSYEFLWSLFGLSYVEISKANGECIDGYFRGLHRGTGAASVCKHISLGKDATVSGIGLKTLASFKKFTIDRLGRKFEIPREVRTWRGEACT

SEQ ID NO: 408 - protein, 1064 aa, Rhodopseudomonas palustris
MSECVTRRILGIDLGIASCGWGVIEVGEASGSIIASGVRCFDAPLIDKTGEPKSATRRTARGQRRIIRRRRQRMNAVRRLLAEFGVLTGRSPDALHQALLRLSQSVAGSQVTPWTLRAAAHERKLTNDELAVVLGHIARHRGFRSNSKNDGGANAADETSKMKKAMETTREGLARYHSFGAMIASDPKFADRKRNRDKDYSHTAKRSDLEDEVRTIFRSQTRFGSLVASEKLSQAFADAAFFQRPLQDSEDMVGSCPFEPGQKRTARRAPSFELFRFLSRLANLKLTVGRAPERRLTPDEIALAAKGFGETKKSITFKSLREALDLDPNARFSGVAKEKESTLDVAARTGGAAYGTKTLKDALGDAPWRSLSRMPEKLDRIAEILSFREDMKAIRNGLEEVGLDGLVVDALMQATANGDFKDFTRAAHISALAARNIIPGLREGLVYSDACTRVGYDHAARPAVPLSQIGSPVTRKALSEALKQVRAVAREYGPIDYFHIELARSIGKSAEERKKLTDGIEARNVEKEKRRKEAAEHLGRAPSDDELLRYELAKEQNFKCIYSGDPIDPAGISANDTRYQVDHILPWSRFGDDSYVNKTLCTARSNQNKRGRTPFEWFDADKTEAEWMEYSARVEDLKEVKGRKKRNYSIKDAASVEDKFKARNLTDTQWATRLLADELKRMFPPRECERVVTVRADGGNDGLSIVEERRVFTRPGAITSKLRRAWGLEGLKKQDGKRVEDDRHHAVDALVLAATTESLLNRLTVEVQQREREGRQDDIFHCSQPWPGFRVDVQRTVYGSETMPGIFVSRAERRRARGKAHDATVKQIRDIDGERIVFERKPIEKLTDKDLERIPVPEPYGKAADPKKLRDELVENLRAWIAAGKPKDKPPRSPKGDIIRKVRIETKDKVAVEINGGTVDRGDMARVDVFRKKNKKGVWEFYVIPIYPHQIVASALPPNRAVIAYKAESEWTAIDGCFEFAWSLNPMSYLELVKSNGELIEGYFRSMDRTTGAINLSPMSTNSETIRSIGVKTLSSFRKFTVDRLGRKFEIPREVRTWRGEACT

SEQ ID NO: 409 - protein, 1173 aa, Rhodospirillum rubrum
  REGION 1..1173: note = Rhodospirillum rubrum ATCC 11170
MRPIEPWILGLDIGTDSLGWAVFSCEEKGPPTAKELLGGGVRLFDSGRDAKDHTSRQAERGAFRRARRQTRTWPWRRDRLIALFQAAGLTPPAAETRQIALALRREAVSRPLAPDALWAALLHLAHHRGFRSNRIDKRERAAAKALAKAKPAKATAKATAPAKEADDEAGFWEGAEAALRQRMAASGAPTVGALLADDLDRGQPVRMRYNQSDRDGVVAPTRALIAEELAEIVARQSSAYPGLDWPAVTRLVLDQRPLRSKGAGPCAFLPGEDRALRALPTVQDFIIRQTLANLRLPSTSADEPRPLTDEEHAKALALLSTARFVEWPALRRALGLKRGVKFTAETERNGAKQAARGTAGNLTEAILAPLIPGWSGWDLDRKDRVFSDLWAARQDRSALLALIGDPRGPTRVTEDETAEAVADAIQIVLPTGRASLSAKAARAIAQAMAPGIGYDEAVTLALGLHHSHRPRQERLARLPYYAAALPDVGLDGDPVGPPPAEDDGAAAEAYYGRIGNISVHIALNETRKIVNALLHRHGPILRLVMVETTRELKAGADERKRMIAEQAERERENAEIDVELRKSDRWMANARERRQRVRLARRQNNLCPYTSTPIGHADLLGDAYDIDHVIPLARGGRDSLDNMVLCQSDANKTKGDKTPWEAFHDKPGWIAQRDDFLARLDPQTAKALAWRFADDAGERVARKSAEDEDQGFLPRQLTDTGYIARVALRYLSLVTNEPNAVVATNGRLTGLLRLAWDITPGPAPRDLLPTPRDALRDDTAARRFLDGLTPPPLAKAVEGAVQARLAALGRSRVADAGLADALGLTLASLGGGGKNRADHRHHFIDAAMIAVTTRGLINQINQASGAGRILDLRKWPRTNFEPPYPTFRAEVMKQWDHIHPSIRPAHRDGGSLHAATVFGVRNRPDARVLVQRKPVEKLFLDANAKPLPADKIAEIIDGFASPRMAKRFKALLARYQAAHPEVPPALAALAVARDPAFGPRGMTANTVIAGRSDGDGEDAGLITPFRANPKAAVRTMGNAVYEVWEIQVKGRPRWTHRVLTRFDRTQPAPPPPPENARLVMRLRRGDLVYWPLESGDRLFLVKKMAVDGRLALWPARLATGKATALYAQLSCPNINLNGDQGYCVQSAEGIRKEKIRTTSCTALGRLRLSKKAT

SEQ ID NO: 410 - protein, 1059 aa, Rhodovulum sp.
  REGION 1..1059: note = Rhodovulum sp. PH10
MGIRFAFDLGTNSIGWAVWRTGPGVFGEDTAASLDGSGVLIFKDGRNPKDGQSLATMRRVPRQSRKRRDRFVLRRRDLLAALRKAGLFPVDVEEGRRLAATDPYHLRAKALDESLTPHEMGRVIFHLNQRRGFRSNRKADRQDREKGKIAEGSKRLAETLAATNCRTLGEFLWSRHRGTPRTRSPTRIRMEGEGAKALYAFYPTREMVRAEFERLWTAQSRFAPDLLTPERHEEIAGILFRQRDLAPPKIGCCTFEPSERRLPRALPSVEARGIYERLAHLRITTGPVSDRGLTRPERDVLASALLAGKSLTFKAVRKTLKILPHALVNFEEAGEKGLDGALTAKLLSKPDHYGAAWHGLSFAEKDTFVGKLLDEADEERLIRRLVTENRLSEDAARRCASIPLADGYGRLGRTANTEILAALVEETDETGTVVTYAEAVRRAGERTGRNWHHSDERDGVILDRLPYYGEILQRHVVPGSGEPEEKNEAARWGRLANPTVHIGLNQLRKVVNRLIAAHGRPDQIVVELARELKLNREQKERLDRENRKNREENERRTAILAEHGQRDTAENKIRLRLFEEQARANAGIALCPYTGRAIGIAELFTSEVEIDHILPVSLTLDDSLANRVLCRREANREKRRQTPFQAFGATPAWNDIVARAAKLPPNKRWRFDPAALERFEREGGFLGRQLNETKYLSRLAKIYLGKICDPDRVYVTPGTLTGLLRARWGLNSILSDSNFKNRSDHRHHAVDAVVIGVLTRGMIQRIAHDAARAEDQDLDRVFRDVPVPFEDFRDHVRERVSTITVAVKPEHGKGGALHEDTSYGLVPDTDPNAALGNLVVRKPIRSLTAGEVDRVRDRALRARLGALAAPFRDESGRVRDAKGLAQALEAFGAENGIRRVRILKPDASVVTIADRRTGVPYRAVAPGENHHVDIVQMRDGSWRGFAASVFEVNRPGWRPEWEVKKLGGKLVMRLHKGDMVELSDKDGQRRVKVVQQIEISANRVRLSPHNDGGKLQDRHADADDPFRWDLATIPLLKDRGCVAVRVDPIGVVTLRRSNV

SEQ ID NO: 411 - protein, 1405 aa, Riemerella anatipestifer
MKTILGLDLGTNSIGWALVKEAENSNEKSEIIKLGVRVNPLTVDEKTNFEAGRPLSTNADRTAKRSARRNLQRYKLRRKNLIDLLIKNQLIDKDTPLTEIGKNTTHQTLELRAKAARERIELEDLARVFLAINKKRGYRSSRKVNNEEEGQAVDGMAVAKKLYDENLTPGQYAYELLSKGKKYVPDFYRSDLQAEFNAIWEYQKQFYADILDDELYNALKGQGQQNSRKRFLAIKGVYTAENKGKRDDVKLRHYKWRSEAISKKINIEEVAYVLVEINNDLNKSSGYLGAISDRSKELYFNKETVGENLWKQIQKNPHTSLKNQVFYRQDYLDEFEQIWETQAQFHPQLTLALKEQIRDVIIFYQRKLKSQKGLLSFCQFESWEIERKDENGNVILNKTTQLPKRQTVGRRVAPKSSPLFQEFKIWQNINNLEVTKISEGASKNKKETETLSDDERKLLFEELNLRGNLSQKEVLQILGLKDKEYKTNFSEGLEGNRTNAALFNIYQQIAENEGYGFDWSKKSAQEIKEELKAVFPQIGIQADILDFNANLDGKEFENQASYQLWHLLYSAEEDDKINEEDQIIYGNSAVSLKKKLCEKFGFTPEYAKWIANVSLQDDYGNLSTKAMRKIIPYLIDGNDYSEACALAGYNHSNSLTKEENDNRELLDKLELLPKNSLRNPVVEKILNQMVNVVNQVIETYGKPDEVRIELARELKKSAEKRAEMTKSINEATRRNEDIKKLITKDFGIPNPTKSDVVRYRLWEELAPLAYKDVFTGKQIKKEDLFSSKIDIEHIIPKALLFDDSFSNKTLVFRETNLKKADRTAYDFIESDYNATLDDYIQRVETLYNNTKGTISKGKRNKLLMAQKNLPDGFIERDLRNSQYIAKKAKAMLYQVFKDVNVTSGSITDRLREDWDLINVMKELNFPKYKALGLTEIEERYDIGQEKTKRVEVITDWTKRNDHRHHAMNALTVAFTTSSHIQYLNYLNARKNESHKEHKNIKGIENKITHKQKDKRKFIPPMPNFREEAKKHIETILVSIKNKNKVYTKNINKTKKKSGHNTKEQLTPRGQLHKETVYGKSKRPMSKPTKINKNFSLEQAQLIINVQEKELVLRHLAQFDNNPAVAFDTKTLKKMPLLKNGEPLKEVLCFEEIFTIRKDITPDLKIEKVVDEKIKAILEQRKKDFGGNAKEAFSDLDKNPIWLNKKKGICIKRVTITGVSNAEALHHQKDHLGREILDDNGNPIPADFVSTGNNHHLAVYLDSEGKLQDNIVSFYEAVVRTSQGLPVVDKGLNKDLGWKFLFSLKQNEMFVFPNDDFDINDFDLLDDKKAELISKHLYRVQKISKVSAGNSFVRDIVFRHHLETTVKEVKELKDISYIQLKSLEGLRNIKKVRINHIGKIVQVGEY

SEQ ID NO: 412 - protein, 1400 aa, Riemerella anatipestifer
MKTILGLDLGTNSIGWALVKETENSNEKSEIIKLGVRVNPLTVDEKTNFEAGRPLSTNADRTAKRSARRNLQRYKLRRKNLIDLLIKHRLIDKDTPLTEIGKNTTHQTLELRAKAARERIELEDLARVFLAINKKRGYRSSRKVNNEEEGQVVDGMAVAKKLYDENLTPGQYAYELLSKGKKYVPDFYRSDLQAEFDSIWEYQKQFYADILDDELYNALKGQGQQNSRKRFLAIKGVYTAENKGKRDEVKLQHYKWRSEAITQKLSIEEVAYVLVEINNDLNKSSGYLGAISDRSKELYFNKETVGENLWKQIQKNPHTSLKNQVFYRQDYLDEFEQIWETQAQFHPQLTLALKEQIRDVVIFYQRKLKSQKGLLSFCQFESWEIERKDENGNVILNKTTQLPKRQTVGRRVAPKSSPLFQEFKIWQNINNLEIAKISDGNSKNKKETEALSDDERKLLFEELNLRGNLSQKEVLQILGLKDKEYKTNFPEGLEGNRTNAALFNIYQQIAENEGYGDWTKKSAQEIKEELKAVFPQIGIQADILDFNAELDGKEFENQASYQLWHLLYSAEEDDKINEEDQIIYGNSAVSLKKKLCEKFGFTPEYAKWIANVSLQDDYGNLSTKAMRKIIPYLIDGNDYSEACALAGYNHSNSLTKEENDNRERLNKLELLPKNSLRNPVVEKILNQMVNVVNQVIETYGKPDEVRIELARELKKSAEERAEMTKGINEATRRNEDIKKLITKNFGIPNPTKNDVVRYRLWEELAPLAYKDVFTGRQIKKEDLFSSKIDIEHIIPKALLFDDSFSNKTLAFRETNLKKADRTAYGFIESDYNATLDDYIQRVETLYNNAKGTISKGKRNKLLMAQKNLPDGFIERDLRNSQYIAKKAKSMIEKVFNDVNVTSGSITDRLREDWDLINVMKELNFPKYKALGLTEIEERYDIGQEKTKKVEVITDWTKRNDHRHHAMDALTVAFTTKSHVQYLNNLNTIHSLKGDEVDLELSKLYGLKNTITEVVNKKRKFIPPMPNFREEAKKHIETILVSIKNKNKVYTKNINKTKKESGYHTKEQLTPRGQLHKETVYGKSKRPMNKPTKINKNFSLEQAQLIINVQEKELVLRHLAQFDNNPAVAFDTKTLKKMPLLKNGEPLKEVLCFEEIFTIRKDITPDLKIEKVVDEKIKAILEQRKKDFGGNAKEAFSDLDKNPIWLNKEKGICIKRVTITGVSNAEALHHQKDHLGREILDDNGNPIPADFVSTGNNHHVAIYEDEKGKLQEKVVSLYEAVARANQGLPVVDKGLNEDLGWKFLFTMKQNEMFVFPNDDFDVNDIDLLDENNAKIISQHLFRVQKLATKNYMFRHHLETNVQEVKELNDIAYKSIRSTEPLKNIKKVRINHIGKIVQVGEY

SEQ ID NO: 413 - protein, 1140 aa, Roseburia intestinalis
  REGION 1..1140: note = Roseburia intestinalis L1-82
MRENGSDERRRNMDEKMDYRIGLDIGIASVGWAVLQNNSDDEPVRIVDLGVRIFDTAEIPKTGESLAGPRRAARTTRRRLRRRKHRLDRIKWLFENQGLINIDDFLKRYNMAGLPDVYQLRYEALDRKLTDEELAQVLLHIAKHRGFRSTRKAETAAKENGAVLKATDENQKRMQEKGYRTVGEMIYLDEAFRTGCSWSEKGYILTPRNKAENYQHTMLRAMLVEEVKEIFSSQRRLGNEKATEELEEKYLEIMTSQRSFDLGPGMQPDGKPSPYAMEGFSDRVGKCTFLGDQGELRGAKGTYTAEYFVALQKINHTKLVNQDGETRNFTEEERRALTLLLFTQKEVKYAAVRKKLGLPEDILFYNLNYKKAATKEEQQKENQNTEKAKFIGMPYYHDYKKCLEERVKYLTENEVRDLFDEIGMILTCYKNDDSRTERLAKLGLVPIEMEGLLAYTPTKFQHLSMKAMRNIIPFLEKGMTYDKACEEAGYDFKADSKGTKQKLLTGENVNQTINEITNPVVKRSVSQTVKVINAIIRTYGSPQAINIELAREMSKTFEERRKIKGDMEKRQKNNEDVKKQIQELGKLSPTGQDILKYRLWQEQQGICMYSGKTIPLEELFKPGYDIDHILPYSITFDDSFRNKVLVTSQENRQKGNRTPYEYMGNDEQRWNEFETRVKTTIRDYKKQQKLLKKHFSEEERSEFKERNLTDTKYITTVIYNMIRQNLEMAPLNRPEKKKQVRAVNGAITAYLRKRWGLPQKNRETDTHHAMDAVVIACCTDGMIQKISRYTKVRERCYSKGTEFVDAETGEIFRPEDYSRAEWDEIFGVHIPKPWETFRAELDVRMGDDPKGFLDTHSDVALELDYPEYIYENLRPIFVSRMPNHKVTGAAHADTIRSPRHFKDEGIVLTKTALTDLKLDKDGEIDGYYNPQSDLLLYEALKKQLLLYGNDAKKAFAQDFHKPKADGTEGPVVRKVKIQKKQTMGVFVDSGNGIAENGGMVRIDVFRVNGKYYFVPVYTADVVKKVLPNRASTAHKPYGEWKVMEDKDFLFSLYSRDLIHIKSKKDIPIKMVNGGMEGIKETYAYYIGADISAANIQGIAHDSRYKFRGLGIQSLDVLEKCQIDVLGHVSVVRSEKRMGFS

SEQ ID NO: 414 - protein, 1128 aa, Roseburia intestinalis
  REGION 1..1128: note = Roseburia intestinalis M50/1
MDEKMDYRIGLDIGIASVGWAVLQNNSDDEPVRIVDLGVRIFDTAEIPKTGESLAGPRRAARTTRRRLRRRKHRLDRIKWLFENQGLINIDDFLKRYNMAGLPDVYQLRYEALDRKLTDEELAQVLLHIAKHRGFRSTRKAETAAKENGAVLKATDENQKRMQEKGYRTVGEMIYLDEAFRIGCSWSEKGYILTPRNKAENYQHTMLRAMLVEEVKEIFSSQRRLGNKKATEELEEKYLEIMTSQRSFDLGPGMQPDGKPSPYAMEGFSDRVGKCTFLGDQGELRGAKGTYTAEYFVALQKINHTKLVNQDGETRNFTEEERRALTLLLFTQKEVKYAAVRKKLGLPEDILFYNLNYKKAATKEEQQKENQNTEKAKFIGMPYYHDYKKCLEERVKYLTENEVRDLFDEIGMILTCYKNDDSRTERLAKLGLVPIEMEGLLAYTPTKFQHLSMKAMRNIIPFLEKGMTYDKACEEAGYDFKADSKGTKQKLLTGENVNQTINEITNPVVKRSVSQTVKVINAIIRTYGSPQAINIELAREMSKTFEERRKIKGDMEKRQKNNEDVKKQIQELGKLSPTGQDILKYRLWQEQQGICMYSGKTIPLEELFKPGYDIDHILPYSITFDDSFRNKVLVTSQENRQKGNRTPYEYMGNDEQRWNEFETRVKTTIRDYKKQQKLLKKHFSEEERSEFKERNLTDTKYITTVIYNMIRQNLEMAPLNRPEKKKQVRAVNGAITAYLRKRWGLPQKNRETDTHHAMDAVVIACCTDGMIQKISRYTKVRERCYSKGTEFVDAETGEIFRPEDYSRAEWDEIFGVHIPKPWETFRAELDVRMGDDPKGFLDTHSDVALELDYPEYIYENLRPIFVSRMPNHKVTGAAHADTIRSPRHFKDEGIVLTKTALTDLKLDKDGEIDGYYNPQSDLLLYEALKKQLLLYGNDAKKAFAQDFHKPKADGTEGPVVRKVKIQKKQTMGVFVDSGNGIAENGGMVRIDVFRVNGKYYFVPVYTADVVKKVLPNRASTANKPYSEWRTMEDKDFLFSLYSRDLVHIKSKKGIPIKNVDGSLGESKEVYAYYIGADISGAKIEGKAHDSRYTFRGIGVQKLELIEKCQVDILGHISTVKNEKRMGFS

SEQ ID NO: 415 - protein, 1152 aa, Roseburia inulinivorans
  REGION 1..1152: note = Roseburia inulinivorans DSM 16841
MNAEHGKEGLLIMEENFQYRIGLDIGITSVGWAVLQNNSQDEPVRITDLGVRIFDVAENPKNGDALAAPRRDARTTRRRLRRRRHRLERIKFLLQENGLIEMDSFMERYYKGNLPDVYQLRYEGLDRKLKDEELAQVLIHIAKHRGFRSTRKAETKEKEGGAVLKATTENQKIMQEKGYRTVGEMLYLDEAFHTECLWNEKGYVLTPRNRPDDYKHTILRSMLVEEVHAIFAAQRAHGNQKATEGLEEAYVEIMTSQRSFDMGPGLQPDGKPSPYAMEGFGDRVGKCTFEKDEYRAPKATYTAELFVALQKINHTKLIDEFGTGRFFSEEERKTIIGLLLSSKELKYGTIRKKLNIDPSLKFNSLNYSAKKEGETEEERVLDTEKAKFASMFWTYEYSKCLKDRTEEMPVGEKADLFDRIGEILTAYKNDDSRSSRLKELGLSGEEIDGLLDLSPAKYQRVSLKAMRKMQPYLEDGLIYDKACEAAGYDFRALNDGNKKHLLKGEEINAIVNDITNPVVKRSVSQTIKVINAIIQKYGSPQAVNIELAREMSKNFQDRTNLEKEMKKRQQENERAKQQIIELGKQNPTGQDILKYRLWNDQGGYCLYSGKKIPLEELFDGGYDIDHILPYSITFDDSYRNKVLVTAQENRQKGNRTPYEYFGADEKRWEDYEASVRLLVRDYKKQQKLLKKNFTEEERKEFKERNLNDTKYITRVVYNMIRQNLELEPFNHPEKKKQVWAVNGAVTSYLRKRWGLMQKDRSTDRHHAMDAVVIACCTDGMIHKISRYMQGRELAYSRNFKFPDEETGEILNRDNFTREQWDEKFGVKVPLPWNSFRDELDIRLLNEDPKNFLLTHADVQRELDYPGWMYGEEESPIEEGRYINYIRPLFVSRMPNHKVTGSAHDATIRSARDYETRGVVITKVPLTDLKLNKDNEIEGYYDKDSDRLLYQALVRQLLLHGNDGKKAFAEDFHKPKADGTEGPVVRKVKIEKKQTSGVMVRGGTGIAANGEMVRIDVFRENGKYYFVPVYTADVVRKVLPNRAATHTKPYSEWRVMDDANFVFSLYSRDLIHVKSKKDIKTNLVNGGLLLQKEIFAYYTGADIATASIAGFANDSNFKFRGLGIQSLEIFEKCQVDILGNISVVRHENRQEFH

SEQ ID NO: 416 - protein, 1156 aa, Ruminococcus albus
  REGION 1..1156: note = Ruminococcus albus 8
MGNYYLGLDVGIGSIGWAVINIEKKRIEDFNVRIFKSGEIQEKNRNSRASQQCRRSRGLRRLYRRKSHRKLRLKNYLSIIGLTTSEKIDYYYETADNNVIQLRNKGLSEKLTPEEIAACLIHICNNRGYKDFYEVNVEDIEDPDERNEYKEEHDSIVLISNLMNEGGYCTPAEMICNCREFDEPNSVYRKFHNSAASKNHYLITRHMLVKEVDLILENQSKYYGILDDKTIAKIKDIIFAQRDFEIGPGKNERFRRFTGYLDSIGKCQFFKDQERGSRFTVIADIYAFVNVLSQYTYTNNRGESVFDTSFANDLINSALKNGSMDKRELKAIAKSYHIDISDKNSDTSLTKCFKYIKVVKPLFEKYGYDWDKLIENYTDTDNNVLNRIGIVLSQAQTPKRRREKLKALNIGLDDGLINELTKLKLSGTANVSYKYMQGSIEAFCEGDLYGKYQAKFNKEIPDIDENAKPQKLPPFKNEDDCEFFKNPVVFRSINETRKLINAIIDKYGYPAAVNIETADELNKTFEDRAIDTKRNNDNQKENDRIVKEIIECIKCDEVHARHLIEKYKLWEAQEGKCLYSGETITKEDMLRDKDKLFEVDHIVPYSLILDNTINNKALVYAEENQKKGQRTPLMYMNEAQAADYRVRVNTMFKSKKCSKKKYQYLMLPDLNDQELLGGWRSRNLNDTRYICKYLVNYLRKNLRFDRSYESSDEDDLKIRDHYRVFPVKSRFTSMFRRWWLNEKTWGRYDKAELKKLTYLDHAADAIIIANCRPEYVVLAGEKLKLNKMYHQAGKRITPEYEQSKKACIDNLYKLFRMDRRTAEKLLSGHGRLTPIIPNLSEEVDKRLWDKNIYEQFWKDDKDKKSCEELYRENVASLYKGDPKFASSLSMPVISLKPDHKYRGTITGEEAIRVKEIDGKLIKLKRKSISEITAESINSIYTDDKILIDSLKTIFEQADYKDVGDYLKKTNQHFFTTSSGKRVNKVTVIEKVPSRWLRKEIDDNNFSLLNDSSYYCIELYKDSKGDNNLQGIAMSDIVHDRKTKKLYLKPDFNYPDDYYTHVMYIFPGDYLRIKSTSKKSGEQLKFEGYFISVKNVNENSFRFISDNKPCAKDKRVSITKKDIVIKLAVDLMGKVQGENNGKGISCGEPLSLLKEKN

SEQ ID NO: 417 - protein, 1341 aa, Ruminococcus lactaris
  REGION 1..1341: note = Ruminococcus lactaris ATCC 29176
MGKGYYVGLDMGTGSVGWAVTDESYQILRRHGKAMWGVRLFESAKTAEERRMFRTGRRRLDRRGWRIEILQEIFAEEISRVDPGFFLRMKESKYYPEDKRDIQGNCPELPYTLFVDKTFTDKDFHKKYPTIYHLRKMLMETEDTPDMRLVYLALHHMMKHRGHFLLSGDISQVTEFKNTFNQFIENIRNEEMDFEIELDESAVQMIEETLKDKNLTRSAKKSKLVKGLNAKNVRDKAFLTLLSGGTVKLSDLFGMEELNEGERPKISFADNGYEEYAAVVEMELGELYYIVESAKAVYDWAILSDILGGSTSVSDAKVRAYEKHKADLKYLKAVVKEYFPKEVYNAVFVESSDKLNNYPAYIGMTKKNGKKVSLEGKRCSREEFMDFLKKNIVVKLPDEEAKMYLQSELEKDSFLPKQVNKDNGVIPYQVHKYELKKILDNLGDKIPFLKENAEKIEKLFSFRIPYYVGPLRTGNGENSKFAWAERKSTEKIYPWNFENVIDVEQSAENFIRRMTNKCTYLIGEDVLPKDSLLYSKFMVLNELNNLRLDGQKISVELKQKIYRDVFCRSRKVTQKKLKSYLIREGIAGKNVELTGIDGDFKGSLTAYHDFKEKLIDVELTQKEKEEIILNIVLFGDDKKLLKQRLKKKFPQLTEKQINTVTALSYKGWGRLSKKLLEEVTVPAPETGEVWNIITALWETNDNFMQLLSKEYQFSDRIEEFNEEKADPEVSYQTIEDLYVSPAVKRQIWQTLQIIQEIEKVMGEKPKRVFVEMAREKQENKRTESRKKTLSDLYTKCKKEEPEWIEALCTSLEKHEEHQLRSDKLYLYYTQKGRCMYSGEPIDLEDLWDNTKYDIDHIYPQSKTMDDSLKNRVLVKKEYNAKKSDTYPIAADIQKKMMPFWKSLLTGGFIPKEKYDRLVRNNPLDANELAGFIERQIVETRQSTKAVAEILKKILPDTEIVYVKAKTVSKFRQDFDFIKVRDMNDLHHAKDAYLNIVVGNVYFVKFTKNAAWFVKENPGRTYNLEKMFIWDVARDGEIAWKAGKSGSIVQVRAMMEKNHILVTRRSYEVKGGLFDQQILKKGKGQVPVKESDERLRDIGKYGGYNKAAGVYFMLVSSKDKKGKEQRTIEFVPIYLKDRVEKDMESARNYLMEERGLREPKILIKKIKIDTLFKVDGFYMWLSGRTSNQLIFKGANQLILSKEDMKTLKKVVKYIQRQKEDKNVKISMRDGITEEELLKLYETFLDKIRHSIYGARLSSQEKTLVNGKEKFIDLSVEAKCQVLYEILHLFQCQSGAANLKMIGGPASAGILVMNNNISKCKNISIVNQSPTGIYEKEIDLLRV

SEQ ID NO: 418 - protein, 1471 aa, Scardovia wiggsiae
  REGION 1..1471: note = Scardovia wiggsiae F0424
MGYKAPRNDKGEIDYGVGLDLGNGSVGWVAMDKDYHLIRARGHELIGARLFDPANSAENRRESRTTRRRLSRRRWRLRMLDSLFASELAKIDPNFLARRKYSWVHPKDEQNHENWYGSIIFGSKEQDKQFYKDYPTIYHLRKKLTEDTERHDIREIYVAIHHIVKYRGHFLREGEINSENLFDPEGFVELIKDVIKLNNSYDESTPIFEASPADVSEALLNEHTSRSGRIEDTLDKLDFSVSRVDKHELKGMRDAAKAVIGAIVGNTADFSKIFNLDNLDKDSKDNLKLKFADSNFDEKYGGVVGSGLLDETQIELVDRIHAVYDAVALKGILGDAHTISEAKVESYEKHRKNWKLIKEELRTKENKDEVDLWYGDLSGRQYKNPPDPEKGPDEGSKKDSPIRDSDQKQNLIKKANDYFTELIDDSQLSEEQKNCLKNDINNGQLFPVQRSSDNGVIPYQIHLNELRRIIENQKQYYPFLAETFIRKTAEGKSYEENKIVALLKFRVPYYVGPLVSKEDMEEHSSGNSAYHWMARNPGRGEAITPWNFDEVVDKDESGARFISRLTGTDTYLLGEPTLPQHSLLYEEYMVLSELNNVRLNVRQGNHWSDKNRQRLSYKQKEFLIENLFKEHKTVTRKRAEDCLSSMGCGEVQLFGLSDEKKFASSLSSYITLKKILGKAFVDDSGNSAILERIIEVQTVFEDREPLTHQLSLIDSLTVEQRKQLAKIHYTGWGKLSRKLLTSKKGSYKIHSQNEIMRTQHSIIDIMRGDSLNLIEIIRDKKIGIGEWIDNENLDRETGESDVSRLESVFEGIVMSPRVKRGVVQAVRVIDDLAKAIGNPPQRIFIEMADEVQASQRTVSRLSRLKALYGSPSLQKEFNDLKDLRKSLNETKDADLQEDRLYLYYIQLGKDLYTGKEISIDSLSSAYDIDHIVPQALTQDDSIDNRVLVSRKENARKTDSYLYTPDLIKNMRPLWGKLLAAGLMSQKKYDALTRVDDFKDREKQRFVQRSLVETRQIMKNVSTILRTYYGEDTNVVTLKSSITHDMRKYLGFPYKNRDINDYHHAQDALCISAAGQFMLNRHFVSGGEVTDGASNAYNMYLAEYLQEFRDAKARGERKRSTAFGFVVGSMSSKDDEKRTDHRTGEIVWSETNAEYLRKVMNYKKMLITQKVGDVKTRALYDETRYGHKESSAKSIKFDNLRRDTSLYGGFSGASTAYMMLVEYKKKNKLVSITAQEASLLAVADQKNDTVSVMDGILASHGLSGAKILLPKIVTGQLLDYSDALVTLQSASELNTARQMWLPRNDYNDIDIILKSKDIEDAAHKLGYDSDTVHVLRRIQKLFEAVFRVAESQFPLHQLSKDQQEEILRDPQNYGFGSAVKLLGGLLKALHANAENTNLAGLVKVLHGDKEYSDDGKAKEFKKFGFSPRWRRISNPTGFTLSDSDTFIYQSPSGIFEQRVTVKELKEKADKQK

SEQ ID NO: 419 - protein, 1178 aa, Scardovia inopinata
  REGION 1..1178: note = Scardovia inopinata F0304
MGKRHNSNMAKKKISYRIGIDVGLNSTGLAAIEVDDDGAPIRILNTMSVIHDGGVDPDAAKVRGTRLAISGIARRTRRMRRRRAKRLDRLEQILEKYGYTDTEPVLEEPYGPWICRAELADGFINDDEQRRMMIGIAIRHIARHRGWRNPYQNVRALLNIDDSDLSEEYKNLKEKVQDQINDGKDLPNFTPSQLVRDYLDNFSGQPAARIRTGKAGPRGNRRDAVGILPQRMRQSDYAYELQRIFDMQKIGRDEAQELLMAVFEAKSPKGSAEKRIGKDPLTGKKRALKASLAFQKYRIVATITNLRIKTGTGSERMLSPTELNDIYTYLLRVQDDNHLPTWEDICEEVLHIGRYQLAGIGKTFEGGERISNMPPVIQTSLAIHGLSEGTLAEKLTKWWDKADDDSRESMIKLLSNTVDIDRVNEVDENFASALDFIDSLDDEELTKLDKIALPRGRAAYSEEALNKLTADMLNTGDDLFSARQRIYHVNNSWRPPQPPIGEPLGNPAVDRVLKITNRYLMNCLNRWGQPRRVTIEHTRSGFTSVKQATEHQKISDKRAEYRRDIVKQLEEAGVESVHEYDIRRWEAVQRQNGQCLYCGRDITFKTCEMDHIVPRKGPGSTNTRTNFAAVCPECNRMKSNIPFASWAETKEAKDRGVSLDKAIKQVRFFNFTKNEYSPQAQRNFKKSMIERLKQKTSDEPLDNRSIESVSWMADELYKRIDWYFNHEQYETSKKAINDDKDNLSGTQVVVYPGSITAEARNAAGLGGNIHFIGGRYKTRLDRRHHAVDACVIAMMEPGIARILTERNQLRQAQRLTARIEDDEVNWKDYPTENTAGYNKYQAWSDRMHALLEYMNNALDYDKIPVVRWERLQLGNRSAHEDTIHPLKKLPLSHEISAIDINHASTPALYEALVSLPDFSEQDGLPADPSRQINVNGERYSGDDLVSFFNSNAAQIAIQGGSAELGTAFHHARIYRCWTVGKNGKKKIFFGMIRVYQHDLLHAKNEDLFTYPLKRSSVSMRYAKKEVVHAILSGNAEYVGYLCVGDELVLDLKGDKSNDEGGSRLSGQVGEFVQKFEEDSKVNSQIVNRWTVDGFPDEAKLRLRPSMFAGEGLKNMKSELVENAAIKNILSKTGWRVSVDVISKKSPVVLRRNAFGEPRWKTNAGLPVSYRWQDTETKE

SEQ ID NO: 420 - protein, 1063 aa, Simonsiella muelleri
  REGION 1..1063: note = Simonsiella muelleri ATCC 29453
MEKFHYVLGLDLGIASVGWAAIEIDKETETSIGLLDCGVRTFERAEVPKTGDSLAKARREARSTRRLIRRRSHRLLRLKRLLKREIFRQPETFKDLPINAWQLRVKGLDSRLNEYEWAAVLLHLVKHRGYLSQRKSEMSETDSKSEMGRLLAGVAENHQLLQQEQYRTPAELALKKFVKHFRNKGGDYAHTFNRLDLQAELHLLFQKQRELGNPFTSPELERQVDDLLMTQRSALQGDAILKMLGHCGFEPEQFKAAKNTFSAERFIWLTKLNNLRIQDQGKERALTADERTKLLDEPYKKSKLTYAQVRKLLSLPQTAIFKGLRYDLEHDKKAENSTLMEMKSYHNIRQTLEKSGLKTEWQSIATQPEILDAIGTAFSIYKTDEDISHELKTCRLPENVLNELLKNINFDGFIQLSLTALRKILPLMEQGYRYDEACTQIYGNHHSGSLQQESKQFLPHIPIDDVRNPVVFRTLTQARKVVNAIIRRYGSPARVHIEMARELGKSKSDRDRIEKQQQKNKKERENAVAKFKEDFPDFVGEPRGKDILKMRLYEQQHGKCLYSGHDIDINRLNEKGYVEIDHALPFSRTWDDSQNNKVLVLGSENQNKRNQTPDEYLDGANNSQRWLEFQARVQTCHFSYGKKQRIQLAKLDDETEKGFLERNLNDTRYIARFMCQFVQENLYLTGKGKRLVFASNGGMTATLRNLWGLRKVREDNDRHHALDAIVVACSTASMQQKITKAFQRHESIEYVDTETGEVKFRIPQPWDFFRQEVMIRVFSDQPCEDLVEKLSARPEALHDNVTPLFVSRAPNRKMSGQGHLETIKSAKRLSEENSMVKKPLTTLKLKDIPEIVGYPSREPQLYAALKTRLETHDDDPIKAFAKPFYKPNKNGELGALVRSVRVKGVQNTGVMVHDGKGIADNATMVRVDVYTKAGKNYLVPVYVWQVAQGILPNRAVTSGKSEADWDLIDESFEFKFSLSRGDLVEMISNKGRIFGYYNGLDRANGSIGIREHDLEKSKGKDGVHRVGVKTATAFNKYHVDPLGKEIHRCSSEPRPTLKIKSKK

SEQ ID NO: 421 - protein, 1327 aa, Solobacterium moorei
  REGION 1..1327: note = Solobacterium moorei F0204
MEGQMKNNGNNLQQGNYYLGLDVGTSSVGWAVTDTDYNVLKFRGKSMWGARLFDEASTAEERRTHRGNRRRLARRKYRLLLLEQLFEKEIRKIDDNFFVRLHESNLWADDKSKPSKFLLFNDTNFTDKDYLKKYPTIYHLRSDLIHNSTEHDIRLVFLALHHLIKYRGHFIYDNSANGDVKTLDEAVSDFEEYLNENDIEFNIENKKEFINVLSDKHLTKKEKKISLKKLYGDITDSENINISVLIEMLSGSSISLSNLFKDIEFDGKQNLSLDSDIEETLNDVVDILGDNIDLLIHAKEVYDIAVLTSSLGKHKYLCDAKVELFEKNKKDLMILKKYIKKNHPEDYKKIFSSPTEKKNYAAYSQTNSKNVCSQEEFCLFIKPYIRDMVKSENEDEVRIAKEVEDKSFLTKLKGTNNSVVPYQIHERELNQILKNIVAYLPFMNDEQEDISVVDKIKLIFKFKIPYYVGPLNTKSTRSWVYRSDEKIYPWNFSNVIDLDKTAHEFMNRLIGRCTYTNDPVLPMDSLLYSKYNVLNEINPIKVNGKAIPVEVKQAIYTDLFENSKKKVTRKSIYIYLLKNGYIEKEDIVSGIDIEIKSKLKSHHDFTQIVQENKCTPEEIERIIKGILVYSDDKSMLRRWLKNNIKGLSENDVKYLAKLNYKEWGRLSKTLLTDIYTINPEDGEACSILDIMWNTNATLMEILSNEKYQFKQNIENYKAENYDEKQNLHEELDDMYISPAARRSIWQALRIVDEIVDIKKSAPKKIFIEMAREKKSAMKKKRTESRKDTLLELYKSCKSQADGFYDEELFEKLSNESNSRLRRDQLYLYYTQMGRSMYTGKRIDFDKLINDKNTYDIDHIYPRSKIKDDSITNRVLVEKDINGEKTDIYPISEDIRQKMQPFWKILKEKGLINEEKYKRLTRNYELTDEELSSFVARQLVETQQSTKALATLLKKEYPSAKIVYSKAGNVSEFRNRKDKELPKFREINDLHHAKDAYLNIVVGNVYDTKFTEKFFNNIRNENYSLKRVFDFSVPGAWDAKGSTFNTIKKYMAKNNPIIAFAPYEVKGELFDQQIVPKGKGQFPIKQGKDIEKYGGYNKLSSAFLFAVEYKGKKARERSLETVYIKDVELYLQDPIKYCESVLGLKEPQIIKPKILMGSLFSINNKKLVVTGRSGKQYVCHHIYQLSINDEDSQYLKNIAKYLQEEPDGNIERQNILNITSVNNIKLFDVLCTKFNSNTYEIILNSLKNDVNEGREKFSELDILEQCNILLQLLKAFKCNRESSNLEKLNNKKQAGVIVIPHLFTKCSVFKVIHQSITGLFEKEMDLLK

SEQ ID NO: 422 - protein, 1179 aa, Sphaerochaeta globosa
MSKKVSRRYEEQAQEICQRLGSRPYSIGLDLGVGSIGVAVAAYDPIKKQPSDLVFVSSRIFIPSTGAAERRQKRGQRNSLRHRANRLKFLWKLLAERNLMLSYSEQDVPDPARLRFEDAVVRANPYELRLKGLNEQLTLSELGYALYHIANHRGSSSVRTFLDEEKSSDDKKLEEQQAMTEQLAKEKGISTFIEVLTAFNTNGLIGYRNSESVKSKGVPVPTRDIISNEIDVLLQTQKQFYQEILSDEYCDRIVSAILFENEKIVPEAGCCPYFPDEKKLPRCHFLNEERRLWEAINNARIKMPMQEGAAKRYQSASFSDEQRHILFHIARSGTDITPKLVQKEFPALKTSIIVLQGKEKAIQKIAGFRFRRLEEKSFWKRLSEEQKDDFFSAWTNTPDDKRLSKYLMKHLLLTENEVVDALKTVSLIGDYGPIGKTATQLLMKHLEDGLTYTEALERGMETGEFQELSVWEQQSLLPYYGQILTGSTQALMGKYWHSAFKEKRDSEGFFKPNTNSDEEKYGRIANPVVHQTLNELRKLMNELITILGAKPQEITVELARELKVGAEKREDIIKQQTKQEKEAVLAYSKYCEPNNLDKRYIERFRLLEDQAFVCPYCLEHISVADIAAGRADVDHIFPRDDTADNSYGNKVVAHRQCNDIKGKRTPYAAFSNTSAWGPIMHYLDETPGMWRKRRKFETNEEEYAKYLQSKGFVSRFESDNSYIAKAAKEYLRCLFNPNNVTAVGSLKGMETSILRKAWNLQGIDDLLGSRHWSKDADTSPTMRKNRDDNRHHGLDAIVALYCSRSLVQMINTMSEQGKRAVEIEAMIPIPGYASEPNLSFEAQRELFRKKILEFMDLHAFVSMKTDNDANGALLKDTVYSILGADTQGEDLVFVVKKKIKDIGVKIGDYEEVASAIRGRITDKQPKWYPMEMKDKIEQLQSKNEAALQKYKESLVQAAAVLEESNRKLIESGKKPIQLSEKTISKKALELVGGYYYLISNNKRTKTFVVKEPSNEVKGFAFDTGSNLCLDFYHDAQGKLCGEIIRKIQAMNPSYKPAYMKQGYSLYVRLYQGDVCELRASDLTEAESNLAKTTHVRLPNAKPGRTFVIIITFTEMGSGYQIYFSNLAKSKKGQDTSFTLTTIKNYDVRKVQLSSAGLVRYVSPLLVDKIEKDEVALCGE

SEQ ID NO: 423 - protein, 1426 aa, Sphingobacterium spiritivorum
  REGION 1..1426: note = Sphingobacterium spiritivorum ATCC 33861
MKHILGLDLGTNSIGWALIKQDFENKQGEILGMGSRIIPMSQDILGDFGKGNSVSQTAERTKYRSVRRLRERFLLRRERLHRILNVLGFLPEHYASQIDFTKRFGKFKEETEPKLVYSNEGFIFKKSFEEMLSDFKTHQPQLLEDNKKIPYDWTIYYLRKKALSRKIEKEELAWILLNFNQKRGYYQLRGEEEEENPNKLIEFYSLKIVDVLADEPQKGKSDIWYSLILENGWIYRRSSKTPLFDWKEKTRDFIVTIDLNDDGSVKTDKEGNEKRSFRAPGENDWTLVKKKTEQEIDSSRKTVGTYIYETLLKNPKQKIKGKLVRTIERKFYKTELKQILEKQKEFHPELRQDDLYSDCVRELYKNNEAHQLTLSKKDFVHLFMEDIIFYQRPLGSQKSSISNCTLEFRKYKDENGTEHTQYLKAIPKSNPYYQEFRIWQWMYNLNIYKKEDDTNVTKDFLNTKADFESLFEFLNNRKEVDQKALLKHFKLNDKTHRWNYVEDKKYPCNETKTMILSRLDKVENISDDFLTREMEQKIWHIIYSVNDKVEYEKALKSFAGKNNLEDNSFFEAFKKFPPFKSEYGAFSEKAIKKLLPLMRMGKFWNYNNISEQSKSRIQKIITGEYDENIKDKVREKAIHLTTETDFQGLQLWLVQYIVYGRHSEAAMLGKWNSADDLEEFLKEFKQHSLRNPIVEQVITETLRVVKDIWQKYGNGAKDFFREIHIELGREMKLPAEERERLTRQISENENTNFRIKALLAEMMDDNSVENVRPFSPMQQEILKIYEEGVLNSDIEIEDDILKISKTAQPSSSDLKRYKLWLEQKYKSPYTGQIIPLNKLFTPEYEIEHIIPQSRYFDDSFTNKIICESAVNKLKDNYIGLEFIKKLGGSIVECGNGKSVAILKHDAYEDFIKKHYANNRSKRNKLLLEDIPEKMIERQMNDTRYISKYISGVLSNIVRVEDGTDEGVNSKNIVPGNGKITTQLKQDWGLNDVWNDLILPRFERMNHLTNSTDFTAWNENHQKFLPTVPVEFSKGFSKKRIDHRHHALDALVIACATKDHVNLLNNQSAKSDTKRYDLKKKLMKFEKVAYNHPQTGERIEREAPKQFLKPWETFTIDAKNHLETIIVSFKQNLRVINKATNYYEKYVEKEGTKVKERVEQKGTNWAIRKPMHKETVSGKIDLPRIKVPKGKILTATRKSLDTSFNLKTIGSITDTGIQKILKNYLQYKDNNPELAFSPEGIEDMNKNIEKFNNGKAHQSISKVRVFELGSKFPLGQSGNKKEKYVEAAKGTNLFFAIYQDKNGKRSYETIPLNEVIERQKQGLSVVDLKGVDDFYLSPNDLVYVPSEDELENISMIDFNKMSSERIYKVVSFTGNQIFFVRQDIATSVVNKAEFSTLNKMERAIDGTMIKETCVKLQIDRLGNISKI

SEQ ID NO: 424 - protein, 1110 aa, Sphingobium sp.
  REGION 1..1110: note = Sphingobium sp. AP49
MAEGKKRIWRLGADLGANSLGWAAIELSAPVNGKPIAILAAGSRIFSDGRDPKSGASLAVDRRDARAMRRRRDRFKQRQKALIKYLIADGLFPADEAARNAMAAIDPYAVRARALDEALSLPELGRALFHLNQRRGFKSNRKADRKADDDAGKIAIGIDRTRDAIAEDEADAGAEPGSWTFGKWLHERRLKGQSVRTRLRPESGEDAKGDGYDFYPDRALMEEEFDAIWAAQAPHHPDVLTNDVHDRLHEIIFYQRPLKAPQVGMCSLIPGDRRLPKAHPLFQRRRLLEELNALMIVRPGEVAQRLTREERDILLLKLKDKNKVSFATLRKALKLDPDARFNKESEDRTDLKGDEVAAVMGSKTRFGNLWVHLSIEAQWDVLARLDAVESDAEDAAFCAWLVETYALTPEQARAVANAPLPPGYGRFGETATRKLIEALRDGKKDDRVLVYSEAVTEAGLGHHSDRRTGEVFEDAKGRPQLPYYGVALERHIMPGTGDPSDPEEMRVGRLTNPTVHIGLNQLRRILNVLIRAYGPPAEIAIELARELKLTDEDKKRINRENNDNRIAAERRSEKLLAIGQADSGANRALLKLWEELNPANVLDRRCIYSGRQISIDMLFSAAVEVDHILPFAATLDDSNGNKIVCLREANREKRKRSPHDAWGHSARWDEIAARAAQLPRNKRWRFEPDAMDKFRDEGGFQARHLVDTQYLARLSREYLATLYPEKGEGSGHIWVSPGRLTEMVRRKLGLNDLLPDHNFGGGADQAKNRLDHRHHAIDAVVVAIVDRGMLNAIARASGQEGAEGRERIIIPEPWDGFRDALRETVNRITVSHRTDHGTASKAGLPKGKDATAGRLHNDTAYGFTGDTDAKGNSIVVRRVPLSSFKKLADLDRIRDADLKAALYQHLNGLEGKAFEKALAEFHKLEWHNFGGVRRVRVTEPLTVIPIKDRNGRIYKGYKGDSNYRYDVWELPDGKWVTNWKNEAGEAMSSVISMFDAHQSSEPPRPHPAARKILSLHQNDLLAIEREGEDRKLMRVVKFGQSGQITLAEHQQAGDLKKRDAVSNDDDPFKYFAPTSGGLKKVKARQVRIDEIGRVLDPGFPARTARRKTRG

SEQ ID NO: 425 - protein, 1090 aa, Sphingomonas sp.
  REGION 1..1090: note = Sphingomonas sp. S17
MDWRLGLDLGANSLGWAALRLDRAGDPIGILAMGSRIFSDGRDPKSGASLAVDRRAARAMRRRRDRFKQRQAALLKYLIRDGLFPADQADRQRLADEDPYALRARALDEELSLFEIGRALFHLNQRRGFQSNRKADRGQDDEAGKIAVGVDRLNQQMEEQGARTLGEFLHQRRRAATDANHIPSVRTRLRPETGEGAKGDGYDFYPSRALIAEEFEEIWAAQAPHYPDTLTQQVHDRLYEIIFHQRPLRAPQVGQCTLVAGETRLPKAHPLFQKRRLLEEINALMIVRPGEIAQRLTPEERDTLYLKLKDKRTVSFATLRKTLKLDSAARFNKESENRTELKGDEVAAELGAKTRLGTRWQHLSGDQQWEVVHRLMALESQADEAAFRDWISQTYDLLPEQAAAVLGARLPQGHGRFGPTATTTLIDSLLHDRTEDGRVVVYSEAVQRSGLGHHSDLRHDRDDEDVTELPYYGVALERHIMPGTAEPTDPEEMRIGRLTNPTVHIGLNQLRHVVNRLIRAYGPPKEIAIELARELKLSEDEKKKRNSENRDNRLAAEGRSKKLEEIRQRDTGANRALLKLWEELNPGNVLDRRCIYTGEQISIDMLFSDRVEVDHILPFAQTLDDSNGNKLLCLREANREKRRRSPYEAWGHTDRWPDIAERASRLPKPKRWRFEPDAMQRFATEDGFLARHLVDTQYLGRLAREYLSWLYPGRGEGSGHVWVSPGRLTEMVRRKLGLNDLLPDHNFGGGADQPKNRLDHRHHAIDALVVAIVDRGMLQAIARASGQDGSEGRERIHIPAPWDGFRDDLRVAVNGIIVSHRPDHGTVAKAGLARGRDQTAGRLHNDTAYGLTGETDAKGNSIVVRRIPLSAIKKPADIARVRDPLLRNALAEFTKGLDGKAFEARIGRFHELGPLLYRGIRRVRVVETLTVIPIRDAEGRAYKGYKGDSNYRYDVWEMPDGKWRCQVVSMFDAHQSTEQARPHPAARKILSLQRNDILAIERTEGDRELVRVVKFSEKQFAVAPPHEGGSLKTRDGNADDPFRYLYPSPNTLKGWRARQVRIDELGRVLDPGFPARKSVRRTRPRAAPVD

SEQ ID NO: 426 - protein, 1084 aa, Sporolactobacillus vineae
  REGION 1..1084: note = Sporolactobacillus vineae DSM 21990 = SL153
MKYSIGLDIGISSVGWSVINLDRERIELMGARLFDAAENPKNGSSLAAPRRDARSARRRLRRRRYRVGRVRHFIIDRGLVTRGQADQLFDWKDGDLDIWLVRVNALERLLTDREFARVLIHIAKNRGYRSNRKSEAKSGENGQVLSAIKANKELMEEKGYQTVAEMLVNEPETFAGRKRNRGGEYTHVIARSELEHEIRLIFTKQRAFGNRFATEENENTYVKIWAAQRPVATKDDILKKIGDCTFEKGEKRAPKASYAFQYFRALDKLNRLRILSVREPSRNLTDDERNLIVPALFNHDKQKYSDLRKILQLRDDQKFNELFYDPGKSLKENENKTFLSLAEQYKIRKVIRDVQGKDGLLQYRPLDIDTIAYALTVFKDDQDTRDYLSNTFVNGNGKQVLNLANRAFDAELIDGLLSLSFAKFGHLSLKALHKLIPHMEQGLSYYDACKKVGYHDNEQVGKSKQHLLPVIPADEIRNPVVVRSLSQTRKVINAIIKRYGSPTFMYIELAREMGRPYNERRDLEKQYNKNRTVNDSAIEQIHELYPEIGAPRGHDILKYKLWQQQDCKCAYSLEKIPAEKIFEPGYAEVDHIIPYSRSFDDSNSNKVLVLSRMNQEKKNRTPYEWFGGDEHRWNKFESYVNALKVNRKKKSLLTKKNMDTEEEDTFKSRHLNDTRYITRFIKSFVEDNLLFREIEGAKQHVFTVNGAYTSLMRKRWGFNKNREESDLHHSVDAVIIAVSQPFRNEVSRYFKHREISLPQLLKRTWDYFPEPWEGFVKELRARTLQDPEKLKLALESLDLDSYDPEFIDEVKPIFISRMPKRSIKGQIHDETLRRNRGKTKDGFVKIVTRTRLENIKFDKNGDFPMYGRESDPKTYQAIKQRYLENNKDKKKAFIEPLYKPAKNPNNASLIRSVKIEDKANQIVPLRDEAVAYNASIVRTEVYRNKETGKFYLAPVYVSDVFAGREPRRFIRANVPYEQWVNITDKFTFLFNLYPNDVIYIKMKKVKTTKSNINKTISWQESYFYFKGTDIHTGAITIIDHMNSFTDRVGTQGLQLFEKYQVDPLGNLSRVHGETQYGVPALSHS

SEQ ID NO: 427 - protein, 1053 aa, Staphylococcus aureus; identical to SEQ ID NO: 28
  REGION 1..1053: note = Staphylococcus aureus subsp. aureus

SEQ ID NO: 428 - protein, 1054 aa, Staphylococcus lugdunensis
  REGION 1..1054: note = Staphylococcus lugdunensis M23590
MNQKFILGLDIGITSVGYGLIDYETKNIIDAGVRLFPEANVENNEGRRSKRGSRRLKRRRIHRLERVKKLLEDYNLLDQSQIPQSTNPYAIRVKGLSEALSKDELVIALLHIAKRRGIHKIDVIDSNDDVGNELSTKEQLNKNSKLLKDKFVCQIQLERMNEGQVRGEKNRFKTADIIKEIIQLLNVQKNFHQLDENFINKYIELVEMRREYFEGPGKGSPYGWEGDPKAWYETLMGHCTYFPDELRSVKYAYSADLFNALNDLNNLVIQRDGLSKLEYHEKYHIIENVFKQKKKPTLKQIANEINVNPEDIKGYRITKSGKPQFTEFKLYHDLKSVLFDQSILENEDVLDQIAEILTIYQDKDSIKSKLTELDILLNEEDKENIAQLTGYTGTHRLSLKCIRLVLEEQWYSSRNQMEIFTHLNIKPKKINLTAANKIPKAMIDEFILSPVVKRTFGQAINLINKIIEKYGVPEDIIIELARENNSKDKQKFINEMQKKNENTRKRINEIIGKYGNQNAKRLVEKIRLHDEQEGKCLYSLESIPLEDLLNNPNHYEVDHIIPRSVSFDNSYHNKVLVKQSENSKKSNLTPYQYFNSGKSKLSYNQFKQHILNLSKSQDRISKKKKEYLLEERDINKFEVQKEFINRNLVDTRYATRELTNYLKAYFSANNMNVKVKTINGSFTDYLRKVWKFKKERNHGYKHHAEDALIIANADFLFKENKKLKAVNSVLEKPEIESKQLDIQVDSEDNYSEMFIIPKQVQDIKDFRNFKYSHRVDKKPNRQLINDTLYSTRKKDNSTYIVQTIKDIYAKDNTTLKKQFDKSPEKFLMYQHDPRTFEKLEVIMKQYANEKNPLAKYHEETGEYLTKYSKKNNGPIVKSLKYIGNKLGSHLDVTHQFKSSTKKLVKLSIKPYRFDVYLTDKGYKFITISYLDVLKKDNYYYIPEQKYDKLKLGKAIDKNAKFIASFYKNDLIKLDGEIYKIIGVNSDTRNMIELDLPDIRYKEYCELNNIKGEPRIKKTIGKKVNSIEKLTTDVLGNVFTNTQYTKPQLLFKRGN

SEQ ID NO: 429 - protein, 1334 aa, Staphylococcus pseudintermedius
MGRKPYILSLDIGTGSVGYACMDKGFNVLKYHDKDALGVYLFDGALTAQERRQFRTSRRRKNRRIKRLGLLQELLAPLVQNPNFYQFQRQFAWKNDNMDFKNKSLSEVLSFLGYESKKYPTIYHLQEALLLKDEKFDPELIYMALYHLVKYRGHFLFDHLKIENLTNNDNMHDFVELIETYENLNNIKLNLDYEKTKVIYEILKDNEMTKNDRAKRVKNMEKKLEQFSIMLLGLKFNEGKLFNHADNAEELKGANQSHTFADNYEENLTPFLTVEQSEFIERANKIYLSLTLQDILKGKKSMAMSKVAAYDKFRNELKQVKDIVYKADSTRTQFKKIFVSSKKSLKQYDATPNDQTFSSLCLFDQYLIRPKKQYSLLIKELKKIIPQDSELYFEAENDTLLKVLNTTDNASIPMQINLYEAETILRNQQKYHAEITDEMIEKVLSLIQFRIPYYVGPLVNDHTASKFGWMERKSNESIKPWNFDEVVDRSKSATQFIRRMTNKCSYLINEDVLPKNSLLYQEMEVLNELNATQIRLQTDPKNRKYRMMPQIKLFAVEHIFKKYKTVSHSKFLEIMLNSNHRENFMNHGEKLSIFGTQDDKKFASKLSSYQDMTKIFGDIEGKRAQIEEIIQWITIFEDKKILVQKLKECYPELTSKQINQLKKLNYSGWGRLSEKLLTHAYQGHSIIELLRHSDENFMEILTNDVYGFQNFIKEENQVQSNKIQHQDIANLTTSPALKKGIWSTIKLVRELTSIFGEPEKIIMEFATEDQQKGKKQKSRKQLWDDNIKKNKLKSVDEYKYIIDVANKLNNEQLQQEKLWLYLSQNGKCMYSGQSIDLDALLSPNATKHYEVDHIFPRSFIKDDSIDNKVLVIKKMNQTKGDQVPLQFIQQPYERIAYWKSLNKAGLISDSKLHKLMKPEFTAMDKEGFIQRQLVETRQISVHVRDFLKEEYPNTKVIPMKAKMVSEFRKKFDIPKIRQMNDAHHAIDAYLNGVVYHGAQLAYPNVDLFDFNFKWEKVREKWKALGEFNTKQKSRELFFFKKLEKMEVSQGERLISKIKLDMNHFKINYSRKLANIPQQFYNQTAVSPKTAELKYESNKSNEVVYKGLTPYQTYVVAIKSVNKKGKEKMEYQMIDHYVFDFYKFQNGNEKELALYLAQRENKDEVLDAQIVYSLNKGDLLYINNHPCYFVSRKEVINAKQFELTVEQQLSLYNVMNNKETNVEKLLIEYDFIAEKVINEYHHYLNSKLKEKRVRTFFSESNQTHEDFIKALDELFKVVTASATRSDKIGSRKNSMTHRAFLGKGKDVKIAYTSISGLKTTKPKSLFKLAESRNEL

SEQ ID NO: 430 - protein, 1334 aa, Staphylococcus pseudintermedius; identical to SEQ ID NO: 429
  REGION 1..1334: note = Staphylococcus pseudintermedius ED99

SEQ ID NO: 431 - protein, 1112 aa, Staphylococcus simulans
  REGION 1..1112: note = Staphylococcus simulans ACS-120-V-Sch1
MLVGLKFKQSILFENMENAEDIKESATGSDAISLSDDYYENLSEFLTDEQLNFIESANTFFMGIMLDRILKGATSISAAKVRDYKIFKSQLKLIKDIVYQNKYDKYHEFFVTSKEDMRAYQENPDAKNFGKLSKFDQYLIHSKDQYAKLMKDLKGLVPKEYTEVLNLIDEQKFLVVQNTTDNASIPYQNNVFEAENILRNQQKYYPEITEEMIGKVINLISFRIPYYVGPLTNKNGQSDFAWMIRKSDEQTLPWNFDKVIDKSKSAEKFIRRMTSKCTYLLEEDVLPKHSLLYQEMEVLNELNNVQLRGENEPKHRIHRLDPKVKQFIYHNLFQKKKNVTHKDLITLLQNSEHRNTLNKTSGQKLKVFGTQNDSKFASKLSTYNDMKAILGSVENKRQMIEELVLWITIFEDKAILKQKIGEKYPNITEKQLNQIVKLNYSGWGRLSEKLLTKEVNGRSLIDLMYSTENNFMEIITDKTLGFDCFIKNSNKVKNAKISYKDVAELRTSPALKKGIWNAIKMVREISNLFGAPEKIIIEFATEDQAKGKRQKSRSELWDDLVKKNNLKRNKEFEGLFEELKAYPDLDFSNPKLWLYIHQNGKCMYTKKPIDLERLMSDTNNQLYEIDHILPRTFVKDDSINNKVLVIQSANQKKSGDKMPLEIFDNHVLVPFWKMLYENDLISSSKLSKLMKKEFNDLDKEGFIQRQLVETRQIISHVSDFLTEEYPSTTVVPMKANVVSELRRKFDIPKIRQLNDWHHAVDAYLNGFVYQAARVFYPKVNLFEFNFKWEKVREKWRQLGEFTENNKKREFFLFKRMENYVNEYGEGMISKLIFDLDNFKFNYSRKVESTESAFYKQSAFSPKNTTAQYDSDKNKTAIYKEMKNKRGIVVSYTYVKKDQELIGYGVFNETVFEYVNNADVDMNTRALKIVRKAFPKLDIKKAQYLFSINKGDALLVNGHPFLFVSAYERINGKQLEFDIAMQRKIKQALSPYNNMTEQEKVEFYNQFAEKVIEEFRNSIGLQSRDRKVNLIKNLFNNTEKSNDSMTQSILEVLKMTKVSAERSKELKIRWNGQTPNTFIDTKNNAEIQYKSITGLKTTKPKSIFKLAESKNEL

SEQ ID NO: 432 - protein, 1370 aa, Streptococcus agalactiae
  REGION 1..1370: note = Streptococcus agalactiae 2603V/R
MNKPYSIGLDIGTNSVGWSIITDDYKVPAKKMRVLGNTDKEYIKKNLIGALLFDGGNTAADRRLKRTARRRYTRRRNRILYLQEIFAEEMSKVDDSFFHRLEDSFLVEEDKRGSKYPIFATLQEEKDYHEKFSTIYHLRKELADKKEKADLRLIYIALAHIIKFRGHFLIEDDSFDVRNTDISKQYQDFLEIFNTTFENNDLLSQNVDVEAILTDKISKSAKKDRILAQYPNQKSTGIFAEFLKLIVGNQADFKKYFNLEDKTPLQFAKDSYDEDLENLLGQIGDEFADLFSAAKKLYDSVLLSGILTVIDLSTKAPLSASMIQRYDEHREDLKQLKQFVKASLPEKYQEIFADSSKDGYAGYIEGKTNQEAFYKYLSKLLTKQEDSENFLEKIKNEDFLRKQRTFDNGSIPHQVHLTELKAIIRRQSEYYPFLKENQDRIEKILTFRIPYYIGPLAREKSDFAWMTRKTDDSIRPWNFEDLVDKEKSAEAFIHRMTNNDFYLPEEKVLPKHSLIYEKFTVYNELTKVRYKNEQGETYFFDSNIKQEIFDGVFKEHRKVSKKKLLDFLAKEYEEFRIVDVIGLDKENKAFNASLGTYHDLEKILDKDFLDNPDNESILEDIVQTLTLFEDREMIKKRLENYKDLFTESQLKKLYRRHYTGWGRLSAKLINGIRDKESQKTILDYLIDDGRSNRNFMQLINDDGLSFKSIISKAQAGSHSDNLKEVVGELAGSPAIKKGILQSLKIVDELVKVMGYEPEQIVVEMARENQTTNQGRRNSRQRYKLLDDGVKNLASDLNGNILKEYPTDNQALQNERLFLYYLQNGRDMYTGEALDIDNLSQYDIDHIIPQAFIKDDSIDNRVLVSSAKNRGKSDDVPSLEIVKDCKVFWKKLLDAKLMSQRKYDNLTKAERGGLTSDDKARFIQRQLVETRQITKHVARILDERFNNELDSKGRRIRKVKIVTLKSNLVSNFRKEFGFYKIREVNNYHHAHDAYLNAVVAKAILTKYPQLEPEFVYGDYPKYNSYKTRKSATEKLFFYSNIMNFFKTKVTLADGTVVVKDDIEVNNDTGEIVWDKKKHFATVRKVLSYPQNNIVKKTEIQTGGFSKESILAHGNSDKLIPRKTKDIYLDPKKYGGFDSPIVAYSVLVVADIKKGKAQKLKTVTELLGITIMERSRFEKNPSAFLESKGYLNIRADKLIILPKYSLFELENGRRRLLASAGELQKGNELALPTQFMKFLYLASRYNESKGKPEEIEKKQEFVNQHVSYFDDILQLINDFSKRVILADANLEKINKLYQDNKENISVDELANNIINLFTFTSLGAPAAFKFFDKIVDRKRYTSTKEVLNSTLIHQSITGLYETRIDLGKLGED

SEQ ID NO: 433 - protein, 1377 aa, Streptococcus agalactiae
  REGION 1..1377: note = Streptococcus agalactiae 515
MNKPYSIGLDIGTNSVGWSIITDDYKVPAKKMRVLGNTDKEYIKKNLIGALLFDGGNTAADRRLKRTARRRYTRRRNRILYLQEIFAEEMSKVDDSFFHRLEDSFLVEEDKRGSKYPIFATMQEEKYYHEKFPTIYHLRKELADKKEKADLRLVYLALAHIIKFRGHFLIEDDRFDVRNTDIQKQYQAFLEIFDTTFENNHLLSQNVDVEAILTDKISKSAKKDRILAQYPNQKSTGIFAEFLKLIVGNQADFKKHFNLEDKTPLQFAKDSYDEDLENLLGQIGDEFADLFSVAKKLYDSVLLSGILTVTDLSTKAPLSASMIQRYDEHHEDLKHLKQFVKASLPENYREVFADSSKDGYAGYIEGKTNQEAFYKYLLKLLTKQEGSEYFLEKIKNEDFLRKQRTFDNGSIPHQVHLTELRAIIRRQSEYYPFLKENQDRIEKILTFRIPYYVGPLAREKSDFAWMTRKTDDSIRPWNFEDLVDKEKSAEAFIHRMTNNDLYLPEEKVLPKHSLIYEKFTVYNELTKVRFLAEGFKDFQFLNRKQKETIFNSLFKEKRKVTEKDIISFLNKVDGYEGIAIKGIEKQFNASLSTYHDLKKILGKDFLDNTDNELILEDIVQTLTLFEDREMIKKCLDIYKDFFTESQLKKLYRRHYTGWGRLSAKLINGIRNKENQKTILDYLIDDGSANRNFMQLINDDDLSFKPIIDKARTGSHSDNLKEVVGELAGSPAIKKGILQSLKIVDELVKVMGYEPEQIVVEMARENQTTAKGLSRSRQRLTTLRESLANLKSNILEEKKPKYVKDQVENHHLSDDRLFLYYLQNGRDMYTKKALDIDNLSQYDIDHIIPQAFIKDDSIDNRVLVSSAKNRGKSDDVPSIEIVKARKMFWKNLLDAKLMSQRKYDNLTKAERGGLTSDDKARFIQRQLVETRQITKHVARILDERFNNEVDNGKKICKVKIVTLKSNLVSNFRKEFGFYKIREVNDYHHAHDAYLNAVVAKAILTKYPQLEPEFVYGMYRQKKLSKIVHEDKEEKYSEATRKMFFYSNLMNMFKRVVRLADGSIVVRPVIETGRYMGKTAWDKKKHFATVRKVLSYPQNNIVKKTEIQTGGFSKESILAHGNSDKLIPRKTKDIYLDPKKYGGFDSPIVAYSVLVVADIKKGKAQKLKTVTELLGITIMERSRFEKNPSAFLESKGYLNIRDDKLMILPKYSLFELENGRRRLLASAGELQKGNELALPTQFMKFLYLASRYNESKGKPEEIEKKQEFVNQHVSYFDDILQLINDFSKRVILADANLEKINKLYQDNKENIPVDELANNIINLFTFTSLGAPAAFKFFDKIVDRKRYTSTKEVLNSTLIHQSITGLYETRIDLGKLGED

SEQ ID NO: 434 - protein, 1370 aa, Streptococcus agalactiae; identical to SEQ ID NO: 432

SEQ ID NO: 435 - protein, 1378 aa, Streptococcus agalactiae
  REGION 1..1378: note = Streptococcus agalactiae ATCC 13813
MNKPYSIGLDIGTNSVGWSIITDDYKVPAKKMRVLGNTDKEYIKKNLIGALLFDGGNTAADRRLKRTARRRYTRRRNRILYLQEIFAEEMSKVDDSFFHRLEDSFLVEEDKRGSKYPIFATMQEEKYYHEKFPTIYHLRKELADKKEKADLRLIYLALAHIIKFRGHFLIEDDRFDVRNTDIQKQYQAFLEIFDTTFENNDLLSQNVDVEAILTDKISKSAKKDRILARYPNQKSTGIFAEFLKLIVGNQADFKKHFNLEDKTPLQFAKDSYDEDLENLLGQIGDEFADLFSAAKKLYDSVLLSGILTVIDLSTKAPLSASMIQRYDEHHEDLKHLKQFVKASLPENYREVFADSSKDGYAGYIEGKTSQEAFYKYLLKLLTKQEGSEYLLEKIKNEDFLRKQRTFDNGSIPHQVHLTELRAIIRRQSEYYPFLKENLDRIEKILTFRIPYYVGPLAREKSDFAWMTRKTDDSIRPWNFEDLVDKEKSAEAFIHRMTNNDLYLPEEKVLPKHSLIYEKFTVYNELTKVRFLAEGFKDFQFLNRKQKETIFNSLFKEKRKVTEKDIISFLNKVDGYEGIAIKGIEKQFNASLSTYHDLKKILGKDFLDNTDNELILEDIIQTLTLFEDREMIKKRLDIYKDFFTESQLKKLYRRHYTGWGRLSAKLINGIRNKENQKTILDYLIDDGSANRNFMQLIKDAGLSFKPIIDKARTGSHSDNLKEVVGELAGSPAIKKGILQSLKIVDELVKVMGYEPEQIVVEMARENQTTAKGLSRSRQRLTTLRESLGNLKSNILEEKKPKYVKDQVENHHLSDDRLFLYYLQNGKDMYTDDELDIDNLSQYDIDHIIPQAFIKDDSIDNRVLVSSAKNRGKSDDVPSIEIVKARKMFWKNLLDAKLMSQRKYDNLTKAERGGLTSDDKARFIQRQLVETRQITKHVARILDERFNNELDSKGRRIRKVKIVTLKSNLVSNFRKEFGFYKIREVNNYHHAHDAYLNAVVAKAILTKYPQLEPEFVYGLYRRKKLSKIVREDKEEKYSEATRKMFFYSNLMNMFKRVVRLADGSIVVRPVIETGRYMGKTAWDKKKHFATVRKVLSYPQNNIVKKTEIQTGGFSKESILAHGNSDKLIPRKTKDIYLDPKKYGGFDSPIVAYSVLVVADIKKGKAQKLKTVTELLGITIMERSRFEKNTSAFLESKGYLNIRDDKLMILPKYSLFELENGRRRLLASAGELQKGNELALPTQFMKFLYLASRYNESKGKPEEIEKKQEFVNQHVSYFDDILQLINDFSNRVILADANLEKINKLYQDNKENIPVDELANNIINLFTFTSLGAPAAFKFFDKIVDRKRYTSTKEVLNSTLIHQSITGLYETRIDLGKLGEG

SEQ ID NO: 436 - protein, 1370 aa, Streptococcus agalactiae
  REGION 1..1370: note = Streptococcus agalactiae CJB111
  MOD_RES 117: note = Any amino acid
MNKPYSIGLDIGTNSVGWSIITDDYKVPAKKMRVLGNTDKEYIKKNLIGALLFDGGNTAADRRLKRTARRRYTRRRNRILYLQEIFAEEMSKVDDSFFHRLEDSFLVEEDKRGSKYXIFATLQEEKDYHEKFSTIYHLRKELADKKEKADLRLIYIALAHIIKFRGHFLIEDDSFDVRNTDISKQYQDFLEIFNTTFENNDLLSQNVDVEAILTDKISKSAKKDRILAQYPNQKSTGIFAEFLKLIVGNQADFKKYFNLEDKTPLQFAKDSYDEDLENLLGQIGDEFADLFSAAKKLYDSVLLSGILTVIDLSTKAPLSASMIQRYDEHREDLKQLKQFVKASLPEKYQEIFADSSKDGYAGYIEGKTNQEAFYKYLSKLLTKQEDSENFLEKIKNEDFLRKQRTFDNGSIPHQVHLTELKAIIRRQSEYYPFLKENQDRIEKILTFRIPYYIGPLAREKSDFAWMTRKTDDSIRPWNFEDLVDKEKSAEAFIHRMTNNDFYLPEEKVLPKHSLIYEKFTVYNELTKVRYKNEQGETYFFDSNIKQEIFDGVFKEHRKVSKKKLLDFLAKEYEEFRIVDVIGLDKENKAFNASLGTYHDLEKILDKDFLDNPDNESILEDIVQTLTLFEDREMIKKRLENYKDLFTESQLKKLYRRHYTGWGRLSAKLINGIRDKESQKTILDYLIDDGRSNRNFMQLINDDGLSFKSIISKAQAGSHSDNLKEVVGELAGSPAIKKGILQSLKIVDELVKVMGYEPEQIVVEMARENQTTNQGRRNSRQRYKLLDDGVKNLASDLNGNILKEYPTDNQALQNERLFLYYLQNGRDMYTGEALDIDNLSQYDIDHIIPQAFIKDDSIDNRVLVSSAKNRGKSDDVPSLEIVKDCKVFWKKLLDAKLMSQRKYDNLTKAERGGLTSDDKARFIQRQLVETRQITKHVARILDERFNNELDSKGRRIRKVKIVTLKSNLVSNFRKEFGFYKIREVNNYHHAHDAYLNAVVAKAILTKYPQLEPEFVYGDYPKYNSYKTRKSATEKLFFYSNIMNFFKTKVTLADGTVVVKDDIEVNNDTGEIVWDKKKHFATVRKVLSYPQNNIVKKTEIQTGGFSKESILAHGNSDKLIPRKTKDIYLDPKKYGGFDSPIVAYSVLVVADIKKGKAQKLKTVTELLGITIMERSRFEKNPSAFLESKGYLNIRADKLIILPKYSLFELENGRRRLLASAGELQKGNELALPTQFMKFLYLASRYNESKGKPEEIEKKQEFVNQHVSYFDDILQLINDFSKRVILADANLEKINKLYQDNKENISVDELANNIINLFTFTSLGAPAAFKFFDKIVDRKRYTSTKEVLNSTLIHQSITGLYETRIDLGKLGED

SEQ ID NO: 437 - protein, 1370 aa, Streptococcus agalactiae
  REGION 1..1370: note = Streptococcus agalactiae COH1
MNKPYSIGLDIGTNSVGYSVVTDDYKVPAKKMRVLGNTDKEYIKKNLIGALLFDGGNTASDRRLKRTARRRYTRRRNRILYLQEIFAEEMSKVDDSFFHRLEDSFLVEDDKRGSKYPIFATMQEEKDYHEKFPTIYHLRKELADKKEKANLRLVYLALAHIIKFRGHFLIEDDSFDVRNTDIQRQYQAFLEIFDTTFENNHLLSQNIDVEGILTDKISKSAKKDRILAQYPNQKSTGIFAEFLKLIVGNQADFKKHFNLEDKTPLQFAKDSYDEDLENLLGQIGDEFADLFSVAKKLYDSVLLSGILTVTDLSTKAPLSASMIQRYDEHREDLKQLKQFVKASLPEKYQEIFTDSSKDGYAGYIEGKTNQGAFYKYLSKLLTKQEGSEYFLEKIKNEDFLRKQRTFDNGSIPHQVHLTELKAIIRRQSEYYPFLKENLDRIEKILTFRIPYYVGPLAREKSDFAWMTRKTDDSIRPWNFEELVDKEASAEAFIHRMTNNDLYLPEEKVLPKHSLIYEKFTVYNELTKVRYKNEQGETYFFDSNIKQEIFDGVFKEHRKVSKKKLLDFLAKEYEEFRIVDVIGLDKENKAFNASLGTYHDLKKILDKDFLDNPDNESILEDIVQTLTLFEDREMIKKRLENYKDLFTESQLKKLYRRHYTGWGRLSAKLINGIRDKESQKTILDYLISDGRANRNFMQLIHDDGLSFKPIIDKAQAGSHSDNLKEVVGELAGSPAIKKGILQSLKIVDELVKVMGYEPEQVVVEMARENQTTNQGRRNTRQRYKLLEEGVKNLASDLNGNILKEYPTDNQALQNERLFLYYLQNGRDMYTGEALDIDNLSQYDIDHIVPQAFIKDDSIDNRVLVSSAKNRGKSDNVPSIDIVKARKAFWKKLLDAKLMSQRKYDNLTKAERGGLTSDDKARFIQRQLVETRQITKHVARILDERFNNELDSKGRRIRKVKIVTLKSNLVSNFRKEFGFYKIREVNDYHHAHDAYLNAVVAKAILTKYPQLEPEFVYGDYPKYNSYKTRKSATEKLFFYSNIMNFFKTKVTLADGTVVVKDDIEVNNDTGEIVWDKKKHFATVRKVLSYPQVNIVKKTEIQTGGFSKESILAHGNSDKLIPRKTKDIYLDPKKYGGFDSPIVAYSVLVVADIKKGKAQKLKTVTELLGITIMERFRFEKNPSAFLESKGYLNIRDDKLMILPKYSLFELENGRRRLLASAGELQKGNELALPTQYMKFLYLASRYNELKGKPEEIEQKQEFVVQHVSYFDDILQIINDFSNRVILADANLEKINKLYQDNKENISVDELANNIINLFTFTSLGAPAAFKFFDKIVDRKRYTSTKEVLNSTLIHQSITGLYETRIDLGKLGED

SEQ ID NO: 438 - protein, 1370 aa, Streptococcus agalactiae
  REGION 1..1370: note = Streptococcus agalactiae FSL S3-026
MNKPYSIGLDIGTNSVGWSIITDDYKVPAKKMRVLGNTDKEYIKKNLIGALLFDGGNTAADRRLKRTARRRYTRRRNRILYLQEIFAEEMSKVDDSFFHRLEDSFLVEEDKRGSKYPIFATMQEEKYYHEKFPTIYHLRKELADKKEKADLRLIYLALAHIIKFRGHFLIEDDRFDVRNTDIQKQYQAFLEIFDTTFENNDLLSQNVDVEAILTDKISKSAKKDRILARYPNQKSTGIFAEFLKLIVGNQADFKKHFNLEDKTPLQFAKDSYDEDLENLLGQIGDEFADLFSAAKKLYDSVLLSGILTVTDLSTKAPLSASMIQRYDEHREDLKQLKQFVKASLPEKYQEIFADSSKDGYAGYIEGKTNQEAFYKYLSKLLTKQEGSEYLLEKIKNEDFLRKQRTFDNGSIPHQVHLTELRAIIRRQSEYYPFLKENLDRIEKILTFRIPYYVGPLAREKSDFAWMTRKTDDSIRPWNFEDLVDKEKSAEAFIHRMTNNDLYLPEEKVLPKHSLIYEKFTVYNELTKVRFLAEGFKDFQFLNRKQKETIFNSLFKEKRKVTEKDIISFLNKVDGYEGIAIKGIEKQFNASLSTYHDLKKILGKDFLDNTDNELILEDIVQTLTLFEDREMIRKRLDIYKDFFTESQLKKLYRRHYTGWGRLSAKLINGIRNKENQKTILDYLIDDGSANRNFMQLIKDAGLSFKPIIDKARTGSHSDNLKEVVGELAGSPAIKKGILQSLKIVDELVKVMGYEPEQIVVEMARENQTTAKGLSRLRQRLTTLRESLANLKSNILEEKKPKYVKDQVENHHLSDDRLFLYYLQNGKDMYTDDELDIDNLSQYDIDHIIPQAFIKDDSIDNRVLVSSAKNRGKSDDVPSVEIVKDCKVFWKKLLDAKLMSQRKYDNLTKAERGGLTSDDKARFIQRQLVETRQITKHVARILDERFNNELDSKGRRIRKVKIVTLKSNLVSNFRKEFGFYKIREVNNYHHAHDAYLNAVVAKAILTKYPQLEPEFVYGDYPKYNSYKTRKSATEKLFFYSNIMNFFKTKVTLADGTVVVKDDIEVNNDTGEIVWDKKKHFATVRKVLSYPQVNIVKKTEIQTGGFSKESILAHGNSDKLIPRKTKDIYLDPKKYGGFDSPIVAYSVLVVADIKKGKAQKLKTVTELLGITIMERSRFEKNPSAFLESKGYLNIRDDKLMILPKYSLFELENGRRRLLASADELQKGNELALPTQFMKFLYLASRYNELKGKPEEIEQKQEFVVQHVSYFDDILQIINDFSNRVILADANLEKINKLYQDNKENIPVDELANNIINLFTFTSLGAPAAFKFFDKIVDRKRYTSTKEVLNSTLIHQSITGLYETRIDLGKLGED

SEQ ID NO: 439 - protein, 1370 aa, Streptococcus agalactiae
  REGION 1..1370: note = Streptococcus agalactiae GB00112
MNKPYSIGLDIGTNSVGYSVVTDDYKVPAKKMRVLGNTDKEYIKKNLIGALLFDGGNTASDRRLKRTARRRYTRRRNRILYLQEIFAEEMSKVDDSFFHRLEDSFLVEDDKRGSKYPIFATMQEEKDYHEKFPTIYHLRKELADKKEKADLRLVYLALAHIIKFRGHFLIEDDSFDVRNTDIQRQYQAFLEIFDTTFENNHLLSQNIDVEGILTDKISKSAKKDRILAQYPNQKSTGIFAEFLKLIVGNQADFKKHFNLEDKTPLQFAKDSYDEDLENLLGQIGDEFADLFSVAKKLYDSVLLSGILTVTDLSTKAPLSASMIQRYDEHREDLKQLKQFVKASLPEKYQEIFTDSSKDGYAGYIEGKTNQGAFYKYLSKLLTKQEGSEYFLEKIKNEDFLRKQRTFDNGSIPHQVHLTELKAIIRRQSEYYPFLKENLDRIEKILTFRIPYYVGPLAREKSDFAWMTRKTDDSIRPWNFEELVDKEASAEAFIHRMTNNDLYLPEEKVLPKHSLIYEKFTVYNELTKVRYKNEQGETYFFDSNIKQEIFDGVFKEHRKVSKKKLLDFLAKEYEEFRIVDVIGLDKENKAFNASLGTYHDLKKILDKDFLDNPDNESILEDIVQTLTLFEDREMIKKRLENYKDLFTESQLKKLYRRHYTGWGRLSAKLINGIRDKESQKTILDYLISDGRANRNFMQLIHDDGLSFKPIIDKAQAGSHSDNLKEVVGELAGSPAIKKGILQSLKIVDELVKVMGYEPEQVVVEMARENQTTNQGRRNTRQRYKLLEEGVKNLASDLNGNILKEYPTDNQALQNERLFLYYLQNGRDMYTGEALDIDNLSQYDIDHIVPQAFIKDDSIDNRVLVSSAKNRGKSDNVPSIDIVKARKAFWKKLLDAKLMSQRKYDNLTKAERGGLTSDDKARFIQRQLVETRQITKHVARILDERFNNELDSKGRRIRKVKIVTLKSNLVSNFRKEFGFYKIREVNDYHHAHDAYLNAVVAKAILTKYPQLEPEFVYGDYPKYNSYKTRKSATEKLFFYSNIMNFFKTKVTLADGTVVVKDDIEVNNDTGEIVWDKKKHFATVRKVLSYPQVNIVKKTEIQTGGFSKESILAHGNSDKLIPRKTKDIYLDPKKYGGFDSPIVAYSVLVVADIKKGKAQKLKTVTELLGITIMERFRFEKNPSAFLESKGYLNIRDDKLMILPKYSLFELENGRRRLLASAGELQKGNELALPTQYMKFLYLASRYNELKGKPEEIEQKQEFVVQHVSYFDDILQIINDFSNRVILADANLEKINKLYQDNKENISVDELANNIINLFTFTSLGAPAAFKFFDKIVDRKRYTSTKEVLNSTLIHQSITGLYETRIDLGKLGED

SEQ ID NO: 440 - protein, 1370 aa, Streptococcus agalactiae
  REGION 1..1370: note = Streptococcus agalactiae H36B
  MOD_RES 9: note = Any amino acid
MNKPYSIGXDIGTNSVGWSIITDDYKVPAKKMRVLGNTDKEYIKKNLIGALLFDGGNTAADRRLKRTARRRYTRRRNRILYLQEIFAEEMSKVDDSFFHRLEDSFLVEEDKRGSKYPIFATLQEEKDYHEKFSTIYHLRKELADKKEKADLRLIYIALAHIIKFRGHFLIEDDSFDVRNTDISKQYQDFLEIFNTTFENNDLLSQNVDVEAILTDKISKSAKKDRILAQYPNQKSTGIFAEFLKLIVGNQADFKKYFNLEDKTPLQFAKDSYDEDLENLLGQIGDEFADLFSAAKKLYDSVLLSGILTVIDLSTKAPLSASMIQRYDEHREDLKQLKQFVKASLPEKYQEIFADSSKDGYAGYIEGKTNQEAFYKYLSKLLTKQEDSENFLEKIKNEDFLRKQRTFDNGSIPHQVHLTELKAIIRRQSEYYPFLKENQDRIEKILTFRIPYYIGPLAREKSDFAWMTRKTDDSIRPWNFEDLVDKEKSAEAFIHRMTNNDFYLPEEKVLPKHSLIYEKFTVYNELTKVRYKNEQGETYFFDSNIKQEIFDGVFKEHRKVSKKKLLDFLAKEYEEFRIVDVIGLDKENKAFNASLGTYHDLEKILDKDFLDNPDNESILEDIVQTLTLFEDREMIKKRLENYKDLFTESQLKKLYRRHYTGWGRLSAKLINGIRDKESQKTILDYLIDDGRSNRNFMQLINDDGLSFKSIISKAQAGSHSDNLKEVVGELAGSPAIKKGILQSLKIVDELVKVMGYEPEQIVVEMARENQTTNQGRRNSRQRYKLLDDGVKNLASDLNGNILKEYPTDNQALQNERLFLYYLQNGRDMYTGEALDIDNLSQYDIDHIIPQAFIKDDSIDNRVLVSSAKNRGKSDDVPSLEIVKDCKVFWKKLLDAKLMSQRKYDNLTKAERGGLTSDDKARFIQRQLVETRQITKHVARILDERFNNELDSKGRRIRKVKIVTLKSNLVSNFRKEFGFYKIREVNNYHHAHDAYLNAVVAKAILTKYPQLEPEFVYGDYPKYNSYKTRKSATEKLFFYSNIMNFFKTKVTLADGTVVVKDDIEVNNDTGEIVWDKKKHFATVRKVLSYPQNNIVKKTEIQTGGFSKESILAHGNSDKLIPRKTKDIYLDPKKYGGFDSPIVAYSVLVVADIKKGKAQKLKTVTELLGITIMERSRFEKNPSAFLESKGYLNIRADKLIILPKYSLFELENGRRRLLASAGELQKGNELALPTQFMKFLYLASRYNESKGKPEEIEKKQEFVNQHVSYFDDILQLINDFSKRVILADANLEKINKLYQDNKENISVDELANNIINLFTFTSLGAPAAFKFFDKIVDRKRYTSTKEVLNSTLIHQSITGLYETRIDLGKLGED

SEQ ID NO: 441 - protein, 1377 aa, Streptococcus agalactiae
MNKPYSIGLDIGTNSVGWSIITDDYKVPAKKMRVLGNTDKEYIKKNLIGALLFDGGNTAADRRLKRTARRRYTRRRNRILYLQEIFAEEMSKVDDSFFHRLEDSFLVEEDKRGSKYPIFATMQEEKYYHEKFPTIYHLRKELADKKEKADLRLVYLALAHIIKFRGHFLIEDDRFDVRNTDIQKQYQAFLEIFDTTFENNHLLSQNVDVEAILTDKISKSAKKDRILAQYPNQKSTGIFAEFLKLIVGNQADFKKHFNLEDKTPLQFAKDSYDEDLENLLGQIGDEFADLFSVAKKLYDSVLLSGILTVTDLSTKAPLSASMIQRYDEHHEDLKHLKQFVKASLPENYREVFADSSKDGYAGYIEGKTNQEAFYKYLLKLLTKQEGSEYFLEKIKNEDFLRKQRTFDNGSIPHQVHLTELRAIIRRQSEYYPFLKENQDRIEKILTFRIPYYVGPLAREKSDFAWMTRKTDDSIRPWNFEDLVDKEKSAEAFIHRMTNNDLYLPEEKVLPKHSLIYEKFTVYNELTKVRFLAEGFKDFQFLNRKQKETIFNSLFKEKRKVTEKDIISFLNKVDGYEGIAIKGIEKQFNASLSTYHDLKKILGKDFLDNTDNELILEDIVQTLTLFEDREMIKKCLDIYKDFFTESQLKKLYRRHYTGWGRLSAKLINGIRNKENQKTILDYLIDDGSANRNFMQLINDDDLSFKPIIDKARTGSHSDNLKEVVGELAGSPAIKKGILQSLKIVDELVKVMGYEPEQIVVEMARENQTTAKGLSRSRQRLTTLRESLANLKSNILEEKKPKYVKDQVENHHLSDDRLFLYYLQNGRDMYTKKALDIDNLSQYDIDHIIPQAFIKDDSIDNRVLVSSAKNRGKSDDVPSIEIVKARKMFWKNLLDAKLMSQRKYDNLTKAERGGLTSDDKARFIQRQLVETRQITKHVARILDERFNNEVDNGKKICKVKIVTLKSNLVSNFRKEFGFYKIREVNDYHHAHDAYLNAVVAKAILTKYPQLEPEFVYGMYRQKKLSKIVHEDKEEKYSEATRKMFFYSNLMNMFKRVVRLADGSIVVRPVIETGRYMRKTAWDKKKHFATVRKVLSYPQNNIVKKTEIQTGGFSKESILAHGNSDKLIPRKTKDIYLDPKKYGGFDSPIVAYSVLVVADIKKGKAQKLKTVTELLGITIMERSRFEKNPSAFLESKGYLNIRDDKLMILPKYSLFELENGRRRLLASAGELQKGNELALPTQFMKFLYLASRYNESKGKPEEIEKKQEFVNQHVSYFDDILQLINDFSKRVILADANLEKINKLYQDNKENIPVDELANNIINLFTFTSLGAPAAFKFFDKIVDRKRYTSTKEVLNSTLIHQSITGLYETRIDLGKLGED

SEQ ID NO: 442 - protein, 1370 aa, Streptococcus agalactiae
MNKPYSIGLDIGTNSVGWSIITDDYKVPAKKMRVLGNTDKEYIKKNLIGALLFDGGNTAADRRLKRTARRRYTRRRNRILYLQEIFAEEMSKVDDSFFHRLEDSFLVEEDKRGSKYPIFATMQEEKDYHEKFPTIYHLRKELADKKEKADLRLVYLALAHIIKFRGHFLIEDDRFDVRNTDIQKQYQAFLEIFDTSFENNHLLSQNVDVEAILTDKISKSAKKDRILAQYPNQKSTGIFAEFLKLIVGNQADFKKHFNLEDKTPLQFAKDSYDEDLENLLGQIGDEFADLFSAAKKLYDSVLLSGILTVTDLSTKAPLSASMIQRYDEHREDLKQLKQFVKASLPEKYQEIFADSSKDGYAGYIEGKTNQEAFYKYLSKLLTKQEDSEYFLEKIKNEDFLRKQRTFDNGSIPHQVHLTELKAIIRRQSEYYPFLKENQDKIEKILTFRIPYYVGPLARGNSDFAWMTRKTDDSIRPWNFEDLVDKEKSAEAFIHRMTNNDLYLPEEKVLPKHSLIYEKFTVYNELTKVRYKNEQGETYFFDSNVKQEIFDGVFKEHRKVSKKQLLDFLAKEFEEFRIVDVTGLDKENKAFNASLGTYHDLKKILDKDFLDNPDNESILEDIVQTITLFEDREMIKKRLENYKDLFTESQLKKLYRRHYTGWGRLSAKLINGIRDRESQKTILDYLISDGRANRNFMQLINDDGLSFKSIISKAQSGSHSDNLKEVVGELAGSPAIKKGILQSLKIVDELVKVMGYEPEQIVVEMARENQTTNQGRRNSRQRYKLLEDGVKNLASDLNGDILKEYPTDNQALQNERLFLYYLQNGRDMYTGEALDIDNLSQYDIDHIVPQAFIKDDSIDNRVLVSSAKNRGKSDDVPSIDIVKARKAFWKKLLDAKLISQRKYDNLTKAERGGLTPDDKAGFIQRQLVETRQITKHVARILDERFNNKVDDNNKPIRKVKIVTLKSNLVSNFRKEFGFYKIREVNNYHHAHDAYLNAVVAKAILTKYPQLEPEFVYGDYPKYNSYKTRKSATEKLFFYSNIMNFFKTKVTLADETVVVKDDIEVNNETGEIAWDKKKHFATVRKVLSYPQVNIVKKTEVQTGGFSKESILAHSNSDKLIPRKTKDIYLDPKKYGGFDSPIVAYSVLVLADIKKGKAQKLKTVKELIGITIMERERFEKNPSAFLESKGYLNIRTDKLIILPKYSLFELENGRRRLLASAGELQKGNELALPTQYMKFLYLASRYNESKGKPEEIEKKQEFVNQHVSYFDDILQLINDFSKRVILADANLEKINKLYSDNKDNTPVDELAKNIINLFTFTSLGAPAAFKFFDKSVDRKRYTSTKEVLDSTLIHQSITGLYETRIDLGKLGED

SEQ ID NO: 443 - protein, 1370 aa, Streptococcus agalactiae
  REGION 1..1370: note = Streptococcus agalactiae STIR-CD-17
MNKPYSIGLDIGTNSVGWSIITDDYKVPAKKMRVLGNTDKEYIKKNLIGALLFDGGNTAADRRLKRTARRRYTRRRNRILYLQEIFAEEMSKVDDSFFHRLEDSFLVEEDKRGSKYPIFATMQEEKDYHEKFPTIYHLRKELADKKEKADLRLVYLALAHIIKFRGHFLIEDDRFDVRNTDIQKQYQAFLEIFDTSFENNHLLSQNVDVEAILTDKISKSAKKDRILAQYPNQKSTGIFAEFLKLIVGNQADFKKHFNLEDKTPLQFAKDSYDEDLENLLGQIGDEFADLFSAAKKLYDSVLLSGILTVTDLSTKAPLSAYMIQRYDEHREDLKQLKQFVKASLPEKYQEIFADSSKDGYAGYIEGKTNQEAFYKYLSKLLTKQEDSEYFLEKIKNEDFLRKQRTFDNGSIPHQVHLTELKAIIRRQSEYYPFLKENQDKIEKILTFRIPYYVGPLARGNSDFAWMTRKTDDSIRPWNFEDLVDKEKSAEAFIHRMTNNDLYLPEEKVLPKHSLIYEKFTVYNELTKVRYKNEQGETYFFDSNVKQEIFDGVFKEHRKVSKKQLLDFLAKEFEEFRIVDVTGLDKENKAFNASLGTYHDLKKILDKDFLDNPDNESILEDIVQTITLFEDREMIKKRLENYKDLFTESQLKKLYRRHYTGWGRLSAKLINGIRDRESQKTILDYLISDGRANRNFMQLINDDGLSFKSIISKAQSGSHSDNLKEVVGELAGSPAIKKGILQSLKIVDELVKVMGYEPEQIVVEMARENQTTNQGRRNSRQRYKLLEDGVKNLASDLNGDILKEYPTDNQALQNERLFLYYLQNGRDMYTGEALDIDNLSQYDIDHIVPQAFIKDDSIDNRVLVSSAKNRGKSDDVPSIDIVKARKAFWKKLLDAKLISQRKYDNLTKAERGGLTPDDKAGFIQRQLVETRQITKHVARILDERFNNKVDDNNKPIRKVKIVTLKSNLVSNFRKEFGFYKIREVNNYHHAHDAYLNAVVAKAILTKYPQLEPEFVYGDYPKYNSYKTRKSATEKLFFYSNIMNFFKTKVTLADETVVVKDDIEVNNETGEIAWDKKKHFATVRKVLSYPQVNIVKKTEVQTGGFSKESILAHSNSDKLIPRKTKDIYLDPKKYGGFDSPIVAYSVLVLADIKKGKAQKLKTVKELIGITIMERERFEKNPSAFLESKGYLNIRTDKLIILPKYSLFELENGRRRLLASAGELQKGNELALPTQYMKFLYLASRYNESKGKPEEIEKKQEFVNQHISYFDDILQLINDFSKRVILADANLEKINKLYSDNKDNTPVDELAKNIINLFTFTSLGAPAAFKFFDKSVDRKRYTSTKEVLDSTLIHQSITGLYETRIDLGKLGED

SEQ ID NO: 444 - protein, 1125 aa, Streptococcus anginosus
  REGION 1..1125: note = Streptococcus anginosus 1_2_62CV
MNGLVLGLDIGIASVGVGILNKETGEIIHANSRIFPAATADSNVERRGFRQGRRLGRRKKHRSARLNNLFEEFGFITDFSAIPLNLNPYALRVKGLSEELTNEELFIALKNIIKRRGISYLDDASEDGETASNEYGKAVEENRKLLADKTPGQIQLERFEKYGQVRGDFTVVENGENHRLINVFSTSAYKKEAERILRRQQEFNVRISDEFIEAYLTILTGKRKYYHGPGNEKSRTDYGRFRTDGTTLDNIFGILIGKCTFYPDEYRAAKASYTAQEFNLLNDLNNLTVPTETKKLSPEQKRQIVEYARTAKTLGTPTLLKYIAKLVDGSIDDIKGYRIDKSDKPEMHTFDAYRKMRTLDLVNIDALSRETLDDLAHILTLNTESEGILEALNSKMPSTFTKEQIDELIQFRKKNSAVFGKGWHNFSLKLMNELISELYETSEEQMTILTRLGKQRSREISKRTKYIDEKELTEEIYNPVVAKSVRQAIKIINEATKRYGIFDNIVIEMARENNEEDAKKDYIKRQKANQDEKNASMEKAAFQYNGKKELPDSIFHGHKELATKIRLWHQQGERCLYTGKNISIRDLIHNPHQYEIDHILPLSLSFDDGLANKVLVLATANQEKGQRTPFQAIDSMDDAWSYREFKQYVRNSKSLSNKKKDYLLTEEDISKIEVKQKFIERNLVDTRYSSRVVLNTLQEFYKTNDFDTKISVVRGQFTSQLRRKWKIEKSRDTYHHHAVDALIIAASSQLRLWKKQNNPLISYKEGQFVDPETGEILSLTDDEYKELVFRPPYDYFVDTLKSKSFEDSILFSYQVDSKYNRKISDATIYGTRKAQLGKDKQEETYVLGKIKDIYSQKGYEDFIKRYNKDETQFLIYHKDPQTFEKVIEEILKTYPDKELNEKGKEIPCNPFEKYRQENGPIRKYSKKGKGPEIKSLKYYDNKLGNHIDITPVNSQNQVVLQSLKPWRTDVYFNPRTSKYELMGLKYSDLRFEKGSGSYGISPEKYNKVKAKEGVNEDSEFKFTLYKNDLILIKDTETGEQQLFRYGSRNDTSKHYVELKPYEKAKFEGNQQLMNLLGTVAKGGQCLKGINKPNLSIYKVKTDVLGNKYFIKKEGDQPQLNFKKKF

SEQ ID NO: 445 - protein, 1345 aa, Streptococcus anginosus
  REGION 1..1345: note = Streptococcus anginosus F0211
MDQKYSIGLDIGTNSVGWAVVTDDYKVPAKKMKVLGNTDKQSIKKNLLGALLFDSGETAEATRLKRTARRRYTRRRNRLRYLQEIFAEEMNKVDENFFQRLDDSFLVDEDKRGERHPIFGNIAAEVKYHDDFPTIYHLRKHLADISQKADLRLVYLALAHMIKFRGHFLIEGQLKAENTNVQALFKDFVEVYDKTVEESHLSEMTVDALSILTEKVSKSRRLENLIAHYPAEKKNTLFGNLIALSLGLQPNFKTNFQLSEDAKLQFSKDTYEEDLEGLLGEIGDEYADLFASAKNLYDAILLSGILTVDDNSTKAPLSASMVKRYEEHQKDLKKLKDFIKVNAPDQYNAIFKDKNKKGYAGYIENGVKQDEFYKYLKGILLQINGSGDFLDKIDREDFLRKQRTFDNGSIPHQIHLQEMHAILRRQEEHYPFLKENQDKIEKILTFRIPYYVGPLARKGSRFAWAEYKADEKITPWNFDDILDKEKSAEKFITRMTLNDLYLPEEKVLPKHSLLYETFTVYNELTKVKYVNEQGEAKFFDANMKQEIFDHVFKENRKVTKDKLLNYLNKEFEEFRIVNLTGLDKENKAFNSSLGTYHDLRKILDKSFLDDKANEKTIEDIIQTLTLFEDREMIRQRLQKYSDIFTKAQLKKLERRHYTGWGRLSYKLINGIRNKENKKTILDYLIDDGYANRNFMQLINDDALSFKEEIARAQIIGDVDDIANVVHDLPGSPAIKKGILQSVKIVDELVKVMGHNPANIIIEMARENQMTDKGRRNSQQRLKLLQDSLKNLDNPVNIKNVENQQLQNDRLFLYYIQNGKDMYTGETLDINNLSQYDIDHIIPQAFIKDNSLDNRVLTRSDKNRGKSDDVPSIEVVHEMKSFWSKLLSVKLITQRKFDNLTKAERGGLTEEDKAGFIKRQLVETRQITKHVAQILDERFNTEFDGNKRRIRNVKIITLKSNLVSNFRKEFELYKVREINDYHHAHDAYLNAVVGNALLLKYPQLEPEFVYGEYPKYNSYRSRKSATEKFLFYSNILRFFKKEDIQTNEDGEIAWNKEKHIKILRKVLSYPQVNIVKKTEEQTGGFSKESILPKGESDKLIPRKTKNSYWNPKKYGGFDSPVVAYSILVFADVEKGKSKKLRKVQDMVGITIMEKKRFEKHPVDFLEQRGYRNVRLEKIIKLPKYSLFELENKRRRLLASARELQKGNELVIPQRFTTLLYHSYQIEKNYEPEHREYVEKHKDEFKELLEYISVFSRKYVLADNNLTKIEMLFSKNKDAEVSSLAKSFISLLTFTAFGAPAAFNFFGENIDRKRYTSVTECLNATLIHQSITGLYETRIDLSKLGED

SEQ ID NO: 446 - protein, 1386 aa, Streptococcus anginosus
  REGION 1..1386: note = Streptococcus anginosus SK1138
MNQKYSIGLDIGTNSVGWAVITDDYKVPAKKMKVLGNTDKQSIKKNLLGALLFDSGETAEATRLKRTARRRYTRRRNRLRYLQEIFAEEMMQVDESFFQRLDDSFLVDEDKRGERHPIFGNIAAEVKYHDEFPTIYHLRKHLADISQKADLRLVYLALAHMIKFRGHFLIEGQLKAENTNVQALFKDFVEVYDKTVEESHLSEITVDALSILTEKVSKSRRLENLIAHYPAEKKNTLFGNLIALFLGLQPNFKTNFQLSEDAKLQFSKDTYEEDLEGLLGEVGDEYADLFASAKNLYDAILLSGILTVDDNSTKAPLSASMVKRYEEHQKDLKKFEDFIKVNALDQYNAIFKDKNKKGYAGYIESGVKQDEFYKYLKGILLQINGSGDFLDKIDREDFLRKQRTFDNGSIPHQIHLQEMHAILRRQGEHYPFLKENQDKIEKILTFRIPYYVGPLARKGSRFAWAEYKADEKITPWNFDDILDKEKSAEKFITRMTLNDLYLPEEKVLPKHSLLYETFTVYNELTKVKYVNEQGEAKFFDANMKQEIFDHVFKENRKVTKDKLLNYLNKEFEEFRIVNLTGLDKENKVFNSSLGTYHDLRKILNKSFLDNKENAQIIEDIIQTLTLFEDREMIRQRLQKYSDIFTKAQLKKLERRHYTGWGRLSYKLINGIRNKENKKTILDYLIDDGYANRNFMQLINDDALSFKEEIAKAQIIGDVDDIANVVHDLPGSPAIKKGILQSVKIVDELVKVMGHNPANIIIEMARENQTTDRGRRNSQQRLKLLQDSLKNLDNPVNIKNVENQQLQNDRLFLYYIQNGKDMYTGETLDINNLSQYDIDHIIPQAYIKDDSFDNRVLTSSSENRGKSDNVPSIEVVCARKADWMRLRKAGLISQRKFDNLTKAERGGLTENDKAGFIKRQLVETRQITKHVAQVLDARFNAKHDENKKVIRDVKIITLKSNLVSQFRKDFKFYKVREINDYHHAHDAYLNAVIGTALLKKYPKLASEFVYGEFKKYDVRKFIAKSDKEIGKATAKYFFYSNLMNFFKKEVKFADGTVVERPDIETSEDGEIAWNKQTDFKIVRKVLSYPQVNIVKKTEVQTHGLDRGKPRGLFNANPSPKPKPDSSENLVGVKRNLDPKKYGGYAGISNSYAVLVKAIIEKGVKKKETMVLEFQGISILDRITFEKDKRAFLLGKGYKDIKKIIELPKYSLFELKDGSRRMLASILSTNNKRGEIHKGNELFVPQKFTTLLYHAKRINNPINKDHIEYVKKHRDDFKELLNYVLEFNEKYVGATKNGERLKEAVADFDSKSNEEICTSFLGAVNSKNAGLFELTSLGSASDFEFLGVKIPRYRDYTPSSLLKDSTLIHQSITGLYETRIDLSKLGED

SEQ ID NO: 447 - protein, 1396 aa, Streptococcus anginosus
  REGION 1..1396: note = Streptococcus anginosus SK52 = DSM 20563
MTKPYSIGLDIGTNSVGWAVITDDYKVPAKKMKVLGNTNRDYIKKNLLGALLFDGGETAEGRRLKRTARRRYTRRKNRLRYLQEIFAEEMMQVDESFFQRLDDSFLVEEDKQGSKYPIFGTLKEEKEYHKKFKTIYHLREELANSKEKADLRLVYLALAHMIKFRGHFLYEGDLKAENTDVQALFKDFVEEYDKTIEESHLSEITVDALSILTEKVSKSSRLENLIAHYPTEKKNTLFGNLIALSLGLQANFKTNFQLSEDAKLQFSKDTYEEDLEGLLGEVGDEYADLFVSAKNLYDAILLSGILTVDDNSTKAPLSASMVKRYKEHKEELAAFKRFIKEKLPKKYEEIFKDDTKNGYAGYVGADKKLRKRSGKLATEEEFYKYVKGILNKVEGADYFLDKIDREDFLRKQRTFDNGSIPHQIHLQEMHAILRRQGEHYPFLKENQDKIEKILTFRIPYYVGPLARKGSRFAWAEYKADEKITPWNFDDILDKEKSAEKFITRMTLNDLYLPEEKVLPKHSPLYETFTVYNELTKVKYVNEQGEAKFFDTNMKQEIFDHVFKENRKVTKDKLLNYLNKEFEEFRIVNLTGLDKENKAFNASLGTYHDLRKILDKSFLDDKVNEKIIEDIIQTLTLFEDREMIRQRLQKYSDIFTTQQLKELERRHYTGWGRLSYKLINGIRNKENKKTILDYLIDDGYANRNFMQLINDDALSFKEEIARAQIIGDVDDIANVVHDLPGSPAIKKGILQSVKIVDELVKVMGHNPTNIIIEMARENQTTDKGRRNSQQRLKLLQDSLKNLDNPVNIKNVENQQLQNDRLFLYYIQNGKDMYTGETLDINNLSQYDIDHIIPQAFIKDNSLDNRVLTRSDKNRGKSDDVPSIEVVHEMKSFWSKLLSVKLITQRKFDNLTKAERGGLTENDKAGFIKRQLVETRQITKHVAQVLDARFNAKHDENKKVIRDVKIITLKSNLVSQFRKDFKFYKVREINDYHHAHDAYLNAVIGTALLKKYPKLASEFVYGEFKKYDVRKFIAKSDKEIGKATAKYFFYSNLMNFFKKEVKFADGTVVERPDIETSEDGEIAWNKQTDFKIVRKVLSYPQVNIVKKTEVQTHGLDRGKPRGLFNANPSPKPKPDSSENLVGIKRNLDPKKYGGYAGISNSYAVLVKAIIEKGVKKKETMVLEFQGISILDRITFEKDKRAFLLGKGYKDIKKIIELPKYSLFELKDGSRRMLASILSTNNKRGEIHKGNELFVPQKFTTLLYHAKRINNPINKDHIEYVKKHRDDFKELLNYVLEFNEKYVGATKNGERLKEAVADFDSKSNEEICTSFLGAVNSKNAGLFELTSLGSASDFEFLGVKIPRYRDYTPSSLLKDSILIHQSITGLYETRIDLSKLGED

SEQ ID NO: 448 - protein, 1373 aa, Streptococcus bovis
  REGION 1..1373: note = Streptococcus bovis ATCC 700338
MTKKNYSIGLDIGTNSVGWAVITDDYKVPAKKMKVLGNTDKKYIKKNLLGALLFDSGETAEATRLKRTARRRYTRRKNRLRYLQEIFAEEMTKVDESFFQRLDESFLRWDDDNKKLGRYPIFGNKADVVKYHQEFPTIYHLRKHLADSSEKADLRLVYLALAHMIKFRGHFLIEGELNAENTDVQKIFADFVGVYDRTFDDSHLSEITVDAASILTEKISKSRRLENLIKYYPTEKKNTLFGNLIALALGLQPNFKMNFKLSEDAKLQFSKDSYEEDLGELLGKIGDDYADLFTSAKNLYDAILLSGILIVDDNSTKAPLSASMIKRYVEHQEDLEKLKEFIKANKSELYHDIFKDKNKNGYAGYIENGVKQDEFYKYLKNTLSKIAGSDYFLDKIEREDFLRKQRTFDNGSIPHQIHLQEMHAILRRQGDYYPFLKENQDRIEKILTFRIPYYVGPLARKDSRFSWAEYHSDEKITPWNFDKVIDKEKSAEKFITRMTLNDLYLPEEKVLPKHSHVYETYAVYNELTKIKYVNEQGKDSFFDSNMKQEIFDHVFKENRKVTKEKLLNYLNKEFPEYRIKDLIGLDKENKSFNASLGTYHDLKKILDKAFLDDKVNEEVIEDIIKTLTLFEDKDMIHERLQKYSDIFTADQLKKLERRHYTGWGRLSYKLINGIRNKENNKTILDYLIDDGSANRNFMQLINDDTLPFKQIIQKSQVVGDVDDIEAVVHDLPGSPAIKKGILQSVKIVDELVKVMGDNPDNIVIEMARENQTTNRGRSQSQQRLKKLQNSLKELGSNILNEEKPSYIEDKVENSHLQNDQLFLYYIQNGKDMYTGDELDIDHLSDYDIDHIIPQAFIKDDSIDNRVLTSSAKNRGKSDDVPSLDIVRARKAEWVRLYKSGLISKRKFDNLTKAERGGLTEADKAGFIKRQLVETRQITKHVAQILDARFNTESDENDKVIRDVKVITLKSNLVSQFRKDFEFYKVREINDYHHAHDAYLNAVVGTALLKKYPKLASEFVYGEYKKYDIRKFITNSSDKATAKYFFYSNLMNFFKRVIRYSNGKVIVRPVVEYSKDTEDIAWDKKSNFRTICKVLSYPQVNIVKKVETQTGGFSKESILPKGDSDKLIPRKTKKAYWDTKKYGGFDSPTVAYSVFVVADVEKGKAKKLKTVKELVGISIMERSFFEENPVEFLENKGYHNIREDKLIKLPKYSLFEFEGGKRRLLASASELQKGNEMVIPGHLVKLLYHAQRINSFNSTKYLDYVSAHKKEFEKVLSCVEDFANLYVDVEKNLSKIRAVADSMDNFSIEEISNSFINLLTLTALGAPADFNFLGEKIPRKRYTSTKECLNATLIHQSITGLYETRIDLSKIGEE

SEQ ID NO: 449 - protein, 1375 aa, Streptococcus canis
  REGION 1..1375: note = Streptococcus canis FSL Z3-227
MEKKYSIGLDIGTNSVGWAVITDDYKVPSKKFKVLGNTNRKSIKKNLMGALLFDSGETAEATRLKRTARRRYTRRKNRIRYLQEIFANEMAKLDDSFFQRLEESFLVEEDKKNERHPIFGNLADEVAYHRNYPTIYHLRKKLADSPEKADLRLIYLALAHIIKFRGHFLIEGKLNAENSDVAKLFYQLIQTYNQLFEESPLDEIEVDAKGILSARLSKSKRLEKLIAVFPNEKKNGLFGNIIALALGLTPNFKSNFDLTEDAKLQLSKDTYDDDLDELLGQIGDQYADLFSAAKNLSDAILLSDILRSNSEVTKAPLSASMVKRYDEHHQDLALLKTLVRQQFPEKYAEIFKDDTKNGYAGYVGIGIKHRKRTTKLATQEEFYKFIKPILEKMDGAEELLAKLNRDDLLRKQRTFDNGSIPHQIHLKELHAILRRQEEFYPFLKENREKIEKILTFRIPYYVGPLARGNSRFAWLTRKSEEAITPWNFEEVVDKGASAQSFIERMTNFDEQLPNKKVLPKHSLLYEYFTVYNELTKVKYVTERMRKPEFLSGEQKKAIVDLLFKTNRKVTVKQLKEDYFKKIECFDSVEIIGVEDRFNASLGTYHDLLKIIKDKDFLDNEENEDILEDIVLTLTLFEDREMIEERLKTYAHLFDDKVMKQLKRRHYTGWGRLSRKMINGIRDKQSGKTILDFLKSDGFSNRNFMQLIHDDSLTFKEEIEKAQVSGQGDSLHEQIADLAGSPAIKKGILQTVKIVDELVKVMGHKPENIVIEMARENQTTTKGLQQSRERKKRIEEGIKELESQILKENPVENTQLQNEKLYLYYLQNGRDMYVDQELDINRLSDYDVDHIVPQSFIKDDSIDNKVLTRSVENRGKSDNVPSEEVVKKMKNYWRQLLNAKLITQRKFDNLTKAERGGLSEADKAGFIKRQLVETRQITKHVARILDSRMNTKRDKNDKPIREVKVITLKSKLVSDFRKDFQLYKVRDINNYHHAHDAYLNAVVGTALIKKYPKLESEFVYGDYKVYDVRKMIAKSEQEIGKATAKRFFYSNIMNFFKTEVKLANGEIRKRPLIETNGETGEVVWNKEKDFATVRKVLAMPQVNIVKKTEVQTGGFSKESILSKRESAKLIPRKKGWDTRKYGGFGSPTVAYSILVVAKVEKGKAKKLKSVKVLVGITIMEKGSYEKDPIGFLEAKGYKDIKKELIFKLPKYSLFELENGRRRMLASATELQKANELVLPQHLVRLLYYTQNISATTGSNNLGYIEQHREEFKEIFEKIIDFSEKYILKNKVNSNLKSSFDEQFAVSDSILLSNSFVSLLKYTSFGASGGFTFLDLDVKQGRLRYQTVTEVLDATLIYQSITGLYETRTDLSQLGGD

SEQ ID NO: 450 - protein, 1345 aa, Streptococcus constellatus
  REGION 1..1345: note = Streptococcus constellatus subsp. constellatus SK53
MGKPYSIGLDIGTNSVGWAVVTDDYKVPAKKMKVLGNTDKQSIKKNLLGALLFDSGETAEATRLKRTARRRYTRRKNRLRYLQEIFTGEMNKVDENFFQRLDDSFLVDEDKRGEHHPIFGNIAAEVKYHDDFPTIYHLRRHLADTSKKADLRLVYLALAHMIKFRGHFLYEGDLKAENTDVQALFKDFVEEYDKTIEESHLSEITVDALSILTEKVSKSSRLENLIAHYPTEKKNTLFGNLIALSLDLHPNFKTNFQLSEDAKLQFSKDTYEEDLEGFLGEVGDEYADLFASAKNLYDAILLSGILTVDDNSTKAPLSASMVKRYEEHQKDLKKLKDFIKVNAPDQYNAIFKDKNKKGYASYIESGVKQDEFYKYLKGILLKINGSGDFLDKIDREDFLRKQRTFDNGSIPHQIHLQEMHAILRRQGEHYPFLKENQDKIEKILTFRIPYYVGPLARKGSRFAWAEYKADEKITPWNFDDILDKEKSAEKFITRMTLNDLYLPEEKVLPKHSPLYEAFTVYNELTKVKYVNEQGEAKFFDTNMKQEIFDHVFKENRKVTKDKLLNYLNKEFEEFRIVNLTGLDKENKAFNSSLGTYHDLRKILDKSFLDDKANEKTIEDIIQTLTLFEDREMIRQRLQKYSDIFTKAQLKKLERRHYTGWGRLSYKLINGIRNKENKKTILDYLIDDGYANRNFMQLINDDALSFKEEIARAQIIDDVDDIANVVHDLPGSPAIKKGILQSVKIVDELVKVMGHNPANIIIEMARENQTTDKGRRNSQQRLKLLQDSLKNLDNPVNIKNVENQQLQNDRLFLYYIQNGKDMYTGETLDINNLSQYDIDHIIPQAFIKDNSLDNRVLTRSDKNRGKSDDVPSIEVVHEMKSFWSKLLSVKLITQRKFDNLTKAERGGLTEEDKAGFIKRQLVETRQITKHVAQILDERFNTEFDGNKRRIRNVKIITLKSNLVSNFRKEFELYKVREINDYHHAHDAYLNAVVGNALLLKYPQLEPEFVYGEYPKYNSYRSRKSATEKFLFYSNILRFFKKEDIQTNEDGEIAWNKEKHIKILRKVLSYPQVNIVKKTEEQTGGFSKESILPKGESDKLIPRKTKNSYWDPKKYGGFDSPVVAYSILVFADVEKGKSKKLRKVQDMVGITIMEKKRFEKNPVDFLEQRGYRNVRLEKIIKLPKYSLFELENKRRRLLASAKELQKGNELVIPQRFTTLLYHSYRIEKDYEPEHREYVEKHKDEFKELLEYISVFSRKYVLADNNLTKIEMLFSKNKDAEVSSLAKSFISLLTFTAFGAPAAFNFFGENIDRKRYTSVTECLNATLIHQSITGLYETRIDLSKLGED

SEQ ID NO: 451 - protein, 1371 aa, Streptococcus dysgalactiae
MDKKYSIGLDIGTNSVGWAVITDDYKVPSKKFKVLGNTDRHSIKKNLIGALLFDSGETAEATRLKRTARRRYTRRKNRIRYLQEIFSSEMSKVDDSFFHRLEESFLVEEDKKHERHPIFGNIVDEVAYHEKYPTIYHLRKKLADSTDKADLRLIYLALAHMIKFRGHFLIEGDLNPDNSDMDKLFIQLVQTYNQLFEENPINASRVDAKAILSARLSKSRRLENLIAQLPGEKRNGLFGNLIALSLGLTPNFKSNFDLAEDAKLQLSKDTYDDDLDNLLAQIGDQYADLFLAAKNLSDAILLSDILRVNSEITKAPLSASMIKRYDEHHQDLTLLKALVRQQLPEKYKEIFFDQSKNGYAGYIDGGASQEEFYKFIKPILEKMDGTEELLAKLNREDLLRKQRTFDNGSIPHQIHLGELHAILRRQEDFYPFLKDNREKIEKILTFRIPYYVGPLARGNSRFAWMTRKSEETITPWNFEEVVDKGASAQSFIERMTNFDKNLPNEKVLPKHSLLYEYFTVYNELTKVKYVTEGMRKPEFLSGKQKEAIVDLLFKTNRKVTVKQLKEDYFKKIECFDSVEISGVEDRFNASLGTYHDLLKIIKDKDFLDNEENEDILEDIVLTLTLFEDKEMIEERLKKYANLFDDKVMKQLKRRHYTGWGRLSRKLINGIRDKQSGKTILDFLKSDGFANRNFMQLINDDSLTFKEAIQKAQVSGQGHSLHEQIANLAGSPAIKKGILQSVKVVDELVKVMGHKPENIVIEMARENQTTQKGQKNSRERMKRIEEGIKELGSQILKEHPVENTQLQNEKLYLYYLQNGRDMYVDQELDINRLSDYDVDHIVPQSFIKDDSIDNKVLTRSDKNRGKSDNVPSEEVVKKMKNYWRQLLNAKLITQRKFDNLTKAERGGLSELDKAGFIKRQLVETRQITKHVAQILDSRMNTKYDENDKLIREVKVITLKSKLVSDFRKDFQFYKVREINNYHHAHDAYLNAVVGTALIKKYPKLESEFVYGDYKVYDVRKMIAKSEQEIGKATAKRFFYSNIMNFFKTEITLANGEIRKRPLIETNEETGEIVWDKGRDFATVRKVLSMPQVNIVKKTEVQTGALTNESIYARGSFDKLISRKHRFESSKYGGFGSPTVTYSVLVVAKSKVQDGKVKKIKTGKELIGITLLDKLVFEKNPLKFIEDKGYGNVQIDKCIKLPKYSLFEFENGTRRMLASVMANNNSRGDLQKANEMFLPAKLVTLLYHAHKIESSKELEHEAYILDHYNDLYQLLSYIERFASLYVDVEKNISKVKELFSNIESYSISEICSSVINLLTLTASGAPADFKFLGTTIPRKRYGSPQSILSSTLIHQSITGLYETRIDLSQLGGD

SEQ ID NO: 452 - protein, 1371 aa, Streptococcus dysgalactiae
MDKKYSIGLDIGTNSVGWAVITDDYKVPSKKFKVLGNTDRHSIKKNLIGALLFDSGETAEATRLKRTARRRYTRRKNRIRYLQEIFSSEMSKVDDSFFHRLEESFLVEEDKKHERHPIFGNIVDEVAYHEKYPTIYHLRKKLADSTDKADLRLIYLALAHMIKFRGHFLIEGDLNPDNSDVDKLFIQLVQTYNQLFEEKPINASGVDAKAILSARLSKSKRLENLIAQLPGEKKNGLFGNLIALSLGLTPNFKSNFDLAEDAKLQLSKDTYDDDLDNLLAQIGNQYADLFLAAKNLSDAILLSDILRVNSEITKAPLSASMIKRYDEHHQDLTLLKALVRQQLPEKYKEIFFDQSKNGYAGYIDGGASQEEFYKFIKPILEKMDGTEELLAKLNREDLLRKQRTFDNGSIPHQIHLGELHAILRRQEDFYPFLKDNREKIEKILTFRIPYYVGPLARGNSRFAWMTRKSEETITPWNFEEVVDKGASAQSFIERMTNFDKNLPNEKVLPKHSLLYEYFTVYNELTKVKYVTEGMRKPEFLSGKQKEAIVDLLFKTNRKVTVKQLKEDYFKKIECFDSVEISGVEDRFNASLGTYHDLLKIIKDKDFLDNEENEDILEDIVLTLTLFEDKEMIEERLKKYANLFDDKVMKQLKRRHYTGWGRLSRKLINGIRDKQSGKTILDFLKSDGFANRNFMQLINDDSLTFKEAIQKAQVSGQGHSLHEQIANLAGSPAIKKGILQSVKVVDELVKVMGHKPENIVIEMARENQTTQKGQKNSRERMKRIEEGIKELGSQILKEHPVENTQLQNEKLYLYYLQNGRDMYVDQELDINRLSDYDVDHIVPQSFIKDDSIDNKVLTRSDKNRGKSDNVPSEEVVKKMKNYWRQLLNAKLITQRKFDNLTKAERGGLSELDKAGFIKRQLVETRQITKHVAQILDSRMNTKYDENDKLIREVKVITLKSKLVSDFRKDFQFYKVREINNYHHAHDAYLNAVVGTALIKKYPKLESEFVYGDYKVYDVRKMIAKSEQEIGKATAKRFFYSNIMNFFKTEITLANGEIRKRPLIETNEETGEIVWDKGRDFATVRKVLSMPQVNIVKKTEVQTGALTNESIYARGSFDKLISRKHRFESSKYGGFGSPTVTYSVLVVAKSKVQDGKVKKIKTGKELIGITLLDKLVFEKNPLKFIEDKGYGNVQIDKCIKLPKYSLFEFENGTRRMLASVMANNNSRGDLQKANEMFLPAKLVTLLYHAHKIESSKELEHEAYILDHYNDLYQLLSYIERFASLYVDVEKNISKVKELFSNIESYSISEICSSVINLLTLTASGAPADFKFLGTTIPRKRYGSPQSILSSTLIHQSITGLYETRIDLSQLGGD

SEQ ID NO: 453 - protein, 1371 aa, Streptococcus dysgalactiae
MDKKYSIGLDIGTNSVGWAVITDDYKVPSKKFKVLGNTDRHSIKKNLIGALLFDSGETAEATRLKRTARRRYTRRKNRIRYLQEIFSSEMSKVDDSFFHRLEESFLVEEDKKHERHPIFGNIVDEVAYHEKYPTIYHLRKKLADSTDKADLRLIYLALAHMIKFRGHFLIEGDLNPDNSDMDKLFIQLVQTYNQLFEENPINASRVDAKAILSARLSKSRRLENLIAQLPGEKRNGLFGNLIALSLGLTPNFKSNFDLAEDAKLQLSKDTYDDDLDNLLAQIGDQYADLFLAAKNLSDAILLSDILRVNSEITKAPLSASMIKRYDEHHQDLTLLKALVRQQLPEKYKEIFFDQSKNGYAGYIDGGASQEEFYKFIKPILEKMDGTEELLAKLNREDLLRKQRTFDNGSIPHQIHLGELHAILRRQEDFYPFLKDNREKIEKILTFRIPYYVGPLARGNSRFAWMTRKSEETITPWNFEEVVDKGASAQSFIERMTNFDKNLPNEKVLPKHSLLYEYFTVYNELTKVKYVTEGMRKPEFLSGKQKEAIVDLLFKTNRKVTVKQLKEDYFKKIECFDSVEISGVEDRFNASLGTYHDLLKIIKDKDFLDNEENEDILEDIVLTLTLFEDKEMIEERLKKYANLFDDKVMKQLKRRHYTGWGRLSRKLINGIRDKQSGKTILDFLKSDGFANRNFMQLINDDSLTFKEAIQKAQVSGQGHSLHEQIANLAGSPAIKKGILQSVKVVDELVKVMGHKPENIVIEMARENQTTQKGQKNSRERMKRIEEGIKELGSQILKEHPVENTQLQNEKLYLYYLQNGRDMYVDQELDINRLSDYDVDHIVPQSFIKDDSIDNKILTRSDKNRGKSDNVPSEEVVKKMKNYWRQLLNAKLITQRKFDNLTKAERGGLSELDKAGFIKRQLVETRQITKHVAQILDSRMNTKYDENDKLIREVKVITLKSKLVSDFRKDFQFYKVREINNYHHAHDAYLNAVVGTALIKKYTKLESEFVYGDYKVYDVRKMIAKSEQEIGKATAKRFFYSNIMNFFKTEITLANGEIRKRPLIETNEETGEIVWDKGRDFATVRKVLSMPQVNIVKKTEVQTGALTNESIYARGSFDKLISRKHRFESSKYGGFGSPTVTYSVLVVAKSKVQDGKVKKIKTGKELIGMTLLDKLVFEKNPLKFIEDKGYGNVQIDKCIKLPKYSLFEFENGTRRMLASVMANNNSRGDLQKANEMFLPAKLVTLLYHAHKIESSKELEHEAYILDHYNDLYQLLSYIERFASLYVDVEKNISKVKELFSNIESYSISEICSSVINLLTLTASGAPADFKFLGTTIPRKRYGSPQSILSSTLIHQSITGLYETRIDLSQLGGD

SEQ ID NO: 454 - protein, 1371 aa, Streptococcus dysgalactiae
MDKKYSIGLDIGTNSVGWAVITDDYKVPSKKFKVLGNTDRHSIKKNLIGALLFDSGETAEATRLKRTARRRYTRRKNRIRYLQEIFSSEMSKVDDSFFHRLEESFLVEEDKKHERHPIFGNIVDEVAYHEKYPTIYHLRKKLADSTDKADLRLIYLALAHMIKFRGHFLIEGDLNPDNSDMDKLFIQLVQTYNQLFEENPINASRVDAKAILSARLSKSRRLENLIAQLPGEKRNGLFGNLIALSLGLTPNFKSNFDLAEDAKLQLSKDTYDDDLDNLLAQIGDQYADLFLAAKNLSDAILLSDILRVNSEITKAPLSASMIKRYDEHHQDLTLLKALVRQQLPEKYKEIFFDQSKNGYAGYIDGGASQEEFYKFIKPILEKMDGTEELLAKLNREDLLRKQRTFDNGSIPHQIHLGELHAILRRQEDFYPFLKDNREKIEKILTFRIPYYVGPLARGNSRFAWMTRKSEETITPWNFEEVVDKGASAQSFIERMTNFDKNLPNEKVLPKHSLLYEYFTVYNELTKVKYVTEGMRKPEFLSGKQKEAIVDLLFKTNRKVTVKQLKEDYFKKIECFDSVEISGVEDRFNASLGTYHDLLKIIKDKDFLDNEENEDILEDIVLTLTLFEDKEMIEERLKTYAHLFDDKVMKQLKRRHYTGWGRLSRKLINGIRDKQSGKTILDFLKSDGFANRNFIQLIHDDSLTFKEAIQKAQVSGQGHSLHEQIANLAGSPAIKKGILQSVKVVDELVKVMGHKPENIVIEMARENQTTQKGQKNSRERMKRIEEGIKELGSQILKEHPVENTQLQNEKLYLYYLQNGRDMYVDQELDINRLSDYDVDHIVPQSFIKDDSIDNKVLTRSDKNRGKSDDVPSEEVVKKMKNYWRQLLNAKLITQRKFDNLTKAERGGLSELDKAGFIKRQLVETRQITKHVAQILDSRMNTKYDENDKLIREVKVITLKSKLVSDFRKDFQFYKVREINNYHHAHDAYLNAVVGTALIKKYPKLESEFVYGDYKVYDVRKMIAKSEQEIGKATAKRFFYSNIMNFFKTEITLANGEIRKRPLIETNEETGEIVWNKGRDFATVRKVLSMPQVNIVKKTEVQTGALTNESIYARGSFDKLISRKHRFESSKYGGFGSPTVTYSVLVVAKSKVQDGKVKKIKTGKELIGITLLDKLVFEKNPLKFIEDKGYGNVQIDKCIKLPKYSLFEFENGTRRMLASVMANNNSRGDLQKANEMFLPAKLVTLLYHAHKIESSKELEHEAYILDHYNDLYQLLSYIERFASLYVDVEKNISKVKELFSNIESYSISEICSSVINLLTLTASGAPADFKFLGTTIPRKRYGSPQSILSSTLIHQSITGLYETRIDLSQLGGD

SEQ ID NO: 455 - protein, 1348 aa, Streptococcus equi
MKKPYTIALDIGTNSVGWVVVTDDYRVPTKKMKVLGNTERKTIKKNLIGALLFDSGDTAEGTRLKRTARRRYTRRKNRLRYLKEIFTEEMAKVDDGFFQRLEDSFYVLEDKEGNKHPIFANLADEVAYHKKYPTIYHLRKELVDNPQKADLRLIYLAVAHIIKFRGHFLIEGTLSSKNNNLQKSFDHLVDTYNLLFEEQRLLTEGINAKELLSAALSKSKRLENLISLIPGQKKTGIFGNIIALSLGLTPNFKANFGLSKDVKLQLAKDTYADDLDSLLAQIGDQYADLFLAAKNLSDAILLSDILTESDEITRAPLSASMVKRYREHHKDLVTLKTLIKDQLPEKYQEIFLDKTKNGYAGYIEGQVSQEEFYKYLKPILARLDGSEPLLLKIDREDFLRKQRTFDNGSIPHQIHLEELHAILRRQEVFYPFLKDNRKKIESLLTFRIPYYVGPLARGHSRFAWVKRKFDGAIRPWNFEEIVDEEASAQIFIEKMTKNDLYLPNEKVLPKHSLLYETFTVYNELTKVKYATEGMTRPQFLSADQKQAIVDLLFKTNRKVTVKQLKENYFKKIECWDSVEITGVEDSFNASLGTYHDLLKIIQDKDFLDNPDNQKIIEDIILTLTLFEDKKMISKRLDQYAHLFDKVVLNKLERHHYTGWGRLSGKLINGIRDKQSGKTILDFLKADGFANRNFMQLIHDSELSFIDEIAKAQVIGKTEYSKDLVGNLAGSPAIKKGISQTIKIVDELVKIMGYLPQQIVIEMARENQTTAQGIKNARQRMRKLEETAKKLGSNILKEHPVDNSQLQNDKRYLYYLQNGKDMYTGDDLDIDYLSSYDIDHIIPQSFIKNNSIDNKVLTSQGANRGKLDNVPSEAIVRKMKGYWQSLLRAGAISKQKFDNLTKAERGGLTQVDKAGFIQRQLVETRQITKHVAQILDSRFNTEFDDHNKRIRKVHIITLKSKLVSDFRKEFGLYKIRDINHYHHAHDAYLNAVVAKAILGKYPQLAPEFVYGDYPKYNSFKERQKATQKMLFYSNILKFFKDQESLHVNSDGEEIWNANKHLPIIKNVLSIPQVNIVKKTEVQTGGFYKESILSKGNSDKLIPRKNNWDTRKYGGFDSPTVAYSVLVIAKMEKGKAKVLKPVKEMVGITIMERTAFEENPVVFLEARGYREIQEHLIIKLPKYSLFELENGRRRLLASASELQKGNELFLPVDYMTFLYLAAHYHELTGSSEDVLRKKYFVDRHLHYFDDIIQMINDFAERHILASSNLEKINHTYHNNSDLPVNERAENIINVFTFVALGAPAAFKFFDATIDRKRYTSTKEVLNATLIHQSVTGLYETRIDLSQLGEN

SEQ ID NO: 456 - protein, 1377 aa, Streptococcus equinus
  REGION 1..1377: note = Streptococcus equinus ATCC 9812
MEKTYSIGLDIGTNSVGWAVITDDYKVPAKKMKVLGNTDKKYIKKNLLGALLFDSGETAEATRLKRAARRRYTRRKNRLRYLQEIFAKEMAKVDESFFQRLEESFLTDDDKTFDSHPIFGNKAEEDTYHQEFPTIYHLRKHLADSPEKVDLRLVYLALAHMIKFRGHFLIEGQLNAENTDVQKIFADFVGVYDRTFDDSHLSEITVDAASILTEKISKSRRLENLIKQYPTEKKNTLFGNLVALALGLQPNFKTNFKLSEDAKLQFSKDTYDEDLEELLGKIGDDYADLFTAAKNLYDAILLSGILTVDDNSTKAPLSASMIKRYEEHHEDLEKLKTFIKVNNFDKYHEIFKDKSKNGYAGYIENGVKQDIFYKHLKSIISEKNGGQYFLDKIEREDFLRKQRTFDNGSIPYQIHLQEMRTILRRQGEYYPFLKENQAKIEKILTFRIPYYVGPLARKNSRFAWAKYHSDEPITPWNFDEVVDKEKSAEKFITRMTLNDLYLPEEKVLPKHSYVYETFAVYNELTKIKYVNEQGKSFFFDANMKQEIFDHVFKENRKVTKAKLLSYLNNEFEEFRINDLIGLDKDSKSFNASLGTYHDLKKILDKSFLDDKTNEQIIEDIVLTLTLFEDRDMIHERLQKYSDIFTSQQLKKLERRHYTGWGRLSYKLINGIRNKENNKTILDFLIDDGDANRNFMQLINDDSLSFKTTIQEAQVVGDVDDIEAVVHDLPGSPAIKKGILQSVKIVDELVKVMGHNPQNIVIEMARENQITGYGRNRSNQRLKRLQDSLKEFGSDILSKKKPSYVDSKVENSHLQNDRLFLYYIQNGKDMYTGEELDIDHLSDYDIDHIIPQAFIKDNSIDNRVLTSSAKNRGKSDDVPSIEIVRNRKSYWYKLYKSGLISKRKFDNLTKAERGGLTETDKAGFIKRQLVETRQITKHVAQILDARFNTKCDENDKVIRDVKVITLKSSLVSQFRKEFKFYKVREINDYHHAHDAYLNAVVGTALLKKYPKLAPEFVYGEYKKYDVRKLVAKSSDNHSELGKATAKYFFYSNLMNFFKTEVKYADGRVFERPDIETNADGEVVWNKQRDFNIVRKVLSYPQVNIVKKVEVQTGGFSKESILPKGDSDKLIPRKTKKLQWETQKYGGFDSPTVAYSVLVVADVEKGKTRKLKTVKELVGISIMERSSFEENPVSFLEKKGYHNVQEDKLIKLPKYSLFEFEGGRRRLLASATELQKGNEVVLPQYMVNLLYHSQHVNNSHKPEHLNYVKQHKDEFKDIFNLIISIARINILKPKVVDNLINEFTEYGQEDISSLSESFINLLKFISFGAPGAFKFLKLDVKQSNLRYKSTTEALSATLIHQSVTGLYETRIDLSKLGEE

SEQ ID NO: 457 - protein, 1370 aa, Streptococcus gallolyticus
MTKKNYSIGLDIGTNSVGWAVITDDYKVPAKKMKVLGNTDKKYIKKNLLGALLFDSGETAEATRLKRTARRRYTRRKNRLRYLQEIFAEEMTKVDESFFYRLDESFLTTDEKDFERHPIFGNKAEEDAYHQKFPTIYHLRNYLADSSEKADLRLVYLALAHMIKYRGHFLIEGKLNAENTDVQKLFTDFVGVYDRTFDDSHLSEITVDVASTLTEKISKSRRLENLIKYYPTEKKNTLFGNLIALALGLQPNFKMNFKLSEDAKLQFSKDTYEEDLEELLGKIGDDYADLFTSAKNLYDAILLSGILTVDDNSTKAPLSASMIKRYVEHHEDLEKLKEFIKANKSELYHDIFKDKNKNGYAGYIENGVKQDEFYKYLKNTLSKIDGSDYFLDKIEREDFLRKQRTFDNGSIPHQIHLQEMHAILRRQGDYYPFLKEKQDRIEKILTFRIPYYVGPLVRKDSRFAWAEYRSDEKITPWNFDKVIDKEKSAEKFITRMTLNDLYLPEEKVLPKHSHVYETYAVYNELTKIKYVNEQGKESFFDSNMKQEIFDHVFKENRKVTKEKLLNYLNKEFPEYRIKDLIGLDKENKSFNASLGTYHDLKKILDKAFLDDKVNEEVIEDIIKTLTLFEDKDMIHERLQKYSDIFTANQLKKLERRHYTGWGRLSYKLINGIRNKENNKTILDYLIDDGSANRNFMQLINDDTLPFKQIIQKSQVVGDVDDIEAVVHDLPGSPAIKKGILQSVKIVDELVKVMGDNPDNIVIEMARENQTTNRGRSQSQQRLKKLQSSLKELGSNILNEEKPSYIEDKVENSHLQNDQLFLYYIQNGKDMYTGDELDIDHLSDYDIDHIIPQAFIKDDSIDNRVLTSSAKNRGKSDDVPSLDIVRARKAEWVRLYKSGLISKRKFDNLTKAERGGLTEADKAGFIKRQLVETRQITKHVAQILDARFNTEHDENDKVIRDVKVITLKSNLVSQFRKDFEFYKVREINDYHHAHDAYLNAVVGTALLKKYPKLASEFVYGEYKKYDIRKFITNSSDKATAKYFFYSNLMNFFKTKVKYADGTVFERPIIETNADGEIAWNKQIDFEKVRKVLSYPQVNIVKKVETQTGGFSKESILPKGDSDKLIPRKTKKVYWDTKKYGGFDSPTVAYSVFVVADVEKGKAKKLKTVKELVGISIMERSFFEENPVEFLENKGYHNIREDKLIKLPKYSLFEFEGGRRRLLASASELQKGNEMVLPGYLVELLYHAHRADNFNSTEYLNYVSEHKKEFEKVLSCVEDFANLYVDVEKNLSKIRAVADSMDNFSIEEISNSFINLLTLTALGAPADFNFLGEKIPRKRYTSTKECLTATLIHQSITGLYETRIDLSKLGEE

SEQ ID NO: 458 - protein, 1370 aa, Streptococcus gallolyticus; identical to SEQ ID NO: 457
  REGION 1..1370: note = Streptococcus gallolyticus subsp. gallolyticus TX20005

SEQ ID NO: 459 - protein, 1371 aa, Streptococcus gallolyticus
MTEKNYSIGLDIGTNSVGWAVITDDYKVPAKKMKVLGNTDKKYIKKNLLGALLFDNGETAEATRLKRTARRRYTRRKNRLRYLQEIFAEEMAKVDESFFYRLDESFLTTDDKDFERHPIFGNKADEIKYHQEFPTIYHLRKHLADSHEKADLRLIYLALAHMIKFRGHFLIEGELNAENTDVQKLFEAFVEVYDRTFDDSNLSEITVDASSILTEKFSKSRRLENLIKHYPTEKKNTLFGNLVALALGLQPNFKTSFKLSEDAKLQFSKDTYEEDLEELIGKIGDEYADLFTSAKNLYDAILLSGILTVADNTTKAPLSASMIKRYNEHQVDLKKLKEFIKNNASDKYDEIFNDKDKNGYAGYIENGVKQDEFYKYLKTTLSKIDGSDYFLDKIEREDFLRKQRTFDNGSIPHQIHLQEMHAILRRQGEHYAFLKENQAKIEKILTFRIPYYVGPLARKNSRFAWAEYHSDEKITPWNFDEIIDKEKSAEKFITRMTLNDLYLPEEKVLPKHSLVYETYTVYNELTKVKYVNEQGKSNFFDANMKQEIFEHVFKENRKVTKDKFLNYLNKEFPEYRIQDLIGLDKENKSFNASLGTYHDLKKILDKSFLDDKTNETIIEDIIQTLTLFEDRDMIRQRLQKYSDIFTPQQLKKLERRHYTGWGRLSYKLINGIRNKENGKSILDYLIDDGYANRNFMQLISDDTLPFKQIIKDAQIIGDIDDVTSVVRELPGSPAIKKGILQSVKIVDELVKVMGHNPDNIVIEMARENQTTNRGRNQSQQRLKKLQDSLKELGSNILNEEKPSYIEGKVENNHLQDDRLFLYYIQNGKDMYTGDELDIDHLSDYDIDHIIPQAFIKDDSIDNRVLTSSAKNRGKSDDVPSLDIVHDRKADWIRLYKSGLISKRKFDNLTKAERGGLTENDKAGFIKRQLVETRQITKHVAQILDSRFNTERDENDKVIRNVKVITLKSNLVSQFRKDFKFYKVREINDYHHAHDAYLNAVVGTALLKKYPKLAPEFVYGEYKKYDIRKFITSSGDKATAKYFFYSNLMNFFKRVIRYSNGKVVVRPVIECSKDTGEIAWNKQTDFEKVRRVLSYPQVNIVKKVETQTGGFSKESILPKGNSDKLIPRKTKKFRWDTPKYGGFDSPNIAYSVFVIADVEKGKAKKLKTVKELVGISIMERSSFEENPVVFLEKKGYQNVQEDNLIKLPKYSLFEFEGGRRRLLASASELQKGNEVVLSRHLVELLYHAHRVNSFNNSEHLKYVSEHKKEFGEVLSCVENFAKSYVDVEKNLGKIRAVADKIDTFSIEDISISFVNLLTLTALGAPADFNFLGEKIPRKRYTSTKECLNATLIHQSITGLYETRIDLSKLGEE

SEQ ID NO: 460 - protein, 1130 aa, Streptococcus gallolyticus
MTNGKILGLDIGIASVGVGIIEAKTGKVVHANSRLFSAANAENNAERRGFRGSRRLNRRKKHRVKRVRDLFEKYEIVTDFRNLNLNPYELRVKGLTEQLTNEELFAALRTISKRRGISYLDDAEDDSTGSTDYAKSIDENRRLLKTKTPGQIQLERLEKYGQLRGNFTVYDENGEAHRLINVFSTSDYEKEARKILETQADYNKKITAEFIDDYVEILTQKRKYYHGPGNEKSRTDYGRFRTDGTTLENIFGILIGKCSFYPDEYRASKASYTAQEYNFLNDLNNLKVPTETGKLSTEQKEALVEFAKSTATLGPAKLLKEIAKILDCKVDEIKGYREDDKGKPDLHTFEPYRKLKFNLDSVNIDDLSREVLDKLADILTLNTEREGIEDAIRHNLPNQFTEGQISEIIKVRKSQSTAFNKGWHSFSAKLMNELIPELYATSDEQMTILTRLEKFKVNKKSSKNTKTIDEKEVTDEIYNPVVAKSVRQTIKIINAAVKKYGDFDKIVIEMPRDKNADDEKKFIDKRNKENKKEKDDALKRAAYLYNGTDKLPDEVFHGNKQLETKIRLWYQQGERCLYSGKPIPIQELVHNSNNFEIDHILPLSLSFDDSLANKVLVYAWTNQEKGQKTPYQVIDSMDAAWSFREMKDYVLKQKGLGKKKRDYLLTTENIDKIEVKKKFIERNLVDTRYASRVVLNSLQSALRELGKDTKISVIRGQFTSQLRRKWKIDKSRETYHHHAVDALIIAASSQLKLWEKQDNPMFVDYGNNQVVDKQTGEILSVSDDEYKELVFQPPYQGFVNMISSKGFEDEILFSYQVDSKYNRKVSDATIYSTRKAKIGKDKKEETYVLGKIKDIYSQNGFDTFIKKYNKDKTQFLMYQKDPLTWENVIEVILRDYPTTKKSEDGKNDVKCNPFEEYRRENGLVCKYSKKGKGTPIKSLKYYDKKLGNCIDITPEGSKNEVVLQSLNPWRADVYFNPETLKYELLGLKYSDLSFEKGTGKYHISQEKYDVIKEKEGIGKKSEFKFTLYRNDLILIKDTASGEQEIYRFLSRTMPNVKHYAELKPYDKEKFDNVQELVEALGEADKVGRCIKGLNKSNLSIYKVRTDVLGNKYFVKKEGDKPKLDFKNNKK

SEQ ID NO: 461 - protein, 1136 aa, Streptococcus gordonii
MNGLVLGLDIGIASVGVGILEKDTGKIIHASSRLFPAATADNNVERRSNRQGRRLNRRKKHRSVRLQDLFEGYGLLTDFSKVSMNLNPYQLRVQGMENQLTNEELFVALKNIVKRRGISYLDDASEDGGTVSSDYGKAVEENRKLLAEKTPGQIQLERFEKYGQLRGDFTVEENGEKHRLINVFSTSAYRKEAERILRKQQEFNSKITDEFIEDYLIILTGKRKYYHGPGNEKSRTDYGRFRTDGTTLDNIFGILIGKCTFYTEEYRASKASYTAQEFNLLNDLNNLTVPTETKKLSEEQKKLIIEYAKSAKTLGASTLLKYIAKMIDASVDQIRGYRVDVNNKPEMHTFEVYRKMQSLETIKVEELPRKVLDELAHILTLNTEREGIEEAINSKLKDIFNRDQVLELVQFRKNNSSLFSKGWHNFSIKLMMELIPELYETSEEQMTILTRLGKQRSKETSKRTKYIDEKELTEEIYNPVVAKSVRQAIKIINEATKKYGIFDNIVIEMARENNEEDAKKDYIKRQKANQDEKNAAMEKAAFQYNGKKELPDNIFHGHKELTTKIRLWHQQGEKCLYTGKNIPISDLIHNQYKYEIDHILPLSLSFDDSLSNKVLVLATANQEKGQRTPFQALDSMDDAWSYREFKSYVKDSKLLSNKKKDYLLTEEDISKIEVKQKFIERNLVDTRYSSRVVLNALQDFYKSHQLDTTISVVRGQFTSQLRRKWGIEKSRETYHHHAVDALIIAASSQLRLWKKHSNPLIAYKEGQFVDSETGEIVSLSDEEYKELVFKAPYDHFVDTLRSKKFEDSILFSYQVDSKYNRKISDATIYATRKAKLDKEKKEYTYTLGKIKDIYALGTKTPSKTGFYKFLDLYKTDKSQFLMYQKDRKTWDEVIEKIIEQYRPFKEYDKNGKEVDFNPFEKYRIGNGPIRKYSKKGNGPEIKSLKYYDILLGKHKNITPDGSRNTVALLSLNPWRTDVYYNSETKKYEFLGLKYADLCFEEGGAYGISEVKYKKIREKEGIGKNSEFKFTLYKNDLILIKDTETNCQQFFRFWSRTGKDNPKSFEKHKIELKPYEKAKFEKGEELKVLGKVPPSSNQFQKNMQIENLSIYKVKTDILGNKHFIKKEGDEPKLKFKK

SEQ ID NO: 462 - protein, 1129 aa, Streptococcus infantarius
  REGION 1..1129: note = Streptococcus infantarius subsp. infantarius ATCC BAA-102
MSNGKILGLDIGVASVGVGIIDSKTGNVIHANSRLFSAANAENNAERRGFRGARRLTRRKKHRVKRVRDLFEKYDISTDFRNLNLNPYELRVKGLTEQLTNEELFAALRTIAKRRGISYLDDAEDDSTGSSDYAKSIDENRRLLKTKTPGQIQLERLEKYGQLRGNFTVYDENGEAHRLINVFSTSDYKNEARKILETQSNYNKQITDEFIEDYIEILTQKRKYYHGPGNEKSRTDYGRFRTDGTTLENIFGILIGKCSFYPEEYRASKASYTAQEFNFLNDLNNLKVPTETGKLSTEQKEYLVDFAKKSKALGASKLLKEIAKIVDCSVDDIKGYRVDNKDKPDLHTFEPYRKLKFNLSSIDIDELSRETLDKLADILTLNTEREGIEDAIKRNLPSQFTEEQISEIVQIRKNQSSAFNKGWHSFSAKLMNELIPELYVTSEEQMTILTRLEKFKVNKKSSKNTKTIDEKEITDEIYNPVVAKSVRQTIKIINAAVKKYGDFDKIVIEMPRDKNAEDEKKFIDKKQKENKKEKDDSLKRAAFLYNGTDNLPDGVFHGNKELKTKIRLWYQQGERCLYSGKLISIHDLVHNSNKFEIDHILPLSLSFDDSLANKVLVYAWTNQEKGQKTPYQVIDSMDTAWSFREMKDYVLKQKGLGKKKCEYLLTTENIDKIEVKKKFIERNLVDTRYASRVVLNSLQTALKELGKDTKVSVVRGQFTSQLRRKWNIDKSRETYHHHAVDALIIAASSQLKLWQKQENPMFESYGENQVVNKETGEILSISDDKYKELVFQPPYQGFVNTISSKGFEDEILFSYQVDSKFNRKVSDATIYSTRKAKLGKDKKDETYVLGKIKDIYSQDGFDTFIKRYKKDKTQFLMYQKDPLTWENVIEVILRDYPSEKLSEDGKKTVKCNPFEEYRRENGLICKYSKKGNGTPIKSLKYYDKKLGNCIDITPEKSKNRVVLRQISPWRADIYFNLETLKYELMGLKYSDLSFEKGTGKYHISQEKYDAIREKEGIGKKSEFKFTLYRNDLILIKDTLNNCERMLRFGSKNDTSKHYVELKPLEKGTFDSEEEILPVLGKVAKSGQFIKGLNKPNISIYKVRTDVLGNKFFIKKEGDKPKLDFKNNNK

SEQ ID NO: 463 - protein, 1375 aa, Streptococcus infantarius
MEKSYSIGLDIGTNSVGWAVITDDYKVPAKKMKVLGNTDKKYIKKNLLGALLFDSGETAEVTRLKRTARRRYTRRKNRLRYLQEIFAKEMTKVDESFFQRLEESFLTDDDKTFDSHPIFGNKAEEDAYHQKFPTIYHLRKYLADSQEKADLRLVYLALAHMIKYRGHFLIEGELNAENTDVQKLFNVFVETYDKIVDESHLSEIEVDASSILTEKVSKSRRLENLIKQYPTEKKNTLFGNLIALALGLQPNFKTNFKLSEDAKLQFSKDTYEEDLEELLGKVGDDYADLFISAKNLYDAILLSGILTVDDNSTKAPLSASMIKRYVEHHEDLEKLKEFIKINKLKLYHDIFKDKTKNGYAGYIDNGVKQDEFYKYLKTILTKIDDSDYFLDKIERDDFLRKQRTFDNGSIPHQIHLQEMHSILRRQGDYYPFLKENQAKIEKILTFRIPYYVGPLARKDSRFAWANYHSDEPITPWNFDEVVDKEKSAEKFITRMTLNDLYLPEEKVLPKHSHVYETFTVYNELTKIKYVNEQGESFFFDANMKQEIFDHVFKENRKVTKAKLLSYLNNEFEEFRINDLIGLDKDSKSFNASLGTYHDLKKILDKSFLDDKTNGQIIEDIVLTLTLFEDRDMIHERLQKYSDFFTSQQLKKLERRHYTGWGRLSYKLINGIRNKENNKTILDFLIDDGHANRNFMQLINDESLSFKTIIQEAQVVGDVDDIEAVVHDLPGSPAIKKGILQSVKIVDELVKVMGDNPDNIVIEMARENQTTGYGRNKSNQRLKRLQDSLKEFGSDILSKKKPSYVDSKVENSHLQNDRLFLYYIQNGKDMYTGEELDIDRLSDYDIDHIIPQAFIKDNSIDNKVLTSSAKNRGKSDDVPSIEIVRNRRSYWYKLYKSGLISKRKFDNLTKAERGGLTEADKAGFIKRQLVETRQITKHVAQILDARFNTKRDENDKVIRDVKVITLKSNLVSQFRKEFKFYKVREINDYHHAHDAYLNAVVGTALLKKYPKLTPEFVYGEYKKYDVRKLIAKSSDDYSEMGKATAKYFFYSNLMNFFKTEVKYADGRVFERPDIETNADGEVVWNKQKDFDIVRKVLSYPQVNIVKKVEAQTGGFSKESILSKGDSDKLIPRKTKKVYWNTKKYGGFDSPTVAYSVLVVADIEKGKAKKLKTVKELVGISIMERSFFEENPVSFLEKKGYHNVQEDKLIKLPKYSLFEFEGGRRRLLASATELQKGNEVMLPAHLVELLYHAHRIDSFNSTEHLKYVSEHKKEFEKVLSCVENFSNLYVDVEKNLSKVRAAAESMTNFSLEEISASFINLLTLTALGAPADFNFLGEKIPRKRYTSTKECLSATLIHQSVTGLYETRIDLSKLGEE

SEQ ID NO: 464 - protein, 1368 aa, Streptococcus iniae
  REGION 1..1368: note = Streptococcus iniae 9117
MRKPYSIGLDIGTNSVGWAVITDDYKVPSKKMRIQGTTDRTSIKKNLIGALLFDNGETAEATRLKRTTRRRYTRRKYRIKELQKIFSSEMNELDIAFFPRLSESFLVSDDKEFENHPIFGNLKDEITYHNDYPTIYHLRQTLADSDQKADLRLIYLALAHIIKFRGHFLIEGNLDSENTDVHVLFLNLVNIYNNLFEEDIVETASIDAEKILTSKTSKSRRLENLIAEIPNQKRNMLFGNLVSLALGLTPNFKTNFELLEDAKLQISKDSYEEDLDNLLAQIGDQYADLFIAAKKLSDAILLSDIITVKGASTKAPLSASMVQRYEEHQQDLALLKNLVKKQIPEKYKEIFDNKEKNGYAGYIDGKTSQEEFYKYIKPILLKLDGTEKLISKLEREDFLRKQRTFDNGSIPHQIHLNELKAIIRRQEKFYPFLKENQKKIEKLFTFKIPYYVGPLANGQSSFAWLKRQSNESITPWNFEEVVDQEASARAFIERMTNFDTYLPEEKVLPKHSPLYEMFMVYNELTKVKYQTEGMKRPVFLSSEDKEEIVNLLFKKERKVTVKQLKEEYFSKMKCFHTVTILGVEDRFNASLGTYHDLLKIFKDKAFLDDEANQDILEEIVWTLTLFEDQAMIERRLVKYADVFEKSVLKKLKKRHYTGWGRLSQKLINGIKDKQTGKTILGFLKDDGVANRNFMQLINDSSLDFAKIIKNEQEKTIKNESLEETIANLAGSPAIKKGILQSIKIVDEIVKIMGQNPDNIVIEMARENQSTMQGIKNSRQRLRKLEEVHKNTGSKILKEYNVSNTQLQSDRLYLYLLQDGKDMYTGKELDYDNLSQYDIDHIIPQSFIKDNSIDNTVLTTQASNRGKSDNVPNIETVNKMKSFWYKQLKSGAISQRKFDHLTKAERGALSDFDKAGFIKRQLVETRQITKHVAQILDSRFNSNLTEDSKSNRNVKIITLKSKMVSDFRKDFGFYKLREVNDYHHAQDAYLNAVVGTALLKKYPKLEAEFVYGDYKHYDLAKLMIQPDSSLGKATTRMFFYSNLMNFFKKEIKLADDTIFTRPQIEVNTETGEIVWDKVKDMQTIRKVMSYPQVNIVMKTEVQTGGFSKESIWPKGDSDKLIARKKSWDPKKYGGFDSPIIAYSVLVVAKIAKGKTQKLKTIKELVGIKIMEQDEFEKDPIAFLEKKGYQDIQTSSIIKLPKYSLFELENGRKRLLASAKELQKGNELALPNKYVKFLYLASHYTKFTGKEEDREKKRSYVESHLYYFDEIMQIIVEYSNRYILADSNLIKIQNLYKEKDNFSIEEQAINMLNLFTFTDLGAPSAFKFFNGDIDRKRYSSTNEIINSTLIYQSPTGLYETRIDLSKLGGK

SEQ ID NO: 465 - protein, 1338 aa, Streptococcus macacae
  REGION 1..1338: note = Streptococcus macacae NCTC 11558
MTKPYSIGLDIGTNSVGWAVVTDGYKVPAKKMKVLGNTDKSHIKKNLLGALLFDSGNTAKDRRLKRTARRRYTRRRNRILYLQEIFAEEMAKADESFFQRLNESFLTNDDKEFDSHPIFGNKAEEEAHHHKFPTIFHLRKHLADSTEKSDLRLIYLALAHMIKFRGHFLIEGQLKAENTNVQTLFDDFVEVYDKTVEESHLSEISVSSILTEKISKSRRLENLIKYYPTEKKNTLFGNLIALSLGLQPNFKTNFKLSEDAKLQFSKDTYEEDLGELLGKIGDNYADLFISAKNLYDAILLSGILTIDDNTTKAPLSASMIKRYEEHQEDLAQLKKFIRQNLPDQYSEVFSDKTKDGYAGYIDGKTNQEAFYKYIKNMLSKTEGADYFLDKIDREDFLRKQRTFDNGSVPHQIHLQEMHAILRRQGEYYPFLKENQDKIEKILTFRIPYYVGPLARKGSRFAWAEYKADKKVTPWNFDDILDKEKSAEEFITRMTLNDLYLPEEKVLPKHSLVYETFNVYNELTKVKYVNEQGKAIFFDANMKQEIFDHVFKENRKVTKDKLLNYLNKEFEEFRIVNLTGLDKENKAFNSSLGTYHDLRKILDKSFLDDKVNEKIIEDIIQTLTLFEDREMIRQRLQKYSDIFTTQQLKKLERRHYTGWGRLSAKLINGIRDKQSNKTILGYLIDDGYSNRNFMQLINDDSLPFKEEIARAQVIGETDDLNQLVSDIAGSPAIKKGILQSLKIVDELVKVMGHNPANIVIEMARENQTTAKGRRSSQQRYKRLEEAIKNLDHDLNHKILKEHPTDNQALQNDRLFLYYLQNGRDMYTEDPLDINRLSDYDIDHIIPQSFIKDDSIDNKVLVSSAKNRGKSDNVPSEDVVNRMRPFWNKLLSCGLISQRKYSNLTKKELKPDDKAGFIKRQLVETRQITKHVAQILDARFNTKRDENKKVIRDVKIITLKSNLVSQFRKDFKFYKVREINDYHHAHDAYLNAVIGKALLDVYPQLEPEFVYGEYPHFHGYKENKATAKKFFYSNIMNFFKKDDIRTDENGEIVWKKDEHISNIKRVLSYPQVNIVKKVEIQTVGQNGGLFDDNPKSPLEVTPSKLVPLKKELNPKKYGGYQKPTTAYPVLLITDTKQLIPISVMNKKQFEQNPVKFLRDRGYQQVGKNDFIKLPKYTLVDIGDGIKRLWASSKEIHKGNQLVVSKKSQILLYHAHHLDSDLSNDYLQNHNQQFDVLFNEIISFSKKCKLGKEHIQKIENVYSNKKNSASIEELAESFIKLLGFTQLGATSPFNFLGVKLNQKQYKGKKDYILPCTEGTLIRQSITGLYETRVDLSKIGED

SEQ ID NO: 466 - protein, 1130 aa, Streptococcus macedonicus
MTNGKILGLDIGIASVGVGIIEAKTGKVVHANSRLFSAANAENNAERRGFRGSRRLNRRKKHRVKRVRDLFEKYGIVTDFRNLNLNPYELRVKGLTEQLTNEELFAALRTISKRRGISYLDDAEDDSTGSTDYAKSIDENRRLLKTKTPGQIQLERLEKYGQLRGNFTVYDENGEAHRLINVFSTSDYEKEARKILETQADYNKKITAEFIDDYVEILTQKRKYYHGPGNEKSRTDYGRFRTDGTTLENIFGILIGKCNFYPDEYRASKASYTAQEYNFLNDLNNLKVPTETGKLSTEQKESLVEFAKNTAILGPAKLLKEIAKILDCKVDEIKGYREDDKGKPDLHTFEPYRKLKFNLDSVNIDYLSREVLDKLADILTLNTEREGIEDAIKRNLPNQFTEEQISEIINVRKSQSTAFNKGWHSFSAKLMNELIPELYATSDEQMTILTRLEKFKVKKKSSKNIKTIDEKEITDEIYNPVVAKSVRQTIKIINAAVKKYGDFDKIVIEMPRDKNADDEKKFINKRNKENKKEKDDALKRAAYLYNGTDKLPDEVFHGNKQLETKIRLWYQQGERCLYSGKPIPIQELVHNSNNFEIDHILPLSLSFDDSLANKVLVYSWTNQEKGQKTPYQVIDSMDAAWSFREMKEYVLKQKGLGKKKRDYLLTTENIDKIEVKKKFIERNLVDTRYASRVVLNSLQSALRELGKDTKVSVVRGQFTSQLRRKWKIDKSRETYHHHAVDALIIAASSQLKLWEKQDNPMFVDYGNNQVVDKQTGEILSVSDNEYKELVFQPPYQGFVNTISSKGFEDEILFSYQVDSKYNRKVSDATIYSTRKAKIGKDKKEETYVLGKIKDIYSQNGFDTFVKKYNKDKTQFLMYQKDPLTWENVIEVILGDYPTTKKSEDGKNDVKCNPFEEYRRENGLICKYSKKGKGTPIKSLKYYDKKLGNCIDITPEESRNKVILQSINPWRADVYFNPETLKYELMGLKYSDLSFEKGTGNYHISQEKYDAIKEKEGIGKKSEFKFTLYRNDLILIKDIASGEQEIYRFLSRTMPNVNHYVELKPYDKEKFDNVQELVEALGEADKVGRCIKSLNKPNISIYKVRTDVLGNKYFVKKEGDKPKLDFKNNKK

SEQ ID NO: 467 - protein, 1134 aa, Streptococcus mitis
  REGION 1..1134: note = Streptococcus mitis ATCC 6249
MNGLVLGLDIGIASEGVGILEKNSGKIIHANSRLFPAATADNNVERRKNRQARRLNRRKKHRGVRFQDLFEDYGLLTDFSKVSINLNPYRLRVDGLNQQLTNEELFIALKNIVKRRGISYLDDASEDGGAVSSDYGKAVEENRKLLAEQTPGQIQLERFEKYGQVRGDFTVVENGEKLRLINVFSTSAYKKEAERILRKQQEFNNQITDEFIEDYLKILTGKRKYYHGPGNEKSRTDYGRFRTDGTTLDNIFGILIGKCTFYPEEYRASKASYTAQEFNLLNDLNNLTVPTETKKLSEEQKKVIVEYAKEAKTLGASTLLKYIAKMIDASVDQIRGYRVDVNNKPEMHTFEVYRKMQSLETISVGELSRNVLDELAHILTLNTEREGMEEAINTKLKDSFSQDQVLELVQFRKNNSSLFSKGWHNFSLKLMMELIPELYETSEEQMTILTRLGKQKSKETSKRTKYIDEKELTEEIYNPVVAKSVRQAIKIINEATKKHGIFDNIVIEMARENNEEDAKKDYIKRQKANQDEKNAAMEKAAFQYNGKKELPDNIFHGHKELATKIRLWHQQGEKCLYTGKTIPISDLIYNQYKYEIDHILPLSLSFDDSLSNKVLALATANQEKGQRTPFQALDSMDDAWSYREFKSYVKDLKSLSNKKKDYLLTEEDISKIEVKQKFIERNLVDTRYSSRVVLNALQDFYKSHQFDTTISVVRGQFTSQLRRKWGLEKSRETYHHHAVDALIIAASSQLRLWKKQNNPLITYKEGQFVDSQTGEIISLTDDEYKELVFKAPYDHFVDTLSSKTFEDSILFSYQVDSKFNRKISDATIYATRKAKLDKEKKEYTYTLGKIKDIYSLGTKTPSKTGFYKFLDLYNKDKSQFLMFQKDRKTWDEVIEKIMEQYRPFKEYDKTGKLVDFNPFEKYRQENEPIRKYSKKGNGPEIKSLKYYDILLGKHKNITPEGSRNTVALLSLNPWRTDVYYNMETKKYEFLGLKYADLPFEEGGAYGISTETYNELREKEGIGKNSEFKFTLYKNDLILIKDTETNCQQIFRFWSRTGKDNPKSFEKHKIELKPYEKARFEKGEELEVLGKVPPSSNQLQKNMQIENLSIYKVKTDVLGNKHFIKKEGDKPKLKF

SEQ ID NO: 468 - protein, 1392 aa, Streptococcus mitis
  REGION 1..1392: note = Streptococcus mitis SK321
MNNNNYSIGLDIGTNSVGWAVITDDYKVPSKKMKVLGNTDKHFIKKNLIGALLFDEGATAEDRRFKRTARRRYTRRKNRLRYLQEIFSEEMSKVDSSFFHRLDDSFLVPEDKRGSKYPIFATLAEEKEYHKKFPTIYHLRKHLADSKEKTDLRLIYLALAHMIKYRGHFLYEESFDIKNNDIQKIFSEFISIYDNTFEGSSLSGQNAQVEAIFTDKISKSAKRERILKLFAYEKSTDLFSEFLKLIVGNQADFKKHFDLEEKAPLQFSKDTYDEDLENLLGQIGDDFADLFLVAKKLYDAILLSGILTVTDSSTKAPLSASMIERYENHQKDLAALKQFIQNNLQEKYDEVFSDQSKDGYARYINGKTTQEAFYKYIKNLLSKFEGSDYFLDKIEREDFLRKQRTFDNGSIPHQIHLQEMNAIIRRQGEHYPFLKEYKEKIETILTFRIPYYVGPLARGNRNFAWLTRNSDQAIRPWNFEEIVDQASSAEEFINKMTNYDLYLPEEKVLPKHSLLYETFAVYNELTKVKFISEGLRDYQFLDSGQKKQIVNQLFKEKRKVTEKDIIQYLHNVDGYDGIELKGIEKQFNASLSTYHDLLKIIKDKEFMDDPKNEEILENIVHTLTIFEDREMIKQRLAQYASIFDKKVIKALTRRHYTGWGKLSAKLINGICDKKTGKTILDYLIDDGYSNRNFMQLINDDGLSFKDIIQKAQVVGKTNDVKQVVQELPGSPAIKKGILQSIKLVDELVKVMGHAPESIVIEIARENQTTARGKKNSQQRYKRIEDALKNLAPGLDSNILKEHPTDNIQLQNDRLFLYYLQNGKDMYTGEALDINQLSSYDIDHIVPQAFIKDDSLDNRVLTSSKDNRGKSDNVPSLEVVQKRKAFWQQLLDSKLISEHKFNNLTKAERGGLDERDKVGFIRRQLVETRQITKHVAQILDARFNTEVNEKDKKNRTVKIITLKSNLVSNFRKEFKLYKVREINDYHHAHDAYLNAVVAKAILKKYPKLEPGFVYGDYQKYDIKRYISRSKDPKEVEKATEKYFFYSNLLNFFKEEVHYADGTIVKRENIEYSKDTGEIAWNKEKDFATIKKVLSLPQVNIVKKTEIQTHGLDRGKPRGLFNSNPSPKPSEDRKENLVPIKQGLDPRKYGGYAGISNSYAVLVKAIIEKGAKKQQKTVLEFQGISILDKINFEKNKENYLLEKGYIKILSTITLPKYSLFEFPDGTRRRLASILSTNNKRGEIHKGNELVIPEKYTTLLYHAKNINKTLEPEHLEYVEKHRNDFAKLLEYVLNFNDKYVGALKNGERIRQAFIDWETVDIEKLCFSFIGPRNSKNAGLFELTSQGSASDFEFLGVKIPRYRDYTPSSLLNATLIHQSITGLYETRIDLSKLGED

SEQ ID NO: 469 - protein, 1345 aa, Streptococcus mutans
  REGION 1..1345: note = Streptococcus mutans 11SSST2
MKKPYSIGLDIGTNSVGWAVVTDDYKVPAKKMKVLGNTDKSHIKKNLLGALLFDSGNTAADRRLKRTARRRYTRRRNRILYLQEIFAEEMSKVDDSFFHRLEDSFLVTEDKRGERHPIFGNLEEEVKYHENFPTIYHLRQYLADNPEKVDLRLVYLALAHIIKFRGHFLIEGKFDTRNNDVQRLFQEFLAVYDNTFENSSLQEQNVQVEEILTDKISKSAKKDRVLKLFPNEKSNGRFAEFLKLIVGNQADFKKHFELEEKAPLQFSKDTYEEELEVLLTQIGDNYAELFLSAKKLYDSILLSGILTVTDVSTKAPLSASMIQRYNEHQMDLAQLKQFIRQKLSDKYNEVFSDVSKDGYAGYIDGKTNQEAFYKYLKGLLNKIEGSGYFLDKIEREDFLRKQRTFDNGSIPHQIHLQEMRAIIRRQAEFYPFLADNQDRIEKILTFRIPYYVGPLARGKSDFAWLSRKSADKITPWNFDEIVDKESSAEAFINRMTNYDLYLPNQKVLPKHSLLYEKFTVYNELTKVKYKTEQGKTAFFDANMKQEIFDGVFKVYRKVTKDKLMDFLEKEFDEFRIVDLTGLDKENKAFNASYGTYHDLRKILDKDFLDNSKNEKILEDIVLTLTLFEDREMIRKRLENYSDLLTKEQVKKLERRHYTGWGRLSAELIHGIRNKESRKTLLDYLIDDGNSNRNFMQLINDDALSFKEEIAKAQVIGETDNLNQVVSDIAGSPAIKKGILQSLKIVDELVKIMGHQPENIVVEMARENQFTNQGRRNSQQRLKGLTDSIKEFGSQILKEHPVENSQLQNDRLFLYYLQNGRDMYTGEELDIDYLSQYDIDHIIPQAFIKDNSIDNRVLTSSKENRGKSDDVPSKDVVRKMKPYWSKLLSAKLITQRKFDNLTKAERGGLTDDDKAGFIKRQLVETRQITKHVARILDERFNTETDENNKKIRQVKIVTLKSNLVSNFRKEFELYKVREINDYHHAHDAYLNAVIGKALLGVYPQLEPEFVYGDYPHFHGHEENKATAKKFFYSNIMNFFKKDDVRTDKNGEIIWKKDEHISNIKKVLSYPQVNIVKKVEEQTGGFSKESILPKGNSDKLIPRKTKKFYWDTKKYGGFDSPIVAYSILVIADIEKGKSKKLKTVKALVGVTIMEKMTFERDPVAFLERKGYRNVQEENIIKLPKYSLFKLENGRKRLLASARELQKGNEIVLPNHLGTLLYHAKNIHKVDEPKHLDYVDKHKDEFKELLDVVSNFSKKYTLAEGNLEKIKELYAQNNGEDLKELSSSFINLLTFTAIGAPAAFKFFDKNIDRKRYTSTTEILNATLIHQSITGLYETRIDLSKLGGD

SEQ ID NO: 470 - protein, 1345 aa, Streptococcus mutans; identical to SEQ ID NO: 469
  REGION 1..1345: note = Streptococcus mutans 11SSST2

SEQ ID NO: 471 - protein, 1345 aa, Streptococcus mutans
  REGION 1..1345: note = Streptococcus mutans 11VS1
MKKPYSIGLDIGTNSVGWAVVTDDYKVPAKKMKVLGNTDKSHIKKNLLGALLFDSGNTAEDRRLKRTARRRYTRRRNRILYLQEIFSEEMGKVDDSFFHRLEDSFLVTEDKRGERHPIFGNLEEEVKYHENFPTIYHLRQYLADNPEKVDLRLVYLALAHIIKFRGHFLIEGKFDTRNNDVQRLFQEFLAVYDNTFENSSLQEQNVQVEEILTDKISKSAKKDRVLKLFPNEKSNGRFAEFLKLIVGNQADFKKHFELEEKAPLQFSKDTYEEELEVLLAQIGDNYAELFLSAKKLYDSILLSGILTVTDVSTKAPLSASMIQRYNEHQMDLAQLKQFIRQKLSDKYNEVFSDVSKDGYAGYIDGKTNQEAFYKYLKGLLNKIEGSGYFLDKIEREDFLRKQRTFDNGSIPHQIHLQEMRAIIRRQAEFYPFLADNQDRIEKILTFRIPYYVGPLARGKSDFAWLSRKSADKITPWNFDEIVDKESSAEAFINRMTNYDLYLPNQKVLPKHSLLYEKFTVYNELTKVKYKTEQGKTAFFDANMKQEIFDGVFKVYRKVTKDKLMDFLEKEFDEFRIVDLTGLDKENKVFNASYGTYHDLCKILDKDFLDNSKNEKILEDIVLTLTLFEDREMIRKRLENYSDLLTKEQVKKLERRHYTGWGRLSAELIHGIRNKESRKTILDYLIDDGNSNRNFMQLINDDALSFKEEIAKAQVIGETDNLNQVVSDIAGSPAIKKGILQSLKIVDELVKIMGHQPENIVVEMARENQFTKQGRRNSQQRLKGLTDSIKEFGSQILKEHPVENSQLQNDRLFLYYLQNGRDMYTGEELDIDYLSQYDIDHIIPQAFIKDNSIDNRVLTSSKENRGKSDDVPSKDVVRKMKSYWSKLLSAKLITQRKFDNLTKAERGGLTDDDKAGFIKRQLVETRQITKHVARILDERFYTETDENNKKIRQVKIVTLKSNLVSNFRKEFELYKVREINDYHHAHDAYLNAVIGKALLGVYPQLEPEFVYGDYPHFHGHKENKATAKKFFYSNIMNFFKKDDVRTDKNGEIIWKKDEHISNIKKVLSYPQVNIVKKVEEQTGGFSKESILPKGNSDKLIPRKTKKFYWDTKKYGGFDSPIVAYSILVIADIEKGKSKKLKTVKALVGVTIMEKMTFERDPVAFLERKGYRNVQEENIIKLPKYSLFKLENGRKRLLASARELQKGNEIVLPNHLGTLLYHAKNIHKVDEPKHLDYVDKHKDEFKELLDVVSNFSKKYTLAEGNLEKIKELYAQNNGEDLKELASSFINLLTFTAIGAPATFKFFDKNIDRKRYTSTTEILNATLIHQSITGLYETRIDLSKLGGD

SEQ ID NO: 472 - protein, 1345 aa, Streptococcus mutans
  REGION 1..1345: note = Streptococcus mutans 14D
MKKPYSIGLDIGTNSVGWAVVTDDYKVPAKKMKVLGNTDKSHIKKNLLGALLFDSGNTAADRRLKRTARRRYTRRRNRILYLQEIFAEEMSKVDDSFFHRLEDSFLVTEDKRGERHPIFGNLEEEVKYHENFPTIYHLRQYLADNPEKVDLRLVYLALAHIIKFRGHFLIEGKFDTRNNDVQRLFQEFLAVYDNTFENSSLQEQNVQVEEILTDKISKSAKKDRVLKLFPNEKSNGRFAEFLKLIVGNQADFKKHFELEEKAPLQFSKDTYEEELEVLLAQIGDNYAELFLSAKKLYDSILLSGILTVTDVSTKAPLSASMIQRYNEHQMDLAQLKQFIRQKLSDKYNEVFSDVSKDGYAGYIDGKTNQEAFYKYLKGLLNKIEGSGYFLDKIEREDFLRKQRTFDNGSIPHQIHLQEMRAIIRRQAEFYPFLADNQDRIEKILTFRIPYYVGPLARGKSDFAWLSRKSADKITPWNFDEIVDKESSAEAFINRMTNYDLYLPNQKVLPKHSLLYEKFTVYNELTKVKYKTEQGKTAFFDANMKQEIFDGVFKVYRKVTKDKLMDFLEKEFDEFRIVDLTGLDKENKAFNASYGTYHDLRKILDKDFLDNSKNEKILEDIVLTLTLFEDREMIRKRLENYSDLLTKEQVKKLERRHYTGWGRLSAELIHGIRNKESRKTILDYLIDDGNSNRNFMQLINDDALSFKEEIAKAQVIGETDNLNQVVSDIAGSPAIKKGILQSLKIVDELVKIMGHQPENIVVEMARENQFTNQGRRNSQQRLKGLTDSIKEFGSQILKEHPVEHSQLQNDRLFLYYLQNGRDMYTGEELDIDYLSQYDIDHIIPQAFIKDNSIDNRVLTSSKENRGKSDDVPSKNVVRKMKSYWSKLLSAKLITQRKFDNLTKAERGGLTDDDKAGFIKRQLVETRQITKHVARILDERFHTETDENNKKIRQVKIVTLKSNLVSNFRKEFELYKVREINDYHHAHDAYLNAVIGKALLGVYPQLEPEFVYGDYPHFHGHKENKATAKKFFYSNIMNFFKKDDVRTDKNGEIIWKKDEHISNIKKVLSYPQVNIVKKVEEQTGGFSKESILPKGNSDKLIPRKTKKFYWDTKKYGGFDSPIVAYSILVIADIEKGKSKKLKTVKALVGVTIMEKMTFERDPVAFLERKGYRNVQEENIIKLPKYSLFKLENGRKRLLASARELQKGNEIVLPNHLGTLLYHAKNIHKVDEPKHLDYVDKHKDEFKELLDVVSNFSKKYTLAEGNLEKIKELYAQNNGEDLKELASSFINLLTFTAIGAPATFKFFDKNIDRKRYTSTTEILNATLIHQSITGLYETRIDLSKLGGD

SEQ ID NO: 473 - protein, 1355 aa, Streptococcus mutans
  REGION 1..1355: note = Streptococcus mutans 15VF2
MKKSYSIGLDIGTNSVGWAVVTDDYKVPAKKMKVLGNTDKSHIKKNLLGALLFDSGNTAEDRRLKRTARRRYTRRRNRILYLQEIFSEEMGKVDDSFFHRLDESFLTDDDKNFDSHPIFGNKAEEDAYHQKFPTIYHLRKHLADSTEKADLRLVYLALAHMIKFRGHFLIEGELNAENTDVQKLFADFVGVYDRTFDDSHLSEITVDASSILTEKISKSRRLEKLINNYPKEKKNTLFGNLIALSLGLQPNFKTNFKLSEDAKLQFSKDTYEEDLEELLGKIGDDYADLFTLAKNLYDAILLSGILTADDSSTKAPLSASMIKRYAEHHEDLEKLKEFIKANKPELYHDIFKDETKNGYAGYIENGVKQDEFYKYLKNTLSKIAGSDYFLDKIEREDFLRKQRTFDNGSIPHQIHLQEMHAILRRQGDYYPFLKENQDRIEKILTFRIPYYVGPLARKNSRFAWAEYHSDEAVMPWNFDQVIDKESSAQAFIEHMTNNDLYLPNEKVLPKHSPLYEKYTVYNELTKIKYVTEIGEAKFFDANLKQEIFDGLFKHERKVTKKKLRTFLDKNFDEFRIVDIQGLDKETETFNASYATYQDLLKVIKDKVFMDNPENAEILENIVLTLTLFEDREMIKQRLAKYADVFDKKVIDQLARRHYTGWGRLSAKLLNGIRDKQSCKTIMDYLIDDAQSNRNLMQLITDDNLTFKDDIVKAQYVDNSDDLHQVVQSLAGSPAIKKGILQSLKIVDELVKVMGKEPEQIVVEMARENQTTAKGRRNSQQRYKRLKEAIKSLDRDLNHKILKEHPTDNQALQNNRLFLYYLQNGRDMYTGESLDINRLSDYDIDHVIPQAFIKDNSIDNRVLTSSKANRGKSDDVPSEDVVNRMRPFWNKLLSSGLISQRKYNNLTKKELTPDDKAGFIKRQLVETRQITKHVARMLDERFNKEFDDNNKRIRRVKIVTLKSNLVSSFRKEFELYKVREINDYHHAHDAYLNAVVVKALLVKYPKLEPEFVYGEYPKYNSYRERKTATQKMFFYSNIMNMFKSKVKLADDQIVERPMIEVNDETGEIAWDKTKHITTVKKVLSYPQVNIVKKVEEQTIGQNGGLFDDNPKSPLEVIPSKLVPLKKALNPEKYGGYQKPTTAYPILLIVDTKQLIPISVMDKKRFEQNPVKFLKDKGYQQIEKNNFVKLPKYTLVDIGNGIKRLWASSKEVHKGNQLVVSKKSQDLLYHAHHLDNDYSNEYVKNHYQQFDILFNEITSFSKKCKLGKEHIQKIEEAYSKERDSASIEELADGFIKLLGFTQLGATSPFSFLGIKLNQKQYTGKKDYLLPCMEATLIHQSITGLYETRIDLNKLGGD

SEQ ID NO: 474 - protein, 1355 aa, Streptococcus mutans; identical to SEQ ID NO: 473
  REGION 1..1355: note = Streptococcus mutans 15VF2

SEQ ID NO: 475 - protein, 1345 aa, Streptococcus mutans
  REGION 1..1345: note = Streptococcus mutans 1SM1
MKKPYSIGLDIGTNSVGWAVVTDDYKVPAKKMKVLGNTDKSHIKKNLLGALLFDSGNTAEDRRLKRTARRRYTRRRNRILYLQEIFSEEMGKVDDSFFHRLEDSFLVTEDKRGERHPIFGNLEEEVKYHENFPTIYHLRQYLADNPEKVDLRLVYLALAHIIKFRGHFLIEGKFDTRNNDVQRLFQEFLAVYDNTFENSSLQEQNVQVEEILTDKISKSAKKDRVLKLFPNEKSNGRFAEFLKLIVGNQADFKKHFELEEKAPLQFSKDTYEEDLEELLGKIGDDYADLFTLAKNLYDAILLSGILTADDSSTKAPLSASMIQRYNEHQMDLAQLKQFIRQKLSDKYNEVFSDVSKDGYAGYIDGKTNQEAFYKYLKGLLNKIEGSGYFLDKIEREDFLRKQRTFDNGSIPHQIHLQEMRAIIRRQAEFYPFLADNQDRIEKILTFRIPYYVGPLARGKSDFAWLSRKSADKITPWNFDEIVDKESSAEAFINRMTNYDLYLPNQKVLPKHSLLYEKFTVYNELTKVKYKTEQGKTAFFDANMKQEIFDGVFKVYRKVTKDKLMDFLEKEFDEFRIVDLTGLDKENKVFNASYGTYHDLCKILDKDFLDNSKNEKILEDIVLTLTLFEDREMIRKRLENYSDLLTKEQVKKLERRHYTGWGRLSAELIHGIRNKESRKTILDYLIDDGNSNRNFMQLINDDALSFKEEIAKAQVIGETDNLNQVVSDIAGSPAIKKGILQSLKIVDELVKIMGHQPENIVVEMARENQFTNQGRRNSQQRLKGLTDSIKEFGSQILKEHPVENSQLQNDRLFLYYLQNGRDMYTGEELDIDYLSQYDIDHIIPQAFIKDNSIDNRVLTSSKENRGKSDDVPSKDVVRKMKSYWSKLLSAKLITQRKFDNLTKAERGGLTDDDKAGFIKRQLVETRQITKHVARILDERFYTETDENNKKIRQVKIVTLKSNLVSNFRKEFELYKVREINDYHHAHDAYLNAVIGKALLGVYPQLEPEFVYGDYPHFHGHKENKATAKKFFYSNIMNFFKKDDVRTDKNGEIIWKKDEHISNIKKVLSYPQVNIVKKVEEQTGGFSKESILPKGNSDKLIPRKTKKFYWDTKKYGGFDSPIVAYSILVIADIEKGKSKKLKTVKALVGVTIMEKMTFERDPVAFLERKGYRNVQEENIIKLPKYSLFKLENGRKRLLASARELQKGNEIVLPNHLGTLLYHAKNIHKVDEPKHLDYVDKHKDEFKELLDVVSNFSKKYTLAEGNLEKIKELYAQNNGEDLKELASSFINLLTFTAIGAPATFKFFDKNIDRKRYTSTTEILNATLIHQSITGLYETRIDLSKLGGD

SEQ ID NO: 476 - protein, 1345 aa, Streptococcus mutans; identical to SEQ ID NO: 475
  REGION 1..1345: note = Streptococcus mutans 1SM1

SEQ ID NO: 477 - protein, 1350 aa, Streptococcus mutans
  REGION 1..1350: note = Streptococcus mutans 24
MKKPYSIGLDIGTNSVGWAVVTDDYKVPAKKMKVLGNTDKSHIEKNLLGALLFDSGNTAEDRRLKRTARRRYTRRRNRILYLQEIFSEEMGKVDDSFFHRLEDSFLVTEDKRGERHPIFGNLEEEVKYHENFPTIYHLRQYLADNPEKVDLRLVYLALAHIIKFRGHFLIEGKFDTRNNDVQRLFQEFLAVYDNTFENSSLQEQNVQVEEILTDKISKSAKKDRVLKLFPNEKSNGRFAEFLKLIVGNQADFKKHFELEEKAPLQFSKDTYEEELEVLLAQIGDNYAELFLSAKKLYDSILLSGILTVTDVSTKAPLSASMIQRYNEHQMDLTQLKQFIRQKLSDKYNEVFSDVSKDGYAGYIDGKTNQEAFYKYLKGLLNKIEGSGYFLDKIEREDFLRKQRTFDNGSIPHQIHLQEMRAIIRRQAEFYPFLADNQDRIEKILTFRIPYYVGPLARGKSDFAWLSRKSADKITPWNFDEIVDKESSAEAFINRMTNYDLYLPNQKVLPKHSLLYEKFTVYNELTKVKYKTEQGKTAFFDANMKQEIFDGVFKVYRKVTKDKLMDFLEKEFDEFRIVDLTGLDKENKAFNASYGTYHDLRKILDKDFLDNSKNEKILEDIVLTLTLFEDREMIRKRLKNYSDLLTKEQLKKLERRHYTGWGRLSAELIHGIRNKESRKTILDYLIDDGNSNRNFMQLINDDALSFKEEIAKAQVIGETDNLNQVVSDIAGSPAIKKGILQSLKIVDELVKIMGHQPENIVVEMARENQFTNQGRQNSQQRLKGLTDSIKEFGSQILKEHPVENSQLQNDRLFLYYLQNGRDMYTGEELDIDYLSQYDIDHIIPQAFIKDNSIDNRVLTSSKENRGKSDDVPSEDVVNRMRPFWNKLLSSGLISQRKYNNLTKKELTLDDKAGFIKRQLVETRQITKHVARMLDERFNKEFDDNNKRICKVKIVTLKSNLVSSFRKEFELYKVREINDYHHAHDAYLNAVVVKALLVKYSKLEPEFVYGEYPKYNSYRERKTATQKMFFYSNIMNMFKSKVKLADDQIVERPMIEVNDETGEIAWDKTKHITTVKKVLSYPQVNIVKKVEEQTIGQNGGLFDDNPKSPLEVIPSKLVPLKKALNPEKYGGYQKPTTAYPILLIVDTKQLIPISVMDKKRFEQNPVKFLKDKGYQQIEKNNFVKLPKYTLVDIGNGIKRLWASSKEVHKGNQLVVSKKSQDLLYHAHHLDNDYSNEYVKNHYQQFDILFNEITSFSKKCKLGKEHIQKIEEAYSKERDSASIEELADGFIKLLGFTQLGATSPFSFLGIKLNQKQYTGKKDYLLPCMEATLIHQSITGLYETRIDLSKLGGD

SEQ ID NO: 478 - protein, 1350 aa, Streptococcus mutans; identical to SEQ ID NO: 477
  REGION 1..1350: note = Streptococcus mutans 24

SEQ ID NO: 479 - protein, 1345 aa, Streptococcus mutans; identical to SEQ ID NO: 472
  REGION 1..1345: note = Streptococcus mutans 2VS1

SEQ ID NO: 480 - protein, 1345 aa, Streptococcus mutans; identical to SEQ ID NO: 472
  REGION 1..1345: note = Streptococcus mutans 2VS1

SEQ ID NO: 481 - protein, 1345 aa, Streptococcus mutans; identical to SEQ ID NO: 471
  REGION 1..1345: note = Streptococcus mutans 3SN1

SEQ ID NO: 482 - protein, 1345 aa, Streptococcus mutans; identical to SEQ ID NO: 471
  REGION 1..1345: note = Streptococcus mutans 3SN1

SEQ ID NO: 483 - protein, 1345 aa, Streptococcus mutans
  REGION 1..1345: note = Streptococcus mutans 4SM1
MKKPYSIGLDIGTNSVGWAVVTDDYKVPAKKMKVLGNTDKSHIKKNLLGALLFDSGNTAEDRRLKRTARRRYTRRRNRILYLQEIFSEEMGKVDDSFFHRLEDSFLVTEDKRGERHPIFGNLEEEVKYHENFPTIYHLRQYLADNPEKVDLRLVYLALAHIIKFRGHFLIEGKFDTRNNDVQRLFQEFLAVYDNTFENSSLQEQNVQVEEILTDKISKSAKKDRVLKLFPNEKSNGRFAEFLKLIVGNQADFKKHFELEEKAPLQFSKDTYEEDLEELLGKIGDDYADLFTLAKNLYDAILLSGILTADDSSTKAPLSASMIQRYNEHQMDLAQLKQFIRQKLSDKYNEVFSDVSKDGYAGYIDGKTNQEAFYKYLKGLLNKIEGSGYFLDKIEREDFLRKQRTFDNGSIPHQIHLQEMRAIIRRQAEFYPFLADNQDRIEKILTFRIPYYVGPLARGKSDFAWLSRKSADKITPWNFDEIVDKESSAEAFINRMTNYDLYLPNQKVLPKHSLLYEKFTVYNELTKVKYKTEQGKTAFFDANMKQEIFDGVFKVYRKVTKDKLMDFLEKEFDEFRIVDLTGLDKENKVFNASYGTYHDLCKILDKDFLDNSKNEKILEDIVLTLTLFEDREMIRKRLENYSDLLTKEQVKKLERRHYTGWGRLSAELIHGIRNKESRKTILDYLIDDGNSNRNFMQLINDDALSFKEEIAKAQVIGETDNLNQVVSDIAGSPAIKKGILQSLKIVDELVKIMGHQPENIVVEMARENQFTNQGRRNSQQRLKGLTDSIKEFGSQILKEHPVENSQLQNDRLFLYYLQNGRDMYTGEELDIDYLSQYDIDHIIPQAFIKDNSIDNRVLTSSKENRGKSDDVPSKDVVRKMKPYWSKLLSAKLITQRKFDNLTKAERGGLTDDDKAGFIKRQLVETRQITKHVARILDERFNTETDENNKKIRQVKIVTLKSNLVSNFRKEFELYKVREINDYHHAHDAYLNAVIGKALLGVYPQLEPEFVYGDYPHFHGHEENKATAKKFFYSNIMNFFKKDDVRTDKNGEIIWKKDEHISNIKKVLSYPQVNIVKKVEEQTGGFSKESILPKGNSDKLIPRKTKKFYWDTKKYGGFDSPIVAYSILVIADIEKGKSKKLKTVKALVGVTIMEKMTFERDPVAFLERKGYRNVQEENIIKLPKYSLFKLENGRKRLLASARELQKGNEIVLPNHLGTLLYHAKNIHKVDEPKHLDYVDKHKDEFKELLDVVSNFSKKYTLAEGNLEKIKELYAQNNGEDLKELASSFINLLTFTAIGAPATFKFFDKNIDRKRYTSTTEILNATLIHQSITGLYETRIDLSKLGGD

SEQ ID NO: 484 - protein, 1345 aa, Streptococcus mutans; identical to SEQ ID NO: 483
  REGION 1..1345: note = Streptococcus mutans 4SM1

SEQ ID NO: 485 - protein, 1345 aa, Streptococcus mutans
  REGION 1..1345: note = Streptococcus mutans 4VF1
MKKPYSIGLDIGTNSVGWAVVTDDYKVPAKKMKVLGNTDKSHIKKNLLGALLFDSGNTAEDRRLKRTARRRYTRRRNRILYLQEIFSEEMGKVDDSFFHRLEDSFLVTEDKRGERHPIFGNLEEEVKYHENFPTIYHLRQYLADNPEKVDLRLVYLALAHIIKFRGHFLIEGKFDTRNNDVQRLFQEFLAVYDNTFENSSLQEQNVQVEEILTDKISKSAKKDRVLKLFPNEKSNGRFAEFLKLIVGNQADFKKHFELEEKAPLQFSKDTYEEELEVLLAQIGDNYAELFLSAKKLYDSILLSGILTVTDVSTKAPLSASMIQRYNEHQMDLAQLKQFIRQKLSDKYNEVFSDVSKDGYAGYIDGKTNQEAFYKYLKGLLNKIEGSGYFLDKIEREDFLRKQRTFDNGSIPHQIHLQEMRAIIRRQAEFYPFLADNQDRIEKILTFRIPYYVGPLARGKSDFAWLSRKSADKITPWNFDEIVDKESSAEAFINRMTNYDLYLPNQKVLPKHSLLYEKFTVYNELTKVKYKTEQGKTAFFDANMKQEIFDGVFKVYRKVTKDKLMDFLEKEFDEFRIVDLTGLDKENKVFNASYGTYHDLCKILDKDFLDNSKNEKILEDIVLTLTLFEDREMIRKRLENYSDLLTKEQVKKLERRHYTGWGRLSAELIHGIRNKESRKTILDYLIDDGNSNRNFMQLINDDALSFKEEIAKAQVIGETDNLNQVVSDIAGSPAIKKGILQSLKIVDELVKIMGHQPENIVVEMARENQFTKQGRRNSQQRLKGLTDSIKEFGSQILKEHPVENSQLQNDRLFLYYLQNGRDMYTGEELDIDYLSQYDIDHIIPQAFIKDNSIDNRVLTSSKENRGKSDDVPSKDVVRKMKSYWSKLLSAKLITQRKFDNLTKAERGGLTDDDKAGFIKRQLVETRQITKHVARILDERFYTETDENNKKIRQVKIVTLKSNLVSNFRKEFELYKVREINDYHHAHDAYLNAVIGKALLGVYPQLEPEFVYGDYPHFHGHKENKATAKKFFYSNIMNFFKKDDVRTDRNGEIIWKKDEHISNIKKVLSYPQVNIVKKVEEQTGGFSKESILPKGNSDKLIPRKTKKFYWDTKKYGGFDSPIVAYSILVIADIEKGKSKKLKTVKALVGVTIMEKMTFERDPVAFLERKGYRNVQEENIIKLPKYSLFKLENGRKRLLASARELQKGNEIVLPNHLGTLLYHAKNIHKVDEPKHLDYVDKHKDEFKELLDVVSNFSKKYTLAEGNLEKIKELYAQNNGEDLKELASSFINLLTFTAIGAPATFKFFDKNIDRKRYTSTTEILNATLIHQSITGLYETRIDLSKLGGD

SEQ ID NO: 486 - protein, 1345 aa, Streptococcus mutans; identical to SEQ ID NO: 485
  REGION 1..1345: note = Streptococcus mutans 4VF1

SEQ ID NO: 487 - protein, 1345 aa, Streptococcus mutans
  REGION 1..1345: note = Streptococcus mutans 5SM3
MKKPYSIGLDIGTNSVGWAVVTDDYKVPAKKMKVLGNTDKSHIEKNLLGALLFDSGNTAEDRRLKRTARRRYTRRRNRILYLQEIFSEEMGKVDDSFFHRLEDFFLVTEDKRGERHPIFGNLEEEVKYHENFPTIYHLRQYLADNPEKVDLRLVYLALAHIIKFRGHFLIEGKFDTRNNDVQRLFQEFLAVYDNTFENSSLQEQNVQVEEILTDKISKSAKKDRVLKLFPNEKSNGRFAEFLKLIVGNQADFKKHFELEEKAPLQFSKDTYEEELEVLLAQIGDNYAELFLSAKKLYDSILLSGILTADDSSTKAPLSASMIQRYNEHQMDLAQLKQFIRQKLSDKYNEVFSDVSKDGYAGYIDGKTNQEAFYKYLKGLLNKIEGSGYFLDKIEREDFLRKQRTFDNGSIPHQIHLQEMRAIIRRQSEFYPFLADNQDRIEKILTFRIPYYVGPLARGKSDFAWLSRKSADKITPWNFDEIVDKESSAEAFINRMTNYDLYLPNQKVLPKHSLLYEKFTVYNELTKVKYKTEQGETAFFDANMKQEIFDGVFKVYRKVTKDKLMDFLEKEFDEFRIVDLTGLDKENKAFNASYGTYHDLRKILDKDFLDNSKNEKILEDIVLTLTLFEDREMIRKRLKNYSDLLTKEQLKKLERRHYTGWGRLSAELIHGIRNKESRKTILDYLIDDGNSNRNFMQLINDDALSFKEEIAKAQVIGETDNLNQVVSDIAGSPAIKKGILQSLKIVDELVKIMGHQPENIVVEMARENQFTNQGRRNSQQRLKGLTDSIKEFGSQILKEHPVENSQLQNDRLFLYYLQNGRDMYTGEELDIDYLSQYDIDHIIPQAFIKDNSIDNRVLTSSKENRGKSDDVPSKDVVRKMKPYWSKLLSAKLITQRKFDNLTKAERGGLTDDDKAGFIKRQLVETRQITKHVARILDERFNTETDENNKKIRQVKIVTLKSNLVSNFRKEFELYKVREINDYHHAHDAYLNAVIGKALLGVYPQLEPEFVYGDYPHFHGHEENKATAKKFFYSNIMNFFKKDDVRTDKNGEIIWKKDEHISNIKKVLSYPQVNIVKKVEEQTGGFSKESILPKGNSDKLIPRKTKKFYWDTKKYGGFDSPIVAYSILVIADIEKGKSKKLKTVKALVGVTIMEKMTFERDPVAFLERKGYRNVQEENIIKLPKYSLFKLENGRKRLLASARELQKGNEIVLPNHLGTLLYHAKNIHKVDEPKHLDYVDKHKDEFKELLDVVSNFSKKYTLAEGNLEKIKELYAQNNGEDLKELASSFINLLTFTAIGAPATFKFFDKNIDRKRYTSTTEILNATLIHQSITGLYETRIDLSKLGGD

SEQ ID NO: 488 - protein, 1345 aa, Streptococcus mutans; identical to SEQ ID NO: 487
  REGION 1..1345: note = Streptococcus mutans 5SM3

SEQ ID NO: 489 - protein, 1359 aa, Streptococcus mutans
  REGION 1..1359: note = Streptococcus mutans 66-2A
MKKPYSIGLDIGTNSVGWAVVTDDYKVPAKKMKVLGNTDKSHIKKNLLGALLFDSGNTAEDRRLKRTARRRYTRRRNRILYLQEIFAEEMMQVDESFFQRLDDSFLVEEDKRGSRYPIFGTLKEEKKYHKEFKTIYHLREKLANSTEKADLRLVYLSLAHMIKFRGHFLIEGQLKAENTNVQALFKDFVEVYDKTVEESHLSEMTVDALSILTEKVSKSRRLENLVECYPTEKKNTLFGNLIALSLGLQPNFKTNFQLSEDAKLQFSKDTYEEDLEGLLGEIGDEYADLFASAKNLYDAILLSGILAVDDNTTKAPLSASMVKRYKEHKEELAAFKRFIKEKLPKKYEEIFKDDTKNGYAGYVGADKKLRKRSGKLATEEEFYKYVKGILNKVEGADVWLDKIDREDFLRKQRTFDNGSIPHQIHLQEMHAILRRQGEHYPFLKENQDKIEKILTFRIPYYVGPLVRKGSRFAWAEYKADEKITPWNFDDILDKEKSAEKFITRMTLNDLYLPEEKVLPKHSLLYETFTVYNELTKVKYVNEQGEAKFFDANMKQEIFDHVFKENRKVTKDKLLNYLNKEFEEFRIVNLTGLDKENKVFNSSLGTYHDLRKILNKSFLDNKENEQIIEDIIQTLTLFEDREMIRQRLQKYSDIFTKAQLKKLERRHYTGWGRLSYKLINGIRDKQSNKTILGYLIDDGYSNRNFMQLINDDALSFKEEIAKAQVIGEMDGLNQVVSDIAGSPAIKKGILQSLKIVDELVKVMGHNPANIVIEMARENQTTAKGRRSSQKRYKRLEEAIKNLDHDLNHKILKEHPTDNQALQNDRLFLYYLQNGRDMYTEDPLDINRLSDYDIDHIIPQAFIKDNSIDNRVLTRSDKNRGKSDDVPSEEVVHKMKPFWSKLLSAKLITQRKFDNLTKAERGGLTDDDKAGFIKRQLVETRQITKHVARILDERFNTETDENNKKIRQVKIVTLKSNLVSNFRKEFELYKVREINDYHHAHDAYLNAVIGKALLGVYPQLEPEFVYGDYPHFHGHKENKATAKKFFYSNIMNFFKKGDVRTDKNGEIIWKKDEHISNIKKVLSYPQVNIVKKVEEQTGGFSKESILPKGNSDKLIPRKTKKFYWDTKKYGGFDSPIVAYSILVIADIEKGKSKKLKTVKALVGVTIMEKMTFERDPVAFLERKGYRNVQEENIIKLPKYSLFKLENGRKRLLASARELQKGNEIVLPNHLETLLYHAKNIHKVDEPKHLDYVDKHKDEFKELLDVVSNFSKKYTLAEGNLEKIKELYAQNNGEDLKELASSFINLLTFTAIGAPAAFKFFDKNIDRKRYTSTTEILNATLIHQSITGLYETRIDLNKLGGD

SEQ ID NO: 490 - protein, 1359 aa, Streptococcus mutans; identical to SEQ ID NO: 489
  REGION 1..1359: note = Streptococcus mutans 66-2A

SEQ ID NO: 491 - protein, 1345 aa, Streptococcus mutans
  REGION 1..1345: note = Streptococcus mutans 8ID3
MKKPYSIGLDIGTNSVGWAVVTDDYKVPAKKMKVLGNTDKSHIEKNLLGALLFDSGNTAEDRRLKRTARRRYTRRRNRILYLQEIFSEEMGKVDDSFFHRLEDSFLVTEDKRGERHPIFGNLEEEVKYHENFPTIYHLRQYLADNPEKVDLRLVYLALAHIIKFRGHFLIEGKFDTRNNDVQRLFQEFLAVYDNTFENSSLQEQNVQVEEILTDKISKSAKKDRVLKLFPNEKSNGRFAEFLKLIVGNQADFKKHFELEEKAPLQFSKDTYEEELEVLLAQIGDNYAELFLSAKKLYDSILLSGILTVTDVGTKAPLSASMIQRYNEHQMDLAQLKQFIRQKLSDKYNEVFSDVSKDGYAGYIDGKTNQEAFYKYLKGLLNKIEGSGYFLDKIEREDFLRKQRTFDNGSIPHQIHLQEMRAIIRRQAEFYPFLADNQDRIEKLLTFRIPYYVGPLARGKSDFAWLSRKSADKITPWNFDEIVDKESSAEAFINRMTNYDLYLPNQKVLPKHSLLYEKFTVYNELIKVKYKTEQGKTAFFDANMKQEIFDGVFKVYRKVTKDKLMDFLEKEFDEFRIVDLTGLDKENKVFNASYGTYHDLCKILDKDFLDNSKNEKILEDIVLTLTLFEDREMIRKRLENYSDLLTKEQVKKLERRHYTGWGRLSAELIHGIRNKESRKTILDYLIDDGNSNRNFMQLINDDALSFKEEIAKAQVIGETDNLNQVVSDIAGSPAIKKGILQSLKIVDELVKIMGHQPENIVVEMARENQFTNQGRRNSQQRLKGLTDSIKEFGSQILKEHPVENSQLQNDRLFLYYLQNGRDMYTGEELDIDYLSQYDIDHIIPQAFIKDNSIDNRVLTSSKENRGKSDDVPSKDVVRKMKSYWSKLLSAKLITQRKFDNLTKAERGGLTDDDKAGFIKRQLVETRQITKHVARILDERFNTETDENNKKIRQVKIVTLKSNLVSNFRKEFELYKVREINDYHHAHDAYLNAVIGKALLGVYPQLEPEFVYGDYPHFHGHKENKATAKKFFYSNIMNFFKKDDVRTDKNGEIIWKKDEHISNIKKVLSYPQVNIVKKVEEQTGGFSKESILPKGNSDKLIPRKTKKFYWDTKKYGGFDSPIVAYSILVIADIEKGKSKKLKTVKALVGVTIMEKMTFERDPVAFLERKGYRNVQEENIIKLPKYSLFKLENGRKRLLASARELQKGNEIVLPNHLGTLLYHAKNIHKVDEPKHLDYVDKHKDEFKELLDVVSNFSKKYTLAEGNLEKIKELYAQNNGEDLKELASSFINLLTFTAIGAPATFKFFDKNIDRKRYTSTTEILNATLIHQSITGLYETRIDLNKLGGD

SEQ ID NO: 492 - protein, 1345 aa, Streptococcus mutans; identical to SEQ ID NO: 491
  REGION 1..1345: note = Streptococcus mutans 8ID3

SEQ ID NO: 493 - protein, 1345 aa, Streptococcus mutans
  REGION 1..1345: note = Streptococcus mutans A19
MKKPYSIGLDIGTNSVGWSVVTDDYKVPAKKMKVLGNTDKSHIEKNLLGALLFDSGNTAEDRRLKRTARRRYTRRRNRILYLQEIFSEEMGKVDDSFFHRLEDSFLVTEDKRGERHPIFGNLEEEVKYHENFPTIYHLRQYLADNPEKVDLRLVYLALAHIIKFRGHFLIEGKFDTRNNDVQRLFQEFLAVYDNTFENSSLQEQNVQVEEILTDKISKSAKKDRVLKLFPNEKSNGRFAEFLKLIVGNQADFKKHFELEEKAPLQFSKDTYEEELEVLLAQIGDNYAELFLSAKKLYDSILLSGILTVTDVGTKAPLSASMIQRYNEHQMDLAQLKQFIRQKLSDKYNEVFSDVSKDGYAGYIDGKTNQEAFYKYLKGLLNKIEGSGYFLDKIEREDFLRKQRTFDNGSIPHQIHLQEMRAIIRRQAEFYPFLADNQDRIEKLLTFRIPYYVGPLARGKSDFAWLSRKSADKITPWNFDEIVDKESSAEAFINRMTNYDLYLPNQKVLPKHSLLYEKFTVYNELTKVKYKTEQGKTAFFDANMKQEIFDGVFKVYRKVTKDKLMDFLEKEFDEFRIVDLTGLDKENKVFNASYGTYHDLCKILDKDFLDNSKNEKILEDIVLTLTLFEDREMIRKRLENYSDLLTKEQVKKLERRHYTGWGRLSAELIHGIRNKESRKTILDYLIDDGNSNRNFMQLINDDALSFKEEIAKAQVIGETDNLNQVVSDIAGSPAIKKGILQSLKIVDELVKIMGHQPENIVVEMARENQFTNQGRRNSQQRLKGLTDSIKEFGSQILKEHPVENSQLQNDRLFLYYLQNGRDMYTGEELDIDYLSQYDIDHIIPQAFIKDNSIDNRVLTSSKENRGKSDDVPSKDVVRKMKSYWSKLLSAKLITQRKFDNLTKAERGGLTDDDKAGFIKRQLVETRQITKHVARILDERFNTETDENNKKIRQVKIVTLKSNLVSNFRKEFELYKVREINDYHHAHDAYLNAVIGKALLGVYPQLEPEFVYGDYPHFHGHKENKATAKKFFYSNIMNFFKKDDVRIDKNGEIIWKKDEHISNIKKVLSYPQVNIVKKVEEQTGGFSKESILPKGNSDKLIPRKTKKFYWDTKKYGGFDSPIVAYSILVIADIEKGKSKKLKTVKALVGVTIMEKMTFERDPVAFLERKGYRNVQEENIIKLPKYSLFKLENGRKRLLASARELQKGNEIVLPNHLGTLLYHAKNIHKVDEPKHLDYVDKHKDEFKELLDVVSNFSKKYTLAEGNLEKIKELYAQNNGEDLKELASSFINLLTFTAIGAPATFKFFDKNIDRKRYTSTTEILNATLIHQSITGLYETRIDLSKLGGD

SEQ ID NO: 494 - protein, 1345 aa, Streptococcus mutans; identical to SEQ ID NO: 493
  REGION 1..1345: note = Streptococcus mutans A19

SEQ ID NO: 495 - protein, 1345 aa, Streptococcus mutans; identical to SEQ ID NO: 472
  REGION 1..1345: note = Streptococcus mutans B

SEQ ID NO: 496 - protein, 1345 aa, Streptococcus mutans; identical to SEQ ID NO: 472
  REGION 1..1345: note = Streptococcus mutans G123

SEQ ID NO: 497 - protein, 1345 aa, Streptococcus mutans
MKKPYSIGLDIGTNSVGWAVVTDDYKVPAKKMKVLGNTDKSHIKKNLLGALLFDSGNTAEDRRLKRTARRRYTRRRNRILYLQEIFSEEMGKVDDSFFHRLDESFLTDDDKNFDSHPIFGNKAEEDAYHQKFPTIYHLRKHLADSTEKADLRLVYLALAHMIKFRGHFLIEGELNAENTDVQKLFADFVGVYDRTFDDSHLSEITVDASSILTEKISKSRRLEKLINNYPKEKKNTLFGNLIALSLGLQPNFKTNFKLSEDAKLQFSKDTYEEELEVLLAQIGDNYAELFLSAKKLYDSILLSGILTVTDVSTKAPLSASMIQRYNEHQMDLAQLKQFIRQKLSDKYNEVFSDVSKDGYAGYIDGKTNQEAFYKYLKGLLNKIEGSGYFLDKIEREDFLRKQRTFDNGSIPHQIHLQEMRAIIRRQAEFYPFLADNQDRIEKILTFRIPYYVGPLARGKSDFAWLSRKSADKITPWNFDEIVDKESSVEAFINRMTNYDLYLPNQKVLPKHSLLYEKFTVYNELTKVKYKTEQGKTAFFDANMKQEIFDGVFKVYRKVTKDKLMDFLEKEFDEFRIVDLTGLDKENKAFNASYGTYHDLRKILDKDFLDNSKNEKILEDIVLTLTLFEDREMIRKRLKNYSDLLTKEQLKKLERRHYTGWGRLSAELIHGIRNKESRKTILDYLIDDGNSNRNFMQLINDDALSFKEEIAKAQVIGETDNLNQVVSDIAGSPAIKKGILQSLKIVDELVKIMGHQPENIVVEMARENQFTNQGRRNSQQRLKGLTDSIKEFGSQILKEHPVENSQLQNDRLFLYYLQNGRDMYTGEELDIDYLSQYDIDHIIPQAFIKDNSIDNRVLTSSKENRGKSDDVPSKDVVRKMKSYWSKLLSAKLITQRKFDNLTKGERGGLTDDDKAGFIKRQLVETRQITKHVARILDERFNTETDENNKKIRQVKIVTLKSNLVSNFRKEFELYKVREINDYHHAHDAYLNAVIGKALLGVYPQLEPEFVYGDYPHFHGHKENKATAKKFFYSNIMNFFKKDDVRTDKNGEIIWKKDEYISNIKKVLSYPQVNIVKKVEEQTGGFSKESILPKGDSDKLIPRKTKKFYWDTKKYGGFDSPIVAYSILVIADIEKGKSKKLKTVKALVGVTIMEKMTFERDPVAFLERKGYRNVQEENIIKLPKYSLFKLENGRKRLLASARELQKGNEIVLPNHLGTLLYHAKNIHKVDEPKHLDYVDKHKDEFKELLDVVSNFSKKYTLAEGNLEKIKELYAQNNGEDLKELASSFINLLTFTAIGAPATFKFFDKNIDRKRYTSTTEILNATLIHQSITGLYETRIDLSKLGGD

SEQ ID NO: 498 - protein, 1345 aa, Streptococcus mutans
MKKPYSIGLDIGTNSVGWAVVTDDYKVPDKKMKVLGNTDKSHIKKNLLGALLFDSGNTAEDRRLKRTARRRYTRRRNRILYLQEIFSEEMGKVDDSFFHRLEDSFLVTEDKRGERHPIFGNLEEEVKYHENFPTIYHLRQYLADNPEKTDLRLVYLALAHIIKFRGHFLIEGKFDTRNNDVQRLFQEFLAVYDNTFENSSLQEQNVQVEEILTDKISKSAKKDRVLKLFPNEKSNGRFAEFLKLIVGNQADFKKHFELEEKAPLQFSKDIYEEELEVLLAQIGDNYAELFLSAKKLYDSILLSGILTVTDVSTKAPLSASMIQRYNEHQMDLAQLKQFIRQKLSDKYNEVFSDVSKDGYAGYIDGKTNQEAFYKYLKGLLNKIEGSGYFLDKIEREDFLRKQRTFDNGSIPHQIHLQEMRAIIRRQAEFYPFLADNQDRIEKILTFRIPYYVGPLARGKSDFAWLSRKSADKITPWNFDEIVDKESSVEAFINRMTNYDLYLPNQKVLPKHSLLYEKFTVYNELTKVKYKTEQGKTAFFDANMKQEIFDGVFKVYRKVTKDKLMDFLEKEFDEFRIVDLTGLDKENKAFNASYGTYHDLRKILDKDFLDNSKNEKILEDIVLTLTLFEDREMIRKRLKNYSDLLTKEQLKKLERRHYTGWGRLSAELIHGIRNKESRKTILDYLIDDGNSNRNFMQLINDDALSFKEEIAKAQVIGETDNLNQVVSDIAGSPAIKKGILQSLKIVDELVKIMGHQPENIVVEMARENQFTNQGRRNSQQRLKGLTDSIKEFGSQILKEHPVENSQLQNDRLFLYYLQNGRDMYTGEELDIDYLSQYDIDHIIPQAFIKDNSIDNRVLTSSKENRGKSDDVPSKDVVRKMKSYWSKLLSAKLITQRKFDNLTKAERGGLTDDDKAGFIKRQLVETRQITKHVARILDERFYTETDENNKKIRQVKIVTLKSNLVSNFRKEFELYKVREINDYHHAHDAYLNAVIGKALLGVYPQLEPEFVYGDYPHFHGHKENKATAKKFFYSNIMNFFKKDDVRTDKNGEIIWKKDEHISNIKKVLSYPQVNIVKKVEEQTGGFSKESILPKGNSDKLIPRKTKKFYWDTKKYGGFDSPIVAYSILVIADIEKGKSKKLKTVKALVGVTIMEKMTFERDPVAFLERKGYRNVQEENIIKLPKYSLFKLENGRKRLLASARELQKGNEIVLPNHLGTLLYHAKNIHKVDEPKHLDYVDKHKDEFKELLDVVSNFSKKYTLAEGNLEKIKELYAQNNGEDLKELASSFINLLTFTAIGAPATFKFFDKNIDRKRYTSTTEILNATLIHQSITGLYETRIDLSKLGGD

SEQ ID NO: 499 - protein, 1345 aa, Streptococcus mutans
  REGION 1..1345: note = Streptococcus mutans M21
MKKPYSIGLDIGTNSVGWAVVTDDYKVPAKKMKVLGNTDKSHIKKNLLGALLFDSGNTAEDRRLKRTARRRYTRRRNRILYLQEIFSEEMGKVDDSFFHRLEDSFLVTEDKRGERHPIFGNLEEEVKYHENFPTIYHLRQYLADNPEKTDLRLVYLALAHIIKFRGHFLIEGKFDTRNNDVQRLFQEFLAVYDNTFENSSLQEQNVQVEEILTDKISKSAKKDRVLKLFPNEKSNGRFAEFLKLIVGNQADFKKHFELEEKAPLQFSKDIYEEELEVLLAQIGDNYAELFLSAKKLYDSILLSGILTVTDVSTKAPLSASMIQRYNEHQMDLAQLKQFIRQKLSDKYNEVFSDVSKDGYAGYIDGKTNQEAFYKYLKGLLNKIEGSGYFLDKIEREDFLRKQRTFDNGSIPHQIHLQEMRAIIRRQAEFYPFLADNQDRIEKILTFRIPYYVGPLARGKSDFAWLSRKSADKITPWNFDEIVDKESSVEAFINRMTNYDLYLPNQKVLPKHSLLYEKFTVYNELTKVKYKTEQGKTAFFDANMKQEIFDGVFKVYRKVTKDKLMDFLEKEFDEFRIVDLTGLDKENKAFNASYGTYHDLRKILDKDFLDNSKNEKILEDIVLTLTLFEDREMIRKRLKNYSDLLTKEQLKKLERRHYTGWGRLSAELIHGIRNKESRKTILDYLIDDGNSNRNFMQLINDDALSFKEEIAKAQVIGETDNLNQVVSDIAGSPAIKKGILQSLKIVDELVKIMGHQPENIVVEMARENQFTNQGRRNSQQRLKGLTDSIKEFGSQILKEHPVENSQLQNDRLFLYYLQNGRDMYTGEELDIDYLSQYDIDHIIPQAFIKDNSIDNRVLTSSKENRGKSDDVPSKNVVRKMKSYWSKLLSAKLITQRKFDNLTKAERGGLTDDDKAGFIKRQLVETRQITKHVARILDERFHTETDENNKKIRQVKIVTLKSNLVSNFRKEFELYKVREINDYHHAHDAYLNAVIGKALLGVYPQLEPEFVYGDYPHFHGHKENKATAKKFFYSNIMNFFKKDDVRTDKNGEIIWKKDEHISNIKKVLSYPQVNIVKKVEEQTGGFSKESILPKGNSDKLIPRKTKKFYWDTKKYGGFDSPIVAYSILVIADIEKGKSKKLKTVKALVGVTIMEKMTFERDPVAFLERKGYRNVQEENIIKLPKYSLFKLENGRKRLLASARELQKGNEIVLPNHLGTLLYHAKNIHKVDEPKHLDYVDKHKDEFKELLDVVSNFSKKYTLAEGNLEKIKELYAQNNGEDLKELASSFINLLTFTAIGAPATFKFFDKNIDRKRYTSTTEILNATLIHQSITGLYETRIDLSKLGGD

SEQ ID NO: 500 - protein, 1345 aa, Streptococcus mutans; identical to SEQ ID NO: 499
  REGION 1..1345: note = Streptococcus mutans M21

SEQ ID NO: 501 - protein, 1345 aa, Streptococcus mutans
  REGION 1..1345: note = Streptococcus mutans M230
MKKPYSIGLDIGTNSVGWAVVTDDYKVPAKKMKVLGNTDKSHIKKNLLGALLFDSGNTAEDRRLKRTARRRYTRRRNRILYLQEIFSEEMGKVDDSFFHRLEDSFLVTEDKRGERHPIFGNLEEEVKYHENFPTIYHLRQYLADNPEKVDLRLVYLALAHIIKFRGHFLIEGKFDTRNNDVQRLFQEFLAVYDNTFENSSLQEQNVQVEEILTDKISKSAKKDRVLKLFPNEKSNGRFAEFLKLIVGNQADFKKHFELEEKAPLQFSKDTYEEELEVLLAQIGDNYAELFLSAKKLYDSILLSGILTVTDVSTKAPLSASMIQRYNEHQMDLAQLKQFIRQKLSDKYNEVFSDVSKDGYAGYIDGKTNQEAFYKYLKGLLNKIEGSGYFLDKIEREDFLRKQRTFDNGSIPHQIHLQEMRAIIRRQAEFYPFLADNQDRIEKILTFRIPYYVGPLARGKSDFAWLSRKSADKITPWNFDEIVDKESSAEAFINRMTNYDLYLPNQKVLPKHSLLYEKFTVYNELTKVKYKTEQGKTAFFDANMKQEIFDGVFKVYRKVTKDKLMDFLEKEFDEFRIVDLTGLDKENKVFNASYGTYHDLCKILDKDFLDNSKNEKILEDIVLTLTLFEDREMIRKRLENYSDLLTKEQVKKLERRHYTGWGRLSAELIHGIRNKESRKTILDYLIDDGNSNRNFMQLINDDALSFKEEIAKAQVIGETDNLNQVVSDIAGSPAIKKGILQSLKIVDELVKIMGHQPENIVVEMARENQFTNQGRQNSQQRLKGLTDSIKEFGSQILKEHPVENSQLQNDRLFLYYLQNGRDMYTGEELDIDYLSQYDIDHIIPQAFIKDNSIDNRVLTSSKENRGKSDDVPSEDVVRKMKSYWSKLLSAKLITQRKFDNLTKAERGGLTDDDKAGFIKRQLVETRQITKHVARILDERFYTETDENNKKIRQVKIVTLKSNLVSNFRKEFELYKVREINDYHHAHDAYLNAVIGKALLGVYPQLEPEFVYGDYPHFHGHKENKATAKKFFYSNIMNFFKKDDVRTDKNGEIIWKKDEHISNIKKVLSYPQVNIVKKVEEQTGGFSKESILPKGNSDKLIPRKTKKFYWDTKKYGGFDSPIVAYSILVIADIEKGKSKKLKTVKALVGVTIMEKMTFERDPVAFLERKGYRNVQEENIIKLPKYSLFKLENGRKRLLASARELQKGNEIVLPNHLGTLLYHAKNIHKVDEPKHLDYVDKHKDEFKELLDVVSNFSKKYTLAEGNLEKIKELYAQNNGEDLKELASSFINLLTFTAIGAPATFKFFDKNIDRKRYTSTTEILNATLIHQSITGLYETRIDLSKLGGD

SEQ ID NO: 502 - protein, 1345 aa, Streptococcus mutans; identical to SEQ ID NO: 501
  REGION 1..1345: note = Streptococcus mutans M230

SEQ ID NO: 503 - protein, 1345 aa, Streptococcus mutans
  REGION 1..1345: note = Streptococcus mutans M2A
MKKPYSIGLDIGTNSVGWAVVTDDYKVPAKKMKVLGNTDKSHIKKNLLGALLFDSGNTAEDRRLKRTARRRYTRRRNRILYLQEIFSEEMGKVDDSFFHRLEDSFLVTEDKRGERHPIFGNLEEEVKYHENFPTIYHLRQYLADNPEKTDLRLVYLALAHIIKFRGHFLIEGKFDTRNNDVQRLFQEFLAVYDNTFENSSLQEQNVQVEEILTDKISKSAKKDRVLKLFPNEKSNGRFAEFLKLIVGNQADFKKHFELEEKAPLQFSKDIYEEELEVLLAQIGDNYAELFLSAKKLYDSILLSGILTVTDVSTKAPLSASMIQRYNEHQMDLAQLKQFIRQKLSDKYNEVFSDVSKDGYAGYIDGKTNQEAFYKYLKGLLNKIEGSGYFLDKIEREDFLRKQRTFDNGSIPHQIHLQEMRAIIRRQAEFYPFLADNQDRIEKILTFRIPYYVGPLARGKSDFAWLSRKSADKITPWNFDEIVDKESSVEAFINRMTNYDLYLPNQKVLPKHSLLYEKFTVYNELTKVKYKTEQGKTAFFDANMKQEIFDGVFKVYRKVTKDKLMDFLEKEFDEFRIVDLTGLDKENKAFNASYGTYHDLRKILDKDFLDNSKNEKILEDIVLTLTLFEDREMIRKRLKNYSDLLTKEQLKKLERRHYTGWGRLSAELIHGIRNKESRKTILDYLIDDGNSNRNFMQLINDDALSFKEEIAKAQVIGETDNLNQVVSDIAGSPAIKKGILQSLKIVDELVKIMGHQPENIVVEMARENQFTNQGRRNSQQRLKGLTDSIKEFGSQILKEHPVENSQLQNDRLFLYYLQNGRDMYTGEELDIDYLSQYDIDHIIPQAFIKDNSIDNRVLTSSKENRGKSDDVPSKDVVRKMKSYWSKLLSAKLITQRKFDNLTKAERGGLTDDDKAGFIKRQLVETRQITKHVARILDERFNTETDENNKKIRQVKIVTLKSNLVSNFRKEFELYKVREINDYHHAHDAYLNAVIGKALLGVYPQLEPEFVYGDYPHFHGHKENKATAKKFFYSNIMNFFKKDDVRTDKNGEIIWKKDEHISNIKKVLSYPQVNIVKKVEEQTGGFSKESILPKGNSYKLIPRKTKKFYWDTKKYGGFDSPIVAYSILVIADIEKGKSKKLKTVKALVGVTIMEKMTFERDPVAFLERKGYRNVQEENIIKLPKYSLFKLENGRKRLLASARELQKGNEIVLPNHLGTLLYHAKNIHKVDEPKHLDYVDKHKDEFKELLDVVSNFSKKYTLAEGNLEKIKELYAQNNGEDLKELASSFINLLTFTAIGAPAAFKFFDKNIDRKRYTSTTEILNATLIHQSITGLYETRIDLSKLGGD

SEQ ID NO: 504 - protein, 1345 aa, Streptococcus mutans; identical to SEQ ID NO: 503
  REGION 1..1345: note = Streptococcus mutans M2A

SEQ ID NO: 505 - protein, 1345 aa, Streptococcus mutans
  REGION 1..1345: note = Streptococcus mutans N29
MKKPYSIGLDIGTNSVGWAVVTDDYKVPAKKMKVLGNTDKSHIKKNLLGALLFDSGNTAADRRLKRTARRRYTRRRNRILYLQEIFAEEMSKVDDSFFHRLEDSFLVTEDKRGERHPIFGNLEEEVKYHENFPTIYHLRQYLADNPEKVDLRLVYLALAHIIKFRGHFLIEGKFDTRNNDVQRLFQEFLAVYDNTFENSSLQEQNVQVEEILTDKISKSAKKDRVLKLFPNEKSNGRFAEFLKLIVGNQADFKKHFELEEKAPLQFSKDTYEEELEVLLAQIGDNYAELFLSAKKLYDSILLSGILTVTDVSTKAPLSASMIQRYNEHQMDLAQLKQFIRQKLSDKYNEVFSDVSKDGYAGYIDGKTNQEAFYKYLKGLLNKIEGSGYFLDKIEREDFLRKQRTFDNGSIPHQIHLQEMRAIIRRQAEFYPFLADNQDRIEKILTFRIPYYVGPLARGKSDFAWLSRKSADKITPWNFDEIVDKESSAEAFINRMTNYDLYLPNQKVLPKHSLLYEKFTVYNELTKVKYKTEQGKTAFFDANMKQEIFDGVFKVYRKVTKDKLMDFLEKEFDEFRIVDLTGLDKENKAFNASYGTYHDLRKILDKDFLDNSKNEKILEDIVLTLTLFEDREMIRKRLENYSDLLTKEQVKKLERRHYTGWGRLSAELIHGIRNKESRKTILDYLIDDGNSNRNFMQLINDDALSFKEEIAKAQVIGETDNLNQVVSDIAGSPAIKKGILQSLKIVDELVKIMGHQPENIVVEMARENQFTNQGRRNSQQRLKGLTDSIKEFGSQILKEHPVENSQLQNDRLFLYYLQNGRDMYTGEELDIDYLSQYDIDHIIPQAFIKDNSIDNRVLTSSKENRGKSDDVPSKNVVRKMKSYWSKLLSAKLITQRKFDNLTKAERGGLTDDDKAGFIKRQLVETRQITKHVARILDERFHTETDENNKKIRQVKIVTLKSNLVSNFRKEFELYKVREINDYHHAHDAYLNAVIGKALLGVYPQLEPEFVYGDYPHFHGHKENKATAKKFFYSNIMNFFKKDDVRTDKNGEIIWKKDEHISNIKKVLSYPQVNIVKKVEEQTGGFSKESILPKGNSDKLIPRKTKKFYWDTKKYGGFDSPIVAYSILVIADIEKGKSKKLKTVKALVGVTIMEKMTFERDPVAFLERKGYRNVQEENIIKLPKYSLFKLENGRKRLLASARELQKGNEIVLPNHLGTLLYHAKNIHKVDEPKHLDYVDKHKDEFKELLDVVSNFSKKYTLAEGNLEKIKELYAQNNGEDLKELSSSFINLLTFTAIGAPAAFKFFDKNIDRKRYTSTTEILNATLIHQSITGLYETRIDLSKLGGD

SEQ ID NO: 506 - protein, 1345 aa, Streptococcus mutans; identical to SEQ ID NO: 505
  REGION 1..1345: note = Streptococcus mutans N29

SEQ ID NO: 507 - protein, 1345 aa, Streptococcus mutans
  REGION 1..1345: note = Streptococcus mutans N3209
MKKPYSIGLDIGTNSVGWAVVTDDYKVPAKKMKVLGNTDKSHIKKNLLGALLFDSGNTAEDRRLKRTTRRRYTRRRNRILYLQEIFSEEMGKVDDSFFHRLEDSFLVTEDKRGERHPIFGNLEEEVKYHENFPTIYHLRQYLADNPEKTDLRLVYLALAHIIKFRGHFLIEGKFDTRNNDVQRLFQEFLAVYDNTFENSSLQEQNVQVEEILTDKISKSAKKDRVLKLFPNEKSNGCFAEFLKLIVGNQADFKKHFELEEKAPLQFSKDTYEEELEVLLAQIGDNYAELFLSAKKLYDSILLSGILTVTDVSTKAPLSASMIQRYNEHQMDLTQLKQFIRQKLSDKYNEVFSDVSKDGYAGYIDGKTNQEAFYKYLKGLLNKIEGSGYFLDKIEREDFLRKQRTFDNGSIPHQIHLQEMRAIIRRQAEFYPFLADNQDRIEKLLTFRIPYYVGPLASGKSDFAWLSRKSADKITPWNFDEIVDKESSAEAFINRMTNYDLYLPNQKVLPKHSLLYEKFTVYNELTKVKYKTEQGKTAFFDANMKQEIFDGVFKVYRKVTKDKLMDFLEKEFDEFRIVDLTGLDKENKVFNASYGTYHDLCKILDKDFLDNSKNEKILEDIVLTLTLFEDREMIRKRLENYSDLLTKEQVKKLERRHYTGWGRLSAELIHGIRNKESRKTILDYLIDDGNSNRNFMQLINDDALSFKEEIAKAQVIGETDNLNQVVSDIAGSPAIKKGILQSLKIVDELVKIMGHQPENIVVEMARENQFTNQGRRNSQQRLKGLTDSIKEFGSQILKEHPVENSQLQNDRLFLYYLQNGRDMYTGEELDIDYLSQYDIDHIIPQAFIKDNSIDNRVLTSSKENRGKSDDVPSKDVVRKMKSYWSKLLSAKLITQRKFDNLTKAERGGLTDDDKAGFIKRQLVETRQITKHVARILDERFNTETDENNKKIRQVKIVTLKSNLVSNFRKEFELYKVREINDYHHAHDAYLNAVIGKALLGVYPQLEPEFVYGDYPHFHGHKENKATAKKFFYSNIMNFFKKDDVRTDKNGEIIWKKDEHISNIKKVLSYPQVNIVKKVEEQTGGFSKESILPKGNSDKLIPRKTKKFYWDTKKYGGFDSPIVAYSILVIADIEKGKSKKLKTVKALVGVTIMEKMTFERDPVAFLERKGYRNVQEENIIKLPKYSLFKLENGRKRLLASARELQKGNEIVLPNHLGTLLYHAKNIHKVDEPKHLDYVDKHKDEFKELLDVVSNFSKKYTLAEGNLEKIKELYAQNNGEDLKELASSFINLLTFTAIGAPATFKFFDKNIDRKRYTSTTEILNATLIHQSITGLYETRIDLSKLGGD

SEQ ID NO: 508 - protein, 1345 aa, Streptococcus mutans; identical to SEQ ID NO: 507
  REGION 1..1345: note = Streptococcus mutans N3209

SEQ ID NO: 509 - protein, 1345 aa, Streptococcus mutans
  REGION 1..1345: note = Streptococcus mutans N66
MKKPYSIGLDIGTNSVGWAVVTDDYKVPAKKMKVLGNTDKSHIKKNLLGALLFDSGNTAEDRRLKRTARRRYTRRRNRILYLQEIFSEEMGKVDDSFFHRLEDSFLVTEDKRGERHPIFGNLEEEVKYHENFPTIYHLRQYLADNPEKTDLRLVYLALAHIIKFRGHFLIEGKFDTRNNDVQRLFQEFLAVYDNTFENSSLQEQNVQVEEILTDKISKSAKKDRVLKLFPNEKSNGRFAEFLKLIVGNQADFKKHFELEEKAPLQFSKDIYEEELEVLLAQIGDNYAELFLSAKKLYDSILLSGILTVTDVSTKAPLSASMIQRYNEHQMDLAQLKQFIRQKLSDKYNEVFSDVSKDGYAGYIDGKTNQEAFYKYLKGLLNKIEGSGYFLDKIEREDFLRKQRTFDNGSIPHQIHLQEMRAIIRRQAEFYPFLADNQDRIEKILTFRIPYYVGPLARGKSDFAWLSRKSADKITPWNFDEIVDKESSAEAFINRMTNYDLYLPNQKVLPKHSLLYEKFTVYNELTKVKYKTEQGKTAFFDANMKQEIFDGVFKVYRKVTKDKLMDFLEKEFDEFRIVDLTGLDKENKAFNASYGTYHDLRKILDKDFLDNSKNEKILEDIVLTLTLFEDREMIRKRLKNYSDLLTKEQLKKLERRHYTGWGRLSAELIHGIRNKESRKTILDYLIDDGNSNRNFMQLINDDALSFKEEIAKAQVIGETDNLNQVVSDIAGSLAIKKGILQSLKIVDELVKIMGHQPENIVVEMARENQFTNQGRRNSQQRLKGLTDSIKEFGSQILKEHPVENSQLQNDRLFLYYLQNGRDMYTGEELDIDYLSQYDIDHIIPQAFIKDNSIDNRVLTSSKENRGKSDDVPSKDVVRKMKSYWSKLLSAKLITQRKFDNLTKGERGGLTDDDKAGFIKRQLVETRQITKHVARILDERFNTETDENNKKIRQVKIVTLKSNLVSNFRKEFELYKVREINDYHHAHDAYLNAVIGKALLGVYPQLEPEFVYGDYPHFHGHKENKATAKKFFYSNIMNFFKKDDVRTDKNGEIIWKKDEYISNIKKVLSYPQVNIVKKVEEQTGGFFKESILPKGDSDKLIPRKTKKFYWDTKKYGGFDSPIVAYSILVIADIEKGKSKKLKTVKALVGVTIMEKMTFERDPVAFLERKGYRNVQEENIIKLPKYSLFKLENGRKRLLASARELQKGNEIVLPNHLGTLLYHAKNIHKVDEPKHLDYVDKHKDEFKELLDVVSNFSKKYTLAEGNLEKIKELYAQNNGEDLKELASSFINLLTFTAIGAPATFKFFDKNIDRKRYTSTTEILNATLIHQSITGLYETRIDLSKLGGD

SEQ ID NO: 510 - protein, 1345 aa, Streptococcus mutans; identical to SEQ ID NO: 509
  REGION 1..1345: note = Streptococcus mutans N66

SEQ ID NO: 511 - protein, 1350 aa, Streptococcus mutans
  REGION 1..1350: note = Streptococcus mutans NFSM1
MKKPYSIGLDIGTNSVGWAVVTDDYKVPAKKMTVLGNTDKSHIKKNLLGALLFDSGNTAADRRLKRTARRRYTRRRNRILYLQEIFAEEMSKVDDSFFHRLEDSFLVTEDKRGERHPIFGNLEEEVKYHENFPTIYHLRQYLADNPEKVDLRLVYLALAHIIKFRGHFLIEGKFDTRNNDVQRLFQEFLAVYDNTFENSSLQEQNVQVEEILTDKISKSAKKDRVLKLFPNEKSNGRFAEFLKLIVGNQADFKKHFELEEKTPLQFSKDTYEEELEVLLAQIGDNYAELFLSAKKLYDSILLSGILTVTDVSTKAPLSASMIQRYNEHQMDLAQLKQFIRQKLSDKYNEVFSDVSKDGYAGYIDGKTNQEAFYKYLKGLLNKIEGSGYFLDKIEREDFLRKQRTFDNGSIPHQIHLQEMRAIIRRQAEFYPFLADNQDRIEKILTFRIPYYVGPLARGKSDFAWLSRKSADKITPWNFDEIVDKESSAEAFINRMTNYDLYLPNQKVLPKHSLLYEKFTVYNELTKVKYKTEQGKTAFFDANMKQEIFDGVFKVYRKVTKDKLMDFLEKEFDEFRIVDLTGLDKENKAFNASYGTYHDLRKILDKDFLDNSKNEKILEDIVLTLTLFEDREMIRKRLENYSDLLTKEQVKKLERRHYTGWGRLSAELIHGIRNKESRKTILDYLIDDGNSNRNFMQLINDDALSFKEEIAKAQVIGETDNLNQVVSDIAGSPAIKKGILQSLKIVDELVKIMGHQPENIVVEMARENQFTNQGRRNSQQRLKGLTDSIKEFGSQILKEHPVENSQLQNDRLFLYYLQNGRDMYTGEELDIDYLSQYDIDHIIPQAFIKDNSIDNRVLTSSKENRGKSDDVPSEDVVNRMRPFWNKLLSSGLISQRKYNNLTKKELTPDDKAGFIKRQLVETRQITKHVARMLDERFNKEFDDNNKRIRRVKIVTLKSNLVSSFRKEFELYKVREINDYHHAHDAYLNAVVVKALLVKYPKLEPEFVYGEYPKYNSYRERKTATQKMFFYSNIMNMFKSKVKLADDQIVERPMIEVNDETGEIAWDKTKHITTVKKVLSYPQVNIVKKVEEQTIGQNGGLFDDNPKSPLEVIPSKLVPLKKALNPEKYGGYQKPTTAYPILLIVDTKQLIPISVMDKKRFEQNPVKFLKDKGYQQIEKNNFVKLPKYTLVDIGNGIKRLWASSKEVHKGNQLVVSKKSQDLLYHAHHLDNDYSNEYVKNHYQQFDILFNEITSFSKKCKLGKEHIQKIEEAYSKERDSASIEELADGFIKLLGFTQLGATSPFSFLGIKLNQKQYTGKKDYLLPCMEATLIHQSITGLYETRIDLSKLGGD

SEQ ID NO: 512 - protein, 1350 aa, Streptococcus mutans; identical to SEQ ID NO: 511
  REGION 1..1350: note = Streptococcus mutans NFSM1

SEQ ID NO: 513 - protein, 1345 aa, Streptococcus mutans; identical to SEQ ID NO: 485
  REGION 1..1345: note = Streptococcus mutans NLML1

SEQ ID NO: 514 - protein, 1338 aa, Streptococcus mutans
  REGION 1..1338: note = Streptococcus mutans NLML4
MDLIGTNSVGWAVVTDDYKVPAKKMKVLGNTDKSHIKKNLLGALLFDSGNTAADRRLKRTARRRYTRRRNRILYLQEIFAEEMSKVDDSFFHRLEDSFLVTEDKRGERHPIFGNLEEEVKYHENFPTIYHLRQYLADNPEKVDLRLVYLALAHIIKFRGHFLIEGKFDTRNNDVQRLFQEFLAVYDNTFENSSLQEQNVQVEEILTDKISKSAKKDRVLKLFPNEKSNGRFAEFLKLIVGNQADFKKHFELEEKAPLQFSKDTYEEELEVLLAQIGDNYAELFLSAKKLYDSILLSGILTVTDVSTKAPLSASMIQRYNEHQMDLAQLKQFIRQKLSDKYNEVFSDVSKDGYAGYIDGKTNQEAFYKYLKGLLNKIEGSGYFLDKIEREDFLRKQRTFDNGSIPHQIHLQEMRAIIRRQAEFYPFLADNQDRIEKILTFRIPYYVGPLARGKSDFAWLSRKSADKITPWNFDEIVDKESSAEAFINRMTNYDLYLPNQKVLPKHSLLYEKFTVYNELTKVKYKTEQGKTAFFDANMKQEIFDGVFKVYRKVTKDKLMDFLEKEFDEFRIVDLTGLDKENKAFNASYGTYHDLRKILDKDFLDNSKNEKILEDIVLTLTLFEDREMIRKRLENYSDLLTKEQVKKLERRHYTGWGRLSAELIHGIRNKESRKTILDYLIDDGNSNRNFMQLINDDALSFKEEIAKAQVIGETDNLNQVVSDIAGSPAIKKGILQSLKIVDELVKIMGHQPENIVVEMARENQFTNQGRRNSQQRLKGLTDSIKEFGSQILKEHPVEHSQLQNDRLFLYYLQNGRDMYTGEELDIDYLSQYDIDHIIPQAFIKDNSIDNRVLTSSKENRGKSDDVPSKNVVRKMKSYWSKLLSAKLITQRKFDNLTKAERGGLTDDDKAGFIKRQLVETRQITKHVARILDERFHTETDENNKKIRQVKIVTLKSNLVSNFRKEFELYKVREINDYHHAHDAYLNAVIGKALLGVYPQLEPEFVYGDYPHFHGHKENKATAKKFFYSNIMNFFKKDDVRTDKNGEIIWKKDEHISNIKKVLSYPQVNIVKKVEEQTGGFSKESILPKGNSDKLIPRKTKKFYWDTKKYGGFDSPIVAYSILVIADIEKGKSKKLKTVKALVGVTIMEKMTFERDPVAFLERKGYRNVQEENIIKLPKYSLFKLENGRKRLLASARELQKGNEIVLPNHLGTLLYHAKNIHKVDEPKHLDYVDKHKDEFKELLDVVSNFSKKYTLAEGNLEKIKELYAQNNGEDLKELASSFINLLTFTAIGAPATFKFFDKNIDRKRYTSTTEILNATLIHQSITGLYETRIDLSKLGGD

SEQ ID NO: 515 - protein, 1338 aa, Streptococcus mutans; identical to SEQ ID NO: 514
  REGION 1..1338: note = Streptococcus mutans NLML4

SEQ ID NO: 516 - protein, 1128 aa, Streptococcus mutans
  REGION 1..1128: note = Streptococcus mutans NLML5
MANSKILGLDIGIASVGVGIIDKETGKIIHVNSRIFPAATADSNVERRGFRQGRRLVRRKKHRKVRLADLFLDSNLLTDFSKVSLNLNPYQLRVKGLNEELSNEELFIALKSIVSRRGISYLDDASEDSGANSSEYGKAVEENRKLLEDRTPGQIQLERFEKYGKVRGDFTVVENGENHRLINVFSTSAYKKEAERILRRQQEFNIRIADEFIEAYLTILTGKRKYYHGPGNEKSRTDYGRFRTDGTTLDNIFGILIGKCTFYPDEYRAAKASYTAQEFNLLNDLNNLTVPTETKKLSEEQKRQIIEHAKTVKTLGAPTLLKYIAKLVGCSADDIKGYRIDKSDKPEIHTFEAYRKMRTMELIKVADLSRESLDALAHILTLNTEREGIEEAIRDRFTNKEFNQEQINELVLFRKNNSSLFGKGWHNFSLKLMKELIPELYETSEEQMTILTRLGKQRVKKSSNRTNYIDEKELTEEIYNPVVAKSVRQAIKIINLATKKYGVFDNIVIEMARESNEDDEKKAIQNAQKANEDEKEAALLKAAHQFNGKEELPDSIFHGHKELLTKIRLWHQQGEKCLYTGKTIFINDLIHNPYKYEIDHILPLSLSFDDSLANKVLVLSTANQEKGQRTPFQSLDSMDGAWTYREFKAYVKGLKTLSNKKKDYLLNEEDINKNEVKQKFIERNLVDTRYSSRVVLNTLQDFYKKREFDTKISVVRGQFTSQIRRKWRIEKTRETYHHHAVDALIIAASSQLNLWKKQNNPLISYKEDQFVDPETGEILSLSDDEYKELVFKAPYDHFVDTLKSKKFEDSILFSYQVDSKYNRKISDATIYGTRKARLGKDSQEETYVLGKIKDIYSQKGYEDFIKKYKKDKTQFLMYHKDPQTFEKVIEEILKTYSDKELNEKGKEVPCNPFEKYRQENGPVRKYSKKGNGPEIKSIKYYDNKLGNHIDITPNNSHHQVVLQSLKPWRTDVYFNPKSGKYELMGLKYSDLRFEKVSGDYGISVKKYNEIKSKEGVDENSEFKFTLYKNDLILIKDTESGEQELFRFLSRTMPNQKHYVELKPYDKSKFEGHQKLMDIFGEVAKGGQCLKGLNKSNISIYKVKTDVLGNKYFIKKEGDQPQLNFKKKI

SEQ ID NO: 517 - protein, 1128 aa, Streptococcus mutans; identical to SEQ ID NO: 516
  REGION 1..1128: note = Streptococcus mutans NLML5

SEQ ID NO: 518 - protein, 1125 aa, Streptococcus mutans
  REGION 1..1125: note = Streptococcus mutans NLML8
MTNGKILGLDIGIASVGVGIINAKTGNVEHASSRIFPAANADNNVERRSARGGRRLIRRKKHRLKRVEDLFEKYNIDTDFSNLNLNPYQLRVKGLNEQLSNEELFAILKNIAKRRGISYLDDAEDDSVGSSDYAKAIDENRKLLKKQTPGEIQLKRLEKYGQLRGNFTIQDENGEYHRLINVFSTSDYVKEARRILETQSYYNKFITESFVEDYIKILQGKRKYYVGPGNEKSRTDYGIYRTDGETLDNLFGILIGKCGFYPEEYRAAKASYTAQEYNFLNDLNNLTVPTETKKLSTEQKYQLVDFAKTASTLEAAKLLKEIAKLVGCQVEEIKGYRLDNKDKPDLHTFEPFRKLKSNLTTIAVENLSITTLDTLAHILTLNTEREGIEEAIQKELPNIFSDEQITGIIAVRKKNSQIFGKGWHSFSIKLMKELIPELYETSEEQMTILIRLKKVKTNSKITNRTKYINEQEVTDEIYNPVVSKSIRQTVKIINAAIKKYGAFDQIVIEMPRESNEEDERKFIADLQKSNAKEKDDAMKQAALLYNGKAELPHGVFHGHKELATKIRLWYQQGERCLYSGKHIDIHDLIHNQHMFEIDHVLPLSLSFDDSLANKVLVYSWANQEKGQRTPFQALPQMASAWSFRELRDYISKQKGISKKKRDYLLTEQDINKVEVKQKFIERNLVDTRYVSRVVLNTLQDALKVMNKETKISVIRGQFTSQLRRQWRIDKSRETYHHHAVDALIIAASSQLRLWKKQNNPMFAEDKHGQKINLDTGEVLSDDAYKELVYQAPYQGFVNTISSKSFEDEILFSYQVDSKVNRKISDATIYATRQAQLGKDKKEETYVLGKIKDIYSQAGYDAFRKKYDKDKAVFLMYQKDPETWEKVIEVILRDYKELDDKGKEIGNPFERYKVKHGFVRKYSRKNKGTEIKSLKYYDNKLGNHIDITPNNSKHSVVLQSINPWRADLYFNPETTKYELMGLKYADLSFEKGTGKYSISREKYDEIKEREGISSKSEFKFTLYKNDLILVKDIGNHKELIARFNSKNDTSKHYVELKPWNKAKFDSEEELIPAFGKVAKSGQFIKGLNKPDLSIYKVKTDILGHKYYIKKEGDKPKLNFENKIKNK

SEQ ID NO: 519 - protein, 1125 aa, Streptococcus mutans; identical to SEQ ID NO: 518
  REGION 1..1125: note = Streptococcus mutans NLML8

SEQ ID NO: 520 - protein, 1345 aa, Streptococcus mutans
  REGION 1..1345: note = Streptococcus mutans NLML9
MKKPYSIGLDIGTNSVGWAVVTDDYKVSAKKMKVLGNTDKSHIKKNLLGALLFDSGNTAEDRRLKRTARRRYTRRRNRILYLQEIFAEEMSKVDDSFFHRLEDSFLVTEDKRGERHPIFGNLEEEVKYHENFPTIYHLRQYLADNPEKVDLRLVYLALAHIIKFRGHFLIEGKFDTRNNDVQRLFQEFLAVYDNTFENSSLQEQNVQVEEILTDKISKSAKKDRVLKLFPNEKSNGRFAEFLKLIVGNQADFKKHFELEEKAPLQFSKDTYEEELEVLLAQIGDNYAELFLSAKKLYDSILLSGILTVTDVSTKAPLSASMIQRYNEHQMDLAQLKQFIRQKLSDKYNEVFSDVSKDGYAGYIDGKTNQEAFYKYLKGLLNKIEGSGYFLDKIEREDFLRKQRTFDNGSIPHQIHLQEMRAIIRRQAEFYPFLADNQDRIEKILTFRIPYYVGPLARGKSDFAWLSRKSADKITPWNFDEIVDKESSAEAFINRMTNYDLYLPNQKVLPKHSLLYEKFTVYNELTKVKYKTEQGKTAFFDANMKQEIFDGVFKVYRKVTKDKLMDFLEKEFDEFRIVDLTGLDKENKAFNASYGTYHDLRKILDKDFLDNSKNEKILEDIVLTLTLFEDREMIRKRLENYSDLLTKEQVKKLERRHYTGWGRLSAELIHGIRNKESRKTILDYLIDDGNSNRNFMQLINDDALSFKEEIAKAQVIGETDNLNQVVSDIAGSPAIKKGILQSLKIVDELVKIMGHQPENIVVEMARENQFTNQGRRNSQQRLKGLTDSIKEFGSQILKEHPVEHSQLQNDRLFLYYLQNGRDMYTGEELDIDYLSQYDIDHIIPQAFIKDNSIDNRVLTSSKENRGKSDDVPSKNVVRKMKSYWSKLLSAKLITQRKFDNLTKAERGGLTDDDKAGFIKRQLVETRQITKHVARILDERFHTETDENNKKIRQVKIVTLKSNLVSNFRKEFELYKVREINDYHHTHDAYLNAVIGKALLGVYPQLEPEFVYGDYPHFHGHKENKATAKKFFYSNIMNFFKKDDVRTDKNGEIIWKKDEHISNIKKVLSYPQVNIVKKVEEQTGGFSKESILPKGNSDKLIPRKTKKFYWDTKKYGGFDSPIVAYSILVIADIEKGKSKKLKTVKALVGVTIMEKMTFERDPVAFLERKGYRNVQEENIIKLPKYSLFKLENGRKRLLASARELQKGNEIVLPNHLGTLLYHAKNIHKVDEPKHLDYVDKHKDEFKELLDVVSNFSKKYTLAEGNLEKIKELYAQNNGEDLKELASSFINLLTFTAIGAPATFKFFDKNIDRKRYTSTTEILNATLIHQSITGLYETRIDLSKLGGD

SEQ ID NO: 521 - protein, 1345 aa, Streptococcus mutans; identical to SEQ ID NO: 520
  REGION 1..1345: note = Streptococcus mutans NLML9

SEQ ID NO: 522 - protein, 1355 aa, Streptococcus mutans
  REGION 1..1355: note = Streptococcus mutans NMT4863
MKKPYSIGLDIGTNSVGWAVVTDDYKVPAKKMKVLGNTDKSHIKKNLLGALLFDSGNTAEDRRLKRTARRRYTRRRNRILYLQEIFAEEMSKVDDSFFHRLDESFLTDDDKNFDSHPIFGNKAEEDAYHQKFPTIYHLRKHLADSTEKADLRLVYLALAHMIKFRGHFLIEGELNAENTDVQKLFADFVGVYDRTFDDSHLSEITVDASSILTEKISKSRRLEKLINNYPKEKKNTLFGNLIALSLGLQPNFKTNFKLSEDAKLQFSKDTYEEDLEELLGKIGDDYADLFTLAKNLYDAILLSGILTADDSSTKAPLSASMIKRYAEHHEDLEKLKEFIKANKPELYHDIFKDETKNGYAGYIENGVKQDEFYKYLKNTLSKITGSDYFLDQIEREDFLRKQRTFDNGSIPHQIHLQEMHAILRRQGDYYPFLKENQDRIEKILTFRIPYYVGPLARKNSRFAWAEYHSDEAVTPWNFDQVIDKESSAQAFIEHMTNNDLYLPNEKVLPKHSPLYEKYTVYNELTKIKYVTEIGEAKFFDANLKQEIFDGLFKHERKVTKKKLRTFLDKNFDEFRIVDIQGLDKETETFNASYATYQDLLKVIKDKVFMDNPENAEILENIVLTLTLFEDREMIKQRLAKYADVFDKKVIDQLARRHYTGWGRLSAKLLNGIRDKQSCKTIMDYLIDDAQSNRNLMQLITDDNLTFKDDIVKAQYVDNSDDLHQVVQSLAGSPAIKKGILQSLKIVDELVKVMGKEPEQIVVEMARENQTTAKGRRNSQQRYKRLKEAIKSLDRDLNHKILKEHPTDNQALQNNRLFLYYLQNGRDMYTGESLDINRLSDYDIDHVIPQAFIKDNSIDNRVLTSSKANRGKSDDVPSEDVVNRMRPFWNKLLSSGLISQRKYNNLTKKELTLDDKAGFIKRQLVETRQITKHVARMLDERFNKEFDDNNKRIRRVKIVTLKSNLVSSFRKEFELYKVREINDYHHAHDAYLNAVVVKALLVKYPKLEPEFVYGEYPKYNSYRERKTATQKMFFYSNIMNMFKSKVKLADDQIVERPMIEVNDETGEIAWDKTKHITTVKKVLSYPQVNIVKKVEEQTIGQNGGLFDDNPKSPLEVIPSKLVPLKKALNPEKYGGYQKPTTAYPILLIVDTKQLIPISVMDKKRFEQNPVKFLKDKGYQQIEKNNFVKLPKYTLVDIGNGIKRLWASSKEVHKGNQLVVSKKSQDLLYHAHHLDNDYSNEYVKNHYQQFDILFNEITSFSKKCKLGKEHIQKIEEAYSKERDFASIEELADGFIKLLGFTQLGATSPFSFLGIKLNQKQYTGKKDYLLPCMEATLIHQSITGLYETRIDLSKLGGD

SEQ ID NO: 523 - protein, 1355 aa, Streptococcus mutans; identical to SEQ ID NO: 522
  REGION 1..1355: note = Streptococcus mutans NMT4863

SEQ ID NO: 524 - protein, 1345 aa, Streptococcus mutans
MKKPYSIGLDIGTNSVGWAVVTDDYKVPAKKMKVLGNTDKSHIKKNLLGALLFDSGNTAADRRLKRTARRRYTRRRNRILYLQEIFAEEMSKVDDSFFHRLEDSFLVTEDKRGERHPIFGNLEEEVKYHENFPTIYHLRQYLADNPEKVDLRLVYLALAHIIKFRGHFLIEGKFDTRNNDVQRLFQEFLAVYDNTFENSSLQEQNVQVEEILTDKISKSAKKDRVLKLFPNEKSNGRFAEFLKLIVGNQADFKKHFELEEKAPLQFSKDTYEEELEVLLAQIGDNYAELFLSAKKLYDSILLSGILTVTDVSTKAPLSASMIQRYNEHQMDLAQLKQFIRQKLSDKYNEVFSDVSKDGYAGYIDGKTNQEAFYKYLKGLLNKIEGSGYFLDKIEREDFLRKQRTFDNGSIPHQIHLQEMRAIIRRQAEFYPFLADNQDRIEKILTFRIPYYVGPLARGKSDFAWLSRKSADKITPWNFDEIVDKESSAEAFINRMTNYDLYLPNQKVLPKHSLLYEKFTVYNELTKVKYKTEQGKTAFFDANMKQEIFDGVFKVYRKVTKDKLMDFLEKEFDEFRIVDLTGLDKENKAFNASYGTYHDLRKILDKDFLDNSKNEKILEDIVLTLTLFEDREMIRKRLENYSDLLTKEQVKKLERRHYTGWGRLSAELIHGIRNKESRKTILDYLIDDGNSNRNFMQLINDDALSFKEEIAKAQVIGETDNLNQVVSDIAGSPAIKKGILQSLKIVDELVKIMGHQPENIVVEMARENQFTNQGRRNSQQRLKGLTDSIKEFGSQILKEHPVKHSQLQNDRLFLYYLQNGRDMYTGEELDIDYLSQYDIDHIIPQAFIKDNSIDNRVLTSSKENRGKSDDVPSKNVVRKMKSYWSKLLSAKLITQRKFDNLTKAERGGLTDDDKAGFIKRQLVETRQITKHVARILDERFHTETDENNKKIRQVKIVTLKSNLVSNFRKEFELYKVREINDYHHAHDAYLNAVIGKALLGVYPQLEPEFVYGDYPHFHGHKENKATAKKFFYSNIMNFFKKDDVRTDKNGEIIWKKDEHISNIKKVLSYPQVNIVKKVEEQTGGFSKESILPKGNSDKLIPRKTKKFYWDTKKYGGFDSPIVAYSILVIADIEKGKSKKLKTVKALVGVTIMEKMTFERDPVAFLERKGYRNVQEENIIKLPKYSLFKLENGRKRLLASARELQKGNEIVLPNHLGTLLYHAKNIHKVDEPKHLDYVDKHKDEFKELLDVVSNFSKKYTLAEGNLEKIKELYAQNNGEDLKELASSFINLLTFTAIGAPATFKFFDKNIDRKRYTSTTEILNATLIHQSITGLYETRIDLSKLGGD

SEQ ID NO: 525 - protein, 1345 aa, Streptococcus mutans; identical to SEQ ID NO: 471
  REGION 1..1345: note = Streptococcus mutans NV1996

SEQ ID NO: 526 - protein, 1345 aa, Streptococcus mutans
  REGION 1..1345: note = Streptococcus mutans NVAB
MKKPYSIGLDIGTNSVGWAVVTDDYKVPAKKMKVLGNTDKSHIKKNLLGALLFDSGNTAADRRLKRTARRRYTRRRNRILYLQEIFAEEMSKVDDSFFHRLEDSFLVTEDKRGERHPIFGNLEEEVKYHENFPTIYHLRQYLADNPEKVDLRLVYLALAHIIKFRGHFLIEGKFDTRNNDVQRLFQEFLAVYDNTFENSSLQEQNVQVEEILTDKISKSAKKDRVLKLFPNEKSNGRFAEFLKLIVGNQADFKKHFELEEKAPLQFSKDTYEEELEVLLAQIGDNYAELFLSAKKLYDSILLSGILTVTDVSTKAPLSASMIQRYNEHQMDLAQLKQFIRQKLSDKYNEVFSDVSKDGYAGYIDGKTNQEAFYKYLKGLLNKIEGSGYFLDKIEREDFLRKQRTFDNGSIPHQIHLQEMRAIIRRQAEFYPFLADNQDRIEKILTFRIPYYVGPLARGKSDFAWLSRKSADKITPWNFDEIVDKESSAEAFINRMTNYDLYLPNQKVLPKHSLLYEKFTVYNELTKVKYKTEQGKTAFFDANMKQEIFDGVFKVYRKVTKDKLMDFLEKEFDEFRIVDLTGLDKENKVFNASYGTYHDLCKILDKDFLDNSKNEKILEDIVLTLTLFEDREMIRKRLENYSDLLTKEQVKKLERRHYTGWGRLSAELIHGIRNKESRKTILDYLIDDGNSNRNFMQLINDDALSFKEEIAKAQVIGETDNLNQVVSDIAGSPAIKKGILQSLKIVDELVKIMGHQPENIVVEMARENQFTKQGRRNSQQRLKGLTDSIKEFGSQILKEHPVENSQLQNDRLFLYYLQNGRDMYTGEELDIDYLSQYDIDHIIPQAFIKDNSIDNRVLTSSKENRGKSDDVPSKDVVRKMKSYWSKLLSAKLITQRKFDNLTKAERGGLTDDDKAGFIKRQLVETRQITKHVARILDERFYTETDENNKKIRQVKIVTLKSNLVSNFRKEFELYKVREINDYHHAHDAYLNAVIGKALLGVYPQLEPEFVYGDYPHFHGHKENKATAKKFFYSNIMNFFKKDDVRTDKNGEIIWKKDEHISNIKKVLSYPQVNIVKKVEEQTGGFSKESILPKGNSDKLIPRKTKKFYWDTKKYGGFDSPIVAYSILVIADIEKGKSKKLKTVKALVGVTIMEKMTFERDPVAFLERKGYRNVQEENIIKLPKYSLFKLENGRKRLLASARELQKGNEIVLPNHLGTLLYHAKNIHKVDEPKHLDYVDKHKDEFKELLDVVSNFSKKYTLAEGNLEKIKELYAQNNGEDLKELASSFINLLTFTAIGAPATFKFFDKNIDRKRYTSTTEILNATLIHQSITGLYETRIDLSKLGGD

SEQ ID NO: 527 - protein, 1345 aa, Streptococcus mutans; identical to SEQ ID NO: 526
  REGION 1..1345: note = Streptococcus mutans NVAB

SEQ ID NO: 528 - protein, 1345 aa, Streptococcus mutans
  REGION 1..1345: note = Streptococcus mutans R221
MKKPYSIGLDIGTNSVGWAVVTDDYKVPAKKMKVLGNTDKSHIKKNLLGALLFDSGNTAEDRRLKRTARRRYTRRRNRILYLQEIFSEEMGKVDDSFFHRLEDSFLVTEDKRGERHPIFGNLEEEVKYHENFPTIYHLRQYLADNPEKTDLRLVYLALAHIIKFRGHFLIEGKFDTRNNDVQRLFQEFLAVYDNTFENSSLQEQNVQVEEILTDKISKSAKKDRVLKLFPNEKSNGRFAEFLKLIVGNQADFKKHFELEEKAPLQFSKDIYEEELEVLLAQIGDNYAELFLSAKKLYDSILLSGILTVTDVSTKAPLSASMIQRYNEHQMDLAQLKQFIRQKLSDKYNEVFSDVSKDGYAGYIDGKTNQEAFYKYLKGLLNKIEGSGYFLDKIEREDFLRKQRTFDNGSIPHQIHLQEMRAIIRRQAEFYPFLADNQDRIEKILTFRIPYYVGPLARGKSDFAWLSRKSADKITPWNFDEIVDKESSVEAFINRMTNYDLYLPNQKVLPKHSLLYEKFTVYNELTKVKYKTEQGKTAFFDANMKQEIFDGVFKVYRKVTKDKLMDFLEKEFDEFRIVDLTGLDKENKAFNASYGTYHDLRKILDKDFLDNSKNEKILEDIVLTLTLFEDREMIRKRLKNYSDLLTKEQLKKLERRHYTGWGRLSAELIHGIRNKESRKTILDYLIDDGNSNRNFMQLINDDALSFKEEIAKAQVIGETDNLNQVVSDIAGSPAIKKGILQSLKIVDELVKIMGHQPENIVVEMARENQFTNQGRRNSQQRLKGLTDSIKEFGSQILKEHPVENSQLQNDRLFLYYLQNGRDMYTGEELDIDYLSQYDIDHIIPQAFIKDNSIDNRVLTSSKENRGKSDDVPSKDVVRKMKSYWSKLLSAKLITQRKFDNLTKAERGGLTDDDKAGFIKRQLVETRQITKHVARILDERFNTETDENNKKIRQVKIVTLKSNLVSNFRKEFELYKVREINDYHHAHDAYLNAVIGKALLGVYPQLEPEFVYGDYPHFHGHKENKATAKKFFYSNIMNFFKKDDVRTDKNGEIIWKKDEHISNIKKVLSYPQVNIVKKVEEQTGGFSKESILPKGNSDKLIPRKTKKFYWDTKKYGGFDSPIVAYSILVIADIEKGKSKKLKTVKALVGVTIMEKMTFERDPVAFLERKGYRNVQEENIIKLPKYSLFKLENGRKRLLASARELQKGNEIVLPNHLGTLLYHAKNIHKVDEPKHLDYVDKHKDEFKELLDVVSNFSKKYTLAEGNLEKIKELYAQNNGEDLKELASSFINLLTFTAIGAPATFKFFDKNIDRKRYTSTTEILNATLIHQSITGLYETRIDLNKLGGD

SEQ ID NO: 529 - protein, 1345 aa, Streptococcus mutans; identical to SEQ ID NO: 528
  REGION 1..1345: note = Streptococcus mutans R221

SEQ ID NO: 530 - protein, 1345 aa, Streptococcus mutans
  REGION 1..1345: note = Streptococcus mutans S1B
MKKPYSIGLDIGTNSVGWAVVTDDYKVPAKKMKVLGNTDKSHIKKNLLGALLFDSGNTAEDRRLKRTARRRYTRRRNRILYLQEIFSEEMGKVDDSFFHRLDESFLTDDDKNFDSYPIFGNKAEEDAYHQKFPTIYHLRKHLADSTEKADLRLVYLALAHMIKFRGHFLIEGELNAENTDVQKLFADFVGVYDRTFDDSHLSEITVDASSILTEKISKSRRLEKLINNYPKEKKNTLFRNLVALSLGLQPNFKTNFKLSEDAKLQFSKDTYEEDLEELLGKIGDDYADLFTLAKNLYDAILLSGILTADDSSTKAPLSASMIKRYAEHHEDLEKLKEFIKANKPELYHDIFKDETKNGYAGYIENGVKQDEFYKYLKNTLSKIAGSDYFLDKIEREDFLRKQRTFDNGSIPHQIHLQEMHAILRRQGDYYPFLKENQDRIEKILTFRIPYYVGPLARGKSDFAWLSRKSADKITPWNFDEIVDKESSVEAFINRMTNYDLYLPNQKVLPKHSLLYEKFTVYNELTKVKYKTEQGKTAFFDANMKQEIFDGVFKVYRKVTKDKLMDFLEKEFDEFRIVDLTGLDKENKAFNASYGTYHDLRKILDKDFLDNSKNEKILEDIVLTLTLFEDREMIRKRLKNYSDLLTKEQLKKLERRHYTGWGRLSAELIHGIRNKESRKTILDYLIDDGNSNRNFMQLINDDALSFKEEIAKAQVIGETDNLNQVVSDIAGSPAIKKGILQSLKIVDELVKIMGHQPENIVVEMARENQFTNQGRRNSQQRLKGLTDSIKEFGSQILKEHPVENSQLQNDRLFLYYLQNGRDMYTGEELDIDYLSQYDIDHIIPQAFIKDNSIDNRVLTSSKENRGKSDDVPSKDVVRKMKSYWSKLLSAKLITQRKFDNLTKGERGGLTDDDKAGFIKRQLVETRQITKHVARILDERFNTETDENNKKIRQVKIVTLKSNLVSNFRKEFELYKVREINDYHHAHDAYLNAVIGKALLGVYPQLEPEFVYGDYPHFHGHKENKATAKKFFYSNIMNFFKKDDVRTDKNGEIIWKKDEYISNIKKVLSYPQVNIVKKVEEQTGGFSKESILPKGDSDKLIPRKTKKFYWDTKKYGGFDSPIVAYSILVIADIEKGKSKKLKTVKALVGVTIMEKMTFERDPVAFLERKGYRNVQEENIIKLPKYSLFKLENGRKRLLASARELQKGNEIVLPNHLGTLLYHAKNIHKVDEPKHLDYVDKHKDEFKELLDVVSNFSKKYTLAEGNLEKIKELYAQNNGEDLKELASSFINLLTFTAIGAPATFKFFDKNIDRKRYTSTTEILNATLIHQSITGLYETRIDLSKLGGD

SEQ ID NO: 531 - protein, 1345 aa, Streptococcus mutans; identical to SEQ ID NO: 530
  REGION 1..1345: note = Streptococcus mutans S1B

SEQ ID NO: 532 - protein, 1345 aa, Streptococcus mutans; identical to SEQ ID NO: 471
  REGION 1..1345: note = Streptococcus mutans SF1

SEQ ID NO: 533 - protein, 1345 aa, Streptococcus mutans
  REGION 1..1345: note = Streptococcus mutans SF14
MKKPYSIGLDIGTNSVGWAVVTDDYKVPAKKMKVLGNTDKSHIKKNLLGALLFDSGNTAEDRRLKRTARRRYTRRRNRILYLQEIFSEEMGKVNDSFFHRLEDSFLVTEDKRGERHPIFGNLEEEVKYHENFPTIYHLRQYLADNPEKVDLRLVYLALAHIIKFRGHFLIEGKFDTRNNDVQRLFQEFLAVYDNTFENSSLQEQNVQVEEILTDKISKSAKKDRVLKLFPNEKSNGRFAEFLKLIVGNQADFKKHFELEEKAPLQFSKDTYEEELEVLLAQIGDNYAELFLSAKKLYDSILLSGILTVTDVSTKAPLSASMIQRYNEHQMDLAQLKQFIRQKLSDKYNEVFSDVSKDGYAGYIDGKTNQEAFYKYLKGLLNKIEGSGYFLDKIEREDFLRKQRTFDNGSIPHQIHLQEMRAIIRRQAEFYPFLADNQDRIEKILTFRIPYYVGPLARGKSDFAWLSRKSADKITPWNFDEIVDKESSAEAFINRMTNYDLYLPNQKVLPKHSLLYEKFTVYNELTKVKYKTEQGKTAFFDANMKQEIFDGVFKVYRKVTKDKLMDFLEKEFDEFRIVDLTGLDKENKVFNASYGTYHDLCKILDKDFLDNSKNEKILEDIVLTLTLFEDREMIRKRLENYSDLLTKEQVKKLERRHYTGWGRLSAELIHGIRNKESRKTILDYLIDDGNSNRNFMQLINDDALSFKEEIAKAQVIGETDNLNQVVSDIAGSPAIKKGILQSLKIVDELVKIMGHQPENIVVEMARENQFTKQGRRNSQQRLKGLTDSIKEFGSQILKEHPVENSQLQNDRLFLYYLQNGRDMYTGEELDIDYLSQYDIDHIIPQAFIKDNSIDNRVLTSSKENRGKSDDVPSKDVVRKMKSYWSKLLSAKLITQRKFDNLTKAERGGLTDDDKAGFIKRQLVETRQITKHVARILDERFYTETDENNKKIRQVKIVTLKSNLVSNFRKEFELYKVREINDYHHAHDAYLNAVIGKALLGVYPQLEPEFVYGDYPHFHGHKENKATAKKFFYSNIMNFFKKDDVRTDKNGEIIWKKDEYISNIKKVLSYPQVNIVKKVEEQTGGFSKESILPKGNSDKLIPRKTKKFYWDTKKYGGFDSPIVAYSILVIADIEKGKSKKLKTVKALVGVTIMEKMTFERDPIAFLERKGYRNVQEENIIKLPKYSLFKLENGRKRLLASARELQKGNEIVLPNHLGTLLYHAKNIHKVDEPKHLDYVDKHKDEFKELLDVVSNFSKKYTLAEGNLEKIKELYAQNNGEDLKELASSFINLLTFTAIGAPAAFKFFDKNIDRKRYTSTTEILNATLIHQSITGLYETRIDLSKLGGD

SEQ ID NO: 534 - protein, 1345 aa, Streptococcus mutans; identical to SEQ ID NO: 533
  REGION 1..1345: note = Streptococcus mutans SF14

SEQ ID NO: 535 - protein, 1345 aa, Streptococcus mutans
  REGION 1..1345: note = Streptococcus mutans SM1
MKKPYSIGLDIGTNSVGWAVVTDDYKVPAKKMKVLGNTDKSHIKKNLLGALLFDSGNTAEDRRLKRTARRRYTRRRNRILYLQEIFSEEMGKVDDSFFHRLEDSFLVTEDKRGERHPIFGNLEEEVKYHENFPTIYHLRQYLADNPEKVDLRLVYLALAHIIKFRGHFLIEGKFDTRNNDVQKLFQEFLAVYDNTFENSSLQEQNVQVEEILTDKISKSAKKDRVLKLFPNEKSNGRFAEFLKLIVGNQADFKKHFELEEKAPLQLSKDTYEEELEVLLAQIGDNYAELFLSAKKLYDSILLSGILTVTDVSTKAPLSASMIQRYNEHQMDLAQLKQFIRQKLSDKYNEVFSDVSKDGYAGYIDGKTNQEAFYKYLKGLLNKIEGSGYFLDKIEREDFLRKQRTFDNGSIPHQIHLQEMRAIIRRQAEFYPFLADNQDRIEKILTFRIPYYVGPLARGKSDFAWLSRKSADKITPWNFDEIVDKESSVEAFINRMTNYDLYLPNQKVLPKHSLLYEKFTVYNELTKVKYKTEQGKTAFFDANMKQEIFDGVFKVYRKVTKDKLMDFLEKEFDEFRIVDLTGLDKENKAFNASYGTYHDLRKILDKDFLDNSKNEKILEDIVLTLTLFEDREMIRKRLENYSDLLTKEQVKKLERRHYTGWGRLSAELIHGIRNKESRKTLLDYLIDDGNSNRNFMQLINDDALSFKEEIAKAQVIGETDNLNQVVSDIAGSPAIKKGILQSLKIVDELVKIMGHQPENIVVEMARENQFTNQGRRNSQQRLKGLTDSIKEFGSQILKEHPVENSQLQNDRLFLYYLQNGRDMYTGEELDIDYLSQYDIDHIIPQAFIKDNSIDNRVLTSSKENRGKSDDVPSKDVVRKMKSYWSKLLSAKLITQRKFDNLTKAERGGLTDDDKAGFIKRQLVETRQITKHVARILDERFNTETDENNKKIRQVKIVTLKSNLVSNFRKEFELYKVREINDYHHAHDAYLNAVIGKALLGVYPQLEPEFVYGDYPHFHGHKENKATAKKFFYSNIMNFFKKDDVRTDKNGEIIWKKDEYISNIKKVLSYPQVNIVKKVEEQTGGFSKESILPKGNSDKLIPRKTKKFYWDTKKYGGFDSPIVAYSILVIADIEKGKSKKLKTVKALVGVTIMEKMTFERDPIAFLERKGYRNVQEENIIKLPKYSLFKLENGRKRLLASARELQKGNEIVLPNHLGTLLYHAKNIHKVDEPKHLDYVDKHKDEFKELLDVVSNFSKKYTLAEGNLEKIKELYAQNNGEDLKELASSFINLLTFTAIGAPATFKFFDKNIDRKRYTSTTEILNATLIHQSITGLYETRIDLSKLGGD

SEQ ID NO: 536 - protein, 1345 aa, Streptococcus mutans; identical to SEQ ID NO: 535
  REGION 1..1345: note = Streptococcus mutans SM1

SEQ ID NO: 537 - protein, 1345 aa, Streptococcus mutans
  REGION 1..1345: note = Streptococcus mutans SM4
MKKPYSIGLDIGTNSVGWAVVTDDYKVPAKKMKVLGNTDKSHIKKNLLGALLFDSGNTAEDRRLKRTARRRYTRRRNRILYLQEIFSEEMDKVDDSFFHRLEDSFLVTEDKRGERHPIFGNLEEEVKYHENFPTIYHLRQYLADNPEKVDLRLVYLALAHIIKFRGHFLIEGKFDTRNNDVQRLFQEFLAVYDNTFENSSLQEQNVQVEEILTDKISKSAKKDRVLKLFPNEKSNGRFAEFLKLIVGNQADFKKHFELEEKAPLQFSKDTYEEELEVLLAQIGDNYAELFLSAKKLYDSILLSGILTVTDVSTKAPLSASMIQRYNEHQMDLAQLKQFIRQKLSDKYNEVFSDVSKDGYAGYIDGKTNQEAFYKYLKGLLNKIEGSGYFLDKIEREDFLRKQRTFDNGSIPHQIHLQEMRAIIRRQAEFYPFLADNQDRIEKILTFRIPYYVGPLARGKSDFAWLSRKSADKITPWNFDEIVDKESSAEAFINRMTNYDLYLPNQKVLPKHSLLYEKFTVYNELTKVKYKTEQGKTAFFDANMKQEIFDGVFKVYRKVTKDKLMDFLEKEFDEFRIVDLTGLDKENKVFNASYGTYHDLCKILDKDFLDNSKNEKILEDIVLTLTLFEDREMIRKRLENYSDLLTKEQVKKLERRHYTGWGRLSAELIHGIRNKESRKTILDYLIDDGNSNRNFMQLINDDALSFKEEIAKAQVIGETDNLNQVVSDIAGSPAIKKGILQSLKIVDELVKIMGHQPENIVVEMARENQFTKQGRRNSQQRLKGLTDSIKEFGSQILKEHPVENSQLQNDRLFLYYLQNGRDMYTGEELDIDYLSQYDIDHIIPQAFIKDNSIDNRVLTSSKENRGKSDDVPSKDVVRKMKSYWSKLLSAKLITQRKFDNLTKAERGGLTDDDKAGFIKRQLVETRQITKHVARILDERFYTETDENNKKIRQVKIVTLKSNLVSNFRKEFELYKVREINDYHHAHDAYLNAVIGKALLGVYPQLEPEFVYGDYPHFHGHKENKATAKKFFYSNIMNFFKKDDVRTDKNGEIIWKKDEHISNIKKVLSYPQVNIVKKVEEQTGGFSKESILPKGNSDKLIPRKTKKFYWDTKKYGGFDSPIVAYSILVIADIEKGKSKKLKTVKALVGVTIMEKMTFERDPVAFLERKGYRNVQEENIIKLPKYSLFKLENGRKRLLASARELQKGNEIVLPNHLGTLLYHAKNIHKVDEPKHLDYVDKHKDEFKELLDVVSNFSKKYTLAEGNLEKIKELYAQNNGEDLKELASSFINLLTFTAIGAPATFKFFDKNIDRKRYTSTTEILNATLIHQSITGLYETRIDLSKLGGD

SEQ ID NO: 538 - protein, 1345 aa, Streptococcus mutans; identical to SEQ ID NO: 537
  REGION 1..1345: note = Streptococcus mutans SM4

SEQ ID NO: 539 - protein, 1345 aa, Streptococcus mutans
  REGION 1..1345: note = Streptococcus mutans SM6
MKKPYSIGLDIGTNSVGWAVVTDDYKVPAKKMKVLGNTDKSHIKKNLLGALLFDSGNTAEDRRLKRTARRRYTRRRNRILYLQEIFSEEMGKVDDSFFHRLEDSFLVTEDKRGERHPIFGNLEEEVKYHENFPTIYHLRQYLADNPEKTDLRLVYLALAHIIKFGGHFLIEGKFDTRNNDVQRLFQEFLAVYDNTFENSSLQEQNVQVEEILTDKISKSAKKDRVLKLFPNEKSNGRFAEFLKLIVGNQADFKKHFELEEKAPLQFSKDIYEEELEVLLAQIGDNYAELFLSAKKLYDSILLSGILTVTDVSTKAPLSASMIQRYNEHQMDLAQLKQFIRQKLSDKYNEVFSDVSKDGYAGYIDGKTNQEAFYKYLKGLLNKIEGSGYFLDKIEREDFLRKQRTFDNGSIPHQIHLQEMRAIIRRQAEFYPFLADNQDRIEKILTFRIPYYVGPLARGKSDFAWLSRKSADKITPWNFDEIVDKESSVEAFINRMTNYDLYLPNQKVLPKHSLLYEKFTVYNELTKVKYKTEQGKTAFFDANMKQEIFDGVFKVYRKVTKDKLMDFLEKEFDEFRIVDLTGLDKENKAFNASYGTYHDLRKILDKDFLDNSKNEKILEDIVLTLTLFEDREMIRKRLKNYSDLLTKEQLKKLERRHYTGWGRLSAELIHGIRNKESRKTILDYLIDDGNSNRNFMQLINDDALSFKEEIAKAQVIGETDNLNQVVSDIAGSPAIKKGILQSLKIVDELVKIMGHQPENIVVEMARENQFTNQGRRNSQQRLKGLTDSIKEFGSQILKEHPVENSQLQNDRLFLYYLQNGRDMYTGEELDIDYLSQYDIDHIIPQAFIKDNSIDNRVLTSSKENRGKSDDVPSKNVVRKMKSYWSKLLSAKLITQRKFDNLTKAERGGLTDDDKAGFIKRQLVETRQITKHVARILDERFHTETDENNKKIRQVKIVTLKSNLVSNFRKEFELYKVREINDYHHAHDAYLNAVIGKALLGVYPQLEPEFVYGDYPHFHGHKENKATAKKFFYSNIMNFFKKDDVRTDKNGEIIWKKDEHISNIKKVLSYPQVNIVKKVEEQTGGFSKESILPKGNSDKLIPRKTKKFYWDTKKYGGFDSPIVAYSILVIADIEKGKSKKLKTVKALVGVTIMEKMTFERDPVAFLERKGYRNVQEENIIKLPKYSLFKLENGRKRLLASARELQKGNEIVLPNHLGTLLYHAKNIHKVDEPKHLDYVDKHKDEFKELLDVVSNFSKKYTLAEGNLEKIKELYAQNNGEDLKELASSFINLLTFTAIGAPATFKFFDKNIDRKRYTSTTEILNATLIHQSITGLYETRIDLSKLGGD

SEQ ID NO: 540 - protein, 1345 aa, Streptococcus mutans; identical to SEQ ID NO: 539
  REGION 1..1345: note = Streptococcus mutans SM6

SEQ ID NO: 541 - protein, 1134 aa, Streptococcus mutans
  REGION 1..1134: note = Streptococcus mutans ST1
MANGKILGLDIGIASVGVGIIDKETGKIIHVNSRIFPAATADSNVERRGFRQGRRLVRRKKHRKVRLADLFLDSNLLTDFSKVSLNLNPYQLRVKGLNEELSNEELFIALKSIVSRRGISYLDDASEDSGANSSEYGKAVEENRKLLEDRTPGQIQLERFEKYGKVRGDFTVVENGENHRLINVFSTSAYKKEAERILRRQQEFNMRIADEFIEAYLTILTGKRKYYHGPGNEKSRTDYGRFRTDGTTLDNIFGILIGKCTFYPDEYRAAKASYTAQEFNLLNDLNNLTVPTETKKLSEEQKRQIIEHAKTVKTLGAPTLLKYIVKLVGCSADDIKGYRIDKSDKPEIHTFEAYRKMRTMELIKVDDLSRESLDALAHILTLNTEREGIEEAIRDRFTNKEFNQEQINELVLFRKNNSSLFGKGWHNFSLKLMKELIPELYETSEEQMTILTRLGKQRVKKSSNRTNYIDEKELTEEIYNPVVAKSVRQAIKIINLATKKYGVFDNIVIEMARESNEDDEKKAIQNAQKANEDEKKAALLKAAHQFNGKEELPDSIFHGHKELLTKIRLWHQQGEKCLYTGKTIFINDLIHNPYKYEIDHILPLSLSFDDSLANKVLVLSTANQEKGQRTPFQSLDSMDGAWTYREFKSYVKGLKTLSNKKKDYLLTEENIDKIEVKQKFIERNLVDTRYSSRVVLNALQDFYKERKFDTKISVVRGQFTSQLRRKWRIEKTRETYHHHAVDALIIAASSQLNLWKKQNNPLISYKEDQFVDPETGEILSLSDDEYKKLVFKAPYEHFVDTLKSKKFEDSILFSYQVDSKYNRKISGATICGTRKAQLGKDTQEETYVLGKIKDIYSQKGYEDFIKKYKKDKTQFLMYHKDPQTFEKVIEEILKTYPDKELNEKGKEVSCNPFEKYRQENGPVRKYSKKGNGPEIKSLKYYDEVLGKNIDITPKNSLNKVVLRSLNPWRTDVYFNHETRKYEFLGLKYSDLRYLKGEHRYGILIGDYKKIKDKEGIEKESEFKFTLYKNDLILIKDTAKGKEELFRFWSRTGKDNAKTFEKNKIELKPYSKSQFEKGEDTNVLGKLYASSNQLQKSFGTLENLSIYKVRTDVLGNKYFIKKEGDKPQLNFKKKL

SEQ ID NO: 542 - protein, 1134 aa, Streptococcus mutans; identical to SEQ ID NO: 541
  REGION 1..1134: note = Streptococcus mutans ST1

SEQ ID NO: 543 - protein, 1350 aa, Streptococcus mutans
  REGION 1..1350: note = Streptococcus mutans ST6
MKKPYSIGLDIGTNSVGWAVVTDDYKVPAKKMKVLGNTDKSHIEKNLLGALLFDSGNTAEDRRLKRTARRRYTRRRNRILYLQEIFSEEMGKVDDSFFHRLEDSFLVTEDKRGERHPIFGNLEEEVKYHENFPTIYHLRQYLADNPEKVDLRLVYLALAHIIKFRGHFLIEGKFDTRNNDVQRLFQEFLAVYDNTFENSSLQEQNVQVEEILTDKISKSAKKDRVLKLFPNEKSNGRFAEFLKLIVGNQADFKKHFELEEKAPLQFSKDTYEEELEVLLAQIGDNYAELFLSAKKLYDSILLSGILTVTDVSTKAPLSASMIQRYNEHQMDLTQLKQFIRQKLSDKYNEVFSDVSKDGYAGYIDGKTNQEAFYKYLKGLLNKIEGSGYFLDKIEREDFLRKQRTFDNGSIPHQIHLQEMRAIIRRQAEFYSFLADNQDRIEKILTFRIPYYVGPLARGKSDFAWLSRKSADKITPWNFDEIVDKESSAEAFINRMTNYDLYLPNQKVLPKHSLLYEKFTVYNELTKVKYKTEQGKTAFFDANMKQEIFDGVFKVYRKVTKDKLMDFLEKEFDEFRIVDLTGLDKENKAFNASYGTYHDLRKILDKDFLDNSKNEKILEDIVLTLTLFEDREMIRKRLENYSDLLTKEQVKKLERRHYTGWGRLSAELIHGIRNKESRKTILDYLIDDGNSNRNFMQLINDDALSFKEEIAKAQVIGETDNLNQVVSDIAGSPAIKKGILQSLKIVDELVKIMGHQPENIVVEMARENQFTNQGRRNSQQRLKGLTDSIKEFGSQILKEHPVENSQLQNDRLFLYYLQNGRDMYTGEELDIDYLSQYDIDHIIPQAFIKDNSIDNRVLTSSKENRGKSDDVPSEDVVNRMRPFWNKLLSSGLISQRKYNNLTKKELTLDDKAGFIKRQLVETRQITKHVARMLDERFNKEFDDNNKRIRKVKIVTLKSNLVSSFRKEFELYKVREINDYHHAHDAYLNAVVVKALLVKYSKLEPEFVYGEYPKYNSYRERKTATQKMFFYSNIMNMFKSKVKLADDQIVERPMIEVNDETGEIAWDKTKHITTVKKVLSYPQVNIVKKVEEQTIGQNGGLFDDNPKSPLEVIPSKLVPLKKALNPEKYGGYQKPTTAYPILLIVDTKQLIPISVMDKKRFEQNPVKFLKDKGYQQIEKNNFVKLPKYTLVDIGNGIKRLWASSKEVHKGNQLVVSKKSQDLLYHAHHLDNDYSNEYVKNHYQQFDILFNEITSFSKKCKLGKEHIQKIEEAYSKERDSASIEELADGFIKLLGFTQLGATSPFSFLGIKLNQKQYTGKKDYLLPCMEATLIHQSITGLYETRIDLSKLGGD

SEQ ID NO: 544 - protein, 1350 aa, Streptococcus mutans; identical to SEQ ID NO: 543
  REGION 1..1350: note = Streptococcus mutans ST6

SEQ ID NO: 545 - protein, 1125 aa, Streptococcus mutans
  REGION 1..1125: note = Streptococcus mutans U2A
MTNGKILGLDIGIASVGVGIINAKTGNVEHASSRIFPAANADNNVERRSARGGRRLIRRKKHRLKRVEDLFEKYNIDTDFSNLNLNPYQLRVKGLNEQLSNEELFAILKNIAKRRGISYLDDAEDDSVGSSDYAKAIDENRKLLKKQTPGEIQLKRLEKYGQLRGNFTIQDENGEYHRLINVFSTSDYVKEARRILETQSYYNKFITESFVEDYIKILQGKRKYYVGPGNEKSRTDYGIYRTDGETLDNLFGILIGKCGFYPEEYRAAKASYTAQEYNFLNDLNNLTVPTETKKLSTEQKYQLVDFAKTASTLGAAKLLKEIAKLVGCQVEEIKGYRLDNKDKPDLHTFEPFRKLKSNLTTIAVENLSITTLDTLAHILTLNTEREGIEEAIQKELPNIFSDEQITEIIAVRKKNSQIFGKGWHSFSIKLMKELIPELYETSEEQMTILTRLKKVKTNSKITNRTKYINEEEITDEIYNPVVSKSIRQTVKIINATIKKYGAFDQIIIEMPRESNEEDERKFIADLQKSNAKEKDDAMKQAALLYNGKDELPHDVFHGHKELATKIRLWYQQGERCLYSGKHIDIHDLIHNQHMFEIDHVLPLSLSFDDSLANKVLVYSWANQEKGQRTPFQALPQMASAWSFRELRDYISKQKGISKKKRDYLLTEQDINKVEVKQKFIERNLVDTRYVSRVVLNTLQDALKVMNKETKISVIRGQFTSQLRRQWRIDKSRETYHHHAVDALIIAASSQLRLWKKQNNPMFAEDKHGQKINLDTGEVLSDDAYKELVYQAPYQGFVNTISSKSFEDEILFSYQVDSKVNRKISDATIYATRQAQLGKDKKEETYVLGKIKDIYSQAGYDAFRKKYDKDKAVFLMYQKDPETWEKVIEVILRDYKELDDKGKEIGNPFERYKVKHGFVRKYSRKNKGTEIKSLKYYDNKLGNHIDITPNNSKHSVVLQSINPWRADLYFNPETTKYELMGLKYADLSFEKGTGKYSISREKYDEIKEREGISSKSEFKFTLYKNDLILVKDIGNHKELIARFNSKNDTSKHYVELKPWNKAKFDSEEELIPAFGKVAKSGQFIKGLNKPDLSIYKVKTDILGHKYYIKKEGDKPKLNFENKIKNK

SEQ ID NO: 546 - protein, 1125 aa, Streptococcus mutans; identical to SEQ ID NO: 545
  REGION 1..1125: note = Streptococcus mutans U2A

SEQ ID NO: 547 - protein, 1345 aa, Streptococcus mutans
  REGION 1..1345: note = Streptococcus mutans UA159
MKKPYSIGLDIGTNSVGWAVVTDDYKVPAKKMKVLGNTDKSHIEKNLLGALLFDSGNTAEDRRLKRTARRRYTRRRNRILYLQEIFSEEMGKVDDSFFHRLEDSFLVTEDKRGERHPIFGNLEEEVKYHENFPTIYHLRQYLADNPEKVDLRLVYLALAHIIKFRGHFLIEGKFDTRNNDVQRLFQEFLAVYDNTFENSSLQEQNVQVEEILTDKISKSAKKDRVLKLFPNEKSNGRFAEFLKLIVGNQADFKKHFELEEKAPLQFSKDTYEEELEVLLAQIGDNYAELFLSAKKLYDSILLSGILTVTDVGTKAPLSASMIQRYNEHQMDLAQLKQFIRQKLSDKYNEVFSDVSKDGYAGYIDGKTNQEAFYKYLKGLLNKIEGSGYFLDKIEREDFLRKQRTFDNGSIPHQIHLQEMRAIIRRQAEFYPFLADNQDRIEKLLTFRIPYYVGPLARGKSDFAWLSRKSADKITPWNFDEIVDKESSAEAFINRMTNYDLYLPNQKVLPKHSLLYEKFTVYNELTKVKYKTEQGKTAFFDANMKQEIFDGVFKVYRKVTKDKLMDFLEKEFDEFRIVDLTGLDKENKVFNASYGTYHDLCKILDKDFLDNSKNEKILEDIVLTLTLFEDREMIRKRLENYSDLLTKEQVKKLERRHYTGWGRLSAELIHGIRNKESRKTILDYLIDDGNSNRNFMQLINDDALSFKEEIAKAQVIGETDNLNQVVSDIAGSPAIKKGILQSLKIVDELVKIMGHQPENIVVEMARENQFTNQGRRNSQQRLKGLTDSIKEFGSQILKEHPVENSQLQNDRLFLYYLQNGRDMYTGEELDIDYLSQYDIDHIIPQAFIKDNSIDNRVLTSSKENRGKSDDVPSKDVVRKMKSYWSKLLSAKLITQRKFDNLTKAERGGLTDDDKAGFIKRQLVETRQITKHVARILDERFNTETDENNKKIRQVKIVTLKSNLVSNFRKEFELYKVREINDYHHAHDAYLNAVIGKALLGVYPQLEPEFVYGDYPHFHGHKENKATAKKFFYSNIMNFFKKDDVRTDKNGEIIWKKDEHISNIKKVLSYPQVNIVKKVEEQTGGFSKESILPKGNSDKLIPRKTKKFYWDTKKYGGFDSPIVAYSILVIADIEKGKSKKLKTVKALVGVTIMEKMTFERDPVAFLERKGYRNVQEENIIKLPKYSLFKLENGRKRLLASARELQKGNEIVLPNHLGTLLYHAKNIHKVDEPKHLDYVDKHKDEFKELLDVVSNFSKKYTLAEGNLEKIKELYAQNNGEDLKELASSFINLLTFTAIGAPATFKFFDKNIDRKRYTSTTEILNATLIHQSITGLYETRIDLNKLGGD

SEQ ID NO: 548 - protein, 1345 aa, Streptococcus mutans; identical to SEQ ID NO: 472
  REGION 1..1345: note = Streptococcus mutans W6

SEQ ID NO: 549 - protein, 1121 aa, Streptococcus oralis
  REGION 1..1121: note = Streptococcus oralis SK1074
MNGLVLGLDIGIASVGVGILEKNSGKIIHANSRLFPAATADNNVERRKNRQARRLNRRKKHRGVRFQDLFEDYGLLTDFSKVSINLNPYRLRVDGLNQQLTNEELFIALKNIVKRRGISYLDDASEDGGAVSSDYGKAVEENRKLLAEQTPGQIQLERFEKYGQVRGDFTVVENGEKCRLINVFSTSAYRKEAEKILRKQQEFNNQITDEFIEDYLKILTGKRKYYHGPGNEKSRTDYGRFRTDGTTLDNIFGVLIGKCTFYPNEYRASKSSYTAQEFNLLNDLNNLTVPTETKKLSEEQKKVIVEYAKEAKTLGASTLLKYIVKMIDASVDQISGYRVDVNNKPEMHTFEVYRKMQSLETISVGELSRNVLDELAHILTLNTEREGIEEAINSKLMGVFSQDQVLELVQFRKNNSSLFSKGWHNFSLKLMMELIPELYETSEEQMTILTRLGKQKSKETSKRTKYIDEKELTEEIYNPVVAKSVRQAIKIINEATKKHGIFDNIVIEMARENNEEDAKKDYIKRQKANQDEKNAAMEKAAFQYNGKKELPGNIFNGHKELATKIRLWHQQGEKCLYTGKTIPISDLIHNQYKYEIDHILPLSLSFDDSLSNKVLVHATANQEKGQRTPFQALDSMDDAWSYREFKSYVKDLKSLSNKKKDYLLTEEDISKIEVKQKFIERNLVDTRYSSRVVLNALQDFYKSHQFDTTISVVRGQFTSQLRRKWGLEKSRETYHHHAVDALIIAASSQLRLWKKQNNPLITYKEGQFVDSQTGEIISLTDDEYKELVFKAPYDHFVDTLHSKTFEDGILFSYQVDSKYNRKISDATIYATRKAKLDKDKSEETYVLGKIKDIYSQAGYDAFIKIYNKDKRKFLMYHKDPQTFEKVIEEILRTYPSKERNDKNKEVPCNPFEKYRQENGPIRKYSKKGNGPEIKCLKYYDNKLGNYIDISPDGSDNQVVLQSLKPWRTDVYFNHQTKEYELMGLKYSDLSFEKGSGKYSISNEKYNSIKRIEGVNEQSEFKFTLYKNDLILIKDSENNEQKLFRFNSRNDTAKHYVELKPYDKARFDGQQELITILGNVAKGGQCLKGLNKSNISIFKVKTDVLGKKHIIKKEGDEPKLKF

SEQ ID NO: 550 - protein, 1373 aa, Streptococcus oralis
  REGION 1..1373: note = Streptococcus oralis SK304
MENKNYSIGLDIGTNSVGWAVITDDYKVPSKKMKVLGNTDKRFIKKNLIGALLFDEGTTAEARRLKRTARRRYTRRKNRLRYLQEIFAEEMSKVDSSFFHRLDDSFLIPEDKKGSKYPIFATLIEEKEYHKQFPTIYHLRKQLADSKEKTDLRLIYLALAHMIKYRGHFLYEDTFDIKNNDIQKIFNEFISIYNNTFEGNSLSGQNVQVEAIFTDKISKSAKRERVLKLFPDEKSTGLFSEFLKLIVGNQADFKKHFDLEEKAPLQFSRDTYDEDLENLLGQIGDDFADLFVAAKKLYDAILLSGILTVTDPSTKAPLSASMIERYENHQKDLATLKQFIKTNLPEKYDEVFSDQSKDGYAGYIDGKTTQESFYKYIKNLLSKFEGADYFLEKIEREDFLRKQRTFDNGSIPHQIHLQEMNAILRRQGEHYPFLKENKEKIEKILTFRIPYYVGPLARGNRDFAWLTRNSDQAIRPWNFEEIVDKASSAESFINKMTNYDLYLPEEKVLPKHSLLYETFAVYNELTKVKFIAEGLRDYQFLDSRQKKDIFYTLFKAEDKRKVTEKDIIQYLHTVDGYDGIELKGIEKQFNASLSTYHDLLKIIKDKEFMDDPNNEEILENIVHTLTIFEDREMIKQRLAQYDSLFDEKVIKALTRRHYTGWGKLSSKLINGIRDKQTGKTILDYLMDDGYNNRNFMQLINDDELSFKEIIKKAQVVGKTDDVKQVVQELPGSPAIKKGILQSIKLVDELVKVMGHEPESIVIEMARENQTTARGKKNSQQRYKRIEDSLKILASGLNAKILKEHPTDNIQLQNDRLFLYYLQNGRDMYTGKPLDINQLSSYDIDHIVPQAFIKDDSLDNRVLTSLKDNRGKSDNVPSLEVVEKMKTFWQQLLDSKLISYRKFNNLTKAERGGLDERDKVGFIKRQLVETRQITKHVAQILDARYNTEVNEKDKKNRTVKIITLKSNLVSNFRKEFRLYKIREINDYHHAHDAYLNAVVAKAILKKYPKLEPEFVYGDYQKYDLKRYISRSKDPKEIEKATEKYFFYSNLLNFFKEEVHYADGTIVKRENIEYSKDTGEIAWNKEKDFATIKKVLSLPQVNIVKKREVQTGGFSKESILPKGNSDKLIPRKTKDILWDTTKYGGFDSPVIAYSILLIADIEKGKAKRLKTVKTLVGITIMEKATFEKSPIAFLENKGYHNVRKENILCLPKYSLFELKNGRRRMLASAKELQKGNEIVLPVHLTTLLYHAKNIHRLDEPEHLEYIQKHRNEFKGLLNLVSEFSQKYVLADANLEKIKNLYADNEQADIEILANSFINLLTFTALGAPAAFKFFGKDVDRKRYTTVSEILNATLIHQSITGLYETRIDLSKLGED

SEQ ID NO: 551 - protein, 1134 aa, Streptococcus oralis
  REGION 1..1134: note = Streptococcus oralis SK313
MNGLVLGLDIGIASVGVGILEKNSGKIVHASSRIFPAATADNNVERRKNRQARRLHRRKKHRGARLKDLFEYYGLLTDFSKVSINLNPYRLRVDGLDQQLTNEELFIALKNIVKRRGISYLDDASEDGGTVSSDYGKAVEENRKLLAEQTPGQIQLERFEKYGQLRGDFTVVENSEKCRLINVFSTSAYKKEAERILRKQQEFNNQITDEFIEDYLKILTGKRKYYHGPGNEKSRTDYGRFRTDGATLDNIFGILIGKCTFYPNEYRASKASYTAQEFNLLNDLNNLTVPTETKKLSEEQKKTIIEYAKSAKTLGASTLLKYIAKMIDASVDQIRGYRVDVNNKPEMHTFEVYRKMQSLETISVGELSRNILDELAHILTLNTEREGIEEAINTKLRDSFSQDQVLELVQFRKNNSSLFSKGWHNFSLKLMMELIPELYETSEEQMTILTRLGKQKSKETSKRTKYIDEKEVTEEIYNPVVAKSVRQAIKIINEATKKHGIFDNIVIEMARENNEEDAKKDYIKRQKANQDEKYAAMEKAAFQYNGKKELPDNIFHGHKELATKIRLWHQQGEKCLYTGKSIPISDLIHNQYKYEIDHILPLSLSFDDSLSNKVLVLATANQEKGQRTPFQALDSMDDAWSYREFKSYVKESKLLGNKKKEYLLTEEDISKIEVKQKFIERNLVDTRYSSRVVLNALQDFYKNHNFDTTISVVRGQFTSQLRRKWGLEKSRETYHHHAVDALIIAASSQLRLWKKQNNPLIAYKEGQFVDSQTGEIISLTDDEYKELVFKAPYDHFVDTLSSKTFEDSILFSYQVDSKFNRKISDATIYATRKAKLDKEKKEYTYTLGKIKDIYSLGTKTPSKTGFYKFLDLYNKDKSQFLMFQKDRKTWDEVIEKIMEQYRPFKEYDKAGKLVDFNPFEKYRQENGPIRKYSKKGNGPEIKSLKYYDILLGKHKNITPEGSRNTVALLSLNPWRTDVYYNMETKKYEFLGLKYADLPFEEGGAYGISTETYNELREKEGIGKNSEFKFTLYKNDLILIKDTETNCQQFFRFWSRTGKDNPKSFEKHKIELKPYEKAKFEKGEELEVLGKVPPSSNQFQKNMQIENLSIYKVKTDVLGNKHFIKKEGDKPKLKF

SEQ ID NO: 552 - protein, 1371 aa, Streptococcus oralis
  REGION 1..1371: note = Streptococcus oralis SK610
MENKNYSIGLDIGTNSVGWSVITDDYKVPSKKMKVLGNTDKRFIKKNLIGALLFDEGTTAEARRLKRTARRRYTRRKNRLRYLQEIFAEEMSKVDSSFFHRLDDSFLIPEDKRGSKYPIFATLAEEKEYHKQFPTIYHLRKQLADSKEKTDLRLIYLALAHMIKYRGHFLYEDTFDIKNNDIQKIFSEFISIYDNTFEGSSLSGQNAQVEAIFTDKISKSAKRERVLKLFPDEKSTGLFSEFLKLIVGNQADFKKHFDLGEKAPLQFSKDTYDEDLENLLGQIGDDFADLFLVAKKLYDAILLSGILTVTDPSTKAPLSASMIERYENHQKDLAVLKQFIKNNLPEKYDEVFSDQSKDGYAGYIDGKTTQEAFYKYIKNLLSKFEGTDYFLEKIEREDFLRKQRTFDNGSIPHQIHLQEMNAILRRQGEHYPFLKDNKEKIEKILTFRIPYYVGPLARGNRDFAWLTRNSDEAIRPWNFEEIVDKASSAEDFINKMTNYDLYLPEEKVLPKHSLLYETFAVYNELTKVKFIAEGLRDYQFLDSGQKKQIVTQLFKEKRKVTEKDIIQFLHNVDGYDGIELKGIEKQFNASLSTYHDLLKIIKDKEFMDDSKNEEILENIVHTLTIFEDREMIKQRLAQYDSLFDEKVIKALIRRHYTGWGKLSAKLIDGICDKQTGNTILDYLIDDGKNNRNFMQLINDDGLSFKEITQKAQVVGKTDDVKQVVQELPGSPAIKKGILQSIKIVDELVKVMGHTPESIVIEMARENQTTARGKKNSQQRYKRIEDALKNLASGLDSNILKEHPTNNIQLQNDRLFLYYLQNGRDMYTGKPLDINQLSSYDIDHIVPQAFIKDDSLDNRVLTSLKDNRGKSDNVPSIEVVQKRKAFWQQLLDSKLISERKFNNLTKAERGGLDERDKVGFIKRQLVETRQITKHVAQILDARFNKEVNEKDKKNRTVKIITLKSNLVSNFRKEFRLYKVREINDYHHAHDAYLNAVVAKAILKKYPKLEPEFVYGDYQKYDLKRYISRSRNPKEVEKATEKYFFYSNLLNFFKEEVHYADGTIVKRENIEYSKDTGEIAWNKEKDFATIKKVLSYPQVNIVKKREVQTGGFSKESILPKGNSDKLIPRKTKDILWETTKYGGFDSPVIAYSILLIADIEKGKAKKLKTVKTLVGITIMEKAAFEENPITFLENKGYHNVRKENILCLPKYSLFELENGRRRLLASAKELQKGNEIVLPVYLTTLLYHSKNVHKLDEPEHLEYIQKHRNEFKDLLNLVSEFSQKYVLADANLEKIQNLYADNEQADIEILANSFINLLTFTALGAPAAFKFFGKDIDRKRYTTVSEILNATLIHQSITGLYETRIDLSKLGED

SEQ ID NO: 553 - protein, 1140 aa, Streptococcus parasanguinis
  REGION 1..1140: note = Streptococcus parasanguinis F0449
MNGLVLGLDIGIASVGVGILKKDIGEIIHTNSRLFSAATADSNIERRGHRGGKRLTRRKKHRSIRLHDLFEDFGLLTDFSKVSINLNPYQLRVQGLDNQLTNEELFIALKNIVKRRGISYLDDASEDGGTVSSDYGKAVEENRKLLAEQTPGQIQLDRFEKYGQVRGDFNVVENGEKRRLINVFTTSAYSKEAERILRKQQEFNKKITDEFIEDYLTILTGKRKYYHGPGNEKSRTDYGRYTTKKDPEGKYITLDNIFGILIGKCTFYPDEYRASKASYTAQEFNLLNDLNNLTVPTETKKLSEEQKKTIIKYAKTAKTLGASTLLKYIAKLIGASVDQIHGYRIDPNKKPEMHTFETYRKMQSLETISVEELPRKVLDELAHILTLNTEREGIEEAINATLKDTFSQDQVLELVQFRKNNSSLFSKGWHSFSLKLMMELIPELYETSEEQMTILTRLGKQKSKETSKRTKYIDEKELTEEIYNPVVAKSVRQAIKIINEATKKYGIFDNIVIEMARENNEEDAKKEYIKRQKANLDEKNAAMEKAAFQYNGKKELPDNVFHGHKELATKIRLWHQQGEKCLYTGKNIPISDLIQNQYKYEIDHILPLSLSFDDSLSNKVLVLATANQEKGQRTPFQALDSMDDAWSYREFKSYVKDSKLLGNKKKEYLLTEEDISKIEVKQKFIERNLVDTRYSSRVVLNALQDFYKEHQFDTTISVVRGQFTSQLRRKWGLEKSRETYHHHAVDALIIAASSQLRLWKKQNNPLISYTEGQFVDQVTGEIISLSDDEYKELVFKAPYDHFVDTLKSKKFEDSILFSYQVDSKYNRKISDATIYATRKAKLDKENKEYTYTLGKIKDIYALGTKSPSKTGFYKFLDLYNKDKSQFLMFQKDRKTWDEVIEKIIEQYRPFKEYDENGKEVDFNPFEKYRIENGPIRKYSKKGNGPEIKSLKYYDNLLGKFVDITPSESKNPVALLSLNPWRTDVYYNTETSKYEFLGLKYADLCFEKGGAYGISEVKYNKIREKEGIGKESEFKFTLYKNDLILIKDTETNCQQIFRFWSRTGKDNPKSFEKHKIELKPYEKARFEKGEELEVLGKVPPSSNQLQKNMQIENLSIYKVKTDVLGNKHFIKKEGEEPKLKF

SEQ ID NO: 554 - protein, 1130 aa, Streptococcus pasteurianus
MTNGKILGLDIGIASVGVGIIEAKTGKVVHANSRLFSAANAENNAERRGFRGSRRLNRRKKHRVKRVRDLFEKYGIVTDFRNLNLNPYELRVKGLTEQLKNEELFAALRTISKRRGISYLDDAEDDSTGSTDYAKSIDENRRLLKNKTPGQIQLERLEKYGQLRGNFTVYDENGEAHRLINVFSTSDYEKEARKILETQADYNKKITAEFIDDYVEILTQKRKYYHGPGNEKSRTDYGRFRTDGTTLENIFGILIGKCNFYPDEYRASKASYTAQEYNFLNDLNNLKVSTETGKLSTEQKESLVEFAKNTATLGPAKLLKEIAKILDCKVDEIKGYREDDKGKPDLHTFEPYRKLKFNLESINIDDLSREVIDKLADILTLNTEREGIEDAIKRNLPNQFTEEQISEIIKVRKSQSTAFNKGWHSFSAKLMNELIPELYATSDEQMTILTRLEKFKVNKKSSKNTKTIDEKEVTDEIYNPVVAKSVRQTIKIINAAVKKYGDFDKIVIEMPRDKNADDEKKFIDKRNKENKKEKDDALKRAAYLYNSSDKLPDEVFHGNKQLETKIRLWYQQGERCLYSGKPISIQELVHNSNNFEIDHILPLSLSFDDSLANKVLVYAWTNQEKGQKTPYQVIDSMDAAWSFREMKDYVLKQKGLGKKKRDYLLTTENIDKIEVKKKFIERNLVDTRYASRVVLNSLQSALRELGKDTKVSVVRGQFTSQLRRKWKIDKSRETYHHHAVDALIIAASSQLKLWEKQDNPMFVDYGKNQVVDKQTGEILSVSDDEYKELVFQPPYQGFVNTISSKGFEDEILFSYQVDSKYNRKVSDATIYSTRKAKIGKDKKEETYVLGKIKDIYSQNGFDTFIKKYNKDKTQFLMYQKDSLTWENVIEVILRDYPTTKKSEDGKNDVKCNPFEEYRRENGLICKYSKKGKGTPIKSLKYYDKKLGNCIDITPEESRNKVILQSINPWRADVYFNPETLKYELMGLKYSDLSFEKGTGNYHISQEKYDAIKEKEGIGKKSEFKFTLYRNDLILIKDIASGEQEIYRFLSRTMPNVNHYVELKPYDKEKFDNVQELVEALGEADKVGRCIKGLNKPNISIYKVRTDVLGNKYFVKKKGDKPKLDFKNNKK

SEQ ID NO: 555 - protein, 1374 aa, Streptococcus pseudoporcinus
  REGION 1..1374: note = Streptococcus pseudoporcinus LQ 940-04
MKKRYSYSIGLDIGTNSVGWAVINEDYKVPAKKMTVFGNTDRKTIKKNLLGTVLFDSGETAQARRLKRTNRRRYTRRRYRLCQLQNIFATEMVKVDDTFFQRLSESFFYYQDKAFDKHPIFGNSKEERAYHKTYPTIYHLRKDLADRDQKADLRLIYLALSHIIKFRGHFLIEGKLNSENTDVQKLFIALVTVYNLLFEEEPIAGETCDAKALLTAKTSKSKRLESLISEFPGQKKNGLFGNLLALALGLRPNFKSNFGLSEDAKLQITKDTYEEELDNLLAEIGDHYADLFLAAKNLSDAILLSDILTLSDENTRAPLSASMIKRYEEHQEDLALLKKLVKEQMPEKYWEIFSNAKKNGYAGYIEGKVSQEDFYRYIKPILSRLKGGDEFLAKIDRDDFLRKQRTFDNGSIPHQIHLKELHAILRRQEKYYPFLAEQKEKIEQLLCFRIPYYVGPLAKGGNSSFAWLKRRSDEPITPWNFKDVVDEEASAQAFIEGMTNYDTYLPEEKVLPKHSPLYEMFTVYNELTKVKYIAENMTKPLYLSAEQKEAIIDHLFKQTRKVTVKDLKEKYFSQIEGLENVDVTGVEGAFNASLGTYNDLLKIIKDKAFLDDEANAEILEEIVLILTLFQDEKLIEKRLAKYANLFEKSVLKKLRKRHYRGWGRLSRQLIDGMKDKASGKTILDFLKADDFANRNFIQLINDSSLDFEKLIDDAQKKAIKRESLTEAVANLAGSPAIKKGILQSLKVVDEIVKVMGHNPDNIVIEMSRENQTTAQGLKNARQRLKKIKEVHKKTGSRILEDNSERITNLTLQDNRLYLYLLQDGKDMYTGQDLDINNLSQYDIDHIIPQSFIKDNSIDNLVLTTQKANRGKSDNVPSIEVVRDMKDRVWRRQLANGAISRQKFDHLTKAERGGLADSDKARFLRRQLVETRQITKHVAQLLDSRFNSKSNQNKKLARNVKIITLKSKIVSDFRKDFGLYKLREVNNYHHAHDAYLNAVVGTALLKKYPKLEAEFVYGDYKHFDLVKLISKSDPSLGKATAKVFFYSNIMNFFKEELSLADGTLMKRPVIETNTETGEVVWDKVKDFKTIRKVLSYPQVNIVKKTEIQSGAFSKESVLSKGNSDKLIERKKGWDPKKYGGFDSPNTAYSIFVVAKVAKRKAQKLKTVKEIVGITIMEQAEYEKDNIAFLEKKGYQDIQEKLLIKLPKYSLFELENGRRRLLASANEFQKGNELALSGKYMKFLYLASRYDKLSSKIESEQQKKLFVEQHLHYFDEILDIVVKHATCYIKAENNLKKIISLYKKKEAYSINEQALNMLNLFIFTSLGAPSTFVFFDETIDRKRYTTSSDVLNGILIQQSITGLYETRIDLSRFGGD

SEQ ID NO: 556 - protein, 1368 aa, Streptococcus pyogenes
  REGION 1..1368: note = Streptococcus pyogenes MGAS10270
MDKKYSIGLDIGTNSVGWAVITDDYKVPSKKFKVLGNTDRHSIKKNLIGALLFDSGETAEATRLKRTARRRYTRRKNRICYLQEIFSNEMAKVDDSFFHRLEESFLVEEDKKHERHPIFGNIVDEVAYHEKYPTIYHLRKKLVDSTDKADLRLIYLALAHMIKFRGHFLIEGDLNPDNSDVDKLFIQLVQTYNQLFEENPINASGVDAKAILSARLSKSRRLENLIAQLPGEKKNGLFGNLIALSLGLTPNFKSNFDLAEDAKLQLSKDTYDDDLDNLLAQIGDQYADLFLAAKNLSDAILLSDILRLNSEITKAPLSASMIKRYDEHHQDLTLLKALVRQQLPEKYKEIFFDQSKNGYAGYIDGGASQEEFYKFIKPILEKMDGTEELLAKLNREDLLRKQRTFDNGSIPHQIHLGELHAILRRQEDFYPFLKDNREKIEKILTFRIPYYVGPLARGNSRFAWMTRKSEETITPWNFEEVVDKGASAQSFIERMTNFDKNLPNEKVLPKHSLLYEYFTVYNELTKVKYVTEGMRKPAFLSGEQKKAIVDLLFKTNRKVTVKQLKEDYFKKIECFDSVEISGVEDRFNASLGTYHDLLKIIKDKDFLDNEENEDILEDIVLTLTLFEDREMIEERLKTYAHLFDDKVMKQLKRRRYTGWGRLSRKLINGIRDKQSGKTILDFLKSDGFANRNFMQLIHDDSLTFKEDIQKAQVSGQGDSLHEHIANLAGSPAIKKGILQTVKVVDELVKVMGRHKPENIVIEMARENQTTQKGQKNSRERMKRIEEGIKELGSQILKEHPVENTQLQNEKLYLYYLQNGRDMYVDQELDINRLSDYDVDHIVPQSFIKDDSIDNKVLTRSDKNRGKSDNVPSEEVVKKMKNYWRQLLNAKLITQRKFDNLTKAERGGLSELDKAGFIKRQLVETRQITKHVAQILDSRMNTKYDENDKLIREVKVITLKSKLVSDFRKDFQFYKVREINNYHHAHDAYLNAVVGTALIKKYPKLESEFVYGDYKVYDVRKMIAKSEQEIGKATAKYFFYSNIMNFFKTEITLANGEIRKRPLIETNGETGEIVWDKGRDFATVRKVLSMPQVNIVKKTEVQTGGFSKESILPKRNSDKLIARKKDWDPKKYGGFDSPTVAYSVLVVAKVEKGKSKKLKSVKELLGLTIMERSSFEKNPIDFLEAKGYKEVKKDLIIKLPKYSLFELENGRKRMLASAGELQKGNELALPSKYVNFLYLASHYEKLKGSPEDNEQKQLFVEQHKHYLDEIIEQISEFSKRVILADANLDKVLSAYNKHRDKPIREQAENIIHLFTLTNLGAPAAFKYFDTTIDRKRYTSTKEVLDATLIHQSITGLYETRIDLSQLGGD

SEQ ID NO: 557 - protein, 1371 aa, Streptococcus pyogenes
MDKKYSIGLDIGTNSVGWAVITDDYKVPSKKFKVLGNTDRHSIKKNLIGALLFDSGETAEATRLKRTARRRYTRRKNRICYLQEIFSNEMAKVDDSFFHRLEESFLVEEDKKHERHPIFGNIVDEVAYHEKYPTIYHLRKKLADSTDKADLRLIYLALAHMIKFRGHFLIEGDLNPDNSDVDKLFIQLVQTYNQLFEENPINASRVDAKAILSARLSKSRRLENLIAQLPGEKKNGLFGNLIALSLGLTPNFKSNFDLAEDAKLQLSKDTYDDDLDNLLAQIGDQYADLFLAAKNLSDATLLSDILRVNSEITKAPLSASMIKRYDEHHQDLTLLKALVRQQLPEKYKEIFFDQSKNGYAGYIDGGASQEEFYKFIKPILEKMDGTEELLAKLNREDLLRKQRTFDNGSIPHQIHLGELHAILRRQEDFYPFLKDNREKIEKILTFRIPYYVGPLARGNSRFAWMTRKSEETITPWNFEEVVDKGASAQSFIERMTNFDKNLPNEKVLPKHSLLYEYFTVYNELTKVKYVTEGMRKPAFLSGEQKKAIVDLLFKTNRKVTVKQLKEDYFKKIECFDSVEISGVEDRFNASLGTYHDLLKIIKDKDFLDNEENEDILEDIVLTLTLFEDKEMIEERLKTYAHLFDDKVMKQLKRRHYTGWGRLSRKLINGIRDKQSGKTILDFLKSDGFANRNFIQLIHDDSLTFKEAIQKAQVSGQGHSLHEQIANLAGSPAIKKGILQSVKVVDELVKVMGHKPENIVIEMARENQTTQKGQKNSRERMKRIEEGIKELGSQILKEHPVENTQLQNEKLYLYYLQNGRDMYVDQELDINRLSDYDVDHIVPQSFIKDDSIDNKVLTRSDKNRGKSDDVPSEEVVKKMKNYWRQLLNAKLITQRKFDNLTKAERGGLSELDKAGFIKRQLVETRQITKHVAQILDSRMNTKYDENDKLIREVKVITLKSKLVSDFRKDFQFYKVREINNYHHAHDAYLNAVVGTALIKKYPKLESEFVYGDYKVYDVRKMIAKSEQEIGKATAKRFFYSNIMNFFKTEITLANGEIRKRPLIETNEETGEIVWDKGRDFATVRKVLSMPQVNIVKKTEVQTGALTNESIYARGSFDKLISRKHRFESSKYGGFGSPTVTYSVLVVAKSKVQDGKVKKIKTGKELIGITLLDKLVFEKNPLKFIEDKGYGNVQIDKCIKLPKYSLFEFENGTRRMLASVMANNNSRGDLQKANEMFLPAKLVTLLYHAHKIESSKELEHEAYILDHYNDLYQLLSYIERFASLYVDVEKNISKVKELFSNIESYSISEICSSVINLLTLTASGAPADFKFLGTTIPRKRYGSPQSILSSTLIHQSITGLYETRIDLSQLGSD

SEQ ID NO: 558 - protein, 1367 aa, Streptococcus pyogenes
MDKKYSIGLDIGTNSVGWAVITDDYKVPSKKFKVLGNTDRHSIKKNLIGALLFGSGETAEATRLKRTARRRYTRRKNRICYLQEIFSNEMAKVDDSFFHRLEESFLVEEDKKHERHPIFGNIVDEVAYHEKYPTIYHLRKKLADSTDKADLRLIYLALAHMIKFRGHFLIEGDLNPDNSDVDKLFIQLVQIYNQLFEENPINASRVDAKAILSARLSKSRRLENLIAQLPGEKRNGLFGNLIALSLGLTPNFKSNFDLAEDAKLQLSKDTYDDDLDNLLAQIGDQYADLFLAAKNLSDAILLSDILRVNSEITKAPLSASMIKRYDEHHQDLTLLKALVRQQLPEKYKEIFFDQSKNGYAGYIDGGASQEEFYKFIKPILEKMDGTEELLVKLNREDLLRKQRTFDNGSIPHQIHLGELHAILRRQEDFYPFLKDNREKIEKILTFRIPYYVGPLARGNSRFAWMTRKSEETITPWNFEEVVDKGASAQSFIERMTNFDKNLPNEKVLPKHSLLYEYFTVYNELTKVKYVTEGMRKPAFLSGEQKKAIVDLLFKTNRKVTVKQLKEDYFKKIECFDSVEISGVEDRFNASLGAYHDLLKIIKDKDFLDNEENEDILEDIVLTLTLFEDRGMIEERLKTYAHLFDDKVMKQLKRRRYTGWGRLSRKLINGIRDKQSGKTILDFLKSDGFANRNFMQLIHDDSLTFKEDIQKAQVSGQGHSLHEQIANLAGSPAIKKGILQTVKIVDELVKVMGHKPENIVIEMARENQTTQKGQKNSRERMKRIEEGIKELGSQILKEHPVENTQLQNEKLYLYYLQNGRDMYVDQELDINRLSDYDVDHIVPQSFIKDDSIDNKVLTRSDKNRGKSDNVPSEEVVKKMKNYWRQLLNAKLITQRKFDNLTKAERGGLSELDKAGFIKRQLVETRQITKHVAQILDSRMNTKYDENDKLIREVKVITLKSKLVSDFRKDFQFYKVREINNYHHAHDAYLNAVVGTALIKKYPKLESEFVYGDYKVYDVRKMIAKSEQEIGKATAKYFFYSNIMNFFKTEITLANGEIRKRPLIETNGETGEIVWDKGRDFATVRKVLSMPQVNIVKKTEVQTGGFSKESILPKRNSDKLIARKKDWDPKKYGGFDSPTVAYSVLVVAKVEKGKSKKLKSVKELLGITIMERSSFEKNPIDFLEAKGYKEVKKDLIIKLPKYSLFELENGRKRMLASAGELQKGNELALPSKYVNFLYLASHYEKLKGSPEDNEQKQLFVEQHKHYLDEIIEQISEFSKRVILADANLDKVLSAYNKHRDKPIREQAENIIHLFTLTNLGAPAAFKYFDTTIDRKRYTSTKEVLDATLIHQSITGLYETRIDLSQLGGD

SEQ ID NO: 559 - protein, 1368 aa, Streptococcus sp.
MDKKYSIGLDIGTNSVGWAVITDDYKVPSKKFKVLGNTDRHSIKKNLIGALLFDSGEIAEATRLKRTARRRYTRRKNRICYLQEIFSNEMAKVDDSFFHRLEESFLVEEDKKHERHPIFGNIVDEVAYHEKYPTIYHLRKKLVDSTDKADLRLIYLALAHMIKFRGHFLIEGDLNPDNSDVDKLFIQLVQTYNQLFEENPINASGVDAKAILSARLSKSRRLENLIAQLPGEKKNGLFGNLIALSLGLTPNFKSNFDLAEDAKLQLSKDTYDDDLDNLLAQIGDQYADLFLAAKNLSDAILLSDILRLNSEITKAPLSASMIKRYDEHHQDLTLLKALVRQQLPEKYKEIFFDQSKNGYAGYIDGGASQEEFYKFIKPILEKMDGTEELLAKLNREDLLRKQRTFDNGSIPHQIHLGELHAILRRQEDFYPFLKDNREKIEKILTFRIPYYVGPLARGNSRFAWMTRKSEETITPWNFEEVVDKGASAQSFIERMTNFDKNLPNEKVLPKHSLLYEYFTVYNELTKVKYVTEGMRKPAFLSGEQKKAIVDLLFKTNRKVTVKQLKEDYFKKIECFDSVEISGVEDRFNASLGTYHDLLKIIKDKDFLDNEENEDILEDIVLTLTLFEDREMIEERLKTYAHLFDDKVMKQLKRRRYTGWGRLSRKLINGIRDKQSGKTILDFLKSDGFANRNFMQLIHDDSLTFKEDIQKAQVSGQGDSLHEHIANLAGSPAIKKGILQTVKVVDELVKVMGRHKPENIVIEMARENQTTQKGQKNSRERMKRIEEGIKELGSQILKEHPVENTQLQNEKLYLYYLQNGRDMYVDQELDINRLSDYDVDHIVPQSFIKDDSIDNKVLTRSDKNRGKSDNVPSEEVVKKMKNYWRQLLNAKLITQRKFDNLTKAERGGLSELDKAGFIKRQLVETRQITKHVAQILDSRMNTKYDENDKLIREVKVITLKSKLVSDFRKDFQFYKVREINNYHHAHDAYLNAVVGTALIKKYPKLESEFVYGDYKVYDVRKMLAKSEQEIGKATAKYFFYSNIMNFFKTEITLANGEIRKRPLIETNGETGEIVWDKGRDFATVRKVLSMPQVNIVKKTEVQTGGFSKESILPKRNSDKLIARKKDWDPKKYGGFDSPTVAYSVLVVAKVEKGKSKKLKSVKELLGITIMERSSFEKNPIDFLEAKGYKEVRKDLIIKLPKYSLFELENGRKRMLASAGELQKGNELALPSKYVNFLYLASHYEKLKGSPEDNEQKQLFVEQHKHYLDEIIEQISEFSKRVILADANLDKVLSAYNKHRDKPIREQAENIIHLFTLTNLGAPTAFKYFDTTIDRKRYTSTKEVLDATFIHQSITGLYETRIDLSQLGGD

SEQ ID NO: 560 - protein, 1368 aa, Streptococcus pyogenes
MDKKYSIGLDIGTNSVGWAVITDDYKVPSKKLKGLGNTDRHGIKKNLIGALLFDSGETAEATRLKRTARRRYTRRKNRICYLQEIFSNEMAKVDDSFFHRLEESFLVEEDKKHERHPIFGNIVDEVAYHEKYPTIYHLRKKLADSTDKVDLRLIYLALAHMIKFRGHFLIEGDLNPDNSDVDKLFIQLVQTYNQLFEENPINASRVDAKAILSARLSKSRRLENLIAQLPGEKKNGLFGNLIALSLGLTPNFKSNFDLAEDAKLQLSKDTYDDDLDNLLAQIGDQYADLFLAAKNLSDATLLSDILRVNSEITKAPLSASMIKRYDEHHQDLTLLKALVRQQLPEKYKEIFFDQSKNGYAGYIDGGASQEEFYKFIKPILEKMDGTEELLAKLNREDLLRKQRTFDNGSIPYQIHLGELHAILRRQEDFYPFLKDNREKIEKILTFRIPYYVGPLARGNSRFAWMTRKSEETITPWNFEEVVDKGASAQSFIERMTNFDKNLPNEKVLPKHSLLYEYFTVYNELTKVKYVTEGMRKPAFLSGEQKKAIVDLLFKTNRKVTVKQLKEDYFKKIECFDSVEISGVEDRFNASLGTYHDLLKIIKDKDFLDNEENEDILEDIVLTLTLFEDREMIEERLKTYAHLFDDKVMKQLKRRRYTGWGRLSRKLINGIRDKQSGKTILDFLKSDGFANRNFMQLIHDDSLTFKEDIQKAQVSGQGDSLHEHIANLAGSPAIKKGILQTVKVVDELVKVMGRHKPENIVIEMARENQTTQKGQKNSRERMKRIEEGIKELGSDILKEYPVENTQLQNEKLYLYYLQNGRDMYVDQELDINRLSDYDVDHIVPQSFLKDDSIDNKVLTRSDKNRGKSDNVPSEEVVKKMKNYWRQLLNAKLITQRKFDNLTKAERGGLSELDKVGFIKRQLVETRQITKHVAQILDSRMNTKYDENDKLIREVRVITLKSKLVSDFRKDFQFYKVREINNYHHAHDAYLNAVVGTALIKKYPKLESEFVYGDYKVYDVRKMIAKSEQEIGKATAKYFFYSNIMNFFKTEITLANGEIRKRPLIETNGETGEIVWDKGRDFATVRKVLSMPQVNIVKKTEVQTGGFSKESILPKRNSDKLIARKKDWDPKKYGGFDSPTVAYSVLVVAKVEKGKSKKLKSVKELLGITIMERSSFEKDPIDFLEAKGYKEVRKDLIIKLPKYSLFELENGRKRMLASAGELQKGNELALPSKYVNFLYLASHYEKLKGSPEDNEQKQLFVEQHKHYLDEIIEQISEFSKRVILADANLDKVLSAYNKHRDKPIREQAENIIHLFTLTNLGAPAAFKYFDTTIDRKRYTSTKEVLDATLIHQSITGLYETRIDLSQLGGD

SEQ ID NO: 561 - protein, 1368 aa, Streptococcus pyogenes
MDKKYSIGLDIGTNSVGWAVITDDYKVPSKKFKVLGNTDRHSIKKNLIGALLFDSGETAEATRLKRTARRRYTRRKNRICYLQEIFSNEMAKVDDSFFHRLEESFLVEEDKKHERHPIFGNIVDEVAYHEKYPTIYHLRKKLVDSTDKADLRLIYLALAHMIKFRGHFLIEGDLNPDNSDVDKLFIQLVQTYNQLFEENPINASGVDAKAILSARLSKSRRLENLIAQLPGEKKNGLFGNLIALSLGLTPNFKSNFDLAEDAKLQLSKDTYDDDLDNLLAQIGDQYADLFLAAKNLSDAILLSDILRVNTEITKAPLSASMIKRYDEHHQDLTLLKALVRQQLPEKYKEIFFDQSKNGYAGYIDGGASQEEFYKFIKPILEKMDGTEELLVKLNREDLLRKQRTFDNGSIPHQIHLGELHAILRRQEDFYPFLKDNREKIEKILTFRIPYYVGPLARGNSRFAWMTRKSEETITPWNFEEVVDKGASAQSFIERMTNFDKNLPNEKVLPKHSLLYEYFTVYNELTKVKYVTEGMRKPAFLSGEQKKAIVDLLFKTNRKVTVKQLKEDYFKKIECFDSVEISGVEDRFNASLGTYHDLLKIIKDKDFLDNEENEDILEDIVLTLTLFEDREMIEERLKTYAHLFDDKVMKQLKRRRYTGWGRLSRKLINGIRDKQSGKTILDFLKSDGFANRNFMQLIHDDSLTFKEDIQKAQVSGQGDSLHEHIANLAGSPAIKKGILQTVKVVDELVKVMGRHKPENIVIEMARENQTTQKGQKNSRERMKRIEEGIKELGSQILKEHPVENTQLQNEKLYLYYLQNGRDMYVDQELDINRLSDYDVDHIVPQSFLKDDSIDNKVLTRSDKNRGKSDNVPSEEVVKKMKNYWRQLLNAKLITQRKFDNLTKAERGGLSELDKAGFIKRQLVETRQITKHVAQILDSRMNTKYDENDKLIREVKVITLKSKLVSDFRKDFQFYKVREINNYHHAHDAYLNAVVGTALIKKYPKLESEFVYGDYKVYDVRKMIAKSEQEIGKATAKYFFYSNIMNFFKTEITLANGEIRKRPLIETNGETGEIVWDKGRDFATVRKVLSMPQVNIVKKTEVQTGGFSKESILPKRNSDKLIARKKDWDPKKYGGFDSPTVAYSVLVVAKVEKGKSKKLKSVKELLGITIMERSSFEKNPIDFLEAKGYKEVKKDLIIKLPKYSLFELENGRKRMLASAGELQKGNELALPSKYVNFLYLASHYEKLKGSPEDNEQKQLFVEQHKHYLDEIIEQISEFSKRVILADANLDKVLSAYNKHRDKPIREQAENIIHLFTLTNLGAPAAFKYFDTTIDRKRYTSTKEVLDATLIHQSITGLYETRIDLSQLGGD

SEQ ID NO: 562 - protein, 1368 aa, Streptococcus pyogenes
MDKKYSIGLDIGTNSVGWAVITDDYKVPSKKFKVLGNTDRHSIKKNLIGALLFDSGETAEATRLKRTARRRYTRRKNRICYLQEIFSNEMAKVDDSFFHRLEESFLVEEDKKHERHPIFGNIVDEVAYHEKYPTIYHLRKKLVDSTDKADLRLIYLALAHMIKFRGHFLIEGDLNPDNSDVDKLFIQLVQTYNQLFEENPINASGVDAKAILSARLSKSRRLENLIAQLPGEKKNGLFGNLIALSLGLTPNFKSNFDLAEDAKLQLSKDTYDDDLDNLLAQIGDQYADLFLAAKNLSDAILLSDILRLNSEITKAPLSASMIKRYDEHHQDLTLLKALVRQQLPEKYKEIFFDQSKNGYAGYIDGGASQEEFYKFIKPILEKMDGTEELLAKLNREDLLRKQRTFDNGSIPHQIHLGELHAILRRQEDFYPFLKDNREKIEKILTFRIPYYVGPLARGNSRFAWMTRKSEETITPWNFEEVVDKGASAQSFIERMTNFDKNLPNEKVLPKHSLLYEYFTVYNELTKVKYVTEGMRKPAFLSGEQKKAIVDLLFKTNRKVTVKQLKEDYFKKIECFDSVEISGVEDRFNASLGTYHDLLKIIKDKDFLDNEENEDILEDIVLTLTLFEDREMIEERLKTYAHLFDDKVMKQLKRRRYTGWGRLSRKLINGIRDKQSGKTILDFLKSDGFANRNFMQLIHDDSLTFKEDIQKAQVSGQGDSLHEHIANLAGSPAIKKGILQTVKVVDELVKVMGRHKPENIVIEMARENQTTQKGQKNSRERMKRIEEGIKELGSQILKEHPVENTQLQNEKLYLYYLQNGRDMYVDQELDINRLSDYDVDHIVPQSFIKDDSIDNKVLTRSDKNRGKSNNVPSEEVVKKMKNYWRQLLNAKLITQRKFDNLTKAERGGLSELDKAGFIKRQLVETRQITKHVAQILDSRMNTKYDENDKLIREVKVITLKSKLVSDFRKDFQFYKVREINNYHHAHDAYLNAVVGTALIKKYPKLESEFVYGDYKVYDVRKMIAKSEQEIGKATAKYFFYSNIMNFFKTEITLANGEIRKRPLIETNGETGEIVWDKGRDFATVRKVLSMPQVNIVKKTEVQTGGFSKESILPKRNSDKLIARKKDWDPKKYGGFDSPTVAYSVLVVAKVEKGKSKKLKSVKELLGITIMERSSFEKNPIDFLEAKGYKEVRKDLIVKLPKYSLFELENGRKRMLASAGELQKGNELALPSKYVNFLYLASHYEKLKGSPEDNEQKQLFVEQHKHYLDEIIEQISEFSKRVILADANLDKVLSAYNKHRDKPIREQAENIIHLFTLTNLGAPAAFKYFDTTIDRKRYTSTKEVLDATFIHQSITGLYETRIDLSQLGGD

SEQ ID NO: 563 - protein, 1368 aa, Streptococcus pyogenes
MDKKYSIGLDIGTNSVGWAVITDDYKVPSKKFKVLGNTDRHSIKKNLIGALLFDSGEIAEATRLKRTARRRYTRRKNRICYLQEIFSNEMAKVDDSFFHRLEESFLVEEDKKHERHPIFGNIVDEVAYHEKYPTIYHLRKKLVDSTDKADLRLIYLALAHMIKFRGHFLIEGDLNPDNSDVDKLFIQLVQTYNQLFEENPINASGVDAKAILSARLSKSRRLENLIAQLPGEKKNGLFGNLIALSLGLTPNFKSNFDLAEDAKLQLSKDTYDDDLDNLLAQIGDQYADLFLAAKNLSDAILLSDILRLNSEITKAPLSASMIKRYDEHHQDLTLLKALVRQQLPEKYKEIFFDQSKNGYAGYIDGGASQEEFYKFIKPILEKMDGTEELLAKLNREDLLRKQRTFDNGSIPHQIHLGELHAILRRQEDFYPFLKDNREKIEKILTFRIPYYVGPLARGNSRFAWMTRKSEETITPWNFEEVVDKGASAQSFIERMTNFDKNLPNEKVLPKHSLLYEYFTVYNELTKVKYVTEGMRKPAFLSGEQKKAIVDLLFKTNRKVTVKQLKEDYFKKIECFDSVEISGVEDRFNASLGTYHDLLKIIKDKDFLDNEENEDILEDIVLTLTLFEDREMIEERLKTYAHLFDDKVMKQLKRRRYTVWGRLSRKLINGIRDKQSGKTILDFLKSDGFANRNFMQLIHDDSLTFKEDIQKAQVSGQGDSLHEHIANLAGSPAIKKGILQTVKVVDELVKVMGRHKPENIVIEMARENQTTQKGQKNSRERMKRIEEGIKELGSQILKEHPVENTQLQNEKLYLYYLQNGRDMYVDQELDINRLSDYDVDHIVPQSFIKDDSIDNKVLTRSDKNRGKSDNVPSEEVVKKMKNYWRQLLNAKLITQRKFDNLTKAERGGLSELDKAGFIKRQLVETRQITKHVAQILDSRMNTKYDENDKLIREVKVITLKSKLVSDFRKDFQFYKVREINNYHHAHDAYLNAVVGTALIKKYPKLESEFVYGDYKVYDVRKMLAKSEQEIGKATAKYFFYSNIMNFFKTEITLANGEIRKRPLIETNGETGEIVWDKGRDFATVRKVLSMPQVNIVKKTEVQTGGFSKESILPKRNSDKLIARKKDWDPKKYGGFDSPTVAYSVLVVAKVEKGKSKKLKSVKELLGITIMERSSFEKNPIDFLEAKGYKEVRKDLIIKLPKYSLFELENGRKRMLASAGELQKGNELALPSKYVNFLYLASHYEKLKGSPEDNEQKQLFVEQHKHYLDEIIEQISEFSKRVILADANLDKVLSAYNKHRDKPIREQAENIIHLFTLTNLGAPTAFKYFDTTIDRKRYTSTKEVLDATFIHQSITGLYETRIDLSQLGGD

SEQ ID NO: 564 - protein, 1368 aa, Streptococcus pyogenes
MDKKYSIGLDIGTNSVGWAVITDDYKVPSKKFKVLGNTDRHSIKKNLIGALLFDSGETAEATRLKRTARRRYTRRKNRICYLQEIFSNEIAKVDDSFFHRLEESFLVEEDKKHERHPIFGNIVDEVAYHEKYPTIYHLRKKLADSTDKADLRLIYLALAHMIKFRGHFLIEGDLNPDNSDVDKLFIQLVQTYNQLFEENPINASRVDAKAILSARLSKSRRLENLIAQLPGEKRNGLFGNLIALSLGLTPNFKSNFDLAEDAKLQLSKDTYDDDLDNLLAQIGDQYADLFLAAKNLSDAILLSDILRVNTEITKAPLSASMIKRYDEHHQDLTLLKALVRQQLPEKYKEIFFDQSKNGYAGYIDGGASQEEFYKFIKPILEKMDGTEELLAKLNREDLLRKQRTFDNGSIPHQIHLGELHAILRRQEDFYPFLKDNREKIEKILTFRIPYYVGPLARGNSRFAWMTRKSEETITPWNFEEVVDKGASAQSFIERMTNFDKNLPNEKVLPKHSLLYEYFTVYNELTKVKYVTEGMRKPAFLSGEQKKAIVDLLFKTNRKVTVKQLKEDYFKKIECFDSVEISGVEDRFNASLGTYHDLLKIIKDKDFLDNEENEDILEDIVLTLTLFEDREMIEERLKTYAHLFDDKVMKQLKRRRYTGWGRLSRKLINGIRDKQSGKTILDFLKSDGFANRNFMQLIHDDSLTFKEDLQKAQVSGQGDSLHEHIANLAGSPAIKKGILQTVKVVDELVKVMGRHKPENIVIEMARENQTTQKGQKNSRERMKRIEEGIKELGSDILKEYPVETTQLQNEKLYLYYLQNGRDMYVDQELDINRLSDYDVDHIVPQSFLKDDSIDNKVLTRSDKNRGKSDNVPSEEVVKKMKNYWKQLLNAKLITQRKFDNLTKAERGGLSELDKAGFIKRQLVETRQITKHVAQILDSRMNTKYDENDKLIREVRVITLKSKLVSDFRKDFQFYKVREINNYHHAHDAYLNAVVGTALIKKYPKLESEFVYGDYKVYDIRKMIAKSEQEIGKATAKYFFYSNIMNFFKTEITLANGEIRKRPLIETNGETGEIVWDKGRDFATVRKVLSMPQVNIVKKTEVQTGGFSKESILPKRNSDKLIARKKDWDPKKYGGFDSPTVAYSVLVVAKVEKGKSKKLKSVKELVGITIMERSSFEKDPVDFLEAKGYKEVRKDLIIKLPKYSLFELENGRKRMLASAGELQKGNELALPSKYVNFLYLASHYEKLKGSPEDNEQKQLFVEQHKHYLDEIIEQISEFSKRVILADANLDKVLSAYNKHRDKPIREQAENIIHLFTLTNLGAPAAFKCFDTTIGRNRYKSIKEVLDATLIHQSITGLYETRIDLSQLGGD

SEQ ID NO: 565 - protein, 1368 aa, Streptococcus pyogenes [sequence omitted]

SEQ ID NO: 566 - protein, 1368 aa, Streptococcus pyogenes; identical to SEQ ID NO: 560

SEQ ID NO: 567 - protein, 1370 aa, Streptococcus ratti
  REGION 1..1370: note = Streptococcus ratti FA-1 = DSM 20564
MKKPYSIGLDIGTNSVGWAVITDDYKVPAKKMKVLGNTDKNYIKKNLLGALLFDSGNTAEDRRLKRTARRRYTRRRNRLLYLQDIFSDEMNKVDESFFHRLEDSFLVSEDKRGDHHPIFGNVVDEVKYHEQFPTIYHLRKYLADTPEKADLRLVYLALAHMIKFRGHFLIDDPKLDVKNTDSQELFSQFLTAYDVTQEDSHLADVKINISDIITEKMNKSRKVEALLFHFPSQKKNSFFGNLVSLVFGLLPNFKTNFNLAEDAKLQLSKDSYDEDLENLLGQIGDEYTDVFVAARKLYDSILLSGILTVNDLSTKAILSASMVRRYEEHNKDLAKLKAFVKANFTHDVFKEVFSDASKNGYAGYIEGKTSQEDFYKYVKNLIGKVDGSADFIEKIDREDFLRKQRTFDNGSIPHQVHLAEMKAILRRQGEYYPFLKEHAEKIQQILTFRIPYYVGPLDRHGHSDFAWASFNSEEKVTPWNFEEIIDKNKSAQAFIERMTNQDLYLPNEKVLPKHSPLYEKYTVYNELTKIKYVTETGTAKFFDANLKQEIFDGLFKKERKVTKRKLLTFLEKNFDEFRIVDIQGLDKETETFNASYGIYQDLLKIIKDKAFMDDSENADILEDIVLTLTLFEDREMIKQRLAKYADLFDKKVIDNLARRRYTGWGRLSAKLLNGIRDKRSRKTIMDYLVDDGRSNRNLMQLITDDNLTFKDEIAKAQYSDNSDDLHQVVQDLAGSPAIKKGILQSVKIVDELVKVMGYEPEQIVVEMARENQTTAKGRRNSQQRYKRLEEAIKNLDRDLNYKILKEHPTDNQALQNDRLFLYYLQNGRDMYTGESLDINRLSDYDIDHIIPQAFIKDNSIDNRVLVSSAKNRGKSDDVPSEDVVNRMRPFWNKLLNCGLISQRKYSNLTKKELTPNDKAGFIKRQLVETRQITKHVARILDEHFNKEFDEDKKRIRKVKVVTLKSNLVSNFRKEFELYKVREINDYHHAHDAYLNAVVAKALLMKYPKLEPEFVYGEYPKYNSYRERKTATQRMFFYSNIMNMFKSKVKLADERIIERPMIEVNDETGEIAWDKTKHIATVKKVLSYPQINIVKKVEEQTGGLTNETIYPRGSFDKLLNRKNTLEASKYGGFGSPTVAYCVLVVADSKNENGKVKKLKLGSELLGITILEKNDFENNSLDFLSRKGYQGVQEKKIIKLPKYSLFEFQDGSRRMLSSVMANDNKRGDLQKANEMILPAYLVKLLYHAKHINSVGEPAHKNYINEHCSEFQDLLNYIRQFADKFVDVDKNLSKIRSLSKSMAEYSVSEICSSFVNLLTLTALGAPADFKFFGTTIPRKRYGSPQSILSATLIHQSITGLYETRIDLSKLGED

SEQ ID NO: 568 - protein, 1127 aa, Streptococcus salivarius
MSDLVLGLDIGIGSVGVGILNKVTGEIIHKNSRIFPAAQAENNVERRINRQGRRLTRRKKHRRVRLNHLFEESGLITDFTNVSINLNPYQLRVKGLTDELSNEELFIALKNMVKHRGISYLDDASDDGNSSVGDYAQIVKENSKQLETKTPGQIQLERYQKYGQLRGDFTVEEDGKKHRLINVFPTSAYRAEALRILQTQQEFNPQITDEFINSYLQILTGKRKYYHGPGNEKSRTDYGRYTTKKDSEDEYITLDNIFGILIGKCTFYPEEYRAAKASYTAQEFNLLNDLNNLTVPTETKKLSEEQKNQIITNVKNEKAMGPAKLFKYIAKLLSCDVADIKGYRIDKSDKAEIHTFEAYRKMKTLATIDIEQMERENLDKLAYVLTLNTEKEGIQEALEHEFADGTFSQEQIDELVQFRKANSSIFGKGWHSFSVKLMMELIPELYATSEEQMTILTRLGKQKTTSSSNKTKYIDEKQLTEEIYNPVAAKSVRQAIKIVNAAIKEYGDFDNIVIEMARETNEDDEKKAIQKIQKANKDEKDAAMLKAANQYNGKAELPHSVFHGHKQLATKIRLWHQQGERCLYTGKTISIHDLINNSNQFEIDHILPLSITFDDSLANKVLVYATANQEKGQRTPYQALDSMDDAWSFRELKAFVRDSKALSNKKKEYLLTEEDISKFDVRKKFIERNLVDTRYASRVVLNALQEHFRVHKTDTKVSVVRGQFTSQLRRHWGIEKTRDTYHHHAVDALIIAASSQLNLWKKQKNTLVSYSEDQLLDIETGELISDDEYKESVFKAPYQHFVDTLKSKEFEDSILFSYQVDSKFNRKISDATIYATRQAKVGKDKKDETYVLGKIKDIYSQTGYDAFIKIYKKDKSKFLMYRHDPQTFEKVIEPILENYPNKELNEKGKEVPCNPFLKYKEDHGYIRKYSKKGNGPEIKSLKYYDSKLGNHIDITPKNSNNKVVLQSVSPWRADVYFNKTTGKYEILGLKYADLKFEKGTGTYKISEEKYNDIKIKEGVDSDSEFKFTLYKNDLLLIKDTETKEQQLFRFLSRTMPNVKHYVELKPYDKQKFDDNEELIKILGIVAKGGQCKKGVSKPNISIYKIRTDVLGNQHIIKNEGDKPKLDF

SEQ ID NO: 569 - protein, 1385 aa, Streptococcus salivarius
  REGION 1..1385: note = Streptococcus salivarius K12
MTKPYSIGLDIGTNSVGWAVITDDYKVPSKKMKVLGNTSKKYIKKNLLGALLFDSGITAEGRRLKRTARRRYTRRRNRILYLQEIFSTEMATLDDAFFQRLDDSFLVPDDKRDSKYPIFGNLVEEKVYHDEFPTIYHLRKHLADSSKKADLRLVYLALAHMIKYRGHFLIEGDFNSKNNDLQKNFQDFLDTYNAIFESDLSLENSKQLEEIVKDKISKSAKKDRILKLFPGEKNSGIFSEFLKLIVGNQADFRKYFNLDEKTSLQFSKESYDEDLETLLGHIGDDYSDVFLKAKKLYDAILLSGILTVTDNGTEAPLSSAMIMRYKEHEEDLALLKAYIRNISLETYNEVFKDNTKNGYAGYIDGKTSQEDFYVYLKRLLAGLEGADYFLEKIDREDFLRKQRTFDNGSIPYQIYLQEMRAILDKQAKFYPFLAKNKERIEKILTFRIPYYVGPLARGNSDFAWSIRKRNEKITPWNFEDVIDKESSAEAFINRMTSFDLYLPEEKVLPKHSLLYENFTVYNELTKVRFIAEGMRDYQFLDSKQKKDIVRLYFKGKRKVTDKDIIEYLHAIDGYDGIELKGIEKQFNSSLSTYHDLLNIINDKEFLDDSSNETIIEEIIHTLTMFEDREMIKQRLSKFDNIFDKSVLKKLSRRHYTGWGKLSAKLINGIRDEKSGNTILDYLIDDGVSNRNFMQLIHDDALSFKKKIKKAQIIGDKDNIKQVVKSLPGSPAIKKGILQSIKIVDELVKVMGREPESIVVEMARENQYTNQGKSNSQQRLKRLEESLKGLGSKILKENVPTRLSKIDNNALQNDRLYLYYLQNGKDMYTGEELDIDRLSNYDIDHIIPQAFLKDDSIDNKVLVSSASNRGKSDDVPSLEVVKKRKTLWYQLLKSKLISQRKFDNLTKAERGGLSQEEKAGFIQRQLVETRQITKHVARLLDERFNNKKDENNRTLRTVKIITLKSSLVSQFRKDFELYKVREINDFHHAHDAYLNAVVASALLKKYPKLEPEFVYGDYPKYNSFRERKSATEKVYFYSNIMNIFKKSIPLADGTVIDRPLIEVNEETGESVWNKVADLNTVRKVLSYSQVNIVKKVEEQNHGLDRGKPKGLFNANLSSKPKPNSKENLVGAKEYLDPKKYGGYAGISNSFAILVKGTIEKGAKKKITNVLEFQGISILDRIYYRKDKLNFLLEKGYKDIELIIELPKYSLFELSDGSRRMLASILSTNNKRGEIHKGNQIFISQKFVKLLYHAKRISSTFNENHRKYVENHKKEFEELFYYILEFNENYVGAKKNGELLKSAFQSWQNHSIDELCSSFIGPTGSERKGLFELTSRGGAADFEFLGVKIPRYRDYTPSSLLKDATLIHQSVTGLYETRIDLGKLGED

SEQ ID NO: 570 - protein, 1135 aa, Streptococcus salivarius
  REGION 1..1135: note = Streptococcus salivarius PS4
MSDLVLGLDIGIGSVGVGILNKVTGEIIHKNSRIFPAAQAENNLERRTNRQGRRLTRRKKHRRVRLNHLFEESGLITDFTKVSINLNPYQLRVKGLTAELSNEELFIALKNMVKHRGISYLDDASDDGNSSVGDYAQIVKENSKQLETKTPGQIQLERYQKYGQLRGDFTVEEDGRKHRLINVFPTSAYHAEALRILQTQQEFNPQITDEFINSYLEILTGKRKYYHGPGNEKSRTDYGKYTTKKDAQGQYITLNNIFGILIGKCTFYPEEYRAAKASYTAQEFNLLNDLNNLTVPTETKKLSEEQKYQIITYVKNEKAMGPAKLFKYIAKLLACDIADIKGYRIDKSDKAEIHTFEAYRKMKTLETIDIEQIEREKLDKLAYVLTLNTEREGIQEALDHEFADGTFSQEQVDELVQFRKANSSIFGKGWHSFSVKLMMELIPELYATSEEQMTILTRLGKQKTTSSSNKTKYIDEKQLTEEIYNPVVAKSVRQAIKIVNAAIKKYGDFDNIVIEMARETNEDDEKKAIQKIQKANKAEKDAAMRKAANQYNGKAELPHSVFHGHKQLATKIRLWHQQGERCLYTGKTISIHDLINNPNQFEIDHILPLSITFDDSLANKVLVYATANQEKGQRTPYQALDSMDDAWSFRELKAFVRESKALSNKKKEYLLTEEDISKFDVRKKFIERNLVDTRYASRVVLNALQEHFKAHKIDTKVSVVRGQFTSQLRRHWGIDKTRDTYHHHAVDALIIAASSQLNLWKKQKNTLVSYSEDQLLDIETGELISDDEYKESVFKAPYQHFVDTLKSKEFEDSILFSYQVDSKFNRKISDATIYATRQAKVGKDKKDETYVLGKIKDIYALGTKTPSKTGFYKFLDLYNKDKSQFLVYQKDRKTWDEVIEKIMEQYRPFKESDKNGKEVDFNPFEKYRIENGPIRKYSRKGNGPEIKSLKYYASKLGNHIDITPKDSNNKVVLQSVSPWRADVYFNKTTGSYEILGLKYADLQFEKGTGTYRISEEKYNDIKKKEGVDSDSEFKFTLYKNDLLLIKDTETKEQRLFRFLSRSMPNKKHYVELKPYSKDKFEKNESLIEILGSADKSGRCIKGLAKSNLSIFKVRTDVLGNQHIIKNEGDKPKLDF

SEQ ID NO: 571 - protein, 1377 aa, Streptococcus sanguinis
  REGION 1..1377: note = Streptococcus sanguinis SK115
MKKPYSIGLDIGTNSVGWAVITDDYKVPSKKMKVLGNTDKHFIKKNLIGALLFDEGTTAEDRRLKRTSRRRYTRRKNRLRYLQEIFSEEISKLDSSFFHRLDDSFLVPEDKRGSKYPIFATLEEEKEYHKKFPTIYHLRKHLADSKEKTDLRLIYLALAHMIKYRGHFLYEESFDIKNNDIQKIFNEFISIYDNTFEGSSLSGQNAQVEAIFTDKISKSTKRERVLKLFSDEKSTGLFSEFLKLIVGNQADFKKHFDLEEKAPLQFSKDTYDEDLENLLGQIGDGFADLFLVAKKLYDAILLSGILTVTDPSTKAPLSASMIERYENHQEDLAALKQFIKNNLSEKYAEVFSDQSKDGYAGFIDGKTTQEAFYKYIKNLLSKLEGADYFLNKIEREDFLRKQRTFDNGSIPHQIHLQEMNAILRRQGEHYLFLKENREKIEKILAFRIPYYVGPLARGNRDFAWLTRNSDQAIRPWNFEEVVDKASSAEDFINKMTNYDLYLPEEKVLPKHSLLYETFAVYNELTKVKFIAEGLRDYQFLDSGQKKQIVNQLFKDKRKVTEKDIIHYLHNVDGYDGIELKGIEKQFNASLSTYHDLLKIIKDKEFMDNPKNGEILENIIHTLTIFEDREMIKQRLAQYDTLFDEKVIKALTRRHYTGWGKLSAKLINGIRDKQTGKTILEYLIDDGDCNRNFMQLINDDGLSFKEIIQKAQVVGKTDDVKQVVQEIPGSPAIKKGILQSIKIVDELVKVMGHNPESIVIEMARENQTTAKGKKNSQQRYKRIEDALKNLAPGLDSNILKENPTDNIQLQNDRLFLYYLQNGKDMYTGKAIDINQLSNYDIDHIIPQAFIKDDSLDNRVLTSSKDNRGKSDNVPSIEVVQKRKAFWQQLLDSKLISERKFNNLTKAKRGGLDERDKVGFIKRQLVETRQITKHVAQLLDTRFNTEVNEENQKIRTVKIITLKSNLVSNFRKEFGLYKVREINDYHHAHDAYLNAVVAKAILKKYPKLEPEFVYGDYQKYDLKRYILKSKASNTIDKATEKYFFYSNLLNFFKEKVRYADGTIKKRENIEYSNDTGEIAWNKEKDFATIKKVLSLPQVNIVKKTEEQTVGQNGGLFDNNIVSKKKVVDASKLIPIKSSLSPEKYGGYARPTIAYSVLVIADIEKGKGKAKKLKRIKEIVGITIQDKKKFESNPVTYLEECGYKNINSNLIIKLPKYSLFEFNDGQRRLLASSIELQKGNELILPYHLTALLYHAQRINKISEPIHKQYVEAHQNEFKELLTTIISLSKKYIQKPNVELLLQQAFDQADKDIYQLSESFISLLKLTSFGAPGAFKFLGVEISQSSVRYKPNSQFLDTTLIHQSITGLYETRIDLSKLGED

SEQ ID NO: 572 - protein, 1392 aa, Streptococcus sanguinis
  REGION 1..1392: note = Streptococcus sanguinis SK330
MENKNYSIGLDIGTNSVGWAVITDDYKVPSKKMKVFGNTDKHFIKKNLIGALLFDEGATAEDRRLKRTARRRYTRRKNRLRYLQEIFSEEISKLDSSFFHRLDDSFLVPKDKRGSKYPIFATLEEEKEYHKKFPTIYHLRKHLADSKEKTDLRLIYLALAHMIKYRGHFLYEESFDIKNNDIQKIFNEFISIYDNTFEGSSLSGQNAQVEAIFTDKISKSAKRERVLKLFSDEKSTSLFSEFLKLIVGNQADFKKHFDLEEKAPLQFSKDTYDEDLENLLGQIGDGFTDLFLVAKKLYDAILLSGILTVTDPSTKAPLSASMIERYESHQKDLAALKQFIKNNLPKRYNEVFSDQSKDGYAGYIDGKTTQEAFYKYIKNLLSKFEGADYFLDKIEREDFLRKQRTFDNGSIPHQIHLQEMNAILRRQGEHYPFLKENREKIEKILTFRIPYYVGPLARGNRDFAWLTRNSDQAIRPWNFEEIVDKASSAEEFINKMTNYDLYLPEEKVLPKHSLLYETFAVYNELTKVKFIAEGLRDYQFLDSGQKKQIVNQLFKEKRKVTEKDIIHYLHNVDGYDGIELKGIEKQFNASLSTYHDLLKIIKDKEFMDDPKNEEILENIVHTLTIFEDREMIKQRLAQYDSIFDEKVIKALTRRHYTGWGKLSAKLINGICDKQTGDTILDYLIDDGKINRNFMQLINDDGLSFKEIIQKAQVVGKTDDVKQVVQELPGSPAIKKGILQSIKIVDELVKVMGYAPESIVIEMARENQTTARGKKNSQQRYKRIEDSLKNLAPGLDSNILKENPTDNIQLQNDRLFLYYLQNGKDMYTGKPLDIDQLSSYDIDHIIPQAFIKDDSIDNRVLTSSKDNRGKSDNVPSLEVVQKRKAFWQQLLDSKLISERKFNNLTKAERGGLDERDKVGFIRRQLVETRQITKHVAQILDASFNTEVNEKNQKIRTVKIITLKSNLVSNFRKEFELYKVREINDYHHAHDAYLNAVVAKAILKKYPKLEPEFVYGDYQKYDLKRYISRFKPSKEIEKATEKYFFYSNLLNFFKEEVHYADGIIVKRENIEYSKDTGEIAWNKEKDFATIKKVLSYPQVNIVKKTEIQTHGLDRGKPKGLFNSNPSPKPSEDSKENLVPIKQGLDPRKYGGYAGISNSYAVLVKAIVEKGAKKQQKTILEFQGISILDKINFENNKENYLLKKRYIEILSTITLPKYSLFEFPDGTRRRLASILSTNNKRGEIHKGNELVLPGKYTTLLYHAKNINKKLEPEHLEYVEKHRNDFAKLLECVLNFNDKYVGALKNGERIRQAFTDWETVDIEKLCFSFIGPENSKNAGLFELTSQGSASDFEFLGVKIPRYRDYAPSSLLKATLIHQSITGLYETRIDLSKLGED

SEQ ID NO: 573 - protein, 1370 aa, Streptococcus sanguinis
  REGION 1..1370: note = Streptococcus sanguinis SK353
MKKPYSIGLDIGTNSVGWAVVTDDYKVPAKKMRVFGDTDRSHIKKNLLGTLLFDDGNTAESRRLKRTARRRYTRRRNRILYLQEIFTESMNEIDESFFHRLDDSFLVPEDKRGSKYPIFATLQEEKEYHKQFPTIYHLRKQLADSKEKSDVRLIYLALAHMIKYRGHFLYEETFDIKNNDIQKIFNEFINIYDNTFEGSSLSGQNAQVEAIFTDKISKSAKRERVLKLFPDEKSTGLFSEFLKLIVGNQADFKKHFDLEEKAPLQFSKDTYDEELENLLGQIGDDFADLFLIAKKLYDAILLSGILTVTDPSTKAPLSASMIERYENHQKDLAALKQFIKNNLPEKYVEVFSDQSKDGYAGYIDGKTTQEAFYKYIKNLLSKFEGADYFLDKIEREDFLRKQRTFDNGSIPHQIHLQEMNAILRRQGEHYPFLKENREKIEKILTFRIPYYVGPLARDNRDFSWLTRNSDEPIRPWNFEEVVDKARSAEDFIHRMTNYDLYLPEEKVLPKHSLLYETFAVYNELTKVKFIAEGLRDYQFLDSGQKKQIVNQLFKEKRKVTEKDIIHYLHNVDGYDGIELKGIEKQFNANLSTYHDLLKITKDKEFMDDPKNEEILENIVHTLTIFEDREMIKQRLAQYDTLFDEKVIKALTRRHYTGWGKLSAKLINGIRDKQSGKTILDYLIDDDKINRNFMQLINDDGLSFKEIIQKAQVVGKTDDVKQVVQELPGSPAIKKGILQSIKIVDELVKVMGYALESIVIEMARENQTTARGKKNSQQRYKRIEDALKNLAPGLDSNILKENPTDNIQLKNDRLFLYYLQNGKDMYTGKPLDINQLSSYDIDHIIPQAFIKDDSIDNRVLTSSKDNRGKSDNVPSLEVVQKRKAFWQQLLDSKLISERKFNNLTKAERGGLDERDKVGFIRRQLVETQQITKNVAQILDARFNTEVKEKNQKIRTVKIITLKSNLVSNFRKEFGLYKVREINNYHHAHDAYLNAVVAKAILKKYPKLEPEFVYGDYQKYDLKKYISRFKPSKEIEKATEKYFFYSNLLNFFKEEVLYADGTIRKRENIEYSKDTGEIAWDKEKDFATIKKVLSYPQVNIVKKREVQTGGFSKESILPKGNSDKLIPRKTKDILWDTTKYGGFDSPVIAYSILLIADIEKGKAKKLKTVKTLVGITIMEKAAFEENPITFLENKGYHNVRKENILCLPKYSLFELENGRRRLLASAKELQKGNEIVLPVCLTTLLYHSKNLHKLDEPEHLEYIQKHRNEFKDLLNLVSEFSQKYILAEANLEKIKDLYADNEQADIEILANSFINLLTFTALGAPAAFKFFGKDVDRKRYTTVSEILNATLIHQSITGLYETRIDLSKLGEE

SEQ ID NO: 574 - protein, 1421 aa, Streptococcus sanguinis
  REGION 1..1421: note = Streptococcus sanguinis SK49
MTKFNKNYSIGLDIGVSSVGYAVVTEDYRVPAFKFKVLGNTEKEKIKKNLIGSTTFVSAQPAKGTRVFRVNRRRIDRRNHRITYLRDIFQKEIEKVDKNFYRRLDESFRVLGDKSEDLQIKQPFFGDKELETAYHKKYPTIYHLRKHLADADKNSPVADIREVYMAISHILKYRGHFLTLDKINPNNINMQNSWIDFIESCQEVFDLEISDESKNIADIFKSSENRQEKVKKILPYFQQELLKKDKSIFKQLLQLLFGLKTKFKDCFELEEEPDLNFSKENYDENLENFLGSLEEDFSDVFAKLKVLRDTILLSGMLTYTGATHARFSATMVERYEEHRKDLQRFKFFIKQNLSEQDYLDIFGRKTQNGFDVDKETKGYVGYITNKMVLTNPQKQKTIQQNFYDYISGKITGIEGAEYFLNKISDGTFLRKLRTSDNGAIPNQIHAYELEKIIERQGKDYPFLLENKDKLLSILTFKIPYYVGPLAKGSNSRFAWIKRATSSDILDDNDEDTRNGKIRPWNYQKLINMDETRDAFITNLIGNDIILLNEKVLPKRSLIYEEVMLQNELTRVKYKDKYGKAHFFDSELRQNIINGLFKNNSKRVNAKSLIKYLSDNHKDLNAIEIVSGVEKGKSFNSTLKTYNDLKTIFSEELLDSEIYQKELEEIIKVITVFDDKKSIKNYLTKFFGHLEILDEEKINQLSKLRYSGWGRYSAKLLLDIRDEDTGFNLLQFLRNDEENRNLTKLISDNTLSFEPKIKDIQSKSTIEDDIFDEIKKLAGSPAIKRGILNSIKIVDELVQIIGYPPHNIVIEMARENMTTEEGQKKAKTRKTKLESALKNIENSLLENGKVPHSDEQLQSEKLYLYYLQNGKDMYTLDKTGSPAPLYLDQLDQYEVDHIIPYSFLPIDSIDNKVLTHRENNQQKLNNIPDKETVANMKPFWEKLYNAKLISQTKYQRLTTSERTPDGVLTESMKAGFIERQLVETRQIIKHVARILDNRFSDTKIITLKSQLITNFRNTFHIAKIRELNDYHHAHDAYLAVVVGQTLLKVYPKLAPELIYGHHAHFNRHEENKATLRKHLYSNIMRFFNNPDSKVSKDIWDCNRDLPIIKDVIYNSQINFVKRTMIKKGAFYNQNPVGKFNKQLAANNRYPLKTKALCLDTSIYGGYGPMNSALSIIIIAERFNEKKGKIETVKEFHDIFIIDYEKFNNNPFQFLNDTSENGFLKKNNINRVLGFYRIPKYSLMQKIDGTRMLFESKSNLHKATQFKLTKTQNELFFHMKRLLTKSNLMDLKSKSAIKESQNFILKHKEEFDNISNQLSAFSQKMLGNTTSLKNLIKGYNERKIKEIDIRDETIKYFYDNFIKMFSFVKSGAPKDINDFFDNKCTVARMRPKPDKKLLNATLIHQSITGLYETRIDLSKLGED

SEQ ID NO: 575 - protein, 1026 aa, Streptococcus sp.
  REGION 1..1026: note = Streptococcus sp. BS35b
MNGLVLGLDIGIASVGVGILEKNSGKIIHANSRLFPAATADNNVERRKNRQARRLNRRKKHRGVRFQDLFEDYGLLTDFSKVSINLNPYRLRVDGLNQQLTNEELFIALKNIVKRRGISYLDDASEDGGAVSSDYGKAVEENRKLLAEQTPGQIQLERFEKYGQVRGDFTVVENGEKRRLINVFSTSAYRKEAEKILRKQQEFNNQITDEFIEDYLKILTGKRKYYHGPGNEKSRTDYGRFRTDGTTLDNIFGVLIGKCTFYPNEYRASKSSYTAQEFNLLNDLNNLTVPTETKKLSEEQKKVIVEYAKEAKTLGASTLLKYIVKMIDASVDQISGYRVDVNNKPEMHTFEVYRKMQSLETISVGELSRNVLDELAHILTLNTEREGIEEAINSKLMGVFSQDQVLELVQFRKNNSSLFSKGWHNFSLKLMMELIPELYETSEEQMTILTRLGKQKSKETSKRTKYIDEKELTEEIYNPVVAKSVRQAIKIINEATKKHGIFDNIVIEMARENNEEDAKKDYIKRQKANQDEKNAAMEKAAFQYNGKKELPGNIFNGHKELATKIRLWHQQGEKCLYTGKTIPISDLIHNQYKYEIDHILPLSLSFDDSLSNKVLVHATANQEKGQRTPFQALDSMDDAWSYREFKSYVKDLKSLSNKKKDYLLTEEDISKIEVKQKFIERNLVDTRYSSRVVLNALQDFYKSHQFDTTISVVRGQFTSQLRRKWGLEKSRETYHHHAVDALIIAASSQLRLWKKQNNPLITYKEGQFIDSQTGEIISLTDDEYKELVFKAPYDHFVDTLHSKTFEDGILFSYQVDSKYNRKISDATIYATRKAKLDKDKSEETYVLGKIKDIYSQAGYDAFIKIYNKDKRKFLMYHKDPQTFEKVIEEILRTYPSKERNDKNKEVPCNPFEKYRQENGPIRKYSKKGNGPEIKCLKYYDNKLGNYIDISPDGSDNQVVLQSLKPWRTDVYFNHQTKKYELMGLKYSDLSFEKGSGKYSISNEKYNSIKRIEGVNEQSEFKFTLYK

SEQ ID NO: 576 - protein, 1139 aa, Streptococcus sp.
  REGION 1..1139: note = Streptococcus sp. C150
MSDLVLGLDIGIGSVGVGILNKVTGEIIHKNSRIFPAAQAENNLERRTNRQGRRLTRRKKHRRVRLNHLFEESGLITDFTKVSINLNPYQLRVKGLTAELSNEELFIALKNMVKHRGISYLDDASDDGNSSVGDYAQIVKENSKQLETKTPGQIQLERYQKYGQLRGDFTVEEDGRKHRLINVFPTSAYHAEALRILQTQQEFNPQITDEFINSYLEILTGKRKYYHGPGNEKSRTDYGKYTTKKDAQGQYITLNNIFGILIGKCTFYPEEYRAAKASYTAQEFNLLNDLNNLTVPTETKKLSEEQKYQIITYVKNEKAMGPAKLFKYIAKLLSCDVADIKGYRIDKSDKAEIHTFEAYRKMKTLETLDVKKMAREELDKLAYVLTLNTEREGIQEALDHEFADGTFSQEQVDELVQFRKANSSIFGKGWHSFSVKLMMELIPELYATSEEQMTILTRLGKQKTTSSSNKTKYIDEKQLTEEIYNPVVAKSVRQAIKIVNAAIKKYGDFDNIVIEMARETNEDDEKKAIQKIQKANKAEKDAAMRKAANQYNGKAELPHSVFHGHKQLATKIRLWHQQGERCLYTGKTISIHDLINNPNQFEIDHILPLSITFDDSLANKVLVYATANQEKGQRTPYQALDSMDDAWSFRELKAFVRESKALSNKKKEYLLTEEDISKFDVRKKFIERNLVDTRYASRVVLNALQEHFRTHKIDTKVSVVRGQFTSQLRRHWGIEKTRDTYHHHAVDALIIAASSQLNLWKKQKNTLVSYSEDQLLDIETGELISDDEYKESVFKAPYQHFVDTLKSKEFEDSILFSYQVDSKFNRKISDATIYATRKAKLDKEKKEYTYTLGKIKDIYALGTKTPSKTGFYKFLDLYKKDKSQFLMYQKDRRTWDEVIEKILEQYRPFKEKDKNGKEVDFNPFEKYRIENGPIRKYSRKGNGPEIKSLKYYDNLLGRFVDITPSESKNPVALLSLNPWRTDVYYNTETRKYEFLGLKYADLCFEKGGSYGISKVKYNKIREKEGIGKNSEFKFTLYKNDLILIKDTETNRQQIFRFWSRTGKDNPKSFEKHKLELKPYEKTRFEKGEELKVLGKVPPSSNRLQKNMQIENLSIYKVRTDVLGNQHIIKNEGDKPKLDF

SEQ ID NO: 577 - protein, 1377 aa, Streptococcus sp.
  REGION 1..1377: note = Streptococcus sp. C300
MNNKPYSIGLDIGTNSVGWSVITDDYKVPSKKMKVLGNTDKRFIKKNLIGALLFDEGTTAEARRLKRTARRRYTRRKNRLRYLQEIFAEEMSKVDSSFFHRLDDSFLIPEDKRGSKYPIFATLVEEKEYHKQFPTIYHLRKQLADSKEKADLRLIYLVLAHMIKYRGHFLYEEAFDIKNNDIQKIFNEFISIYDNTFEGSSLSGQNAQVETIFTDKISKSAKRERVLKLFPDEKSTGLFSEFLKLIVGNQADFKKHFDLEEKAPLQFSKDTYDEDLENLLEQIGDDFADLFVAAKKLYDAILLSGILTVTDPSTKAPLSASMIERYENHQKDLAVLKQFIKTNLPEKYVEVFSDQSKDGYAGYIDGKTTQEAFYKYIKNLLSKFDGADYFLDKIEREVFLRKQRTFDNGSIPHQIHLQEMNTILRRQGEHYPFLKENKEKIEKILTFRIPYHVGPLARGNRDFAWLTRNSDQAIRPWNFEEIVDKASSAEDFINKMTNYDLYLPEEKVLPKHSLLYETFAVYNELTKVKFIAEGMRDYQFLDSGQKKKIINQLFKKKRKVTEDDIIDCLQKIDNYDGIELKGIEKQFNASLSTYHDILKIIRDKEFMDDPKNGDILENVIHTLTIFEDREMIKQRLAQYNSIFDEKVIKALSRKHYTGWGKLSAKLIDGIRDKQTGKTILDYLMDDGKSNRNFMQLIKDDELSFTEIIQKAQVVGDTDNLRQVVQNLPGSPAIKKGILQSIKIVDELVKVMGHAPESIVIEMARENQTTARGKKNSQQRYKRIEDSLKNLASGLDSNILKENPTDNIQLQNDRLFLYYLQNGKDMYTGEALNINQLSSYDIDHIIPQAFIKDDSLDNRVLTSSKDNRGKSDNVPSLEVVEKMKAFWQQLLDSKLISERKYNNLTKAERERGGLNELDKVGFIKRQLVETRQITKHVAQILDARFNKEVTEKNKKNRNVKIITLKSNMVSNFRKEFGLYKVREINDYHHAHDAYLNAVVAKAILKKYPKLEPEFVYGDYQKYDLKRYISRSKDPKEVEKATEKYFFYSNLLNFFKEEVHYADGTIVKRENIEYSKDTGEIAWNKEKDFATIKKVLSLPQVNIVKKTEEQTVGQNGGLFDNNIVSKKKVVDASKLIPIKSGLSPEKYGGYARPTIAYSVLVTYKQNNKIKNTMVGIPVLTKLEFERDPNLYLRNLGINNVSHVIKLVKYTVLEFKHKYGTYRRFIVSNQELKRANQIFVTTKQMKLISQYTTLDKNEHDSLLKNNQQLIQSIWNQFLEFMLATDLVNKKQYDELILTNNQTIEECRNIMNRVITTLSFTNINAGQKKIIFDDTLSLPIKRWQFTDSDKMVKKIIESTLIHQSITGLYETRIDLSKLGED

SEQ ID NO: 578 - protein, 1371 aa, Streptococcus sp.
  REGION 1..1371: note = Streptococcus sp. F0441
MENKNYSIGLDIGTNSVGWSVITDDYKVPSKKMKVLGNTDKHFIKKNLIGALLFDEGTTAEARRLKRTARRRYTRRKNRLRYLQEIFSEEIGKVDSSFFHRLDDSFLIPEDKRGSKYPIFATLAEEKKYHKQFPTIYHLRKQLADSKEKTDLRLIYLALAHMIKYRGHFLYEEAFDIKNNDIQKIFNEFISIYNNTFEGNSLSGQNVQVEAIFTDKISKSAKRERVLKLFPDEKSTGLFSEFLKLIVGNQADFKKHFDLEEKAPLQFSRDTYDEDLENLLGQIGDDFADLFLVAKKLYDAILLSGILTVTNPSTKAPLSASMIERYENHQKDLASLKQFIKNNLPEKYDEVFSDQSEDGYAGYIDGKTTQETFYKYIKNLLSKFEGADYFLDKIEREDFLRKQRTFDNGSIPHQIHLQEMNAILRRQGEHYPFLKENKEKIEKILTFRIPYYVGPLARGNRDFAWLTRNSDQAIRPWNFEEIVDKASSAEDFINKMTNYDLYLPEEKVLPKHSLLYETFAVYNELTKVKFIAEGLRDYQFLDSGQKKQIVTQLFKEKRKVTEKDIIQFLHNVDGYDGIELKGIEKQFNASLSTYHDLLKIIKDKAFMDDAKNEAILENIVHTLTIFEDREMIKQRLAQYDSLFDEKVIKALTRRHYTGWGKLSAKLINGISDKQTGNTILDYLIDDGEINRNFMQLINDDGLSFKEIIQKAQVVGKTNDVKQVVQELPGSPAIKKGILQSIKIVDELVKVMGHAPESIVIEMARENQTTARGKKNSQQRYKRIEDSLKILASGLNSKILKEHPTDNIQLQNDRLFLYYLQNGKDMYTGEALDINQLSSCDIDHIIPQAFIKDDSLDNRVLTSSKDNRGKSDNVPSLEVVDKMKVFWQQLLDSKLISYRKFNNLTKAERGGLNELDKVGFIKRQLVETRQITKHVAQILDARFNKEVTEKDKKNRTVKIITLKSNLVSNFRKEFELYKVREINDYHHAHDAYLNAVVAKAILKKYPKLEPEFVYGDYQKYDLKRYISRSKDPKEIEKATEKYFFYSNLLNFFKEEVHYADGTIVKRENIEYSKDTGEIAWNKEKDFATIKKVLSLPQVNIVKKREVQTGGFSKESILPKGNSDKLIPRKTKDILWDTTKYGGFDSPVIAYSILLIADIEKGKAKKLKTVKTLVGITIMEKDAFEKNPIAFLENKGYHNVCKENILCLPKYSLFELENGRRRLLASAKELQKCNEIVLPVYLTTLLYHSKNVHKLDEPGHLEYIQKHRNEFKDLLNLVSEFSQKYVLADANLEKIKNLYADNEQADIEILANSFINLLTFTALGAPAAFKFFGKDVDRKRYTTVSEILNATLIHQSITGLYETRIDLSKLGED

SEQ ID NO: 579 - protein, 1121 aa, Streptococcus sp.
  REGION 1..1121: note = Streptococcus sp. GMD6S
MNGLVLGLDIGIASVGVGILEKNSGKIIHANSRLFPAATADNNVERRKNRQARRLHRRKKHRGVRFQDLFEDYGLLTDFSKVSINLNPYRLRVDGLNQQLTNEELFIALKNIVKRRGISYLDDASEDGGTVSSDYGKAVEENRKLLAEQTPGQIQLERFEKYGQVRGDFTVVENGEKRRLINVFSTSAYRKEAERILRKQQEFNSKITDEFIEDCLKILTGKRKYYHGPGNEKSRTDYGRFRTDGTTLDNIFGILIGKCTFYPDEYRASKASYTAQEFNLLNDLNNLTVPTETKKLSEEQKKVIVEYAKEAKTLGASTLLKYIAKMIDASVDQIRGYRVDVNNKPEIHTFEAYRKMQSLETISVGELSRNVLDELAHILTLNTEREGIEEAINTKLKDSFSQDQVLELVQFRKNNSSLFSKGWHNFSLKLMMELIPELYETSEEQMTILTRLGKQKSKEISKRTKYIDEKELTEEIYNPVVAKSVRQAIKIINEATKKHGIFDNIVIEMARENNEEDAKKDYIKRQKANQDEKNAAMEKAAFQYNGKKELPDSIFHGQKELATKIRLWHQQGEKCLYTGKNIPISDLIHNQYKYEIDHILPLSLSFDDSLSNKVLVLATANQEKGQRTPFQALDSMDDAWSYREFKSYVKESKLLGNKKKEYLLTEEDISKIEVKQKFIERNLIDTRYSSRVVLNALQDFYKAHKFDTTISVVRGQFTSQLRRKWGLEKSRETYHHHAVDALIIAASSQLRLWKKQNNPLIAYKEGQFVDSETGEIISLSDDEYKELVFKAPYDHFVDTLSSKTFEDSILFSYQVDSKFNRKISDATIYATRKAKLDKEKSEETYVLGKIKDIYSQAGYDAFIKIYNKDKSKFLMYHKDPQTFEKVIEEILRTYPSKELNDKNKEIPCNPFEKYRQENGPIRKYSKKSNGPEIKSLKYYDNKLGNHIDITPESSDNQVVLQSLKPWRTDVYFNHQTKKYELMGLKYSDLSFEKGSGKYSISNQKYNSIKRIEGIDEQSEFKFTLYKNDLILIKDSENNEQKLFRFNSRNDTAKHYIELKPYDKAKFDGEQELITILGNVAKGGRCLKGLNKSNISIFKVKTDVLGKKHIIKKEGDEPKLKF

SEQ ID NO: 580 - protein, 1375 aa, Streptococcus sp.
  REGION 1..1375: note = Streptococcus sp. M334
MSNKSYSIGLDIGTNSVGWAVITDDYKVPSKKMKVLGNTDKHFIKKNLIGALLFDEGTTAEDRRLKRTARRRYTRRKNRLRYLQEIFSQEISKVDSSFFHRLDDFFLVPEDKRGSKYPIFATLVEEKEYHKKFPTIYHLRKHLADSKEKTDLRLIYLALAHMIKYRGHFLYEESFDIKNNDIQKIFSEFISIYDNTFEGKSLSGQNAQVEAIFTDKISKSTKRERVLKLFPDEKSTGLFSEFLKLIVGNQADFKKHFDLEEKAPLQFSKDTYDEDLENLLGQIGDDFADLFLVAKKLYDAILLSGILTVKDLSTKAPLSASMIERYENHQKDLAALKQFIQNNLQEKYDEVFSDQSKDGYAGYIDGKTTQEAFYKYIKNLLSKFEGADYFLDKIEREDFLKKQRTFDNGSIPHQIHLQEMNAIIRRQGEHYPFLQENKEKIEKILTFRIPYYVGPLARGNGDFAWLTRNSDQAIRPWNFEEIVDQASSAEDFINKMTNYDLYLPEEKVLPKHSLLYETFAVYNELTKVKFIAEGLTRYQFLDKKQKKDIFDTFFKAENKRKVTEKDIIHYLHNVDGYDGIELKGIEKQFNASLSTYHDLLKIIKDKAFMDDSKNEEILENIIHTLTIFEDREMIKQRLAQYDSLFDEKVIKALTRRHYTGWGKLSAKLINGIRDKKSGKTILDYLIDDGEINRNFMQLIHDDGLSFKEIIQKAQVFGKTNDVKQVVQELPGSPAIKKGILQSIKIVDELVKVMGHAPESIVIEMARENQTTARGKKNSQQRYKRIEDSLKNLASGLDSNILKENPTDNIQLQNDRLFLYYLQNGRDMYTGKPLEINQLSNYDIDHIIPQAFIKDDSLDNRVLTSSKDNRGKSDNVPSLEVVEKMKAFWQQLLDSKLISERKFNNLTKAERERGGLNELDKVGFIKRQLVETRQITKHVAQFLDARFNKEVTEKDKKNRNVKIITLKSNLVSNFRKEFGLYKVREINDYHHAHDAYLNAVLAKAILKKYPKLEPEFVYGDYQKYDLQRYISKSREPKEVEKATQKYFFYSNLLNFFKEEVHYADGTIVKRENIEYSKDTGEIAWNKEKDFATVKKVLSLPQVNIVKKTEVQTGGFSKESILPKGNSDKLIPRKTKEILWDTTKYGGFDSPVIAYSILLIADIEKGKAKKLKTVKTLVGITIMEKATFEKNPITFLENKGYHNVRKENILCLPKYSLFELESGRRRMLASAKELQKGNEIVLPVYLTTLLYHSKNVHKLDEPEHLEYIQKHRYEFKDLLNLVSEFSQKYVLADANLEKIKNLYADNEQADIEILANSFINLLTFTALGAPAAFKFLGKDVDRKRYTTVSEILNATLIHQSITGLYETRIDLSKLGED

SEQ ID NO: 581 - protein, 1371 aa, Streptococcus sp.
  REGION 1..1371: note = Streptococcus sp. oral taxon 056 str. F0418
MNNNNYSIGLDIGTNSVGWAVITDDYKVPSKKMRVLGNTDKRFIKKNLIGALLFDEGTTAEDRRLKRTARRRYTRRKNRLRYLQEIFAEEMSKVDSSFFHRLDDSFLVPEDKSGSKYPIFATLAEEKEYHKKFPTIYHLRKHLADSKEKADLRLIYLALAHITKYRGHFLYEEAFDIKNNDIQKIFNEFINIYDNTFEGSSLSGQNAQVEAIFTGKISKSVKREHVLKLFPDEKSTGLFSEFLKLIVGNQADFKKHFDLEEKASLQFSKDTYDEDLENLLGQIGDDFADLFLVAKKLYDAILLSGILTVTDPSTKAPLSASMIERYENHQEDLAALKQFIKNNLPEKYAEVFSDQSKDGYAGYIDGKTTQEAFYKYIKNLLSKFEGADYFLDKIEREDFLRKQRTFDNGSIPHQIHLQEMNAILRRQGEHYPLLKENKEKIEKILTFRIPYYVGPLARGNRDFAWLTRNSDQAIRPWNFEEIVDKASSAESFINKMTNYDLYLPEEKVLPKHSLLYETFAVYNELTKVKFIAEGLRDYQFFDSGQKKQIVNQLFKEKRKVTEKDIIHYLHNVDGYDGIELKGIEKQFNASLSTYHDLLKIIKDKEFMDNHKNQEILENIVHTLTIFEDREMIKQRLAQYDSIFDEKVIKALTRRHYTGWGKLSAKLINGICDKKTGKTILDYLIDDGYNNRNFMQLINDDGLSFKEIIQKAQVVGKTDDLTQVVRELSGSPAIKKGILQSIKIVDELVKIMGYAPESIVIEMARENQTTAKGKKNSQQRYKRIEDALKNLAPGLDSTISKENPTDNIQLQNDRLFLYYLQNGKDMYTGEALDINQLSSYDIDHIIPQAFIKDDSLDNRVLTSSKDNRGKSDNVPSLEVVKKRKAFWQQLLDSKLISERKFNNLTKAERGGLDERDKVGFIKRQLVETRQITKHVARILDARFNTEVSEKNQKIRSVKIITLKSNLVSNFRKEFKLYKVREINDYHHAHDAYLNAVVAKAILKKYPKLEPEFVYGDYQKYDLKRYISKSKDPKEVEKATEKYFFYSNLLNFFKEEVHYADGTIVKRENIEYSKDTGEIAWNKEKDFVTIKKVLSYPQVNIVKKREVQTGGFSKESILPKGNSDKLIPRKTKDILWDTTKYGGFDSPVIAYSILLIADIEKGKAKKLKTVKTLVGITIMEKAAFEKNPITFLENKGYHNVRKENILCLPKYSLFELENGRRRLLASAKELQKGNEIVLPVYLTTLLYHSKNVHKLDEPEHLEYIQKHRYEFKDLLNLVSEFSQKYVLAEANLEKIKSLYVDNEQADIEILANSFINLLTFTALGAPAAFKFFGKDVDRKRYTTVSEILNATLIHQSITGLYETRIDLSKLGED

SEQ ID NO: 582 - protein, 1420 aa, Streptococcus sp.
  REGION 1..1420: note = Streptococcus sp. oral taxon 071 str. 73H25AP
MAKFNKNYSIGLDIGVSSVGYAVVTEDYRVPAFKFKVLGNTEKEKIKKNLIGSTTFVPAQSAQGTRVFRVNRRRIDRRNHRIAYLRDIFQKEIEKIDKNFYRRLDESFRVLGDKSEDIQIKQPFFGNKELETAYHKKYPTIYHLRKHLADADKNSPVADIREVYMVLSHILKYRGHFLTLGKIDPNNINMQNSWIDFIESCQDAFDLEISDESKTIAAIFKSSENRQEKVKQILSYFQQELLKKDKSIFKQLLQLLFGLKTKFKDCFELEEEPDLNFSKENYDENLENLLGALEEDFSDVFAKLKILRDTILLSSMLTYTGATHARFSATMVERYEEHRKDLQRFKSFVKQNLSEQDYLDIFGRKTPTGFDVDKETKGYVGYISNKMVLTNPQKQKTIQQNFYDYISGKITGIEGAECFLNKISDGTFLRKLRTTDNGAIPNQIHAYELEKIIERQGRDYPFLLENKDKLLSILTFKIPYYVGPLAKGNNSRFAWIKRTTSQDVLDDNDEDTRNGKIRPWNYHKLINMDETRDAFIINLIGNDIILLNEKVLPKRSLIYEEVMLQNELTRVKYKDKYGKIHFFNSELRQEIINNLFKTNSKRVSSAMLLSYLENFTNLQAVEIVSGIEKGKSLNSTLKTYNDLKTIFSEELLDSEIYQKELEEIIKVITVFDDKKSIKNYLTKYFGHLEFLNEEKINQLSKLRYTGWGRYSGKLLLGIRDEDTGFNLMQFLRNDDENRNLTQLISDTTLSFDSAIKAIQSKSTVEDDVFEEIKNLAGSPAIKRGILNSIKIVDELVQIIGYPPQNIIIEMARENMTTEEGQKKAKTRKSKLESALKNIEDSVLESGKVPHSDEQLQSEKLYLYYLQNGKDMYSLDKTGSPTPLYRDQLDQYEVDHIIPYSFLPIDSIDNKVLTHRENNQRKLNNIPDKETVANMKPFWEKLYNAKLISQTKYQRLTTSERTPDGVLTESMKAGFIERQLVETRQIIKHVARILDNRFSDTKIITLKSQLVTNFRNTFHIAKIRELNDYHHAHDAYLAVVVGQTLLKAYPKLAPELIYGHHAHFNRHEENKATLRKHLYSNIMRFFNNPDSKVSKDIWDCNRDLPIVKDVIYNSQINFVKRTMIKKGAFYNQNPVGKLNKQIAANNRYPLKTKVSSLDTSIYGGYGPMNSALSIIIIAERFNEKKGKIETVKEFHDIFIIDYEKFNNNPFQFLNNVSEEGFLKKNDLNRVLAFYRISKYSLMQKIDGTRMLFESKSNLHKVTQFKLTKTQNELFFHMKRLLTKSNLMDLKSESAIKESQNFIQTHQNEFDNIADRLSNYSQKMLGETKSLQTLINGYNERPIKQIDNNEETIRYYYDNFIKMFSFVKSGAPKDIINFFNDKYTVPRMRPKPDRKMLDATLIHQSITGLYETRIDLSKLGED

SEQ ID NO: 583 - protein, 1122 aa, Streptococcus suis
  REGION 1..1122: note = Streptococcus suis 89/1591
MSNGKILGLDIGIASVGVGVIDAQTGEIIHASSRIFPSANAANNAERRTFRGSRRLIRRKKHRIKRLDDLFNDFHINLDGEMSTDNPYVLRVKGLSQKLTVEELYISIKNIMKRRGISYLDDAESDNEAGRSDYAKAIERNRQLLTSKTPGEIQLERLEKYGQLRGNFTIIDEEGQSQQIINVFSTSDYVKEVEKILDCQKMYHKFISDEFCDKLIELLREKRKYYVGPGNEKSRTDYGIYRTDGTTLENLFGILIGKCTFYPDQYRSSRASYTAQEFNFLNDLNNLTVPTETKKLSQEQKEFLVNYAKETSVLGAGKILQQIAKLADCKVEDIRGYRLDNKDKPELHTFETYRAMKGLVPLVDIGVLSREQLDILADILTLNTDFEGIREALKKQLPNVFDEKQVKGLASFRKSKSQLFAKGWHNLSQKIMLEVIPELYATSDEQMTILTRLGKFEKSSVAEYPSSINVDEITDEIYNPVVAKSIRQTIKIINASIKKWGEFDQIVIEMPRDRNEDEEKKRIADGQKANAKEKADSILRAAELYCAGKVLPDYVYNGHNQLATKIRLWYQQGERCIYTGQPISIHDLIHNQNQYEIDHILPLSLTFDDSLSNKVLVLATANQEKAQRTPYNYLKSATSAWSYREFKDYVTKRKGIGKKKCEYLTFEEDINGFEVRSKFIQRNLVDTRYASKVILNALQDYFKISGIQTKVSVVRGQFTSQLRHKWGIEKTRETYHHHAVDALIIAASSQLRLWKKQESPLVVDYQEGRQVDLETGEILELTDEQYKELVYQPPYQGFVNTISSSAFDNEILFSYQVDSKVNRKISDATIYATRNAQLGKDKTEGIYVLGKIKDIYTQAGYEAFLKRYTKDKTSFLMYHKDLDTWEKVIEIILRDYREYDEKGKEIGNPFERYRRENGYVKKYSRKGNGTAIKSLKYYDNKLGNHIDITPENSRNAVVLQSLKPWRTDVYFNKETGKYEFLGIKYSDLSFEKGTGEYGISQEKYDSIKIAEGVAKKSIFKFTLYKQDLLFIKDIENNFGKLLRFTSKNDTSKHYVELKPYDKNKFGTEEPLLPVLGNVAKSGQCIKGLNKSNISIYKVRTDILGYRHFIKQEGEHPQLKFKK

SEQ ID NO: 584 - protein, 1122 aa, Streptococcus suis
MSNGKILGLDIGIASVGVGVIDAQTGEIIHASSRIFPSANAANNAERRTFRGSRRLIRRKKHRIKRLDDLFNDFHINLDGEMSTDNPYVLRVKGLSQKLTVEELYISIKNIMKRRGISYLDDAESDNEAGRSDYAKAIERNRQLLTSKTPGEIQLERLEKYGQLRGNFTIIDEEGQSQQIINVFSTSDYVKEVEKILDCQKMYHKFISDEFCDKLIELLREKRKYYVGPGNEKSRTDYGIYRTDGTTLENLFGILIGKCTFYPDQYRSSRASYTAQEFNFLNDLNNLTVPTETKKLSQEQKEFLVNYAKETSVLGAGKILQQIAKLADCKVEDIRGYRLDNKDKPELHTFETYRAMKGLVPLVDIGVLSREQLDILADILTLNTDFEGIREALKKQLPNVFDEKQVKGLASFRKSKSQLFAKGWHNLSQKIMLEVIPELYATSDEQMTILTRLGKFEKSSVAEYPSSINVDEITDEIYNPVVAKSIRQTIKIINASIKKWDEFDQIVIEMPRDRNEDEEKKRIADGQKANAKEKADSILRAAELYCAGKVLPDYVYNGHNQLATKIRLWYQQGERCIYTGQPISIHDLIHNQNQYEIDHILPLSLTFDDSLSNKVLVLATANQEKAQRTPYNYLKSATSAWSYREFKDYVTKRKGIGKKKCEYLTFEEDINGFEVRSKFIQRNLVDTRYASKVILNALQDYFKISGIQTKVSVVRGQFTSQLRHKWGIEKTRETYHHHAVDALIIAASSQLRLWKKQESPLVVDYQEGRQVDLETGEILELTDEQYKELVYQPPYQGFVNTISSSAFDNEILFSYQVDSKVNRKISDATIYATRNAQLGKDKTEGIYVLGKIKDIYTQAGYEAFLKRYTKDKTSFLMYHKDLDTWEKVIEIILRDYREYDEKGKEIGNPFERYRRENGYVKKYSRKGNGTAIKSLKYYDNKLGNHIDITPENSRNAVVLQSLKPWRTDVYFNKETGKYEFLGIKYSDLSFEKGTGEYGISQEKYDSIKIAEGVAKKSIFKFTLYKQDLLFIKDIENNFGKLLRFTSKNDTSKHYVELKPYDKNKFGTEEPLLPVLGNVAKSGQCIKGLNKSNISIYKVRTDILGYRHFIKQEGEHPQLKFKK

SEQ ID NO: 585 - protein, 1381 aa, Streptococcus suis
MVKKKYAIGIDIGTNSVGWSIVTDDYKVPSKKMKVFGNTEKRYIKKNLLGTLLFDEGNTAENRRLKRTARRRYTRRRNRILYLQEIFAEEINKIDDSFFQRLDDSFLIVEDKQGSKHPIFGTLQEEKEYHKQFPTIYHLRKQLADSSQKADIRLIYLALAHIIKYRGHFLFEGDLKSENKDVQHLFNDFVEMFDKTVEGSYLSENLPNVADVLVEKVSKSRRLENILHYFPNEKKNGLFGNFLALALGLQPNFKTNFELAEDAKIQFSKETYEEDLEELLGKIGDDYADLFIATKSLYDGILLAGILSTTDSTTKAPLSSSMVNRYEEHQKDLALLKNFIHQNLSDSYKEVFNDKLKDGYAGYIEGKTTQENFYRFIKKAIEKIEGSNYFIDKIDREDFLRKQRTFDNGSIPHQIHLQEMHAIIRRQAEFYPFLVENQDKIEKILTFRIPYYVGPLARGKSEFAWLNRKSDEKIRPWNFDEMVDKETSAENFITRMTNYDRYLPDQKVLPKHSLLYEKFAVYNELTKVKFIAEGMRDYQFLDSGQKKDIVKTLFKTKRKVTAKDIKAYLENSNGYAGVELKGLEEQFNASLPTYHDLLKILRDKAFIDAEENQEILEDIVLTLTLFEDREMIRKRLEKYKDILTEEQRKKLERRHYTGWGRLSAKLINGILDKVTRKTILGYLIDDGTSNRNFMQLINDDTLSFVDEIRLAQGSGEAEDYRAEVQNLAGSPAIKKGILQSLKIVDELIEVMGYEPEHIVVEMARENQFTNQGRRNSQQRINRLENALKDFGSKILEEQKPYGVSKVNNIHLQSDRLFLYYLQNGKDMYTDEELDIDHLSEYDIDHIIPQAFIKDDSLDNKVLTKSAKNRGKSDDVPSMEIVHNRKNFWRQLLKSKLISQRKFDNLTKAERGGLTNEDKARFIQRQLVETRQITKHVARMLDTRFNTKLDEAGNRIRDPKVNIITLKSNLVSQFRKDYQLYKIREINNYHHAHDAYINAVVATALLKKYPQLAPEFVYGEYPTYNSYNSRKSATEKVLFYSNIMNFFKRIVVHSKTGEVRIRPVIEVNKETGEIVWDKKSDFRTVRKVLSYPQVNVVKKTEVQNHGLDRGKPKGFYNANLSPRPKEGSVENLVPAKQSFDTKRYGGYAGISNSYAVLVNGIIEKGKKKSKAEVTEFQGISILARKDFDKNPKQYLLNLGYKDIKSIIKLPKYSLFELENGSRRMLASILSTNNKRGEIHKGNEMYLPDKFVTLLYHAMRVNRTLEPGHKKYVETHRHVFDELLIYILEYNEKIVGAKANGKRIVEAYSARKDTDNLEELCNSFINLLNLTALGSAVDFEFLGTKIPRYRDYTPSSLLKATLIHQSVTGLYETRIDLSKLGGD

SEQ ID NO: 586 - protein, 1122 aa, Streptococcus suis; identical to SEQ ID NO: 583

SEQ ID NO: 587 - protein, 1388 aa, Streptococcus thermophilus
MTKPYSIGLDIGTNSVGWAVITDNYKVPSKKMKVLGNTSKKYIKKNLLGVLLFDSGITAEGRRLKRTARRRYTRRRNRILYLQEIFSTEMATLDDAFFQRLDDSFLVPDDKRDSKYPIFGNLVEEKVYHDEFPTIYHLRKYLADSTKKADLRLVYLALAHMIKYRGHFLIEGEFNSKNNDIQKNFQDFLDTYNAIFESDLSLENSKQLEEIVKDKISKLEKKDRILKLFPGEKNSGIFSEFLKLIVGNQADFRKCFNLDEKASLHFSKESYDEDLETLLGYIGDDYSDVFLKAKKLYDAILLSGFLTVTDNETEAPLSSAMIKRYNEHKEDLALLKEYIRNISLKTYNEVFKDDTKNGYAGYIDGKTNQEDFYVYLKNLLAEFEGADYFLEKIDREDFLRKQRTFDNGSIPYQIHLQEMRAILDKQAKFYPFLAKNKERIEKILTFRIPYYVGPLARGNSDFAWSIRKRNEKITPWNFEDVIDKESSAEAFINRMTSFDLYLPEEKVLPKHSLLYETFNVYNELTKVRFIAESMRDYQFLDSKQKKDIVRLYFKDKRKVTDKDIIEYLHAIYGYDGIELKGIEKQFNSSLSTYHDLLNIINDKEFLDDSSNEAIIEEIIHTLTIFEDREMIKQRLSKFENIFDKSVLKKLSRRHYTGWGKLSAKLINGIRDEKSGNTILDYLIDDGISNRNFMQLIHDDALSFKKKIQKAQIIGDEDKGNIKEVVKSLPGSPAIKKGILQSIKIVDELVKVMGGRKPESIVVEMARENQYTNQGKSNSQQRLKRLEKSLKELGSKILKENIPAKLSKIDNNALQNDRLYLYYLQNGKDMYTGDDLDIDRLSNYDIDHIIPQAFLKDNSIDNKVLVSSASNRGKSDDFPSLEVVKKRKTFWYQLLKSKLISQRKFDNLTKAERGGLLPEDKAGFIQRQLVETRQITKHVARLLDEKFNNKKDENNRAVRTVKIITLKSTLVSQFRKDFELYKVREINDFHHAHDAYLNAVIASALLKKYPKLEPEFVYGDYPKYNSFRERKSATEKVYFYSNIMNIFKKSISLADGRVIERPLIEVNEETGESVWNKESDLATVRRVLSYPQVNVVKKVEEQNHGLDRGKPKGLFNANLSSKPKPNSNENLVGAKEYLDPKKYGGYAGISNSFAVLVKGTIEKGAKKKITNVLEFQGISILDRINYRKDKLNFLLEKGYKDIELIIELPKYSLFELSDGSRRMLASILSTNNKRGEIHKGNQIFLSQKFVKLLYHAKRISNTINENHRKYVENHKKEFEELFYYILEFNENYVGAKKNGKLLNSAFQSWQNHSIDELCSSFIGPTGSERKGLFELTSRGSAADFEFLGVKIPRYRDYTPSSLLKDATLIHQSVTGLYETRIDLAKLGEG

SEQ ID NO: 588 - protein, 1128 aa, Streptococcus thermophilus
MSDLVLGLDIGIGSVGVGILNKVTGEIIHKNSRIFPAAQAENNLVRRTNRQGRRLTRRKKHRIVRLNRLFEESGLITDFTKISINLNPYQLRVKGLTDELSNEELFIALKNMVKHRGISYLDDASDDGNSSVGDYAQIVKENSKQLETKTPGQIQLERYQTYGQLRGDFTVEKDGKKHRLINVFPTSAYRSEALRILQTQQEFNPQITDEFINRYLEILTGKRKYYHGPGNEKSRTDYGRYRTSGETLDNIFGILIGKCTFYPEEFRAAKASYTAQEFNLLNDLNNLTVPTETKKLSKEQKNQIINYVKNEKAMGPAKLFKYIAKLLSCDVADIKGYRIDKSGKAEIHTFEAYRKMKTLETLDIEQMDRETLDKLAYVLTLNTEREGIQEALEHEFADGSFSQKQVDELVQFRKANSSIFGKGWHNFSVKLMMELIPELYETSEEQMTILTRLGKQKRLRLQIKQNISNKTKYIDEKLLTEEIYNPVVAKSVRQAIKIVNAAIKEYGDFDNIVIEMARETNEDDEKKAIQKIQKANKDEKDAAMLKAANQYNGKAELPHSVFHGHKQLATKIRLWHQQGERCLYTGKTISIHDLINNPNQFEVDHILPLSITFDDSLANKVLVYATANQEKGQRTPYQALDSMDDAWSFRELKAFVRESKTLSNKKKEYLLTEEDISKFDVRKKFIERNLVDTRYASRVVLNALQEHFRAHKIDTKVSVVRGQFTSQLRRHWGIEKTRDTYHHHAVDALIIAASSQLNLWKKQKNTLVSYSEEQLLDIETGELISDDEYKESVFKAPYQHFVDTLKSKEFEDSILFSYQVDSKFNRKISDATIYATRQAKVGKDKKDETYVLGKIKDIYTQDGYDAFMKIYKKDKSKFLMYRHDPQTFEKVIEPILENYPNKQMNEKGKEVPCNPFLKYKEEHGYIRKYSKKGNGPEIKSLKYYDSKLLGNPIDITPENSKNKVVLQSLKPWRTDVYFNKATGKYEILGLKYADLQFEKGTGTYKISQEKYNDIKKKEGVDSDSEFKFTLYKNDLLLVKDTETKEQQLFRFLSRTLPKQKHYVELKPYDKQKFEGGEALIKVLGNVANGGQCIKGLAKSNISIYKVRTDVLGNQHIIKNEGDKPKLDF

SEQ ID NO: 589 - protein, 1121 aa, Streptococcus thermophilus
MSDLVLGLDIGIGSVGVGILNKVTGEIIHKNSRIFPAAQAENNLVRRTNRQGRRLTRRKKHRIVRLNRLFEESGLITDFTKISINLNPYQLRVKGLTDELSNEELFIALKNMVKHRGISYLDDASDDGNSSVGDYAQIVKENSKQLETKTPGQIQLERYQTYGQLRGDFTVEKDGKKHRLINVFPTSAYRSEALRILQTQQEFNPQITDEFINRYLEILTGKRKYYHGPGNEKSRTDYGRYRTSGETLDNIFGILIGKCTFYPDEFRAAKASYTAQEFNLLNDLNNLTVPTETKKLSKEQKNQIINYVKNEKAMGPAKLFKYIAKLLSCDVADIKEYRIDKSGKAEIHTFEAYRKMKTLETLDIEQMDRETLDKLAYVLTLNTEREGIQEALEHEFADGSFSQKQVDELVQFRKANSSIFGKGWHNFSVKLMMELIPELYETSEEQMTILTRLGKQKTTSSSNKTKYIDEKLLTEEIYNPVVAKSVRQAIKIVNAAIKEYGDFDNIVIEMARETNEDDEKKAIQKIQKANKDEKDAAMLKAANQYNGKAELPHSVFHGHKQLATKIRLWHQQGERCLYTGKTISIHDLINNSNQFEVDHILPLSITFDDSLANKVLVYATANQEKGQRTPYQALDSMDDAWSFRELKAFVRESKTLSNKKKEYLLTEEDISKFDVRKKFIERNLVDTRYASRVVLNALQEHFRAHKIDTKVSVVRGQFTSQLRRHWGIEKTRDTYHHHAVDALIIAASIQLNLWKKQKNTLVSYSEDQLLDIETGELISDDEYKESVFKAPYQHFVDTLKSKEFEDSILFSYQVDSKFNRKISDATIYATRQAKVGKDKADETYVLGKIKDIYTQDGYDAFMKIYKKDKSKFLMYRHDPQTFEKVIEPILENYPNKQINEKGKEVPVNPFLKYKEEHGYIRKYSKKGNGPEIKSLKYYDSKLGNHIDITPKDSNNKVVLQSVSPWRADVYFNKTTGKYEILGLKYADLQFEKGTGTYKISQEKYNDIKKKEGVDSDSEFKFTLYKNDLLLVKDTETKEQQLFRFLSRTMPKQKHYVELKPYDKQKFEGGEALIKVLGNVANSGQCKKGLGKSNISIYKVRTDVLGNQHIIKNEGDKPKLDF

SEQ ID NO: 590 - protein, 1388 aa, Streptococcus thermophilus
MTKPYSIGLDIGTNSVGWAVTTDNYKVPSKKMKVLGNTSKKYIKKNLLGVLLFDSGITAEGRRLKRTARRRYTRRRNRILYLQEIFSTEMATLDDAFFQRLDDSFLVPDDKRDSKYPIFGNLVEEKAYHDEFPTIYHLRKYLADSTKKADLRLVYLALAHMIKYRGHFLIEGEFNSKNNDIQKNFQDFLDTYNAIFESDLSLENSKQLEEIVKDKISKLEKKDRILKLFPGEKNSGIFSEFLKLIVGNQADFRKCFNLDEKASLHFSKESYDEDLETLLGYIGDDYSDVFLKAKKLYDAILLSGFLTVTDNETEAPLSSAMIKRYNEHKEDLALLKEYIRNISLKTYNEVFKDDTKNGYAGYIDGKTNQEDFYVYLKKLLAEFEGADYFLEKIDREDFLRKQRTFDNGSIPYQIHLQEMRAILDKQAKFYPFLAKNKERIEKILTFRIPYYVGPLARGNSDFAWSIRKRNEKITPWNFEDVIDKESSAEAFINRMTSFDLYLPEEKVLPKHSLLYETFNVYNELTKVRFIAESMRDYQFLDSKQKKDIVRLYFKDKRKVTDKDIIEYLHAIYGYDGIELKGIEKQFNSSLSTYHDLLNIINDKEFLDDSSNEAIIEEIIHTLTIFEDREMIKQRLSKFENIFDKSVLKKLSRRHYTGWGKLSAKLINGIRDEKSGNTILDYLIDDGISNRNFMQLIHDDALSFKKKIQKAQIIGDEDKGNIKEVVKSLPGSPAIKKGILQSIKIVDELVKVMGGRKPESIVVEMARENQYTNQGKSNSQQRLKRLEKSLKELGSKILKENIPAKLSKIDNNALQNDRLYLYYLQNGKDMYTGDDLDIDRLSNYDIDHIIPQAFLKDNSIDNKVLVSSASNRGKSDDVPSLEVVKKRKTFWYQLLKSKLISQRKFDNLTKAERGGLSPEDKAGFIQRQLVETRQITKHVARLLDEKFNNKKDENNRAVRTVKIITLKSTLVSQFRKDFELYKVREINDFHHAHDAYLNAVVASALLKKYPKLEPEFVYGDYPKYNSFRERKSATEKVYFYSNIMNIFKKSISLADGRVIERPLIEVNEETGESVWNKESDLATVRRVLSYPQVNVVKKVEEQNHGLDRGKPKGLFNANLSSKPKPNSNENLVGAKEYLDPKKYGGYAGISNSFTVLVKGTIEKGAKKKITNVLEFQGISILDRINYRKDKLNFLLEKGYKDIELIIELPKYSLFELSDGSRRMLASILSTNNKRGEIHKGNQIFLSQKFVKLLYHAKRISNTINENHRKYVENHKKEFEELFYYILEFNENYVGAKKNGKLLNSAFQSWQNHSIDELCSSFIGPTGSERKGLFELTSRGSAADFEFLGVKIPRYRDYTPSSLLKDATLIHQSVTGLYETRIDLAKLGEG

SEQ ID NO: 591 - protein, 1121 aa, Streptococcus thermophilus
MSDLVLGLDIGIGSVGVGILNKVTGEIIHKNSRIFPAAQAENNLVRRTNRQGRRLARRKKHRRVRLNRLFEESGLITDFTKISINLNPYQLRVKGLTDELSNEELFIALKNMVKHRGISYLDDASDDGNSSVGDYAQIVKENSKQLETKTPGQIQLERYQTYGQLRGDFTVEKDGKKHRLINVFPTSAYRSEALRILQTQQEFNPQITDEFINRYLEILTGKRKYYHGPGNEKSRTDYGRYRTSGETLDNIFGILIGKCTFYPDEFRAAKASYTAQEFNLLNDLNNLTVPTETKKLSKEQKNQIINYVKNEKAMGPAKLFKYIAKLLSCDVADIKGYRIDKSGKAEIHTFEAYRKMKTLETLDIEQMDRETLDKLAYVLTLNTEREGIQEALEHEFADGSFSQKQVDELVQFRKANSSIFGKGWHNFSVKLMMELIPELYETSEEQMTILTRLGKQKTTSSSNKTKYIDEKLLTEEIYNPVVAKSVRQAIKIVNAAIKEYGDFDNIVIEMARETNEDDEKKAIQKIQKANKDEKDAAMLKAANQYNGKAELPHSVFHGHKQLATKIRLWHQQGERCLYTGKTISIHDLINNSNQFEVDHILPLSITFDDSLANKVLVYATANQEKGQRTPYQALDSMDDAWSFRELKAFVRESKTLSNKKKEYLLTEEDISKFDVRKKFIERNLVDTRYASRVVLNALQEHFRAHKIDTKVSVVRGQFTSQLRRHWGIEKTRDTYHHHAVDALIIAASSQLNLWKKQKNTLVSYSEDQLLDIETGELISDDEYKESVFKAPYQHFVDTLKSKEFEDSILFSYQVDSKFNRKISDATIYATRQAKVGKDKADETYVLGKIKDIYTQDGYDAFMKIYKKDKSKFLMYRHDPQTFEKVIEPILENYPNKQINEKGKEVPCNPFLKYKEEHGYIRKYSKKGNGPEIKSLKYYDSKLGNHIDITPKDSNNKVVLQSVSPWRADVYFNKTTGKYEILGLKYADLQFEKGTGTYKISQEKYNDIKKKEGVDSDSEFKFTLYKNDLLLVKDTETKEQQLFRFLSRTMPKQKHYVELKPYDKQKFEGGEALIKVLGNVANSGQCKKGLGKSNISIYKVRTDVLGNQHIIKNEGDKPKLDF

SEQ ID NO: 592 - protein, 1122 aa, Streptococcus thermophilus
MSDLVLGLDIGIGSVGVGILNKVTGEIIHKNSRIFPAAQAENNLVRRTNRQGRRLTRRKKHRIVRLNRLFEESGLITDFTKISINLNPYQLRVKGLTDELSNEELFIALKNMVKHRGISYLDDASDDGNSSVGDYAQIVKENSKQLETKTPGQIQLERYQTYGQLRGDFTVEKDGKKHRLINVFPTSAYRSEALRILQTQQEFNSQITDEFINRYLEILTGKRKYYHGPGNEKSRTDYGRYRTNGETLDNIFGILIGKCTFYPDEFRAAKASYTAQEFNLLNDLNNLTVPTETKKLSKEQKNQIINYVKNEKVMGPAKLFKYIAKLLSCDVADIKGHRIDKSGKAEIHTFEAYRKMKTLETLDIEQMDRETLDKLAYVLTLNTEREGIQEALEHEFADGSFSQKQVDELVQFRKANSSIFGKGWHNFSVKLMMELIPELYETSEEQMTILTRLGKQKTTSSSNKTKYIDEKLLTEEIYNPVVAKSVRQAIKIVNAAIKEYGDFDNIVIEMARETNEDDEKKAIQKIQKANKDEKDAAMLKAANQYNGKAELPHSVFHGHKQLATKIRLWHQQGERCLYTGKTISIHDLINNPNQFEVDHILPLSITFDDSLANKVLVYATANQEKGQRTPYQALDSMDDAWSFRELKAFVRESKTLSNKKKEYLLTEEDISKFDVRKKFIERNLVDTRYASRVVLNALQEHFRAHKIDTKVSVVRGQFTSQLRRHWGIEKTRDTYHHHAVDALIIAASSQLNLWKKQKNTLVSYSEEQLLDIETGELISDDEYKESVFKAPYQHFVDTLKSKEFEDSILFSYQVDSKFNRKISDATIYATRQAKVGKDKKDETYVLGKIKDIYTQDGYDAFMKIYKKDKSKFLMYRHDPQTFEKVIEPILENYPNKEMNEKGKEVPCNPFLKYKEEHGYIRKYSKKGNGPEIKSLKYYDSKLLGNPIDITPENSKNKVVLQSLKPWRTDVYFNKNTGKYEILGLKYADLQFEKKTGTYKISQEKYNGIMKEEGVDSDSEFKFTLYKNDLLLVKDTETKEQQLFRFLSRTMPNVKYYVELKPYSKDKFEKNESLIEILGSADKSGRCIKGLGKSNISIYKVRTDVLGNQHIIKNEGDKPKLDF

SEQ ID NO: 593 - protein, 1388 aa, Streptococcus thermophilus
MTKPYSIGLDIGTNSVGWAVITDNYKVPSKKMKVLGNTSKKYIKKNLLGVLLFDSGITAEGRRLKRTARRRYTRRRNRILYLQEIFSTEMATLDDAFFQRLDDSFLVPDDKRDSKYPIFGNLVEEKAYHDEFPTIYHLRKYLADSTKKADLRLVYLALAHMIKYRGHFLIEGEFNSKNNDIQKNFQDFLDTYNAIFESDLSLENSKQLEEIVKDKISKLEKKDRILKLFPGEKNSGIFSEFLKLIVGNQADFRKCFNLDEKASLHFSKESYDEDLETLLGYIGDDYSDVFLKAKKLYDAILLSGFLTVTDNETEAPLSSAMIKRYNEHKEDLALLKEYIRNISLKTYNEVFKDDTKNGYAGYIDGKTNQEDFYVYLKNLLAEFEGADYFLEKIDREDFLRKQRTFDNGSIPYQIHLQEMRAILDKQAKFYPFLAKNKERIEKILTFRIPYYVGPLARGNSDFAWSIRKRNEKITPWNFEDVIDKESSAEAFINRMTSFDLYLPEEKVLPKHSLLYETFNVYNELTKVRFIAESMRDYQFLDSKQKKDIVRLYFKDKRKVTDKDIIEYLHAIYGYDGIELKGIEKQFNSSLSTYHDLLNIINDKEFLDDSSNEAIIEEIIHTLTIFEDREMIKQRLSKFENIFDKSVLKKLSRRHYTGWGKLSAKLINGIRDEKSGNTILDYLIDDGISNRNFMQLIHDDALSFKKKIQKAQIIGDEDKGNIKEVVKSLPGSPAIKKGILQSIKIVDELVKVMGGRKPESIVVEMARENQYTNQGKSNSQQRLKRLEKSLKELGSKILKENIPAKLSKIDNNALQNDRLYLYYLQNGKDMYTGDDLDIDRLSNYDIDHIIPQAFLKDNSIDNKVLVSSASNRGKSDDFPSLEVVKKRKTFWYQLLKSKLISQRKFDNLTKAERGGLLPEDKAGFIQRQLVETRQITKHVARLLDEKFNNKKDENNRAVRTVKIITLKSTLVSQFRKDFELYKVREINDFHHAHDAYLNAVIASALLKKYPKLEPEFVYGDYPKYNSFRERKSATEKVYFYSNIMNIFKKSISLADGRVIERPLIEVNEETGESVWNKESDLATVRRVLSYPQVNVVKKVEEQNHGLDRGKPKGLFNANLSSKPKPNSNENLVGAKEYLDPKKYGGYAGISNSFAVLVKGTIEKGAKKKITNVLEFQGISILDRINYRKDKLNFLLEKGYKDIELIIELPKYSLFELSDGSRRMLASILSTNNKRGEIHKGNQIFLSQKFVKLLYHAKRISNTINENHRKYVENHKKEFEELFYYILEFNENYVGAKKNGKLLNSAFQSWQNHSIDELCSSFIGPTGSERKGLFELTSRGSAADFEFLGVKIPRYRDYTPSSLLKDATLIHQSVTGLYETRIDLAKLGEG

SEQ ID NO: 594 - protein, 1121 aa, Streptococcus thermophilus
MSDLVLGLDIGIGSVGVGILNKVTGEIIHKNSRIFPAAQAENNLVRRTNRQGRRLTRRKKHRRVRLNRLFEESGLITDFTKISINLNPYQLRVKGLTDELSNEELFIALKNMVKHRGISYLDDASDDGNSSVGDYAQIVKENSKQLETKTPGQIQLERYQTYGQLRGDFTVEKDGKKHRLINVFPTSAYRSEALRILQTQQEFNPQITDEFVNRYLEILTGKRKYYHGPGNEKSRTDYGRYRTNGETLDNIFGILIGKCTFYPEEFRAAKASYTAQEFNLLNDLNNLTVPTETKKLSKEQKNQIINYVKNEKAMGPAKLFKYIAKLLSCDVADIKGYRIDKSGKAEIHTFEAYRKMKTLETLDIEQMDRETLDKLAYVLTLNTEREGIQEALEHEFADGSFSQKQVDELVQFRKANSSIFGKGWHNFSVKLMMELIPELYETSEEQMTILKRLGKQKTTSSSNKTKYIDEKLLTEEIYNPVVAKSIRQAIKIVNAAIKEYGDFDNIVIEMARETNEDDEKKAIQKIQKANKDEKDAAMLKAANQYNGKAELPHSVFHGHKQLATKIRLWHQQGERCLYTGKTISIHDLINNPNQFEVDHILPLSITFDDSLANKVLVYATANQEKGQRTPYQALDSMDDAWSFRELKAFVRESKTLSNKKKEYLLTEEDISKFDVRKKFIERNLVDTRYASRVVLNALQEHFRAHKIDTKVSVVRGQFTSQLRRHWGIEKTRDTYHHHAVDALIIAASSQLNLWKKQKNTLVSYSEDQLLDIETGELISDDEYKESVFKAPYQHFVDTLKSKEFEDSILFSYQVDSKFNRKISDATIYATRQAKVGKDKKDETYVLGKIKDIYTQDGYDAFMKIYKKDKSKFLMYRHDPQTFEKVIEPILENYPNKEMNEKGKEVPCNPFLKYKEEHGYIRKYSKKGNDPEIKSLKYYDSKLGNHIDITPKDSNNKVVLQSVSPWRADVYFNKTTGKYEILGLKYADLQFEKGTGTYKISQEKYNDIKKKEGVDSDSEFKFTLYKNDLLLVKDTETKEQQLFRFLSRTMPKQKHYVELKPYDKQKFEGGEALIKVLGNVANSGQCKKGLGKSNISIYKVRTDVLGNQHIIKNEGDKPKLDF

SEQ ID NO: 595 - protein, 1122 aa, Streptococcus thermophilus
  REGION 1..1122: note = Streptococcus thermophilus MTCC 5460
MSDLVLGLDIGIGSVGVGILNKVTGEIIHKNSRIFPAAQAENNVERRTNRQGRRLTRRKKHRRVRLNRLFEESGLITDFTKISINLNPYQLRVRGLTDELSNEELFIALKNMVKHRGISYLDDASDDGNSSVGDYAQIVKENSKQLETKTPGQIQLERYQTYGQLRGDFTVEKDGKKHRLINVFPTSAYRSEALRILQTQQEFNSQITDEFINRYLEILTGKRKYYHGPGNEKSRTDYGRYRTSGETLDNIFGILIGKCTFYPEEFRAAKASYTAQEFNLLNDLNNLTVPTETKKLSKEQKNQIINYVKNEKAMGPAKLFKYIAKLLSCDVADIKGYRIDKSGKAEIHTFEAYRKMKTLETLDIEQMDRETLDKLAYVLTLNTEREGIQEALEHEFADGSFSQKQVDELVQFRKASSSIFGKGWHNFSVKLMMELIPELYETSEEQMTILTRLGKQKTTSSSNKTKYIDEKLLTEEIYNPVVAKSVRQAIKIVNAAIKEYGDFDNIVIEMARETNEDDEKKAIQKIQKANKDEKDAAMLKAANQYNGKAELPHSVFHGHKQLATKIRLWHQQGERCLYTGKTISIHDLINNPNQFEVDHILPLSITFDDSLANKVLVYATANQEKGQRTPYQALDSMDDAWSFRELKAFVRESKTLSNKKKEYLLTEEDISKFDVRKKFIERNLVDTRYASRVVLNALQEHFRAHKIDTKVSVVRGQFTSQLRRHWGIEKTRDTYHHHAVDALIIAASSQLNLWKKQKNTLVSYSEDQLLDIETGELISDDEYKESVFKAPYQHFVDTLKSKEFEDSILFSYQVDSKFNRKLSDATIYATRQAKVGKDKKDETYVLGKIKDIYTQDGYDAFMKIYKKDKSKFLMYRHDPQTFEKVIEPILENYPNKEMNEKGKEVPCNPFLKYKEEHGYIRKYSKKGNGPEIKSLKYYDSKLLGNPIDITPENSKNKVVLQSLKPWRADVYFNKTTGKYEILGLKYADLQFEKKTGTYKISQEKYNGIMKEEGVDSDSEFKFTLYKNDLLLVKDTETKEQQLFRFLSRTMPNVKYYVELKPYSKDKFEKNESLIEILGSADKSGRCIKGLGKSNISIYKVRTDVLGNQHIIKNEGDKPKLDF

SEQ ID NO: 596 - protein, 1121 aa, Streptococcus thermophilus
MSDLVLGLDIGIGSVGVGILNKVTGEIIHKNSRIFPAAQAENNLVRRTNRQGRRLTRRKKHRIVRLNRLFEESGLITDFTKISINLNPYQLRVKGLTDELSNEELFIALKNMVKHRGISYLDDASDDGNSSVGDYAQIVKENSKQLETKTPGQIQLERYQTYGQLRGDFTVEKDGKKHRLINVFPTSAYRSEALRILQTQQEFNPQITDEFINRYLEILTGKRKYYHGPGNEKSRTDYGRYRTSGETLDNIFGILIGKCTFYPDEFRAAKASYTAQEFNLLNDLNNLTVPTETKKLSKEQKNQIINYVKNEKAMGPAKLFKYIAKLLSCDVADIKGYRIDKSGKAEIHTFEAYRKMKTLETLDIEQMDRETLDKLAYVLTLNTEREGIQEALEHEFADGSFSQKQVDELVQFRKANSSIFGKGWHNFSVKLMMELIPELYETSEEQMTILTRLGKQKTTSSSNKTKYIDEKLLTEEIYNPVVAKSVRQAIKIVNAAIKEYGDFDNIVIEMARETNEDDEKKAIQKIQKANKDEKDAAMLKAANQYNGKAELPHSVFHGHKQLATKIRLWHQQGERCLYTGKTISIHDLINNSNQFEVDHILPLSITFDDSLANKVLVYATANQEKGQRTPYQALDSMDDAWSFRELKAFVRESKTLSNKKKEYLLTEEDISKFDVRKKFIERNLVDTRYASRVVLNALQEHFRAHKIDTKVSVVRGQFTSQLRRHWGIEKTRDTYHHHAVDALIIAASSQLNLWKKQKNTLVSYSEDQLLDIETGELISDDEYKESVFKAPYQHFVDTLKSKEFEDSILFSYQVDSKFNRKISDATIYATRQAKVGKDKADETYVLGKIKDIYTQDGYDAFMKIYKKDKSKFLMYRHDPQTFEKVIEPILENYPNKQMNEKGKEVPCNPFLKYKEEHGYIRKYSKKGNGPEIKSLKYYDSKLGNHIDITPKDSNNKVVLQSVSPWRADIYFNNTTGKYEILGLKYADLQFEKGTGTYKISQEKYNDIKKKEGVDSDSEFKFTLYKNDLLLVKETETKEQQLFRFLSRTMPKQKHYVELKPYDKQKFEGGEALIKVLGNVANGGQCIKGLGKSNISIYKVRTDVLGNQHIIKNEGDKPKLDF

SEQ ID NO: 597 - protein, 1388 aa, Streptococcus thermophilus
MTKPYSIGLDIGTNSVGWAVITDNYKVPSKKMKVLGNTSKKYIKKNLLGVLLFDSGITAEGRRLKRTARRRYTRRRNRILYLQEIFSTEMATLDDAFFQRLDDSFLVPDDKRDSKYPIFGNLVEEKAYHDEFPTIYHLRKYLADSTKKADLRLVYLALAHMIKYRGHFLIEGEFNSKNNDIQKNFQDFLDTYNAIFESDLSLENSKQLEEIVKDKISKLEKKDRILKLFPGEKNSGIFSEFLKLIVGNQADFRKCFNLDEKASLHFSKESYDEDLETLLGYIGDDYSDVFLKAKKLYDAILLSGFLTVTDNETEAPLSSAMIKRYNEHKEDLALLKEYIRNISLKTYNEVFKDDTKNGYAGYIDGKTNQEDFYVYLKNLLAEFEGADYFLEKIDREDFLRKQRTFDNGSIPYQIHLQEMRAILDKQAKFYPFLAKNKERIEKILTFRIPYYVGPLARGNSDFAWSIRKRNEKITPWNFEDVIDKESSAEAFINRMTSFDLYLPEEKVLPKHSLLYETFNVYNELTKVRFIAESMRDYQFLDSKQKKDIVRLYFKDKRKVTDKDIIEYLHAIYGYDGIELKGIEKQFNSSLSTYHDLLNIINDKEFLDDSSNEAIIEEIIHTLTIFEDREMIKQRLSKFENIFDKSVLKKLSRRHYTGWGKLSAKLINGIRDEKSGNTILDYLIDDGISNRNFMQLIHDDALSFKKKIQKAQIIGDEDKGNIKEVVKSLPGSPAIKKGILQSIKIVDELVKVMGGRKPESIVVEMARENQYTNQGKSNSQQRLKRLEKSLKELGSKILKENIPAKLSKIDNNALQNDRLYLYYLQNGKDMYTGDDLDIDRLSNYDIDHIIPQAFLKDNSIDNKVLVSSASNRGKSDDFPSLEVVKKRKTFWYQLLKSKLISQRKFDNLTKAERGGLLPEDKAGFIQRQLVETRQITKHVARLLDEKFNNKKDENNRAVRTVKIITLKSTLVSQFRKDFELYKVCEINDFHHAHDAYLNAVIASALLKKYPKLEPEFVYGDYPKYNSFRERKSATEKVYFYSNIMNIFKKSISLADGRVIERPLIEVNEETGESVWNKESDLATVRRVLSYPQVNVVKKVEEQNHGLDRGKPKGLFNANLSSKPKPNSNENLVGAKEYLDPKKYGGYAGISNSFAVLVKGTIEKGAKKKITNVLEFQGISILDRINYRKDKLNFLLEKGYKDIELIIELPKYSLFELSDGSRRMLASILSTNNKRGEIHKGNQIFLSQKFVKLLYHAKRISNTINENHRKYVENHKKEFEELFYYILEFNENYVGAKKNGKLLNSAFQSWQNHSIDELCSSFIGPTGSERKGLFELTSRGSAADFEFLGVKIPRYRDYTPSSLLKDATLIHQSVTGLYETRIDLAKLGEG

SEQ ID NO: 598 - protein, 1128 aa, Streptococcus vestibularis
  REGION 1..1128: note = Streptococcus vestibularis ATCC 49124
MSDLVLGLDIGIGSVGVGILNKVTGEIIHKNSRIFPAAQAENNVERRTNRQGRRLTRRKKHRRVRLNHLFEESGLITDFTKVSINLNPYQLRVKGLIDELSNEELFIALKNMVKHRGISYLDDASDDGNSSVGDYAQIVKENSKQLETKTPGQIQLERYQKYGQLRGDFTVEEDGKKHRLINVFPTSAYRSEALRILQTQKEFNPQITDEFINRYLEILTGKRKYYHGPGNEKSRTDYGRYTTKKDSENEYITLDNIFGILIGKCTFYPEEYRAAKASYTAQEFNLLNDLNNLTVPTETKKLSEEQKNQIINYVKNEKAMGPAKLFKYIAKLLSCDVADIKGYRIDKSDKAEIHTFEAYRKMKTLETIDFEKMSRDQLDKLAYVLTLNTEREGIQEALDHEFADGNFSQEQIDELVQFRKANSSIFGKGWHNFSVKLMMELIPELYATSEEQMTILTRLGKQKTTSSSNKTKYIDEKLLTEEIYNPVVAKSVRQAIKIVNAAIKEYGDFDNIVIEMARETNEDDEKKAIQKIQKANKDEKDAAMLKAANQYNGRAELPHSVFHGHKQLATKIRLWHQQGERCLYTGKTISIHDLINNPNQFEIDHILPLSITFDDSLANKVLVYATANQEKGQRTPYQALDSMDDAWSFRELKAFVRESKSLSNKKKEYLLTEEDISRFDVRKKFIERNLVDTRYASRVVLNALQEHFRAHKTDTKVSVVRGQFTSQLRRHWGIEKTRDTYHHHAVDALIIAASSQLNLWKKQKNTLVNYSENQLLDIETGELISDDEYKESVFKAPYQHFVDTLKSKEFEDSILFSYQVDSKFNRKISDATIYATRQAKVGKDKKDETYVLGKIKDIYSQTGYDAFIKIYQKDKSKFLMYRHDPQTFEKVIEPILENYPNKEMNEKGKEVPCNPFLKYKEEHGDYIRKYSKKGNGPEIKSLKYYDSKLGNHIDITPKDSNNKVVLQSVSPWRADVYFNKTTGKYEILGLKYADLQFEKGTGTYKISQEKYNVIKKKEGVDSDSEFKFTLYKNDLLLIKDTETKEQQLFRFLSRTKPNVKHYVELKPYDKQKFEGNESLINVLGAVAKGGQCQKGINKPNISIYKVRTDVLGNQHIIKNEGDKPKLDF

SEQ ID NO: 599 - protein, 1084 aa, Subdoligranulum sp.
  REGION 1..1084: note = Subdoligranulum sp. 4_3_54A2FAA
MKNTLYGIGLDIGVASVGWAVVGLNGTGEPVGLHRLGVRIFDKAEQPKTGESLAAPRRMARGMRRRLRRKALRRADVYALLERSGLSTREELAQMFEAGGLEDIYALRTRALDEPVGKAEFSRILLHLAQRRGFKSNRRTASDGEDGRLLAAVNENRRRMAQGGWRTVGEMLYRHEAFALHKRNKADDYLSTVGRDMVAEEASILFERQRAMGCSWAAPELQAEYLSILLRQRSFDEGPGGNSPYGGNQVEKMVGRCTFEPDEPRAAKAAYSFEYFSLLQKLNHIRLAENGETRPLTQPQRQQLLSLAHKTPDISLARIRKELALPETVQFNGVRCRANETLEESEKKEKFACLPAYHKMRKALDGVVKGRISSLSISQRDAAATALSLYKNEDTLRAKLTEAGFQAPEIDALAGLTGFSKFGHLSLKACRKLIPHLEQGLTYDQACTAAGYDFKGHGAGERAFTLPAAAPEMEQITSPVVRRAVAQTIKVVNGIIREMDASPAWVRIELARELSKTFGERQEMDRSMRENAAQNERLMQELRDTFHLLSPTGQDLVKYRLWKEQDGVCAYSLRRLDVERLFEPGYVDVDHIVPYSLSFDDRRSNKVLVLSSENRQKGNRLPLQYLQGKRREDFIVWTNSSVHDYRKRQNLLREKLSGDEAEGFRQRNLQDTQHMARFLYNYISDHLAFAQSEALGKKRVFAVSGAVTSHLRKRWGLSKVRADGDLHHALDAAVVACTTDGMIRRISGYYGHIEGEYLQDADGAGSQHARTKERFPAPWPRFRDELIVRLSEQPAEPLLDINPEFYCEYGTEHIRPVFVSRMPRRKVTGPGHKETIKGAAAADEGLLTVRKALTELKLDKDGEIKDYYMPSSDTLLYEALKAQLRRFGGDGKKAFAEPFYKPKADGTPGPLVRKVKTTEKATLTVPVHGGAASNDTMVRVDVFLVPGDGYYWVPVYTADTLKPELPNRAVVQGKPYSEWKEMREEDFIFSLYPNDLVYVEHKSGLKFTLQNADSTLEKTRTQTSAFAYFVSGSISTASITIRTHDNAYGIPSLGVKTLKTFHKYQVDVLGNVFPVHKETRQKFR

SEQ ID NO: 600 - protein, 1422 aa, Sutterella wadsworthensis
  REGION 1..1422: note = Sutterella wadsworthensis 3_1_45B
MTQSERRFSCSIGIDMGAKYTGVFYALFDREELPTNLNSKAMTLVMPETGPRYVQAQRTAVRHRLRGQKRYTLARKLAFLVVDDMIKKQEKRLTDEEWKRGREALSGLLKRRGYSRPNADGEDLTPLENVRADVFAAHPAFSTYFSEVRSLAEQWEEFTANISNVEKFLGDPNIPADKEFIEFAVAEGLIDKTEKKAYQSALSTLRANANVLTGLRQMGHKPRSEYFKAIEADLKKDSRLAKINEAFGGAERLARLLGNLSNLQLRAERWYFNAPDIMKDRGWEPDRFKKTLVRAFKFFHPAKDQNKQHLELIKQIENSEDIIETLCTLDPNRTIPPYEDQNNRRPPLDQTLLLSPEKLTRQYGEIWKTWSARLTSAEPTLAPAAEILERSTDRKSRVAVNGHEPLPTLAYQLSYALQRAFDRSKALDPYALRALAAGSKSNKLTSARTALENCIGGQNVKTFLDCARRYYREADDAKVGLWFDNADGLLERSDLHPPMKKKILPLLVANILQTDETTGQKFLDEIWRKQIKGRETVASRCARIETVRKSFGGGFNIAYNTAQYREVNKLPRNAQDKELLTIRDRVAETADFIAANLGLSDEQKRKFANPFSLAQFYTLIETEVSGFSATTLAVHLENAWRMTIKDAVINGETVRAAQCSRLPAETARPFDGLVRRLVDRQAWEIAKRVSTDIQSKVDFSNGIVDVSIFVEENKFEFSASVADLKKNKRVKDKMLSEAEKLETRWLIKNERIKKASRGTCPYTGDRLAEGGEIDHILPRSLIKDARGIVFNAEPNLIYASSRGNQLKKNQRYSLSDLKANYRNEIFKTSNIAAITAEIEDVVTKLQQTHRLKFFDLLNEHEQDCVRHALFLDDGSEARDAVLELLATQRRTRVNGTQIWMIKNLANKIREELQNWCKTTNNRLHFQAAATNVSDAKNLRLKLAQNQPDFEKPDIQPIASHSIDALCSFAVGSADAERDQNGFDYLDGKTVLGLYPQSCEVIHLQAKPQEEKSHFDSVAIFKEGIYAEQFLPIFTLNEKIWIGYETLNAKGERCGAIEVSGKQPKELLEMLAPFFNKPVGDLSAHATYRILKKPAYEFLAKAALQPLSAEEKRLAALLDALRYCTSRKSLMSLFMAANGKSLKKREDVLKPKLFQLKVELKGEKSFKLNGSLTLPVKQDWLRICDSPELADAFGKPCSADELTSKLARIWKRPVMRDLAHAPVRREFSLPAIDNPSGGFRIRRTNLFGNELYQVHAINAKKYRGFASAGSNVDWSKGILFNELQHENLTECGGRFITSADVTPMSEWRKVVAEDNLSIWIAPGTEGRRYVRVETTFIQASHWFEQSVENWAITSPLSLPASFKVDKPAEFQKAVGTELSELLGQPRSEIFIENVGNAKHIRFWYIVVSSNKKMNESYNNVSKS

SEQ ID NO: 601 - protein, 1049 aa, Tistrella mobilis
MINERLTFGIDLGIGSCGWAVLRHADAAGEPGVIEGLGSWCFDVPETSKERIPTNQVRRSNRLLRRVIRRRRNRMAEIRRLFHAQGLLPSADEDALKRPRLDPWELRARGLDQCLSAEEFAVALGHIARHRGFRSSAKRKAANTSGEDSKMLSALLVTRERTARYRTVGEMFARDPEYSARRRNRDGIFDRTVARDDLIHEVGKLFEAQRARGSAFASPDLEADFNAIAFRQAEMQDSERLVGNCPFERDEKRAARWAPSFERFRLLTRLINLRIATAEGERRFTPEDLARVSAELGATAKLPVSRVRALIGLLPDERFTTIRVEDEDRDIVARTGEAAPGTWRLRKTLGEALWAEMQARPDQLDAIAHVLSFFEATAKIRSELDRLGLPAAVIEALDRGLEDGAFAKFKGAGHISAKACRNLLPHLQQGHRYDQACRLAGYDHAASTLSHTAQVVSKAGFNALVTELGESIANPIARKALTEGLKQIRAMCARWGLPGAIHIELAREVGNSIEKRRELESQRETTTKRRQTERDEIRGLLALEDVDDDTLLRYRLWKEQGGKCLYTGKDIHVRQLIATDNSVQVDHILPWSRFGDDSFNNKTLCLASANQRKRGQTPWEWFSLTGTPEAWEVFASRVETSKDLRGFKKRNLLLKNADEVAQRFRSRNLNDTRYAARLLAEAAKLFYPAGDRQEKDGRRRVLTRPGPLTAALRHAWGLESLKKADGKRVSDDRHHALDALAVAAISEREVQRLTRSFQEWEQQGLARPLRHVAPPWPGFRGDVLAAYAQAFVARPERRRARGKGHDASIRQVVGEGPEAQVFERRGLADLKEADLDRVKDPERNQAIIEAVRAWILAGRPADAPPRSPRGDVIVKLRTAPAKKIKPAVPVRGGTADRGDMVRIDVFTRPNRKGRDEWYLVPIYPHQVMNRKAWPHPPMRSVVAYKDEAGWTEIGAEHSFRFSLYPRSYVQLVKSNGDVIEGYLVSMDRSTGAFRVFVHNNPAEMAKGIGAKTLLNLRKFNVDRFGVRTEVKSEVRTWHGEVCTSPVPPD

SEQ ID NO: 602 - protein, 1395 aa, Treponema denticola
  REGION 1..1395: note = Treponema denticola AL-2
MKKEIKDYFLGLDVGTGSVGWAVTDTDYKLLKANRKDLWGMRCFETAETAEVRRLHRGARRRIERRKKRIKLLQELFSQEIAKIDEGFFQRMKESPFYAEDKTILQENALFNDKDFTDKTYHKAYPTINHLIKAWIENKVKPDPRLLYLACHNIIKKRGHFLFEGDFDSENQFDTSIQALFEYLREDMEVDIDADSQKVKEILKDSSLKNSEKQSRLNKILGLKPSDKQKKAITNLISGNKINFADLYDNPDLKDAEKNSISFSKDDFDALSDDLASILGDSFELLLKAKAVYNCSVLSKVIGDEQYLSFAKVKIYEKHKTDLTKLKAVIKKHFPNNYKKVFGYNQDNESKNNYSGYVGVCKTKNKKLVINNSVNQEDFYKFLKPILSAKSEIKEVNDILAEIETGNFLPKQISKSNAEIPYQLRKMELEKILSNAEKHFSFLKQKDEKGLSHSEKIIMLLTFKIPYYIGPINDNHKKSFPDRCWVVKKEKSPSGKTTPWNFFDHIDKEKTAEEFITSRTNFCTYLIGESVLPKNSLLYSEYTVLNEINNLQIIIDGKNICDTKLKQKIYEDLFKKYKKITQKQISTFIKHEGICNKTDEVIILGIDKECTSSLKSYIELKNIFGKQVDEISTKNMLEEIIRWATIYDEGEGKTILKTKIKAEYGKYCSDEQIKKILNLKFSGWGRLSRKFLETVTSEMPGFSEPVNIITAMRETQNNLMELLSSEFKFTENIKKINSGFEDAEKQFSYDGLVKPLFLSPSVKKMLWQTLKLVKEISHITQAPPKKIFIEMAKGAELEPARTKTRLKILQDLYSSCKNDADAFSSEIQYLSGKIENEDNLRLRSDKLYLYYTQLGKCMYCGKPIEIGHVFDTSNYDIDHIYPQSKIKDDSISNRVLVCSSCNKNKEDKYPLKSEIQSKQRGFWNFLQRNNFISLEKLNRLTRTTPISDDETAKFIARQLVETRQATKVAAKVLEKMFPETKIVYSKAETVSMFRNKFDIIKCREINDFHHAHDAYLNIVVGNVYNTKFTNNPWNFIKEKRDNPKIADTYNYYKVFDYDVKRNNITAWEKGKTIITVKDMLKRNTPIYTRQAACKKGGLFDQTIMKKGLGQHPLKKEGPFSNISKYGGYNKVSAAYYTLIEYEEKGNKIRSLETIPLYLVKDIQKDQDVLKSYLTDLLGKKEFKILVPKIKINSLLKINGFPCHITGKTNDSFLLRPAVQFCCSNDEVLYFKKIIRFSEIRSQREKIGKTISPYEDLSFRSYIKENLCKKTKNDEIGEKEFYDLLQKKNLEIYDMLLTKHKDTIYKKRPNSATIDILVKGKEKFKSLIIENQFEVILEILKLFSATRNVSELQHIGGSKYSGVAKIGNKISSLDNCILIYQSITGIFEKRIDLLKV

SEQ ID NO: 603 - protein, 1395 aa, Treponema denticola
  REGION 1..1395: note = Treponema denticola ASLM
MKKEIKDYFLGLDVGTGSVGWAVTDTDYKLLKANRKDLWGMRCFETAETAEVRRLHRGARRRIERRKKRIKLLQELFSQEIAKIDEGFFQRMKESPLYAEDKTILQENTLFNDKDFTDKTYHKAYPTINHLIKAWIENKVKPDPRLLYLACHNIIKKRGHFLFEGDFDSENQFDTSIQALFEYLREDMEVDIDADSQKVKEILKDSSLKNSEKQSRLNKMLGLKPSDKQKKAITNLISGNKINFADLYDNPDLKDAEKNSISFSKDDFDALSDDLASILGDSFELLLKAKAVYNCSVLSKVIGDEQYLSFAKVKIYEKHKTDLTKLKNVIKKHFPKDYKKVFGYNKNEKNNNNYSGYVGVCKTKSKKLIINNSVNQEDFYKFLKTILSAKSEIKEVNDILTEIETGTFLPKQISKSNAEIPYQLRKMELEKILSNAEKHFSFLKQKDEKGLSHSEKIIMLLTFKIPYYIGPINDNHKKSFPDRCWVVKKEKSPSGKTTPWNFFDHIDKEKTAEEFITSRTNFCTYLIGESVLPKNSLLYSEYTVLNEINNLQIIIDGKNICDTKLKQKIYEELFKKYKKITQKQISTFIKHEGICNKTDEVIILGIDKECTSSLKSYIELKNIFGKQVDEISTKNMLEEIIRWATIYDEGEGKTILKTKIKAEYGKYCSDEQIKKILNLKFSGWGRLSRKFLETVTSEMPGFSEPVNIITAMRETQNNLMELLSSEFKFTENIKKINSGFEDVEKQFSYDGLVKPLFLSPSVKKMLWQTLKLVKEISHITQAPPKKIFIEMAKGAELDPVRTKTRLKILQDLYNNCKNDADAFSSEIKDLSGKIENEDNLRLRSDKLYLYYTQLGKCMYCGKPIEIGHVFDTSNYDIDHIYPQSKIKDDSISNRVLVCSSCNKNKEDKYPLKAEIQSKQRGFWNFLQRNNFISLEKFNRLTRATPISDDETAKFIARQLVETRQATKVAARVLEKMFPETKIVYSKAETVSMFRNKFDIVKCREINDFHHAHDAYLNIVVGNVYNTKFTNNLWNFIKEKRDNPKIADTYNYYKVFDYDVKRNNITAWEKGKTIITVKDMLKRNTPIYTRQAACKKGGLFDQTIMKKGLGQHPLKKEGPFSNISKYGGYNKVSAAYYTLIEYEEKGNKIRSLETIPLYLVKDIQKDQDVLKSYLTDLLGKKEFKILVPKIKINSLLKINGFPCHITGKTNDSFLLRPAVQFCCSNDEVLYFKKIIRFSEIRSQREKIGKTISPYEDLSFRSYIKENLCKKTKNDEIGEKEFYDLLQKKNLEIYDMLLTKHKDTIYKKRPNSATIDILVKGKEKFKSLIIENQFEVILEILKLFSATRNVSDLQHIGGSKYSGVAKIGNKISSLDNCILIYQSITGIFEKRIDLLKV

SEQ ID NO: 604 - protein, 1395 aa, Treponema denticola
  REGION 1..1395: note = Treponema denticola ATCC 35405
MKKEIKDYFLGLDVGTGSVGWAVTDTDYKLLKANRKDLWGMRCFETAETAEVRRLHRGARRRIERRKKRIKLLQELFSQEIAKTDEGFFQRMKESPFYAEDKTILQENTLFNDKDFADKTYHKAYPTINHLIKAWIENKVKPDPRLLYLACHNIIKKRGHFLFEGDFDSENQFDTSIQALFEYLREDMEVDIDADSQKVKEILKDSSLKNSEKQSRLNKILGLKPSDKQKKAITNLISGNKINFADLYDNPDLKDAEKNSISFSKDDFDALSDDLASILGDSFELLLKAKAVYNCSVLSKVIGDEQYLSFAKVKIYEKHKTDLTKLKNVIKKHFPKDYKKVFGYNKNEKNNNNYSGYVGVCKTKSKKLIINNSVNQEDFYKFLKTILSAKSEIKEVNDILTEIETGTFLPKQISKSNAEIPYQLRKMELEKILSNAEKHFSFLKQKDEKGLSHSEKIIMLLTFKIPYYIGPINDNHKKFFPDRCWVVKKEKSPSGKTTPWNFFDHIDKEKTAEAFITSRTNFCTYLVGESVLPKSSLLYSEYTVLNEINNLQIIIDGKNICDIKLKQKIYEDLFKKYKKITQKQISTFIKHEGICNKTDEVIILGIDKECTSSLKSYIELKNIFGKQVDEISTKNMLEEIIRWATIYDEGEGKTILKTKIKAEYGKYCSDEQIKKILNLKFSGWGRLSRKFLETVTSEMPGFSEPVNIITAMRETQNNLMELLSSEFTFTENIKKINSGFEDAEKQFSYDGLVKPLFLSPSVKKMLWQTLKLVKEISHITQAPPKKIFIEMAKGAELEPARTKTRLKILQDLYNNCKNDADAFSSEIKDLSGKIENEDNLRLRSDKLYLYYTQLGKCMYCGKPIEIGHVFDTSNYDIDHIYPQSKIKDDSISNRVLVCSSCNKNKEDKYPLKSEIQSKQRGFWNFLQRNNFISLEKLNRLTRATPISDDETAKFIARQLVETRQATKVAAKVLEKMFPETKIVYSKAETVSMFRNKFDIVKCREINDFHHAHDAYLNIVVGNVYNTKFTNNPWNFIKEKRDNPKIADTYNYYKVFDYDVKRNNITAWEKGKTIITVKDMLKRNTPIYTRQAACKKGELFNQTIMKKGLGQHPLKKEGPFSNISKYGGYNKVSAAYYTLIEYEEKGNKIRSLETIPLYLVKDIQKDQDVLKSYLTDLLGKKEFKILVPKIKINSLLKINGFPCHITGKTNDSFLLRPAVQFCCSNNEVLYFKKIIRFSEIRSQREKIGKTISPYEDLSFRSYIKENLWKKTKNDEIGEKEFYDLLQKKNLEIYDMLLTKHKDTIYKKRPNSATIDILVKGKEKFKSLIIENQFEVILEILKLFSATRNVSDLQHIGGSKYSGVAKIGNKISSLDNCILIYQSITGIFEKRIDLLKV

SEQ ID NO: 605 - protein, 1395 aa, Treponema denticola
  REGION 1..1395: note = Treponema denticola H1-T
MKKEIKDYFLGLDVGTGSVGWAVTDTDYKLLKANRKDLWGMRCFETAETAEVRRLHRGARRRIERRKKRIKLLQELFSQEIAKIDEGFFQRMKESPFYAEDKTILQENALFNDKDFTDKTYHKAYPTINHLIKAWIENKVKPDPRLLYLACHNIIKKRGHFLFEGDFDSENQFDTSIQALFEYLREDMEVDIDADSQKVKEILKDSSLKNSEKQSRLNKILGLKPSDKQKKAITNLISGNKINFADLYDNPDLKDAEKNSISFSKDDFDALSDDLASILGDSFELLLKAKAVYNCSVLSKVIGDEQYLSFAKVKIYEKHKTDLTKLKAVIKKHFPNNYKKVFGYNQDNESKNNYSGYVGVCKTKNKKLVINNSVNQEDFYKFLKPILSAKSEIKEVNDILAEIETGNFLPKQISKSNAEIPYQLRKMELEKILSNAEKHFSFLKQKDEKGLSHSEKIIMLLTFKIPYYIGPINDNHKKSFPDRCWVVKKEKSPSGKTTPWNFFDHIDKEKTAEEFITSRTNFCTYLIGESVLPKNSLLYSEYTVLNEINNLQIIIDGKNICDTKLKQKIYEDLFKKYKKITQKQISTFIKHEGICNKTDEVIILGIDKECTSSLKSYIELKNIFGKQVDEISTKNMLEEIIRWATIYDEGEGKTILKTKIKAEYGKYCSDEQIKKILNLKFSGWGRLSRKFLETVTSEMPGFSEPVNIITAMRETQNNLMELLSSEFKFTENIKKINSGFEDAEKQFSYDGLVKPLFLSPSVKKMLWQTLKLVKEISHITQAPPKKIFIEMAKGAELEPARTKTRLKILQDLYSSCKNDADAFSSEIQYLSGKIENEDNLRLRSDKLYLYYTQLGKCMYCGKPIEIGHVFDTSNYDIDHIYPQSKIKDDSISNRVLVCSSCNKNKEDKYPLKSEIQSKQRGFWNFLQRNNFISLEKLNRLTRTTPISDDETAKFIARQLVETRQATKVAAKVLEKMFPETKIVYSKAETVSMFRNKFDIIKCREINDFHHAHDAYLNIVVGNVYNTKFTNNPWNFIKEKRDNPKIADTYNYYKVFDYDVKRNNITAWEKGKTIITVKDMLKRNTPIYTRQAACKKGELFNQTIMKKGLGQHPLKKEGPFSNISKYGGYNKVSAAYYTLIEYEEKVNKIRSLETIPLYLVKDIQKDQDVLKSYLTDLLGKKEIKILVPKIKINSLLKINGFPCHITGKTGDSFVLRPAVQFCCSNDEVLYFKKIIRFNEIRSQREKMGKTISPYEDLSFRSYIKENLCKKTKADEIGEKEFYDLLQKKNLEIYDMLLTKHKDTIYNKRPNSTTLGMLTKGRYEFINLKPKDQIIVMLEILKLFCTTREAIDLGLIKGKPAAGVATLGKKISNLDNCILIYQSITGIFEKRIDLLKV

SEQ ID NO: 606 - protein, 1395 aa, Treponema denticola
  REGION 1..1395: note = Treponema denticola H-22
MKKEIKDYFLGLDVGTGSVGWAVTDTDYKLLKANRKDLWGMRCFETAETAEVRRLHRGARRRIERRKKRIKLLQELFSQEIAKIDEGFFQRMKESPFYAEDKTILQENTLFNDKDFTDKTYHKAYPTINHLIKAWIENKVKPDPRLLYLACHNIIKKRGHFLFEGDFDSENQFDTSIQALFEYLREDMEVDIDADSQKVKEILKDSSLKNSEKQSRLNKILGLKPSDKQKKAITNLISGNKINFADLYDNPDLKDAEKNSISFSKDDFDALSDDLASILGDSFELLLKAKAVYNCSVLSKVIGDEQYLSFAKVKIYEKHKTDLTKLKNVIKKHFPKDYKKVFGYNKNEKNNNNYSGYVGVCKTKSKKLIINNSVNQEDFYKFLKTILSAKSEIKEVNDILTEIETGTFLPKQISKSNAEIPYQLRKMELEKILSNAEKHFSFLKQKDEKGLSHSEKIIMLLTFKIPYYIGPINDNHKKSFPDRCWVIKKEKSPSGKTTPWNFFDHIDKDKTAEAFITSRTNFCTYLVGESVLPKSSLLYSEYTVLNEINNLQIIIDGKNICDIKLKQKIYEELFKKYKKITQKQISTFIKHEGICNKTDEVIILGIDKECTSSLKSYIELKNIFGKQVDEISTKNMLEEIIRWATIYDEGEGKTILKTKIKAEYGKYCSDEQIKKILNLKFSGWGRLSRKFLETVTSEMPGFSEPVNIITAMRETQNNLMELLSSEFKFTENIKKINSGFEDAEKQFSYNGLVKPLFLSPSVKKMLWQTLKLVKEISHITQAPPKKIFIEMAKGAELEPARTKTRLKILQDLYNNCKNDADAFSSEIKDLSGKIENEDNLRLRSDKLYLYYTQLGKCMYCGKPIEIGHVFDTSNYDIDHIYPQSKIKDDSISNRVLVCSSCNKNKEDKYPLKSEIQSKQRGFWNFLQRNNFISLEKLNRLTRTTPISDDETAKFIARQLVETRQATKVAAKVLEKMFPETKIVYSKAETVSMFRNKFDIIKCREINDFHHAHDAYLNIVVGNVYNTKFTNNPWNFIKEKRDNPKIADTYNYYKVFDYDVKRNNITAWEKGKTIITVKDMLKRNTPIYTRQAACKKGGLFDQTIMKKGLGQHPLKKEGAFSNISKYGGYNKVSAAYYTLIEYEEKGNKIRSLETIPLYLVKDIQKDQDVLKSYLTDLLGKKEIKILVPKIKINSLLKINGFPCHITGKTGDSFVLRPAVQFCCSNDEVLYFKKIIRFNEIRSQREKMGKTISPYEDLSFRSYIKENLCKKTKADEIGEKEFYDLLQKKNLEIYDMLLTKHKDTIYNKRPNSTTLGMLTKGRYEFINLKPKDQIIVMLEILKLFCTTREAIDLGLIKGKPAAGVATLGKKISNPDNCILIYQSITGIFEKRIDLLKV

SEQ ID NO: 607 - protein, 1395 aa, Treponema denticola
  REGION 1..1395: note = Treponema denticola OTK
MKKEIKDYFLGLDVGTGSVGWAVTDTDYKLLKANRKDLWGMRCFETAETAEVRRLHRGARRRIERRKKRIKLLQELFSQEIAKIDEGFFQRMKESPLYAEDKTILQENTLFNDKDFTDKTYHKAYPTINHLIKAWIENKVKPDPRLLYLACHNIIKKRGHFLFEGDFDSENQFDTSIQALFEYLREDMELDIDADSQKVKEILKDSSLKNSEKQSRLNKMLGLKPSDKQKKAITNLISGNKINFADLYDNPDLKDAEKNSISFSKDDFDALSDDLASILGDSFELLLKAKAVYNCSVLSKVIGDEQYLSFAKVKIYEKHKTDLTKLKNVIKKHFPKDYKKVFGYNKNEKNNNNYSAYVGVCKITHKKLVIKNSASQEDFYKFLKTILSAKSEIKEVNDILTEIETGTFLPKQISKSNAEIPYQLRKMELEKILSNAEKHFSFLKQKDEKGLSHSEKIIMLLTFKIPYYIGPINDNHKKSFPDRCWVVKKEKSPSGKTTPWNFFDHIDKEKTAEEFITSRTNFCTYLIGESVLPKSSLLYSEYTVLNEINNLQIIIDGKNICDIKLKQKIYEELFKKYKKITQKQISTFIKHEGICNKTDEVIILGIDKECTSSLKSYIELKNIFGKQVDEISTKNMLEEIIRWATIYDEGEGKTILKTKIKAEYGKYCSDEQIKKILNLKFSGWGRLSRKFLETVTSEMPGFSEPVNIITAMRETQNNLMELLSSEFKFTENIKKINSGFEDAEKQFSYNGLVKPLFLSPSVKKMLWQTLKLVKEISHITQAPPKKIFIEMAKGAELEPARTKTRLKILQDLYSSCKNDADAFSSEIQYLSGKIENEDNLRLRSDKLYLYYTQLGKCMYCGKPIEIGHVFDTSNYDIDHIYPQSKIKDDSISNRVLVCSSCNKNKEDKYPLKAEIQSKQRGFWNFLQRNNFISLEKLNRLTRTSPISDDETAKFIARQLVETRQATKVAAKVLEKMFPETKIVYSKAETVSMFRNKFDIIKCREINDFHHAHDAYLNIVVGNVYNTKFTNNPWNFIKEKRDNPKIADTYNYYKVFDYDVKRNNITAWEKGKTIITVKDMLKRNTPIYTRQAACKKGELFNQTIMKKGLGQHPLKKEGPLSNISKYGGYNKVSAAYYTLIEYEEKGSKIRSLETIPLYLVKDIQKNKDGLKSYLTDQIGKKEIKILIPKIKINSLLKINGFPCHITGKMGEAFVLRPAVQFCCSNDEALYFKKIIRFNEIRKQREKMGKTISPYEDLSFRSYIKDNLCKKTKADEIEEKEFYDLLQKKNLEIYDMLLTKHKDTIYKKRPNSATIDILVKGKEKFKSLIIENQFEVILEILKLFSATRNVSDLQHIGGSKNAGNARVGNKISSLDNCILIYQSITGIFEKRIDLLKI

SEQ ID NO: 608 - protein, 1395 aa, Treponema denticola
  REGION 1..1395: note = Treponema denticola SP37
MKKEIKDYFLGLDVGTGSVGWAVTDTDYKLLKANRKDLWGMRCFETAETAEVRRLHRGARRRIERRKKRIKLLQELFSQEIAKTDEGFFQRMKESPFYAEDKTILQENALFNDRDFTDKTYHKAYPTINHLIKAWIENKVKPDPRLLYLACHNIIKKRGHFLFEGDFDSENQFDTSIQALFEYLREDMEVDIDADSQKVKEILKDSSLKNSEKQSRLNKMLGLKPSDKQKKAITNLISGNKINFADLYDNPDLKDAEKNSISFSKDDFDALSDDLASILGDSFELLLKAKAVYNCSVLSKVIGDEQYLSFAKVKIYEKHKTDLTKLKNVIKKHFPNDYKKVFGYNKNEKNNNNYSAYVGVCKTKSKKLVINNTVNQEDFYKFLKPILLAKSEIKEVNDILTEIETGTFLPKQISKSNAEIPYQLRKMELEKILSNAEKHFSFLKQKDEKGLSHSEKIIMLLTFKIPYYIGPINDNHKKSFPDRCWVIKKEKSPSGKTTPWNFFDHIDKDKTAEAFITSRTNFCTYLVGESVLPKNSLLYSEYTVLNEINNLQIIIDGKNICDIKLKQKIYEELFKKYKKITQKQISTFIKHEGICNKTDEVIILGIDKECTSSLKSYIELKNIFGKQVDEISTKNMLEEIIRWATIYDEGEGKTILKTKIKAEYGKYCSDEQIKKILNLKFSGWGRLSRKFLETVTSEMPGFSEPVNIITAMRETQNNLMELLSSEFKFTENIKKINSGFEDVEKQFSYDSLVKPLFLSPSVKKMLWQTLKLVKEISHITQAPPKKIFIEMAKGAELDPVRTKTRLKILQDLYNNCKNDADAFSSEIKDLSGKIENEDNLRLRSDKLYLYYTQLGKCMYCGKPIEIGHVFDTSNYDIDHIYPQSKIKDDSISNRVLVCSSCNKNKEDKYPLKAEIQSKQRGFWNFLQRNNFISLEKLNRLTRTSPISDDETAKFIARQLVETRQATKVAAKVLEKMFPETKIVYSKAETVSMFRNKFDIIKCREINDFHHAHDAYLNIVVGNVYNTKFTNNPWNFIKEKRDNPKIADTYNYYKVFDYDVKRNNITAWEKGKTIITVKDMLKRNTPIYTRQAACKKGELFNQTIMKKGLGQHPLKKEGPLSNISKYGGYNKVSAAYYTLIEYEEKGSKIRSLETIPLYLVKDIQKNKDGLKSYLTDQIGKKEIKILIPKIKINSLLKINGFPCHITGKMGEAFVLRPAVQFCCSNDEALYFKKIIRFNEIRKQREKMGKTISPYEDLSFRSYIKDNLCKKTKADEIEEKEFYDLLQKKNLEIYDMLLTKHKDTIYKKRPNSATIDILVKGKEKFKSLIIENQFEVILEILKLFSATRNVSDLQHIGGSKNAGNARVGNKISSLDNCILIYQSITGIFEKRIDLLKI

SEQ ID NO: 609 - protein, 1062 aa, Treponema sp.
  REGION 1..1062: note = Treponema sp. JC4
MIMKLEKWRLGLDLGTNSIGWSVFSLDKDNSVQDLIDMGVRIFSDGRDPKTKEPLAVARRTARSQRKLIYRRKLRRKQVFKFLQEQGLFPKTKEECMTLKSLNPYELRIKALDEKLEPYELGRALFNLAVRRGFKSNRKDGSREEVSEKKSPDEIKTQADMQTHLEKAIKENGCRTITEFLYKNQGENGGIRFAPGRMTYYPTRKMYEEEFNLIRSKQEKYYPQVDWDDIYKAIFYQRPLKPQQRGYCIYENDKERTFKAMPCSQKLRILQDIGNLAYYEGGSKKRVELNDNQDKVLYELLNSKDKVTFDQMRKALCLADSNSFNLEENRDFLIGNPTAVKMRSKNRFGKLWDEIPLEEQDLIIETIITADEDDAVYEVIKKYDLTQEQRDFIVKNTILQSGTSMLCKEVSEKLVKRLEEIADLKYHEAVESLGYKFADQTVEKYDLLPYYGKVLPGSTMEIDLSAPETNPEKHYGKISNPTVHVALNQTRVVVNALIKEYGKPSQIAIELSRDLKNNVEKKAEIARKQNQRAKENIAINDTISALYHTAFPGKSFYPNRNDRMKYRLWSELGLGNKCIYCGKGISGAELFTKEIEIEHILPFSRTLLDAESNLTVAHSSCNAFKAERSPFEAFGTNPSGYSWQEIIQRANQLKNTSKKNKFSPNAMDSFEKDSSFIARQLSDNQYIAKAALRYLKCLVENPSDVWTTNGSMTKLLRDKWEMDSILCRKFTEKEVALLGLKPEQIGNYKKNRFDHRHHAIDAVVIGLTDRSMVQKLATKNSHKGNRIEIPEFPILRSDLIEKVKNIVVSFKPDHGAEGKLSKETLLGKIKLHGKETFVCRENIVSLSEKNLDDIVDEKIKSKVKDYVAKHKGQKIEAVLSDFSKENGIKKVRCVNRVQTPIEITSGKISRYLSPEDYFAAVIWEIPGEKKTFKAQYIRRNEVEKNSKGLNVVKPAVLENGKPHPAAKQVCLLHKDDYLEFSDKGKMYFCRIAGYAATNNKLDIRPVYAVSYCADWINSTNETMLTGYWKPTPTQNWVSVNVLFDKQKARLVTVSPIGRVFRK

SEQ ID NO: 610 - protein, 1011 aa, unidentified
  REGION 1..1011: note = Description of Unknown: uncultured delta proteobacterium HF0070_07E19 polypeptide
MSSKAIDSLEQLDLFKPQEYTLGLDLGIKSIGWAILSGERIANAGVYLFETAEELNSTGNKLISKAAERGRKRRIRRMLDRKARRGRHIRYLLEREGLPTDELEEVVVHQSNRTLWDVRAEAVERKLTKQELAAVLFHLVRHRGYFPNTKKLPPDDESDSADEEQGKINRATSRLREELKASDCKTIGQFLAQNRDRQRNREGDYSNLMARKLVFEEALQILAFQRKQGHELSKDFEKTYLDVLMGQRSGRSPKLGNCSLIPSELRAPSSAPSTEWFKFLQNLGNLQISNAYREEWSIDAPRRAQIIDACSQRSTSSYWQIRRDFQIPDEYRFNLVNYERRDPDVDLQEYLQQQERKTLANFRNWKQLEKIIGTGHPIQTLDEAARLITLIKDDEKLSDQLADLLPEASDKAITQLCELDFTTAAKISLEAMYRILPHMNQGMGFFDACQQESLPEIGVPPAGDRVPPFDEMYNPVVNRVLSQSRKLINAVIDEYGMPAKIRVELARDLGKGRELRERIKLDQLDKSKQNDQRAEDFRAEFQQAPRGDQSLRYRLWKEQNCTCPYSGRMIPVNSVLSEDTQIDHILPISQSFDNSLSNKVLCFTEENAQKSNRTPFEYLDAADFQRLEAISGNWPEAKRNKLLHKSFGKVAEEWKSRALNDTRYLTSALADHLRHHLPDSKIQTVNGRITGYLRKQWGLEKDRDKHTHHAVDAIVVACTTPAIVQQVTLYHQDIRRYKKLGEKRPTPWPETFRQDVLDVEEEIFITRQPKKVSGGIQTKDTLRKHRSKPDRQRVALTKVKLADLERLVEKDASNRNLYEHLKQCLEESGDQPTKAFKAPFYMPSGPEAKQRPILSKVTLLREKPEPPKQLTELSGGRRYDSMAQGRLDIYRYKPGGKRKDEYRVVLQRMIDLMRGEENVHVFQKGVPYDQGPEIEQNYTFLFSLYFDDLVEFQRSADSEVIRGYYRTFNIANGQLKISTYLEGRQDFDFFGANRLAHFAKVQVNLLGKVIK

SEQ ID NO: 611 - protein, 1032 aa, unidentified
  REGION 1..1032: note = Description of Unknown: uncultured Termite group 1 bacterium phylotype Rs-D17 polypeptide
MLYHIANHRGTDSVRSFLEYDDDKIKENTLTAKIAKETKKVIDAKKYRTFGEYLYKGKIEKFQQNIRKKVSNRKTPANKNKEFAVTRDVIIKETEKILASQKQYYTYILTDEYIKKIKDAISYQTEKLIPESGYCPYFKDEKRLPRSHKLNEYRRMYEALNNAKYFDPVLDENTGEILSYQEKEFSREEKKILFDEVLLKGMELTESGAKKLLYHLPDGCEVQLQGRDKTTQKIKGYALVDLEASPFWLRLSQQQQDEFLYDWNSLPLEKLKPKLTNYYSLTESEVDETFQEIKLPSNYASVGKKAMEILLTYIKDGCSYTEALEKAVSEGKLKVDKQTMIYDSLPYYGKILKESTQKLIGKAFSKQFADRNYKEPDTNKNEREFGKIANPVVHQTLNELRKLINEIITVFGKKPLEIGLETTRELKKSKKNREYLSKQQNKNEYARNRIYKEYIEPHLSQIKSRQENPSKYISKFELLEEQNFICPFCSEKITPDDIINSKVDVEHIFPIEESEDITKNNLVIAHNECNADKGKKSPFDAFGDKTSGKYRWNCILHNAQKNLPHKVWRFYQGSLEKFLENKPMSRRFGTDNSYISKIAARYLACLFNDPYHSEIFCIKSSLIAQLRIAWDLNSIMVPLVKNILSEKELEEFKISKNKKIRIDNRHHALDAIVIAYANRGYHNFLNRIHAKEYKINYREKSWLSKILLPPLNRDLEDFKISVKDSIEKANVSIKHDHNTNGSLVKATAYKVYYSGAGEYIITTSKNVEEISFKEKEDPKDTLYRALCKFECRDIDIKDEKLIKKLKYNSTLYKKVQNNLSKAKQELEQDNKKTEEEGKKSQKITEVRIYKKACSLVKGQYIQCGSRLKDKFFAVKEPTEIKTGLGYDTGDNLFLDLYYDKTGKLCGEIIRKVNFNRNKPNYQKEGYTLFERIYQSDILEVDTSEDRISLKNKTGSAPSDRTFIKVNTFTEVNAYFDGKRDKIQIFFGNLLKSSFKNDSFFISSMQKYNVRKVILTSLGIIKYRSQILKNKEV

SEQ ID NO: 612 - protein, 1398 aa, Veillonella atypica
  REGION 1..1398: note = Veillonella atypica ACS-134-V-Col7a
METQTSNQLITSHLKDYPKQDYFVGLDIGTNSVGWAVTNTSYELLKFHSHKMWGSRLFEEGESAVTRRGFRSMRRRLERRKLRLKLLEELFADAMAQVDSTFFIRLHESKYHYEDKTTGHSSKHILFIDEDYTDQDYFTEYPTIYHLRKDLMENGTDDIRKLFLAVHHILKYRGNFLYEGATFNSNAFTFEDVLKQALVNITFNCFDTNSAISSISNILMESGKTKSDKAKAIERLVDTYTVFDEVNTPDKPQKEQVKEDKKTLKAFANLVLGLSANLIDLFGSVEDIDDDLKKLQIVGDTYDEKRDELAKVWGDEIHIIDDCKSVYDAIILMSIKEPGLTISQSKVKAFDKHKEDLVILKSLLKLDRNVYNEMFKSDKKGLHNYVHYIKQGRTEETSCSREDFYKYTKKIVEGLADSKDKEYILNEIELQTLLPLQRIKDNGVIPYQLHLEELKVILDKCGPKFPFLHTVSDGFSVTEKLIKMLEFRIPYYVGPLNTHHNIDNGGFSWAVRKQAGRVTPWNFEEKIDREKSAAAFIKNLTNKCTYLFGEDVLPKSSLLYSEFMLLNELNNVRIDGKALAQGVKQHLIDSIFKQDHKKMTKNRIELFLKDNNYITKKHKPEITGLDGEIKNDLTSYRDMVRILGNNFDVSMAEDIITDITIFGESKKMLRQTLRNKFGSQLNDETIKKLSKLRYRDWGRLSKKLLKGIDGCDKAGNGAPKTIIELMRNDSYNLMEILGDKFSFMECIEEENAKLAQGQVVNPHDIIDELALSPAVKRAVWQALRIVDEVAHIKKALPSRIFVEVARTNKSEKKKKDSRQKRLSDLYSAIKKDDVLQSGLQDKEFGALKSGLANYDDAALRSKKLYLYYTQMGRCAYTGNIIDLNQLNTDNYDIDHIYPRSLTKDDSFDNLVLCERTANAKKSDIYPIDNRIQTKQKPFWAFLKHQGLISERKYERLTRIAPLTADDLSGFIARQLVETNQSVKATTTLLRRLYPDIDVVFVKAENVSDFRHNNNFIKVRSLNHHHHAKDAYLNIVVGNVYHEKFTRNFRLFFKKNGANRTYNLAKMFNYDVICTNAQDGKAWDVKTSMNTVKKMMASNDVRVTRRLLEQSGALADATIYKASVAAKAKDGAYIGMKTKYSVFADVTKYGGMTKIKNAYSIIVQYTGKKGEEIKEIVPLPIYLINRNATDIELIDYVKSVIPKAKDISIKYRKLCINQLVKVNGFYYYLGGKTNDKIYIDNAIELVVPHDIATYIKLLDKYDLLRKENKTLKASSITTSIYNINTSTVVSLSNKVGIDVFDYFMSKLRTPLYMKMKGNKVDELSSTGRSKFIKMTLEEQSIYLLEVLNLLTNSKTTFDVKPLGITGSRSTIGVKIHNLDEFKIINESITGLYSNEVTIV

SEQ ID NO: 613 - protein, 1398 aa, Veillonella parvula
  REGION 1..1398: note = Veillonella parvula ATCC 17745
METQASNQLISSHLKGYPIKDYFVGLDIGTSSVGWAVTNKAYELLKFRSHKMWGSRLFDEGESAVARRGFRSMRRRLERRKLRLKLLEELFADAMAQVDPTFFMRLRESKYHYEDKTTGHSSKHILFIDKNYNDQDYFKEYPTVYHLRSELMKSGTDDIRKLFLAVHHILKYRGNFLYEGATFDSNASTLDDVIKQALENITFNCFDCNSAISSIGQILMEAGKTKSDKAKAIEHLVDTYIATDTVDTSSKTQKDQVKEDKKRLKAFANLVLGLNASLIDLFGSVEELEEDLKKLQITGDTYDDKRDELAKAWSDEIYIIDDCKSVYDAIILLSIKEPGLTISESKVKAFNKHKDDLAILKSLLKSDRSIYNTMFKVDEKGLHNYVHYIKQGRTEETSCNREDFYKYTKKIVEGLSDSKDKEYILSQIELQILLPLQRIKDNGVIPYQLHLEELKAILAKCGPKFPFLNEVADGFSVAEKLIKMLEFRIPYYVGPLNTHHNVDNGGFAWAVRKASGRVTPWNFDDKIDREKSAAAFIKNLTNKCTYLLGEDVLPKSSLLYSEFMLLNELNNVRIDGKPLEKVVKEHLIEAVFKQDHKKMTKNRIEQFLKDNGYISETHKHEITGLDGEIKNDLASYRDMVRILGDGFDRSMAEEIITDITIFGESKKMLRETLRKKFASCLDDEAIKKLTKLRYRDWGRLSQKLLNGIEGCDKAGDGTPETIIILMRNFSYNLMELLGDKFSFMERIQEINAKLTEGQIVNPHDIIDDLALSPAVKRAVWQALRIVDEVAHIKKALPARIFVEVTRSNKNEKKKKDSRQKRLSDLYAAIKKDDVLLNGLNNEIFGELKSSLAKYDDAALRSKKLYLYYTQMGRCAYTGEIIELSLLNTDNYDIDHIYPRSLTKDDSFDNLVLCKRTANAQKSDAYPISEEIQKTQKPFWTFLKQQGLISERKYERLTRITPLTADDLSGFIARQLVETNQSVKAATTLLRRLYPGVDVVFVKAENVTDFRHDNNFIKVRSLNHHHHAKDAYLNIVVGNVYHERFTRNFRAFFKKNGANRTYNLAKMFNYDVNCTNAKDGKAWDVKTSMDTVKKMMDSNDVRVTKRLLEQTGALADATIYKATVAGKAKDGAYIGMKTKSSVFADVSKYGGMTKIKNAYSIIVQYTGKKGEVIKEIVPLPIYLTNRNTTDQDLINYVASIIPQAKDISIIYGKLCINQLVKVNGFYYYLGGKTNSKFCIDNAIQVIVSNEWIPYLKVLEKFNNMRKDNKDLKANVVSTRALDNKHTIEVRIVEEKNIEFFDYLVSKLKMPIYQKMKGNKAAELSEKGYGLFKKMSLEEQSIHLIELLNLLTNQKTTFEVKPLGITASRSTVGSKISNQDEFKVINESITGLYSNEVTIV

SEQ ID NO: 614 - protein, 1395 aa, Veillonella sp.
  REGION 1..1395: note = Veillonella sp. 6_1_27
METQASNQLISSHLKGYPIKDYFVGLDIGTSSVGWAVTNKAYELLKFRSHKMWGSRLFDEGESAVARRGFRSMRRRLERRKLRLKLLEELFADAMAQVDPTFFMRLRESKYHYEDKTTGHSSKHILFIDKNYTDQDYYKEYPTIYHLRVALMKSGTDDIRKLFLAVHHILKYRGNFLYEGATFDSNASTLDDVLKQALENITFNCFDSSAAIGSIGQILMELGKTKSDKAKAIERLVDTYIITDEVDTSGKTQKEQVKEDKKRLKSFANLVLGLSASLTDLFGSVEDLDEDLKKLQIIGDTYDERRDDLAKVWGDEIHIIDDCKSVYDAIILMSIKEPGLTISESKVKAFKKHKDDLAILKSLLKSDRSIYNTMFKVDEKGLHNYVHYIKQGRTEETSCNREDFYKYTKKVVEGLPDSKDKEYILSEIELQTLLPLQRIKDNGVIPYQLHLEELKVILAKCGPKFPFLNEVADGFSVAEKLIKMLEFRIPYYVGPLNTHHNVDNGGFAWAVRKASGRVTPWNFDDKIDREKSAAAFIKNLTNKCTYLLGEDVLPKSSLLYSEFMLLNELNNVRIDGKPLEKAVKEHLIEAVFKQDHKKMTKNRIEQFLKDNNYIPEKHKPEITGLDGEIKNDLASYRDMVRILGNNFDLSMAEEIITDITIFGESKKMLRETLRNKFSSRLDDEAIKKLSKLRYRDWGRLSRKLLNVIEGCDKAGDGTPETIIILMRNFSYNLMELLGDKFSFMERIQEINAKLIEGQIVNPHDIIDDLALSPAVKRAVWQALRIVDEIVHIKKTLPARIFVEVTRSNKAEKKKKDSRQKRLSDLYAAIKKDDALLSGLTNEEFGGLKSGLAKYDDAALRSKKLYLYYTQMGRCAYTGEVIDLSQLNTDNYDIDHIYPRSLTKDDSFDNLVLCKRTANAQKSDTYPISKEIQKAQKAFWIFLKQQGLISERKYERLTRITPLTADDLSGFIARQLVETNQSVKAATTLLRRLYPGVDVVFVKAENVTDFRHDNDFIKVRSLNHHHHAKDAYLNIVVGNVYHERFTRNFRAFFKKNGANRTYNLAKMFNYDVKCTNAKDGKAWAVKTSMDTVKKMMDSNDVRVTKRVYEQKGQLSDINLTKASKVKADIYLPIKANDPIMSQNMKYGGYSDIKNAYYTIIEYSDKKNNSIKAFIPIPIFIATKTLTKQALLEYIKTVLPKANNLRIIYKKVYNDQLLKIDGFNYYLGGRSNDRFCIDNAIQLIVPLEIQFYIKLVEKFTAIISENKNIALKASSVKSRNPINNQVENITLEYTQKLFDYLVSKFNELIYLKMRGNKLTDVNNIGRKQFIKLSLEERCKALAELLNIFTNMNKKLSLSTINVSASRKVVNFKISSLDEFKIVNESITGLYSHEITIV

SEQ ID NO: 615 - protein, 1120 aa, Veillonella sp.
  REGION 1..1120: note = Veillonella sp. oral taxon 780 str. F0422
MGFKANLVNLFTDEDIEVILPEEKEFKSINLHEGIYEDVRDAYEDAWGDRFAIVDQCKVLHDIIVISSIIKPGQSLSEAKIESYNQHKEDLVLLKSVLKEDRKLYDDMFVVDTDKGTNYVKYTKQGVNGNTSATQEEFYKYVRKVVSVLPETEHTRRIVQKLEEGTFLPLQRISKNGVVPYQLHKEELVRILDKATVNFPFLNKVENGLTVADKIISILEFKIPYYVGPLNPTHSIENGGFAWVVRKEAGQVLPWNFEQKVDVQASAVKFIENLTNKCTYLIDQDVLPKYSLLYAEFSLLNELNNIRVNDKPLPADVKQAFIRDHFISLQDSKTATKKVVAKYLVDNNYVSQPPIITGMDQQIATKLTSHRDMTRILGEHFDHAMAEDIIRYITIFGESKDMLRQVLKNYYGDRLTTEQIKKLGKLTYTGWGRLSKKFLSDIWGMKKNDDDAEAGTIIEHMREGQENLMQLLSSSYSFIDVVQEYVTNVLGEKEKTAFEMLEDLSLSPMVKRSVWQTLRILDEIVSIRKELPKKIFVEVARTNKADKKRTQSRKALLEELYKQIKDEDVHVLQQELESKEDSALNSKKLYLYFTQMGRCMYSGRRIDIHELFTDKYDIDHIYPRSLTKDDSWHNIVLVEKQLNAEKTDRFPILSAIQSKQKGFWKLLWDRGFISEKKYDRLVRTTDLTDEELNQFINRQMVSTNQSVKAVTTLLHQLYPETEVVFSKAENVSDFRHDYDFVKVRSINHHHHAKDAYLNIVVGNVYHEKFTKNFLSFAKQKGTRRTYNLTKIFEYEIKLTEESKKVIWDPNIHMDIVKKMMKSNDVRVTQRAVPQKGGLSDETIYKKGIAKRGVYLPLKSSDERVRDVEKYGGRTSITISEYIILNIRDTSDQDRIEIFSLPLYIAGKKDIHKAIEEAYLSTCKKPASVVDIQILYRGLYIGSKVNINGFTYYMGGKTGSNVSIDSAVDVVMDITSSVYIKLLEKVAIKKIENPKTFRIENIKTSYNHKEVTVSKEQNIALYQELLKKLDTPLFSKMKGNKLEEFRTVGFDTFIALSLEEQASVLLEVLNVLTNFKTKRDITKIGMTSSRSTLGINISNTEQFSVITTSITGLYEQEIKIK

SEQ ID NO: 616 - protein, 1068 aa, Verminephrobacter eiseniae
MNKAVAYRLALDLGSTSLGWAIFRLNEAREPTAIIRAGVRIFSDGRNANSEPLAVHRRVARAMRRRRDRLLKRKKRMHDQLVQHGFFPAEVAERKELERLNPYQLRAKGLHEALTPGEFARALFHINQRRGFKSNRKTDRKDNDSGALKQAISELRKRIQDSDCATAGEWFWKERMQQKPEGVRGQWVRARYRKTPSTTDEGKKRIGYDLYVDRAMVEQEFDALWAAQAALQPGLFTEAARAELKDTLLYQRDLRPVKPGRCTLLPAEERAPLALPSTQRFRILQEVNNLRLLDEALREVPLNLAQRDAVVSALEGKKELSFAAIRKLLTLSGKFNLEDEKRAELKGNATSVILARKDLFGDAWAGFDAAVQDEIVWRLVSQESEGALIAWLQQHTGVDGVCAEAIVNTRLPDGYGRLSRKALERIVPALQREVCTYDKAVQAAGFAHHSDLGFDFDYAEDEVQQVGEHTIASTGEVQAQYAFKQLPYYGKALQRHVAFGSGDAKDHEEKCYGKIANPTVHIGLNQVRTVVNALIRRYGHPTEVVVELARDLKQSREQKQQTQREQADNQKRNEDIRKRIAPILETSPERVRDRDIKKWILWEELNKKDIADRHCPYSGERISATMLLSEAVEIEHILPFSRTLDDSLNNRTVAMRRANRIKGDRTPWEARADFEAQGWRYEAILQRAEGMPPRKRYRFAEDGYQRWLGKDRNFLARALNDTSYLSRLAANYLRLVCPQGVRVIPGQMTDKLRGKFGLNSVLGLDGKKNRNDHRHHAVDACVIGVTDQGLMQRFANASKQARENGLTRLVQDMLLPWWPSYYDHVERAVRHIRVSHRPDHGFEGAMMKGTAHGIREDGIREDGRIKQRPKAKGSADHKTITLIPIDEPRQLARHGVDAEGKPLPYKGYASGSNYCIEITKNGKGKWEGQVISTFDAYRIKAAADAAARAGQVISTVEADSIVRKSGWERLRGAQSQNGQPLVMRLVIGDSVRMEVDGRDEVMRVVKMSGKEMVFAPVREANVDKRNNMPDEQDPFTYTYKRADQLRKAKARQVTISPIGELRDPGFKG

SEQ ID NO: 617 - protein, 1440 aa, Weeksella virosa
MKTILGLDLGTNSIGWALVEQDFENKQGLILGMGSRIIPMDAGIIGKFAEGSSISQTAERTGYRSIRRLRERHLLRRERLHRVLNILKFLPEHYAAEIDFEKRFGQFLAETEPKLAWKKNAEGKFEFLFQRSFDEMVADFKANGQDIKIPYDWTIYYLRKKALTQKISPQELAWIILNFNQKRGYYQLRGEEEEENPNKKVEFYSLKIVDVVADEQPNKKGDTWYSLHLENGWVYRRSSKIPLYDWKDKVRDFIVTTDINEDGSEKLDKDGEVKRSFRAPKEDDWTLIKKKTEQEIEQFNQTVGSYIYEALLDNPTQKIRGKLVRTIERKFYKSELKKILEKQIELQPELFTEDLYNACARELYRRNVAHQQQLSSRDFVYLFLNDIIFYQRPLRSQKSLISNCSLEFRTIKDKDGNGQIIYLKAIPKSNPYYQEFRVWQWLYNLKIFTKEDDKDVTNQFINKVEDLEALFEFLMNQKEVNHTDILTYLIEPIVKSKYPNAKGKAFKDELKKELKKYRWNYVYDADKDESKSYPMNETRYELRKRLDKVENVPADFMTRKIEQHLWHIIYSVTDKIEFEKALKSFANKYDLHQESFVENFKRFKPFDSDYGTYSEKAIKKLLPLMRVGKYWSWDIIDDKTKTRIGKIITGEYDETIKNRVREKAIDLTEENHFQGLQLWLAQYIVYDRHSEADIAGKWNSVADLEQYLSEFKQHSLRNPIVEQVITETLRVVRDIWKQYGKGAKDYFDEIHIELGREMKNTAEERKRLSSIISENETTNLRIRAILEELMYDENMENVRPYSPMQQEALKIYEDGVLSSSVEIPEDIEKISKKSEPTKSEIQRYKLWLEQKYRSPYTGRPIPLSKLFTPAYQIEHIIPQARFFDDGFSNKVICESEVNALKDKMLGLEFIQNYYGQKVTTSFGEVTILTEDAYKAFVKEHYDKNRSKRNKLLLEEIPEKMIDRQMNDTRYISKYISKVLSNLVRGEKDDEGVNSKNIIPGNGKITGILKQDWGLNDVWNDLILPRFERMNQLTNSTDFTAWNEKHQKFLPSVPLELSKGFQKKRIDHRHHALDALIIACATRDHVNLLNNKHAKSRNERYDLQHKLRHTTPWQDKEGKVRTKFTEFKKPWETFTQDTKKELEKIVVNFKQNLRVINKATNYYEKIVDGKKVMFKQEGVNWAIRKPMHKETVSGKIDLPRVKVSKGKILTATRKSLDTSFNAKTILSITDTGIQKILLNYLKAKGNPELAFSPEGIEEMNQNISLYNDGKPHQPILKVRVFEQGSKFPLGETGNKTTKYVEAAKGTNLFFGVYEDNQGKRSYDTIPLNIVIERQKQGLNSVPETNEKGHRLLFSLSPNDLVYVPIEGEVFDETNPDVNRIYKVVSFSGSQMFCVRQDVATSIVYKLEFSSLNKMERTIDGIMIKEICIKLKVDRLGNISKA

SEQ ID NO: 618 - protein, 1409 aa, Wolinella succinogenes
MLVSPISVDLGGKNTGFFSFTDSLDNSQSGTVIYDESFVLSQVGRRSKRHSKRNNLRNKLVKRLFLLILQEHHGLSIDVLPDEIRGLFNKRGYTYAGFELDEKKKDALESDTLKEFLSEKLQSIDRDSDVEDFLNQIASNAESFKDYKKGFEAVFASATHSPNKKLELKDELKSEYGENAKELLAGLRVTKEILDEFDKQENQGNLPRAKYFEELGEYIATNEKVKSFFDSNSLKLTDMTKLIGNISNYQLKELRRYFNDKEMEKGDIWIPNKLHKITERFVRSWHPKNDADRQRRAELMKDLKSKEIMELLTTTEPVMTIPPYDDMNNRGAVKCQTLRLNEEYLDKHLPNWRDIAKRLNHGKFNDDLADSTVKGYSEDSTLLHRLLDTSKEIDIYELRGKKPNELLVKTLGQSDANRLYGFAQNYYELIRQKVRAGIWVPVKNKDDSLNLEDNSNMLKRCNHNPPHKKNQIHNLVAGILGVKLDEAKFAEFEKELWSAKVGNKKLSAYCKNIEELRKTHGNTFKIDIEELRKKDPAELSKEEKAKLRLTDDVILNEWSQKIANFFDIDDKHRQRFNNLFSMAQLHTVIDTPRSGFSSTCKRCTAENRFRSETAFYNDETGEFHKKATATCQRLPADTQRPFSGKIERYIDKLGYELAKIKAKELEGMEAKEIKVPIILEQNAFEYEESLRKSKTGSNDRVINSKKDRDGKKLAKAKENAEDRLKDKDKRIKAFSSGICPYCGDTIGDDGEIDHILPRSHTLKIYGTVFNPEGNLIYVHQKCNQAKADSIYKLSDIKAGVSAQWIEEQVANIKGYKTFSVLSAEQQKAFRYALFLQNDNEAYKKVVDWLRTDQSARVNGTQKYLAKKIQEKLTKMLPNKHLSFEFILADATEVSELRRQYARQNPLLAKAEKQAPSSHAIDAVMAFVARYQKVFKDGTPPNADEVAKLAMLDSWNPASNEPLTKGLSTNQKIEKMIKSGDYGQKNMREVFGKSIFGENAIGERYKPIVVQEGGYYIGYPATVKKGYELKNCKVVTSKNDIAKLEKIIKNQDLISLKENQYIKIFSINKQTISELSNRYFNMNYKNLVERDKEIVGLLEFIVENCRYYTKKVDVKFAPKYIHETKYPFYDDWRRFDEAWRYLQENQNKTSSKDRFVIDKSSLNEYYQPDKNEYKLDVDTQPIWDDFCRWYFLDRYKTANDKKSIRIKARKTFSLLAESGVQGKVFRAKRKIPTGYAYQALPMDNNVIAGDYANILLEANSKTLSLVPKSGISIEKQLDKKLDVIKKTDVRGLAIDNNSFFNADFDTHGIRLIVENTSVKVGNFPISAIDKSAKRMIFRALFEKEKGKRKKKTTISFKESGPVQDYLKVFLKKIVKIQLRTDGSISNIVVRKNAADFTLSFRSEHIQKLLK

SEQ ID NO: 619 - protein, 1059 aa, Wolinella succinogenes
MIERILGVDLGISSLGWAIVEYDKDDEAANRIIDCGVRLFTAAETPKKKESPNKARREARGIRRVLNRRRVRMNMIKKLFLRAGLIQDVDLDGEGGMFYSKANRADVWELRHDGLYRLLKGDELARVLIHIAKHRGYKFIGDDEADEESGKVKKAGVVLRQNFEAAGCRTVGEWLWRERGANGKKRNKHGDYEISIHRDLLVEEVEAIFVAQQEMRSTIATDALKAAYREIAFFVRPMQRIEKMVGHCTYFPEERRAPKSAPTAEKFIAISKFFSTVIIDNEGWEQKIIERKTLEELLDFAVSREKVEFRHLRKFLDLSDNEIFKGLHYKGKPKTAKKREATLFDPNEPTELEFDKVEAEKKAWISLRGAAKLREALGNEFYGRFVALGKHADEATKILTYYKDEGQKRRELTKLPLEAEMVERLVKIGFSDFLKLSLKAIRDILPAMESGARYDEAVLMLGVPHKEKSAILPPLNKTDIDILNPTVIRAFAQFRKVANALVRKYGAFDRVHFELAREINTKGEIEDIKESQRKNEKERKEAADWIAETSFQVPLTRKNILKKRLYIQQDGRCAYTGDVIELERLFDEGYCEIDHILPRSRSADDSFANKVLCLARANQQKTDRTPYEWFGHDAARWNAFETRTSAPSNRVRTGKGKIDRLLKKNFDENSEMAFKDRNLNDTRYMARAIKTYCEQYWVFKNSHTKAPVQVRSGKLTSVLRYQWGLESKDRESHTHHAVDAIIIAFSTQGMVQKLSEYYRFKETHREKERPKLAVPLANFRDAVEEATRIENTETVKEGVEVKRLLISRPPRARVTGQAHEQTAKPYPRIKQVKNKKKWRLAPIDEEKFESFKADRVASANQKNFYETSTIPRVDVYHKKGKFHLVPIYLHEMVLNELPNLSLGTNPEAMDENFFKFSIFKDDLISIQTQGTPKKPAKIIMGYFKNMHGANMVLSSINNSPCEGFTCTPVSMDKKHKDKCKLCPEENRIAGRCLQGFLDYWSQEGLRPPRKEFECDQGVKFALDVKKYQIDPLGYYYEVKQEKRLGTIPQMRSAKKLVKK

SEQ ID NO: 620 - protein, 1388 aa, Zunongwangia profunda
MKRILGLDLGTNSIGWALVNEAENEKEISKIIKLGVRVNPLTIDEKTNFEKGRPLSTNADRTLKRGARRNLQRYKLRRENLIEILIDNHIITKETPLTEIGKGTTYQTLSLRAKAVRERIDLEDFAKVLLAINKKRGYKSSRKASNDEEGQAIDGMAIAKELYERGITPGQYVLELLENDRKYIPDFYRSDLKQEFNKIWNNQKTFYPEILTDELFKELDGKNKSQTWAICQKPFNIKGIKRITKGREKTIENYHWRVKGLSGKLNLEKLAIILQEINNDINQSSGYLGGISDKSKKLYLNKETVGEFLYKQIAKNPHTSLKNQVFYRHDYLDEFEQIWKTQSNFNANLTDELKQEIRDVIIFYQRKIKSQKSLISFCQFESWEQEYFDKETGKTKTRTVGRRVIPKSSPLFQEFKIWQNLNHLVFTNSETDEKIEIKEVEQEIRKELFEELNLRGDLNPNDLLKILRSQFKIGKLSNWKCNFEKIEGNRTNAALFNIYQKISDFEGYGIDWNKSNAKKIRKELKATFPEIGIDASILEFDAYKKQLTNQSSYELWHLLYSAEEDFKISEQDKLIYGNSSVSLKKKLHLKFGFNPEYAKMLANLSLMSDYGNLSAKAIKKILPYLEDGHLYSEACRLAGYNHSKSLTAEELEKFEPKAKLDLLKKNSLRNPVVEKILNQMVNVVNQVIDTYGKPDGVRIELARELKKSAKERAEMTKGIADGTRRNEEIKKIITQKFGIPNPTKSDLVRYRLWQELESRGYKDIFTDKYISPDKIFSSEIDIEHIIPKALLFDDSFSNKTLSFRNVNLKKANRTALDFITQDYQSNVEAYKERVETWNKDNHISKGKRNKLLMSLKDIPDGFIERDLRNSQYIARKAKRMLYEVFPNEVLATSGSITDKLRSDWDLINVMKELNLPKYKALGLTEYEERLDKGTEELFKHEVIKDWTKRNDHRHHAMDALAVAFTTHNHIQYINNLNARKDITQDNHPIIKNIENLITEVNSKGKRVFKAPMSSFRESAKEQIEAILVSFKNKNKVVTKNINQTKKEGGFNYQNAKTPRGQLHKETIYGKSKQPLEKPVKINNRFCKKQVGLIINFKEQEAVLHHLKKYDNNEKIAFSNKTLKSDPIQVNGSPLREVKIFEEIFTIRKDINPDNFKTQKHLDKIIDKGIKEVMKKRLEEYNGDFKTAFSDLDKNPIWLNQSKGITIKRATISGVTNAEPLHQAKDHLGNIILDDNGKEIPIDYVSTGNNHHVAIYQDESGNLQEEVVSFYEAVIRKNQDQPIIKKRHPKGWKFLFTMKQNEMFVFSSENFNPSEIDLLDEKNAAIISPNLFRVQKIATKNYMFRHHLETEVTNNLDFTYRHFQATEWLRNLCKVRIDHIGRIVQIGEY

SEQ ID NO: 621-631 - skipped (11 entries)

SEQ ID NO: 632 - RNA, 22 nt, Homo sapiens
  source 1..22: mol_type = transcribed RNA
tgctcaggttgcacagctggga

SEQ ID NO: 633 - RNA, 22 nt, Homo sapiens
  source 1..22: mol_type = transcribed RNA
tcccagctgtgcaacctgagca

SEQ ID NO: 634 - RNA, 22 nt, Homo sapiens
  source 1..22: mol_type = transcribed RNA
tcaggtgtggaaactgaggcag

SEQ ID NO: 635 - RNA, 22 nt, Homo sapiens
  source 1..22: mol_type = transcribed RNA
ctgcctcagtttccacacctga

SEQ ID NO: 636 - RNA, 22 nt, Homo sapiens
  source 1..22: mol_type = transcribed RNA
caaaaccgcgattactcttgca

SEQ ID NO: 637 - RNA, 22 nt, Homo sapiens
  source 1..22: mol_type = transcribed RNA
tgcaagagtaatcgcggttttg

SEQ ID NO: 638 - RNA, 21 nt, Homo sapiens
  source 1..21: mol_type = transcribed RNA
aaaagtaattgtggtttttgc

SEQ ID NO: 639 - RNA, 21 nt, Homo sapiens
  source 1..21: mol_type = transcribed RNA
gcaaaaaccacaattactttt

SEQ ID NO: 640 - RNA, 21 nt, Homo sapiens
  source 1..21: mol_type = transcribed RNA
aaaaactgcaatcacttttgc

SEQ ID NO: 641 - RNA, 21 nt, Homo sapiens
  source 1..21: mol_type = transcribed RNA
gcaaaagtgattgcagttttt

SEQ ID NO: 642 - RNA, 22 nt, Homo sapiens
  source 1..22: mol_type = transcribed RNA
caaaagtgattgtggtttttgc

SEQ ID NO: 643 - RNA, 22 nt, Homo sapiens
  source 1..22: mol_type = transcribed RNA
gcaaaaaccacaatcacttttg

SEQ ID NO: 644 - RNA, 22 nt, Homo sapiens
  source 1..22: mol_type = transcribed RNA
agcagtgtttgttttgcccaca

SEQ ID NO: 645 - RNA, 22 nt, Homo sapiens
  source 1..22: mol_type = transcribed RNA
tgtgggcaaaacaaacactgct

SEQ ID NO: 646 - RNA, 22 nt, Homo sapiens
  source 1..22: mol_type = transcribed RNA
tcgggcgcaagagcactgcagt

SEQ ID NO: 647 - RNA, 22 nt, Homo sapiens
  source 1..22: mol_type = transcribed RNA
actgcagtgctcttgcgcccga

SEQ ID NO: 648 - RNA, 21 nt, Homo sapiens
  source 1..21: mol_type = transcribed RNA
acacttgttgggatgacctgc

SEQ ID NO: 649 - RNA, 21 nt, Homo sapiens
  source 1..21: mol_type = transcribed RNA
gcaggtcatcccaacaagtgt

SEQ ID NO: 650 - RNA, 24 nt, Homo sapiens
  source 1..24: mol_type = transcribed RNA
aggagctatccactccaggtgtcc

SEQ ID NO: 651 - RNA, 24 nt, Homo sapiens
  source 1..24: mol_type = transcribed RNA
ggacacctggagtggatagctcct

SEQ ID NO: 652 - RNA, 23 nt, Homo sapiens
  source 1..23: mol_type = transcribed RNA
ccagagcagcctgcggtaacagt

SEQ ID NO: 653 - RNA, 23 nt, Homo sapiens
  source 1..23: mol_type = transcribed RNA
actgttaccgcaggctgctctgg

SEQ ID NO: 654 - RNA, 22 nt, Homo sapiens
  source 1..22: mol_type = transcribed RNA
agttgccagggctgcctttggt

SEQ ID NO: 655 - RNA, 22 nt, Homo sapiens
  source 1..22: mol_type = transcribed RNA
accaaaggcagccctggcaact

SEQ ID NO: 656 - RNA, 21 nt, Homo sapiens
  source 1..21: mol_type = transcribed RNA
tagaccatctttctagagtat

SEQ ID NO: 657 - RNA, 21 nt, Homo sapiens
  source 1..21: mol_type = transcribed RNA
atactctagaaagatggtcta

SEQ ID NO: 658 - RNA, 22 nt, Homo sapiens
  source 1..22: mol_type = transcribed RNA
agctctagaaagattgttgacc

SEQ ID NO: 659 - RNA, 22 nt, Homo sapiens
  source 1..22: mol_type = transcribed RNA
ggtcaacaatctttctagagct

SEQ ID NO: 660 - RNA, 21 nt, Homo sapiens
  source 1..21: mol_type = transcribed RNA
gggactaggatgcagacctcc

SEQ ID NO: 661 - RNA, 21 nt, Homo sapiens
  source 1..21: mol_type = transcribed RNA
ggaggtctgcatcctagtccc

SEQ ID NO: 662 - RNA, 23 nt, Homo sapiens
  source 1..23: mol_type = transcribed RNA
aggtctgcattcaaatccccaga

SEQ ID NO: 663 - RNA, 23 nt, Homo sapiens
  source 1..23: mol_type = transcribed RNA
tctggggatttgaatgcagacct

SEQ ID NO: 664 - RNA, 20 nt, Homo sapiens
  source 1..20: mol_type = transcribed RNA
cattacagcacagccattct

SEQ ID NO: 665 - RNA, 20 nt, Homo sapiens
  source 1..20: mol_type = transcribed RNA
agaatggctgtgctgtaatg

SEQ ID NO: 666 - RNA, 21 nt, Homo sapiens
  source 1..21: mol_type = transcribed RNA
tctggctgtgctgtaatgcag

SEQ ID NO: 667 - RNA, 21 nt, Homo sapiens
  source 1..21: mol_type = transcribed RNA
ctgcattacagcacagccaga

SEQ ID NO: 668 - RNA, 21 nt, Homo sapiens
  source 1..21: mol_type = transcribed RNA
tgacttctacctcttccaaag

SEQ ID NO: 669 - RNA, 21 nt, Homo sapiens
  source 1..21: mol_type = transcribed RNA
ctttggaagaggtagaagtca

SEQ ID NO: 670 - RNA, 22 nt, Homo sapiens
  source 1..22: mol_type = transcribed RNA
ttggaataggggatatctcagc

SEQ ID NO: 671 - RNA, 22 nt, Homo sapiens
  source 1..22: mol_type = transcribed RNA
gctgagatatcccctattccaa

SEQ ID NO: 672 - RNA, 22 nt, Homo sapiens
  source 1..22: mol_type = transcribed RNA
tcgtatcagagattccagacac

SEQ ID NO: 673 - RNA, 22 nt, Homo sapiens
  source 1..22: mol_type = transcribed RNA
gtgtctggaatctctgatacga

SEQ ID NO: 674 - RNA, 23 nt, Homo sapiens
  source 1..23: mol_type = transcribed RNA
actgggatgtcactgaatatggt

SEQ ID NO: 675 - RNA, 23 nt, Homo sapiens
  source 1..23: mol_type = transcribed RNA
accatattcagtgacatcccagt

SEQ ID NO: 676 - RNA, 22 nt, Homo sapiens
  source 1..22: mol_type = transcribed RNA
caaagtccttcctatttttccc

SEQ ID NO: 677 - RNA, 22 nt, Homo sapiens
  source 1..22: mol_type = transcribed RNA
gggaaaaataggaaggactttg

SEQ ID NO: 678 - RNA, 21 nt, Homo sapiens
  source 1..21: mol_type = transcribed RNA
gaagaataggagggactttgt

SEQ ID NO: 679 - RNA, 21 nt, Homo sapiens
  source 1..21: mol_type = transcribed RNA
acaaagtccctcctattcttc

SEQ ID NO: 680 - RNA, 22 nt, Homo sapiens
  source 1..22: mol_type = transcribed RNA
tgggccatgcatttctagaact

SEQ ID NO: 681 - RNA, 22 nt, Homo sapiens
  source 1..22: mol_type = transcribed RNA
agttctagaaatgcatggccca

SEQ ID NO: 682 - RNA, 21 nt, Homo sapiens
  source 1..21: mol_type = transcribed RNA
tctagaaatgcatgacccacc

SEQ ID NO: 683 - RNA, 21 nt, Homo sapiens
  source 1..21: mol_type = transcribed RNA
ggtgggtcatgcatttctaga

SEQ ID NO: 684 - RNA, 22 nt, Homo sapiens
  source 1..22: mol_type = transcribed RNA
ttccactgccactacctaattt

SEQ ID NO: 685 - RNA, 22 nt, Homo sapiens
  source 1..22: mol_type = transcribed RNA
aaattaggtagtggcagtggaa

SEQ ID NO: 686 - RNA, 21 nt, Homo sapiens
  source 1..21: mol_type = transcribed RNA
attaggtagtggcagtggaac

SEQ ID NO: 687 - RNA, 21 nt, Homo sapiens
  source 1..21: mol_type = transcribed RNA
gttccactgccactacctaat

SEQ ID NO: 688 - RNA, 21 nt, Homo sapiens
  source 1..21: mol_type = transcribed RNA
caccgactctgtctcctgcag

SEQ ID NO: 689 - RNA, 21 nt, Homo sapiens
  source 1..21: mol_type = transcribed RNA
ctgcaggagacagagtcggtg

SEQ ID NO: 690 - RNA, 22 nt, Homo sapiens
  source 1..22: mol_type = transcribed RNA
cagcaggggagagagaggagtc

SEQ ID NO: 691 - RNA, 22 nt, Homo sapiens
  source 1..22: mol_type = transcribed RNA
gactcctctctctcccctgctg

SEQ ID NO: 692 - RNA, 22 nt, Homo sapiens
  source 1..22: mol_type = transcribed RNA
ttccagcccttctaatggtagg

SEQ ID NO: 693 - RNA, 22 nt, Homo sapiens
  source 1..22: mol_type = transcribed RNA
cctaccattagaagggctggaa

SEQ ID NO: 694 - RNA, 22 nt, Homo sapiens
  source 1..22: mol_type = transcribed RNA
taccattagaagagctggaaga

SEQ ID NO: 695 - RNA, 22 nt, Homo sapiens
  source 1..22: mol_type = transcribed RNA
tcttccagctcttctaatggta

SEQ ID NO: 696 - RNA, 21 nt, Homo sapiens
  source 1..21: mol_type = transcribed RNA
tcaagtgtcatctgtccctag

SEQ ID NO: 697 - RNA, 21 nt, Homo sapiens
  source 1..21: mol_type = transcribed RNA
ctagggacagatgacacttga

SEQ ID NO: 698 - RNA, 23 nt, Homo sapiens
  source 1..23: mol_type = transcribed RNA
tttgggattgacgccacatgtct

SEQ ID NO: 699 - RNA, 23 nt, Homo sapiens
  source 1..23: mol_type = transcribed RNA
agacatgtggcgtcaatcccaaa

SEQ ID NO: 700 - RNA, 21 nt, Homo sapiens
  source 1..21: mol_type = transcribed RNA
ctgcctgttcttccactccag

SEQ ID NO: 701 - RNA, 21 nt, Homo sapiens
  source 1..21: mol_type = transcribed RNA
ctggagtggaagaacaggcag

SEQ ID NO: 702 - RNA, 23 nt, Homo sapiens
  source 1..23: mol_type = transcribed RNA
tatggagtggactttcagctggc

SEQ ID NO: 703 - RNA, 23 nt, Homo sapiens
  source 1..23: mol_type = transcribed RNA
gccagctgaaagtccactccata

SEQ ID NO: 704 - RNA, 22 nt, Homo sapiens
  source 1..22: mol_type = transcribed RNA
cctcaccatcccttctgcctgc

SEQ ID NO: 705 - RNA, 22 nt, Homo sapiens
  source 1..22: mol_type = transcribed RNA
gcaggcagaagggatggtgagg

SEQ ID NO: 706 - RNA, 23 nt, Homo sapiens
  source 1..23: mol_type = transcribed RNA
caggcagaagtggggctgacagg

SEQ ID NO: 707 - RNA, 23 nt, Homo sapiens
  source 1..23: mol_type = transcribed RNA
cctgtcagccccacttctgcctg

SEQ ID NO: 708 - RNA, 20 nt, Homo sapiens
  source 1..20: mol_type = transcribed RNA
tctcttcatctaccccccag

SEQ ID NO: 709 - RNA, 20 nt, Homo sapiens
  source 1..20: mol_type = transcribed RNA
ctggggggtagatgaagaga

SEQ ID NO: 710 - RNA, 21 nt, Homo sapiens
  source 1..21: mol_type = transcribed RNA
ttggagggtgtggaagacatc

SEQ ID NO: 711 - RNA, 21 nt, Homo sapiens
  source 1..21: mol_type = transcribed RNA
gatgtcttccacaccctccaa

SEQ ID NO: 712 - RNA, 22 nt, Homo sapiens
  source 1..22: mol_type = transcribed RNA
ctgccagccccgttccagggca

SEQ ID NO: 713 - RNA, 22 nt, Homo sapiens
  source 1..22: mol_type = transcribed RNA
tgccctggaacggggctggcag

SEQ ID NO: 714 - RNA, 23 nt, Homo sapiens
  source 1..23: mol_type = transcribed RNA
acaaagtacagcattagccttag

SEQ ID NO: 715 - RNA, 23 nt, Homo sapiens
  source 1..23: mol_type = transcribed RNA
ctaaggctaatgctgtactttgt

SEQ ID NO: 716 - RNA, 23 nt, Homo sapiens
  source 1..23: mol_type = transcribed RNA
aaaggtcattgtaaggttaatgc

SEQ ID NO: 717 - RNA, 23 nt, Homo sapiens
  source 1..23: mol_type = transcribed RNA
gcattaaccttacaatgaccttt

SEQ ID NO: 718 - RNA, 22 nt, Homo sapiens
  source 1..22: mol_type = transcribed RNA
tgaggctaatgcactacttcac

SEQ ID NO: 719 - RNA, 22 nt, Homo sapiens
  source 1..22: mol_type = transcribed RNA
gtgaagtagtgcattagcctca

SEQ ID NO: 720 - RNA, 24 nt, Homo sapiens
  source 1..24: mol_type = transcribed RNA
tatagagagcaggaagattaatgt

SEQ ID NO: 721 - RNA, 24 nt, Homo sapiens
  source 1..24: mol_type = transcribed RNA
acattaatcttcctgctctctata

SEQ ID NO: 722 - RNA, 23 nt, Homo sapiens
  source 1..23: mol_type = transcribed RNA
gtgcttcatcgtaattaacctta

SEQ ID NO: 723 - RNA, 23 nt, Homo sapiens
  source 1..23: mol_type = transcribed RNA
taaggttaattacgatgaagcac

SEQ ID NO: 724 - RNA, 24 nt, Homo sapiens
  source 1..24: mol_type = transcribed RNA
gtggaaagcatgcatccagggtgt

SEQ ID NO: 725 - RNA, 24 nt, Homo sapiens
  source 1..24: mol_type = transcribed RNA
acaccctggatgcatgctttccac

SEQ ID NO: 726 - RNA, 22 nt, Homo sapiens
  source 1..22: mol_type = transcribed RNA
agacacatttggagagggaacc

SEQ ID NO: 727 - RNA, 22 nt, Homo sapiens
  source 1..22: mol_type = transcribed RNA
ggttccctctccaaatgtgtct

SEQ ID NO: 728 - RNA, 22 nt, Homo sapiens
  source 1..22: mol_type = transcribed RNA
ttccctttgtcatcctatgcct

SEQ ID NO: 729 - RNA, 22 nt, Homo sapiens
  source 1..22: mol_type = transcribed RNA
aggcataggatgacaaagggaa

SEQ ID NO: 730 - RNA, 21 nt, Homo sapiens
  source 1..21: mol_type = transcribed RNA
gctgggaaggcaaagggacgt

SEQ ID NO: 731 - RNA, 21 nt, Homo sapiens
  source 1..21: mol_type = transcribed RNA
acgtccctttgccttcccagc

SEQ ID NO: 732 - RNA, 21 nt, Homo sapiens
  source 1..21: mol_type = transcribed RNA
taccacagggtagaaccacgg

SEQ ID NO: 733 - RNA, 21 nt, Homo sapiens
  source 1..21: mol_type = transcribed RNA
ccgtggttctaccctgtggta

SEQ ID NO: 734 - RNA, 22 nt, Homo sapiens
  source 1..22: mol_type = transcribed RNA
ggctggagcgagtgcagtggtg

SEQ ID NO: 735 - RNA, 22 nt, Homo sapiens
  source 1..22: mol_type = transcribed RNA
caccactgcactcgctccagcc

SEQ ID NO: 736 - RNA, 18 nt, Homo sapiens
  source 1..18: mol_type = transcribed RNA
ccaggctctgcagtggga

SEQ ID NO: 737 - RNA, 18 nt, Homo sapiens
  source 1..18: mol_type = transcribed RNA
tcccactgcagagcctgg

SEQ ID NO: 738 - RNA, 22 nt, Homo sapiens
  source 1..22: mol_type = transcribed RNA
ctgggaggtgtgatattgtggt

SEQ ID NO: 739 - RNA, 22 nt, Homo sapiens
  source 1..22: mol_type = transcribed RNA
accacaatatcacacctcccag

SEQ ID NO: 740 - RNA, 22 nt, Homo sapiens
  source 1..22: mol_type = transcribed RNA
gggaggtgtgatctcacactcg

SEQ ID NO: 741 - RNA, 22 nt, Homo sapiens
  source 1..22: mol_type = transcribed RNA
cgagtgtgagatcacacctccc

SEQ ID NO: 742 - RNA, 22 nt, Homo sapiens
  source 1..22: mol_type = transcribed RNA
tgtgatatcatggttcctggga

SEQ ID NO: 743 - RNA, 22 nt, Homo sapiens
  source 1..22: mol_type = transcribed RNA
tcccaggaaccatgatatcaca

SEQ ID NO: 744 - RNA, 22 nt, Homo sapiens
  source 1..22: mol_type = transcribed RNA
tgtgatatcgtgcttcctggga

SEQ ID NO: 745 - RNA, 22 nt, Homo sapiens
  source 1..22: mol_type = transcribed RNA
tcccaggaagcacgatatcaca

SEQ ID NO: 746 - RNA, 18 nt, Homo sapiens
  source 1..18: mol_type = transcribed RNA
ggtgggcttcccggaggg

SEQ ID NO: 747 - RNA, 18 nt, Homo sapiens
  source 1..18: mol_type = transcribed RNA
ccctccgggaagcccacc

SEQ ID NO: 748 - RNA, 18 nt, Homo sapiens
  source 1..18: mol_type = transcribed RNA
cactgcaggactcagcag

SEQ ID NO: 749 - RNA, 18 nt, Homo sapiens
  source 1..18: mol_type = transcribed RNA
ctgctgagtcctgcagtg

SEQ ID NO: 750 - RNA, 17 nt, Homo sapiens
  source 1..17: mol_type = transcribed RNA
tgagggaggagactgca

SEQ ID NO: 751 - RNA, 17 nt, Homo sapiens
  source 1..17: mol_type = transcribed RNA
tgcagtctcctccctca

SEQ ID NO: 752 - RNA, 18 nt, Homo sapiens
  source 1..18: mol_type = transcribed RNA
gaggctgaaggaagatgg

SEQ ID NO: 753 - RNA, 18 nt, Homo sapiens
  source 1..18: mol_type = transcribed RNA
ccatcttccttcagcctc

SEQ ID NO: 754 - RNA, 22 nt, Homo sapiens
  source 1..22: mol_type = transcribed RNA
gtcactgatgtctgtagctgag

SEQ ID NO: 755 - RNA, 22 nt, Homo sapiens
  source 1..22: mol_type = transcribed RNA
ctcagctacagacatcagtgac

SEQ ID NO: 756 - RNA, 22 nt, Homo sapiens
  source 1..22: mol_type = transcribed RNA
acctgtctgtggaaaggagcta

SEQ ID NO: 757 - RNA, 22 nt, Homo sapiens
  source 1..22: mol_type = transcribed RNA
tagctcctttccacagacaggt

SEQ ID NO: 758 - RNA, 22 nt, Homo sapiens
  source 1..22: mol_type = transcribed RNA
agagttaactcaaaatggacta

SEQ ID NO: 759 - RNA, 22 nt, Homo sapiens
  source 1..22: mol_type = transcribed RNA
tagtccattttgagttaactct

SEQ ID NO: 760 - RNA, 22 nt, Homo sapiens
  source 1..22: mol_type = transcribed RNA
tgttgggattcagcaggaccat

SEQ ID NO: 761 - RNA, 22 nt, Homo sapiens
  source 1..22: mol_type = transcribed RNA
atggtcctgctgaatcccaaca

SEQ ID NO: 762 - RNA, 17 nt, Homo sapiens
  source 1..17: mol_type = transcribed RNA
gaagatggacgtacttt

SEQ ID NO: 763 - RNA, 17 nt, Homo sapiens
  source 1..17: mol_type = transcribed RNA
aaagtacgtccatcttc

SEQ ID NO: 764 - RNA, 21 nt, Homo sapiens
  source 1..21: mol_type = transcribed RNA
tctgaatagagtctgaagagt

SEQ ID NO: 765 - RNA, 21 nt, Homo sapiens
  source 1..21: mol_type = transcribed RNA
actcttcagactctattcaga

SEQ ID NO: 766 - RNA, 22 nt, Homo sapiens
  source 1..22: mol_type = transcribed RNA
caaggagacgggaacatggagc

SEQ ID NO: 767 - RNA, 22 nt, Homo sapiens
  source 1..22: mol_type = transcribed RNA
gctccatgttcccgtctccttg

SEQ ID NO: 768 - RNA, 20 nt, Homo sapiens
  source 1..20: mol_type = transcribed RNA
aaaagctgggctgagaggcg

SEQ ID NO: 769 - RNA, 20 nt, Homo sapiens
  source 1..20: mol_type = transcribed RNA
cgcctctcagcccagctttt

SEQ ID NO: 770 - RNA, 18 nt, Homo sapiens
  source 1..18: mol_type = transcribed RNA
aggctggagtgagcggag

SEQ ID NO: 771 - RNA, 18 nt, Homo sapiens
  source 1..18: mol_type = transcribed RNA
ctccgctcactccagcct

SEQ ID NO: 772 - RNA, 22 nt, Homo sapiens
  source 1..22: mol_type = transcribed RNA
gcgactctgaaaactagaaggt

SEQ ID NO: 773 - RNA, 22 nt, Homo sapiens
  source 1..22: mol_type = transcribed RNA
accttctagttttcagagtcgc

SEQ ID NO: 774 - RNA, 20 nt, Homo sapiens
  source 1..20: mol_type = transcribed RNA
aaagactctgcaagatgcct

SEQ ID NO: 775 - RNA, 20 nt, Homo sapiens
  source 1..20: mol_type = transcribed RNA
aggcatcttgcagagtcttt

SEQ ID NO: 776 - RNA, 21 nt, Homo sapiens
  source 1..21: mol_type = transcribed RNA
acaggagtgggggtgggacat

SEQ ID NO: 777 - RNA, 21 nt, Homo sapiens
  source 1..21: mol_type = transcribed RNA
atgtcccacccccactcctgt

SEQ ID NO: 778 - RNA, 21 nt, Homo sapiens
  source 1..21: mol_type = transcribed RNA
cgtcccaccccccactcctgt

SEQ ID NO: 779 - RNA, 21 nt, Homo sapiens
  source 1..21: mol_type = transcribed RNA
acaggagtggggggtgggacg

SEQ ID NO: 780 - RNA, 18 nt, Homo sapiens
  source 1..18: mol_type = transcribed RNA
aggagaagtaaagtagaa

SEQ ID NO: 781 - RNA, 18 nt, Homo sapiens
  source 1..18: mol_type = transcribed RNA
ttctactttacttctcct

SEQ ID NO: 782 - RNA, 22 nt, Homo sapiens
  source 1..22: mol_type = transcribed RNA
atggccagagctcacacagagg

SEQ ID NO: 783 - RNA, 22 nt, Homo sapiens
  source 1..22: mol_type = transcribed RNA
cctctgtgtgagctctggccat

SEQ ID NO: 784 - RNA, 21 nt, Homo sapiens
  source 1..21: mol_type = transcribed RNA
tgggctcagggtacaaaggtt

SEQ ID NO: 785 - RNA, 21 nt, Homo sapiens
  source 1..21: mol_type = transcribed RNA
aacctttgtaccctgagccca

SEQ ID NO: 786 - RNA, 21 nt, Homo sapiens
  source 1..21: mol_type = transcribed RNA
cacaggcttagaaaagacagt

SEQ ID NO: 787 - RNA, 21 nt, Homo sapiens
  source 1..21: mol_type = transcribed RNA
actgtcttttctaagcctgtg

SEQ ID NO: 788 - RNA, 22 nt, Homo sapiens
  source 1..22: mol_type = transcribed RNA
gtgactgataccttggaggcat

SEQ ID NO: 789 - RNA, 22 nt, Homo sapiens
  source 1..22: mol_type = transcribed RNA
atgcctccaaggtatcagtcac

SEQ ID NO: 790 - RNA, 22 nt, Homo sapiens
  source 1..22: mol_type = transcribed RNA
tgtcgtggggcttgctggcttg

SEQ ID NO: 791 - RNA, 22 nt, Homo sapiens
  source 1..22: mol_type = transcribed RNA
caagccagcaagccccacgaca

SEQ ID NO: 792 - RNA, 17 nt, Homo sapiens
  source 1..17: mol_type = transcribed RNA
acagggaggagattgta

SEQ ID NO: 793 - RNA, 17 nt, Homo sapiens
  source 1..17: mol_type = transcribed RNA
tacaatctcctccctgt

SEQ ID NO: 794 - RNA, 17 nt, Homo sapiens
  source 1..17: mol_type = transcribed RNA
gccggacaagagggagg

SEQ ID NO: 795 - RNA, 17 nt, Homo sapiens
  source 1..17: mol_type = transcribed RNA
cctccctcttgtccggc

SEQ ID NO: 796 - RNA, 17 nt, Homo sapiens
  source 1..17: mol_type = transcribed RNA
ttggaggcgtgggtttt

SEQ ID NO: 797 - RNA, 17 nt, Homo sapiens
  source 1..17: mol_type = transcribed RNA
aaaacccacgcctccaa

SEQ ID NO: 798 - RNA, 18 nt, Homo sapiens
  source 1..18: mol_type = transcribed RNA
ctcgagttggaagaggcg

SEQ ID NO: 799 - RNA, 18 nt, Homo sapiens
  source 1..18: mol_type = transcribed RNA
cgcctcttccaactcgag

SEQ ID NO: 800 - RNA, 21 nt, Homo sapiens
  source 1..21: mol_type = transcribed RNA
cacggcaaaagaaacaatcca

SEQ ID NO: 801 - RNA, 21 nt, Homo sapiens
  source 1..21: mol_type = transcribed RNA
tggattgtttcttttgccgtg

SEQ ID NO: 802 - RNA, 22 nt, Homo sapiens
  source 1..22: mol_type = transcribed RNA
agattgtttcttttgccgtgca

SEQ ID NO: 803 - RNA, 22 nt, Homo sapiens
  source 1..22: mol_type = transcribed RNA
tgcacggcaaaagaaacaatct

SEQ ID NO: 804 - RNA, 17 nt, Homo sapiens
  source 1..17: mol_type = transcribed RNA
ggtgggggctgttgttt

SEQ ID NO: 805 - RNA, 17 nt, Homo sapiens
  source 1..17: mol_type = transcribed RNA
aaacaacagcccccacc

SEQ ID NO: 806 - RNA, 20 nt, Homo sapiens
  source 1..20: mol_type = transcribed RNA
ggctccttggtctaggggta

SEQ ID NO: 807 - RNA, 20 nt, Homo sapiens
  source 1..20: mol_type = transcribed RNA
tacccctagaccaaggagcc

SEQ ID NO: 808 - RNA, 22 nt, Homo sapiens
  source 1..22: mol_type = transcribed RNA
cgtcccggggctgcgcgaggca

SEQ ID NO: 809 - RNA, 22 nt, Homo sapiens
  source 1..22: mol_type = transcribed RNA
tgcctcgcgcagccccgggacg

SEQ ID NO: 810 - RNA, 22 nt, Homo sapiens
  source 1..22: mol_type = transcribed RNA
tggggatttggagaagtggtga

SEQ ID NO: 811 - RNA, 22 nt, Homo sapiens
  source 1..22: mol_type = transcribed RNA
tcaccacttctccaaatcccca

SEQ ID NO: 812 - RNA, 17 nt, Homo sapiens
  source 1..17: mol_type = transcribed RNA
tggtagagctgaggaca

SEQ ID NO: 813 - RNA, 17 nt, Homo sapiens
  source 1..17: mol_type = transcribed RNA
tgtcctcagctctacca

SEQ ID NO: 814 - RNA, 23 nt, Homo sapiens
  source 1..23: mol_type = transcribed RNA
ttgaattcttggccttaagtgat

SEQ ID NO: 815 - RNA, 23 nt, Homo sapiens
  source 1..23: mol_type = transcribed RNA
atcacttaaggccaagaattcaa

SEQ ID NO: 816 - RNA, 20 nt, Homo sapiens
  source 1..20: mol_type = transcribed RNA
gagcttggtctgtagcggtt

SEQ ID NO: 817 - RNA, 20 nt, Homo sapiens
  source 1..20: mol_type = transcribed RNA
aaccgctacagaccaagctc

SEQ ID NO: 818 - RNA, 20 nt, Homo sapiens
  source 1..20: mol_type = transcribed RNA
ggatccgagtcacggcacca

SEQ ID NO: 819 - RNA, 20 nt, Homo sapiens
  source 1..20: mol_type = transcribed RNA
tggtgccgtgactcggatcc

SEQ ID NO: 820 - RNA, 17 nt, Homo sapiens
  source 1..17: mol_type = transcribed RNA
agggtgtgtgtgttttt

SEQ ID NO: 821 - RNA, 17 nt, Homo sapiens
  source 1..17: mol_type = transcribed RNA
aaaaacacacacaccct

SEQ ID NO: 822 - RNA, 17 nt, Homo sapiens
  source 1..17: mol_type = transcribed RNA
cctggtggcttcctttt

SEQ ID NO: 823 - RNA, 17 nt, Homo sapiens
  source 1..17: mol_type = transcribed RNA
aaaaggaagccaccagg

SEQ ID NO: 824 - RNA, 22 nt, Homo sapiens
  source 1..22: mol_type = transcribed RNA
tcacaaggtattgactggcgta

SEQ ID NO: 825 - RNA, 22 nt, Homo sapiens
  source 1..22: mol_type = transcribed RNA
tacgccagtcaataccttgtga

SEQ ID NO: 826 - RNA, 19 nt, Homo sapiens
  source 1..19: mol_type = transcribed RNA
agaggtaggtgtggaagaa

SEQ ID NO: 827 - RNA, 19 nt, Homo sapiens
  source 1..19: mol_type = transcribed RNA
ttcttccacacctacctct

SEQ ID NO: 828 - RNA, 22 nt, Homo sapiens
  source 1..22: mol_type = transcribed RNA
ccaggaggcggaggaggtggag

SEQ ID NO: 829 - RNA, 22 nt, Homo sapiens
  source 1..22: mol_type = transcribed RNA
ctccacctcctccgcctcctgg

SEQ ID NO: 830 - RNA, 22 nt, Homo sapiens
  source 1..22: mol_type = transcribed RNA
atagtggttgtgaatttacctt

SEQ ID NO: 831 - RNA, 22 nt, Homo sapiens
  source 1..22: mol_type = transcribed RNA
aaggtaaattcacaaccactat

SEQ ID NO: 832 - RNA, 23 nt, Homo sapiens
  source 1..23: mol_type = transcribed RNA
gattgagactagtagggctaggc

SEQ ID NO: 833 - RNA, 23 nt, Homo sapiens
  source 1..23: mol_type = transcribed RNA
gcctagccctactagtctcaatc

SEQ ID NO: 834 - RNA, 23 nt, Homo sapiens
  source 1..23: mol_type = transcribed RNA
tgacacggagggtggcttgggaa

SEQ ID NO: 835 - RNA, 23 nt, Homo sapiens
  source 1..23: mol_type = transcribed RNA
ttcccaagccaccctccgtgtca

SEQ ID NO: 836 - RNA, 17 nt, Homo sapiens
  source 1..17: mol_type = transcribed RNA
gagactggggtggggcc

SEQ ID NO: 837 - RNA, 17 nt, Homo sapiens
  source 1..17: mol_type = transcribed RNA
ggccccaccccagtctc

SEQ ID NO: 838 - RNA, 21 nt, Homo sapiens
  source 1..21: mol_type = transcribed RNA
aaggtttggatagatgcaata

SEQ ID NO: 839 - RNA, 21 nt, Homo sapiens
  source 1..21: mol_type = transcribed RNA
tattgcatctatccaaacctt

SEQ ID NO: 840 - RNA, 22 nt, Homo sapiens
  source 1..22: mol_type = transcribed RNA
ctcaagtagtctgaccagggga

SEQ ID NO: 841 - RNA, 22 nt, Homo sapiens
  source 1..22: mol_type = transcribed RNA
tcccctggtcagactacttgag

SEQ ID NO: 842 - RNA, 18 nt, Homo sapiens
  source 1..18: mol_type = transcribed RNA
gggtgcgggccggcgggg

SEQ ID NO: 843 - RNA, 18 nt, Homo sapiens
  source 1..18: mol_type = transcribed RNA
ccccgccggcccgcaccc

SEQ ID NO: 844 - RNA, 18 nt, Homo sapiens
  source 1..18: mol_type = transcribed RNA
agagcagaaggatgagat

SEQ ID NO: 845 - RNA, 18 nt, Homo sapiens
  source 1..18: mol_type = transcribed RNA
atctcatccttctgctct

SEQ ID NO: 846 - RNA, 21 nt, Homo sapiens
  source 1..21: mol_type = transcribed RNA
tggcaaacgtggaagccgaga

SEQ ID NO: 847 - RNA, 21 nt, Homo sapiens
  source 1..21: mol_type = transcribed RNA
tctcggcttccacgtttgcca

SEQ ID NO: 848 - RNA, 18 nt, Homo sapiens
  source 1..18: mol_type = transcribed RNA
ggtggggggtgttgtttt

SEQ ID NO: 849 - RNA, 18 nt, Homo sapiens
  source 1..18: mol_type = transcribed RNA
aaaacaacaccccccacc

SEQ ID NO: 850 - RNA, 22 nt, Homo sapiens
  source 1..22: mol_type = transcribed RNA
ctagtgctctccgttacaagta

SEQ ID NO: 851 - RNA, 22 nt, Homo sapiens
  source 1..22: mol_type = transcribed RNA
tacttgtaacggagagcactag

SEQ ID NO: 852 - RNA, 22 nt, Homo sapiens
  source 1..22: mol_type = transcribed RNA
caagggaccaagcattcattat

SEQ ID NO: 853 - RNA, 22 nt, Homo sapiens
  source 1..22: mol_type = transcribed RNA
ataatgaatgcttggtcccttg

SEQ ID NO: 854 - RNA, 22 nt, Homo sapiens
  source 1..22: mol_type = transcribed RNA
caggaaggatttagggacaggc

SEQ ID NO: 855 - RNA, 22 nt, Homo sapiens
  source 1..22: mol_type = transcribed RNA
gcctgtccctaaatccttcctg

SEQ ID NO: 856 - RNA, 22 nt, Homo sapiens
  source 1..22: mol_type = transcribed RNA
ctattaaggacatttgtgattc

SEQ ID NO: 857 - RNA, 22 nt, Homo sapiens
  source 1..22: mol_type = transcribed RNA
gaatcacaaatgtccttaatag

SEQ ID NO: 858 - RNA, 22 nt, Homo sapiens
  source 1..22: mol_type = transcribed RNA
attaaggacatttgtgattgat

SEQ ID NO: 859 - RNA, 22 nt, Homo sapiens
  source 1..22: mol_type = transcribed RNA
atcaatcacaaatgtccttaat

SEQ ID NO: 860 - RNA, 17 nt, Homo sapiens
  source 1..17: mol_type = transcribed RNA
gaggctgagctgaggag

SEQ ID NO: 861 - RNA, 17 nt, Homo sapiens
  source 1..17: mol_type = transcribed RNA
ctcctcagctcagcctc

SEQ ID NO: 862 - RNA, 22 nt, Homo sapiens
  source 1..22: mol_type = transcribed RNA
cgcgcggccgtgctcggagcag

SEQ ID NO: 863 - RNA, 22 nt, Homo sapiens
  source 1..22: mol_type = transcribed RNA
ctgctccgagcacggccgcgcg

SEQ ID NO: 864 - RNA, 21 nt, Homo sapiens
  source 1..21: mol_type = transcribed RNA
agccaagtggaagttacttta

SEQ ID NO: 865 - RNA, 21 nt, Homo sapiens
  source 1..21: mol_type = transcribed RNA
taaagtaacttccacttggct

SEQ ID NO: 866 - RNA, 17 nt, Homo sapiens
  source 1..17: mol_type = transcribed RNA
ggagtgggctggtggtt

SEQ ID NO: 867 - RNA, 17 nt, Homo sapiens
  source 1..17: mol_type = transcribed RNA
aaccaccagcccactcc

SEQ ID NO: 868 - RNA, 22 nt, Homo sapiens
  source 1..22: mol_type = transcribed RNA
tttctatttctcagtggggctc

SEQ ID NO: 869 - RNA, 22 nt, Homo sapiens
  source 1..22: mol_type = transcribed RNA
gagccccactgagaaatagaaa

SEQ ID NO: 870 - RNA, 22 nt, Homo sapiens
  source 1..22: mol_type = transcribed RNA
aacccagtgggctatggaaatg

SEQ ID NO: 871 - RNA, 22 nt, Homo sapiens
  source 1..22: mol_type = transcribed RNA
catttccatagcccactgggtt

SEQ ID NO: 872 - RNA, 17 nt, Homo sapiens
  source 1..17: mol_type = transcribed RNA
ggggtggtctgttgttg

SEQ ID NO: 873 - RNA, 17 nt, Homo sapiens
  source 1..17: mol_type = transcribed RNA
caacaacagaccacccc

SEQ ID NO: 874 - RNA, 20 nt, Homo sapiens
  source 1..20: mol_type = transcribed RNA
aaaaggcgggagaagcccca

SEQ ID NO: 875 - RNA, 20 nt, Homo sapiens
  source 1..20: mol_type = transcribed RNA
tggggcttctcccgcctttt

SEQ ID NO: 876 - RNA, 20 nt, Homo sapiens
  source 1..20: mol_type = transcribed RNA
taacggccgcggtaccctaa

SEQ ID NO: 877 - RNA, 20 nt, Homo sapiens
  source 1..20: mol_type = transcribed RNA
ttagggtaccgcggccgtta

SEQ ID NO: 878 - RNA, 17 nt, Homo sapiens
  source 1..17: mol_type = transcribed RNA
gctgggcgaggctggca

SEQ ID NO: 879 - RNA, 17 nt, Homo sapiens
  source 1..17: mol_type = transcribed RNA
tgccagcctcgcccagc

SEQ ID NO: 880 - RNA, 19 nt, Homo sapiens
  source 1..19: mol_type = transcribed RNA
agagctggctgaagggcag

SEQ ID NO: 881 - RNA, 19 nt, Homo sapiens
  source 1..19: mol_type = transcribed RNA
ctgcccttcagccagctct

SEQ ID NO: 882 - RNA, 18 nt, Homo sapiens
  source 1..18: mol_type = transcribed RNA
agggggcgggctccggcg

SEQ ID NO: 883 - RNA, 18 nt, Homo sapiens
  source 1..18: mol_type = transcribed RNA
cgccggagcccgccccct

SEQ ID NO: 884 - RNA, 22 nt, Homo sapiens
  source 1..22: mol_type = transcribed RNA
tctggtaagagatttgggcata

SEQ ID NO: 885 - RNA, 22 nt, Homo sapiens
  source 1..22: mol_type = transcribed RNA
tatgcccaaatctcttaccaga

SEQ ID NO: 886 - RNA, 22 nt, Homo sapiens
  source 1..22: mol_type = transcribed RNA
aatgtggactggtgtgaccaaa

SEQ ID NO: 887 - RNA, 22 nt, Homo sapiens
  source 1..22: mol_type = transcribed RNA
tttggtcacaccagtccacatt

SEQ ID NO: 888 - RNA, 17 nt, Homo sapiens
  source 1..17: mol_type = transcribed RNA
ggggctgggcgcgcgcc

SEQ ID NO: 889 - RNA, 17 nt, Homo sapiens
  source 1..17: mol_type = transcribed RNA
ggcgcgcgcccagcccc

SEQ ID NO: 890 - RNA, 21 nt, Homo sapiens
  source 1..21: mol_type = transcribed RNA
agaaggcctttccatctctgt

SEQ ID NO: 891 - RNA, 21 nt, Homo sapiens
  source 1..21: mol_type = transcribed RNA
acagagatggaaaggccttct

SEQ ID NO: 892 - RNA, 22 nt, Homo sapiens
  source 1..22: mol_type = transcribed RNA
ccagactgtggctgaccagagg

SEQ ID NO: 893 - RNA, 22 nt, Homo sapiens
  source 1..22: mol_type = transcribed RNA
cctctggtcagccacagtctgg

SEQ ID NO: 894 - RNA, 21 nt, Homo sapiens
  source 1..21: mol_type = transcribed RNA
aatgtaaacaggctttttgct

SEQ ID NO: 895 - RNA, 21 nt, Homo sapiens
  source 1..21: mol_type = transcribed RNA
agcaaaaagcctgtttacatt

SEQ ID NO: 896 - RNA, 22 nt, Homo sapiens
  source 1..22: mol_type = transcribed RNA
gaggaaactgaagctgagaggg

SEQ ID NO: 897 - RNA, 22 nt, Homo sapiens
  source 1..22: mol_type = transcribed RNA
ccctctcagcttcagtttcctc

SEQ ID NO: 898 - RNA, 17 nt, Homo sapiens
  source 1..17: mol_type = transcribed RNA
ctccgggacggctgggc

SEQ ID NO: 899 - RNA, 17 nt, Homo sapiens
  source 1..17: mol_type = transcribed RNA
gcccagccgtcccggag

SEQ ID NO: 900 - RNA, 22 nt, Homo sapiens
  source 1..22: mol_type = transcribed RNA
tgggctggcagggcaagtgctg

SEQ ID NO: 901 - RNA, 22 nt, Homo sapiens
  source 1..22: mol_type = transcribed RNA
cagcacttgccctgccagccca

SEQ ID NO: 902 - RNA, 17 nt, Homo sapiens
  source 1..17: mol_type = transcribed RNA
aagactgagaggaggga

SEQ ID NO: 903 - RNA, 17 nt, Homo sapiens
  source 1..17: mol_type = transcribed RNA
tccctcctctcagtctt

SEQ ID NO: 904 - RNA, 17 nt, Homo sapiens
  source 1..17: mol_type = transcribed RNA
tgaggtagtagtttctt

SEQ ID NO: 905 - RNA, 17 nt, Homo sapiens
  source 1..17: mol_type = transcribed RNA
aagaaactactacctca

SEQ ID NO: 906 - RNA, 21 nt, Homo sapiens
  source 1..21: mol_type = transcribed RNA
tatgtgacctcggatgaatca

SEQ ID NO: 907 - RNA, 21 nt, Homo sapiens
  source 1..21: mol_type = transcribed RNA
tgattcatccgaggtcacata

SEQ ID NO: 908 - RNA, 22 nt, Homo sapiens
  source 1..22: mol_type = transcribed RNA
gctgatgatgatggtgctgaag

SEQ ID NO: 909 - RNA, 22 nt, Homo sapiens
  source 1..22: mol_type = transcribed RNA
cttcagcaccatcatcatcagc

SEQ ID NO: 910 - RNA, 22 nt, Homo sapiens
  source 1..22: mol_type = transcribed RNA
tttaagcaggaaatagaattta

SEQ ID NO: 911 - RNA, 22 nt, Homo sapiens
  source 1..22: mol_type = transcribed RNA
taaattctatttcctgcttaaa

SEQ ID NO: 912 - RNA, 22 nt, Homo sapiens
  source 1..22: mol_type = transcribed RNA
tgtgacaatagagatgaacatg

SEQ ID NO: 913 - RNA, 22 nt, Homo sapiens
  source 1..22: mol_type = transcribed RNA
catgttcatctctattgtcaca

SEQ ID NO: 914 - RNA, 18 nt, Homo sapiens
  source 1..18: mol_type = transcribed RNA
aggctgggctgggacgga

SEQ ID NO: 915 - RNA, 18 nt, Homo sapiens
  source 1..18: mol_type = transcribed RNA
tccgtcccagcccagcct

SEQ ID NO: 916 - RNA, 20 nt, Homo sapiens
  source 1..20: mol_type = transcribed RNA
aaatgggtggtctgaggcaa

SEQ ID NO: 917 - RNA, 20 nt, Homo sapiens
  source 1..20: mol_type = transcribed RNA
ttgcctcagaccacccattt

SEQ ID NO: 918 - RNA, 20 nt, Homo sapiens
  source 1..20: mol_type = transcribed RNA
ctgggttgggctgggctggg

SEQ ID NO: 919 - RNA, 20 nt, Homo sapiens
  source 1..20: mol_type = transcribed RNA
cccagcccagcccaacccag

SEQ ID NO: 920 - RNA, 17 nt, Homo sapiens
  source 1..17: mol_type = transcribed RNA
gcggggctgggcgcgcg

SEQ ID NO: 921 - RNA, 17 nt, Homo sapiens
  source 1..17: mol_type = transcribed RNA
cgcgcgcccagccccgc

SEQ ID NO: 922 - RNA, 22 nt, Homo sapiens
  source 1..22: mol_type = transcribed RNA
actaaaggatatagaaggtttt

SEQ ID NO: 923 - RNA, 22 nt, Homo sapiens
  source 1..22: mol_type = transcribed RNA
aaaaccttctatatcctttagt

SEQ ID NO: 924 - RNA, 22 nt, Homo sapiens
  source 1..22: mol_type = transcribed RNA
tgagggagtaggatgtatggtt

SEQ ID NO: 925 - RNA, 22 nt, Homo sapiens
  source 1..22: mol_type = transcribed RNA
aaccatacatcctactccctca

SEQ ID NO: 926 - RNA, 22 nt, Homo sapiens
  source 1..22: mol_type = transcribed RNA
gaagaactgttgcatttgccct

SEQ ID NO: 927 - RNA, 22 nt, Homo sapiens
  source 1..22: mol_type = transcribed RNA
agggcaaatgcaacagttcttc

SEQ ID NO: 928 - RNA, 22 nt, Homo sapiens
  source 1..22: mol_type = transcribed RNA
cagggcctcactgtatcgccca

SEQ ID NO: 929 - RNA, 22 nt, Homo sapiens
  source 1..22: mol_type = transcribed RNA
tgggcgatacagtgaggccctg

SEQ ID NO: 930 - RNA, 22 nt, Homo sapiens
  source 1..22: mol_type = transcribed RNA
agactgacggctggaggcccat

SEQ ID NO: 931 - RNA, 22 nt, Homo sapiens
  source 1..22: mol_type = transcribed RNA
atgggcctccagccgtcagtct

SEQ ID NO: 932 - RNA, 18 nt, Homo sapiens
  source 1..18: mol_type = transcribed RNA
acaggcaggattggggaa

SEQ ID NO: 933 - RNA, 18 nt, Homo sapiens
  source 1..18: mol_type = transcribed RNA
ttccccaatcctgcctgt

SEQ ID NO: 934 - RNA, 22 nt, Homo sapiens
  source 1..22: mol_type = transcribed RNA
aggactggactcccggcagccc

SEQ ID NO: 935 - RNA, 22 nt, Homo sapiens
  source 1..22: mol_type = transcribed RNA
gggctgccgggagtccagtcct

SEQ ID NO: 936 - RNA, 17 nt, Homo sapiens
  source 1..17: mol_type = transcribed RNA
gggagaagggtcggggc

SEQ ID NO: 937 - RNA, 17 nt, Homo sapiens
  source 1..17: mol_type = transcribed RNA
gccccgacccttctccc

SEQ ID NO: 938 - RNA, 25 nt, Homo sapiens
  source 1..25: mol_type = transcribed RNA
aaatatgatgaaactcacagctgag

SEQ ID NO: 939 - RNA, 25 nt, Homo sapiens
  source 1..25: mol_type = transcribed RNA
ctcagctgtgagtttcatcatattt

SEQ ID NO: 940 - RNA, 26 nt, Homo sapiens
  source 1..26: mol_type = transcribed RNA
gctcagggatgataactgtgctgaga

SEQ ID NO: 941 - RNA, 26 nt, Homo sapiens
  source 1..26: mol_type = transcribed RNA
tctcagcacagttatcatccctgagc

SEQ ID NO: 942 - RNA, 18 nt, Homo sapiens
  source 1..18: mol_type = transcribed RNA
cagcagtgcgcagggctg

SEQ ID NO: 943 - RNA, 18 nt, Homo sapiens
  source 1..18: mol_type = transcribed RNA
cagccctgcgcactgctg

SEQ ID NO: 944 - RNA, 22 nt, Homo sapiens
  source 1..22: mol_type = transcribed RNA
gctaaggaagtcctgtgctcag

SEQ ID NO: 945 - RNA, 22 nt, Homo sapiens
  source 1..22: mol_type = transcribed RNA
ctgagcacaggacttccttagc

SEQ ID NO: 946 - RNA, 21 nt, Homo sapiens
  source 1..21: mol_type = transcribed RNA
tgactctgcctgtaggccggt

SEQ ID NO: 947 - RNA, 21 nt, Homo sapiens
  source 1..21: mol_type = transcribed RNA
accggcctacaggcagagtca

SEQ ID NO: 948 - RNA, 21 nt, Homo sapiens
  source 1..21: mol_type = transcribed RNA
gaccgagagggcctcggctgt

SEQ ID NO: 949 - RNA, 21 nt, Homo sapiens
  source 1..21: mol_type = transcribed RNA
acagccgaggccctctcggtc

SEQ ID NO: 950 - RNA, 21 nt, Homo sapiens
  source 1..21: mol_type = transcribed RNA
ggggggatgtgcatgctggtt

SEQ ID NO: 951 - RNA, 21 nt, Homo sapiens
  source 1..21: mol_type = transcribed RNA
aaccagcatgcacatcccccc

SEQ ID NO: 952 - RNA, 22 nt, Homo sapiens
  source 1..22: mol_type = transcribed RNA
tggtctgcaaagagatgactgt

SEQ ID NO: 953 - RNA, 22 nt, Homo sapiens
  source 1..22: mol_type = transcribed RNA
acagtcatctctttgcagacca

SEQ ID NO: 954 - RNA, 22 nt, Homo sapiens
  source 1..22: mol_type = transcribed RNA
tcattatatgtatgatctggac

SEQ ID NO: 955 - RNA, 22 nt, Homo sapiens
  source 1..22: mol_type = transcribed RNA
gtccagatcatacatataatga

SEQ ID NO: 956 - RNA, 18 nt, Homo sapiens
  source 1..18: mol_type = transcribed RNA
cccagcaggacgggagcg

SEQ ID NO: 957 - RNA, 18 nt, Homo sapiens
  source 1..18: mol_type = transcribed RNA
cgctcccgtcctgctggg

SEQ ID NO: 958 - RNA, 17 nt, Homo sapiens
  source 1..17: mol_type = transcribed RNA
atggagaaggcttctga

SEQ ID NO: 959 - RNA, 17 nt, Homo sapiens
  source 1..17: mol_type = transcribed RNA
tcagaagccttctccat

SEQ ID NO: 960 - RNA, 17 nt, Homo sapiens
  source 1..17: mol_type = transcribed RNA
ccccggggagcccggcg

SEQ ID NO: 961 - RNA, 17 nt, Homo sapiens
  source 1..17: mol_type = transcribed RNA
cgccgggctccccgggg

SEQ ID NO: 962 - RNA, 22 nt, Homo sapiens
  source 1..22: mol_type = transcribed RNA
tggaaggaggttgccggacgct

SEQ ID NO: 963 - RNA, 22 nt, Homo sapiens
  source 1..22: mol_type = transcribed RNA
agcgtccggcaacctccttcca

SEQ ID NO: 964 - RNA, 17 nt, Homo sapiens
  source 1..17: mol_type = transcribed RNA
ggatggaggaggggtct

SEQ ID NO: 965 - RNA, 17 nt, Homo sapiens
  source 1..17: mol_type = transcribed RNA
agacccctcctccatcc

SEQ ID NO: 966 - RNA, 17 nt, Homo sapiens
  source 1..17: mol_type = transcribed RNA
gtggacctggctgggac

SEQ ID NO: 967 - RNA, 17 nt, Homo sapiens
  source 1..17: mol_type = transcribed RNA
gtcccagccaggtccac

SEQ ID NO: 968 - RNA, 21 nt, Homo sapiens
  source 1..21: mol_type = transcribed RNA
tcgtgcatatatctaccacat

SEQ ID NO: 969 - RNA, 21 nt, Homo sapiens
  source 1..21: mol_type = transcribed RNA
atgtggtagatatatgcacga

SEQ ID NO: 970 - RNA, 21 nt, Homo sapiens
  source 1..21: mol_type = transcribed RNA
tgtggtagatatatgcacgat

SEQ ID NO: 971 - RNA, 21 nt, Homo sapiens
  source 1..21: mol_type = transcribed RNA
atcgtgcatatatctaccaca

SEQ ID NO: 972 - RNA, 22 nt, Homo sapiens
  source 1..22: mol_type = transcribed RNA
tgagccgagctgagcttagctg

SEQ ID NO: 973 - RNA, 22 nt, Homo sapiens
  source 1..22: mol_type = transcribed RNA
cagctaagctcagctcggctca

SEQ ID NO: 974 - RNA, 22 nt, Homo sapiens
  source 1..22: mol_type = transcribed RNA
gagcttggatgagctgggctga

SEQ ID NO: 975 - RNA, 22 nt, Homo sapiens
  source 1..22: mol_type = transcribed RNA
tcagcccagctcatccaagctc

SEQ ID NO: 976 - RNA, 22 nt, Homo sapiens
  source 1..22: mol_type = transcribed RNA
gctgaactgggctgagctgggc

SEQ ID NO: 977 - RNA, 22 nt, Homo sapiens
  source 1..22: mol_type = transcribed RNA
gcccagctcagcccagttcagc

SEQ ID NO: 978 - RNA, 21 nt, Homo sapiens
  source 1..21: mol_type = transcribed RNA
ttagtcctgcctgtaggttta

SEQ ID NO: 979 - RNA, 21 nt, Homo sapiens
  source 1..21: mol_type = transcribed RNA
taaacctacaggcaggactaa

SEQ ID NO: 980 - RNA, 20 nt, Homo sapiens
  source 1..20: mol_type = transcribed RNA
ttgggctgggctgggttggg

SEQ ID NO: 981 - RNA, 20 nt, Homo sapiens
  source 1..20: mol_type = transcribed RNA
cccaacccagcccagcccaa

SEQ ID NO: 982 - RNA, 20 nt, Homo sapiens
  source 1..20: mol_type = transcribed RNA
taggatgggggtgagaggtg

SEQ ID NO: 983 - RNA, 20 nt, Homo sapiens
  source 1..20: mol_type = transcribed RNA
cacctctcacccccatccta

SEQ ID NO: 984 - RNA, 22 nt, Homo sapiens
  source 1..22: mol_type = transcribed RNA
aaaagtaattgtggattttgct

SEQ ID NO: 985 - RNA, 22 nt, Homo sapiens
  source 1..22: mol_type = transcribed RNA
agcaaaatccacaattactttt

SEQ ID NO: 986 - RNA, 22 nt, Homo sapiens
  source 1..22: mol_type = transcribed RNA
caaaaaccggcaattacttttg

SEQ ID NO: 987 - RNA, 22 nt, Homo sapiens
  source 1..22: mol_type = transcribed RNA
caaaagtaattgccggtttttg

SEQ ID NO: 988 - RNA, 22 nt, Homo sapiens
  source 1..22: mol_type = transcribed RNA
gaaaacgacaatgacttttgca

SEQ ID NO: 989 - RNA, 22 nt, Homo sapiens
  source 1..22: mol_type = transcribed RNA
tgcaaaagtcattgtcgttttc

SEQ ID NO: 990 - RNA, 21 nt, Homo sapiens
  source 1..21: mol_type = transcribed RNA
caaaaactgcaattactttca

SEQ ID NO: 991 - RNA, 21 nt, Homo sapiens
  source 1..21: mol_type = transcribed RNA
tgaaagtaattgcagtttttg

SEQ ID NO: 992 - RNA, 21 nt, Homo sapiens
  source 1..21: mol_type = transcribed RNA
aaaggtaattgtggtttctgc

SEQ ID NO: 993 - RNA, 21 nt, Homo sapiens
  source 1..21: mol_type = transcribed RNA
gcagaaaccacaattaccttt

SEQ ID NO: 994 - RNA, 22 nt, Homo sapiens
  source 1..22: mol_type = transcribed RNA
caaaaactgcagttacttttgc

SEQ ID NO: 995 - RNA, 22 nt, Homo sapiens
  source 1..22: mol_type = transcribed RNA
gcaaaagtaactgcagtttttg

SEQ ID NO: 996 - RNA, 20 nt, Homo sapiens
  source 1..20: mol_type = transcribed RNA
aaaagtgattgcagtgtttg

SEQ ID NO: 997 - RNA, 20 nt, Homo sapiens
  source 1..20: mol_type = transcribed RNA
caaacactgcaatcactttt

SEQ ID NO: 998 - RNA, 22 nt, Homo sapiens
  source 1..22: mol_type = transcribed RNA
aaaggtaattgcagtttttccc

SEQ ID NO: 999 - RNA, 22 nt, Homo sapiens
  source 1..22: mol_type = transcribed RNA
gggaaaaactgcaattaccttt

SEQ ID NO: 1000 - RNA, 21 nt, Homo sapiens
  source 1..21: mol_type = transcribed RNA
taaaaactgcaattactttta

SEQ ID NO: 1001 - RNA, 21 nt, Homo sapiens
  source 1..21: mol_type = transcribed RNA
taaaagtaattgcagttttta

SEQ ID NO: 1002 - RNA, 23 nt, Homo sapiens
  source 1..23: mol_type = transcribed RNA
tgcaaaagtaattgcagtttttg

SEQ ID NO: 1003 - RNA, 23 nt, Homo sapiens
  source 1..23: mol_type = transcribed RNA
caaaaactgcaattacttttgca

SEQ ID NO: 1004 - RNA, 21 nt, Homo sapiens
  source 1..21: mol_type = transcribed RNA
aaaagtaactgcggtttttga

SEQ ID NO: 1005 - RNA, 21 nt, Homo sapiens
  source 1..21: mol_type = transcribed RNA
tcaaaaaccgcagttactttt

SEQ ID NO: 1006 - RNA, 22 nt, Homo sapiens
  source 1..22: mol_type = transcribed RNA
aacggcaatgacttttgtacca

SEQ ID NO: 1007 - RNA, 22 nt, Homo sapiens
  source 1..22: mol_type = transcribed RNA
tggtacaaaagtcattgccgtt

SEQ ID NO: 1008 - RNA, 22 nt, Homo sapiens
  source 1..22: mol_type = transcribed RNA
caaaaactgcagttacttttgt

SEQ ID NO: 1009 - RNA, 22 nt, Homo sapiens
  source 1..22: mol_type = transcribed RNA
acaaaagtaactgcagtttttg

SEQ ID NO: 1010 - RNA, 22 nt, Homo sapiens
  source 1..22: mol_type = transcribed RNA
aaaagtaattgcggtttttgcc

SEQ ID NO: 1011 - RNA, 22 nt, Homo sapiens
  source 1..22: mol_type = transcribed RNA
ggcaaaaaccgcaattactttt

SEQ ID NO: 1012 - RNA, 20 nt, Homo sapiens
  source 1..20: mol_type = transcribed RNA
aaaaggcattgtggtttttg

SEQ ID NO: 1013 - RNA, 20 nt, Homo sapiens
  source 1..20: mol_type = transcribed RNA
caaaaaccacaatgcctttt

SEQ ID NO: 1014 - RNA, 23 nt, Homo sapiens
  source 1..23: mol_type = transcribed RNA
cggcccgggctgctgctgttcct

SEQ ID NO: 1015 - RNA, 23 nt, Homo sapiens
  source 1..23: mol_type = transcribed RNA
aggaacagcagcagcccgggccg

SEQ ID NO: 1016 - RNA, 20 nt, Homo sapiens
  source 1..20: mol_type = transcribed RNA
agaggtatagggcatgggaa

SEQ ID NO: 1017 - RNA, 20 nt, Homo sapiens
  source 1..20: mol_type = transcribed RNA
ttcccatgccctatacctct

SEQ ID NO: 1018 - RNA, 22 nt, Homo sapiens
  source 1..22: mol_type = transcribed RNA
ttcctatgcatatacttctttg

SEQ ID NO: 1019 - RNA, 22 nt, Homo sapiens
  source 1..22: mol_type = transcribed RNA
caaagaagtatatgcataggaa

SEQ ID NO: 1020 - RNA, 22 nt, Homo sapiens
  source 1..22: mol_type = transcribed RNA
atcatagaggaaaatccatgtt

SEQ ID NO: 1021 - RNA, 22 nt, Homo sapiens
  source 1..22: mol_type = transcribed RNA
aacatggattttcctctatgat

SEQ ID NO: 1022 - RNA, 22 nt, Homo sapiens
  source 1..22: mol_type = transcribed RNA
cgtggatattccttctatgttt

SEQ ID NO: 1023 - RNA, 22 nt, Homo sapiens
  source 1..22: mol_type = transcribed RNA
aaacatagaaggaatatccacg

SEQ ID NO: 1024 - RNA, 22 nt, Homo sapiens
  source 1..22: mol_type = transcribed RNA
tgagtattacatggccaatctc

SEQ ID NO: 1025 - RNA, 22 nt, Homo sapiens
  source 1..22: mol_type = transcribed RNA
gagattggccatgtaatactca

SEQ ID NO: 1026 - RNA, 21 nt, Homo sapiens
  source 1..21: mol_type = transcribed RNA
cttccgccccgccgggcgtcg

SEQ ID NO: 1027 - RNA, 21 nt, Homo sapiens
  source 1..21: mol_type = transcribed RNA
cgacgcccggcggggcggaag

SEQ ID NO: 1028 - RNA, 22 nt, Homo sapiens
  source 1..22: mol_type = transcribed RNA
tagcttatcagactgatgttga

SEQ ID NO: 1029 - RNA, 22 nt, Homo sapiens
  source 1..22: mol_type = transcribed RNA
tcaacatcagtctgataagcta

SEQ ID NO: 1030 - RNA, 22 nt, Homo sapiens
  source 1..22: mol_type = transcribed RNA
cactagattgtgagctcctgga

SEQ ID NO: 1031 - RNA, 22 nt, Homo sapiens
  source 1..22: mol_type = transcribed RNA
tccaggagctcacaatctagtg

SEQ ID NO: 1032 - RNA, 22 nt, Homo sapiens
  source 1..22: mol_type = transcribed RNA
aaggagctcacagtctattgag

SEQ ID NO: 1033 - RNA, 22 nt, Homo sapiens
  source 1..22: mol_type = transcribed RNA
ctcaatagactgtgagctcctt

SEQ ID NO: 1034 - RNA, 22 nt, Homo sapiens
  source 1..22: mol_type = transcribed RNA
tacgtcatcgttgtcatcgtca

SEQ ID NO: 1035 - RNA, 22 nt, Homo sapiens
  source 1..22: mol_type = transcribed RNA
tgacgatgacaacgatgacgta

SEQ ID NO: 1036 - RNA, 22 nt, Homo sapiens
  source 1..22: mol_type = transcribed RNA
cacgctcatgcacacacccaca

SEQ ID NO: 1037 - RNA, 22 nt, Homo sapiens
  source 1..22: mol_type = transcribed RNA
tgtgggtgtgtgcatgagcgtg

SEQ ID NO: 1038 - RNA, 21 nt, Homo sapiens
  source 1..21: mol_type = transcribed RNA
caacaccagtcgatgggctgt

SEQ ID NO: 1039 - RNA, 21 nt, Homo sapiens
  source 1..21: mol_type = transcribed RNA
acagcccatcgactggtgttg

SEQ ID NO: 1040 - RNA, 22 nt, Homo sapiens
  source 1..22: mol_type = transcribed RNA
ttcaccaccttctccacccagc

SEQ ID NO: 1041 - RNA, 22 nt, Homo sapiens
  source 1..22: mol_type = transcribed RNA
gctgggtggagaaggtggtgaa

SEQ ID NO: 1042 - RNA, 23 nt, Homo sapiens
  source 1..23: mol_type = transcribed RNA
cgggtagagagggcagtgggagg

SEQ ID NO: 1043 - RNA, 23 nt, Homo sapiens
  source 1..23: mol_type = transcribed RNA
cctcccactgccctctctacccg

SEQ ID NO: 1044 - RNA, 18 nt, Homo sapiens
  source 1..18: mol_type = transcribed RNA
aatccttgctacctgggt

SEQ ID NO: 1045 - RNA, 18 nt, Homo sapiens
  source 1..18: mol_type = transcribed RNA
acccaggtagcaaggatt

SEQ ID NO: 1046 - RNA, 22 nt, Homo sapiens
  source 1..22: mol_type = transcribed RNA
caatttagtgtgtgtgatattt

SEQ ID NO: 1047 - RNA, 22 nt, Homo sapiens
  source 1..22: mol_type = transcribed RNA
aaatatcacacacactaaattg

SEQ ID NO: 1048 - RNA, 22 nt, Homo sapiens
  source 1..22: mol_type = transcribed RNA
tattgcacattactaagttgca

SEQ ID NO: 1049 - RNA, 22 nt, Homo sapiens
  source 1..22: mol_type = transcribed RNA
tgcaacttagtaatgtgcaata

SEQ ID NO: 1050 - RNA, 22 nt, Homo sapiens
  source 1..22: mol_type = transcribed RNA
cctattcttgattacttgtttc

SEQ ID NO: 1051 - RNA, 22 nt, Homo sapiens
  source 1..22: mol_type = transcribed RNA
gaaacaagtaatcaagaatagg

SEQ ID NO: 1052 - RNA, 22 nt, Homo sapiens
  source 1..22: mol_type = transcribed RNA
ttcaagtaatccaggataggct

SEQ ID NO: 1053 - RNA, 22 nt, Homo sapiens
  source 1..22: mol_type = transcribed RNA
agcctatcctggattacttgaa

SEQ ID NO: 1054 - RNA, 23 nt, Homo sapiens
  source 1..23: mol_type = transcribed RNA
ccagttaccgcttccgctaccgc

SEQ ID NO: 1055 - RNA, 23 nt, Homo sapiens
  source 1..23: mol_type = transcribed RNA
gcggtagcggaagcggtaactgg

SEQ ID NO: 1056 - RNA, 21 nt, Homo sapiens
  source 1..21: mol_type = transcribed RNA
gatttcagtggagtgaagttc

SEQ ID NO: 1057 - RNA, 21 nt, Homo sapiens
  source 1..21: mol_type = transcribed RNA
gaacttcactccactgaaatc

SEQ ID NO: 1058 - RNA, 22 nt, Homo sapiens
  source 1..22: mol_type = transcribed RNA
tccttcattccaccggagtctg

SEQ ID NO: 1059 - RNA, 22 nt, Homo sapiens
  source 1..22: mol_type = transcribed RNA
cagactccggtggaatgaagga

SEQ ID NO: 1060 - RNA, 23 nt, Homo sapiens
  source 1..23: mol_type = transcribed RNA
aaaatggtgccctagtgactaca

SEQ ID NO: 1061 - RNA, 23 nt, Homo sapiens
  source 1..23: mol_type = transcribed RNA
tgtagtcactagggcaccatttt

SEQ ID NO: 1062 - RNA, 21 nt, Homo sapiens
  source 1..21: mol_type = transcribed RNA
caagtcactagtggttccgtt

SEQ ID NO: 1063 - RNA, 21 nt, Homo sapiens
  source 1..21: mol_type = transcribed RNA
aacggaaccactagtgacttg

SEQ ID NO: 1064 - RNA, 22 nt, Homo sapiens
  source 1..22: mol_type = transcribed RNA
ccagtattaactgtgctgctga

SEQ ID NO: 1065 - RNA, 22 nt, Homo sapiens
  source 1..22: mol_type = transcribed RNA
tcagcagcacagttaatactgg

SEQ ID NO: 1066 - RNA, 23 nt, Homo sapiens
  source 1..23: mol_type = transcribed RNA
tcccccaggtgtgattctgattt

SEQ ID NO: 1067 - RNA, 23 nt, Homo sapiens
  source 1..23: mol_type = transcribed RNA
aaatcagaatcacacctggggga

SEQ ID NO: 1068 - RNA, 22 nt, Homo sapiens
  source 1..22: mol_type = transcribed RNA
aaaagctgggttgagagggcga

SEQ ID NO: 1069 - RNA, 22 nt, Homo sapiens
  source 1..22: mol_type = transcribed RNA
tcgccctctcaacccagctttt

SEQ ID NO: 1070 - RNA, 22 nt, Homo sapiens
  source 1..22: mol_type = transcribed RNA
tggacggagaactgataagggt

SEQ ID NO: 1071 - RNA, 22 nt, Homo sapiens
  source 1..22: mol_type = transcribed RNA
acccttatcagttctccgtcca

SEQ ID NO: 1072 - RNA, 22 nt, Homo sapiens
  source 1..22: mol_type = transcribed RNA
tggtgggccgcagaacatgtgc

SEQ ID NO: 1073 - RNA, 22 nt, Homo sapiens
  source 1..22: mol_type = transcribed RNA
gcacatgttctgcggcccacca

SEQ ID NO: 1074 - RNA, 22 nt, Homo sapiens
  source 1..22: mol_type = transcribed RNA
agtgcctgctatgtgccaggca

SEQ ID NO: 1075 - RNA, 22 nt, Homo sapiens
  source 1..22: mol_type = transcribed RNA
tgcctggcacatagcaggcact

SEQ ID NO: 1076 - RNA, 22 nt, Homo sapiens
  source 1..22: mol_type = transcribed RNA
cttggcacctagcaagcactca

SEQ ID NO: 1077 - RNA, 22 nt, Homo sapiens
  source 1..22: mol_type = transcribed RNA
tgagtgcttgctaggtgccaag

SEQ ID NO: 1078 - RNA, 23 nt, Homo sapiens
  source 1..23: mol_type = transcribed RNA
ttattgcttaagaatacgcgtag

SEQ ID NO: 1079 - RNA, 23 nt, Homo sapiens
  source 1..23: mol_type = transcribed RNA
ctacgcgtattcttaagcaataa

SEQ ID NO: 1080 - RNA, 22 nt, Homo sapiens
  source 1..22: mol_type = transcribed RNA
ttgcatagtcacaaaagtgatc

SEQ ID NO: 1081 - RNA, 22 nt, Homo sapiens
  source 1..22: mol_type = transcribed RNA
gatcacttttgtgactatgcaa

SEQ ID NO: 1082 - RNA, 22 nt, Homo sapiens
  source 1..22: mol_type = transcribed RNA
gtgaattaccgaagggccataa

SEQ ID NO: 1083 - RNA, 22 nt, Homo sapiens
  source 1..22: mol_type = transcribed RNA
ttatggcccttcggtaattcac

SEQ ID NO: 1084 - RNA, 22 nt, Homo sapiens
  source 1..22: mol_type = transcribed RNA
tatggcactggtagaattcact

SEQ ID NO: 1085 - RNA, 22 nt, Homo sapiens
  source 1..22: mol_type = transcribed RNA
agtgaattctaccagtgccata

SEQ ID NO: 1086 - RNA, 22 nt, Homo sapiens
  source 1..22: mol_type = transcribed RNA
tgatatgtttgatatattaggt

SEQ ID NO: 1087 - RNA, 22 nt, Homo sapiens
  source 1..22: mol_type = transcribed RNA
acctaatatatcaaacatatca

SEQ ID NO: 1088 - RNA, 21 nt, Homo sapiens
  source 1..21: mol_type = transcribed RNA
tgatatgtttgatattgggtt

SEQ ID NO: 1089 - RNA, 21 nt, Homo sapiens
  source 1..21: mol_type = transcribed RNA
aacccaatatcaaacatatca

SEQ ID NO: 1090 - RNA, 18 nt, Homo sapiens
  source 1..18: mol_type = transcribed RNA
agcaggtgcggggcggcg

SEQ ID NO: 1091 - RNA, 18 nt, Homo sapiens
  source 1..18: mol_type = transcribed RNA
cgccgccccgcacctgct

SEQ ID NO: 1092 - RNA, 21 nt, Homo sapiens
  source 1..21: mol_type = transcribed RNA
cagtgcaagtgtagatgccga

SEQ ID NO: 1093 - RNA, 21 nt, Homo sapiens
  source 1..21: mol_type = transcribed RNA
tcggcatctacacttgcactg

SEQ ID NO: 1094 - RNA, 22 nt, Homo sapiens
  source 1..22: mol_type = transcribed RNA
tatgtaatatggtccacatctt

SEQ ID NO: 1095 - RNA, 22 nt, Homo sapiens
  source 1..22: mol_type = transcribed RNA
aagatgtggaccatattacata

SEQ ID NO: 1096 - RNA, 21 nt, Homo sapiens
  source 1..21: mol_type = transcribed RNA
aatataacacagatggcctgt

SEQ ID NO: 1097 - RNA, 21 nt, Homo sapiens
  source 1..21: mol_type = transcribed RNA
acaggccatctgtgttatatt

SEQ ID NO: 1098 - RNA, 22 nt, Homo sapiens
  source 1..22: mol_type = transcribed RNA
atcgggaatgtcgtgtccgccc

SEQ ID NO: 1099 - RNA, 22 nt, Homo sapiens
  source 1..22: mol_type = transcribed RNA
gggcggacacgacattcccgat

SEQ ID NO: 1100 - RNA, 23 nt, Homo sapiens
  source 1..23: mol_type = transcribed RNA
aatgacacgatcactcccgttga

SEQ ID NO: 1101 - RNA, 23 nt, Homo sapiens
  source 1..23: mol_type = transcribed RNA
tcaacgggagtgatcgtgtcatt

SEQ ID NO: 1102 - RNA, 22 nt, Homo sapiens
  source 1..22: mol_type = transcribed RNA
tactcaggagagtggcaatcac

SEQ ID NO: 1103 - RNA, 22 nt, Homo sapiens
  source 1..22: mol_type = transcribed RNA
gtgattgccactctcctgagta

SEQ ID NO: 1104 - RNA, 23 nt, Homo sapiens
  source 1..23: mol_type = transcribed RNA
tggaagactagtgattttgttgt

SEQ ID NO: 1105 - RNA, 23 nt, Homo sapiens
  source 1..23: mol_type = transcribed RNA
acaacaaaatcactagtcttcca

SEQ ID NO: 1106 - RNA, 22 nt, Homo sapiens
  source 1..22: mol_type = transcribed RNA
ataaagctagataaccgaaagt

SEQ ID NO: 1107 - RNA, 22 nt, Homo sapiens
  source 1..22: mol_type = transcribed RNA
actttcggttatctagctttat

SEQ ID NO: 1108 - RNA, 23 nt, Homo sapiens
  source 1..23: mol_type = transcribed RNA
tctttggttatctagctgtatga

SEQ ID NO: 1109 - RNA, 23 nt, Homo sapiens
  source 1..23: mol_type = transcribed RNA
tcatacagctagataaccaaaga

SEQ ID NO: 1110 - RNA, 22 nt, Homo sapiens
  source 1..22: mol_type = transcribed RNA
acaggtgaggttcttgggagcc

SEQ ID NO: 1111 - RNA, 22 nt, Homo sapiens
  source 1..22: mol_type = transcribed RNA
ggctcccaagaacctcacctgt

SEQ ID NO: 1112 - RNA, 24 nt, Homo sapiens
  source 1..24: mol_type = transcribed RNA
tccctgagaccctttaacctgtga

SEQ ID NO: 1113 - RNA, 24 nt, Homo sapiens
  source 1..24: mol_type = transcribed RNA
tcacaggttaaagggtctcaggga

SEQ ID NO: 1114 - RNA, 22 nt, Homo sapiens
  source 1..22: mol_type = transcribed RNA
caacaaatcccagtctacctaa

SEQ ID NO: 1115 - RNA, 22 nt, Homo sapiens
  source 1..22: mol_type = transcribed RNA
ttaggtagactgggatttgttg

SEQ ID NO: 1116 - RNA, 22 nt, Homo sapiens
  source 1..22: mol_type = transcribed RNA
cgtgttcacagcggaccttgat

SEQ ID NO: 1117 - RNA, 22 nt, Homo sapiens
  source 1..22: mol_type = transcribed RNA
atcaaggtccgctgtgaacacg

SEQ ID NO: 1118 - RNA, 20 nt, Homo sapiens
  source 1..20: mol_type = transcribed RNA
taaggcacgcggtgaatgcc

SEQ ID NO: 1119 - RNA, 20 nt, Homo sapiens
  source 1..20: mol_type = transcribed RNA
ggcattcaccgcgtgcctta

SEQ ID NO: 1120 - RNA, 22 nt, Homo sapiens
  source 1..22: mol_type = transcribed RNA
aacacacctggttaacctcttt

SEQ ID NO: 1121 - RNA, 22 nt, Homo sapiens
  source 1..22: mol_type = transcribed RNA
aaagaggttaaccaggtgtgtt

SEQ ID NO: 1122 - RNA, 22 nt, Homo sapiens
  source 1..22: mol_type = transcribed RNA
taacagtctacagccatggtcg

SEQ ID NO: 1123 - RNA, 22 nt, Homo sapiens
  source 1..22: mol_type = transcribed RNA
cgaccatggctgtagactgtta

SEQ ID NO: 1124 - RNA, 22 nt, Homo sapiens
  source 1..22: mol_type = transcribed RNA
accgtggctttcgattgttact

SEQ ID NO: 1125 - RNA, 22 nt, Homo sapiens
  source 1..22: mol_type = transcribed RNA
agtaacaatcgaaagccacggt

SEQ ID NO: 1126 - RNA, 21 nt, Homo sapiens
  source 1..21: mol_type = transcribed RNA
taacagtctccagtcacggcc

SEQ ID NO: 1127 - RNA, 21 nt, Homo sapiens
  source 1..21: mol_type = transcribed RNA
ggccgtgactggagactgtta

SEQ ID NO: 1128 - RNA, 23 nt, Homo sapiens
  source 1..23: mol_type = transcribed RNA
accttggctctagactgcttact

SEQ ID NO: 1129 - RNA, 23 nt, Homo sapiens
  source 1..23: mol_type = transcribed RNA
agtaagcagtctagagccaaggt

SEQ ID NO: 1130 - RNA, 23 nt, Homo sapiens
  source 1..23: mol_type = transcribed RNA
tctcacacagaaatcgcacccgt

SEQ ID NO: 1131 - RNA, 23 nt, Homo sapiens
  source 1..23: mol_type = transcribed RNA
acgggtgcgatttctgtgtgaga

SEQ ID NO: 1132 - RNA, 22 nt, Homo sapiens
  source 1..22: mol_type = transcribed RNA
tggttgaccatagaacatgcgc

SEQ ID NO: 1133 - RNA, 22 nt, Homo sapiens
  source 1..22: mol_type = transcribed RNA
gcgcatgttctatggtcaacca

SEQ ID NO: 1134 - RNA, 23 nt, Homo sapiens
  source 1..23: mol_type = transcribed RNA
cagtaacaaagattcatccttgt

SEQ ID NO: 1135 - RNA, 23 nt, Homo sapiens
  source 1..23: mol_type = transcribed RNA
acaaggatgaatctttgttactg

SEQ ID NO: 1136 - RNA, 22 nt, Homo sapiens
  source 1..22: mol_type = transcribed RNA
agagttgagtctggacgtcccg

SEQ ID NO: 1137 - RNA, 22 nt, Homo sapiens
  source 1..22: mol_type = transcribed RNA
cgggacgtccagactcaactct

SEQ ID NO: 1138 - RNA, 22 nt, Homo sapiens
  source 1..22: mol_type = transcribed RNA
agaattgtggctggacatctgt

SEQ ID NO: 1139 - RNA, 22 nt, Homo sapiens
  source 1..22: mol_type = transcribed RNA
acagatgtccagccacaattct

SEQ ID NO: 1140 - RNA, 21 nt, Homo sapiens
  source 1..21: mol_type = transcribed RNA
tgattgtccaaacgcaattct

SEQ ID NO: 1141 - RNA, 21 nt, Homo sapiens
  source 1..21: mol_type = transcribed RNA
agaattgcgtttggacaatca

SEQ ID NO: 1142 - RNA, 22 nt, Homo sapiens
  source 1..22: mol_type = transcribed RNA
tatagggattggagccgtggcg

SEQ ID NO: 1143 - RNA, 22 nt, Homo sapiens
  source 1..22: mol_type = transcribed RNA
cgccacggctccaatccctata

SEQ ID NO: 1144 - RNA, 23 nt, Homo sapiens
  source 1..23: mol_type = transcribed RNA
tatggctttttattcctatgtga

SEQ ID NO: 1145 - RNA, 23 nt, Homo sapiens
  source 1..23: mol_type = transcribed RNA
tcacataggaataaaaagccata

SEQ ID NO: 1146 - RNA, 22 nt, Homo sapiens
  source 1..22: mol_type = transcribed RNA
atgtagggctaaaagccatggg

SEQ ID NO: 1147 - RNA, 22 nt, Homo sapiens
  source 1..22: mol_type = transcribed RNA
cccatggcttttagccctacat

SEQ ID NO: 1148 - RNA, 23 nt, Homo sapiens
  source 1..23: mol_type = transcribed RNA
tatggcttttcattcctatgtga

SEQ ID NO: 1149 - RNA, 23 nt, Homo sapiens
  source 1..23: mol_type = transcribed RNA
tcacataggaatgaaaagccata

SEQ ID NO: 1150 - RNA, 22 nt, Homo sapiens
  source 1..22: mol_type = transcribed RNA
aaccatcgaccgttgagtggac

SEQ ID NO: 1151 - RNA, 22 nt, Homo sapiens
  source 1..22: mol_type = transcribed RNA
gtccactcaacggtcgatggtt

SEQ ID NO: 1152 - RNA, 22 nt, Homo sapiens
  source 1..22: mol_type = transcribed RNA
aacattcaacctgtcggtgagt

SEQ ID NO: 1153 - RNA, 22 nt, Homo sapiens
  source 1..22: mol_type = transcribed RNA
actcaccgacaggttgaatgtt

SEQ ID NO: 1154 - RNA, 25 nt, Homo sapiens
  source 1..25: mol_type = transcribed RNA
cttccagacgctccgccccacgtcg

SEQ ID NO: 1155 - RNA, 25 nt, Homo sapiens
  source 1..25: mol_type = transcribed RNA
cgacgtggggcggagcgtctggaag

SEQ ID NO: 1156 - RNA, 24 nt, Homo sapiens
  source 1..24: mol_type = transcribed RNA
aacaacaaaatcactagtcttcca

SEQ ID NO: 1157 - RNA, 24 nt, Homo sapiens
  source 1..24: mol_type = transcribed RNA
tggaagactagtgattttgttgtt

SEQ ID NO: 1158 - RNA, 22 nt, Homo sapiens
  source 1..22: mol_type = transcribed RNA
aggtagactgggatttgttgtt

SEQ ID NO: 1159 - RNA, 22 nt, Homo sapiens
  source 1..22: mol_type = transcribed RNA
aacaacaaatcccagtctacct

SEQ ID NO: 1160 - RNA, 22 nt, Homo sapiens
  source 1..22: mol_type = transcribed RNA
aaacaccattgtcacactccac

SEQ ID NO: 1161 - RNA, 22 nt, Homo sapiens
  source 1..22: mol_type = transcribed RNA
gtggagtgtgacaatggtgttt

SEQ ID NO: 1162 - RNA, 23 nt, Homo sapiens
  source 1..23: mol_type = transcribed RNA
tttagtgtgataatggcgtttga

SEQ ID NO: 1163 - RNA, 23 nt, Homo sapiens
  source 1..23: mol_type = transcribed RNA
tcaaacgccattatcacactaaa

SEQ ID NO: 1164 - RNA, 22 nt, Homo sapiens
  source 1..22: mol_type = transcribed RNA
tatggaaagactttgccactct

SEQ ID NO: 1165 - RNA, 22 nt, Homo sapiens
  source 1..22: mol_type = transcribed RNA
agagtggcaaagtctttccata

SEQ ID NO: 1166 - RNA, 21 nt, Homo sapiens
  source 1..21: mol_type = transcribed RNA
agtggcaaagtctttccatat

SEQ ID NO: 1167 - RNA, 21 nt, Homo sapiens
  source 1..21: mol_type = transcribed RNA
atatggaaagactttgccact

SEQ ID NO: 1168 - RNA, 22 nt, Homo sapiens
  source 1..22: mol_type = transcribed RNA
cagcccggatcccagcccactt

SEQ ID NO: 1169 - RNA, 22 nt, Homo sapiens
  source 1..22: mol_type = transcribed RNA
aagtgggctgggatccgggctg

SEQ ID NO: 1170 - RNA, 20 nt, Homo sapiens
  source 1..20: mol_type = transcribed RNA
gtgggttggggcgggctctg

SEQ ID NO: 1171 - RNA, 20 nt, Homo sapiens
  source 1..20: mol_type = transcribed RNA
cagagcccgccccaacccac

SEQ ID NO: 1172 - RNA, 23 nt, Homo sapiens
  source 1..23: mol_type = transcribed RNA
ttcgggctggcctgctgctccgg

SEQ ID NO: 1173 - RNA, 23 nt, Homo sapiens
  source 1..23: mol_type = transcribed RNA
ccggagcagcaggccagcccgaa

SEQ ID NO: 1174 - RNA, 21 nt, Homo sapiens
  source 1..21: mol_type = transcribed RNA
tgtgcagcaggccaaccgaga

SEQ ID NO: 1175 - RNA, 21 nt, Homo sapiens
  source 1..21: mol_type = transcribed RNA
tctcggttggcctgctgcaca

SEQ ID NO: 1176 - RNA, 22 nt, Homo sapiens
  source 1..22: mol_type = transcribed RNA
cagggcaggaagaagtggacaa

SEQ ID NO: 1177 - RNA, 22 nt, Homo sapiens
  source 1..22: mol_type = transcribed RNA
ttgtccacttcttcctgccctg

SEQ ID NO: 1178 - RNA, 22 nt, Homo sapiens
  source 1..22: mol_type = transcribed RNA
gtccacttctgcctgccctgcc

SEQ ID NO: 1179 - RNA, 22 nt, Homo sapiens
  source 1..22: mol_type = transcribed RNA
ggcagggcaggcagaagtggac

SEQ ID NO: 1180 - RNA, 22 nt, Homo sapiens
  source 1..22: mol_type = transcribed RNA
tttggacagaaaacacgcaggt

SEQ ID NO: 1181 - RNA, 22 nt, Homo sapiens
  source 1..22: mol_type = transcribed RNA
acctgcgtgttttctgtccaaa

SEQ ID NO: 1182 - RNA, 20 nt, Homo sapiens
  source 1..20: mol_type = transcribed RNA
cctgcgtgttttctgtccaa

SEQ ID NO: 1183 - RNA, 20 nt, Homo sapiens
  source 1..20: mol_type = transcribed RNA
ttggacagaaaacacgcagg

SEQ ID NO: 1184 - RNA, 22 nt, Homo sapiens
  source 1..22: mol_type = transcribed RNA
tgccgccctctcgctgctctag

SEQ ID NO: 1185 - RNA, 22 nt, Homo sapiens
  source 1..22: mol_type = transcribed RNA
ctagagcagcgagagggcggca

SEQ ID NO: 1186 - RNA, 23 nt, Homo sapiens
  source 1..23: mol_type = transcribed RNA
gagggcagcgtgggtgtggcgga

SEQ ID NO: 1187 - RNA, 23 nt, Homo sapiens
  source 1..23: mol_type = transcribed RNA
tccgccacacccacgctgccctc

SEQ ID NO: 1188 - RNA, 22 nt, Homo sapiens
  source 1..22: mol_type = transcribed RNA
aggagctagccaggcatatgca

SEQ ID NO: 1189 - RNA, 22 nt, Homo sapiens
  source 1..22: mol_type = transcribed RNA
tgcatatgcctggctagctcct

SEQ ID NO: 1190 - RNA, 20 nt, Homo sapiens
  source 1..20: mol_type = transcribed RNA
atatgcctggctagctcctc

SEQ ID NO: 1191 - RNA, 20 nt, Homo sapiens
  source 1..20: mol_type = transcribed RNA
gaggagctagccaggcatat

SEQ ID NO: 1192 - RNA, 19 nt, Homo sapiens
  source 1..19: mol_type = transcribed RNA
cggcgcgaccggcccgggg

SEQ ID NO: 1193 - RNA, 19 nt, Homo sapiens
  source 1..19: mol_type = transcribed RNA
ccccgggccggtcgcgccg

SEQ ID NO: 1194 - RNA, 21 nt, Homo sapiens
  source 1..21: mol_type = transcribed RNA
tcttgaagtcagaacccgcaa

SEQ ID NO: 1195 - RNA, 21 nt, Homo sapiens
  source 1..21: mol_type = transcribed RNA
ttgcgggttctgacttcaaga

SEQ ID NO: 1196 - RNA, 22 nt, Homo sapiens
  source 1..22: mol_type = transcribed RNA
aactcgtgttcaaagcctttag

SEQ ID NO: 1197 - RNA, 22 nt, Homo sapiens
  source 1..22: mol_type = transcribed RNA
ctaaaggctttgaacacgagtt

SEQ ID NO: 1198 - RNA, 23 nt, Homo sapiens
  source 1..23: mol_type = transcribed RNA
cctggacaccgctcagccggccg

SEQ ID NO: 1199 - RNA, 23 nt, Homo sapiens
  source 1..23: mol_type = transcribed RNA
cggccggctgagcggtgtccagg

SEQ ID NO: 1200 - RNA, 21 nt, Homo sapiens
  source 1..21: mol_type = transcribed RNA
actcggctgcggtggacaagt

SEQ ID NO: 1201 - RNA, 21 nt, Homo sapiens
  source 1..21: mol_type = transcribed RNA
acttgtccaccgcagccgagt

SEQ ID NO: 1202 - RNA, 20 nt, Homo sapiens
  source 1..20: mol_type = transcribed RNA
tcactctcaccttgctttgc

SEQ ID NO: 1203 - RNA, 20 nt, Homo sapiens
  source 1..20: mol_type = transcribed RNA
gcaaagcaaggtgagagtga

SEQ ID NO: 1204 - RNA, 22 nt, Homo sapiens
  source 1..22: mol_type = transcribed RNA
ttgctaagtaggctgagattga

SEQ ID NO: 1205 - RNA, 22 nt, Homo sapiens
  source 1..22: mol_type = transcribed RNA
tcaatctcagcctacttagcaa

SEQ ID NO: 1206 - RNA, 22 nt, Homo sapiens
  source 1..22: mol_type = transcribed RNA
caccccctgtttcctggcccac

SEQ ID NO: 1207 - RNA, 22 nt, Homo sapiens
  source 1..22: mol_type = transcribed RNA
gtgggccaggaaacagggggtg

SEQ ID NO: 1208 - RNA, 23 nt, Homo sapiens
  source 1..23: mol_type = transcribed RNA
tgggccagggagcagctggtggg

SEQ ID NO: 1209 - RNA, 23 nt, Homo sapiens
  source 1..23: mol_type = transcribed RNA
cccaccagctgctccctggccca

SEQ ID NO: 1210 - RNA, 24 nt, Homo sapiens
  source 1..24: mol_type = transcribed RNA
tgcccatgccatacttttgcctca

SEQ ID NO: 1211 - RNA, 24 nt, Homo sapiens
  source 1..24: mol_type = transcribed RNA
tgaggcaaaagtatggcatgggca

SEQ ID NO: 1212 - RNA, 22 nt, Homo sapiens
  source 1..22: mol_type = transcribed RNA
atggcatcgtcccctggtggct

SEQ ID NO: 1213 - RNA, 22 nt, Homo sapiens
  source 1..22: mol_type = transcribed RNA
agccaccaggggacgatgccat

SEQ ID NO: 1214 - RNA, 22 nt, Homo sapiens
  source 1..22: mol_type = transcribed RNA
gacacatgaccataaatgctaa

SEQ ID NO: 1215 - RNA, 22 nt, Homo sapiens
  source 1..22: mol_type = transcribed RNA
ttagcatttatggtcatgtgtc

SEQ ID NO: 1216 - RNA, 23 nt, Homo sapiens
  source 1..23: mol_type = transcribed RNA
tggagagagaaaagagacagaag

SEQ ID NO: 1217 - RNA, 23 nt, Homo sapiens
  source 1..23: mol_type = transcribed RNA
cttctgtctcttttctctctcca

SEQ ID NO: 1218 - RNA, 22 nt, Homo sapiens
  source 1..22: mol_type = transcribed RNA
agacagtagttcttgcctggtt

SEQ ID NO: 1219 - RNA, 22 nt, Homo sapiens
  source 1..22: mol_type = transcribed RNA
aaccaggcaagaactactgtct

SEQ ID NO: 1220 - RNA, 19 nt, Homo sapiens
  source 1..19: mol_type = transcribed RNA
accaggcaagaaatattgt

SEQ ID NO: 1221 - RNA, 19 nt, Homo sapiens
  source 1..19: mol_type = transcribed RNA
acaatatttcttgcctggt

SEQ ID NO: 1222 - RNA, 21 nt, Homo sapiens
  source 1..21: mol_type = transcribed RNA
attgtccctctcccttcccag

SEQ ID NO: 1223 - RNA, 21 nt, Homo sapiens
  source 1..21: mol_type = transcribed RNA
ctgggaagggagagggacaat

SEQ ID NO: 1224 - RNA, 22 nt, Homo sapiens
  source 1..22: mol_type = transcribed RNA
actgggaagaggagctgaggga

SEQ ID NO: 1225 - RNA, 22 nt, Homo sapiens
  source 1..22: mol_type = transcribed RNA
tccctcagctcctcttcccagt

SEQ ID NO: 1226 - RNA, 23 nt, Homo sapiens
  source 1..23: mol_type = transcribed RNA
gaagatggtgctgtgctgaggaa

SEQ ID NO: 1227 - RNA, 23 nt, Homo sapiens
  source 1..23: mol_type = transcribed RNA
ttcctcagcacagcaccatcttc

SEQ ID NO: 1228 - RNA, 20 nt, Homo sapiens
  source 1..20: mol_type = transcribed RNA
tgtgggactgcaaatgggag

SEQ ID NO: 1229 - RNA, 20 nt, Homo sapiens
  source 1..20: mol_type = transcribed RNA
ctcccatttgcagtcccaca

SEQ ID NO: 1230 - RNA, 21 nt, Homo sapiens
  source 1..21: mol_type = transcribed RNA
tctgaggcctgcctctcccca

SEQ ID NO: 1231 - RNA, 21 nt, Homo sapiens
  source 1..21: mol_type = transcribed RNA
tggggagaggcaggcctcaga

SEQ ID NO: 1232 - RNA, 24 nt, Homo sapiens
  source 1..24: mol_type = transcribed RNA
tgggcgaggggtgggctctcagag

SEQ ID NO: 1233 - RNA, 24 nt, Homo sapiens
  source 1..24: mol_type = transcribed RNA
ctctgagagcccacccctcgccca

SEQ ID NO: 1234 - RNA, 21 nt, Homo sapiens
  source 1..21: mol_type = transcribed RNA
aggtagaatgaggcctgacat

SEQ ID NO: 1235 - RNA, 21 nt, Homo sapiens
  source 1..21: mol_type = transcribed RNA
atgtcaggcctcattctacct

SEQ ID NO: 1236 - RNA, 19 nt, Homo sapiens
  source 1..19: mol_type = transcribed RNA
tcaggcctctttctacctt

SEQ ID NO: 1237 - RNA, 19 nt, Homo sapiens
  source 1..19: mol_type = transcribed RNA
aaggtagaaagaggcctga

SEQ ID NO: 1238 - RNA, 20 nt, Homo sapiens
  source 1..20: mol_type = transcribed RNA
cggggtgggtgaggtcgggc

SEQ ID NO: 1239 - RNA, 20 nt, Homo sapiens
  source 1..20: mol_type = transcribed RNA
gcccgacctcacccaccccg

SEQ ID NO: 1240 - RNA, 22 nt, Homo sapiens
  source 1..22: mol_type = transcribed RNA
gttctgttaacccatcccctca

SEQ ID NO: 1241 - RNA, 22 nt, Homo sapiens
  source 1..22: mol_type = transcribed RNA
tgaggggatgggttaacagaac

SEQ ID NO: 1242 - RNA, 22 nt, Homo sapiens
  source 1..22: mol_type = transcribed RNA
aggggactggttaatagaacta

SEQ ID NO: 1243 - RNA, 22 nt, Homo sapiens
  source 1..22: mol_type = transcribed RNA
tagttctattaaccagtcccct

SEQ ID NO: 1244 - RNA, 23 nt, Homo sapiens
  source 1..23: mol_type = transcribed RNA
tggagttaagggttgcttggaga

SEQ ID NO: 1245 - RNA, 23 nt, Homo sapiens
  source 1..23: mol_type = transcribed RNA
tctccaagcaacccttaactcca

SEQ ID NO: 1246 - RNA, 22 nt, Homo sapiens
  source 1..22: mol_type = transcribed RNA
tctctgagcaaggcttaacacc

SEQ ID NO: 1247 - RNA, 22 nt, Homo sapiens
  source 1..22: mol_type = transcribed RNA
ggtgttaagccttgctcagaga

SEQ ID NO: 1248 - RNA, 22 nt, Homo sapiens
  source 1..22: mol_type = transcribed RNA
tgtgggatctggaggcatctgg

SEQ ID NO: 1249 - RNA, 22 nt, Homo sapiens
  source 1..22: mol_type = transcribed RNA
ccagatgcctccagatcccaca

SEQ ID NO: 1250 - RNA, 21 nt, Homo sapiens
  source 1..21: mol_type = transcribed RNA
accctcgtcaggtccccgggg

SEQ ID NO: 1251 - RNA, 21 nt, Homo sapiens
  source 1..21: mol_type = transcribed RNA
ccccggggacctgacgagggt

SEQ ID NO: 1252 - RNA, 22 nt, Homo sapiens
  source 1..22: mol_type = transcribed RNA
caccggggatggcagagggtcg

SEQ ID NO: 1253 - RNA, 22 nt, Homo sapiens
  source 1..22: mol_type = transcribed RNA
cgaccctctgccatccccggtg

SEQ ID NO: 1254 - RNA, 23 nt, Homo sapiens
  source 1..23: mol_type = transcribed RNA
tgggctgagggcaggaggcctgt

SEQ ID NO: 1255 - RNA, 23 nt, Homo sapiens
  source 1..23: mol_type = transcribed RNA
acaggcctcctgccctcagccca

SEQ ID NO: 1256 - RNA, 23 nt, Homo sapiens
  source 1..23: mol_type = transcribed RNA
aatgtggaagtggtctgaggcat

SEQ ID NO: 1257 - RNA, 23 nt, Homo sapiens
  source 1..23: mol_type = transcribed RNA
atgcctcagaccacttccacatt

SEQ ID NO: 1258 - RNA, 23 nt, Homo sapiens
  source 1..23: mol_type = transcribed RNA
gtgagtgtggatcctggaggaat

SEQ ID NO: 1259 - RNA, 23 nt, Homo sapiens
  source 1..23: mol_type = transcribed RNA
attcctccaggatccacactcac

SEQ ID NO: 1260 - RNA, 22 nt, Homo sapiens
  source 1..22: mol_type = transcribed RNA
tttcttcttagacatggcaacg

SEQ ID NO: 1261 - RNA, 22 nt, Homo sapiens
  source 1..22: mol_type = transcribed RNA
cgttgccatgtctaagaagaaa

SEQ ID NO: 1262 - RNA, 22 nt, Homo sapiens
  source 1..22: mol_type = transcribed RNA
ctgccatgtctaagaagaaaac

SEQ ID NO: 1263 - RNA, 22 nt, Homo sapiens
  source 1..22: mol_type = transcribed RNA
gttttcttcttagacatggcag

SEQ ID NO: 1264 - RNA, 22 nt, Homo sapiens
  source 1..22: mol_type = transcribed RNA
tttcttcttagacatggcagct

SEQ ID NO: 1265 - RNA, 22 nt, Homo sapiens
  source 1..22: mol_type = transcribed RNA
agctgccatgtctaagaagaaa

SEQ ID NO: 1266 - RNA, 19 nt, Homo sapiens
  source 1..19: mol_type = transcribed RNA
ttgccatgtctaagaagaa

SEQ ID NO: 1267 - RNA, 19 nt, Homo sapiens
  source 1..19: mol_type = transcribed RNA
ttcttcttagacatggcaa

SEQ ID NO: 1268 - RNA, 23 nt, Homo sapiens
  source 1..23: mol_type = transcribed RNA
tgcagctctggtggaaaatggag

SEQ ID NO: 1269 - RNA, 23 nt, Homo sapiens
  source 1..23: mol_type = transcribed RNA
ctccattttccaccagagctgca

SEQ ID NO: 1270 - RNA, 22 nt, Homo sapiens
  source 1..22: mol_type = transcribed RNA
caggatccacagagctagtcca

SEQ ID NO: 1271 - RNA, 22 nt, Homo sapiens
  source 1..22: mol_type = transcribed RNA
tggactagctctgtggatcctg

SEQ ID NO: 1272 - RNA, 22 nt, Homo sapiens
  source 1..22: mol_type = transcribed RNA
aactagctctgtggatcctgac

SEQ ID NO: 1273 - RNA, 22 nt, Homo sapiens
  source 1..22: mol_type = transcribed RNA
gtcaggatccacagagctagtt

SEQ ID NO: 1274 - RNA, 22 nt, Homo sapiens
  source 1..22: mol_type = transcribed RNA
aaagatggacaattggctaaat

SEQ ID NO: 1275 - RNA, 22 nt, Homo sapiens
  source 1..22: mol_type = transcribed RNA
atttagccaattgtccatcttt

SEQ ID NO: 1276 - RNA, 24 nt, Homo sapiens
  source 1..24: mol_type = transcribed RNA
agctgagctccatggacgtgcagt

SEQ ID NO: 1277 - RNA, 24 nt, Homo sapiens
  source 1..24: mol_type = transcribed RNA
actgcacgtccatggagctcagct

SEQ ID NO: 1278 - RNA, 22 nt, Homo sapiens
  source 1..22: mol_type = transcribed RNA
cttccggtctgtgagccccgtc

SEQ ID NO: 1279 - RNA, 22 nt, Homo sapiens
  source 1..22: mol_type = transcribed RNA
gacggggctcacagaccggaag

SEQ ID NO: 1280 - RNA, 22 nt, Homo sapiens
  source 1..22: mol_type = transcribed RNA
tggggtgcccactccgcaagtt

SEQ ID NO: 1281 - RNA, 22 nt, Homo sapiens
  source 1..22: mol_type = transcribed RNA
aacttgcggagtgggcacccca

SEQ ID NO: 1282 - RNA, 26 nt, Homo sapiens
  source 1..26: mol_type = transcribed RNA
ctcggccgcggcgcgtagcccccgcc

SEQ ID NO: 1283 - RNA, 26 nt, Homo sapiens
  source 1..26: mol_type = transcribed RNA
ggcgggggctacgcgccgcggccgag

SEQ ID NO: 1284 - RNA, 23 nt, Homo sapiens
  source 1..23: mol_type = transcribed RNA
ctgggggacgcgtgagcgcgagc

SEQ ID NO: 1285 - RNA, 23 nt, Homo sapiens
  source 1..23: mol_type = transcribed RNA
gctcgcgctcacgcgtcccccag

SEQ ID NO: 1286 - RNA, 21 nt, Homo sapiens
  source 1..21: mol_type = transcribed RNA
catacaatctgacatgtattt

SEQ ID NO: 1287 - RNA, 21 nt, Homo sapiens
  source 1..21: mol_type = transcribed RNA
aaatacatgtcagattgtatg

SEQ ID NO: 1288 - RNA, 21 nt, Homo sapiens
  source 1..21: mol_type = transcribed RNA
atacatgtcagattgtatgcc

SEQ ID NO: 1289 - RNA, 21 nt, Homo sapiens
  source 1..21: mol_type = transcribed RNA
ggcatacaatctgacatgtat

SEQ ID NO: 1290 - RNA, 21 nt, Homo sapiens
  source 1..21: mol_type = transcribed RNA
tccctccttctgtccccacag

SEQ ID NO: 1291 - RNA, 21 nt, Homo sapiens
  source 1..21: mol_type = transcribed RNA
ctgtggggacagaaggaggga

SEQ ID NO: 1292 - RNA, 22 nt, Homo sapiens
  source 1..22: mol_type = transcribed RNA
actggggagcagaaggagaacc

SEQ ID NO: 1293 - RNA, 22 nt, Homo sapiens
  source 1..22: mol_type = transcribed RNA
ggttctccttctgctccccagt

SEQ ID NO: 1294 - RNA, 23 nt, Homo sapiens
  source 1..23: mol_type = transcribed RNA
gaaaatcctttttgtttttccag

SEQ ID NO: 1295 - RNA, 23 nt, Homo sapiens
  source 1..23: mol_type = transcribed RNA
ctggaaaaacaaaaaggattttc

SEQ ID NO: 1296 - RNA, 23 nt, Homo sapiens
  source 1..23: mol_type = transcribed RNA
agggaaaaaaaaaaggatttgtc

SEQ ID NO: 1297 - RNA, 23 nt, Homo sapiens
  source 1..23: mol_type = transcribed RNA
gacaaatccttttttttttccct

SEQ ID NO: 1298 - RNA, 22 nt, Homo sapiens
  source 1..22: mol_type = transcribed RNA
tgtgtccgggaagtggaggagg

SEQ ID NO: 1299 - RNA, 22 nt, Homo sapiens
  source 1..22: mol_type = transcribed RNA
cctcctccacttcccggacaca

SEQ ID NO: 1300 - RNA, 22 nt, Homo sapiens
  source 1..22: mol_type = transcribed RNA
tgaagttacatcatggtcgctt

SEQ ID NO: 1301 - RNA, 22 nt, Homo sapiens
  source 1..22: mol_type = transcribed RNA
aagcgaccatgatgtaacttca

SEQ ID NO: 1302 - RNA, 22 nt, Homo sapiens
  source 1..22: mol_type = transcribed RNA
aagcgaccatgatgtaacttca

SEQ ID NO: 1303 - RNA, 22 nt, Homo sapiens
  source 1..22: mol_type = transcribed RNA
tgaagttacatcatggtcgctt

SEQ ID NO: 1304 - RNA, 21 nt, Homo sapiens
  source 1..21: mol_type = transcribed RNA
ttagtgcatagtctttggtct

SEQ ID NO: 1305 - RNA, 21 nt, Homo sapiens
  source 1..21: mol_type = transcribed RNA
agaccaaagactatgcactaa

SEQ ID NO: 1306 - RNA, 22 nt, Homo sapiens
  source 1..22: mol_type = transcribed RNA
accgaagactgtgcgctaatct

SEQ ID NO: 1307 - RNA, 22 nt, Homo sapiens
  source 1..22: mol_type = transcribed RNA
agattagcgcacagtcttcggt

SEQ ID NO: 1308 - RNA, 21 nt, Homo sapiens
  source 1..21: mol_type = transcribed RNA
ttacacagctggacagaggca

SEQ ID NO: 1309 - RNA, 21 nt, Homo sapiens
  source 1..21: mol_type = transcribed RNA
tgcctctgtccagctgtgtaa

SEQ ID NO: 1310 - RNA, 22 nt, Homo sapiens
  source 1..22: mol_type = transcribed RNA
tccaggcaggagccggactgga

SEQ ID NO: 1311 - RNA, 22 nt, Homo sapiens
  source 1..22: mol_type = transcribed RNA
tccagtccggctcctgcctgga

SEQ ID NO: 1312 - RNA, 21 nt, Homo sapiens
  source 1..21: mol_type = transcribed RNA
ctgggctcgggacgcgcggct

SEQ ID NO: 1313 - RNA, 21 nt, Homo sapiens
  source 1..21: mol_type = transcribed RNA
agccgcgcgtcccgagcccag

SEQ ID NO: 1314 - RNA, 22 nt, Homo sapiens
  source 1..22: mol_type = transcribed RNA
ggggctgtgattgaccagcagg

SEQ ID NO: 1315 - RNA, 22 nt, Homo sapiens
  source 1..22: mol_type = transcribed RNA
cctgctggtcaatcacagcccc

SEQ ID NO: 1316 - RNA, 22 nt, Homo sapiens
  source 1..22: mol_type = transcribed RNA
cactgtttcaccactggctctt

SEQ ID NO: 1317 - RNA, 22 nt, Homo sapiens
  source 1..22: mol_type = transcribed RNA
aagagccagtggtgaaacagtg

SEQ ID NO: 1318 - RNA, 21 nt, Homo sapiens
  source 1..21: mol_type = transcribed RNA
gagccagtggtgagacagtga

SEQ ID NO: 1319 - RNA, 21 nt, Homo sapiens
  source 1..21: mol_type = transcribed RNA
tcactgtctcaccactggctc

SEQ ID NO: 1320 - RNA, 22 nt, Homo sapiens
  source 1..22: mol_type = transcribed RNA
aaggtattgttcagacttatga

SEQ ID NO: 1321 - RNA, 22 nt, Homo sapiens
  source 1..22: mol_type = transcribed RNA
tcataagtctgaacaatacctt

SEQ ID NO: 1322 - RNA, 22 nt, Homo sapiens
  source 1..22: mol_type = transcribed RNA
tctgtgatagagattctttgct

SEQ ID NO: 1323 - RNA, 22 nt, Homo sapiens
  source 1..22: mol_type = transcribed RNA
agcaaagaatctctatcacaga

SEQ ID NO: 1324 - RNA, 21 nt, Homo sapiens
  source 1..21: mol_type = transcribed RNA
tctgaattgtaagagttgtta

SEQ ID NO: 1325 - RNA, 21 nt, Homo sapiens
  source 1..21: mol_type = transcribed RNA
taacaactcttacaattcaga

SEQ ID NO: 1326 - RNA, 23 nt, Homo sapiens
  source 1..23: mol_type = transcribed RNA
agaactcttgcagtcttagatgt

SEQ ID NO: 1327 - RNA, 23 nt, Homo sapiens
  source 1..23: mol_type = transcribed RNA
acatctaagactgcaagagttct

SEQ ID NO: 1328 - RNA, 22 nt, Homo sapiens
  source 1..22: mol_type = transcribed RNA
aacgggaatgcaggctgtatct

SEQ ID NO: 1329 - RNA, 22 nt, Homo sapiens
  source 1..22: mol_type = transcribed RNA
agatacagcctgcattcccgtt

SEQ ID NO: 1330 - RNA, 23 nt, Homo sapiens
  source 1..23: mol_type = transcribed RNA
tctgagttcctggagcctggtct

SEQ ID NO: 1331 - RNA, 23 nt, Homo sapiens
  source 1..23: mol_type = transcribed RNA
agaccaggctccaggaactcaga

SEQ ID NO: 1332 - RNA, 23 nt, Homo sapiens
  source 1..23: mol_type = transcribed RNA
tggagatccagtgctcgcccgat

SEQ ID NO: 1333 - RNA, 23 nt, Homo sapiens
  source 1..23: mol_type = transcribed RNA
atcgggcgagcactggatctcca

SEQ ID NO: 1334 - RNA, 22 nt, Homo sapiens
  source 1..22: mol_type = transcribed RNA
tgttgcaagtcggtggagacgt

SEQ ID NO: 1335 - RNA, 22 nt, Homo sapiens
  source 1..22: mol_type = transcribed RNA
acgtctccaccgacttgcaaca

SEQ ID NO: 1336 - RNA, 22 nt, Homo sapiens
  source 1..22: mol_type = transcribed RNA
ctctctactgacttgcaacata

SEQ ID NO: 1337 - RNA, 22 nt, Homo sapiens
  source 1..22: mol_type = transcribed RNA
tatgttgcaagtcagtagagag

SEQ ID NO: 1338 - RNA, 22 nt, Homo sapiens
  source 1..22: mol_type = transcribed RNA
tctcccttcctgccctggctag

SEQ ID NO: 1339 - RNA, 22 nt, Homo sapiens
  source 1..22: mol_type = transcribed RNA
ctagccagggcaggaagggaga

SEQ ID NO: 1340 - RNA, 26 nt, Homo sapiens
  source 1..26: mol_type = transcribed RNA
cccagggcttggagtggggcaaggtt

SEQ ID NO: 1341 - RNA, 26 nt, Homo sapiens
  source 1..26: mol_type = transcribed RNA
aaccttgccccactccaagccctggg

SEQ ID NO: 1342 - RNA, 23 nt, Homo sapiens
  source 1..23: mol_type = transcribed RNA
tatctgctgggctttctggtgtt

SEQ ID NO: 1343 - RNA, 23 nt, Homo sapiens
  source 1..23: mol_type = transcribed RNA
aacaccagaaagcccagcagata

SEQ ID NO: 1344 - RNA, 21 nt, Homo sapiens
  source 1..21: mol_type = transcribed RNA
tggctgttggagggggcaggc

SEQ ID NO: 1345 - RNA, 21 nt, Homo sapiens
  source 1..21: mol_type = transcribed RNA
gcctgccccctccaacagcca

SEQ ID NO: 1346 - RNA, 22 nt, Homo sapiens
  source 1..22: mol_type = transcribed RNA
cagccctcctcccgcacccaaa

SEQ ID NO: 1347 - RNA, 22 nt, Homo sapiens
  source 1..22: mol_type = transcribed RNA
tttgggtgcgggaggagggctg

SEQ ID NO: 1348 - RNA, 22 nt, Homo sapiens
  source 1..22: mol_type = transcribed RNA
taggggcagcagaggacctggg

SEQ ID NO: 1349 - RNA, 22 nt, Homo sapiens
  source 1..22: mol_type = transcribed RNA
cccaggtcctctgctgccccta

SEQ ID NO: 1350 - RNA, 22 nt, Homo sapiens
  source 1..22: mol_type = transcribed RNA
ttgaggagacatggtgggggcc

SEQ ID NO: 1351 - RNA, 22 nt, Homo sapiens
  source 1..22: mol_type = transcribed RNA
ggcccccaccatgtctcctcaa

SEQ ID NO: 1352 - RNA, 21 nt, Homo sapiens
  source 1..21: mol_type = transcribed RNA
gcagcccagctgaggcctctg

SEQ ID NO: 1353 - RNA, 21 nt, Homo sapiens
  source 1..21: mol_type = transcribed RNA
cagaggcctcagctgggctgc

SEQ ID NO: 1354 - RNA, 22 nt, Homo sapiens
  source 1..22: mol_type = transcribed RNA
gagcaggcgaggctgggctgaa

SEQ ID NO: 1355 - RNA, 22 nt, Homo sapiens
  source 1..22: mol_type = transcribed RNA
ttcagcccagcctcgcctgctc

SEQ ID NO: 1356 - RNA, 23 nt, Homo sapiens
  source 1..23: mol_type = transcribed RNA
ccagccacggactgagagtgcat

SEQ ID NO: 1357 - RNA, 23 nt, Homo sapiens
  source 1..23: mol_type = transcribed RNA
atgcactctcagtccgtggctgg

SEQ ID NO: 1358 - RNA, 23 nt, Homo sapiens
  source 1..23: mol_type = transcribed RNA
gtcctccaggccatgagctgcgg

SEQ ID NO: 1359 - RNA, 23 nt, Homo sapiens
  source 1..23: mol_type = transcribed RNA
ccgcagctcatggcctggaggac

SEQ ID NO: 1360 - RNA, 22 nt, Homo sapiens
  source 1..22: mol_type = transcribed RNA
tcaggcagtgtgggtatcagat

SEQ ID NO: 1361 - RNA, 22 nt, Homo sapiens
  source 1..22: mol_type = transcribed RNA
atctgatacccacactgcctga

SEQ ID NO: 1362 - RNA, 23 nt, Homo sapiens
  source 1..23: mol_type = transcribed RNA
tgagagtggaattcacagtattt

SEQ ID NO: 1363 - RNA, 23 nt, Homo sapiens
  source 1..23: mol_type = transcribed RNA
aaatactgtgaattccactctca

SEQ ID NO: 1364 - RNA, 23 nt, Homo sapiens
  source 1..23: mol_type = transcribed RNA
atactgtgaatttcactgtcaca

SEQ ID NO: 1365 - RNA, 23 nt, Homo sapiens
  source 1..23: mol_type = transcribed RNA
tgtgacagtgaaattcacagtat

SEQ ID NO: 1366 - RNA, 21 nt, Homo sapiens
  source 1..21: mol_type = transcribed RNA
caaatggacaggataacacct

SEQ ID NO: 1367 - RNA, 21 nt, Homo sapiens
  source 1..21: mol_type = transcribed RNA
aggtgttatcctgtccatttg

SEQ ID NO: 1368 - RNA, 22 nt, Homo sapiens
  source 1..22: mol_type = transcribed RNA
aggtgttatcctatccatttgc

SEQ ID NO: 1369 - RNA, 22 nt, Homo sapiens
  source 1..22: mol_type = transcribed RNA
gcaaatggataggataacacct

SEQ ID NO: 1370 - RNA, 22 nt, Homo sapiens
  source 1..22: mol_type = transcribed RNA
tgatctcaccgctgcctccttc

SEQ ID NO: 1371 - RNA, 22 nt, Homo sapiens
  source 1..22: mol_type = transcribed RNA
gaaggaggcagcggtgagatca

SEQ ID NO: 1372 - RNA, 22 nt, Homo sapiens
  source 1..22: mol_type = transcribed RNA
caggaggcagtgggcgagcagg

SEQ ID NO: 1373 - RNA, 22 nt, Homo sapiens
  source 1..22: mol_type = transcribed RNA
cctgctcgcccactgcctcctg

SEQ ID NO: 1374 - RNA, 22 nt, Homo sapiens
  source 1..22: mol_type = transcribed RNA
tgcaagacggatactgtcatct

SEQ ID NO: 1375 - RNA, 22 nt, Homo sapiens
  source 1..22: mol_type = transcribed RNA
agatgacagtatccgtcttgca

SEQ ID NO: 1376 - RNA, 24 nt, Homo sapiens
  source 1..24: mol_type = transcribed RNA
tgtcagtgactcctgccccttggt

SEQ ID NO: 1377 - RNA, 24 nt, Homo sapiens
  source 1..24: mol_type = transcribed RNA
accaaggggcaggagtcactgaca

SEQ ID NO: 1378 - RNA, 22 nt, Homo sapiens
  source 1..22: mol_type = transcribed RNA
agggggcgcagtcactgacgtg

SEQ ID NO: 1379 - RNA, 22 nt, Homo sapiens
  source 1..22: mol_type = transcribed RNA
cacgtcagtgactgcgccccct

SEQ ID NO: 1380 - RNA, 23 nt, Homo sapiens
  source 1..23: mol_type = transcribed RNA
tcaaaatgtagaggaagacccca

SEQ ID NO: 1381 - RNA, 23 nt, Homo sapiens
  source 1..23: mol_type = transcribed RNA
tggggtcttcctctacattttga

SEQ ID NO: 1382 - RNA, 22 nt, Homo sapiens
  source 1..22: mol_type = transcribed RNA
aatttactctgcaatcttctcc

SEQ ID NO: 1383 - RNA, 22 nt, Homo sapiens
  source 1..22: mol_type = transcribed RNA
ggagaagattgcagagtaaatt

SEQ ID NO: 1384 - RNA, 22 nt, Homo sapiens
  source 1..22: mol_type = transcribed RNA
agaagattgcagagtaagttcc

SEQ ID NO: 1385 - RNA, 22 nt, Homo sapiens
  source 1..22: mol_type = transcribed RNA
ggaacttactctgcaatcttct

SEQ ID NO: 1386 - RNA, 26 nt, Homo sapiens
  source 1..26: mol_type = transcribed RNA
cacaggactgactcctcaccccagtg

SEQ ID NO: 1387 - RNA, 26 nt, Homo sapiens
  source 1..26: mol_type = transcribed RNA
cactggggtgaggagtcagtcctgtg

SEQ ID NO: 1388 - RNA, 22 nt, Homo sapiens
  source 1..22: mol_type = transcribed RNA
tctggggatgaggacagtgtgt

SEQ ID NO: 1389 - RNA, 22 nt, Homo sapiens
  source 1..22: mol_type = transcribed RNA
acacactgtcctcatccccaga

SEQ ID NO: 1390 - RNA, 20 nt, Homo sapiens
  source 1..20: mol_type = transcribed RNA
atgggtgatgggtgtggtgt

SEQ ID NO: 1391 - RNA, 20 nt, Homo sapiens
  source 1..20: mol_type = transcribed RNA
acaccacacccatcacccat

SEQ ID NO: 1392 - RNA, 22 nt, Homo sapiens
  source 1..22: mol_type = transcribed RNA
ttggccaccacacctacccctt

SEQ ID NO: 1393 - RNA, 22 nt, Homo sapiens
  source 1..22: mol_type = transcribed RNA
aaggggtaggtgtggtggccaa

SEQ ID NO: 1394 - RNA, 22 nt, Homo sapiens
  source 1..22: mol_type = transcribed RNA
tgtagttgtattgtattgccac

SEQ ID NO: 1395 - RNA, 22 nt, Homo sapiens
  source 1..22: mol_type = transcribed RNA
gtggcaatacaatacaactaca

SEQ ID NO: 1396 - RNA, 23 nt, Homo sapiens
  source 1..23: mol_type = transcribed RNA
tagcaatacagtacaaatatagt

SEQ ID NO: 1397 - RNA, 23 nt, Homo sapiens
  source 1..23: mol_type = transcribed RNA
actatatttgtactgtattgcta

SEQ ID NO: 1398 - RNA, 22 nt, Homo sapiens
  source 1..22: mol_type = transcribed RNA
tcagtcacatatctagtgtcta

SEQ ID NO: 1399 - RNA, 22 nt, Homo sapiens
  source 1..22: mol_type = transcribed RNA
tagacactagatatgtgactga

SEQ ID NO: 1400 - RNA, 22 nt, Homo sapiens
  source 1..22: mol_type = transcribed RNA
gacactaggcatgtgagtgatt

SEQ ID NO: 1401 - RNA, 22 nt, Homo sapiens
  source 1..22: mol_type = transcribed RNA
aatcactcacatgcctagtgtc

SEQ ID NO: 1402 - RNA, 22 nt, Homo sapiens
  source 1..22: mol_type = transcribed RNA
tcaatcacttggtaattgctgt

SEQ ID NO: 1403 - RNA, 22 nt, Homo sapiens
  source 1..22: mol_type = transcribed RNA
acagcaattaccaagtgattga

SEQ ID NO: 1404 - RNA, 25 nt, Homo sapiens
  source 1..25: mol_type = transcribed RNA
agcggggaggaagtgggcgctgctt

SEQ ID NO: 1405 - RNA, 25 nt, Homo sapiens
  source 1..25: mol_type = transcribed RNA
aagcagcgcccacttcctccccgct

SEQ ID NO: 1406 - RNA, 22 nt, Homo sapiens
  source 1..22: mol_type = transcribed RNA
agcccgccccagccgaggttct

SEQ ID NO: 1407 - RNA, 22 nt, Homo sapiens
  source 1..22: mol_type = transcribed RNA
agaacctcggctggggcgggct

SEQ ID NO: 1408 - RNA, 23 nt, Homo sapiens
  source 1..23: mol_type = transcribed RNA
gccccggcgcgggcgggttctgg

SEQ ID NO: 1409 - RNA, 23 nt, Homo sapiens
  source 1..23: mol_type = transcribed RNA
ccagaacccgcccgcgccggggc

SEQ ID NO: 1410 - RNA, 22 nt, Homo sapiens
  source 1..22: mol_type = transcribed RNA
agcaaggcggcatctctctgat

SEQ ID NO: 1411 - RNA, 22 nt, Homo sapiens
  source 1..22: mol_type = transcribed RNA
atcagagagatgccgccttgct

SEQ ID NO: 1412 - RNA, 21 nt, Homo sapiens
  source 1..21: mol_type = transcribed RNA
agagatgccgccttgctcctt

SEQ ID NO: 1413 - RNA, 21 nt, Homo sapiens
  source 1..21: mol_type = transcribed RNA
aaggagcaaggcggcatctct

SEQ ID NO: 1414 - RNA, 23 nt, Homo sapiens
  source 1..23: mol_type = transcribed RNA
ttgaagaggaggtgctctgtagc

SEQ ID NO: 1415 - RNA, 23 nt, Homo sapiens
  source 1..23: mol_type = transcribed RNA
gctacagagcacctcctcttcaa

SEQ ID NO: 1416 - RNA, 22 nt, Homo sapiens
  source 1..22: mol_type = transcribed RNA
acaacagtgacttgctctccaa

SEQ ID NO: 1417 - RNA, 22 nt, Homo sapiens
  source 1..22: mol_type = transcribed RNA
ttggagagcaagtcactgttgt

SEQ ID NO: 1418 - RNA, 18 nt, Homo sapiens
  source 1..18: mol_type = transcribed RNA
gggtgagggcaggtggtt

SEQ ID NO: 1419 - RNA, 18 nt, Homo sapiens
  source 1..18: mol_type = transcribed RNA
aaccacctgccctcaccc

SEQ ID NO: 1420 - RNA, 18 nt, Homo sapiens
  source 1..18: mol_type = transcribed RNA
cgtgtcttctggcttgat

SEQ ID NO: 1421 - RNA, 18 nt, Homo sapiens
  source 1..18: mol_type = transcribed RNA
atcaagccagaagacacg

SEQ ID NO: 1422 - RNA, 23 nt, Homo sapiens
  source 1..23: mol_type = transcribed RNA
tgcatcaggccagaagacatgag

SEQ ID NO: 1423 - RNA, 23 nt, Homo sapiens
  source 1..23: mol_type = transcribed RNA
ctcatgtcttctggcctgatgca

SEQ ID NO: 1424 - RNA, 21 nt, Homo sapiens
  source 1..21: mol_type = transcribed RNA
aatgagagacctgtactgtat

SEQ ID NO: 1425 - RNA, 21 nt, Homo sapiens
  source 1..21: mol_type = transcribed RNA
atacagtacaggtctctcatt

SEQ ID NO: 1426 - RNA, 22 nt, Homo sapiens
  source 1..22: mol_type = transcribed RNA
tccagtacaggtctctcatttc

SEQ ID NO: 1427 - RNA, 22 nt, Homo sapiens
  source 1..22: mol_type = transcribed RNA
gaaatgagagacctgtactgga

SEQ ID NO: 1428 - RNA, 22 nt, Homo sapiens
  source 1..22: mol_type = transcribed RNA
tgggatccagacagtgggagaa

SEQ ID NO: 1429 - RNA, 22 nt, Homo sapiens
  source 1..22: mol_type = transcribed RNA
ttctcccactgtctggatccca

SEQ ID NO: 1430 - RNA, 22 nt, Homo sapiens
  source 1..22: mol_type = transcribed RNA
ttctcccactaccaggctccca

SEQ ID NO: 1431 - RNA, 22 nt, Homo sapiens
  source 1..22: mol_type = transcribed RNA
tgggagcctggtagtgggagaa

SEQ ID NO: 1432 - RNA, 22 nt, Homo sapiens
  source 1..22: mol_type = transcribed RNA
ccaacctaggtggtcagagttg

SEQ ID NO: 1433 - RNA, 22 nt, Homo sapiens
  source 1..22: mol_type = transcribed RNA
caactctgaccacctaggttgg

SEQ ID NO: 1434 - RNA, 22 nt, Homo sapiens
  source 1..22: mol_type = transcribed RNA
aactctgaccccttaggttgat

SEQ ID NO: 1435 - RNA, 22 nt, Homo sapiens
  source 1..22: mol_type = transcribed RNA
atcaacctaaggggtcagagtt

SEQ ID NO: 1436 - RNA, 23 nt, Homo sapiens
  source 1..23: mol_type = transcribed RNA
gtgccaccttaactgcagccaat

SEQ ID NO: 1437 - RNA, 23 nt, Homo sapiens
  source 1..23: mol_type = transcribed RNA
attggctgcagttaaggtggcac

SEQ ID NO: 1438 - RNA, 22 nt, Homo sapiens
  source 1..22: mol_type = transcribed RNA
aagttggctgcagttaaggtgg

SEQ ID NO: 1439 - RNA, 22 nt, Homo sapiens
  source 1..22: mol_type = transcribed RNA
ccaccttaactgcagccaactt

SEQ ID NO: 1440 - RNA, 22 nt, Homo sapiens
  source 1..22: mol_type = transcribed RNA
aagggggaaggaaacatggaga

SEQ ID NO: 1441 - RNA, 22 nt, Homo sapiens
  source 1..22: mol_type = transcribed RNA
tctccatgtttccttccccctt

SEQ ID NO: 1442 - RNA, 22 nt, Homo sapiens
  source 1..22: mol_type = transcribed RNA
tccatgtttccttcccccttct

SEQ ID NO: 1443 - RNA, 22 nt, Homo sapiens
  source 1..22: mol_type = transcribed RNA
agaagggggaaggaaacatgga

SEQ ID NO: 1444 - RNA, 21 nt, Homo sapiens
  source 1..21: mol_type = transcribed RNA
acacatgggtggctgtggcct

SEQ ID NO: 1445 - RNA, 21 nt, Homo sapiens
  source 1..21: mol_type = transcribed RNA
aggccacagccacccatgtgt

SEQ ID NO: 1446 - RNA, 22 nt, Homo sapiens
  source 1..22: mol_type = transcribed RNA
taggccacagccacccatgtgt

SEQ ID NO: 1447 - RNA, 22 nt, Homo sapiens
  source 1..22: mol_type = transcribed RNA
acacatgggtggctgtggccta

SEQ ID NO: 1448 - RNA, 21 nt, Homo sapiens
  source 1..21: mol_type = transcribed RNA
agctgtacctgaaaccaagca

SEQ ID NO: 1449 - RNA, 21 nt, Homo sapiens
  source 1..21: mol_type = transcribed RNA
tgcttggtttcaggtacagct

SEQ ID NO: 1450 - RNA, 22 nt, Homo sapiens
  source 1..22: mol_type = transcribed RNA
tcacaaatctataatatgcagg

SEQ ID NO: 1451 - RNA, 22 nt, Homo sapiens
  source 1..22: mol_type = transcribed RNA
cctgcatattatagatttgtga

SEQ ID NO: 1452 - RNA, 21 nt, Homo sapiens
  source 1..21: mol_type = transcribed RNA
tgcttaagttgtaccaagtat

SEQ ID NO: 1453 - RNA, 21 nt, Homo sapiens
  source 1..21: mol_type = transcribed RNA
atacttggtacaacttaagca

SEQ ID NO: 1454 - RNA, 22 nt, Homo sapiens
  source 1..22: mol_type = transcribed RNA
cctggcatatttggtataactt

SEQ ID NO: 1455 - RNA, 22 nt, Homo sapiens
  source 1..22: mol_type = transcribed RNA
aagttataccaaatatgccagg

SEQ ID NO: 1456 - RNA, 22 nt, Homo sapiens
  source 1..22: mol_type = transcribed RNA
tgagggctccaggtgacggtgg

SEQ ID NO: 1457 - RNA, 22 nt, Homo sapiens
  source 1..22: mol_type = transcribed RNA
ccaccgtcacctggagccctca

SEQ ID NO: 1458 - RNA, 22 nt, Homo sapiens
  source 1..22: mol_type = transcribed RNA
acctgccagcacctccctgcag

SEQ ID NO: 1459 - RNA, 22 nt, Homo sapiens
  source 1..22: mol_type = transcribed RNA
ctgcagggaggtgctggcaggt

SEQ ID NO: 1460 - RNA, 23 nt, Homo sapiens
  source 1..23: mol_type = transcribed RNA
ggcaggagggctgtgccaggttg

SEQ ID NO: 1461 - RNA, 23 nt, Homo sapiens
  source 1..23: mol_type = transcribed RNA
caacctggcacagccctcctgcc

SEQ ID NO: 1462 - RNA, 22 nt, Homo sapiens
  source 1..22: mol_type = transcribed RNA
ccctctctggctcctccccaaa

SEQ ID NO: 1463 - RNA, 22 nt, Homo sapiens
  source 1..22: mol_type = transcribed RNA
tttggggaggagccagagaggg

SEQ ID NO: 1464 - RNA, 24 nt, Homo sapiens
  source 1..24: mol_type = transcribed RNA
tgggggagccatgagataagagca

SEQ ID NO: 1465 - RNA, 24 nt, Homo sapiens
  source 1..24: mol_type = transcribed RNA
tgctcttatctcatggctccccca

SEQ ID NO: 1466 - RNA, 21 nt, Homo sapiens
  source 1..21: mol_type = transcribed RNA
gtaccttctggttcagctagt

SEQ ID NO: 1467 - RNA, 21 nt, Homo sapiens
  source 1..21: mol_type = transcribed RNA
actagctgaaccagaaggtac

SEQ ID NO: 1468 - RNA, 23 nt, Homo sapiens
  source 1..23: mol_type = transcribed RNA
aactgaaccaggagtgagcttcg

SEQ ID NO: 1469 - RNA, 23 nt, Homo sapiens
  source 1..23: mol_type = transcribed RNA
cgaagctcactcctggttcagtt

SEQ ID NO: 1470 - RNA, 22 nt, Homo sapiens
  source 1..22: mol_type = transcribed RNA
tggggaaggcgtcagtgtcggg

SEQ ID NO: 1471 - RNA, 22 nt, Homo sapiens
  source 1..22: mol_type = transcribed RNA
cccgacactgacgccttcccca

SEQ ID NO: 1472 - RNA, 21 nt, Homo sapiens
  source 1..21: mol_type = transcribed RNA
agaccctgcagccttcccacc

SEQ ID NO: 1473 - RNA, 21 nt, Homo sapiens
  source 1..21: mol_type = transcribed RNA
ggtgggaaggctgcagggtct

SEQ ID NO: 1474 - RNA, 22 nt, Homo sapiens
  source 1..22: mol_type = transcribed RNA
acccaggttccctctggccgca

SEQ ID NO: 1475 - RNA, 22 nt, Homo sapiens
  source 1..22: mol_type = transcribed RNA
tgcggccagagggaacctgggt

SEQ ID NO: 1476 - RNA, 23 nt, Homo sapiens
  source 1..23: mol_type = transcribed RNA
agggccagaggagcctggagtgg

SEQ ID NO: 1477 - RNA, 23 nt, Homo sapiens
  source 1..23: mol_type = transcribed RNA
ccactccaggctcctctggccct

SEQ ID NO: 1478 - RNA, 22 nt, Homo sapiens
  source 1..22: mol_type = transcribed RNA
atagtgggaagctggcagattc

SEQ ID NO: 1479 - RNA, 22 nt, Homo sapiens
  source 1..22: mol_type = transcribed RNA
gaatctgccagcttcccactat

SEQ ID NO: 1480 - RNA, 21 nt, Homo sapiens
  source 1..21: mol_type = transcribed RNA
atctgccagcttccacagtgg

SEQ ID NO: 1481 - RNA, 21 nt, Homo sapiens
  source 1..21: mol_type = transcribed RNA
ccactgtggaagctggcagat

SEQ ID NO: 1482 - RNA, 25 nt, Homo sapiens
  source 1..25: mol_type = transcribed RNA
catgctgacctccctcctgccccag

SEQ ID NO: 1483 - RNA, 25 nt, Homo sapiens
  source 1..25: mol_type = transcribed RNA
ctggggcaggagggaggtcagcatg

SEQ ID NO: 1484 - RNA, 23 nt, Homo sapiens
  source 1..23: mol_type = transcribed RNA
tgggaggggagaggcagcaagca

SEQ ID NO: 1485 - RNA, 23 nt, Homo sapiens
  source 1..23: mol_type = transcribed RNA
tgcttgctgcctctcccctccca

SEQ ID NO: 1486 - RNA, 22 nt, Homo sapiens
  source 1..22: mol_type = transcribed RNA
tcatttatctgttgggaagcta

SEQ ID NO: 1487 - RNA, 22 nt, Homo sapiens
  source 1..22: mol_type = transcribed RNA
tagcttcccaacagataaatga

SEQ ID NO: 1488 - RNA, 23 nt, Homo sapiens
  source 1..23: mol_type = transcribed RNA
ctggcggagcccattccatgcca

SEQ ID NO: 1489 - RNA, 23 nt, Homo sapiens
  source 1..23: mol_type = transcribed RNA
tggcatggaatgggctccgccag

SEQ ID NO: 1490 - RNA, 22 nt, Homo sapiens
  source 1..22: mol_type = transcribed RNA
cacacaagtggcccccaacact

SEQ ID NO: 1491 - RNA, 22 nt, Homo sapiens
  source 1..22: mol_type = transcribed RNA
agtgttgggggccacttgtgtg

SEQ ID NO: 1492 - RNA, 22 nt, Homo sapiens
  source 1..22: mol_type = transcribed RNA
tgctgggggccacatgagtgtg

SEQ ID NO: 1493 - RNA, 22 nt, Homo sapiens
  source 1..22: mol_type = transcribed RNA
cacactcatgtggcccccagca

SEQ ID NO: 1494 - RNA, 21 nt, Homo sapiens
  source 1..21: mol_type = transcribed RNA
gccctgacctgtcctgttctg

SEQ ID NO: 1495 - RNA, 21 nt, Homo sapiens
  source 1..21: mol_type = transcribed RNA
cagaacaggacaggtcagggc

SEQ ID NO: 1496 - RNA, 23 nt, Homo sapiens
  source 1..23: mol_type = transcribed RNA
tgtagagcagggagcaggaagct

SEQ ID NO: 1497 - RNA, 23 nt, Homo sapiens
  source 1..23: mol_type = transcribed RNA
agcttcctgctccctgctctaca

SEQ ID NO: 1498 - RNA, 22 nt, Homo sapiens
  source 1..22: mol_type = transcribed RNA
ccaccaggtctagcattgggat

SEQ ID NO: 1499 - RNA, 22 nt, Homo sapiens
  source 1..22: mol_type = transcribed RNA
atcccaatgctagacctggtgg

SEQ ID NO: 1500 - RNA, 22 nt, Homo sapiens
  source 1..22: mol_type = transcribed RNA
aatcccaatgctagacccggtg

SEQ ID NO: 1501 - RNA, 22 nt, Homo sapiens
  source 1..22: mol_type = transcribed RNA
caccgggtctagcattgggatt

SEQ ID NO: 1502 - RNA, 22 nt, Homo sapiens
  source 1..22: mol_type = transcribed RNA
gctgcgggctgcggtcagggcg

SEQ ID NO: 1503 - RNA, 22 nt, Homo sapiens
  source 1..22: mol_type = transcribed RNA
cgccctgaccgcagcccgcagc

SEQ ID NO: 1504 - RNA, 21 nt, Homo sapiens
  source 1..21: mol_type = transcribed RNA
aaaggtgctcaaattagacat

SEQ ID NO: 1505 - RNA, 21 nt, Homo sapiens
  source 1..21: mol_type = transcribed RNA
atgtctaatttgagcaccttt

SEQ ID NO: 1506 - RNA, 22 nt, Homo sapiens
  source 1..22: mol_type = transcribed RNA
cctaatttgaacaccttcggta

SEQ ID NO: 1507 - RNA, 22 nt, Homo sapiens
  source 1..22: mol_type = transcribed RNA
taccgaaggtgttcaaattagg

SEQ ID NO: 1508 - RNA, 19 nt, Homo sapiens
  source 1..19: mol_type = transcribed RNA
aggcaggttatctgggctg

SEQ ID NO: 1509 - RNA, 19 nt, Homo sapiens
  source 1..19: mol_type = transcribed RNA
cagcccagataacctgcct

SEQ ID NO: 1510 - RNA, 20 nt, Homo sapiens
  source 1..20: mol_type = transcribed RNA
atgcgaggatgctgacagtg

SEQ ID NO: 1511 - RNA, 20 nt, Homo sapiens
  source 1..20: mol_type = transcribed RNA
cactgtcagcatcctcgcat

SEQ ID NO: 1512 - RNA, 22 nt, Homo sapiens
  source 1..22: mol_type = transcribed RNA
tgaaactggagcgcctggagga

SEQ ID NO: 1513 - RNA, 22 nt, Homo sapiens
  source 1..22: mol_type = transcribed RNA
tcctccaggcgctccagtttca

SEQ ID NO: 1514 - RNA, 22 nt, Homo sapiens
  source 1..22: mol_type = transcribed RNA
accagcgcgttttcagtttcat

SEQ ID NO: 1515 - RNA, 22 nt, Homo sapiens
  source 1..22: mol_type = transcribed RNA
atgaaactgaaaacgcgctggt

SEQ ID NO: 1516 - RNA, 25 nt, Homo sapiens
  source 1..25: mol_type = transcribed RNA
aagggaggaggagcggaggggccct

SEQ ID NO: 1517 - RNA, 25 nt, Homo sapiens
  source 1..25: mol_type = transcribed RNA
agggcccctccgctcctcctccctt

SEQ ID NO: 1518 - RNA, 22 nt, Homo sapiens
  source 1..22: mol_type = transcribed RNA
gcccgagaggatccgtccctgc

SEQ ID NO: 1519 - RNA, 22 nt, Homo sapiens
  source 1..22: mol_type = transcribed RNA
gcagggacggatcctctcgggc

SEQ ID NO: 1520 - RNA, 22 nt, Homo sapiens
  source 1..22: mol_type = transcribed RNA
aggactgatcctctcgggcagg

SEQ ID NO: 1521 - RNA, 22 nt, Homo sapiens
  source 1..22: mol_type = transcribed RNA
cctgcccgagaggatcagtcct

SEQ ID NO: 1522 - RNA, 23 nt, Homo sapiens
  source 1..23: mol_type = transcribed RNA
tcaggcaaagggatatttacaga

SEQ ID NO: 1523 - RNA, 23 nt, Homo sapiens
  source 1..23: mol_type = transcribed RNA
tctgtaaatatccctttgcctga

SEQ ID NO: 1524 - RNA, 21 nt, Homo sapiens
  source 1..21: mol_type = transcribed RNA
tttctgtcttttctggtccag

SEQ ID NO: 1525 - RNA, 21 nt, Homo sapiens
  source 1..21: mol_type = transcribed RNA
ctggaccagaaaagacagaaa

SEQ ID NO: 1526 - RNA, 23 nt, Homo sapiens
  source 1..23: mol_type = transcribed RNA
tggccggatgggacaggaggcat

SEQ ID NO: 1527 - RNA, 23 nt, Homo sapiens
  source 1..23: mol_type = transcribed RNA
atgcctcctgtcccatccggcca

SEQ ID NO: 1528 - RNA, 23 nt, Homo sapiens
  source 1..23: mol_type = transcribed RNA
tctaaagactagacttcgctatg

SEQ ID NO: 1529 - RNA, 23 nt, Homo sapiens
  source 1..23: mol_type = transcribed RNA
catagcgaagtctagtctttaga

SEQ ID NO: 1530 - RNA, 23 nt, Homo sapiens
  source 1..23: mol_type = transcribed RNA
tggcccggcgacgtctcacggtc

SEQ ID NO: 1531 - RNA, 23 nt, Homo sapiens
  source 1..23: mol_type = transcribed RNA
gaccgtgagacgtcgccgggcca

SEQ ID NO: 1532 - RNA, 23 nt, Homo sapiens
  source 1..23: mol_type = transcribed RNA
tgagtggggctcccgggacggcg

SEQ ID NO: 1533 - RNA, 23 nt, Homo sapiens
  source 1..23: mol_type = transcribed RNA
cgccgtcccgggagccccactca

SEQ ID NO: 1534 - RNA, 21 nt, Homo sapiens
  source 1..21: mol_type = transcribed RNA
agcggtgctcctgcgggccga

SEQ ID NO: 1535 - RNA, 21 nt, Homo sapiens
  source 1..21: mol_type = transcribed RNA
tcggcccgcaggagcaccgct

SEQ ID NO: 1536 - RNA, 23 nt, Homo sapiens
  source 1..23: mol_type = transcribed RNA
ccggtcccaggagaacctgcaga

SEQ ID NO: 1537 - RNA, 23 nt, Homo sapiens
  source 1..23: mol_type = transcribed RNA
tctgcaggttctcctgggaccgg

SEQ ID NO: 1538 - RNA, 22 nt, Homo sapiens
  source 1..22: mol_type = transcribed RNA
aaggcccgggctttcctcccag

SEQ ID NO: 1539 - RNA, 22 nt, Homo sapiens
  source 1..22: mol_type = transcribed RNA
ctgggaggaaagcccgggcctt

SEQ ID NO: 1540 - RNA, 22 nt, Homo sapiens
  source 1..22: mol_type = transcribed RNA
agggaaggaggcttggtcttag

SEQ ID NO: 1541 - RNA, 22 nt, Homo sapiens
  source 1..22: mol_type = transcribed RNA
ctaagaccaagcctccttccct

SEQ ID NO: 1542 - RNA, 21 nt, Homo sapiens
  source 1..21: mol_type = transcribed RNA
gaggtttggggaggatttgct

SEQ ID NO: 1543 - RNA, 21 nt, Homo sapiens
  source 1..21: mol_type = transcribed RNA
agcaaatcctccccaaacctc

SEQ ID NO: 1544 - RNA, 20 nt, Homo sapiens
  source 1..20: mol_type = transcribed RNA
cgcccctcctgcccccacag

SEQ ID NO: 1545 - RNA, 20 nt, Homo sapiens
  source 1..20: mol_type = transcribed RNA
ctgtgggggcaggaggggcg

SEQ ID NO: 1546 - RNA, 22 nt, Homo sapiens
  source 1..22: mol_type = transcribed RNA
tgcggggacaggccagggcatc

SEQ ID NO: 1547 - RNA, 22 nt, Homo sapiens
  source 1..22: mol_type = transcribed RNA
gatgccctggcctgtccccgca

SEQ ID NO: 1548 - RNA, 22 nt, Homo sapiens
  source 1..22: mol_type = transcribed RNA
cctgacccaccccctcccgcag

SEQ ID NO: 1549 - RNA, 22 nt, Homo sapiens
  source 1..22: mol_type = transcribed RNA
ctgcgggagggggtgggtcagg

SEQ ID NO: 1550 - RNA, 22 nt, Homo sapiens
  source 1..22: mol_type = transcribed RNA
ctcgggcggaggtggttgagtg

SEQ ID NO: 1551 - RNA, 22 nt, Homo sapiens
  source 1..22: mol_type = transcribed RNA
cactcaaccacctccgcccgag

SEQ ID NO: 1552 - RNA, 24 nt, Homo sapiens
  source 1..24: mol_type = transcribed RNA
agaggacccgtagctgctagaagg

SEQ ID NO: 1553 - RNA, 24 nt, Homo sapiens
  source 1..24: mol_type = transcribed RNA
ccttctagcagctacgggtcctct

SEQ ID NO: 1554 - RNA, 22 nt, Homo sapiens
  source 1..22: mol_type = transcribed RNA
ttgtggatctcaaggatgtgct

SEQ ID NO: 1555 - RNA, 22 nt, Homo sapiens
  source 1..22: mol_type = transcribed RNA
agcacatccttgagatccacaa

SEQ ID NO: 1556 - RNA, 22 nt, Homo sapiens
  source 1..22: mol_type = transcribed RNA
ttctctttctttagccttgtgt

SEQ ID NO: 1557 - RNA, 22 nt, Homo sapiens
  source 1..22: mol_type = transcribed RNA
acacaaggctaaagaaagagaa

SEQ ID NO: 1558 - RNA, 22 nt, Homo sapiens
  source 1..22: mol_type = transcribed RNA
caaggccaaaggaagagaacag

SEQ ID NO: 1559 - RNA, 22 nt, Homo sapiens
  source 1..22: mol_type = transcribed RNA
ctgttctcttcctttggccttg

SEQ ID NO: 1560 - RNA, 23 nt, Homo sapiens
  source 1..23: mol_type = transcribed RNA
atgcggacctgggttagcggagt

SEQ ID NO: 1561 - RNA, 23 nt, Homo sapiens
  source 1..23: mol_type = transcribed RNA
actccgctaacccaggtccgcat

SEQ ID NO: 1562 - RNA, 22 nt, Homo sapiens
  source 1..22: mol_type = transcribed RNA
agccaggctctgaagggaaagt

SEQ ID NO: 1563 - RNA, 22 nt, Homo sapiens
  source 1..22: mol_type = transcribed RNA
actttcccttcagagcctggct

SEQ ID NO: 1564 - RNA, 22 nt, Homo sapiens
  source 1..22: mol_type = transcribed RNA
tttcccttcagagcctggcttt

SEQ ID NO: 1565 - RNA, 22 nt, Homo sapiens
  source 1..22: mol_type = transcribed RNA
aaagccaggctctgaagggaaa

SEQ ID NO: 1566 - RNA, 22 nt, Homo sapiens
  source 1..22: mol_type = transcribed RNA
ccagagatggttgccttcctat

SEQ ID NO: 1567 - RNA, 22 nt, Homo sapiens
  source 1..22: mol_type = transcribed RNA
ataggaaggcaaccatctctgg

SEQ ID NO: 1568 - RNA, 23 nt, Homo sapiens
  source 1..23: mol_type = transcribed RNA
cagggaggcgctcactctctgct

SEQ ID NO: 1569 - RNA, 23 nt, Homo sapiens
  source 1..23: mol_type = transcribed RNA
agcagagagtgagcgcctccctg

SEQ ID NO: 1570 - RNA, 22 nt, Homo sapiens
  source 1..22: mol_type = transcribed RNA
catgacgtcacagaggcttcgc

SEQ ID NO: 1571 - RNA, 22 nt, Homo sapiens
  source 1..22: mol_type = transcribed RNA
gcgaagcctctgtgacgtcatg

SEQ ID NO: 1572 - RNA, 23 nt, Homo sapiens
  source 1..23: mol_type = transcribed RNA
aggcctctgtgacgtcacggtgt

SEQ ID NO: 1573 - RNA, 23 nt, Homo sapiens
  source 1..23: mol_type = transcribed RNA
acaccgtgacgtcacagaggcct

SEQ ID NO: 1574 - RNA, 23 nt, Homo sapiens
  source 1..23: mol_type = transcribed RNA
tgccccacctgctgaccaccctc

SEQ ID NO: 1575 - RNA, 23 nt, Homo sapiens
  source 1..23: mol_type = transcribed RNA
gagggtggtcagcaggtggggca

SEQ ID NO: 1576 - RNA, 23 nt, Homo sapiens
  source 1..23: mol_type = transcribed RNA
gtgagtgggagccggtggggctg

SEQ ID NO: 1577 - RNA, 23 nt, Homo sapiens
  source 1..23: mol_type = transcribed RNA
cagccccaccggctcccactcac

SEQ ID NO: 1578 - RNA, 21 nt, Homo sapiens
  source 1..21: mol_type = transcribed RNA
taggactagatgttggaatta

SEQ ID NO: 1579 - RNA, 21 nt, Homo sapiens
  source 1..21: mol_type = transcribed RNA
taattccaacatctagtccta

SEQ ID NO: 1580 - RNA, 22 nt, Homo sapiens
  source 1..22: mol_type = transcribed RNA
aaattcatgttcaatctaaacc

SEQ ID NO: 1581 - RNA, 22 nt, Homo sapiens
  source 1..22: mol_type = transcribed RNA
ggtttagattgaacatgaattt

SEQ ID NO: 1582 - RNA, 22 nt, Homo sapiens
  source 1..22: mol_type = transcribed RNA
tttagattgaacatgaagttag

SEQ ID NO: 1583 - RNA, 22 nt, Homo sapiens
  source 1..22: mol_type = transcribed RNA
ctaacttcatgttcaatctaaa

SEQ ID NO: 1584 - RNA, 21 nt, Homo sapiens
  source 1..21: mol_type = transcribed RNA
gagggcatgcgcactttgtcc

SEQ ID NO: 1585 - RNA, 21 nt, Homo sapiens
  source 1..21: mol_type = transcribed RNA
ggacaaagtgcgcatgccctc

SEQ ID NO: 1586 - RNA, 21 nt, Homo sapiens
  source 1..21: mol_type = transcribed RNA
acaaggtgtgcatgcctgacc

SEQ ID NO: 1587 - RNA, 21 nt, Homo sapiens
  source 1..21: mol_type = transcribed RNA
ggtcaggcatgcacaccttgt

SEQ ID NO: 1588 - RNA, 22 nt, Homo sapiens
  source 1..22: mol_type = transcribed RNA
cttctgatcaagatttgtggtg

SEQ ID NO: 1589 - RNA, 22 nt, Homo sapiens
  source 1..22: mol_type = transcribed RNA
caccacaaatcttgatcagaag

SEQ ID NO: 1590 - RNA, 21 nt, Homo sapiens
  source 1..21: mol_type = transcribed RNA
ccaaatcttgatcagaagcct

SEQ ID NO: 1591 - RNA, 21 nt, Homo sapiens
  source 1..21: mol_type = transcribed RNA
aggcttctgatcaagatttgg

SEQ ID NO: 1592 - RNA, 24 nt, Homo sapiens
  source 1..24: mol_type = transcribed RNA
aggcaggggctggtgctgggcggg

SEQ ID NO: 1593 - RNA, 24 nt, Homo sapiens
  source 1..24: mol_type = transcribed RNA
cccgcccagcaccagcccctgcct

SEQ ID NO: 1594 - RNA, 21 nt, Homo sapiens
  source 1..21: mol_type = transcribed RNA
cgcctgcccagccctcctgct

SEQ ID NO: 1595 - RNA, 21 nt, Homo sapiens
  source 1..21: mol_type = transcribed RNA
agcaggagggctgggcaggcg

SEQ ID NO: 1596 - RNA, 22 nt, Homo sapiens
  source 1..22: mol_type = transcribed RNA
ttaactcctttcacacccatgg

SEQ ID NO: 1597 - RNA, 22 nt, Homo sapiens
  source 1..22: mol_type = transcribed RNA
ccatgggtgtgaaaggagttaa

SEQ ID NO: 1598 - RNA, 21 nt, Homo sapiens
  source 1..21: mol_type = transcribed RNA
tggatgtggaaggagttatct

SEQ ID NO: 1599 - RNA, 21 nt, Homo sapiens
  source 1..21: mol_type = transcribed RNA
agataactccttccacatcca

SEQ ID NO: 1600 - RNA, 22 nt, Homo sapiens
  source 1..22: mol_type = transcribed RNA
tgagtgattgatagctatgttc

SEQ ID NO: 1601 - RNA, 22 nt, Homo sapiens
  source 1..22: mol_type = transcribed RNA
gaacatagctatcaatcactca

SEQ ID NO: 1602 - RNA, 21 nt, Homo sapiens
  source 1..21: mol_type = transcribed RNA
atagcaattgctcttttggaa

SEQ ID NO: 1603 - RNA, 21 nt, Homo sapiens
  source 1..21: mol_type = transcribed RNA
ttccaaaagagcaattgctat

SEQ ID NO: 1604 - RNA, 21 nt, Homo sapiens
  source 1..21: mol_type = transcribed RNA
tctgaaagagcagttggtgtt

SEQ ID NO: 1605 - RNA, 21 nt, Homo sapiens
  source 1..21: mol_type = transcribed RNA
aacaccaactgctctttcaga

SEQ ID NO: 1606 - RNA, 23 nt, Homo sapiens
  source 1..23: mol_type = transcribed RNA
cgcgggcgctcctggccgccgcc

SEQ ID NO: 1607 - RNA, 23 nt, Homo sapiens
  source 1..23: mol_type = transcribed RNA
ggcggcggccaggagcgcccgcg

SEQ ID NO: 1608 - RNA, 20 nt, Homo sapiens
  source 1..20: mol_type = transcribed RNA
ccaggagatccagagagaat

SEQ ID NO: 1609 - RNA, 20 nt, Homo sapiens
  source 1..20: mol_type = transcribed RNA
attctctctggatctcctgg

SEQ ID NO: 1610 - RNA, 22 nt, Homo sapiens
  source 1..22: mol_type = transcribed RNA
attctctctggatcccatggat

SEQ ID NO: 1611 - RNA, 22 nt, Homo sapiens
  source 1..22: mol_type = transcribed RNA
atccatgggatccagagagaat

SEQ ID NO: 1612 - RNA, 22 nt, Homo sapiens
  source 1..22: mol_type = transcribed RNA
tctgccatcctccctcccctac

SEQ ID NO: 1613 - RNA, 22 nt, Homo sapiens
  source 1..22: mol_type = transcribed RNA
gtaggggagggaggatggcaga

SEQ ID NO: 1614 - RNA, 24 nt, Homo sapiens
  source 1..24: mol_type = transcribed RNA
ggtgggatggagagaaggtatgag

SEQ ID NO: 1615 - RNA, 24 nt, Homo sapiens
  source 1..24: mol_type = transcribed RNA
ctcataccttctctccatcccacc

SEQ ID NO: 1616 - RNA, 18 nt, Homo sapiens
  source 1..18: mol_type = transcribed RNA
tgagatgacactgtagct

SEQ ID NO: 1617 - RNA, 18 nt, Homo sapiens
  source 1..18: mol_type = transcribed RNA
agctacagtgtcatctca

SEQ ID NO: 1618 - RNA, 21 nt, Homo sapiens
  source 1..21: mol_type = transcribed RNA
agcagacttgacctacaatta

SEQ ID NO: 1619 - RNA, 21 nt, Homo sapiens
  source 1..21: mol_type = transcribed RNA
taattgtaggtcaagtctgct

SEQ ID NO: 1620 - RNA, 22 nt, Homo sapiens
  source 1..22: mol_type = transcribed RNA
cagaacaggagcatagaaaggc

SEQ ID NO: 1621 - RNA, 22 nt, Homo sapiens
  source 1..22: mol_type = transcribed RNA
gcctttctatgctcctgttctg

SEQ ID NO: 1622 - RNA, 22 nt, Homo sapiens
  source 1..22: mol_type = transcribed RNA
ttaattttttgtttcggtcact

SEQ ID NO: 1623 - RNA, 22 nt, Homo sapiens
  source 1..22: mol_type = transcribed RNA
agtgaccgaaacaaaaaattaa

SEQ ID NO: 1624 - RNA, 23 nt, Homo sapiens
  source 1..23: mol_type = transcribed RNA
cttgccatcctggtccactgcat

SEQ ID NO: 1625 - RNA, 23 nt, Homo sapiens
  source 1..23: mol_type = transcribed RNA
atgcagtggaccaggatggcaag

SEQ ID NO: 1626 - RNA, 22 nt, Homo sapiens
  source 1..22: mol_type = transcribed RNA
gtggaccaggatggcaagggct

SEQ ID NO: 1627 - RNA, 22 nt, Homo sapiens
  source 1..22: mol_type = transcribed RNA
agcccttgccatcctggtccac

SEQ ID NO: 1628 - RNA, 22 nt, Homo sapiens
  source 1..22: mol_type = transcribed RNA
atacctcatctagaatgctgta

SEQ ID NO: 1629 - RNA, 22 nt, Homo sapiens
  source 1..22: mol_type = transcribed RNA
tacagcattctagatgaggtat

SEQ ID NO: 1630 - RNA, 22 nt, Homo sapiens
  source 1..22: mol_type = transcribed RNA
ttctagatgagagatatatata

SEQ ID NO: 1631 - RNA, 22 nt, Homo sapiens
  source 1..22: mol_type = transcribed RNA
tatatatatctctcatctagaa

SEQ ID NO: 1632 - RNA, 22 nt, Homo sapiens
  source 1..22: mol_type = transcribed RNA
tcttcttcctttgcagagttga

SEQ ID NO: 1633 - RNA, 22 nt, Homo sapiens
  source 1..22: mol_type = transcribed RNA
tcaactctgcaaaggaagaaga

SEQ ID NO: 1634 - RNA, 22 nt, Homo sapiens
  source 1..22: mol_type = transcribed RNA
aattctgtaaaggaagaagagg

SEQ ID NO: 1635 - RNA, 22 nt, Homo sapiens
  source 1..22: mol_type = transcribed RNA
cctcttcttcctttacagaatt

SEQ ID NO: 1636 - RNA, 22 nt, Homo sapiens
  source 1..22: mol_type = transcribed RNA
taggagggaatagtaaaagcag

SEQ ID NO: 1637 - RNA, 22 nt, Homo sapiens
  source 1..22: mol_type = transcribed RNA
ctgcttttactattccctccta

SEQ ID NO: 1638 - RNA, 22 nt, Homo sapiens
  source 1..22: mol_type = transcribed RNA
acccttgagcctgatccctagc

SEQ ID NO: 1639 - RNA, 22 nt, Homo sapiens
  source 1..22: mol_type = transcribed RNA
gctagggatcaggctcaagggt

SEQ ID NO: 1640 - RNA, 22 nt, Homo sapiens
  source 1..22: mol_type = transcribed RNA
aatgttggaatcctcgctagag

SEQ ID NO: 1641 - RNA, 22 nt, Homo sapiens
  source 1..22: mol_type = transcribed RNA
ctctagcgaggattccaacatt

SEQ ID NO: 1642 - RNA, 21 nt, Homo sapiens
  source 1..21: mol_type = transcribed RNA
tagcggggattccaatattgg

SEQ ID NO: 1643 - RNA, 21 nt, Homo sapiens
  source 1..21: mol_type = transcribed RNA
ccaatattggaatccccgcta

SEQ ID NO: 1644 - RNA, 22 nt, Homo sapiens
  source 1..22: mol_type = transcribed RNA
tgattgtcttcatatctagaac

SEQ ID NO: 1645 - RNA, 22 nt, Homo sapiens
  source 1..22: mol_type = transcribed RNA
gttctagatatgaagacaatca

SEQ ID NO: 1646 - RNA, 22 nt, Homo sapiens
  source 1..22: mol_type = transcribed RNA
ttctggatatgaagacaatcaa

SEQ ID NO: 1647 - RNA, 22 nt, Homo sapiens
  source 1..22: mol_type = transcribed RNA
ttgattgtcttcatatccagaa

SEQ ID NO: 1648 - RNA, 23 nt, Homo sapiens
  source 1..23: mol_type = transcribed RNA
ccccggtgttggggcgcgtctgc

SEQ ID NO: 1649 - RNA, 23 nt, Homo sapiens
  source 1..23: mol_type = transcribed RNA
gcagacgcgccccaacaccgggg

SEQ ID NO: 1650 - RNA, 21 nt, Homo sapiens
  source 1..21: mol_type = transcribed RNA
ggcgcgcccagctcccgggct

SEQ ID NO: 1651 - RNA, 21 nt, Homo sapiens
  source 1..21: mol_type = transcribed RNA
agcccgggagctgggcgcgcc

SEQ ID NO: 1652 - RNA, 20 nt, Homo sapiens
  source 1..20: mol_type = transcribed RNA
tgaggagatgctgggactga

SEQ ID NO: 1653 - RNA, 20 nt, Homo sapiens
  source 1..20: mol_type = transcribed RNA
tcagtcccagcatctcctca

SEQ ID NO: 1654 - RNA, 21 nt, Homo sapiens
  source 1..21: mol_type = transcribed RNA
agagtcggcgacgccgccagc

SEQ ID NO: 1655 - RNA, 21 nt, Homo sapiens
  source 1..21: mol_type = transcribed RNA
gctggcggcgtcgccgactct

SEQ ID NO: 1656 - RNA, 22 nt, Homo sapiens
  source 1..22: mol_type = transcribed RNA
tgaagccagctctggtctgggc

SEQ ID NO: 1657 - RNA, 22 nt, Homo sapiens
  source 1..22: mol_type = transcribed RNA
gcccagaccagagctggcttca

SEQ ID NO: 1658 - RNA, 22 nt, Homo sapiens
  source 1..22: mol_type = transcribed RNA
tgagaccaggactggatgcacc

SEQ ID NO: 1659 - RNA, 22 nt, Homo sapiens
  source 1..22: mol_type = transcribed RNA
ggtgcatccagtcctggtctca

SEQ ID NO: 1660 - RNA, 24 nt, Homo sapiens
  source 1..24: mol_type = transcribed RNA
gatgcgccgcccactgccccgcgc

SEQ ID NO: 1661 - RNA, 24 nt, Homo sapiens
  source 1..24: mol_type = transcribed RNA
gcgcggggcagtgggcggcgcatc

SEQ ID NO: 1662 - RNA, 22 nt, Homo sapiens
  source 1..22: mol_type = transcribed RNA
gcgggggtggcggcggcatccc

SEQ ID NO: 1663 - RNA, 22 nt, Homo sapiens
  source 1..22: mol_type = transcribed RNA
gggatgccgccgccacccccgc

SEQ ID NO: 1664 - RNA, 22 nt, Homo sapiens
  source 1..22: mol_type = transcribed RNA
ttacggaccagctaagggaggc

SEQ ID NO: 1665 - RNA, 22 nt, Homo sapiens
  source 1..22: mol_type = transcribed RNA
gcctcccttagctggtccgtaa

SEQ ID NO: 1666 - RNA, 21 nt, Homo sapiens
  source 1..21: mol_type = transcribed RNA
cacacatagcaggtgtatata

SEQ ID NO: 1667 - RNA, 21 nt, Homo sapiens
  source 1..21: mol_type = transcribed RNA
tatatacacctgctatgtgtg

SEQ ID NO: 1668 - RNA, 22 nt, Homo sapiens
  source 1..22: mol_type = transcribed RNA
gtatacacctgatatgtgtatg

SEQ ID NO: 1669 - RNA, 22 nt, Homo sapiens
  source 1..22: mol_type = transcribed RNA
catacacatatcaggtgtatac

SEQ ID NO: 1670 - RNA, 22 nt, Homo sapiens
  source 1..22: mol_type = transcribed RNA
tgaatggtaaagcgatgtcaca

SEQ ID NO: 1671 - RNA, 22 nt, Homo sapiens
  source 1..22: mol_type = transcribed RNA
tgtgacatcgctttaccattca

SEQ ID NO: 1672 - RNA, 20 nt, Homo sapiens
  source 1..20: mol_type = transcribed RNA
atcgctttaccattcatgtt

SEQ ID NO: 1673 - RNA, 20 nt, Homo sapiens
  source 1..20: mol_type = transcribed RNA
aacatgaatggtaaagcgat

SEQ ID NO: 1674 - RNA, 18 nt, Homo sapiens
  source 1..18: mol_type = transcribed RNA
tggatatgatgactgaaa

SEQ ID NO: 1675 - RNA, 18 nt, Homo sapiens
  source 1..18: mol_type = transcribed RNA
tttcagtcatcatatcca

SEQ ID NO: 1676 - RNA, 18 nt, Homo sapiens
  source 1..18: mol_type = transcribed RNA
cggtgagcgctcgctggc

SEQ ID NO: 1677 - RNA, 18 nt, Homo sapiens
  source 1..18: mol_type = transcribed RNA
gccagcgagcgctcaccg

SEQ ID NO: 1678 - RNA, 23 nt, Homo sapiens
  source 1..23: mol_type = transcribed RNA
tctgcactgtgagttggctggct

SEQ ID NO: 1679 - RNA, 23 nt, Homo sapiens
  source 1..23: mol_type = transcribed RNA
agccagccaactcacagtgcaga

SEQ ID NO: 1680 - RNA, 24 nt, Homo sapiens
  source 1..24: mol_type = transcribed RNA
acatcctgctccacagggcagagg

SEQ ID NO: 1681 - RNA, 24 nt, Homo sapiens
  source 1..24: mol_type = transcribed RNA
cctctgccctgtggagcaggatgt

SEQ ID NO: 1682 - RNA, 22 nt, Homo sapiens
  source 1..22: mol_type = transcribed RNA
tctggctatctcacgagactgt

SEQ ID NO: 1683 - RNA, 22 nt, Homo sapiens
  source 1..22: mol_type = transcribed RNA
acagtctcgtgagatagccaga

SEQ ID NO: 1684 - RNA, 22 nt, Homo sapiens
  source 1..22: mol_type = transcribed RNA
atattattagccacttctggat

SEQ ID NO: 1685 - RNA, 22 nt, Homo sapiens
  source 1..22: mol_type = transcribed RNA
atccagaagtggctaataatat

SEQ ID NO: 1686 - RNA, 21 nt, Homo sapiens
  source 1..21: mol_type = transcribed RNA
agaagtggctaataatattga

SEQ ID NO: 1687 - RNA, 21 nt, Homo sapiens
  source 1..21: mol_type = transcribed RNA
tcaatattattagccacttct

SEQ ID NO: 1688 - RNA, 22 nt, Homo sapiens
  source 1..22: mol_type = transcribed RNA
taaagtggcagagtatagacac

SEQ ID NO: 1689 - RNA, 22 nt, Homo sapiens
  source 1..22: mol_type = transcribed RNA
gtgtctatactctgccacttta

SEQ ID NO: 1690 - RNA, 22 nt, Homo sapiens
  source 1..22: mol_type = transcribed RNA
tgtctatactctgtcactttac

SEQ ID NO: 1691 - RNA, 22 nt, Homo sapiens
  source 1..22: mol_type = transcribed RNA
gtaaagtgacagagtatagaca

SEQ ID NO: 1692 - RNA, 21 nt, Homo sapiens
  source 1..21: mol_type = transcribed RNA
tctcagtaagtggcactctgt

SEQ ID NO: 1693 - RNA, 21 nt, Homo sapiens
  source 1..21: mol_type = transcribed RNA
acagagtgccacttactgaga

SEQ ID NO: 1694 - RNA, 21 nt, Homo sapiens
  source 1..21: mol_type = transcribed RNA
gacagagtgccacttactgaa

SEQ ID NO: 1695 - RNA, 21 nt, Homo sapiens
  source 1..21: mol_type = transcribed RNA
ttcagtaagtggcactctgtc

SEQ ID NO: 1696 - RNA, 22 nt, Homo sapiens
  source 1..22: mol_type = transcribed RNA
aactcacgaagtataccgaagt

SEQ ID NO: 1697 - RNA, 22 nt, Homo sapiens
  source 1..22: mol_type = transcribed RNA
acttcggtatacttcgtgagtt

SEQ ID NO: 1698 - RNA, 22 nt, Homo sapiens
  source 1..22: mol_type = transcribed RNA
ttcggtatactttgtgaattgg

SEQ ID NO: 1699 - RNA, 22 nt, Homo sapiens
  source 1..22: mol_type = transcribed RNA
ccaattcacaaagtataccgaa

SEQ ID NO: 1700 - RNA, 22 nt, Homo sapiens
  source 1..22: mol_type = transcribed RNA
actggcatgctgcatttatata

SEQ ID NO: 1701 - RNA, 22 nt, Homo sapiens
  source 1..22: mol_type = transcribed RNA
tatataaatgcagcatgccagt

SEQ ID NO: 1702 - RNA, 22 nt, Homo sapiens
  source 1..22: mol_type = transcribed RNA
atctaaatgcagcatgccagtc

SEQ ID NO: 1703 - RNA, 22 nt, Homo sapiens
  source 1..22: mol_type = transcribed RNA
gactggcatgctgcatttagat

SEQ ID NO: 1704 - RNA, 19 nt, Homo sapiens
  source 1..19: mol_type = transcribed RNA
catccgtccgtctgtccac

SEQ ID NO: 1705 - RNA, 19 nt, Homo sapiens
  source 1..19: mol_type = transcribed RNA
gtggacagacggacggatg

SEQ ID NO: 1706 - RNA, 21 nt, Homo sapiens
  source 1..21: mol_type = transcribed RNA
agtggaccgaggaaggaagga

SEQ ID NO: 1707 - RNA, 21 nt, Homo sapiens
  source 1..21: mol_type = transcribed RNA
tccttccttcctcggtccact

SEQ ID NO: 1708 - RNA, 22 nt, Homo sapiens
  source 1..22: mol_type = transcribed RNA
tacacaagaaaaccaaggctca

SEQ ID NO: 1709 - RNA, 22 nt, Homo sapiens
  source 1..22: mol_type = transcribed RNA
tgagccttggttttcttgtgta

SEQ ID NO: 1710 - RNA, 21 nt, Homo sapiens
  source 1..21: mol_type = transcribed RNA
taacataatagtgtggattga

SEQ ID NO: 1711 - RNA, 21 nt, Homo sapiens
  source 1..21: mol_type = transcribed RNA
tcaatccacactattatgtta

SEQ ID NO: 1712 - RNA, 21 nt, Homo sapiens
  source 1..21: mol_type = transcribed RNA
tgcttaaccttgccctcgaaa

SEQ ID NO: 1713 - RNA, 21 nt, Homo sapiens
  source 1..21: mol_type = transcribed RNA
tttcgagggcaaggttaagca

SEQ ID NO: 1714 - RNA, 21 nt, Homo sapiens
  source 1..21: mol_type = transcribed RNA
ttggacggtaaggttaagcaa

SEQ ID NO: 1715 - RNA, 21 nt, Homo sapiens
  source 1..21: mol_type = transcribed RNA
ttgcttaaccttaccgtccaa

SEQ ID NO: 1716 - RNA, 21 nt, Homo sapiens
  source 1..21: mol_type = transcribed RNA
aaaagcatcaggaagtaccca

SEQ ID NO: 1717 - RNA, 21 nt, Homo sapiens
  source 1..21: mol_type = transcribed RNA
tgggtacttcctgatgctttt

SEQ ID NO: 1718 - RNA, 21 nt, Homo sapiens
  source 1..21: mol_type = transcribed RNA
gcaggacaggcagaagtggat

SEQ ID NO: 1719 - RNA, 21 nt, Homo sapiens
  source 1..21: mol_type = transcribed RNA
atccacttctgcctgtcctgc

SEQ ID NO: 1720 - RNA, 22 nt, Homo sapiens
  source 1..22: mol_type = transcribed RNA
cagggctggcagtgacatgggt

SEQ ID NO: 1721 - RNA, 22 nt, Homo sapiens
  source 1..22: mol_type = transcribed RNA
acccatgtcactgccagccctg

SEQ ID NO: 1722 - RNA, 22 nt, Homo sapiens
  source 1..22: mol_type = transcribed RNA
atttccctgccattcccttggc

SEQ ID NO: 1723 - RNA, 22 nt, Homo sapiens
  source 1..22: mol_type = transcribed RNA
gccaagggaatggcagggaaat

SEQ ID NO: 1724 - RNA, 22 nt, Homo sapiens
  source 1..22: mol_type = transcribed RNA
tggcggcggtagttatgggctt

SEQ ID NO: 1725 - RNA, 22 nt, Homo sapiens
  source 1..22: mol_type = transcribed RNA
aagcccataactaccgccgcca

SEQ ID NO: 1726 - RNA, 22 nt, Homo sapiens
  source 1..22: mol_type = transcribed RNA
gctccctctagggtcgctcgga

SEQ ID NO: 1727 - RNA, 22 nt, Homo sapiens
  source 1..22: mol_type = transcribed RNA
tccgagcgaccctagagggagc

SEQ ID NO: 1728 - RNA, 22 nt, Homo sapiens
  source 1..22: mol_type = transcribed RNA
tgggaacttagtagaggtttaa

SEQ ID NO: 1729 - RNA, 22 nt, Homo sapiens
  source 1..22: mol_type = transcribed RNA
ttaaacctctactaagttccca

SEQ ID NO: 1730 - RNA, 21 nt, Homo sapiens
  source 1..21: mol_type = transcribed RNA
tggggctagtgatgcaggacg

SEQ ID NO: 1731 - RNA, 21 nt, Homo sapiens
  source 1..21: mol_type = transcribed RNA
cgtcctgcatcactagcccca

SEQ ID NO: 1732 - RNA, 22 nt, Homo sapiens
  source 1..22: mol_type = transcribed RNA
gctgacagcagggctggccgct

SEQ ID NO: 1733 - RNA, 22 nt, Homo sapiens
  source 1..22: mol_type = transcribed RNA
agcggccagccctgctgtcagc

SEQ ID NO: 1734 - RNA, 21 nt, Homo sapiens
  source 1..21: mol_type = transcribed RNA
attggactgctgatggcccgt

SEQ ID NO: 1735 - RNA, 21 nt, Homo sapiens
  source 1..21: mol_type = transcribed RNA
acgggccatcagcagtccaat

SEQ ID NO: 1736 - RNA, 22 nt, Homo sapiens
  source 1..22: mol_type = transcribed RNA
aggccatcagcagtccaatgaa

SEQ ID NO: 1737 - RNA, 22 nt, Homo sapiens
  source 1..22: mol_type = transcribed RNA
ttcattggactgctgatggcct

SEQ ID NO: 1738 - RNA, 22 nt, Homo sapiens
  source 1..22: mol_type = transcribed RNA
ttggacagaaaacacgcaggaa

SEQ ID NO: 1739 - RNA, 22 nt, Homo sapiens
  source 1..22: mol_type = transcribed RNA
ttcctgcgtgttttctgtccaa

SEQ ID NO: 1740 - RNA, 20 nt, Homo sapiens
  source 1..20: mol_type = transcribed RNA
cctgcgtgttttctgtccaa

SEQ ID NO: 1741 - RNA, 20 nt, Homo sapiens
  source 1..20: mol_type = transcribed RNA
ttggacagaaaacacgcagg

SEQ ID NO: 1742 - RNA, 22 nt, Homo sapiens
  source 1..22: mol_type = transcribed RNA
tgagacaggcttatgctgctat

SEQ ID NO: 1743 - RNA, 22 nt, Homo sapiens
  source 1..22: mol_type = transcribed RNA
atagcagcataagcctgtctca

SEQ ID NO: 1744 - RNA, 22 nt, Homo sapiens
  source 1..22: mol_type = transcribed RNA
atagcagcatgaacctgtctca

SEQ ID NO: 1745 - RNA, 22 nt, Homo sapiens
  source 1..22: mol_type = transcribed RNA
tgagacaggttcatgctgctat

SEQ ID NO: 1746 - RNA, 20 nt, Homo sapiens
  source 1..20: mol_type = transcribed RNA
gagacaggttcatgctgcta

SEQ ID NO: 1747 - RNA, 20 nt, Homo sapiens
  source 1..20: mol_type = transcribed RNA
tagcagcatgaacctgtctc

SEQ ID NO: 1748 - RNA, 21 nt, Homo sapiens
  source 1..21: mol_type = transcribed RNA
atagcagcataagcctgtctc

SEQ ID NO: 1749 - RNA, 21 nt, Homo sapiens
  source 1..21: mol_type = transcribed RNA
gagacaggcttatgctgctat

SEQ ID NO: 1750 - RNA, 22 nt, Homo sapiens
  source 1..22: mol_type = transcribed RNA
tgtgtggatcctggaggaggca

SEQ ID NO: 1751 - RNA, 22 nt, Homo sapiens
  source 1..22: mol_type = transcribed RNA
tgcctcctccaggatccacaca

SEQ ID NO: 1752 - RNA, 22 nt, Homo sapiens
  source 1..22: mol_type = transcribed RNA
agacatcaagatcagtcccaaa

SEQ ID NO: 1753 - RNA, 22 nt, Homo sapiens
  source 1..22: mol_type = transcribed RNA
tttgggactgatcttgatgtct

SEQ ID NO: 1754 - RNA, 22 nt, Homo sapiens
  source 1..22: mol_type = transcribed RNA
tttgggactgatcttgatgtct

SEQ ID NO: 1755 - RNA, 22 nt, Homo sapiens
  source 1..22: mol_type = transcribed RNA
agacatcaagatcagtcccaaa

SEQ ID NO: 1756 - RNA, 22 nt, Homo sapiens
  source 1..22: mol_type = transcribed RNA
aaggaaccagaaaatgagaagt

SEQ ID NO: 1757 - RNA, 22 nt, Homo sapiens
  source 1..22: mol_type = transcribed RNA
acttctcattttctggttcctt

SEQ ID NO: 1758 - RNA, 22 nt, Homo sapiens
  source 1..22: mol_type = transcribed RNA
tctggccttgacttgactcttt

SEQ ID NO: 1759 - RNA, 22 nt, Homo sapiens
  source 1..22: mol_type = transcribed RNA
aaagagtcaagtcaaggccaga

SEQ ID NO: 1760 - RNA, 23 nt, Homo sapiens
  source 1..23: mol_type = transcribed RNA
tcaaggccagaggtcccacagca

SEQ ID NO: 1761 - RNA, 23 nt, Homo sapiens
  source 1..23: mol_type = transcribed RNA
tgctgtgggacctctggccttga

SEQ ID NO: 1762 - RNA, 21 nt, Homo sapiens
  source 1..21: mol_type = transcribed RNA
actccagttttagttctcttg

SEQ ID NO: 1763 - RNA, 21 nt, Homo sapiens
  source 1..21: mol_type = transcribed RNA
caagagaactaaaactggagt

SEQ ID NO: 1764 - RNA, 22 nt, Homo sapiens
  source 1..22: mol_type = transcribed RNA
aagagaactgaaagtggagcct

SEQ ID NO: 1765 - RNA, 22 nt, Homo sapiens
  source 1..22: mol_type = transcribed RNA
aggctccactttcagttctctt

SEQ ID NO: 1766 - RNA, 22 nt, Homo sapiens
  source 1..22: mol_type = transcribed RNA
taaggggtgtatggcagatgca

SEQ ID NO: 1767 - RNA, 22 nt, Homo sapiens
  source 1..22: mol_type = transcribed RNA
tgcatctgccatacacccctta

SEQ ID NO: 1768 - RNA, 21 nt, Homo sapiens
  source 1..21: mol_type = transcribed RNA
tttcagataacagtattacat

SEQ ID NO: 1769 - RNA, 21 nt, Homo sapiens
  source 1..21: mol_type = transcribed RNA
atgtaatactgttatctgaaa

SEQ ID NO: 1770 - RNA, 22 nt, Homo sapiens
  source 1..22: mol_type = transcribed RNA
aagcaatactgttacctgaaat

SEQ ID NO: 1771 - RNA, 22 nt, Homo sapiens
  source 1..22: mol_type = transcribed RNA
atttcaggtaacagtattgctt

SEQ ID NO: 1772 - RNA, 22 nt, Homo sapiens
  source 1..22: mol_type = transcribed RNA
tactaactgcagattcaagtga

SEQ ID NO: 1773 - RNA, 22 nt, Homo sapiens
  source 1..22: mol_type = transcribed RNA
tcacttgaatctgcagttagta

SEQ ID NO: 1774 - RNA, 21 nt, Homo sapiens
  source 1..21: mol_type = transcribed RNA
attgcctaacatgtgccagaa

SEQ ID NO: 1775 - RNA, 21 nt, Homo sapiens
  source 1..21: mol_type = transcribed RNA
ttctggcacatgttaggcaat

SEQ ID NO: 1776 - RNA, 22 nt, Homo sapiens
  source 1..22: mol_type = transcribed RNA
tctggtatgtagtaggtaataa

SEQ ID NO: 1777 - RNA, 22 nt, Homo sapiens
  source 1..22: mol_type = transcribed RNA
ttattacctactacataccaga

SEQ ID NO: 1778 - RNA, 22 nt, Homo sapiens
  source 1..22: mol_type = transcribed RNA
agttgcctttttgttcccatgc

SEQ ID NO: 1779 - RNA, 22 nt, Homo sapiens
  source 1..22: mol_type = transcribed RNA
gcatgggaacaaaaaggcaact

SEQ ID NO: 1780 - RNA, 21 nt, Homo sapiens
  source 1..21: mol_type = transcribed RNA
ataggcaccaaaaagcaacaa

SEQ ID NO: 1781 - RNA, 21 nt, Homo sapiens
  source 1..21: mol_type = transcribed RNA
ttgttgctttttggtgcctat

SEQ ID NO: 1782 - RNA, 22 nt, Homo sapiens
  source 1..22: mol_type = transcribed RNA
cctgcaactttgcctgatcaga

SEQ ID NO: 1783 - RNA, 22 nt, Homo sapiens
  source 1..22: mol_type = transcribed RNA
tctgatcaggcaaagttgcagg

SEQ ID NO: 1784 - RNA, 22 nt, Homo sapiens
  source 1..22: mol_type = transcribed RNA
tgatcaggcaaaattgcagact

SEQ ID NO: 1785 - RNA, 22 nt, Homo sapiens
  source 1..22: mol_type = transcribed RNA
agtctgcaattttgcctgatca

SEQ ID NO: 1786 - RNA, 22 nt, Homo sapiens
  source 1..22: mol_type = transcribed RNA
ttgtggctggtcatgaggctaa

SEQ ID NO: 1787 - RNA, 22 nt, Homo sapiens
  source 1..22: mol_type = transcribed RNA
ttagcctcatgaccagccacaa

SEQ ID NO: 1788 - RNA, 21 nt, Homo sapiens
  source 1..21: mol_type = transcribed RNA
ttagtctcatgatcagacaca

SEQ ID NO: 1789 - RNA, 21 nt, Homo sapiens
  source 1..21: mol_type = transcribed RNA
tgtgtctgatcatgagactaa

SEQ ID NO: 1790 - RNA, 22 nt, Homo sapiens
  source 1..22: mol_type = transcribed RNA
aaagatagacaattggctaaat

SEQ ID NO: 1791 - RNA, 22 nt, Homo sapiens
  source 1..22: mol_type = transcribed RNA
atttagccaattgtctatcttt

SEQ ID NO: 1792 - RNA, 22 nt, Homo sapiens
  source 1..22: mol_type = transcribed RNA
ttagccaattgtccatctttag

SEQ ID NO: 1793 - RNA, 22 nt, Homo sapiens
  source 1..22: mol_type = transcribed RNA
ctaaagatggacaattggctaa

SEQ ID NO: 1794 - RNA, 22 nt, Homo sapiens
  source 1..22: mol_type = transcribed RNA
tctgtgagaccaaagaactact

SEQ ID NO: 1795 - RNA, 22 nt, Homo sapiens
  source 1..22: mol_type = transcribed RNA
agtagttctttggtctcacaga

SEQ ID NO: 1796 - RNA, 22 nt, Homo sapiens
  source 1..22: mol_type = transcribed RNA
ttgttctttggtctttcagcca

SEQ ID NO: 1797 - RNA, 22 nt, Homo sapiens
  source 1..22: mol_type = transcribed RNA
tggctgaaagaccaaagaacaa

SEQ ID NO: 1798 - RNA, 23 nt, Homo sapiens
  source 1..23: mol_type = transcribed RNA
cgggctgtccggaggggtcggct

SEQ ID NO: 1799 - RNA, 23 nt, Homo sapiens
  source 1..23: mol_type = transcribed RNA
agccgacccctccggacagcccg

SEQ ID NO: 1800 - RNA, 23 nt, Homo sapiens
  source 1..23: mol_type = transcribed RNA
tctgtattctcctttgcctgcag

SEQ ID NO: 1801 - RNA, 23 nt, Homo sapiens
  source 1..23: mol_type = transcribed RNA
ctgcaggcaaaggagaatacaga

SEQ ID NO: 1802 - RNA, 23 nt, Homo sapiens
  source 1..23: mol_type = transcribed RNA
tacatggatggaaaccttcaagc

SEQ ID NO: 1803 - RNA, 23 nt, Homo sapiens
  source 1..23: mol_type = transcribed RNA
gcttgaaggtttccatccatgta

SEQ ID NO: 1804 - RNA, 22 nt, Homo sapiens
  source 1..22: mol_type = transcribed RNA
tatggaggttctagaccatgtt

SEQ ID NO: 1805 - RNA, 22 nt, Homo sapiens
  source 1..22: mol_type = transcribed RNA
aacatggtctagaacctccata

SEQ ID NO: 1806 - RNA, 22 nt, Homo sapiens
  source 1..22: mol_type = transcribed RNA
gggaccatcctgcctgctgtgg

SEQ ID NO: 1807 - RNA, 22 nt, Homo sapiens
  source 1..22: mol_type = transcribed RNA
ccacagcaggcaggatggtccc

SEQ ID NO: 1808 - RNA, 22 nt, Homo sapiens
  source 1..22: mol_type = transcribed RNA
tcagcaggcaggctggtgcagc

SEQ ID NO: 1809 - RNA, 22 nt, Homo sapiens
  source 1..22: mol_type = transcribed RNA
gctgcaccagcctgcctgctga

SEQ ID NO: 1810 - RNA, 22 nt, Homo sapiens
  source 1..22: mol_type = transcribed RNA
tcacctgacctcccatgcctgt

SEQ ID NO: 1811 - RNA, 22 nt, Homo sapiens
  source 1..22: mol_type = transcribed RNA
acaggcatgggaggtcaggtga

SEQ ID NO: 1812 - RNA, 22 nt, Homo sapiens
  source 1..22: mol_type = transcribed RNA
caggcacgggagctcaggtgag

SEQ ID NO: 1813 - RNA, 22 nt, Homo sapiens
  source 1..22: mol_type = transcribed RNA
ctcacctgagctcccgtgcctg

SEQ ID NO: 1814 - RNA, 21 nt, Homo sapiens
  source 1..21: mol_type = transcribed RNA
tgagtgttgtctacgagggca

SEQ ID NO: 1815 - RNA, 21 nt, Homo sapiens
  source 1..21: mol_type = transcribed RNA
tgccctcgtagacaacactca

SEQ ID NO: 1816 - RNA, 21 nt, Homo sapiens
  source 1..21: mol_type = transcribed RNA
actgacaggagagcattttga

SEQ ID NO: 1817 - RNA, 21 nt, Homo sapiens
  source 1..21: mol_type = transcribed RNA
tcaaaatgctctcctgtcagt

SEQ ID NO: 1818 - RNA, 22 nt, Homo sapiens
  source 1..22: mol_type = transcribed RNA
tgacctgggactcggacagctg

SEQ ID NO: 1819 - RNA, 22 nt, Homo sapiens
  source 1..22: mol_type = transcribed RNA
cagctgtccgagtcccaggtca

SEQ ID NO: 1820 - RNA, 22 nt, Homo sapiens
  source 1..22: mol_type = transcribed RNA
tctcaggagtaaagacagagtt

SEQ ID NO: 1821 - RNA, 22 nt, Homo sapiens
  source 1..22: mol_type = transcribed RNA
aactctgtctttactcctgaga

SEQ ID NO: 1822 - RNA, 22 nt, Homo sapiens
  source 1..22: mol_type = transcribed RNA
aactctgtcttcactcatgagt

SEQ ID NO: 1823 - RNA, 22 nt, Homo sapiens
  source 1..22: mol_type = transcribed RNA
actcatgagtgaagacagagtt

SEQ ID NO: 1824 - RNA, 22 nt, Homo sapiens
  source 1..22: mol_type = transcribed RNA
tggggcggagcttccggaggcc

SEQ ID NO: 1825 - RNA, 22 nt, Homo sapiens
  source 1..22: mol_type = transcribed RNA
ggcctccggaagctccgcccca

SEQ ID NO: 1826 - RNA, 22 nt, Homo sapiens
  source 1..22: mol_type = transcribed RNA
caatcagcaagtatactgccct

SEQ ID NO: 1827 - RNA, 22 nt, Homo sapiens
  source 1..22: mol_type = transcribed RNA
agggcagtatacttgctgattg

SEQ ID NO: 1828 - RNA, 22 nt, Homo sapiens
  source 1..22: mol_type = transcribed RNA
tggcagtgtcttagctggttgt

SEQ ID NO: 1829 - RNA, 22 nt, Homo sapiens
  source 1..22: mol_type = transcribed RNA
acaaccagctaagacactgcca

SEQ ID NO: 1830 - RNA, 22 nt, Homo sapiens
  source 1..22: mol_type = transcribed RNA
ccaatattggctgtgctgctcc

SEQ ID NO: 1831 - RNA, 22 nt, Homo sapiens
  source 1..22: mol_type = transcribed RNA
ggagcagcacagccaatattgg

SEQ ID NO: 1832 - RNA, 21 nt, Homo sapiens
  source 1..21: mol_type = transcribed RNA
tagcagcacagaaatattggc

SEQ ID NO: 1833 - RNA, 21 nt, Homo sapiens
  source 1..21: mol_type = transcribed RNA
gccaatatttctgtgctgcta

SEQ ID NO: 1834 - RNA, 21 nt, Homo sapiens
  source 1..21: mol_type = transcribed RNA
taattttatgtataagctagt

SEQ ID NO: 1835 - RNA, 21 nt, Homo sapiens
  source 1..21: mol_type = transcribed RNA
actagcttatacataaaatta

SEQ ID NO: 1836 - RNA, 22 nt, Homo sapiens
  source 1..22: mol_type = transcribed RNA
gagcttattcataaaagtgcag

SEQ ID NO: 1837 - RNA, 22 nt, Homo sapiens
  source 1..22: mol_type = transcribed RNA
ctgcacttttatgaataagctc

SEQ ID NO: 1838 - RNA, 22 nt, Homo sapiens
  source 1..22: mol_type = transcribed RNA
aagacgggaggaaagaagggag

SEQ ID NO: 1839 - RNA, 22 nt, Homo sapiens
  source 1..22: mol_type = transcribed RNA
ctcccttctttcctcccgtctt

SEQ ID NO: 1840 - RNA, 22 nt, Homo sapiens
  source 1..22: mol_type = transcribed RNA
cagtggttttaccctatggtag

SEQ ID NO: 1841 - RNA, 22 nt, Homo sapiens
  source 1..22: mol_type = transcribed RNA
ctaccatagggtaaaaccactg

SEQ ID NO: 1842 - RNA, 22 nt, Homo sapiens
  source 1..22: mol_type = transcribed RNA
attctaatttctccacgtcttt

SEQ ID NO: 1843 - RNA, 22 nt, Homo sapiens
  source 1..22: mol_type = transcribed RNA
aaagacgtggagaaattagaat

SEQ ID NO: 1844 - RNA, 22 nt, Homo sapiens
  source 1..22: mol_type = transcribed RNA
aaccagcaccccaactttggac

SEQ ID NO: 1845 - RNA, 22 nt, Homo sapiens
  source 1..22: mol_type = transcribed RNA
gtccaaagttggggtgctggtt

SEQ ID NO: 1846 - RNA, 24 nt, Homo sapiens
  source 1..24: mol_type = transcribed RNA
aaagacataggatagagtcacctc

SEQ ID NO: 1847 - RNA, 24 nt, Homo sapiens
  source 1..24: mol_type = transcribed RNA
gaggtgactctatcctatgtcttt

SEQ ID NO: 1848 - RNA, 22 nt, Homo sapiens
  source 1..22: mol_type = transcribed RNA
taactggttgaacaactgaacc

SEQ ID NO: 1849 - RNA, 22 nt, Homo sapiens
  source 1..22: mol_type = transcribed RNA
ggttcagttgttcaaccagtta

SEQ ID NO: 1850 - RNA, 20 nt, Homo sapiens
  source 1..20: mol_type = transcribed RNA
cgtgccacccttttccccag

SEQ ID NO: 1851 - RNA, 20 nt, Homo sapiens
  source 1..20: mol_type = transcribed RNA
ctggggaaaagggtggcacg

SEQ ID NO: 1852 - RNA, 17 nt, Homo sapiens
  source 1..17: mol_type = transcribed RNA
gtggggccaggcggtgg

SEQ ID NO: 1853 - RNA, 17 nt, Homo sapiens
  source 1..17: mol_type = transcribed RNA
ccaccgcctggccccac

SEQ ID NO: 1854 - RNA, 22 nt, Homo sapiens
  source 1..22: mol_type = transcribed RNA
aaaagctgggttgagagggcaa

SEQ ID NO: 1855 - RNA, 22 nt, Homo sapiens
  source 1..22: mol_type = transcribed RNA
ttgccctctcaacccagctttt

SEQ ID NO: 1856 - RNA, 22 nt, Homo sapiens
  source 1..22: mol_type = transcribed RNA
ggtccagaggggagataggttc

SEQ ID NO: 1857 - RNA, 22 nt, Homo sapiens
  source 1..22: mol_type = transcribed RNA
gaacctatctcccctctggacc

SEQ ID NO: 1858 - RNA, 23 nt, Homo sapiens
  source 1..23: mol_type = transcribed RNA
tagccttcagatcttggtgtttt

SEQ ID NO: 1859 - RNA, 23 nt, Homo sapiens
  source 1..23: mol_type = transcribed RNA
aaaacaccaagatctgaaggcta

SEQ ID NO: 1860 - RNA, 23 nt, Homo sapiens
  source 1..23: mol_type = transcribed RNA
ccacttggatctgaaggctgccc

SEQ ID NO: 1861 - RNA, 23 nt, Homo sapiens
  source 1..23: mol_type = transcribed RNA
gggcagccttcagatccaagtgg

SEQ ID NO: 1862 - RNA, 22 nt, Homo sapiens
  source 1..22: mol_type = transcribed RNA
tgtgcgcagggagacctctccc

SEQ ID NO: 1863 - RNA, 22 nt, Homo sapiens
  source 1..22: mol_type = transcribed RNA
gggagaggtctccctgcgcaca

SEQ ID NO: 1864 - RNA, 22 nt, Homo sapiens
  source 1..22: mol_type = transcribed RNA
tgtctactactggagacactgg

SEQ ID NO: 1865 - RNA, 22 nt, Homo sapiens
  source 1..22: mol_type = transcribed RNA
ccagtgtctccagtagtagaca

SEQ ID NO: 1866 - RNA, 21 nt, Homo sapiens
  source 1..21: mol_type = transcribed RNA
aaggcagggcccccgctcccc

SEQ ID NO: 1867 - RNA, 21 nt, Homo sapiens
  source 1..21: mol_type = transcribed RNA
ggggagcgggggccctgcctt

SEQ ID NO: 1868 - RNA, 21 nt, Homo sapiens
  source 1..21: mol_type = transcribed RNA
ctgactgttgccgtcctccag

SEQ ID NO: 1869 - RNA, 21 nt, Homo sapiens
  source 1..21: mol_type = transcribed RNA
ctggaggacggcaacagtcag

SEQ ID NO: 1870 - RNA, 25 nt, Homo sapiens
  source 1..25: mol_type = transcribed RNA
aaaaaccacaattacttttgcacca

SEQ ID NO: 1871 - RNA, 25 nt, Homo sapiens
  source 1..25: mol_type = transcribed RNA
tggtgcaaaagtaattgtggttttt

SEQ ID NO: 1872 - RNA, 23 nt, Homo sapiens
  source 1..23: mol_type = transcribed RNA
caaaaaccgcaattacttttgca

SEQ ID NO: 1873 - RNA, 23 nt, Homo sapiens
  source 1..23: mol_type = transcribed RNA
tgcaaaagtaattgcggtttttg

SEQ ID NO: 1874 - RNA, 22 nt, Homo sapiens
  source 1..22: mol_type = transcribed RNA
atgtgcctgagggagtaagaca

SEQ ID NO: 1875 - RNA, 22 nt, Homo sapiens
  source 1..22: mol_type = transcribed RNA
tgtcttactccctcaggcacat

SEQ ID NO: 1876 - RNA, 20 nt, Homo sapiens
  source 1..20: mol_type = transcribed RNA
tcttactccctcaggcactg

SEQ ID NO: 1877 - RNA, 20 nt, Homo sapiens
  source 1..20: mol_type = transcribed RNA
cagtgcctgagggagtaaga

SEQ ID NO: 1878 - RNA, 22 nt, Homo sapiens
  source 1..22: mol_type = transcribed RNA
agacacatttggagagggaccc

SEQ ID NO: 1879 - RNA, 22 nt, Homo sapiens
  source 1..22: mol_type = transcribed RNA
gggtccctctccaaatgtgtct

SEQ ID NO: 1880 - RNA, 22 nt, Homo sapiens
  source 1..22: mol_type = transcribed RNA
ggttccctctccaaatgtgtct

SEQ ID NO: 1881 - RNA, 22 nt, Homo sapiens
  source 1..22: mol_type = transcribed RNA
agacacatttggagagggaacc

SEQ ID NO: 1882 - RNA, 21 nt, Homo sapiens
  source 1..21: mol_type = transcribed RNA
aaaatttctttcactacttag

SEQ ID NO: 1883 - RNA, 21 nt, Homo sapiens
  source 1..21: mol_type = transcribed RNA
ctaagtagtgaaagaaatttt

SEQ ID NO: 1884 - RNA, 21 nt, Homo sapiens
  source 1..21: mol_type = transcribed RNA
ttagtgaaggctattttaatt

SEQ ID NO: 1885 - RNA, 21 nt, Homo sapiens
  source 1..21: mol_type = transcribed RNA
aattaaaatagccttcactaa

SEQ ID NO: 1886 - RNA, 20 nt, Homo sapiens
  source 1..20: mol_type = transcribed RNA
actgtaaacgctttctgatg

SEQ ID NO: 1887 - RNA, 20 nt, Homo sapiens
  source 1..20: mol_type = transcribed RNA
catcagaaagcgtttacagt

SEQ ID NO: 1888 - RNA, 22 nt, Homo sapiens
  source 1..22: mol_type = transcribed RNA
gcatgtgatgaagcaaatcagt

SEQ ID NO: 1889 - RNA, 22 nt, Homo sapiens
  source 1..22: mol_type = transcribed RNA
actgatttgcttcatcacatgc

SEQ ID NO: 1890 - RNA, 24 nt, Homo sapiens
  source 1..24: mol_type = transcribed RNA
caaagtgatgagtaatactggctg

SEQ ID NO: 1891 - RNA, 24 nt, Homo sapiens
  source 1..24: mol_type = transcribed RNA
cagccagtattactcatcactttg

SEQ ID NO: 1892 - RNA, 20 nt, Homo sapiens
  source 1..20: mol_type = transcribed RNA
gaatcggaaaggaggcgccg

SEQ ID NO: 1893 - RNA, 20 nt, Homo sapiens
  source 1..20: mol_type = transcribed RNA
cggcgcctcctttccgattc

SEQ ID NO: 1894 - RNA, 21 nt, Homo sapiens
  source 1..21: mol_type = transcribed RNA
ttgtgaagaaagaaattctta

SEQ ID NO: 1895 - RNA, 21 nt, Homo sapiens
  source 1..21: mol_type = transcribed RNA
taagaatttctttcttcacaa

SEQ ID NO: 1896 - RNA, 22 nt, Homo sapiens
  source 1..22: mol_type = transcribed RNA
aggaggcatcttgagaaatgga

SEQ ID NO: 1897 - RNA, 22 nt, Homo sapiens
  source 1..22: mol_type = transcribed RNA
tccatttctcaagatgcctcct

SEQ ID NO: 1898 - RNA, 24 nt, Homo sapiens
  source 1..24: mol_type = transcribed RNA
acaaaaaaaaaagcccaacccttc

SEQ ID NO: 1899 - RNA, 24 nt, Homo sapiens
  source 1..24: mol_type = transcribed RNA
gaagggttgggcttttttttttgt

SEQ ID NO: 1900 - RNA, 22 nt, Homo sapiens
  source 1..22: mol_type = transcribed RNA
tgttgtacttttttttttgttc

SEQ ID NO: 1901 - RNA, 22 nt, Homo sapiens
  source 1..22: mol_type = transcribed RNA
gaacaaaaaaaaaagtacaaca

SEQ ID NO: 1902 - RNA, 21 nt, Homo sapiens
  source 1..21: mol_type = transcribed RNA
tctctcggctcctcgcggctc

SEQ ID NO: 1903 - RNA, 21 nt, Homo sapiens
  source 1..21: mol_type = transcribed RNA
gagccgcgaggagccgagaga

SEQ ID NO: 1904 - RNA, 23 nt, Homo sapiens
  source 1..23: mol_type = transcribed RNA
cgagggcatttcatgatgcaggc

SEQ ID NO: 1905 - RNA, 23 nt, Homo sapiens
  source 1..23: mol_type = transcribed RNA
gcctgcatcatgaaatgccctcg

SEQ ID NO: 1906 - RNA, 22 nt, Homo sapiens
  source 1..22: mol_type = transcribed RNA
atgaagtgcactcatgatatgt

SEQ ID NO: 1907 - RNA, 22 nt, Homo sapiens
  source 1..22: mol_type = transcribed RNA
acatatcatgagtgcacttcat

SEQ ID NO: 1908 - RNA, 22 nt, Homo sapiens
  source 1..22: mol_type = transcribed RNA
tgtctacattaatgaaaagagc

SEQ ID NO: 1909 - RNA, 22 nt, Homo sapiens
  source 1..22: mol_type = transcribed RNA
gctcttttcattaatgtagaca

SEQ ID NO: 1910 - RNA, 22 nt, Homo sapiens
  source 1..22: mol_type = transcribed RNA
tcaccctgcatcccgcacccag

SEQ ID NO: 1911 - RNA, 22 nt, Homo sapiens
  source 1..22: mol_type = transcribed RNA
ctgggtgcgggatgcagggtga

SEQ ID NO: 1912 - RNA, 22 nt, Homo sapiens
  source 1..22: mol_type = transcribed RNA
gtgggctgggctgggctgggcc

SEQ ID NO: 1913 - RNA, 22 nt, Homo sapiens
  source 1..22: mol_type = transcribed RNA
ggcccagcccagcccagcccac

SEQ ID NO: 1914 - RNA, 20 nt, Homo sapiens
  source 1..20: mol_type = transcribed RNA
cgcgggtcggggtctgcagg

SEQ ID NO: 1915 - RNA, 20 nt, Homo sapiens
  source 1..20: mol_type = transcribed RNA
cctgcagaccccgacccgcg

SEQ ID NO: 1916 - RNA, 21 nt, Homo sapiens
  source 1..21: mol_type = transcribed RNA
tcacctgagctcccgtgcctg

SEQ ID NO: 1917 - RNA, 21 nt, Homo sapiens
  source 1..21: mol_type = transcribed RNA
caggcacgggagctcaggtga

SEQ ID NO: 1918 - RNA, 20 nt, Homo sapiens
  source 1..20: mol_type = transcribed RNA
aggcatgggaggtcaggtga

SEQ ID NO: 1919 - RNA, 20 nt, Homo sapiens
  source 1..20: mol_type = transcribed RNA
tcacctgacctcccatgcct

SEQ ID NO: 1920 - RNA, 23 nt, Homo sapiens
  source 1..23: mol_type = transcribed RNA
catcagcaccctatgtcctttct

SEQ ID NO: 1921 - RNA, 23 nt, Homo sapiens
  source 1..23: mol_type = transcribed RNA
agaaaggacatagggtgctgatg

SEQ ID NO: 1922 - RNA, 22 nt, Homo sapiens
  source 1..22: mol_type = transcribed RNA
aaagacatagttgcaagatggg

SEQ ID NO: 1923 - RNA, 22 nt, Homo sapiens
  source 1..22: mol_type = transcribed RNA
cccatcttgcaactatgtcttt

SEQ ID NO: 1924 - RNA, 22 nt, Homo sapiens
  source 1..22: mol_type = transcribed RNA
tttgtgacctggtccactaacc

SEQ ID NO: 1925 - RNA, 22 nt, Homo sapiens
  source 1..22: mol_type = transcribed RNA
ggttagtggaccaggtcacaaa

SEQ ID NO: 1926 - RNA, 22 nt, Homo sapiens
  source 1..22: mol_type = transcribed RNA
gatggttgaccagagagcacac

SEQ ID NO: 1927 - RNA, 22 nt, Homo sapiens
  source 1..22: mol_type = transcribed RNA
gtgtgctctctggtcaaccatc

SEQ ID NO: 1928 - RNA, 20 nt, Homo sapiens
  source 1..20: mol_type = transcribed RNA
aaaagctgggttgagagggt

SEQ ID NO: 1929 - RNA, 20 nt, Homo sapiens
  source 1..20: mol_type = transcribed RNA
accctctcaacccagctttt

SEQ ID NO: 1930 - RNA, 21 nt, Homo sapiens
  source 1..21: mol_type = transcribed RNA
cacaaggtattggtattacct

SEQ ID NO: 1931 - RNA, 21 nt, Homo sapiens
  source 1..21: mol_type = transcribed RNA
aggtaataccaataccttgtg

SEQ ID NO: 1932 - RNA, 22 nt, Homo sapiens
  source 1..22: mol_type = transcribed RNA
tagtaccagtaccttgtgttca

SEQ ID NO: 1933 - RNA, 22 nt, Homo sapiens
  source 1..22: mol_type = transcribed RNA
tgaacacaaggtactggtacta

SEQ ID NO: 1934 - RNA, 22 nt, Homo sapiens
  source 1..22: mol_type = transcribed RNA
agtattctgtaccagggaaggt

SEQ ID NO: 1935 - RNA, 22 nt, Homo sapiens
  source 1..22: mol_type = transcribed RNA
accttccctggtacagaatact

SEQ ID NO: 1936 - RNA, 22 nt, Homo sapiens
  source 1..22: mol_type = transcribed RNA
tggcagtgtattgttagctggt

SEQ ID NO: 1937 - RNA, 22 nt, Homo sapiens
  source 1..22: mol_type = transcribed RNA
accagctaacaatacactgcca

SEQ ID NO: 1938 - RNA, 22 nt, Homo sapiens
  source 1..22: mol_type = transcribed RNA
tatacaagggcaagctctctgt

SEQ ID NO: 1939 - RNA, 22 nt, Homo sapiens
  source 1..22: mol_type = transcribed RNA
acagagagcttgcccttgtata

SEQ ID NO: 1940 - RNA, 22 nt, Homo sapiens
  source 1..22: mol_type = transcribed RNA
agcgaggttgccctttgtatat

SEQ ID NO: 1941 - RNA, 22 nt, Homo sapiens
  source 1..22: mol_type = transcribed RNA
atatacaaagggcaacctcgct

SEQ ID NO: 1942 - RNA, 22 nt, Homo sapiens
  source 1..22: mol_type = transcribed RNA
caatcactaactccactgccat

SEQ ID NO: 1943 - RNA, 22 nt, Homo sapiens
  source 1..22: mol_type = transcribed RNA
atggcagtggagttagtgattg

SEQ ID NO: 1944 - RNA, 23 nt, Homo sapiens
  source 1..23: mol_type = transcribed RNA
taggcagtgtcattagctgattg

SEQ ID NO: 1945 - RNA, 23 nt, Homo sapiens
  source 1..23: mol_type = transcribed RNA
caatcagctaatgacactgccta

SEQ ID NO: 1946 - RNA, 22 nt, Homo sapiens
  source 1..22: mol_type = transcribed RNA
cagccacaactaccctgccact

SEQ ID NO: 1947 - RNA, 22 nt, Homo sapiens
  source 1..22: mol_type = transcribed RNA
agtggcagggtagttgtggctg

SEQ ID NO: 1948 - RNA, 22 nt, Homo sapiens
  source 1..22: mol_type = transcribed RNA
aggcagtgtattgttagctggc

SEQ ID NO: 1949 - RNA, 22 nt, Homo sapiens
  source 1..22: mol_type = transcribed RNA
gccagctaacaatacactgcct

SEQ ID NO: 1950 - RNA, 22 nt, Homo sapiens
  source 1..22: mol_type = transcribed RNA
aatcactaaccacacggccagg

SEQ ID NO: 1951 - RNA, 22 nt, Homo sapiens
  source 1..22: mol_type = transcribed RNA
cctggccgtgtggttagtgatt

SEQ ID NO: 1952 - RNA, 23 nt, Homo sapiens
  source 1..23: mol_type = transcribed RNA
aggcagtgtagttagctgattgc

SEQ ID NO: 1953 - RNA, 23 nt, Homo sapiens
  source 1..23: mol_type = transcribed RNA
gcaatcagctaactacactgcct

SEQ ID NO: 1954 - RNA, 20 nt, Homo sapiens
  source 1..20: mol_type = transcribed RNA
gtccgctcggcggtggccca

SEQ ID NO: 1955 - RNA, 20 nt, Homo sapiens
  source 1..20: mol_type = transcribed RNA
tgggccaccgccgagcggac

SEQ ID NO: 1956 - RNA, 23 nt, Homo sapiens
  source 1..23: mol_type = transcribed RNA
gaacgcctgttcttgccaggtgg

SEQ ID NO: 1957 - RNA, 23 nt, Homo sapiens
  source 1..23: mol_type = transcribed RNA
ccacctggcaagaacaggcgttc

SEQ ID NO: 1958 - RNA, 19 nt, Homo sapiens
  source 1..19: mol_type = transcribed RNA
aagtgtgcagggcactggt

SEQ ID NO: 1959 - RNA, 19 nt, Homo sapiens
  source 1..19: mol_type = transcribed RNA
accagtgccctgcacactt

SEQ ID NO: 1960 - RNA, 21 nt, Homo sapiens
  source 1..21: mol_type = transcribed RNA
aggggtgctatctgtgattga

SEQ ID NO: 1961 - RNA, 21 nt, Homo sapiens
  source 1..21: mol_type = transcribed RNA
tcaatcacagatagcacccct

SEQ ID NO: 1962 - RNA, 22 nt, Homo sapiens
  source 1..22: mol_type = transcribed RNA
ctttcagtcagatgtttgctgc

SEQ ID NO: 1963 - RNA, 22 nt, Homo sapiens
  source 1..22: mol_type = transcribed RNA
gcagcaaacatctgactgaaag

SEQ ID NO: 1964 - RNA, 22 nt, Homo sapiens
  source 1..22: mol_type = transcribed RNA
tgtaaacatccccgactggaag

SEQ ID NO: 1965 - RNA, 22 nt, Homo sapiens
  source 1..22: mol_type = transcribed RNA
cttccagtcggggatgtttaca

SEQ ID NO: 1966 - RNA, 22 nt, Homo sapiens
  source 1..22: mol_type = transcribed RNA
tgtaaacatcctcgactggaag

SEQ ID NO: 1967 - RNA, 22 nt, Homo sapiens
  source 1..22: mol_type = transcribed RNA
cttccagtcgaggatgtttaca

SEQ ID NO: 1968 - RNA, 22 nt, Homo sapiens
  source 1..22: mol_type = transcribed RNA
agaagtaattgcggttttgcca

SEQ ID NO: 1969 - RNA, 22 nt, Homo sapiens
  source 1..22: mol_type = transcribed RNA
tggcaaaaccgcaattacttct

SEQ ID NO: 1970 - RNA, 22 nt, Homo sapiens
  source 1..22: mol_type = transcribed RNA
caaaactggcaattacttttgc

SEQ ID NO: 1971 - RNA, 22 nt, Homo sapiens
  source 1..22: mol_type = transcribed RNA
gcaaaagtaattgccagttttg

SEQ ID NO: 1972 - RNA, 22 nt, Homo sapiens
  source 1..22: mol_type = transcribed RNA
aaaagtaattgcgagttttacc

SEQ ID NO: 1973 - RNA, 22 nt, Homo sapiens
  source 1..22: mol_type = transcribed RNA
ggtaaaactcgcaattactttt

SEQ ID NO: 1974 - RNA, 22 nt, Homo sapiens
  source 1..22: mol_type = transcribed RNA
caagaacctcagttgcttttgt

SEQ ID NO: 1975 - RNA, 22 nt, Homo sapiens
  source 1..22: mol_type = transcribed RNA
acaaaagcaactgaggttcttg

SEQ ID NO: 1976 - RNA, 22 nt, Homo sapiens
  source 1..22: mol_type = transcribed RNA
caaaaatctcaattacttttgc

SEQ ID NO: 1977 - RNA, 22 nt, Homo sapiens
  source 1..22: mol_type = transcribed RNA
gcaaaagtaattgagatttttg

SEQ ID NO: 1978 - RNA, 22 nt, Homo sapiens
  source 1..22: mol_type = transcribed RNA
caaaaaccacagtttcttttgc

SEQ ID NO: 1979 - RNA, 22 nt, Homo sapiens
  source 1..22: mol_type = transcribed RNA
gcaaaagaaactgtggtttttg

SEQ ID NO: 1980 - RNA, 22 nt, Homo sapiens
  source 1..22: mol_type = transcribed RNA
aaaagtaattgtggtttttgcc

SEQ ID NO: 1981 - RNA, 22 nt, Homo sapiens
  source 1..22: mol_type = transcribed RNA
ggcaaaaaccacaattactttt

SEQ ID NO: 1982 - RNA, 21 nt, Homo sapiens
  source 1..21: mol_type = transcribed RNA
tgacaactatggatgagctct

SEQ ID NO: 1983 - RNA, 21 nt, Homo sapiens
  source 1..21: mol_type = transcribed RNA
agagctcatccatagttgtca

SEQ ID NO: 1984 - RNA, 21 nt, Homo sapiens
  source 1..21: mol_type = transcribed RNA
aacaggtgactggttagacaa

SEQ ID NO: 1985 - RNA, 21 nt, Homo sapiens
  source 1..21: mol_type = transcribed RNA
ttgtctaaccagtcacctgtt

SEQ ID NO: 1986 - RNA, 21 nt, Homo sapiens
  source 1..21: mol_type = transcribed RNA
aaaacggtgagattttgtttt

SEQ ID NO: 1987 - RNA, 21 nt, Homo sapiens
  source 1..21: mol_type = transcribed RNA
aaaacaaaatctcaccgtttt

SEQ ID NO: 1988 - RNA, 21 nt, Homo sapiens
  source 1..21: mol_type = transcribed RNA
gctagtcctgactcagccagt

SEQ ID NO: 1989 - RNA, 21 nt, Homo sapiens
  source 1..21: mol_type = transcribed RNA
actggctgagtcaggactagc

SEQ ID NO: 1990 - RNA, 21 nt, Homo sapiens
  source 1..21: mol_type = transcribed RNA
agggtaagctgaacctctgat

SEQ ID NO: 1991 - RNA, 21 nt, Homo sapiens
  source 1..21: mol_type = transcribed RNA
atcagaggttcagcttaccct

SEQ ID NO: 1992 - RNA, 22 nt, Homo sapiens
  source 1..22: mol_type = transcribed RNA
atattaccattagctcatcttt

SEQ ID NO: 1993 - RNA, 22 nt, Homo sapiens
  source 1..22: mol_type = transcribed RNA
aaagatgagctaatggtaatat

SEQ ID NO: 1994 - RNA, 22 nt, Homo sapiens
  source 1..22: mol_type = transcribed RNA
gatgagctcattgtaatatgag

SEQ ID NO: 1995 - RNA, 22 nt, Homo sapiens
  source 1..22: mol_type = transcribed RNA
ctcatattacaatgagctcatc

SEQ ID NO: 1996 - RNA, 19 nt, Homo sapiens
  source 1..19: mol_type = transcribed RNA
aggttgacatacgtttccc

SEQ ID NO: 1997 - RNA, 19 nt, Homo sapiens
  source 1..19: mol_type = transcribed RNA
gggaaacgtatgtcaacct

SEQ ID NO: 1998 - RNA, 20 nt, Homo sapiens
  source 1..20: mol_type = transcribed RNA
atgtataaatgtatacacac

SEQ ID NO: 1999 - RNA, 20 nt, Homo sapiens
  source 1..20: mol_type = transcribed RNA
gtgtgtatacatttatacat

SEQ ID NO: 2000 - RNA, 24 nt, Homo sapiens
  source 1..24: mol_type = transcribed RNA
ctgaagtgatgtgtaactgatcag

SEQ ID NO: 2001 - RNA, 24 nt, Homo sapiens
  source 1..24: mol_type = transcribed RNA
ctgatcagttacacatcacttcag

SEQ ID NO: 2002 - RNA, 22 nt, Homo sapiens
  source 1..22: mol_type = transcribed RNA
aagatgtggaaaaattggaatc

SEQ ID NO: 2003 - RNA, 22 nt, Homo sapiens
  source 1..22: mol_type = transcribed RNA
gattccaatttttccacatctt

SEQ ID NO: 2004 - RNA, 21 nt, Homo sapiens
  source 1..21: mol_type = transcribed RNA
tagataaaatattggtacctg

SEQ ID NO: 2005 - RNA, 21 nt, Homo sapiens
  source 1..21: mol_type = transcribed RNA
caggtaccaatattttatcta

SEQ ID NO: 2006 - RNA, 21 nt, Homo sapiens
  source 1..21: mol_type = transcribed RNA
cttcttgtgctctaggattgt

SEQ ID NO: 2007 - RNA, 21 nt, Homo sapiens
  source 1..21: mol_type = transcribed RNA
acaatcctagagcacaagaag

SEQ ID NO: 2008 - RNA, 22 nt, Homo sapiens
  source 1..22: mol_type = transcribed RNA
tatgcattgtatttttaggtcc

SEQ ID NO: 2009 - RNA, 22 nt, Homo sapiens
  source 1..22: mol_type = transcribed RNA
ggacctaaaaatacaatgcata

SEQ ID NO: 2010 - RNA, 21 nt, Homo sapiens
  source 1..21: mol_type = transcribed RNA
tttccataggtgatgagtcac

SEQ ID NO: 2011 - RNA, 21 nt, Homo sapiens
  source 1..21: mol_type = transcribed RNA
gtgactcatcacctatggaaa

SEQ ID NO: 2012 - RNA, 21 nt, Homo sapiens
  source 1..21: mol_type = transcribed RNA
ttggccacaatgggttagaac

SEQ ID NO: 2013 - RNA, 21 nt, Homo sapiens
  source 1..21: mol_type = transcribed RNA
gttctaacccattgtggccaa

SEQ ID NO: 2014 - RNA, 22 nt, Homo sapiens
  source 1..22: mol_type = transcribed RNA
tgtgtcactcgatgaccactgt

SEQ ID NO: 2015 - RNA, 22 nt, Homo sapiens
  source 1..22: mol_type = transcribed RNA
acagtggtcatcgagtgacaca

SEQ ID NO: 2016 - RNA, 23 nt, Homo sapiens
  source 1..23: mol_type = transcribed RNA
acttacagacaagagccttgctc

SEQ ID NO: 2017 - RNA, 23 nt, Homo sapiens
  source 1..23: mol_type = transcribed RNA
gagcaaggctcttgtctgtaagt

SEQ ID NO: 2018 - RNA, 19 nt, Homo sapiens
  source 1..19: mol_type = transcribed RNA
aggctgcggaattcaggac

SEQ ID NO: 2019 - RNA, 19 nt, Homo sapiens
  source 1..19: mol_type = transcribed RNA
gtcctgaattccgcagcct

SEQ ID NO: 2020 - RNA, 23 nt, Homo sapiens
  source 1..23: mol_type = transcribed RNA
taaatcccatggtgccttctcct

SEQ ID NO: 2021 - RNA, 23 nt, Homo sapiens
  source 1..23: mol_type = transcribed RNA
aggagaaggcaccatgggattta

SEQ ID NO: 2022 - RNA, 21 nt, Homo sapiens
  source 1..21: mol_type = transcribed RNA
aaactactgaaaatcaaagat

SEQ ID NO: 2023 - RNA, 21 nt, Homo sapiens
  source 1..21: mol_type = transcribed RNA
atctttgattttcagtagttt

SEQ ID NO: 2024 - RNA, 21 nt, Homo sapiens
  source 1..21: mol_type = transcribed RNA
gttcaaatccagatctataac

SEQ ID NO: 2025 - RNA, 21 nt, Homo sapiens
  source 1..21: mol_type = transcribed RNA
gttatagatctggatttgaac

SEQ ID NO: 2026 - RNA, 19 nt, Homo sapiens
  source 1..19: mol_type = transcribed RNA
ccggttccagtccctggag

SEQ ID NO: 2027 - RNA, 19 nt, Homo sapiens
  source 1..19: mol_type = transcribed RNA
ctccagggactggaaccgg

SEQ ID NO: 2028 - RNA, 20 nt, Homo sapiens
  source 1..20: mol_type = transcribed RNA
agggtgtttctctcatctct

SEQ ID NO: 2029 - RNA, 20 nt, Homo sapiens
  source 1..20: mol_type = transcribed RNA
agagatgagagaaacaccct

SEQ ID NO: 2030 - RNA, 24 nt, Homo sapiens
  source 1..24: mol_type = transcribed RNA
gacctggacatgtttgtgcccagt

SEQ ID NO: 2031 - RNA, 24 nt, Homo sapiens
  source 1..24: mol_type = transcribed RNA
actgggcacaaacatgtccaggtc

SEQ ID NO: 2032 - RNA, 20 nt, Homo sapiens
  source 1..20: mol_type = transcribed RNA
atggagatagatatagaaat

SEQ ID NO: 2033 - RNA, 20 nt, Homo sapiens
  source 1..20: mol_type = transcribed RNA
atttctatatctatctccat

SEQ ID NO: 2034 - RNA, 19 nt, Homo sapiens
  source 1..19: mol_type = transcribed RNA
agctgtctgaaaatgtctt

SEQ ID NO: 2035 - RNA, 19 nt, Homo sapiens
  source 1..19: mol_type = transcribed RNA
aagacattttcagacagct

SEQ ID NO: 2036 - RNA, 21 nt, Homo sapiens
  source 1..21: mol_type = transcribed RNA
agacctggcccagacctcagc

SEQ ID NO: 2037 - RNA, 21 nt, Homo sapiens
  source 1..21: mol_type = transcribed RNA
gctgaggtctgggccaggtct

SEQ ID NO: 2038 - RNA, 23 nt, Homo sapiens
  source 1..23: mol_type = transcribed RNA
acttgggcactgaaacaatgtcc

SEQ ID NO: 2039 - RNA, 23 nt, Homo sapiens
  source 1..23: mol_type = transcribed RNA
ggacattgtttcagtgcccaagt

SEQ ID NO: 2040 - RNA, 24 nt, Homo sapiens
  source 1..24: mol_type = transcribed RNA
actgggggctttcgggctctgcgt

SEQ ID NO: 2041 - RNA, 24 nt, Homo sapiens
  source 1..24: mol_type = transcribed RNA
acgcagagcccgaaagcccccagt

SEQ ID NO: 2042 - RNA, 23 nt, Homo sapiens
  source 1..23: mol_type = transcribed RNA
atcgctgcggttgcgagcgctgt

SEQ ID NO: 2043 - RNA, 23 nt, Homo sapiens
  source 1..23: mol_type = transcribed RNA
acagcgctcgcaaccgcagcgat

SEQ ID NO: 2044 - RNA, 22 nt, Homo sapiens
  source 1..22: mol_type = transcribed RNA
gtccctctccaaatgtgtcttg

SEQ ID NO: 2045 - RNA, 22 nt, Homo sapiens
  source 1..22: mol_type = transcribed RNA
caagacacatttggagagggac

SEQ ID NO: 2046 - RNA, 22 nt, Homo sapiens
  source 1..22: mol_type = transcribed RNA
acttgtatgctagctcaggtag

SEQ ID NO: 2047 - RNA, 22 nt, Homo sapiens
  source 1..22: mol_type = transcribed RNA
ctacctgagctagcatacaagt

SEQ ID NO: 2048 - RNA, 22 nt, Homo sapiens
  source 1..22: mol_type = transcribed RNA
tttaggataagcttgacttttg

SEQ ID NO: 2049 - RNA, 22 nt, Homo sapiens
  source 1..22: mol_type = transcribed RNA
caaaagtcaagcttatcctaaa

SEQ ID NO: 2050 - RNA, 21 nt, Homo sapiens
  source 1..21: mol_type = transcribed RNA
gtgttgaaacaatctctactg

SEQ ID NO: 2051 - RNA, 21 nt, Homo sapiens
  source 1..21: mol_type = transcribed RNA
cagtagagattgtttcaacac

SEQ ID NO: 2052 - RNA, 22 nt, Homo sapiens
  source 1..22: mol_type = transcribed RNA
tatgtctgctgaccatcacctt

SEQ ID NO: 2053 - RNA, 22 nt, Homo sapiens
  source 1..22: mol_type = transcribed RNA
aaggtgatggtcagcagacata

SEQ ID NO: 2054 - RNA, 22 nt, Homo sapiens
  source 1..22: mol_type = transcribed RNA
ggggctggggccggggccgagc

SEQ ID NO: 2055 - RNA, 22 nt, Homo sapiens
  source 1..22: mol_type = transcribed RNA
gctcggccccggccccagcccc

SEQ ID NO: 2056 - RNA, 22 nt, Homo sapiens
  source 1..22: mol_type = transcribed RNA
tgaggtagtaggttgtatggtt

SEQ ID NO: 2057 - RNA, 22 nt, Homo sapiens
  source 1..22: mol_type = transcribed RNA
aaccatacaacctactacctca

SEQ ID NO: 2058 - RNA, 21 nt, Homo sapiens
  source 1..21: mol_type = transcribed RNA
gtgtcttttgctctgcagtca

SEQ ID NO: 2059 - RNA, 21 nt, Homo sapiens
  source 1..21: mol_type = transcribed RNA
tgactgcagagcaaaagacac

SEQ ID NO: 2060 - RNA, 24 nt, Homo sapiens
  source 1..24: mol_type = transcribed RNA
ccccgggaacgtcgagactggagc

SEQ ID NO: 2061 - RNA, 24 nt, Homo sapiens
  source 1..24: mol_type = transcribed RNA
gctccagtctcgacgttcccgggg

SEQ ID NO: 2062 - RNA, 22 nt, Homo sapiens
  source 1..22: mol_type = transcribed RNA
acccgtcccgttcgtccccgga

SEQ ID NO: 2063 - RNA, 22 nt, Homo sapiens
  source 1..22: mol_type = transcribed RNA
tccggggacgaacgggacgggt

SEQ ID NO: 2064 - RNA, 22 nt, Homo sapiens
  source 1..22: mol_type = transcribed RNA
atgggtgaatttgtagaaggat

SEQ ID NO: 2065 - RNA, 22 nt, Homo sapiens
  source 1..22: mol_type = transcribed RNA
atccttctacaaattcacccat

SEQ ID NO: 2066 - RNA, 22 nt, Homo sapiens
  source 1..22: mol_type = transcribed RNA
ctggactgagccgtgctactgg

SEQ ID NO: 2067 - RNA, 22 nt, Homo sapiens
  source 1..22: mol_type = transcribed RNA
ccagtagcacggctcagtccag

SEQ ID NO: 2068 - RNA, 22 nt, Homo sapiens
  source 1..22: mol_type = transcribed RNA
ctggactgagccatgctactgg

SEQ ID NO: 2069 - RNA, 22 nt, Homo sapiens
  source 1..22: mol_type = transcribed RNA
ccagtagcatggctcagtccag

SEQ ID NO: 2070 - RNA, 22 nt, Homo sapiens
  source 1..22: mol_type = transcribed RNA
tacgtagatatatatgtatttt

SEQ ID NO: 2071 - RNA, 22 nt, Homo sapiens
  source 1..22: mol_type = transcribed RNA
aaaatacatatatatctacgta

SEQ ID NO: 2072 - RNA, 24 nt, Homo sapiens
  source 1..24: mol_type = transcribed RNA
aaatatatatatatatgtacgtat

SEQ ID NO: 2073 - RNA, 22 nt, Homo sapiens
  source 1..22: mol_type = transcribed RNA
gctcttttcattaatgtagaca

SEQ ID NO: 2074 - RNA, 22 nt, Homo sapiens
  source 1..22: mol_type = transcribed RNA
tgctggatcagtggttcgagtc

SEQ ID NO: 2075 - RNA, 22 nt, Homo sapiens
  source 1..22: mol_type = transcribed RNA
gactcgaaccactgatccagca

SEQ ID NO: 2076 - RNA, 19 nt, Homo sapiens
  source 1..19: mol_type = transcribed RNA
tggatttttggatcaggga

SEQ ID NO: 2077 - RNA, 19 nt, Homo sapiens
  source 1..19: mol_type = transcribed RNA
tccctgatccaaaaatcca

SEQ ID NO: 2078 - RNA, 22 nt, Homo sapiens
  source 1..22: mol_type = transcribed RNA
ttataaagcaatgagactgatt

SEQ ID NO: 2079 - RNA, 22 nt, Homo sapiens
  source 1..22: mol_type = transcribed RNA
aatcagtctcattgctttataa

SEQ ID NO: 2080 - RNA, 23 nt, Homo sapiens
  source 1..23: mol_type = transcribed RNA
tagtgcaatattgcttatagggt

SEQ ID NO: 2081 - RNA, 23 nt, Homo sapiens
  source 1..23: mol_type = transcribed RNA
accctataagcaatattgcacta

SEQ ID NO: 2082 - RNA, 22 nt, Homo sapiens
  source 1..22: mol_type = transcribed RNA
accctatcaatattgtctctgc

SEQ ID NO: 2083 - RNA, 22 nt, Homo sapiens
  source 1..22: mol_type = transcribed RNA
gcagagacaatattgatagggt

SEQ ID NO: 2084 - RNA, 17 nt, Homo sapiens
  source 1..17: mol_type = transcribed RNA
taagtgcttccatgctt

SEQ ID NO: 2085 - RNA, 17 nt, Homo sapiens
  source 1..17: mol_type = transcribed RNA
aagcatggaagcactta

SEQ ID NO: 2086 - RNA, 22 nt, Homo sapiens
  source 1..22: mol_type = transcribed RNA
tcggcctgaccacccaccccac

SEQ ID NO: 2087 - RNA, 22 nt, Homo sapiens
  source 1..22: mol_type = transcribed RNA
gtggggtgggtggtcaggccga

SEQ ID NO: 2088 - RNA, 21 nt, Homo sapiens
  source 1..21: mol_type = transcribed RNA
ggggggggggggggggggccg

SEQ ID NO: 2089 - RNA, 21 nt, Homo sapiens
  source 1..21: mol_type = transcribed RNA
cggcccccccccccccccccc

SEQ ID NO: 2090 - RNA, 22 nt, Homo sapiens
  source 1..22: mol_type = transcribed RNA
ctatacgacctgctgcctttct

SEQ ID NO: 2091 - RNA, 22 nt, Homo sapiens
  source 1..22: mol_type = transcribed RNA
agaaaggcagcaggtcgtatag

SEQ ID NO: 2092 - RNA, 22 nt, Homo sapiens
  source 1..22: mol_type = transcribed RNA
agaggtagtaggttgcatagtt

SEQ ID NO: 2093 - RNA, 22 nt, Homo sapiens
  source 1..22: mol_type = transcribed RNA
aactatgcaacctactacctct

SEQ ID NO: 2094 - RNA, 22 nt, Homo sapiens
  source 1..22: mol_type = transcribed RNA
ccgcactgtgggtacttgctgc

SEQ ID NO: 2095 - RNA, 22 nt, Homo sapiens
  source 1..22: mol_type = transcribed RNA
gcagcaagtacccacagtgcgg

SEQ ID NO: 2096 - RNA, 21 nt, Homo sapiens
  source 1..21: mol_type = transcribed RNA
taaagtgctgacagtgcagat

SEQ ID NO: 2097 - RNA, 21 nt, Homo sapiens
  source 1..21: mol_type = transcribed RNA
atctgcactgtcagcacttta

SEQ ID NO: 2098 - RNA, 22 nt, Homo sapiens
  source 1..22: mol_type = transcribed RNA
aactggatcaattataggagtg

SEQ ID NO: 2099 - RNA, 22 nt, Homo sapiens
  source 1..22: mol_type = transcribed RNA
cactcctataattgatccagtt

SEQ ID NO: 2100 - RNA, 26 nt, Homo sapiens
  source 1..26: mol_type = transcribed RNA
aagtagttggtttgtatgagatggtt

SEQ ID NO: 2101 - RNA, 26 nt, Homo sapiens
  source 1..26: mol_type = transcribed RNA
aaccatctcatacaaaccaactactt

SEQ ID NO: 2102 - RNA, 21 nt, Homo sapiens
  source 1..21: mol_type = transcribed RNA
aagtgatctaaaggcctacat

SEQ ID NO: 2103 - RNA, 21 nt, Homo sapiens
  source 1..21: mol_type = transcribed RNA
atgtaggcctttagatcactt

SEQ ID NO: 2104 - RNA, 22 nt, Homo sapiens
  source 1..22: mol_type = transcribed RNA
tcagatgatctaaaggcctata

SEQ ID NO: 2105 - RNA, 22 nt, Homo sapiens
  source 1..22: mol_type = transcribed RNA
tataggcctttagatcatctga

SEQ ID NO: 2106 - RNA, 21 nt, Homo sapiens
  source 1..21: mol_type = transcribed RNA
taggcctttagatcacttaaa

SEQ ID NO: 2107 - RNA, 21 nt, Homo sapiens
  source 1..21: mol_type = transcribed RNA
tttaagtgatctaaaggccta

SEQ ID NO: 2108 - RNA, 21 nt, Homo sapiens
  source 1..21: mol_type = transcribed RNA
actctagctgccaaaggcgct

SEQ ID NO: 2109 - RNA, 21 nt, Homo sapiens
  source 1..21: mol_type = transcribed RNA
agcgcctttggcagctagagt

SEQ ID NO: 2110 - RNA, 22 nt, Homo sapiens
  source 1..22: mol_type = transcribed RNA
agaaggaaattgaattcattta

SEQ ID NO: 2111 - RNA, 22 nt, Homo sapiens
  source 1..22: mol_type = transcribed RNA
taaatgaattcaatttccttct

SEQ ID NO: 2112 - RNA, 21 nt, Homo sapiens
  source 1..21: mol_type = transcribed RNA
agagaagaagatcagcctgca

SEQ ID NO: 2113 - RNA, 21 nt, Homo sapiens
  source 1..21: mol_type = transcribed RNA
tgcaggctgatcttcttctct

SEQ ID NO: 2114 - RNA, 24 nt, Homo sapiens
  source 1..24: mol_type = transcribed RNA
agcctggaagctggagcctgcagt

SEQ ID NO: 2115 - RNA, 24 nt, Homo sapiens
  source 1..24: mol_type = transcribed RNA
actgcaggctccagcttccaggct

SEQ ID NO: 2116 - RNA, 23 nt, Homo sapiens
  source 1..23: mol_type = transcribed RNA
aggatgagcaaagaaagtagatt

SEQ ID NO: 2117 - RNA, 23 nt, Homo sapiens
  source 1..23: mol_type = transcribed RNA
aatctactttctttgctcatcct

SEQ ID NO: 2118 - RNA, 22 nt, Homo sapiens
  source 1..22: mol_type = transcribed RNA
aaccactttctttgctcatcca

SEQ ID NO: 2119 - RNA, 22 nt, Homo sapiens
  source 1..22: mol_type = transcribed RNA
tggatgagcaaagaaagtggtt

SEQ ID NO: 2120 - RNA, 22 nt, Homo sapiens
  source 1..22: mol_type = transcribed RNA
cggatgagcaaagaaagtggtt

SEQ ID NO: 2121 - RNA, 22 nt, Homo sapiens
  source 1..22: mol_type = transcribed RNA
aaccactttctttgctcatccg

SEQ ID NO: 2122 - RNA, 22 nt, Homo sapiens
  source 1..22: mol_type = transcribed RNA
aggcattgacttctcactagct

SEQ ID NO: 2123 - RNA, 22 nt, Homo sapiens
  source 1..22: mol_type = transcribed RNA
agctagtgagaagtcaatgcct

SEQ ID NO: 2124 - RNA, 21 nt, Homo sapiens
  source 1..21: mol_type = transcribed RNA
agtgaatgatgggttctgacc

SEQ ID NO: 2125 - RNA, 21 nt, Homo sapiens
  source 1..21: mol_type = transcribed RNA
ggtcagaacccatcattcact

SEQ ID NO: 2126 - RNA, 21 nt, Homo sapiens
  source 1..21: mol_type = transcribed RNA
agttaggattaggtcgtggaa

SEQ ID NO: 2127 - RNA, 21 nt, Homo sapiens
  source 1..21: mol_type = transcribed RNA
ttccacgacctaatcctaact

SEQ ID NO: 2128 - RNA, 19 nt, Homo sapiens
  source 1..19: mol_type = transcribed RNA
atggataaggctttggctt

SEQ ID NO: 2129 - RNA, 19 nt, Homo sapiens
  source 1..19: mol_type = transcribed RNA
aagccaaagccttatccat

SEQ ID NO: 2130 - RNA, 22 nt, Homo sapiens
  source 1..22: mol_type = transcribed RNA
atggtaccctggcatactgagt

SEQ ID NO: 2131 - RNA, 22 nt, Homo sapiens
  source 1..22: mol_type = transcribed RNA
actcagtatgccagggtaccat

SEQ ID NO: 2132 - RNA, 23 nt, Homo sapiens
  source 1..23: mol_type = transcribed RNA
caagtcttatttgagcacctgtt

SEQ ID NO: 2133 - RNA, 23 nt, Homo sapiens
  source 1..23: mol_type = transcribed RNA
aacaggtgctcaaataagacttg

SEQ ID NO: 2134 - RNA, 22 nt, Homo sapiens
  source 1..22: mol_type = transcribed RNA
caggatgtggtcaagtgttgtt

SEQ ID NO: 2135 - RNA, 22 nt, Homo sapiens
  source 1..22: mol_type = transcribed RNA
aacaacacttgaccacatcctg

SEQ ID NO: 2136 - RNA, 23 nt, Homo sapiens
  source 1..23: mol_type = transcribed RNA
cctcagggctgtagaacagggct

SEQ ID NO: 2137 - RNA, 23 nt, Homo sapiens
  source 1..23: mol_type = transcribed RNA
agccctgttctacagccctgagg

SEQ ID NO: 2138 - RNA, 21 nt, Homo sapiens
  source 1..21: mol_type = transcribed RNA
cctgttgaagtgtaatcccca

SEQ ID NO: 2139 - RNA, 21 nt, Homo sapiens
  source 1..21: mol_type = transcribed RNA
tggggattacacttcaacagg

SEQ ID NO: 2140 - RNA, 18 nt, Homo sapiens
  source 1..18: mol_type = transcribed RNA
cgggcgtggtggtggggg

SEQ ID NO: 2141 - RNA, 18 nt, Homo sapiens
  source 1..18: mol_type = transcribed RNA
cccccaccaccacgcccg

SEQ ID NO: 2142 - RNA, 20 nt, Homo sapiens
  source 1..20: mol_type = transcribed RNA
cgggcgtggtggtgggggtg

SEQ ID NO: 2143 - RNA, 20 nt, Homo sapiens
  source 1..20: mol_type = transcribed RNA
cacccccaccaccacgcccg

SEQ ID NO: 2144 - RNA, 23 nt, Homo sapiens
  source 1..23: mol_type = transcribed RNA
ctggagatatggaagagctgtgt

SEQ ID NO: 2145 - RNA, 23 nt, Homo sapiens
  source 1..23: mol_type = transcribed RNA
acacagctcttccatatctccag

SEQ ID NO: 2146 - RNA, 26 nt, Homo sapiens
  source 1..26: mol_type = transcribed RNA
gatgatgatggcagcaaattctgaaa

SEQ ID NO: 2147 - RNA, 26 nt, Homo sapiens
  source 1..26: mol_type = transcribed RNA
tttcagaatttgctgccatcatcatc

SEQ ID NO: 2148 - RNA, 25 nt, Homo sapiens
  source 1..25: mol_type = transcribed RNA
gggcgacaaagcaagactctttctt

SEQ ID NO: 2149 - RNA, 25 nt, Homo sapiens
  source 1..25: mol_type = transcribed RNA
aagaaagagtcttgctttgtcgccc

SEQ ID NO: 2150 - RNA, 25 nt, Homo sapiens
  source 1..25: mol_type = transcribed RNA
gaacccatgaggttgaggctgcagt

SEQ ID NO: 2151 - RNA, 25 nt, Homo sapiens
  source 1..25: mol_type = transcribed RNA
actgcagcctcaacctcatgggttc

SEQ ID NO: 2152 - RNA, 17 nt, Homo sapiens
  source 1..17: mol_type = transcribed RNA
gtgggggagaggctgtc

SEQ ID NO: 2153 - RNA, 17 nt, Homo sapiens
  source 1..17: mol_type = transcribed RNA
gacagcctctcccccac

SEQ ID NO: 2154 - RNA, 20 nt, Homo sapiens
  source 1..20: mol_type = transcribed RNA
taaagagccctgtggagaca

SEQ ID NO: 2155 - RNA, 20 nt, Homo sapiens
  source 1..20: mol_type = transcribed RNA
tgtctccacagggctcttta

SEQ ID NO: 2156 - RNA, 22 nt, Homo sapiens
  source 1..22: mol_type = transcribed RNA
tagtactgtgcatatcatctat

SEQ ID NO: 2157 - RNA, 22 nt, Homo sapiens
  source 1..22: mol_type = transcribed RNA
atagatgatatgcacagtacta

SEQ ID NO: 2158 - RNA, 20 nt, Homo sapiens
  source 1..20: mol_type = transcribed RNA
tcgtttgcctttttctgctt

SEQ ID NO: 2159 - RNA, 20 nt, Homo sapiens
  source 1..20: mol_type = transcribed RNA
aagcagaaaaaggcaaacga

SEQ ID NO: 2160 - RNA, 21 nt, Homo sapiens
  source 1..21: mol_type = transcribed RNA
tggactgccctgatctggaga

SEQ ID NO: 2161 - RNA, 21 nt, Homo sapiens
  source 1..21: mol_type = transcribed RNA
tctccagatcagggcagtcca

SEQ ID NO: 2162 - RNA, 22 nt, Homo sapiens
  source 1..22: mol_type = transcribed RNA
tgggtggtctggagatttgtgc

SEQ ID NO: 2163 - RNA, 22 nt, Homo sapiens
  source 1..22: mol_type = transcribed RNA
gcacaaatctccagaccaccca

SEQ ID NO: 2164 - RNA, 22 nt, Homo sapiens
  source 1..22: mol_type = transcribed RNA
tgtgaggttggcattgttgtct

SEQ ID NO: 2165 - RNA, 22 nt, Homo sapiens
  source 1..22: mol_type = transcribed RNA
agacaacaatgccaacctcaca

SEQ ID NO: 2166 - RNA, 17 nt, Homo sapiens
  source 1..17: mol_type = transcribed RNA
ttcaagtaattcaggtg

SEQ ID NO: 2167 - RNA, 17 nt, Homo sapiens
  source 1..17: mol_type = transcribed RNA
cacctgaattacttgaa

SEQ ID NO: 2168 - RNA, 22 nt, Homo sapiens
  source 1..22: mol_type = transcribed RNA
ttctggaattctgtgtgaggga

SEQ ID NO: 2169 - RNA, 22 nt, Homo sapiens
  source 1..22: mol_type = transcribed RNA
tccctcacacagaattccagaa

SEQ ID NO: 2170 - RNA, 22 nt, Homo sapiens
  source 1..22: mol_type = transcribed RNA
ttttcaactctaatgggagaga

SEQ ID NO: 2171 - RNA, 22 nt, Homo sapiens
  source 1..22: mol_type = transcribed RNA
tctctcccattagagttgaaaa

SEQ ID NO: 2172 - RNA, 18 nt, Homo sapiens
  source 1..18: mol_type = transcribed RNA
acgttggctctggtggtg

SEQ ID NO: 2173 - RNA, 18 nt, Homo sapiens
  source 1..18: mol_type = transcribed RNA
caccaccagagccaacgt

SEQ ID NO: 2174 - RNA, 22 nt, Homo sapiens
  source 1..22: mol_type = transcribed RNA
ccacctcccctgcaaacgtcca

SEQ ID NO: 2175 - RNA, 22 nt, Homo sapiens
  source 1..22: mol_type = transcribed RNA
tggacgtttgcaggggaggtgg

SEQ ID NO: 2176 - RNA, 22 nt, Homo sapiens
  source 1..22: mol_type = transcribed RNA
actcggcgtggcgtcggtcgtg

SEQ ID NO: 2177 - RNA, 22 nt, Homo sapiens
  source 1..22: mol_type = transcribed RNA
cacgaccgacgccacgccgagt

SEQ ID NO: 2178 - RNA, 21 nt, Homo sapiens
  source 1..21: mol_type = transcribed RNA
tcgaccggacctcgaccggct

SEQ ID NO: 2179 - RNA, 21 nt, Homo sapiens
  source 1..21: mol_type = transcribed RNA
agccggtcgaggtccggtcga

SEQ ID NO: 2180 - RNA, 22 nt, Homo sapiens
  source 1..22: mol_type = transcribed RNA
tgagaactgaattccataggct

SEQ ID NO: 2181 - RNA, 22 nt, Homo sapiens
  source 1..22: mol_type = transcribed RNA
agcctatggaattcagttctca

SEQ ID NO: 2182 - RNA, 22 nt, Homo sapiens
  source 1..22: mol_type = transcribed RNA
aatcatacacggttgacctatt

SEQ ID NO: 2183 - RNA, 22 nt, Homo sapiens
  source 1..22: mol_type = transcribed RNA
aataggtcaaccgtgtatgatt

SEQ ID NO: 2184 - RNA, 22 nt, Homo sapiens
  source 1..22: mol_type = transcribed RNA
taggttatccgtgttgccttcg

SEQ ID NO: 2185 - RNA, 22 nt, Homo sapiens
  source 1..22: mol_type = transcribed RNA
cgaaggcaacacggataaccta

SEQ ID NO: 2186 - RNA, 21 nt, Homo sapiens
  source 1..21: mol_type = transcribed RNA
ccagtcctgtgcctgccgcct

SEQ ID NO: 2187 - RNA, 21 nt, Homo sapiens
  source 1..21: mol_type = transcribed RNA
aggcggcaggcacaggactgg

SEQ ID NO: 2188 - RNA, 22 nt, Homo sapiens
  source 1..22: mol_type = transcribed RNA
tctgccccctccgctgctgcca

SEQ ID NO: 2189 - RNA, 22 nt, Homo sapiens
  source 1..22: mol_type = transcribed RNA
tggcagcagcggagggggcaga

SEQ ID NO: 2190 - RNA, 22 nt, Homo sapiens
  source 1..22: mol_type = transcribed RNA
ggaggggtcccgcactgggagg

SEQ ID NO: 2191 - RNA, 22 nt, Homo sapiens
  source 1..22: mol_type = transcribed RNA
cctcccagtgcgggacccctcc

SEQ ID NO: 2192 - RNA, 22 nt, Homo sapiens
  source 1..22: mol_type = transcribed RNA
ccctgtgcccggcccacttctg

SEQ ID NO: 2193 - RNA, 22 nt, Homo sapiens
  source 1..22: mol_type = transcribed RNA
cagaagtgggccgggcacaggg

SEQ ID NO: 2194 - RNA, 20 nt, Homo sapiens
  source 1..20: mol_type = transcribed RNA
ccccagggcgacgcggcggg

SEQ ID NO: 2195 - RNA, 20 nt, Homo sapiens
  source 1..20: mol_type = transcribed RNA
cccgccgcgtcgccctgggg

SEQ ID NO: 2196 - RNA, 22 nt, Homo sapiens
  source 1..22: mol_type = transcribed RNA
accttgccttgctgcccgggcc

SEQ ID NO: 2197 - RNA, 22 nt, Homo sapiens
  source 1..22: mol_type = transcribed RNA
ggcccgggcagcaaggcaaggt

SEQ ID NO: 2198 - RNA, 21 nt, Homo sapiens
  source 1..21: mol_type = transcribed RNA
atttgtgcttggctctgtcac

SEQ ID NO: 2199 - RNA, 21 nt, Homo sapiens
  source 1..21: mol_type = transcribed RNA
gtgacagagccaagcacaaat

SEQ ID NO: 2200 - RNA, 22 nt, Homo sapiens
  source 1..22: mol_type = transcribed RNA
attgtccttgctgtttggagat

SEQ ID NO: 2201 - RNA, 22 nt, Homo sapiens
  source 1..22: mol_type = transcribed RNA
atctccaaacagcaaggacaat

SEQ ID NO: 2202 - RNA, 21 nt, Homo sapiens
  source 1..21: mol_type = transcribed RNA
atccccagatacaatggacaa

SEQ ID NO: 2203 - RNA, 21 nt, Homo sapiens
  source 1..21: mol_type = transcribed RNA
ttgtccattgtatctggggat

SEQ ID NO: 2204 - RNA, 23 nt, Homo sapiens
  source 1..23: mol_type = transcribed RNA
cagtgcaatagtattgtcaaagc

SEQ ID NO: 2205 - RNA, 23 nt, Homo sapiens
  source 1..23: mol_type = transcribed RNA
gctttgacaatactattgcactg

SEQ ID NO: 2206 - RNA, 22 nt, Homo sapiens
  source 1..22: mol_type = transcribed RNA
gctctgactttattgcactact

SEQ ID NO: 2207 - RNA, 22 nt, Homo sapiens
  source 1..22: mol_type = transcribed RNA
agtagtgcaataaagtcagagc

SEQ ID NO: 2208 - RNA, 23 nt, Homo sapiens
  source 1..23: mol_type = transcribed RNA
taagtgcttccatgttttagtag

SEQ ID NO: 2209 - RNA, 23 nt, Homo sapiens
  source 1..23: mol_type = transcribed RNA
ctactaaaacatggaagcactta

SEQ ID NO: 2210 - RNA, 22 nt, Homo sapiens
  source 1..22: mol_type = transcribed RNA
actttaacatggaagtgctttc

SEQ ID NO: 2211 - RNA, 22 nt, Homo sapiens
  source 1..22: mol_type = transcribed RNA
gaaagcacttccatgttaaagt

SEQ ID NO: 2212 - RNA, 23 nt, Homo sapiens
  source 1..23: mol_type = transcribed RNA
taagtgcttccatgtttcagtgg

SEQ ID NO: 2213 - RNA, 23 nt, Homo sapiens
  source 1..23: mol_type = transcribed RNA
ccactgaaacatggaagcactta

SEQ ID NO: 2214 - RNA, 22 nt, Homo sapiens
  source 1..22: mol_type = transcribed RNA
tttaacatgggggtacctgctg

SEQ ID NO: 2215 - RNA, 22 nt, Homo sapiens
  source 1..22: mol_type = transcribed RNA
cagcaggtacccccatgttaaa

SEQ ID NO: 2216 - RNA, 23 nt, Homo sapiens
  source 1..23: mol_type = transcribed RNA
taagtgcttccatgtttgagtgt

SEQ ID NO: 2217 - RNA, 23 nt, Homo sapiens
  source 1..23: mol_type = transcribed RNA
acactcaaacatggaagcactta

SEQ ID NO: 2218 - RNA, 22 nt, Homo sapiens
  source 1..22: mol_type = transcribed RNA
actttaacatggaggcacttgc

SEQ ID NO: 2219 - RNA, 22 nt, Homo sapiens
  source 1..22: mol_type = transcribed RNA
gcaagtgcctccatgttaaagt

SEQ ID NO: 2220 - RNA, 22 nt, Homo sapiens
  source 1..22: mol_type = transcribed RNA
aattgcactttagcaatggtga

SEQ ID NO: 2221 - RNA, 22 nt, Homo sapiens
  source 1..22: mol_type = transcribed RNA
tcaccattgctaaagtgcaatt

SEQ ID NO: 2222 - RNA, 22 nt, Homo sapiens
  source 1..22: mol_type = transcribed RNA
actgttgctaatatgcaactct

SEQ ID NO: 2223 - RNA, 22 nt, Homo sapiens
  source 1..22: mol_type = transcribed RNA
agagttgcatattagcaacagt

SEQ ID NO: 2224 - RNA, 23 nt, Homo sapiens
  source 1..23: mol_type = transcribed RNA
agctcggtctgaggcccctcagt

SEQ ID NO: 2225 - RNA, 23 nt, Homo sapiens
  source 1..23: mol_type = transcribed RNA
actgaggggcctcagaccgagct

SEQ ID NO: 2226 - RNA, 22 nt, Homo sapiens
  source 1..22: mol_type = transcribed RNA
aaaaactgagactacttttgca

SEQ ID NO: 2227 - RNA, 22 nt, Homo sapiens
  source 1..22: mol_type = transcribed RNA
tgcaaaagtagtctcagttttt

SEQ ID NO: 2228 - RNA, 19 nt, Homo sapiens
  source 1..19: mol_type = transcribed RNA
aaaaactgtaattactttt

SEQ ID NO: 2229 - RNA, 19 nt, Homo sapiens
  source 1..19: mol_type = transcribed RNA
aaaagtaattacagttttt

SEQ ID NO: 2230 - RNA, 22 nt, Homo sapiens
  source 1..22: mol_type = transcribed RNA
aaaactgtaattacttttgtac

SEQ ID NO: 2231 - RNA, 22 nt, Homo sapiens
  source 1..22: mol_type = transcribed RNA
gtacaaaagtaattacagtttt

SEQ ID NO: 2232 - RNA, 23 nt, Homo sapiens
  source 1..23: mol_type = transcribed RNA
tgcaaaagtaattgcagtttttg

SEQ ID NO: 2233 - RNA, 23 nt, Homo sapiens
  source 1..23: mol_type = transcribed RNA
caaaaactgcaattacttttgca

SEQ ID NO: 2234 - RNA, 23 nt, Homo sapiens
  source 1..23: mol_type = transcribed RNA
caaaaaccgcaattacttttgca

SEQ ID NO: 2235 - RNA, 23 nt, Homo sapiens
  source 1..23: mol_type = transcribed RNA
tgcaaaagtaattgcggtttttg

SEQ ID NO: 2236 - RNA, 22 nt, Homo sapiens
  source 1..22: mol_type = transcribed RNA
aaaagtaatcgcggtttttgtc

SEQ ID NO: 2237 - RNA, 22 nt, Homo sapiens
  source 1..22: mol_type = transcribed RNA
gacaaaaaccgcgattactttt

SEQ ID NO: 2238 - RNA, 22 nt, Homo sapiens
  source 1..22: mol_type = transcribed RNA
aaaagtacttgcggattttgct

SEQ ID NO: 2239 - RNA, 22 nt, Homo sapiens
  source 1..22: mol_type = transcribed RNA
agcaaaatccgcaagtactttt

SEQ ID NO: 2240 - RNA, 22 nt, Homo sapiens
  source 1..22: mol_type = transcribed RNA
aaaagtatttgcgggttttgtc

SEQ ID NO: 2241 - RNA, 22 nt, Homo sapiens
  source 1..22: mol_type = transcribed RNA
gacaaaacccgcaaatactttt

SEQ ID NO: 2242 - RNA, 21 nt, Homo sapiens
  source 1..21: mol_type = transcribed RNA
caaaggtatttgtggtttttg

SEQ ID NO: 2243 - RNA, 21 nt, Homo sapiens
  source 1..21: mol_type = transcribed RNA
caaaaaccacaaatacctttg

SEQ ID NO: 2244 - RNA, 22 nt, Homo sapiens
  source 1..22: mol_type = transcribed RNA
ccaaaactgcagttacttttgc

SEQ ID NO: 2245 - RNA, 22 nt, Homo sapiens
  source 1..22: mol_type = transcribed RNA
gcaaaagtaactgcagttttgg

SEQ ID NO: 2246 - RNA, 22 nt, Homo sapiens
  source 1..22: mol_type = transcribed RNA
aaaagtaattgcggtttttgcc

SEQ ID NO: 2247 - RNA, 22 nt, Homo sapiens
  source 1..22: mol_type = transcribed RNA
ggcaaaaaccgcaattactttt

SEQ ID NO: 2248 - RNA, 22 nt, Homo sapiens
  source 1..22: mol_type = transcribed RNA
tagcaaaaactgcagttacttt

SEQ ID NO: 2249 - RNA, 22 nt, Homo sapiens
  source 1..22: mol_type = transcribed RNA
aaagtaactgcagtttttgcta

SEQ ID NO: 2250 - RNA, 20 nt, Homo sapiens
  source 1..20: mol_type = transcribed RNA
ggaggttgggaagggcagag

SEQ ID NO: 2251 - RNA, 20 nt, Homo sapiens
  source 1..20: mol_type = transcribed RNA
ctctgcccttcccaacctcc

SEQ ID NO: 2252 - RNA, 18 nt, Homo sapiens
  source 1..18: mol_type = transcribed RNA
tgaggcgggggggcgagc

SEQ ID NO: 2253 - RNA, 18 nt, Homo sapiens
  source 1..18: mol_type = transcribed RNA
gctcgcccccccgcctca

SEQ ID NO: 2254 - RNA, 20 nt, Homo sapiens
  source 1..20: mol_type = transcribed RNA
agagatgaagcgggggggcg

SEQ ID NO: 2255 - RNA, 20 nt, Homo sapiens
  source 1..20: mol_type = transcribed RNA
cgcccccccgcttcatctct

SEQ ID NO: 2256 - RNA, 24 nt, Homo sapiens
  source 1..24: mol_type = transcribed RNA
ggaggccggggtggggcggggcgg

SEQ ID NO: 2257 - RNA, 24 nt, Homo sapiens
  source 1..24: mol_type = transcribed RNA
ccgccccgccccaccccggcctcc

SEQ ID NO: 2258 - RNA, 19 nt, Homo sapiens
  source 1..19: mol_type = transcribed RNA
ggggagcgaggggcggggc

SEQ ID NO: 2259 - RNA, 19 nt, Homo sapiens
  source 1..19: mol_type = transcribed RNA
gccccgcccctcgctcccc

SEQ ID NO: 2260 - RNA, 23 nt, Homo sapiens
  source 1..23: mol_type = transcribed RNA
tattcatttatccccagcctaca

SEQ ID NO: 2261 - RNA, 23 nt, Homo sapiens
  source 1..23: mol_type = transcribed RNA
tgtaggctggggataaatgaata

SEQ ID NO: 2262 - RNA, 24 nt, Homo sapiens
  source 1..24: mol_type = transcribed RNA
actggctagggaaaatgattggat

SEQ ID NO: 2263 - RNA, 24 nt, Homo sapiens
  source 1..24: mol_type = transcribed RNA
atccaatcattttccctagccagt

SEQ ID NO: 2264 - RNA, 22 nt, Homo sapiens
  source 1..22: mol_type = transcribed RNA
ttcatttgcctcccagcctaca

SEQ ID NO: 2265 - RNA, 22 nt, Homo sapiens
  source 1..22: mol_type = transcribed RNA
tgtaggctgggaggcaaatgaa

SEQ ID NO: 2266 - RNA, 24 nt, Homo sapiens
  source 1..24: mol_type = transcribed RNA
tgggctaagggagatgattgggta

SEQ ID NO: 2267 - RNA, 24 nt, Homo sapiens
  source 1..24: mol_type = transcribed RNA
tacccaatcatctcccttagccca

SEQ ID NO: 2268 - RNA, 22 nt, Homo sapiens
  source 1..22: mol_type = transcribed RNA
actccagccccacagcctcagc

SEQ ID NO: 2269 - RNA, 22 nt, Homo sapiens
  source 1..22: mol_type = transcribed RNA
gctgaggctgtggggctggagt

SEQ ID NO: 2270 - RNA, 22 nt, Homo sapiens
  source 1..22: mol_type = transcribed RNA
aggaggaattggtgctggtctt

SEQ ID NO: 2271 - RNA, 22 nt, Homo sapiens
  source 1..22: mol_type = transcribed RNA
aagaccagcaccaattcctcct

SEQ ID NO: 2272 - RNA, 22 nt, Homo sapiens
  source 1..22: mol_type = transcribed RNA
aggcagcggggtgtagtggata

SEQ ID NO: 2273 - RNA, 22 nt, Homo sapiens
  source 1..22: mol_type = transcribed RNA
tatccactacaccccgctgcct

SEQ ID NO: 2274 - RNA, 22 nt, Homo sapiens
  source 1..22: mol_type = transcribed RNA
tccattacactaccctgcctct

SEQ ID NO: 2275 - RNA, 22 nt, Homo sapiens
  source 1..22: mol_type = transcribed RNA
agaggcagggtagtgtaatgga

SEQ ID NO: 2276 - RNA, 22 nt, Homo sapiens
  source 1..22: mol_type = transcribed RNA
actgctgagctagcacttcccg

SEQ ID NO: 2277 - RNA, 22 nt, Homo sapiens
  source 1..22: mol_type = transcribed RNA
cgggaagtgctagctcagcagt

SEQ ID NO: 2278 - RNA, 23 nt, Homo sapiens
  source 1..23: mol_type = transcribed RNA
caaagtgctgttcgtgcaggtag

SEQ ID NO: 2279 - RNA, 23 nt, Homo sapiens
  source 1..23: mol_type = transcribed RNA
ctacctgcacgaacagcactttg

SEQ ID NO: 2280 - RNA, 23 nt, Homo sapiens
  source 1..23: mol_type = transcribed RNA
cacccggctgtgtgcacatgtgc

SEQ ID NO: 2281 - RNA, 23 nt, Homo sapiens
  source 1..23: mol_type = transcribed RNA
gcacatgtgcacacagccgggtg

SEQ ID NO: 2282 - RNA, 23 nt, Homo sapiens
  source 1..23: mol_type = transcribed RNA
agcttctttacagtgctgccttg

SEQ ID NO: 2283 - RNA, 23 nt, Homo sapiens
  source 1..23: mol_type = transcribed RNA
caaggcagcactgtaaagaagct

SEQ ID NO: 2284 - RNA, 23 nt, Homo sapiens
  source 1..23: mol_type = transcribed RNA
agcagcattgtacagggctatga

SEQ ID NO: 2285 - RNA, 23 nt, Homo sapiens
  source 1..23: mol_type = transcribed RNA
tcatagccctgtacaatgctgct

SEQ ID NO: 2286 - RNA, 17 nt, Homo sapiens
  source 1..17: mol_type = transcribed RNA
cctgagaaaagggccaa

SEQ ID NO: 2287 - RNA, 17 nt, Homo sapiens
  source 1..17: mol_type = transcribed RNA
ttggcccttttctcagg

SEQ ID NO: 2288 - RNA, 19 nt, Homo sapiens
  source 1..19: mol_type = transcribed RNA
ggccactgagtcagcacca

SEQ ID NO: 2289 - RNA, 19 nt, Homo sapiens
  source 1..19: mol_type = transcribed RNA
tggtgctgactcagtggcc

SEQ ID NO: 2290 - RNA, 18 nt, Homo sapiens
  source 1..18: mol_type = transcribed RNA
agggcatgtccagggggt

SEQ ID NO: 2291 - RNA, 18 nt, Homo sapiens
  source 1..18: mol_type = transcribed RNA
accccctggacatgccct

SEQ ID NO: 2292 - RNA, 23 nt, Homo sapiens
  source 1..23: mol_type = transcribed RNA
gcctggagctactccaccatctc

SEQ ID NO: 2293 - RNA, 23 nt, Homo sapiens
  source 1..23: mol_type = transcribed RNA
gagatggtggagtagctccaggc

SEQ ID NO: 2294 - RNA, 17 nt, Homo sapiens
  source 1..17: mol_type = transcribed RNA
cagtgttcagagatgga

SEQ ID NO: 2295 - RNA, 17 nt, Homo sapiens
  source 1..17: mol_type = transcribed RNA
tccatctctgaacactg

SEQ ID NO: 2296 - RNA, 18 nt, Homo sapiens
  source 1..18: mol_type = transcribed RNA
atctgacctgatgaaggt

SEQ ID NO: 2297 - RNA, 18 nt, Homo sapiens
  source 1..18: mol_type = transcribed RNA
accttcatcaggtcagat

SEQ ID NO: 2298 - RNA, 18 nt, Homo sapiens
  source 1..18: mol_type = transcribed RNA
ccagaggtggggactgag

SEQ ID NO: 2299 - RNA, 18 nt, Homo sapiens
  source 1..18: mol_type = transcribed RNA
ctcagtccccacctctgg

SEQ ID NO: 2300 - RNA, 17 nt, Homo sapiens
  source 1..17: mol_type = transcribed RNA
ccccgccaccgccttgg

SEQ ID NO: 2301 - RNA, 17 nt, Homo sapiens
  source 1..17: mol_type = transcribed RNA
ccaaggcggtggcgggg

SEQ ID NO: 2302 - RNA, 22 nt, Homo sapiens
  source 1..22: mol_type = transcribed RNA
cagttgggtctaggggtcagga

SEQ ID NO: 2303 - RNA, 22 nt, Homo sapiens
  source 1..22: mol_type = transcribed RNA
tcctgacccctagacccaactg

SEQ ID NO: 2304 - RNA, 19 nt, Homo sapiens
  source 1..19: mol_type = transcribed RNA
cttggggcatggagtccca

SEQ ID NO: 2305 - RNA, 19 nt, Homo sapiens
  source 1..19: mol_type = transcribed RNA
tgggactccatgccccaag

SEQ ID NO: 2306 - RNA, 16 nt, Homo sapiens
  source 1..16: mol_type = transcribed RNA
aggaaacagggaccca

SEQ ID NO: 2307 - RNA, 16 nt, Homo sapiens
  source 1..16: mol_type = transcribed RNA
tgggtccctgtttcct

SEQ ID NO: 2308 - RNA, 17 nt, Homo sapiens
  source 1..17: mol_type = transcribed RNA
gacattcagactacctg

SEQ ID NO: 2309 - RNA, 17 nt, Homo sapiens
  source 1..17: mol_type = transcribed RNA
caggtagtctgaatgtc

SEQ ID NO: 2310 - RNA, 18 nt, Homo sapiens
  source 1..18: mol_type = transcribed RNA
attctaagtgccttggcc

SEQ ID NO: 2311 - RNA, 18 nt, Homo sapiens
  source 1..18: mol_type = transcribed RNA
ggccaaggcacttagaat

SEQ ID NO: 2312 - RNA, 17 nt, Homo sapiens
  source 1..17: mol_type = transcribed RNA
actcagtcatggtcatt

SEQ ID NO: 2313 - RNA, 17 nt, Homo sapiens
  source 1..17: mol_type = transcribed RNA
aatgaccatgactgagt

SEQ ID NO: 2314 - RNA, 19 nt, Homo sapiens
  source 1..19: mol_type = transcribed RNA
ctgtgggctcagctctggg

SEQ ID NO: 2315 - RNA, 19 nt, Homo sapiens
  source 1..19: mol_type = transcribed RNA
cccagagctgagcccacag

SEQ ID NO: 2316 - RNA, 16 nt, Homo sapiens
  source 1..16: mol_type = transcribed RNA
ctaggaggccttggcc

SEQ ID NO: 2317 - RNA, 16 nt, Homo sapiens
  source 1..16: mol_type = transcribed RNA
ggccaaggcctcctag

SEQ ID NO: 2318 - RNA, 16 nt, Homo sapiens
  source 1..16: mol_type = transcribed RNA
tccagctcggtggcac

SEQ ID NO: 2319 - RNA, 16 nt, Homo sapiens
  source 1..16: mol_type = transcribed RNA
gtgccaccgagctgga

SEQ ID NO: 2320 - RNA, 21 nt, Homo sapiens
  source 1..21: mol_type = transcribed RNA
ggctcctcctctcaggatgtg

SEQ ID NO: 2321 - RNA, 21 nt, Homo sapiens
  source 1..21: mol_type = transcribed RNA
cacatcctgagaggaggagcc

SEQ ID NO: 2322 - RNA, 21 nt, Homo sapiens
  source 1..21: mol_type = transcribed RNA
gcaggcacagacagccctggc

SEQ ID NO: 2323 - RNA, 21 nt, Homo sapiens
  source 1..21: mol_type = transcribed RNA
gccagggctgtctgtgcctgc

SEQ ID NO: 2324 - RNA, 20 nt, Homo sapiens
  source 1..20: mol_type = transcribed RNA
tcagggagtcaggggagggc

SEQ ID NO: 2325 - RNA, 20 nt, Homo sapiens
  source 1..20: mol_type = transcribed RNA
gccctcccctgactccctga

SEQ ID NO: 2326 - RNA, 19 nt, Homo sapiens
  source 1..19: mol_type = transcribed RNA
gggggaagaaaaggtgggg

SEQ ID NO: 2327 - RNA, 19 nt, Homo sapiens
  source 1..19: mol_type = transcribed RNA
ccccaccttttcttccccc

SEQ ID NO: 2328 - RNA, 18 nt, Homo sapiens
  source 1..18: mol_type = transcribed RNA
cattcaactagtgattgt

SEQ ID NO: 2329 - RNA, 18 nt, Homo sapiens
  source 1..18: mol_type = transcribed RNA
acaatcactagttgaatg

SEQ ID NO: 2330 - RNA, 18 nt, Homo sapiens
  source 1..18: mol_type = transcribed RNA
cagcagtccctccccctg

SEQ ID NO: 2331 - RNA, 18 nt, Homo sapiens
  source 1..18: mol_type = transcribed RNA
cagggggagggactgctg

SEQ ID NO: 2332 - RNA, 17 nt, Homo sapiens
  source 1..17: mol_type = transcribed RNA
ccaattaccacttcttt

SEQ ID NO: 2333 - RNA, 17 nt, Homo sapiens
  source 1..17: mol_type = transcribed RNA
aaagaagtggtaattgg

SEQ ID NO: 2334 - RNA, 17 nt, Homo sapiens
  source 1..17: mol_type = transcribed RNA
ctcagtgactcatgtgc

SEQ ID NO: 2335 - RNA, 17 nt, Homo sapiens
  source 1..17: mol_type = transcribed RNA
gcacatgagtcactgag

SEQ ID NO: 2336 - RNA, 21 nt, Homo sapiens
  source 1..21: mol_type = transcribed RNA
gcagttctgagcacagtacac

SEQ ID NO: 2337 - RNA, 21 nt, Homo sapiens
  source 1..21: mol_type = transcribed RNA
gtgtactgtgctcagaactgc

SEQ ID NO: 2338 - RNA, 18 nt, Homo sapiens
  source 1..18: mol_type = transcribed RNA
ctagggggtttgcccttg

SEQ ID NO: 2339 - RNA, 18 nt, Homo sapiens
  source 1..18: mol_type = transcribed RNA
caagggcaaaccccctag

SEQ ID NO: 2340 - RNA, 16 nt, Homo sapiens
  source 1..16: mol_type = transcribed RNA
ctctcctcccggcttc

SEQ ID NO: 2341 - RNA, 16 nt, Homo sapiens
  source 1..16: mol_type = transcribed RNA
gaagccgggaggagag

SEQ ID NO: 2342 - RNA, 21 nt, Homo sapiens
  source 1..21: mol_type = transcribed RNA
gagtgtagttctgagcagagc

SEQ ID NO: 2343 - RNA, 21 nt, Homo sapiens
  source 1..21: mol_type = transcribed RNA
gctctgctcagaactacactc

SEQ ID NO: 2344 - RNA, 18 nt, Homo sapiens
  source 1..18: mol_type = transcribed RNA
gggtcccggggagggggg

SEQ ID NO: 2345 - RNA, 18 nt, Homo sapiens
  source 1..18: mol_type = transcribed RNA
cccccctccccgggaccc

SEQ ID NO: 2346 - RNA, 18 nt, Homo sapiens
  source 1..18: mol_type = transcribed RNA
taaaatttgcatccagga

SEQ ID NO: 2347 - RNA, 18 nt, Homo sapiens
  source 1..18: mol_type = transcribed RNA
tcctggatgcaaatttta

SEQ ID NO: 2348 - RNA, 17 nt, Homo sapiens
  source 1..17: mol_type = transcribed RNA
tggggctcagcgagttt

SEQ ID NO: 2349 - RNA, 17 nt, Homo sapiens
  source 1..17: mol_type = transcribed RNA
aaactcgctgagcccca

SEQ ID NO: 2350 - RNA, 18 nt, Homo sapiens
  source 1..18: mol_type = transcribed RNA
gggctcacatcaccccat

SEQ ID NO: 2351 - RNA, 18 nt, Homo sapiens
  source 1..18: mol_type = transcribed RNA
atggggtgatgtgagccc

SEQ ID NO: 2352 - RNA, 18 nt, Homo sapiens
  source 1..18: mol_type = transcribed RNA
gcggcgagtccgactcat

SEQ ID NO: 2353 - RNA, 18 nt, Homo sapiens
  source 1..18: mol_type = transcribed RNA
atgagtcggactcgccgc

SEQ ID NO: 2354 - RNA, 17 nt, Homo sapiens
  source 1..17: mol_type = transcribed RNA
accccactcctggtacc

SEQ ID NO: 2355 - RNA, 17 nt, Homo sapiens
  source 1..17: mol_type = transcribed RNA
ggtaccaggagtggggt

SEQ ID NO: 2356 - RNA, 19 nt, Homo sapiens
  source 1..19: mol_type = transcribed RNA
tctcccttgagggcacttt

SEQ ID NO: 2357 - RNA, 19 nt, Homo sapiens
  source 1..19: mol_type = transcribed RNA
aaagtgccctcaagggaga

SEQ ID NO: 2358 - RNA, 17 nt, Homo sapiens
  source 1..17: mol_type = transcribed RNA
ttgtctgctgagtttcc

SEQ ID NO: 2359 - RNA, 17 nt, Homo sapiens
  source 1..17: mol_type = transcribed RNA
ggaaactcagcagacaa

SEQ ID NO: 2360 - RNA, 19 nt, Homo sapiens
  source 1..19: mol_type = transcribed RNA
gcattgtgcagggctatca

SEQ ID NO: 2361 - RNA, 19 nt, Homo sapiens
  source 1..19: mol_type = transcribed RNA
tgatagccctgcacaatgc

SEQ ID NO: 2362 - RNA, 19 nt, Homo sapiens
  source 1..19: mol_type = transcribed RNA
tgccctcctttcttccctc

SEQ ID NO: 2363 - RNA, 19 nt, Homo sapiens
  source 1..19: mol_type = transcribed RNA
gagggaagaaaggagggca

SEQ ID NO: 2364 - RNA, 16 nt, Homo sapiens
  source 1..16: mol_type = transcribed RNA
ttcagcaggaacagct

SEQ ID NO: 2365 - RNA, 16 nt, Homo sapiens
  source 1..16: mol_type = transcribed RNA
agctgttcctgctgaa

SEQ ID NO: 2366 - RNA, 18 nt, Homo sapiens
  source 1..18: mol_type = transcribed RNA
cccctgggccggccttgg

SEQ ID NO: 2367 - RNA, 18 nt, Homo sapiens
  source 1..18: mol_type = transcribed RNA
ccaaggccggcccagggg

SEQ ID NO: 2368 - RNA, 17 nt, Homo sapiens
  source 1..17: mol_type = transcribed RNA
cagcctgacaggaacag

SEQ ID NO: 2369 - RNA, 17 nt, Homo sapiens
  source 1..17: mol_type = transcribed RNA
ctgttcctgtcaggctg

SEQ ID NO: 2370 - RNA, 17 nt, Homo sapiens
  source 1..17: mol_type = transcribed RNA
gggagtctacagcaggg

SEQ ID NO: 2371 - RNA, 17 nt, Homo sapiens
  source 1..17: mol_type = transcribed RNA
ccctgctgtagactccc

SEQ ID NO: 2372 - RNA, 18 nt, Homo sapiens
  source 1..18: mol_type = transcribed RNA
cagtgcaatgttttcctt

SEQ ID NO: 2373 - RNA, 18 nt, Homo sapiens
  source 1..18: mol_type = transcribed RNA
aaggaaaacattgcactg

SEQ ID NO: 2374 - RNA, 17 nt, Homo sapiens
  source 1..17: mol_type = transcribed RNA
atgtgggctcaggctca

SEQ ID NO: 2375 - RNA, 17 nt, Homo sapiens
  source 1..17: mol_type = transcribed RNA
tgagcctgagcccacat

SEQ ID NO: 2376 - RNA, 16 nt, Homo sapiens
  source 1..16: mol_type = transcribed RNA
tgccttcctgtctgtg

SEQ ID NO: 2377 - RNA, 16 nt, Homo sapiens
  source 1..16: mol_type = transcribed RNA
cacagacaggaaggca

SEQ ID NO: 2378 - RNA, 22 nt, Homo sapiens
  source 1..22: mol_type = transcribed RNA
ctgggacaggaggaggaggcag

SEQ ID NO: 2379 - RNA, 22 nt, Homo sapiens
  source 1..22: mol_type = transcribed RNA
ctgcctcctcctcctgtcccag

SEQ ID NO: 2380 - RNA, 18 nt, Homo sapiens
  source 1..18: mol_type = transcribed RNA
gctggtgacatgagaggc

SEQ ID NO: 2381 - RNA, 18 nt, Homo sapiens
  source 1..18: mol_type = transcribed RNA
gcctctcatgtcaccagc

SEQ ID NO: 2382 - RNA, 18 nt, Homo sapiens
  source 1..18: mol_type = transcribed RNA
tgggagctggactacttc

SEQ ID NO: 2383 - RNA, 18 nt, Homo sapiens
  source 1..18: mol_type = transcribed RNA
gaagtagtccagctccca

SEQ ID NO: 2384 - RNA, 20 nt, Homo sapiens
  source 1..20: mol_type = transcribed RNA
tcccactacttcacttgtga

SEQ ID NO: 2385 - RNA, 20 nt, Homo sapiens
  source 1..20: mol_type = transcribed RNA
tcacaagtgaagtagtggga

SEQ ID NO: 2386 - RNA, 18 nt, Homo sapiens
  source 1..18: mol_type = transcribed RNA
ccagtgtggctcagcgag

SEQ ID NO: 2387 - RNA, 18 nt, Homo sapiens
  source 1..18: mol_type = transcribed RNA
ctcgctgagccacactgg

SEQ ID NO: 2388 - RNA, 17 nt, Homo sapiens
  source 1..17: mol_type = transcribed RNA
ttctgagctgaggacag

SEQ ID NO: 2389 - RNA, 17 nt, Homo sapiens
  source 1..17: mol_type = transcribed RNA
ctgtcctcagctcagaa

SEQ ID NO: 2390 - RNA, 17 nt, Homo sapiens
  source 1..17: mol_type = transcribed RNA
ccggcatgtccagggca

SEQ ID NO: 2391 - RNA, 17 nt, Homo sapiens
  source 1..17: mol_type = transcribed RNA
tgccctggacatgccgg

SEQ ID NO: 2392 - RNA, 18 nt, Homo sapiens
  source 1..18: mol_type = transcribed RNA
cctagacacctccagttc

SEQ ID NO: 2393 - RNA, 18 nt, Homo sapiens
  source 1..18: mol_type = transcribed RNA
gaactggaggtgtctagg

SEQ ID NO: 2394 - RNA, 17 nt, Homo sapiens
  source 1..17: mol_type = transcribed RNA
tggagagaaaggcagta

SEQ ID NO: 2395 - RNA, 17 nt, Homo sapiens
  source 1..17: mol_type = transcribed RNA
tactgcctttctctcca

SEQ ID NO: 2396 - RNA, 19 nt, Homo sapiens
  source 1..19: mol_type = transcribed RNA
aatgttttttcctgtttcc

SEQ ID NO: 2397 - RNA, 19 nt, Homo sapiens
  source 1..19: mol_type = transcribed RNA
ggaaacaggaaaaaacatt

SEQ ID NO: 2398 - RNA, 18 nt, Homo sapiens
  source 1..18: mol_type = transcribed RNA
tccctggagtttcttctt

SEQ ID NO: 2399 - RNA, 18 nt, Homo sapiens
  source 1..18: mol_type = transcribed RNA
aagaagaaactccaggga

SEQ ID NO: 2400 - RNA, 18 nt, Homo sapiens
  source 1..18: mol_type = transcribed RNA
ctggagtctaggattcca

SEQ ID NO: 2401 - RNA, 18 nt, Homo sapiens
  source 1..18: mol_type = transcribed RNA
tggaatcctagactccag

SEQ ID NO: 2402 - RNA, 16 nt, Homo sapiens
  source 1..16: mol_type = transcribed RNA
gcagcattcatgtccc

SEQ ID NO: 2403 - RNA, 16 nt, Homo sapiens
  source 1..16: mol_type = transcribed RNA
gggacatgaatgctgc

SEQ ID NO: 2404 - RNA, 18 nt, Homo sapiens
  source 1..18: mol_type = transcribed RNA
gaaagagagctgagtgtg

SEQ ID NO: 2405 - RNA, 18 nt, Homo sapiens
  source 1..18: mol_type = transcribed RNA
cacactcagctctctttc

SEQ ID NO: 2406 - RNA, 19 nt, Homo sapiens
  source 1..19: mol_type = transcribed RNA
ggccttgttcctgtcccca

SEQ ID NO: 2407 - RNA, 19 nt, Homo sapiens
  source 1..19: mol_type = transcribed RNA
tggggacaggaacaaggcc

SEQ ID NO: 2408 - RNA, 20 nt, Homo sapiens
  source 1..20: mol_type = transcribed RNA
agccccctggccccaaaccc

SEQ ID NO: 2409 - RNA, 20 nt, Homo sapiens
  source 1..20: mol_type = transcribed RNA
gggtttggggccagggggct

SEQ ID NO: 2410 - RNA, 18 nt, Homo sapiens
  source 1..18: mol_type = transcribed RNA
ctctgggaaatgggacag

SEQ ID NO: 2411 - RNA, 18 nt, Homo sapiens
  source 1..18: mol_type = transcribed RNA
ctgtcccatttcccagag

SEQ ID NO: 2412 - RNA, 18 nt, Homo sapiens
  source 1..18: mol_type = transcribed RNA
ccgctttctgagctggac

SEQ ID NO: 2413 - RNA, 18 nt, Homo sapiens
  source 1..18: mol_type = transcribed RNA
gtccagctcagaaagcgg

SEQ ID NO: 2414 - RNA, 17 nt, Homo sapiens
  source 1..17: mol_type = transcribed RNA
ggtgaggctagctggtg

SEQ ID NO: 2415 - RNA, 17 nt, Homo sapiens
  source 1..17: mol_type = transcribed RNA
caccagctagcctcacc

SEQ ID NO: 2416 - RNA, 17 nt, Homo sapiens
  source 1..17: mol_type = transcribed RNA
acattgccagggagttt

SEQ ID NO: 2417 - RNA, 17 nt, Homo sapiens
  source 1..17: mol_type = transcribed RNA
aaactccctggcaatgt

SEQ ID NO: 2418 - RNA, 17 nt, Homo sapiens
  source 1..17: mol_type = transcribed RNA
cactgtgggtacatgct

SEQ ID NO: 2419 - RNA, 17 nt, Homo sapiens
  source 1..17: mol_type = transcribed RNA
agcatgtacccacagtg

SEQ ID NO: 2420 - RNA, 17 nt, Homo sapiens
  source 1..17: mol_type = transcribed RNA
tccctgagcaaagccac

SEQ ID NO: 2421 - RNA, 17 nt, Homo sapiens
  source 1..17: mol_type = transcribed RNA
gtggctttgctcaggga

SEQ ID NO: 2422 - RNA, 18 nt, Homo sapiens
  source 1..18: mol_type = transcribed RNA
gggattctgtagcttcct

SEQ ID NO: 2423 - RNA, 18 nt, Homo sapiens
  source 1..18: mol_type = transcribed RNA
aggaagctacagaatccc

SEQ ID NO: 2424 - RNA, 21 nt, Homo sapiens
  source 1..21: mol_type = transcribed RNA
ttagcggtggaccgccctgcg

SEQ ID NO: 2425 - RNA, 21 nt, Homo sapiens
  source 1..21: mol_type = transcribed RNA
cgcagggcggtccaccgctaa

SEQ ID NO: 2426 - RNA, 21 nt, Homo sapiens
  source 1..21: mol_type = transcribed RNA
ctgtgggctcagcgcgtgggg

SEQ ID NO: 2427 - RNA, 21 nt, Homo sapiens
  source 1..21: mol_type = transcribed RNA
ccccacgcgctgagcccacag

SEQ ID NO: 2428 - RNA, 18 nt, Homo sapiens
  source 1..18: mol_type = transcribed RNA
cagccccacagcctcaga

SEQ ID NO: 2429 - RNA, 18 nt, Homo sapiens
  source 1..18: mol_type = transcribed RNA
tctgaggctgtggggctg

SEQ ID NO: 2430 - RNA, 20 nt, Homo sapiens
  source 1..20: mol_type = transcribed RNA
ccctgagaccctaaccttaa

SEQ ID NO: 2431 - RNA, 20 nt, Homo sapiens
  source 1..20: mol_type = transcribed RNA
ttaaggttagggtctcaggg

SEQ ID NO: 2432 - RNA, 18 nt, Homo sapiens
  source 1..18: mol_type = transcribed RNA
ttgcacttgtctcagtga

SEQ ID NO: 2433 - RNA, 18 nt, Homo sapiens
  source 1..18: mol_type = transcribed RNA
tcactgagacaagtgcaa

SEQ ID NO: 2434 - RNA, 20 nt, Homo sapiens
  source 1..20: mol_type = transcribed RNA
tgttcctctgtctcccagac

SEQ ID NO: 2435 - RNA, 20 nt, Homo sapiens
  source 1..20: mol_type = transcribed RNA
gtctgggagacagaggaaca

SEQ ID NO: 2436 - RNA, 19 nt, Homo sapiens
  source 1..19: mol_type = transcribed RNA
ggcttgcatgggggactgg

SEQ ID NO: 2437 - RNA, 19 nt, Homo sapiens
  source 1..19: mol_type = transcribed RNA
ccagtcccccatgcaagcc

SEQ ID NO: 2438 - RNA, 17 nt, Homo sapiens
  source 1..17: mol_type = transcribed RNA
ccagttttcccaggatt

SEQ ID NO: 2439 - RNA, 17 nt, Homo sapiens
  source 1..17: mol_type = transcribed RNA
aatcctgggaaaactgg

SEQ ID NO: 2440 - RNA, 19 nt, Homo sapiens
  source 1..19: mol_type = transcribed RNA
cctgagaccctagttccac

SEQ ID NO: 2441 - RNA, 19 nt, Homo sapiens
  source 1..19: mol_type = transcribed RNA
gtggaactagggtctcagg

SEQ ID NO: 2442 - RNA, 19 nt, Homo sapiens
  source 1..19: mol_type = transcribed RNA
cctcagatcagagccttgc

SEQ ID NO: 2443 - RNA, 19 nt, Homo sapiens
  source 1..19: mol_type = transcribed RNA
gcaaggctctgatctgagg

SEQ ID NO: 2444 - RNA, 22 nt, Homo sapiens
  source 1..22: mol_type = transcribed RNA
cattgcacttgtctcggtctga

SEQ ID NO: 2445 - RNA, 22 nt, Homo sapiens
  source 1..22: mol_type = transcribed RNA
tcagaccgagacaagtgcaatg

SEQ ID NO: 2446 - RNA, 21 nt, Homo sapiens
  source 1..21: mol_type = transcribed RNA
aggcggagacttgggcaattg

SEQ ID NO: 2447 - RNA, 21 nt, Homo sapiens
  source 1..21: mol_type = transcribed RNA
caattgcccaagtctccgcct

SEQ ID NO: 2448 - RNA, 22 nt, Homo sapiens
  source 1..22: mol_type = transcribed RNA
cctattcttggttacttgcacg

SEQ ID NO: 2449 - RNA, 22 nt, Homo sapiens
  source 1..22: mol_type = transcribed RNA
cgtgcaagtaaccaagaatagg

SEQ ID NO: 2450 - RNA, 19 nt, Homo sapiens
  source 1..19: mol_type = transcribed RNA
aatggatttttggagcagg

SEQ ID NO: 2451 - RNA, 19 nt, Homo sapiens
  source 1..19: mol_type = transcribed RNA
cctgctccaaaaatccatt

SEQ ID NO: 2452 - RNA, 22 nt, Homo sapiens
  source 1..22: mol_type = transcribed RNA
tgcggggctagggctaacagca

SEQ ID NO: 2453 - RNA, 22 nt, Homo sapiens
  source 1..22: mol_type = transcribed RNA
tgctgttagccctagccccgca

SEQ ID NO: 2454 - RNA, 22 nt, Homo sapiens
  source 1..22: mol_type = transcribed RNA
aaaagtaattgcggattttgcc

SEQ ID NO: 2455 - RNA, 22 nt, Homo sapiens
  source 1..22: mol_type = transcribed RNA
ggcaaaatccgcaattactttt

SEQ ID NO: 2456 - RNA, 22 nt, Homo sapiens
  source 1..22: mol_type = transcribed RNA
caaaagtaattgtggattttgt

SEQ ID NO: 2457 - RNA, 22 nt, Homo sapiens
  source 1..22: mol_type = transcribed RNA
acaaaatccacaattacttttg

SEQ ID NO: 2458 - RNA, 23 nt, Homo sapiens
  source 1..23: mol_type = transcribed RNA
taagtgcttccatgttttggtga

SEQ ID NO: 2459 - RNA, 23 nt, Homo sapiens
  source 1..23: mol_type = transcribed RNA
tcaccaaaacatggaagcactta

SEQ ID NO: 2460 - RNA, 23 nt, Homo sapiens
  source 1..23: mol_type = transcribed RNA
acttaaacgtggatgtacttgct

SEQ ID NO: 2461 - RNA, 23 nt, Homo sapiens
  source 1..23: mol_type = transcribed RNA
agcaagtacatccacgtttaagt

SEQ ID NO: 2462 - RNA, 21 nt, Homo sapiens
  source 1..21: mol_type = transcribed RNA
ctatacaatctactgtctttc

SEQ ID NO: 2463 - RNA, 21 nt, Homo sapiens
  source 1..21: mol_type = transcribed RNA
gaaagacagtagattgtatag

SEQ ID NO: 2464 - RNA, 22 nt, Homo sapiens
  source 1..22: mol_type = transcribed RNA
tgaggtagtaggttgtatagtt

SEQ ID NO: 2465 - RNA, 22 nt, Homo sapiens
  source 1..22: mol_type = transcribed RNA
aactatacaacctactacctca

SEQ ID NO: 2466 - RNA, 22 nt, Homo sapiens
  source 1..22: mol_type = transcribed RNA
ctgtacagcctcctagctttcc

SEQ ID NO: 2467 - RNA, 22 nt, Homo sapiens
  source 1..22: mol_type = transcribed RNA
ggaaagctaggaggctgtacag

SEQ ID NO: 2468 - RNA, 20 nt, Homo sapiens
  source 1..20: mol_type = transcribed RNA
caccaggcattgtggtctcc

SEQ ID NO: 2469 - RNA, 20 nt, Homo sapiens
  source 1..20: mol_type = transcribed RNA
ggagaccacaatgcctggtg

SEQ ID NO: 2470 - RNA, 23 nt, Homo sapiens
  source 1..23: mol_type = transcribed RNA
tgagtaccgccatgtctgttggg

SEQ ID NO: 2471 - RNA, 23 nt, Homo sapiens
  source 1..23: mol_type = transcribed RNA
cccaacagacatggcggtactca

SEQ ID NO: 2472 - RNA, 22 nt, Homo sapiens
  source 1..22: mol_type = transcribed RNA
tacccagagcatgcagtgtgaa

SEQ ID NO: 2473 - RNA, 22 nt, Homo sapiens
  source 1..22: mol_type = transcribed RNA
ttcacactgcatgctctgggta

SEQ ID NO: 2474 - RNA, 22 nt, Homo sapiens
  source 1..22: mol_type = transcribed RNA
aagtgctgtcatagctgaggtc

SEQ ID NO: 2475 - RNA, 22 nt, Homo sapiens
  source 1..22: mol_type = transcribed RNA
gacctcagctatgacagcactt

SEQ ID NO: 2476 - RNA, 23 nt, Homo sapiens
  source 1..23: mol_type = transcribed RNA
cactcagccttgagggcactttc

SEQ ID NO: 2477 - RNA, 23 nt, Homo sapiens
  source 1..23: mol_type = transcribed RNA
gaaagtgccctcaaggctgagtg

SEQ ID NO: 2478 - RNA, 22 nt, Homo sapiens
  source 1..22: mol_type = transcribed RNA
tcgacagcacgacactgccttc

SEQ ID NO: 2479 - RNA, 22 nt, Homo sapiens
  source 1..22: mol_type = transcribed RNA
gaaggcagtgtcgtgctgtcga

SEQ ID NO: 2480 - RNA, 22 nt, Homo sapiens
  source 1..22: mol_type = transcribed RNA
taggtagtttcctgttgttggg

SEQ ID NO: 2481 - RNA, 22 nt, Homo sapiens
  source 1..22: mol_type = transcribed RNA
cccaacaacaggaaactaccta

SEQ ID NO: 2482 - RNA, 21 nt, Homo sapiens
  source 1..21: mol_type = transcribed RNA
tacagtactgtgataactgaa

SEQ ID NO: 2483 - RNA, 21 nt, Homo sapiens
  source 1..21: mol_type = transcribed RNA
ttcagttatcacagtactgta

SEQ ID NO: 2484 - RNA, 22 nt, Homo sapiens
  source 1..22: mol_type = transcribed RNA
cagttatcacagtgctgatgct

SEQ ID NO: 2485 - RNA, 22 nt, Homo sapiens
  source 1..22: mol_type = transcribed RNA
agcatcagcactgtgataactg

SEQ ID NO: 2486 - RNA, 23 nt, Homo sapiens
  source 1..23: mol_type = transcribed RNA
tgtgcaaatctatgcaaaactga

SEQ ID NO: 2487 - RNA, 23 nt, Homo sapiens
  source 1..23: mol_type = transcribed RNA
tcagttttgcatagatttgcaca

SEQ ID NO: 2488 - RNA, 22 nt, Homo sapiens
  source 1..22: mol_type = transcribed RNA
agttttgcatagttgcactaca

SEQ ID NO: 2489 - RNA, 22 nt, Homo sapiens
  source 1..22: mol_type = transcribed RNA
tgtagtgcaactatgcaaaact

SEQ ID NO: 2490 - RNA, 23 nt, Homo sapiens
  source 1..23: mol_type = transcribed RNA
agttttgcaggtttgcatccagc

SEQ ID NO: 2491 - RNA, 23 nt, Homo sapiens
  source 1..23: mol_type = transcribed RNA
gctggatgcaaacctgcaaaact

SEQ ID NO: 2492 - RNA, 22 nt, Homo sapiens
  source 1..22: mol_type = transcribed RNA
agttttgcaggtttgcatttca

SEQ ID NO: 2493 - RNA, 22 nt, Homo sapiens
  source 1..22: mol_type = transcribed RNA
tgaaatgcaaacctgcaaaact

SEQ ID NO: 2494 - RNA, 23 nt, Homo sapiens
  source 1..23: mol_type = transcribed RNA
tgtgcaaatccatgcaaaactga

SEQ ID NO: 2495 - RNA, 23 nt, Homo sapiens
  source 1..23: mol_type = transcribed RNA
tcagttttgcatggatttgcaca

SEQ ID NO: 2496 - RNA, 23 nt, Homo sapiens
  source 1..23: mol_type = transcribed RNA
tactgcatcaggaactgattgga

SEQ ID NO: 2497 - RNA, 23 nt, Homo sapiens
  source 1..23: mol_type = transcribed RNA
tccaatcagttcctgatgcagta

SEQ ID NO: 2498 - RNA, 22 nt, Homo sapiens
  source 1..22: mol_type = transcribed RNA
atggttccgtcaagcaccatgg

SEQ ID NO: 2499 - RNA, 22 nt, Homo sapiens
  source 1..22: mol_type = transcribed RNA
ccatggtgcttgacggaaccat

SEQ ID NO: 2500 - RNA, 21 nt, Homo sapiens
  source 1..21: mol_type = transcribed RNA
agctacatctggctactgggt

SEQ ID NO: 2501 - RNA, 21 nt, Homo sapiens
  source 1..21: mol_type = transcribed RNA
acccagtagccagatgtagct

SEQ ID NO: 2502 - RNA, 22 nt, Homo sapiens
  source 1..22: mol_type = transcribed RNA
ctcagtagccagtgtagatcct

SEQ ID NO: 2503 - RNA, 22 nt, Homo sapiens
  source 1..22: mol_type = transcribed RNA
aggatctacactggctactgag

SEQ ID NO: 2504 - RNA, 22 nt, Homo sapiens
  source 1..22: mol_type = transcribed RNA
ttatcagaatctccaggggtac

SEQ ID NO: 2505 - RNA, 22 nt, Homo sapiens
  source 1..22: mol_type = transcribed RNA
gtacccctggagattctgataa

SEQ ID NO: 2506 - RNA, 23 nt, Homo sapiens
  source 1..23: mol_type = transcribed RNA
atcaacagacattaattgggcgc

SEQ ID NO: 2507 - RNA, 23 nt, Homo sapiens
  source 1..23: mol_type = transcribed RNA
gcgcccaattaatgtctgttgat

SEQ ID NO: 2508 - RNA, 21 nt, Homo sapiens
  source 1..21: mol_type = transcribed RNA
caaaacgtgaggcgctgctat

SEQ ID NO: 2509 - RNA, 21 nt, Homo sapiens
  source 1..21: mol_type = transcribed RNA
atagcagcgcctcacgttttg

SEQ ID NO: 2510 - RNA, 22 nt, Homo sapiens
  source 1..22: mol_type = transcribed RNA
cagcagcaattcatgttttgaa

SEQ ID NO: 2511 - RNA, 22 nt, Homo sapiens
  source 1..22: mol_type = transcribed RNA
ttcaaaacatgaattgctgctg

SEQ ID NO: 2512 - RNA, 18 nt, Homo sapiens
  source 1..18: mol_type = transcribed RNA
ttcacagggaggtgtcat

SEQ ID NO: 2513 - RNA, 18 nt, Homo sapiens
  source 1..18: mol_type = transcribed RNA
atgacacctccctgtgaa

SEQ ID NO: 2514 - RNA, 20 nt, Homo sapiens
  source 1..20: mol_type = transcribed RNA
gcggagagagaatggggagc

SEQ ID NO: 2515 - RNA, 20 nt, Homo sapiens
  source 1..20: mol_type = transcribed RNA
gctccccattctctctccgc

SEQ ID NO: 2516 - RNA, 21 nt, Homo sapiens
  source 1..21: mol_type = transcribed RNA
cctgcgagtctccggcggtgg

SEQ ID NO: 2517 - RNA, 21 nt, Homo sapiens
  source 1..21: mol_type = transcribed RNA
ccaccgccggagactcgcagg

SEQ ID NO: 2518 - RNA, 21 nt, Homo sapiens
  source 1..21: mol_type = transcribed RNA
gggctagggcctgctgccccc

SEQ ID NO: 2519 - RNA, 21 nt, Homo sapiens
  source 1..21: mol_type = transcribed RNA
gggggcagcaggccctagccc

SEQ ID NO: 2520 - RNA, 19 nt, Homo sapiens
  source 1..19: mol_type = transcribed RNA
ttctgctgccggccaaggc

SEQ ID NO: 2521 - RNA, 19 nt, Homo sapiens
  source 1..19: mol_type = transcribed RNA
gccttggccggcagcagaa

SEQ ID NO: 2522 - RNA, 22 nt, Homo sapiens
  source 1..22: mol_type = transcribed RNA
tcctcatcacactgcaccttag

SEQ ID NO: 2523 - RNA, 22 nt, Homo sapiens
  source 1..22: mol_type = transcribed RNA
ctaaggtgcagtgtgatgagga

SEQ ID NO: 2524 - RNA, 20 nt, Homo sapiens
  source 1..20: mol_type = transcribed RNA
ggtagtgagttatcagctac

SEQ ID NO: 2525 - RNA, 20 nt, Homo sapiens
  source 1..20: mol_type = transcribed RNA
gtagctgataactcactacc

SEQ ID NO: 2526 - RNA, 20 nt, Homo sapiens
  source 1..20: mol_type = transcribed RNA
gatattcagaggctaggtgg

SEQ ID NO: 2527 - RNA, 20 nt, Homo sapiens
  source 1..20: mol_type = transcribed RNA
ccacctagcctctgaatatc

SEQ ID NO: 2528 - RNA, 21 nt, Homo sapiens
  source 1..21: mol_type = transcribed RNA
acggcccaggcggcattggtg

SEQ ID NO: 2529 - RNA, 21 nt, Homo sapiens
  source 1..21: mol_type = transcribed RNA
caccaatgccgcctgggccgt

SEQ ID NO: 2530 - RNA, 21 nt, Homo sapiens
  source 1..21: mol_type = transcribed RNA
agcatgacagaggagaggtgg

SEQ ID NO: 2531 - RNA, 21 nt, Homo sapiens
  source 1..21: mol_type = transcribed RNA
ccacctctcctctgtcatgct

SEQ ID NO: 2532 - RNA, 21 nt, Homo sapiens
  source 1..21: mol_type = transcribed RNA
gggaagagctgtacggccttc

SEQ ID NO: 2533 - RNA, 21 nt, Homo sapiens
  source 1..21: mol_type = transcribed RNA
gaaggccgtacagctcttccc

SEQ ID NO: 2534 - RNA, 19 nt, Homo sapiens
  source 1..19: mol_type = transcribed RNA
ccgcctgagctagctgtgg

SEQ ID NO: 2535 - RNA, 19 nt, Homo sapiens
  source 1..19: mol_type = transcribed RNA
ccacagctagctcaggcgg

SEQ ID NO: 2536 - RNA, 24 nt, Homo sapiens
  source 1..24: mol_type = transcribed RNA
ttggaagcttggaccaactagctg

SEQ ID NO: 2537 - RNA, 24 nt, Homo sapiens
  source 1..24: mol_type = transcribed RNA
cagctagttggtccaagcttccaa

SEQ ID NO: 2538 - RNA, 19 nt, Homo sapiens
  source 1..19: mol_type = transcribed RNA
tctagtgcgggcgttcccg

SEQ ID NO: 2539 - RNA, 19 nt, Homo sapiens
  source 1..19: mol_type = transcribed RNA
cgggaacgcccgcactaga

SEQ ID NO: 2540 - RNA, 24 nt, Homo sapiens
  source 1..24: mol_type = transcribed RNA
aggagcagtgccggccaaggcgcc

SEQ ID NO: 2541 - RNA, 24 nt, Homo sapiens
  source 1..24: mol_type = transcribed RNA
ggcgccttggccggcactgctcct

SEQ ID NO: 2542 - RNA, 19 nt, Homo sapiens
  source 1..19: mol_type = transcribed RNA
gaatacgtctggttgatcc

SEQ ID NO: 2543 - RNA, 19 nt, Homo sapiens
  source 1..19: mol_type = transcribed RNA
ggatcaaccagacgtattc

SEQ ID NO: 2544 - RNA, 20 nt, Homo sapiens
  source 1..20: mol_type = transcribed RNA
cttatatcagaggctgtggg

SEQ ID NO: 2545 - RNA, 20 nt, Homo sapiens
  source 1..20: mol_type = transcribed RNA
cccacagcctctgatataag

SEQ ID NO: 2546 - RNA, 20 nt, Homo sapiens
  source 1..20: mol_type = transcribed RNA
ttccgccagtcggtggccgg

SEQ ID NO: 2547 - RNA, 20 nt, Homo sapiens
  source 1..20: mol_type = transcribed RNA
ccggccaccgactggcggaa

SEQ ID NO: 2548 - RNA, 19 nt, Homo sapiens
  source 1..19: mol_type = transcribed RNA
aaggggctgggggagcaca

SEQ ID NO: 2549 - RNA, 19 nt, Homo sapiens
  source 1..19: mol_type = transcribed RNA
tgtgctcccccagcccctt

SEQ ID NO: 2550 - RNA, 23 nt, Homo sapiens
  source 1..23: mol_type = transcribed RNA
aggttgggatcggttgcaatgct

SEQ ID NO: 2551 - RNA, 23 nt, Homo sapiens
  source 1..23: mol_type = transcribed RNA
agcattgcaaccgatcccaacct

SEQ ID NO: 2552 - RNA, 22 nt, Homo sapiens
  source 1..22: mol_type = transcribed RNA
gggtggggatttgttgcattac

SEQ ID NO: 2553 - RNA, 22 nt, Homo sapiens
  source 1..22: mol_type = transcribed RNA
gtaatgcaacaaatccccaccc

SEQ ID NO: 2554 - RNA, 22 nt, Homo sapiens
  source 1..22: mol_type = transcribed RNA
tattgcacttgtcccggcctgt

SEQ ID NO: 2555 - RNA, 22 nt, Homo sapiens
  source 1..22: mol_type = transcribed RNA
acaggccgggacaagtgcaata

SEQ ID NO: 2556 - RNA, 22 nt, Homo sapiens
  source 1..22: mol_type = transcribed RNA
tattgcactcgtcccggcctcc

SEQ ID NO: 2557 - RNA, 22 nt, Homo sapiens
  source 1..22: mol_type = transcribed RNA
ggaggccgggacgagtgcaata

SEQ ID NO: 2558 - RNA, 22 nt, Homo sapiens
  source 1..22: mol_type = transcribed RNA
agggacgggacgcggtgcagtg

SEQ ID NO: 2559 - RNA, 22 nt, Homo sapiens
  source 1..22: mol_type = transcribed RNA
cactgcaccgcgtcccgtccct

SEQ ID NO: 2560 - RNA, 21 nt, Homo sapiens
  source 1..21: mol_type = transcribed RNA
atcacattgccagggatttcc

SEQ ID NO: 2561 - RNA, 21 nt, Homo sapiens
  source 1..21: mol_type = transcribed RNA
ggaaatccctggcaatgtgat

SEQ ID NO: 2562 - RNA, 22 nt, Homo sapiens
  source 1..22: mol_type = transcribed RNA
ggggttcctggggatgggattt

SEQ ID NO: 2563 - RNA, 22 nt, Homo sapiens
  source 1..22: mol_type = transcribed RNA
aaatcccatccccaggaacccc

SEQ ID NO: 2564 - RNA, 22 nt, Homo sapiens
  source 1..22: mol_type = transcribed RNA
actgcagtgaaggcacttgtag

SEQ ID NO: 2565 - RNA, 22 nt, Homo sapiens
  source 1..22: mol_type = transcribed RNA
ctacaagtgccttcactgcagt

SEQ ID NO: 2566 - RNA, 23 nt, Homo sapiens
  source 1..23: mol_type = transcribed RNA
agctacattgtctgctgggtttc

SEQ ID NO: 2567 - RNA, 23 nt, Homo sapiens
  source 1..23: mol_type = transcribed RNA
gaaacccagcagacaatgtagct

SEQ ID NO: 2568 - RNA, 22 nt, Homo sapiens
  source 1..22: mol_type = transcribed RNA
acctggcatacaatgtagattt

SEQ ID NO: 2569 - RNA, 22 nt, Homo sapiens
  source 1..22: mol_type = transcribed RNA
aaatctacattgtatgccaggt

SEQ ID NO: 2570 - RNA, 22 nt, Homo sapiens
  source 1..22: mol_type = transcribed RNA
tcgtaccgtgagtaataatgcg

SEQ ID NO: 2571 - RNA, 22 nt, Homo sapiens
  source 1..22: mol_type = transcribed RNA
cgcattattactcacggtacga

SEQ ID NO: 2572 - RNA, 21 nt, Homo sapiens
  source 1..21: mol_type = transcribed RNA
cattattacttttggtacgcg

SEQ ID NO: 2573 - RNA, 21 nt, Homo sapiens
  source 1..21: mol_type = transcribed RNA
cgcgtaccaaaagtaataatg

SEQ ID NO: 2574 - RNA, 23 nt, Homo sapiens
  source 1..23: mol_type = transcribed RNA
tactccagagggcgtcactcatg

SEQ ID NO: 2575 - RNA, 23 nt, Homo sapiens
  source 1..23: mol_type = transcribed RNA
catgagtgacgccctctggagta

SEQ ID NO: 2576 - RNA, 21 nt, Homo sapiens
  source 1..21: mol_type = transcribed RNA
tcccacgttgtggcccagcag

SEQ ID NO: 2577 - RNA, 21 nt, Homo sapiens
  source 1..21: mol_type = transcribed RNA
ctgctgggccacaacgtggga

SEQ ID NO: 2578 - RNA, 23 nt, Homo sapiens
  source 1..23: mol_type = transcribed RNA
cctcaccaccccttctgcctgca

SEQ ID NO: 2579 - RNA, 23 nt, Homo sapiens
  source 1..23: mol_type = transcribed RNA
tgcaggcagaaggggtggtgagg

SEQ ID NO: 2580 - RNA, 24 nt, Homo sapiens
  source 1..24: mol_type = transcribed RNA
ctgcaggcagaagtggggctgaca

SEQ ID NO: 2581 - RNA, 24 nt, Homo sapiens
  source 1..24: mol_type = transcribed RNA
tgtcagccccacttctgcctgcag

SEQ ID NO: 2582 - RNA, 21 nt, Homo sapiens
  source 1..21: mol_type = transcribed RNA
ccaaaccagtcgtgcctgtgg

SEQ ID NO: 2583 - RNA, 21 nt, Homo sapiens
  source 1..21: mol_type = transcribed RNA
ccacaggcacgactggtttgg

SEQ ID NO: 2584 - RNA, 22 nt, Homo sapiens
  source 1..22: mol_type = transcribed RNA
ctcaaaccggctgtgcctgtgg

SEQ ID NO: 2585 - RNA, 22 nt, Homo sapiens
  source 1..22: mol_type = transcribed RNA
ccacaggcacagccggtttgag

SEQ ID NO: 2586 - RNA, 21 nt, Homo sapiens
  source 1..21: mol_type = transcribed RNA
acaggcacgactggtttggca

SEQ ID NO: 2587 - RNA, 21 nt, Homo sapiens
  source 1..21: mol_type = transcribed RNA
tgccaaaccagtcgtgcctgt

SEQ ID NO: 2588 - RNA, 22 nt, Homo sapiens
  source 1..22: mol_type = transcribed RNA
tccgaactctccattcctctgc

SEQ ID NO: 2589 - RNA, 22 nt, Homo sapiens
  source 1..22: mol_type = transcribed RNA
gcagaggaatggagagttcgga

SEQ ID NO: 2590 - RNA, 20 nt, Homo sapiens
  source 1..20: mol_type = transcribed RNA
tgggaatgggggtaagggcc

SEQ ID NO: 2591 - RNA, 20 nt, Homo sapiens
  source 1..20: mol_type = transcribed RNA
ggcccttacccccattccca

SEQ ID NO: 2592 - RNA, 22 nt, Homo sapiens
  source 1..22: mol_type = transcribed RNA
aggcgatgtggggatgtagaga

SEQ ID NO: 2593 - RNA, 22 nt, Homo sapiens
  source 1..22: mol_type = transcribed RNA
tctctacatccccacatcgcct

SEQ ID NO: 2594 - RNA, 21 nt, Homo sapiens
  source 1..21: mol_type = transcribed RNA
tagtggtcagagggcttatga

SEQ ID NO: 2595 - RNA, 21 nt, Homo sapiens
  source 1..21: mol_type = transcribed RNA
tcataagccctctgaccacta

SEQ ID NO: 2596 - RNA, 22 nt, Homo sapiens
  source 1..22: mol_type = transcribed RNA
tctgacatcagtgattctcctg

SEQ ID NO: 2597 - RNA, 22 nt, Homo sapiens
  source 1..22: mol_type = transcribed RNA
caggagaatcactgatgtcaga

SEQ ID NO: 2598 - RNA, 22 nt, Homo sapiens
  source 1..22: mol_type = transcribed RNA
cgcgcctgcaggaactggtaga

SEQ ID NO: 2599 - RNA, 22 nt, Homo sapiens
  source 1..22: mol_type = transcribed RNA
tctaccagttcctgcaggcgcg

SEQ ID NO: 2600 - RNA, 23 nt, Homo sapiens
  source 1..23: mol_type = transcribed RNA
tgggcaggggcttattgtaggag

SEQ ID NO: 2601 - RNA, 23 nt, Homo sapiens
  source 1..23: mol_type = transcribed RNA
ctcctacaataagcccctgccca

SEQ ID NO: 2602 - RNA, 22 nt, Homo sapiens
  source 1..22: mol_type = transcribed RNA
tgcaggggtcgggtgggccagg

SEQ ID NO: 2603 - RNA, 22 nt, Homo sapiens
  source 1..22: mol_type = transcribed RNA
cctggcccacccgacccctgca

SEQ ID NO: 2604 - RNA, 20 nt, Homo sapiens
  source 1..20: mol_type = transcribed RNA
aggcgcacccgaccacatgc

SEQ ID NO: 2605 - RNA, 20 nt, Homo sapiens
  source 1..20: mol_type = transcribed RNA
gcatgtggtcgggtgcgcct

SEQ ID NO: 2606 - RNA, 22 nt, Homo sapiens
  source 1..22: mol_type = transcribed RNA
atagtccgagtaacgtcggggc

SEQ ID NO: 2607 - RNA, 22 nt, Homo sapiens
  source 1..22: mol_type = transcribed RNA
gccccgacgttactcggactat

SEQ ID NO: 2608 - RNA, 23 nt, Homo sapiens
  source 1..23: mol_type = transcribed RNA
ctgggcccgcggcgggcgtgggg

SEQ ID NO: 2609 - RNA, 23 nt, Homo sapiens
  source 1..23: mol_type = transcribed RNA
ccccacgcccgccgcgggcccag

SEQ ID NO: 2610 - RNA, 21 nt, Homo sapiens
  source 1..21: mol_type = transcribed RNA
tacttggaaaggcatcagttg

SEQ ID NO: 2611 - RNA, 21 nt, Homo sapiens
  source 1..21: mol_type = transcribed RNA
caactgatgcctttccaagta

SEQ ID NO: 2612 - RNA, 22 nt, Homo sapiens
  source 1..22: mol_type = transcribed RNA
tgcaacgaacctgagccactga

SEQ ID NO: 2613 - RNA, 22 nt, Homo sapiens
  source 1..22: mol_type = transcribed RNA
tcagtggctcaggttcgttgca

SEQ ID NO: 2614 - RNA, 22 nt, Homo sapiens
  source 1..22: mol_type = transcribed RNA
tgcaacttacctgagtcattga

SEQ ID NO: 2615 - RNA, 22 nt, Homo sapiens
  source 1..22: mol_type = transcribed RNA
tcaatgactcaggtaagttgca

SEQ ID NO: 2616 - RNA, 21 nt, Homo sapiens
  source 1..21: mol_type = transcribed RNA
cactgtgtcctttctgcgtag

SEQ ID NO: 2617 - RNA, 21 nt, Homo sapiens
  source 1..21: mol_type = transcribed RNA
ctacgcagaaaggacacagtg

SEQ ID NO: 2618 - RNA, 22 nt, Homo sapiens
  source 1..22: mol_type = transcribed RNA
cactggctcctttctgggtaga

SEQ ID NO: 2619 - RNA, 22 nt, Homo sapiens
  source 1..22: mol_type = transcribed RNA
tctacccagaaaggagccagtg

SEQ ID NO: 2620 - RNA, 22 nt, Homo sapiens
  source 1..22: mol_type = transcribed RNA
cactgtttcctttctgagtgga

SEQ ID NO: 2621 - RNA, 22 nt, Homo sapiens
  source 1..22: mol_type = transcribed RNA
tccactcagaaaggaaacagtg

SEQ ID NO: 2622 - RNA, 21 nt, Homo sapiens
  source 1..21: mol_type = transcribed RNA
tattcagaaaggtgccagtca

SEQ ID NO: 2623 - RNA, 21 nt, Homo sapiens
  source 1..21: mol_type = transcribed RNA
tgactggcacctttctgaata

SEQ ID NO: 2624 - RNA, 20 nt, Homo sapiens
  source 1..20: mol_type = transcribed RNA
attcctagaaattgttcata

SEQ ID NO: 2625 - RNA, 20 nt, Homo sapiens
  source 1..20: mol_type = transcribed RNA
tatgaacaatttctaggaat

SEQ ID NO: 2626 - RNA, 22 nt, Homo sapiens
  source 1..22: mol_type = transcribed RNA
taatactgtctggtaaaaccgt

SEQ ID NO: 2627 - RNA, 22 nt, Homo sapiens
  source 1..22: mol_type = transcribed RNA
acggttttaccagacagtatta

SEQ ID NO: 2628 - RNA, 22 nt, Homo sapiens
  source 1..22: mol_type = transcribed RNA
tgaaacatacacgggaaacctc

SEQ ID NO: 2629 - RNA, 22 nt, Homo sapiens
  source 1..22: mol_type = transcribed RNA
gaggtttcccgtgtatgtttca

SEQ ID NO: 2630 - RNA, 22 nt, Homo sapiens
  source 1..22: mol_type = transcribed RNA
ctatacaacctactgccttccc

SEQ ID NO: 2631 - RNA, 22 nt, Homo sapiens
  source 1..22: mol_type = transcribed RNA
gggaaggcagtaggttgtatag

SEQ ID NO: 2632 - RNA, 22 nt, Homo sapiens
  source 1..22: mol_type = transcribed RNA
tgaggtagtaggttgtgtggtt

SEQ ID NO: 2633 - RNA, 22 nt, Homo sapiens
  source 1..22: mol_type = transcribed RNA
aaccacacaacctactacctca

SEQ ID NO: 2634 - RNA, 22 nt, Homo sapiens
  source 1..22: mol_type = transcribed RNA
taacactgtctggtaacgatgt

SEQ ID NO: 2635 - RNA, 22 nt, Homo sapiens
  source 1..22: mol_type = transcribed RNA
acatcgttaccagacagtgtta

SEQ ID NO: 2636 - RNA, 22 nt, Homo sapiens
  source 1..22: mol_type = transcribed RNA
catcttaccggacagtgctgga

SEQ ID NO: 2637 - RNA, 22 nt, Homo sapiens
  source 1..22: mol_type = transcribed RNA
tccagcactgtccggtaagatg

SEQ ID NO: 2638 - RNA, 22 nt, Homo sapiens
  source 1..22: mol_type = transcribed RNA
taatactgcctggtaatgatga

SEQ ID NO: 2639 - RNA, 22 nt, Homo sapiens
  source 1..22: mol_type = transcribed RNA
tcatcattaccaggcagtatta

SEQ ID NO: 2640 - RNA, 22 nt, Homo sapiens
  source 1..22: mol_type = transcribed RNA
catcttactgggcagcattgga

SEQ ID NO: 2641 - RNA, 22 nt, Homo sapiens
  source 1..22: mol_type = transcribed RNA
tccaatgctgcccagtaagatg

SEQ ID NO: 2642 - RNA, 23 nt, Homo sapiens
  source 1..23: mol_type = transcribed RNA
taatactgccgggtaatgatgga

SEQ ID NO: 2643 - RNA, 23 nt, Homo sapiens
  source 1..23: mol_type = transcribed RNA
tccatcattacccggcagtatta

SEQ ID NO: 2644 - RNA, 22 nt, Homo sapiens
  source 1..22: mol_type = transcribed RNA
cgtcttacccagcagtgtttgg

SEQ ID NO: 2645 - RNA, 22 nt, Homo sapiens
  source 1..22: mol_type = transcribed RNA
ccaaacactgctgggtaagacg

SEQ ID NO: 2646 - RNA, 22 nt, Homo sapiens
  source 1..22: mol_type = transcribed RNA
tccagcatcagtgattttgttg

SEQ ID NO: 2647 - RNA, 22 nt, Homo sapiens
  source 1..22: mol_type = transcribed RNA
caacaaaatcactgatgctgga

SEQ ID NO: 2648 - RNA, 20 nt, Homo sapiens
  source 1..20: mol_type = transcribed RNA
tacagtatagatgatgtact

SEQ ID NO: 2649 - RNA, 20 nt, Homo sapiens
  source 1..20: mol_type = transcribed RNA
agtacatcatctatactgta

SEQ ID NO: 2650 - RNA, 22 nt, Homo sapiens
  source 1..22: mol_type = transcribed RNA
ggatatcatcatatactgtaag

SEQ ID NO: 2651 - RNA, 22 nt, Homo sapiens
  source 1..22: mol_type = transcribed RNA
cttacagtatatgatgatatcc

SEQ ID NO: 2652 - RNA, 21 nt, Homo sapiens
  source 1..21: mol_type = transcribed RNA
cggggcagctcagtacaggat

SEQ ID NO: 2653 - RNA, 21 nt, Homo sapiens
  source 1..21: mol_type = transcribed RNA
atcctgtactgagctgccccg

SEQ ID NO: 2654 - RNA, 21 nt, Homo sapiens
  source 1..21: mol_type = transcribed RNA
tccttctgctccgtcccccag

SEQ ID NO: 2655 - RNA, 21 nt, Homo sapiens
  source 1..21: mol_type = transcribed RNA
ctgggggacggagcagaagga

SEQ ID NO: 2656 - RNA, 21 nt, Homo sapiens
  source 1..21: mol_type = transcribed RNA
cgggggcggggccgaagcgcg

SEQ ID NO: 2657 - RNA, 21 nt, Homo sapiens
  source 1..21: mol_type = transcribed RNA
cgcgcttcggccccgcccccg

SEQ ID NO: 2658 - RNA, 21 nt, Homo sapiens
  source 1..21: mol_type = transcribed RNA
tcctgcgcgtcccagatgccc

SEQ ID NO: 2659 - RNA, 21 nt, Homo sapiens
  source 1..21: mol_type = transcribed RNA
gggcatctgggacgcgcagga

SEQ ID NO: 2660 - RNA, 22 nt, Homo sapiens
  source 1..22: mol_type = transcribed RNA
catcagaattcatggaggctag

SEQ ID NO: 2661 - RNA, 22 nt, Homo sapiens
  source 1..22: mol_type = transcribed RNA
ctagcctccatgaattctgatg

SEQ ID NO: 2662 - RNA, 22 nt, Homo sapiens
  source 1..22: mol_type = transcribed RNA
agcttccatgactcctgatgga

SEQ ID NO: 2663 - RNA, 22 nt, Homo sapiens
  source 1..22: mol_type = transcribed RNA
tccatcaggagtcatggaagct

SEQ ID NO: 2664 - RNA, 21 nt, Homo sapiens
  source 1..21: mol_type = transcribed RNA
tgacagcgccctgcctggctc

SEQ ID NO: 2665 - RNA, 21 nt, Homo sapiens
  source 1..21: mol_type = transcribed RNA
gagccaggcagggcgctgtca

SEQ ID NO: 2666 - RNA, 24 nt, Homo sapiens
  source 1..24: mol_type = transcribed RNA
agcgcgggctgagcgctgccagtc

SEQ ID NO: 2667 - RNA, 24 nt, Homo sapiens
  source 1..24: mol_type = transcribed RNA
gactggcagcgctcagcccgcgct

SEQ ID NO: 2668 - RNA, 22 nt, Homo sapiens
  source 1..22: mol_type = transcribed RNA
ctgggaggtgtgatatcgtggt

SEQ ID NO: 2669 - RNA, 22 nt, Homo sapiens
  source 1..22: mol_type = transcribed RNA
accacgatatcacacctcccag

SEQ ID NO: 2670 - RNA, 22 nt, Homo sapiens
  source 1..22: mol_type = transcribed RNA
tgtgatatcatggttcctggga

SEQ ID NO: 2671 - RNA, 22 nt, Homo sapiens
  source 1..22: mol_type = transcribed RNA
tcccaggaaccatgatatcaca

SEQ ID NO: 2672 - RNA, 22 nt, Homo sapiens
  source 1..22: mol_type = transcribed RNA
aggtgctccaggctggctcaca

SEQ ID NO: 2673 - RNA, 22 nt, Homo sapiens
  source 1..22: mol_type = transcribed RNA
tgtgagccagcctggagcacct

SEQ ID NO: 2674 - RNA, 22 nt, Homo sapiens
  source 1..22: mol_type = transcribed RNA
gagcaatgtaggtagactgttt

SEQ ID NO: 2675 - RNA, 22 nt, Homo sapiens
  source 1..22: mol_type = transcribed RNA
aaacagtctacctacattgctc

SEQ ID NO: 2676 - RNA, 22 nt, Homo sapiens
  source 1..22: mol_type = transcribed RNA
tgtcctctagggcctgcagtct

SEQ ID NO: 2677 - RNA, 22 nt, Homo sapiens
  source 1..22: mol_type = transcribed RNA
agactgcaggccctagaggaca

SEQ ID NO: 2678 - RNA, 20 nt, Homo sapiens
  source 1..20: mol_type = transcribed RNA
aaaggcataaaaccaagaca

SEQ ID NO: 2679 - RNA, 20 nt, Homo sapiens
  source 1..20: mol_type = transcribed RNA
tgtcttggttttatgccttt

SEQ ID NO: 2680 - RNA, 21 nt, Homo sapiens
  source 1..21: mol_type = transcribed RNA
taacgcataatatggacatgt

SEQ ID NO: 2681 - RNA, 21 nt, Homo sapiens
  source 1..21: mol_type = transcribed RNA
acatgtccatattatgcgtta

SEQ ID NO: 2682 - RNA, 22 nt, Homo sapiens
  source 1..22: mol_type = transcribed RNA
ttgaggaaaagatggtcttatt

SEQ ID NO: 2683 - RNA, 22 nt, Homo sapiens
  source 1..22: mol_type = transcribed RNA
aataagaccatcttttcctcaa

SEQ ID NO: 2684 - RNA, 26 nt, Homo sapiens
  source 1..26: mol_type = transcribed RNA
aagaggaagaaatggctggttctcag

SEQ ID NO: 2685 - RNA, 26 nt, Homo sapiens
  source 1..26: mol_type = transcribed RNA
ctgagaaccagccatttcttcctctt

SEQ ID NO: 2686 - RNA, 20 nt, Homo sapiens
  source 1..20: mol_type = transcribed RNA
gctcggactgagcaggtggg

SEQ ID NO: 2687 - RNA, 20 nt, Homo sapiens
  source 1..20: mol_type = transcribed RNA
cccacctgctcagtccgagc

SEQ ID NO: 2688 - RNA, 21 nt, Homo sapiens
  source 1..21: mol_type = transcribed RNA
acagggccgcagatggagact

SEQ ID NO: 2689 - RNA, 21 nt, Homo sapiens
  source 1..21: mol_type = transcribed RNA
agtctccatctgcggccctgt

SEQ ID NO: 2690 - RNA, 21 nt, Homo sapiens
  source 1..21: mol_type = transcribed RNA
gcagagaacaaaggactcagt

SEQ ID NO: 2691 - RNA, 21 nt, Homo sapiens
  source 1..21: mol_type = transcribed RNA
actgagtcctttgttctctgc

SEQ ID NO: 2692 - RNA, 22 nt, Homo sapiens
  source 1..22: mol_type = transcribed RNA
actgattatcttaactctctga

SEQ ID NO: 2693 - RNA, 22 nt, Homo sapiens
  source 1..22: mol_type = transcribed RNA
tcagagagttaagataatcagt

SEQ ID NO: 2694 - RNA, 23 nt, Homo sapiens
  source 1..23: mol_type = transcribed RNA
tctctgagtaccatatgccttgt

SEQ ID NO: 2695 - RNA, 23 nt, Homo sapiens
  source 1..23: mol_type = transcribed RNA
acaaggcatatggtactcagaga

SEQ ID NO: 2696 - RNA, 22 nt, Homo sapiens
  source 1..22: mol_type = transcribed RNA
aactagtaatgttggattaggg

SEQ ID NO: 2697 - RNA, 22 nt, Homo sapiens
  source 1..22: mol_type = transcribed RNA
ccctaatccaacattactagtt

SEQ ID NO: 2698 - RNA, 22 nt, Homo sapiens
  source 1..22: mol_type = transcribed RNA
atatgtatatgtgactgctact

SEQ ID NO: 2699 - RNA, 22 nt, Homo sapiens
  source 1..22: mol_type = transcribed RNA
agtagcagtcacatatacatat

SEQ ID NO: 2700 - RNA, 21 nt, Homo sapiens
  source 1..21: mol_type = transcribed RNA
tggccaaaaagcaggcagaga

SEQ ID NO: 2701 - RNA, 21 nt, Homo sapiens
  source 1..21: mol_type = transcribed RNA
tctctgcctgctttttggcca

SEQ ID NO: 2702 - RNA, 22 nt, Homo sapiens
  source 1..22: mol_type = transcribed RNA
ggaggaaccttggagcttcggc

SEQ ID NO: 2703 - RNA, 22 nt, Homo sapiens
  source 1..22: mol_type = transcribed RNA
gccgaagctccaaggttcctcc

SEQ ID NO: 2704 - RNA, 23 nt, Homo sapiens
  source 1..23: mol_type = transcribed RNA
gaggctgatgtgagtagaccact

SEQ ID NO: 2705 - RNA, 23 nt, Homo sapiens
  source 1..23: mol_type = transcribed RNA
agtggtctactcacatcagcctc

SEQ ID NO: 2706 - RNA, 21 nt, Homo sapiens
  source 1..21: mol_type = transcribed RNA
ctgtcctaaggttgttgagtt

SEQ ID NO: 2707 - RNA, 21 nt, Homo sapiens
  source 1..21: mol_type = transcribed RNA
aactcaacaaccttaggacag

SEQ ID NO: 2708 - RNA, 21 nt, Homo sapiens
  source 1..21: mol_type = transcribed RNA
tcttcaacctcaggacttgca

SEQ ID NO: 2709 - RNA, 21 nt, Homo sapiens
  source 1..21: mol_type = transcribed RNA
tgcaagtcctgaggttgaaga

SEQ ID NO: 2710 - RNA, 22 nt, Homo sapiens
  source 1..22: mol_type = transcribed RNA
tgtgatatcatggttcctggga

SEQ ID NO: 2711 - RNA, 22 nt, Homo sapiens
  source 1..22: mol_type = transcribed RNA
tcccaggaaccatgatatcaca

SEQ ID NO: 2712 - RNA, 22 nt, Homo sapiens
  source 1..22: mol_type = transcribed RNA
ctgggaggtgtgatattgtggt

SEQ ID NO: 2713 - RNA, 22 nt, Homo sapiens
  source 1..22: mol_type = transcribed RNA
accacaatatcacacctcccag

SEQ ID NO: 2714 - RNA, 22 nt, Homo sapiens
  source 1..22: mol_type = transcribed RNA
caggtagatatttgataggcat

SEQ ID NO: 2715 - RNA, 22 nt, Homo sapiens
  source 1..22: mol_type = transcribed RNA
atgcctatcaaatatctacctg

SEQ ID NO: 2716 - RNA, 21 nt, Homo sapiens
  source 1..21: mol_type = transcribed RNA
gcctatcacatatctgcctgt

SEQ ID NO: 2717 - RNA, 21 nt, Homo sapiens
  source 1..21: mol_type = transcribed RNA
acaggcagatatgtgataggc

SEQ ID NO: 2718 - RNA, 20 nt, Homo sapiens
  source 1..20: mol_type = transcribed RNA
gggctggggcgcggggaggt

SEQ ID NO: 2719 - RNA, 20 nt, Homo sapiens
  source 1..20: mol_type = transcribed RNA
acctccccgcgccccagccc

SEQ ID NO: 2720 - RNA, 18 nt, Homo sapiens
  source 1..18: mol_type = transcribed RNA
tgcttcctttcagagggt

SEQ ID NO: 2721 - RNA, 18 nt, Homo sapiens
  source 1..18: mol_type = transcribed RNA
accctctgaaaggaagca

SEQ ID NO: 2722 - RNA, 21 nt, Homo sapiens
  source 1..21: mol_type = transcribed RNA
tgagttggccatctgagtgag

SEQ ID NO: 2723 - RNA, 21 nt, Homo sapiens
  source 1..21: mol_type = transcribed RNA
ctcactcagatggccaactca

SEQ ID NO: 2724 - RNA, 23 nt, Homo sapiens
  source 1..23: mol_type = transcribed RNA
aacattcattgttgtcggtgggt

SEQ ID NO: 2725 - RNA, 23 nt, Homo sapiens
  source 1..23: mol_type = transcribed RNA
acccaccgacaacaatgaatgtt

SEQ ID NO: 2726 - RNA, 21 nt, Homo sapiens
  source 1..21: mol_type = transcribed RNA
tcacagtgaaccggtctcttt

SEQ ID NO: 2727 - RNA, 21 nt, Homo sapiens
  source 1..21: mol_type = transcribed RNA
aaagagaccggttcactgtga

SEQ ID NO: 2728 - RNA, 22 nt, Homo sapiens
  source 1..22: mol_type = transcribed RNA
caacaaatcacagtctgccata

SEQ ID NO: 2729 - RNA, 22 nt, Homo sapiens
  source 1..22: mol_type = transcribed RNA
tatggcagactgtgatttgttg

SEQ ID NO: 2730 - RNA, 21 nt, Homo sapiens
  source 1..21: mol_type = transcribed RNA
ctcactgaacaatgaatgcaa

SEQ ID NO: 2731 - RNA, 21 nt, Homo sapiens
  source 1..21: mol_type = transcribed RNA
ttgcattcattgttcagtgag

SEQ ID NO: 2732 - RNA, 23 nt, Homo sapiens
  source 1..23: mol_type = transcribed RNA
aacattcattgctgtcggtgggt

SEQ ID NO: 2733 - RNA, 23 nt, Homo sapiens
  source 1..23: mol_type = transcribed RNA
acccaccgacagcaatgaatgtt

SEQ ID NO: 2734 - RNA, 22 nt, Homo sapiens
  source 1..22: mol_type = transcribed RNA
accatcgaccgttgattgtacc

SEQ ID NO: 2735 - RNA, 22 nt, Homo sapiens
  source 1..22: mol_type = transcribed RNA
ggtacaatcaacggtcgatggt

SEQ ID NO: 2736 - RNA, 23 nt, Homo sapiens
  source 1..23: mol_type = transcribed RNA
aacattcaacgctgtcggtgagt

SEQ ID NO: 2737 - RNA, 23 nt, Homo sapiens
  source 1..23: mol_type = transcribed RNA
actcaccgacagcgttgaatgtt

SEQ ID NO: 2738 - RNA, 22 nt, Homo sapiens
  source 1..22: mol_type = transcribed RNA
accactgaccgttgactgtacc

SEQ ID NO: 2739 - RNA, 22 nt, Homo sapiens
  source 1..22: mol_type = transcribed RNA
ggtacagtcaacggtcagtggt

SEQ ID NO: 2740 - RNA, 22 nt, Homo sapiens
  source 1..22: mol_type = transcribed RNA
ctgttgccactaacctcaacct

SEQ ID NO: 2741 - RNA, 22 nt, Homo sapiens
  source 1..22: mol_type = transcribed RNA
aggttgaggttagtggcaacag

SEQ ID NO: 2742 - RNA, 22 nt, Homo sapiens
  source 1..22: mol_type = transcribed RNA
ataagacgagcaaaaagcttgt

SEQ ID NO: 2743 - RNA, 22 nt, Homo sapiens
  source 1..22: mol_type = transcribed RNA
acaagctttttgctcgtcttat

SEQ ID NO: 2744 - RNA, 22 nt, Homo sapiens
  source 1..22: mol_type = transcribed RNA
ataagacgaacaaaaggtttgt

SEQ ID NO: 2745 - RNA, 22 nt, Homo sapiens
  source 1..22: mol_type = transcribed RNA
acaaaccttttgttcgtcttat

SEQ ID NO: 2746 - RNA, 21 nt, Homo sapiens
  source 1..21: mol_type = transcribed RNA
agggagggacgggggctgtgc

SEQ ID NO: 2747 - RNA, 21 nt, Homo sapiens
  source 1..21: mol_type = transcribed RNA
gcacagcccccgtccctccct

SEQ ID NO: 2748 - RNA, 23 nt, Homo sapiens
  source 1..23: mol_type = transcribed RNA
tctggctccgtgtcttcactccc

SEQ ID NO: 2749 - RNA, 23 nt, Homo sapiens
  source 1..23: mol_type = transcribed RNA
gggagtgaagacacggagccaga

SEQ ID NO: 2750 - RNA, 22 nt, Homo sapiens
  source 1..22: mol_type = transcribed RNA
tggaatgtaaagaagtatgtat

SEQ ID NO: 2751 - RNA, 22 nt, Homo sapiens
  source 1..22: mol_type = transcribed RNA
atacatacttctttacattcca

SEQ ID NO: 2752 - RNA, 22 nt, Homo sapiens
  source 1..22: mol_type = transcribed RNA
aacatcacagcaagtctgtgct

SEQ ID NO: 2753 - RNA, 22 nt, Homo sapiens
  source 1..22: mol_type = transcribed RNA
agcacagacttgctgtgatgtt

SEQ ID NO: 2754 - RNA, 21 nt, Homo sapiens
  source 1..21: mol_type = transcribed RNA
ttaagacttgcagtgatgttt

SEQ ID NO: 2755 - RNA, 21 nt, Homo sapiens
  source 1..21: mol_type = transcribed RNA
aaacatcactgcaagtcttaa

SEQ ID NO: 2756 - RNA, 22 nt, Homo sapiens
  source 1..22: mol_type = transcribed RNA
aacatcactgcaagtcttaaca

SEQ ID NO: 2757 - RNA, 22 nt, Homo sapiens
  source 1..22: mol_type = transcribed RNA
tgttaagacttgcagtgatgtt

SEQ ID NO: 2758 - RNA, 21 nt, Homo sapiens
  source 1..21: mol_type = transcribed RNA
acagacttgctgtgatgttca

SEQ ID NO: 2759 - RNA, 21 nt, Homo sapiens
  source 1..21: mol_type = transcribed RNA
tgaacatcacagcaagtctgt

SEQ ID NO: 2760 - RNA, 22 nt, Homo sapiens
  source 1..22: mol_type = transcribed RNA
aaaccgttaccattactgagtt

SEQ ID NO: 2761 - RNA, 22 nt, Homo sapiens
  source 1..22: mol_type = transcribed RNA
aactcagtaatggtaacggttt

SEQ ID NO: 2762 - RNA, 22 nt, Homo sapiens
  source 1..22: mol_type = transcribed RNA
tagcaagagaaccattaccatt

SEQ ID NO: 2763 - RNA, 22 nt, Homo sapiens
  source 1..22: mol_type = transcribed RNA
aatggtaatggttctcttgcta

SEQ ID NO: 2764 - RNA, 23 nt, Homo sapiens
  source 1..23: mol_type = transcribed RNA
tgaggggcagagagcgagacttt

SEQ ID NO: 2765 - RNA, 23 nt, Homo sapiens
  source 1..23: mol_type = transcribed RNA
aaagtctcgctctctgcccctca

SEQ ID NO: 2766 - RNA, 22 nt, Homo sapiens
  source 1..22: mol_type = transcribed RNA
caagctcgcttctatgggtctg

SEQ ID NO: 2767 - RNA, 22 nt, Homo sapiens
  source 1..22: mol_type = transcribed RNA
cagacccatagaagcgagcttg

SEQ ID NO: 2768 - RNA, 22 nt, Homo sapiens
  source 1..22: mol_type = transcribed RNA
aacccgtagatccgatcttgtg

SEQ ID NO: 2769 - RNA, 22 nt, Homo sapiens
  source 1..22: mol_type = transcribed RNA
cacaagatcggatctacgggtt

SEQ ID NO: 2770 - RNA, 22 nt, Homo sapiens
  source 1..22: mol_type = transcribed RNA
caagctcgtgtctgtgggtccg

SEQ ID NO: 2771 - RNA, 22 nt, Homo sapiens
  source 1..22: mol_type = transcribed RNA
cggacccacagacacgagcttg

SEQ ID NO: 2772 - RNA, 22 nt, Homo sapiens
  source 1..22: mol_type = transcribed RNA
cacccgtagaaccgaccttgcg

SEQ ID NO: 2773 - RNA, 22 nt, Homo sapiens
  source 1..22: mol_type = transcribed RNA
cgcaaggtcggttctacgggtg

SEQ ID NO: 2774 - RNA, 23 nt, Homo sapiens
  source 1..23: mol_type = transcribed RNA
tggagacgcggccctgttggagt

SEQ ID NO: 2775 - RNA, 23 nt, Homo sapiens
  source 1..23: mol_type = transcribed RNA
actccaacagggccgcgtctcca

SEQ ID NO: 2776 - RNA, 23 nt, Homo sapiens
  source 1..23: mol_type = transcribed RNA
tctacagtgcacgtgtctccagt

SEQ ID NO: 2777 - RNA, 23 nt, Homo sapiens
  source 1..23: mol_type = transcribed RNA
actggagacacgtgcactgtaga

SEQ ID NO: 2778 - RNA, 22 nt, Homo sapiens
  source 1..22: mol_type = transcribed RNA
caaattcgtatctaggggaata

SEQ ID NO: 2779 - RNA, 22 nt, Homo sapiens
  source 1..22: mol_type = transcribed RNA
tattcccctagatacgaatttg

SEQ ID NO: 2780 - RNA, 23 nt, Homo sapiens
  source 1..23: mol_type = transcribed RNA
taccctgtagatccgaatttgtg

SEQ ID NO: 2781 - RNA, 23 nt, Homo sapiens
  source 1..23: mol_type = transcribed RNA
cacaaattcggatctacagggta

SEQ ID NO: 2782 - RNA, 23 nt, Homo sapiens
  source 1..23: mol_type = transcribed RNA
cctgcagcgacttgatggcttcc

SEQ ID NO: 2783 - RNA, 23 nt, Homo sapiens
  source 1..23: mol_type = transcribed RNA
ggaagccatcaagtcgctgcagg

SEQ ID NO: 2784 - RNA, 22 nt, Homo sapiens
  source 1..22: mol_type = transcribed RNA
tcagtgcactacagaactttgt

SEQ ID NO: 2785 - RNA, 22 nt, Homo sapiens
  source 1..22: mol_type = transcribed RNA
acaaagttctgtagtgcactga

SEQ ID NO: 2786 - RNA, 22 nt, Homo sapiens
  source 1..22: mol_type = transcribed RNA
aaagttctgagacactccgact

SEQ ID NO: 2787 - RNA, 22 nt, Homo sapiens
  source 1..22: mol_type = transcribed RNA
agtcggagtgtctcagaacttt

SEQ ID NO: 2788 - RNA, 22 nt, Homo sapiens
  source 1..22: mol_type = transcribed RNA
cctgttctccattacttggctc

SEQ ID NO: 2789 - RNA, 22 nt, Homo sapiens
  source 1..22: mol_type = transcribed RNA
gagccaagtaatggagaacagg

SEQ ID NO: 2790 - RNA, 21 nt, Homo sapiens
  source 1..21: mol_type = transcribed RNA
ttcaagtaattcaggataggt

SEQ ID NO: 2791 - RNA, 21 nt, Homo sapiens
  source 1..21: mol_type = transcribed RNA
acctatcctgaattacttgaa

SEQ ID NO: 2792 - RNA, 22 nt, Homo sapiens
  source 1..22: mol_type = transcribed RNA
gccctgaacgaggggtctggag

SEQ ID NO: 2793 - RNA, 22 nt, Homo sapiens
  source 1..22: mol_type = transcribed RNA
ctccagacccctcgttcagggc

SEQ ID NO: 2794 - RNA, 22 nt, Homo sapiens
  source 1..22: mol_type = transcribed RNA
gctgactcctagtccagggctc

SEQ ID NO: 2795 - RNA, 22 nt, Homo sapiens
  source 1..22: mol_type = transcribed RNA
gagccctggactaggagtcagc

SEQ ID NO: 2796 - RNA, 22 nt, Homo sapiens
  source 1..22: mol_type = transcribed RNA
atcacacaaaggcaacttttgt

SEQ ID NO: 2797 - RNA, 22 nt, Homo sapiens
  source 1..22: mol_type = transcribed RNA
acaaaagttgcctttgtgtgat

SEQ ID NO: 2798 - RNA, 22 nt, Homo sapiens
  source 1..22: mol_type = transcribed RNA
agaggttgcccttggtgaattc

SEQ ID NO: 2799 - RNA, 22 nt, Homo sapiens
  source 1..22: mol_type = transcribed RNA
gaattcaccaagggcaacctct

SEQ ID NO: 2800 - RNA, 21 nt, Homo sapiens
  source 1..21: mol_type = transcribed RNA
ggtagattttccttctatggt

SEQ ID NO: 2801 - RNA, 21 nt, Homo sapiens
  source 1..21: mol_type = transcribed RNA
accatagaaggaaaatctacc

SEQ ID NO: 2802 - RNA, 21 nt, Homo sapiens
  source 1..21: mol_type = transcribed RNA
atcatagaggaaaatccacgt

SEQ ID NO: 2803 - RNA, 21 nt, Homo sapiens
  source 1..21: mol_type = transcribed RNA
acgtggattttcctctatgat

SEQ ID NO: 2804 - RNA, 22 nt, Homo sapiens
  source 1..22: mol_type = transcribed RNA
gtagattctccttctatgagta

SEQ ID NO: 2805 - RNA, 22 nt, Homo sapiens
  source 1..22: mol_type = transcribed RNA
tactcatagaaggagaatctac

SEQ ID NO: 2806 - RNA, 22 nt, Homo sapiens
  source 1..22: mol_type = transcribed RNA
ctggtacaggcctgggggacag

SEQ ID NO: 2807 - RNA, 22 nt, Homo sapiens
  source 1..22: mol_type = transcribed RNA
ctgtcccccaggcctgtaccag

SEQ ID NO: 2808 - RNA, 22 nt, Homo sapiens
  source 1..22: mol_type = transcribed RNA
tctcccaacccttgtaccagtg

SEQ ID NO: 2809 - RNA, 22 nt, Homo sapiens
  source 1..22: mol_type = transcribed RNA
cactggtacaagggttgggaga

SEQ ID NO: 2810 - RNA, 22 nt, Homo sapiens
  source 1..22: mol_type = transcribed RNA
acgggttaggctcttgggagct

SEQ ID NO: 2811 - RNA, 22 nt, Homo sapiens
  source 1..22: mol_type = transcribed RNA
agctcccaagagcctaacccgt

SEQ ID NO: 2812 - RNA, 22 nt, Homo sapiens
  source 1..22: mol_type = transcribed RNA
tcacaagtcaggctcttgggac

SEQ ID NO: 2813 - RNA, 22 nt, Homo sapiens
  source 1..22: mol_type = transcribed RNA
gtcccaagagcctgacttgtga

SEQ ID NO: 2814 - RNA, 22 nt, Homo sapiens
  source 1..22: mol_type = transcribed RNA
aacccgtagatccgaacttgtg

SEQ ID NO: 2815 - RNA, 22 nt, Homo sapiens
  source 1..22: mol_type = transcribed RNA
cacaagttcggatctacgggtt

SEQ ID NO: 2816 - RNA, 21 nt, Homo sapiens
  source 1..21: mol_type = transcribed RNA
ctgtacaggccactgccttgc

SEQ ID NO: 2817 - RNA, 21 nt, Homo sapiens
  source 1..21: mol_type = transcribed RNA
gcaaggcagtggcctgtacag

SEQ ID NO: 2818 - RNA, 22 nt, Homo sapiens
  source 1..22: mol_type = transcribed RNA
tgaggtagtagtttgtacagtt

SEQ ID NO: 2819 - RNA, 22 nt, Homo sapiens
  source 1..22: mol_type = transcribed RNA
aactgtacaaactactacctca

SEQ ID NO: 2820 - RNA, 22 nt, Homo sapiens
  source 1..22: mol_type = transcribed RNA
tccctgagaccctaacttgtga

SEQ ID NO: 2821 - RNA, 22 nt, Homo sapiens
  source 1..22: mol_type = transcribed RNA
tcacaagttagggtctcaggga

SEQ ID NO: 2822 - RNA, 22 nt, Homo sapiens
  source 1..22: mol_type = transcribed RNA
caagcttgtatctataggtatg

SEQ ID NO: 2823 - RNA, 22 nt, Homo sapiens
  source 1..22: mol_type = transcribed RNA
catacctatagatacaagcttg

SEQ ID NO: 2824 - RNA, 23 nt, Homo sapiens
  source 1..23: mol_type = transcribed RNA
aaagtgctgcgacatttgagcgt

SEQ ID NO: 2825 - RNA, 23 nt, Homo sapiens
  source 1..23: mol_type = transcribed RNA
acgctcaaatgtcgcagcacttt

SEQ ID NO: 2826 - RNA, 22 nt, Homo sapiens
  source 1..22: mol_type = transcribed RNA
tttagagacggggtcttgctct

SEQ ID NO: 2827 - RNA, 22 nt, Homo sapiens
  source 1..22: mol_type = transcribed RNA
agagcaagaccccgtctctaaa

SEQ ID NO: 2828 - RNA, 24 nt, Homo sapiens
  source 1..24: mol_type = transcribed RNA
tggccctgactgaagaccagcagt

SEQ ID NO: 2829 - RNA, 24 nt, Homo sapiens
  source 1..24: mol_type = transcribed RNA
actgctggtcttcagtcagggcca

SEQ ID NO: 2830 - RNA, 21 nt, Homo sapiens
  source 1..21: mol_type = transcribed RNA
gcgacccatacttggtttcag

SEQ ID NO: 2831 - RNA, 21 nt, Homo sapiens
  source 1..21: mol_type = transcribed RNA
ctgaaaccaagtatgggtcgc

SEQ ID NO: 2832 - RNA, 22 nt, Homo sapiens
  source 1..22: mol_type = transcribed RNA
gaaatcaagcgtgggtgagacc

SEQ ID NO: 2833 - RNA, 22 nt, Homo sapiens
  source 1..22: mol_type = transcribed RNA
ggtctcacccacgcttgatttc

SEQ ID NO: 2834 - RNA, 21 nt, Homo sapiens
  source 1..21: mol_type = transcribed RNA
ccctgggcctctgctccccag

SEQ ID NO: 2835 - RNA, 21 nt, Homo sapiens
  source 1..21: mol_type = transcribed RNA
ctggggagcagaggcccaggg

SEQ ID NO: 2836 - RNA, 24 nt, Homo sapiens
  source 1..24: mol_type = transcribed RNA
tggggagctgaggctctgggggtg

SEQ ID NO: 2837 - RNA, 24 nt, Homo sapiens
  source 1..24: mol_type = transcribed RNA
cacccccagagcctcagctcccca

SEQ ID NO: 2838 - RNA, 20 nt, Homo sapiens
  source 1..20: mol_type = transcribed RNA
ggggagctgtggaagcagta

SEQ ID NO: 2839 - RNA, 20 nt, Homo sapiens
  source 1..20: mol_type = transcribed RNA
tactgcttccacagctcccc

SEQ ID NO: 2840 - RNA, 25 nt, Homo sapiens
  source 1..25: mol_type = transcribed RNA
ctagtgagggacagaaccaggattc

SEQ ID NO: 2841 - RNA, 25 nt, Homo sapiens
  source 1..25: mol_type = transcribed RNA
gaatcctggttctgtccctcactag

SEQ ID NO: 2842 - RNA, 20 nt, Homo sapiens
  source 1..20: mol_type = transcribed RNA
agagtcttgtgatgtcttgc

SEQ ID NO: 2843 - RNA, 20 nt, Homo sapiens
  source 1..20: mol_type = transcribed RNA
gcaagacatcacaagactct

SEQ ID NO: 2844 - RNA, 23 nt, Homo sapiens
  source 1..23: mol_type = transcribed RNA
gcagcagagaataggactacgtc

SEQ ID NO: 2845 - RNA, 23 nt, Homo sapiens
  source 1..23: mol_type = transcribed RNA
gacgtagtcctattctctgctgc

SEQ ID NO: 2846 - RNA, 23 nt, Homo sapiens
  source 1..23: mol_type = transcribed RNA
tgagcgcctcgacgacagagccg

SEQ ID NO: 2847 - RNA, 23 nt, Homo sapiens
  source 1..23: mol_type = transcribed RNA
cggctctgtcgtcgaggcgctca

SEQ ID NO: 2848 - RNA, 23 nt, Homo sapiens
  source 1..23: mol_type = transcribed RNA
tccctgtcctccaggagctcacg

SEQ ID NO: 2849 - RNA, 23 nt, Homo sapiens
  source 1..23: mol_type = transcribed RNA
cgtgagctcctggaggacaggga

SEQ ID NO: 2850 - RNA, 22 nt, Homo sapiens
  source 1..22: mol_type = transcribed RNA
ctatacggcctcctagctttcc

SEQ ID NO: 2851 - RNA, 22 nt, Homo sapiens
  source 1..22: mol_type = transcribed RNA
ggaaagctaggaggccgtatag

SEQ ID NO: 2852 - RNA, 22 nt, Homo sapiens
  source 1..22: mol_type = transcribed RNA
tgaggtaggaggttgtatagtt

SEQ ID NO: 2853 - RNA, 22 nt, Homo sapiens
  source 1..22: mol_type = transcribed RNA
aactatacaacctcctacctca

SEQ ID NO: 2854 - RNA, 22 nt, Homo sapiens
  source 1..22: mol_type = transcribed RNA
ctgcgcaagctactgccttgct

SEQ ID NO: 2855 - RNA, 22 nt, Homo sapiens
  source 1..22: mol_type = transcribed RNA
agcaaggcagtagcttgcgcag

SEQ ID NO: 2856 - RNA, 22 nt, Homo sapiens
  source 1..22: mol_type = transcribed RNA
tgaggtagtagtttgtgctgtt

SEQ ID NO: 2857 - RNA, 22 nt, Homo sapiens
  source 1..22: mol_type = transcribed RNA
aacagcacaaactactacctca

SEQ ID NO: 2858 - RNA, 22 nt, Homo sapiens
  source 1..22: mol_type = transcribed RNA
tgccctgtggactcagttctgg

SEQ ID NO: 2859 - RNA, 22 nt, Homo sapiens
  source 1..22: mol_type = transcribed RNA
ccagaactgagtccacagggca

SEQ ID NO: 2860 - RNA, 21 nt, Homo sapiens
  source 1..21: mol_type = transcribed RNA
tggttctagacttgccaacta

SEQ ID NO: 2861 - RNA, 21 nt, Homo sapiens
  source 1..21: mol_type = transcribed RNA
tagttggcaagtctagaacca

SEQ ID NO: 2862 - RNA, 23 nt, Homo sapiens
  source 1..23: mol_type = transcribed RNA
tgtctgcccgcatgcctgcctct

SEQ ID NO: 2863 - RNA, 23 nt, Homo sapiens
  source 1..23: mol_type = transcribed RNA
agaggcaggcatgcgggcagaca

SEQ ID NO: 2864 - RNA, 22 nt, Homo sapiens
  source 1..22: mol_type = transcribed RNA
aaaagtaattgcggtctttggt

SEQ ID NO: 2865 - RNA, 22 nt, Homo sapiens
  source 1..22: mol_type = transcribed RNA
accaaagaccgcaattactttt

SEQ ID NO: 2866 - RNA, 18 nt, Homo sapiens
  source 1..18: mol_type = transcribed RNA
tcgaggagctcacagtct

SEQ ID NO: 2867 - RNA, 18 nt, Homo sapiens
  source 1..18: mol_type = transcribed RNA
agactgtgagctcctcga

SEQ ID NO: 2868 - RNA, 22 nt, Homo sapiens
  source 1..22: mol_type = transcribed RNA
ctatacaatctattgccttccc

SEQ ID NO: 2869 - RNA, 22 nt, Homo sapiens
  source 1..22: mol_type = transcribed RNA
gggaaggcaatagattgtatag

SEQ ID NO: 2870 - RNA, 22 nt, Homo sapiens
  source 1..22: mol_type = transcribed RNA
ctatacagtctactgtctttcc

SEQ ID NO: 2871 - RNA, 22 nt, Homo sapiens
  source 1..22: mol_type = transcribed RNA
ggaaagacagtagactgtatag

SEQ ID NO: 2872 - RNA, 22 nt, Homo sapiens
  source 1..22: mol_type = transcribed RNA
tgaggtagtagattgtatagtt

SEQ ID NO: 2873 - RNA, 22 nt, Homo sapiens
  source 1..22: mol_type = transcribed RNA
aactatacaatctactacctca

SEQ ID NO: 2874 - RNA, 22 nt, Homo sapiens
  source 1..22: mol_type = transcribed RNA
aaaagtaattgtggttttggcc

SEQ ID NO: 2875 - RNA, 22 nt, Homo sapiens
  source 1..22: mol_type = transcribed RNA
ggccaaaaccacaattactttt

SEQ ID NO: 2876 - RNA, 22 nt, Homo sapiens
  source 1..22: mol_type = transcribed RNA
aaaagtaattgcggtttttgcc

SEQ ID NO: 2877 - RNA, 22 nt, Homo sapiens
  source 1..22: mol_type = transcribed RNA
ggcaaaaaccgcaattactttt

SEQ ID NO: 2878 - RNA, 22 nt, Homo sapiens
  source 1..22: mol_type = transcribed RNA
cctctgaaattcagttcttcag

SEQ ID NO: 2879 - RNA, 22 nt, Homo sapiens
  source 1..22: mol_type = transcribed RNA
ctgaagaactgaatttcagagg

SEQ ID NO: 2880 - RNA, 22 nt, Homo sapiens
  source 1..22: mol_type = transcribed RNA
tgagaactgaattccatgggtt

SEQ ID NO: 2881 - RNA, 22 nt, Homo sapiens
  source 1..22: mol_type = transcribed RNA
aacccatggaattcagttctca

SEQ ID NO: 2882 - RNA, 22 nt, Homo sapiens
  source 1..22: mol_type = transcribed RNA
acagcaggcacagacaggcagt

SEQ ID NO: 2883 - RNA, 22 nt, Homo sapiens
  source 1..22: mol_type = transcribed RNA
actgcctgtctgtgcctgctgt

SEQ ID NO: 2884 - RNA, 22 nt, Homo sapiens
  source 1..22: mol_type = transcribed RNA
tgcctgtctacacttgctgtgc

SEQ ID NO: 2885 - RNA, 22 nt, Homo sapiens
  source 1..22: mol_type = transcribed RNA
gcacagcaagtgtagacaggca

SEQ ID NO: 2886 - RNA, 22 nt, Homo sapiens
  source 1..22: mol_type = transcribed RNA
tagcaccatctgaaatcggtta

SEQ ID NO: 2887 - RNA, 22 nt, Homo sapiens
  source 1..22: mol_type = transcribed RNA
taaccgatttcagatggtgcta

SEQ ID NO: 2888 - RNA, 22 nt, Homo sapiens
  source 1..22: mol_type = transcribed RNA
actgatttcttttggtgttcag

SEQ ID NO: 2889 - RNA, 22 nt, Homo sapiens
  source 1..22: mol_type = transcribed RNA
ctgaacaccaaaagaaatcagt

SEQ ID NO: 2890 - RNA, 24 nt, Homo sapiens
  source 1..24: mol_type = transcribed RNA
gctggtttcatatggtggtttaga

SEQ ID NO: 2891 - RNA, 24 nt, Homo sapiens
  source 1..24: mol_type = transcribed RNA
tctaaaccaccatatgaaaccagc

SEQ ID NO: 2892 - RNA, 22 nt, Homo sapiens
  source 1..22: mol_type = transcribed RNA
ctggtttcacatggtggcttag

SEQ ID NO: 2893 - RNA, 22 nt, Homo sapiens
  source 1..22: mol_type = transcribed RNA
ctaagccaccatgtgaaaccag

SEQ ID NO: 2894 - RNA, 23 nt, Homo sapiens
  source 1..23: mol_type = transcribed RNA
tagcaccatttgaaatcagtgtt

SEQ ID NO: 2895 - RNA, 23 nt, Homo sapiens
  source 1..23: mol_type = transcribed RNA
aacactgatttcaaatggtgcta

SEQ ID NO: 2896 - RNA, 22 nt, Homo sapiens
  source 1..22: mol_type = transcribed RNA
tagcaccatttgaaatcggtta

SEQ ID NO: 2897 - RNA, 22 nt, Homo sapiens
  source 1..22: mol_type = transcribed RNA
taaccgatttcaaatggtgcta

SEQ ID NO: 2898 - RNA, 22 nt, Homo sapiens
  source 1..22: mol_type = transcribed RNA
tgaccgatttctcctggtgttc

SEQ ID NO: 2899 - RNA, 22 nt, Homo sapiens
  source 1..22: mol_type = transcribed RNA
gaacaccaggagaaatcggtca

SEQ ID NO: 2900 - RNA, 23 nt, Homo sapiens
  source 1..23: mol_type = transcribed RNA
tgtcactcggctcggcccactac

SEQ ID NO: 2901 - RNA, 23 nt, Homo sapiens
  source 1..23: mol_type = transcribed RNA
gtagtgggccgagccgagtgaca

SEQ ID NO: 2902 - RNA, 22 nt, Homo sapiens
  source 1..22: mol_type = transcribed RNA
ctgccaattccataggtcacag

SEQ ID NO: 2903 - RNA, 22 nt, Homo sapiens
  source 1..22: mol_type = transcribed RNA
ctgtgacctatggaattggcag

SEQ ID NO: 2904 - RNA, 21 nt, Homo sapiens
  source 1..21: mol_type = transcribed RNA
ctgacctatgaattgacagcc

SEQ ID NO: 2905 - RNA, 21 nt, Homo sapiens
  source 1..21: mol_type = transcribed RNA
ggctgtcaattcataggtcag

SEQ ID NO: 2906 - RNA, 20 nt, Homo sapiens
  source 1..20: mol_type = transcribed RNA
actgccccaggtgctgctgg

SEQ ID NO: 2907 - RNA, 20 nt, Homo sapiens
  source 1..20: mol_type = transcribed RNA
ccagcagcacctggggcagt

SEQ ID NO: 2908 - RNA, 22 nt, Homo sapiens
  source 1..22: mol_type = transcribed RNA
aacgccattatcacactaaata

SEQ ID NO: 2909 - RNA, 22 nt, Homo sapiens
  source 1..22: mol_type = transcribed RNA
tatttagtgtgataatggcgtt

SEQ ID NO: 2910 - RNA, 22 nt, Homo sapiens
  source 1..22: mol_type = transcribed RNA
ctttcagtcggatgtttgcagc

SEQ ID NO: 2911 - RNA, 22 nt, Homo sapiens
  source 1..22: mol_type = transcribed RNA
gctgcaaacatccgactgaaag

SEQ ID NO: 2912 - RNA, 22 nt, Homo sapiens
  source 1..22: mol_type = transcribed RNA
aattgcacggtatccatctgta

SEQ ID NO: 2913 - RNA, 22 nt, Homo sapiens
  source 1..22: mol_type = transcribed RNA
tacagatggataccgtgcaatt

SEQ ID NO: 2914 - RNA, 22 nt, Homo sapiens
  source 1..22: mol_type = transcribed RNA
cgggtggatcacgatgcaattt

SEQ ID NO: 2915 - RNA, 22 nt, Homo sapiens
  source 1..22: mol_type = transcribed RNA
aaattgcatcgtgatccacccg

SEQ ID NO: 2916 - RNA, 22 nt, Homo sapiens
  source 1..22: mol_type = transcribed RNA
ctgggaggtggatgtttacttc

SEQ ID NO: 2917 - RNA, 22 nt, Homo sapiens
  source 1..22: mol_type = transcribed RNA
gaagtaaacatccacctcccag

SEQ ID NO: 2918 - RNA, 22 nt, Homo sapiens
  source 1..22: mol_type = transcribed RNA
tgtaaacatcctacactcagct

SEQ ID NO: 2919 - RNA, 22 nt, Homo sapiens
  source 1..22: mol_type = transcribed RNA
agctgagtgtaggatgtttaca

SEQ ID NO: 2920 - RNA, 22 nt, Homo sapiens
  source 1..22: mol_type = transcribed RNA
ctgggagagggttgtttactcc

SEQ ID NO: 2921 - RNA, 22 nt, Homo sapiens
  source 1..22: mol_type = transcribed RNA
ggagtaaacaaccctctcccag

SEQ ID NO: 2922 - RNA, 22 nt, Homo sapiens
  source 1..22: mol_type = transcribed RNA
ctgggagaaggctgtttactct

SEQ ID NO: 2923 - RNA, 22 nt, Homo sapiens
  source 1..22: mol_type = transcribed RNA
agagtaaacagccttctcccag

SEQ ID NO: 2924 - RNA, 23 nt, Homo sapiens
  source 1..23: mol_type = transcribed RNA
tgtaaacatcctacactctcagc

SEQ ID NO: 2925 - RNA, 23 nt, Homo sapiens
  source 1..23: mol_type = transcribed RNA
gctgagagtgtaggatgtttaca

SEQ ID NO: 2926 - RNA, 22 nt, Homo sapiens
  source 1..22: mol_type = transcribed RNA
tttttcattattgctcctgacc

SEQ ID NO: 2927 - RNA, 22 nt, Homo sapiens
  source 1..22: mol_type = transcribed RNA
ggtcaggagcaataatgaaaaa

SEQ ID NO: 2928 - RNA, 23 nt, Homo sapiens
  source 1..23: mol_type = transcribed RNA
tcaagagcaataacgaaaaatgt

SEQ ID NO: 2929 - RNA, 23 nt, Homo sapiens
  source 1..23: mol_type = transcribed RNA
acatttttcgttattgctcttga

SEQ ID NO: 2930 - RNA, 23 nt, Homo sapiens
  source 1..23: mol_type = transcribed RNA
caaagtgcttacagtgcaggtag

SEQ ID NO: 2931 - RNA, 23 nt, Homo sapiens
  source 1..23: mol_type = transcribed RNA
ctacctgcactgtaagcactttg

SEQ ID NO: 2932 - RNA, 22 nt, Homo sapiens
  source 1..22: mol_type = transcribed RNA
ggattcctggaaatactgttct

SEQ ID NO: 2933 - RNA, 22 nt, Homo sapiens
  source 1..22: mol_type = transcribed RNA
agaacagtatttccaggaatcc

SEQ ID NO: 2934 - RNA, 23 nt, Homo sapiens
  source 1..23: mol_type = transcribed RNA
gtccagttttcccaggaatccct

SEQ ID NO: 2935 - RNA, 23 nt, Homo sapiens
  source 1..23: mol_type = transcribed RNA
agggattcctgggaaaactggac

SEQ ID NO: 2936 - RNA, 22 nt, Homo sapiens
  source 1..22: mol_type = transcribed RNA
actgcattatgagcacttaaag

SEQ ID NO: 2937 - RNA, 22 nt, Homo sapiens
  source 1..22: mol_type = transcribed RNA
ctttaagtgctcataatgcagt

SEQ ID NO: 2938 - RNA, 23 nt, Homo sapiens
  source 1..23: mol_type = transcribed RNA
taaagtgcttatagtgcaggtag

SEQ ID NO: 2939 - RNA, 23 nt, Homo sapiens
  source 1..23: mol_type = transcribed RNA
ctacctgcactataagcacttta

SEQ ID NO: 2940 - RNA, 22 nt, Homo sapiens
  source 1..22: mol_type = transcribed RNA
gagggttgggtggaggctctcc

SEQ ID NO: 2941 - RNA, 22 nt, Homo sapiens
  source 1..22: mol_type = transcribed RNA
ggagagcctccacccaaccctc

SEQ ID NO: 2942 - RNA, 22 nt, Homo sapiens
  source 1..22: mol_type = transcribed RNA
ctgtgcgtgtgacagcggctga

SEQ ID NO: 2943 - RNA, 22 nt, Homo sapiens
  source 1..22: mol_type = transcribed RNA
tcagccgctgtcacacgcacag

SEQ ID NO: 2944 - RNA, 22 nt, Homo sapiens
  source 1..22: mol_type = transcribed RNA
ccagtggggctgctgttatctg

SEQ ID NO: 2945 - RNA, 22 nt, Homo sapiens
  source 1..22: mol_type = transcribed RNA
cagataacagcagccccactgg

SEQ ID NO: 2946 - RNA, 22 nt, Homo sapiens
  source 1..22: mol_type = transcribed RNA
tgtaacagcaactccatgtgga

SEQ ID NO: 2947 - RNA, 22 nt, Homo sapiens
  source 1..22: mol_type = transcribed RNA
tccacatggagttgctgttaca

SEQ ID NO: 2948 - RNA, 22 nt, Homo sapiens
  source 1..22: mol_type = transcribed RNA
tcacagtggtctctgggattat

SEQ ID NO: 2949 - RNA, 22 nt, Homo sapiens
  source 1..22: mol_type = transcribed RNA
ataatcccagagaccactgtga

SEQ ID NO: 2950 - RNA, 22 nt, Homo sapiens
  source 1..22: mol_type = transcribed RNA
taatctcagctggcaactgtga

SEQ ID NO: 2951 - RNA, 22 nt, Homo sapiens
  source 1..22: mol_type = transcribed RNA
tcacagttgccagctgagatta

SEQ ID NO: 2952 - RNA, 22 nt, Homo sapiens
  source 1..22: mol_type = transcribed RNA
cagtgcctcggcagtgcagccc

SEQ ID NO: 2953 - RNA, 22 nt, Homo sapiens
  source 1..22: mol_type = transcribed RNA
gggctgcactgccgaggcactg

SEQ ID NO: 2954 - RNA, 20 nt, Homo sapiens
  source 1..20: mol_type = transcribed RNA
gtgcattgctgttgcattgc

SEQ ID NO: 2955 - RNA, 20 nt, Homo sapiens
  source 1..20: mol_type = transcribed RNA
gcaatgcaacagcaatgcac

SEQ ID NO: 2956 - RNA, 19 nt, Homo sapiens
  source 1..19: mol_type = transcribed RNA
actggacttggaggcagaa

SEQ ID NO: 2957 - RNA, 19 nt, Homo sapiens
  source 1..19: mol_type = transcribed RNA
ttctgcctccaagtccagt

SEQ ID NO: 2958 - RNA, 25 nt, Homo sapiens
  source 1..25: mol_type = transcribed RNA
actggacttggagtcagaagagtgg

SEQ ID NO: 2959 - RNA, 25 nt, Homo sapiens
  source 1..25: mol_type = transcribed RNA
ccactcttctgactccaagtccagt

SEQ ID NO: 2960 - RNA, 20 nt, Homo sapiens
  source 1..20: mol_type = transcribed RNA
actggacttggagtcagaaa

SEQ ID NO: 2961 - RNA, 20 nt, Homo sapiens
  source 1..20: mol_type = transcribed RNA
tttctgactccaagtccagt

SEQ ID NO: 2962 - RNA, 19 nt, Homo sapiens
  source 1..19: mol_type = transcribed RNA
actggacttggagtcagga

SEQ ID NO: 2963 - RNA, 19 nt, Homo sapiens
  source 1..19: mol_type = transcribed RNA
tcctgactccaagtccagt

SEQ ID NO: 2964 - RNA, 20 nt, Homo sapiens
  source 1..20: mol_type = transcribed RNA
actggacttggagccagaag

SEQ ID NO: 2965 - RNA, 20 nt, Homo sapiens
  source 1..20: mol_type = transcribed RNA
cttctggctccaagtccagt

SEQ ID NO: 2966 - RNA, 20 nt, Homo sapiens
  source 1..20: mol_type = transcribed RNA
actgggcttggagtcagaag

SEQ ID NO: 2967 - RNA, 20 nt, Homo sapiens
  source 1..20: mol_type = transcribed RNA
cttctgactccaagcccagt

SEQ ID NO: 2968 - RNA, 21 nt, Homo sapiens
  source 1..21: mol_type = transcribed RNA
actggacttggtgtcagatgg

SEQ ID NO: 2969 - RNA, 21 nt, Homo sapiens
  source 1..21: mol_type = transcribed RNA
ccatctgacaccaagtccagt

SEQ ID NO: 2970 - RNA, 21 nt, Homo sapiens
  source 1..21: mol_type = transcribed RNA
actggactaggagtcagaagg

SEQ ID NO: 2971 - RNA, 21 nt, Homo sapiens
  source 1..21: mol_type = transcribed RNA
ccttctgactcctagtccagt

SEQ ID NO: 2972 - RNA, 19 nt, Homo sapiens
  source 1..19: mol_type = transcribed RNA
actggatttggagccagaa

SEQ ID NO: 2973 - RNA, 19 nt, Homo sapiens
  source 1..19: mol_type = transcribed RNA
ttctggctccaaatccagt

SEQ ID NO: 2974 - RNA, 20 nt, Homo sapiens
  source 1..20: mol_type = transcribed RNA
aggaatgttccttctttgcc

SEQ ID NO: 2975 - RNA, 20 nt, Homo sapiens
  source 1..20: mol_type = transcribed RNA
ggcaaagaaggaacattcct

SEQ ID NO: 2976 - RNA, 21 nt, Homo sapiens
  source 1..21: mol_type = transcribed RNA
tcagtgcatgacagaacttgg

SEQ ID NO: 2977 - RNA, 21 nt, Homo sapiens
  source 1..21: mol_type = transcribed RNA
ccaagttctgtcatgcactga

SEQ ID NO: 2978 - RNA, 20 nt, Homo sapiens
  source 1..20: mol_type = transcribed RNA
tcacacctgcctcgcccccc

SEQ ID NO: 2979 - RNA, 20 nt, Homo sapiens
  source 1..20: mol_type = transcribed RNA
ggggggcgaggcaggtgtga

SEQ ID NO: 2980 - RNA, 21 nt, Homo sapiens
  source 1..21: mol_type = transcribed RNA
gtgggcgggggcaggtgtgtg

SEQ ID NO: 2981 - RNA, 21 nt, Homo sapiens
  source 1..21: mol_type = transcribed RNA
cacacacctgcccccgcccac

SEQ ID NO: 2982 - RNA, 22 nt, Homo sapiens
  source 1..22: mol_type = transcribed RNA
acgcccttcccccccttcttca

SEQ ID NO: 2983 - RNA, 22 nt, Homo sapiens
  source 1..22: mol_type = transcribed RNA
tgaagaagggggggaagggcgt

SEQ ID NO: 2984 - RNA, 22 nt, Homo sapiens
  source 1..22: mol_type = transcribed RNA
ttgcatatgtaggatgtcccat

SEQ ID NO: 2985 - RNA, 22 nt, Homo sapiens
  source 1..22: mol_type = transcribed RNA
atgggacatcctacatatgcaa

SEQ ID NO: 2986 - RNA, 23 nt, Homo sapiens
  source 1..23: mol_type = transcribed RNA
gtttgcacgggtgggccttgtct

SEQ ID NO: 2987 - RNA, 23 nt, Homo sapiens
  source 1..23: mol_type = transcribed RNA
agacaaggcccacccgtgcaaac

SEQ ID NO: 2988 - RNA, 22 nt, Homo sapiens
  source 1..22: mol_type = transcribed RNA
gactatagaactttccccctca

SEQ ID NO: 2989 - RNA, 22 nt, Homo sapiens
  source 1..22: mol_type = transcribed RNA
tgagggggaaagttctatagtc

SEQ ID NO: 2990 - RNA, 21 nt, Homo sapiens
  source 1..21: mol_type = transcribed RNA
agggggaaagttctatagtcc

SEQ ID NO: 2991 - RNA, 21 nt, Homo sapiens
  source 1..21: mol_type = transcribed RNA
ggactatagaactttccccct

SEQ ID NO: 2992 - RNA, 21 nt, Homo sapiens
  source 1..21: mol_type = transcribed RNA
ctttttgcggtctgggcttgc

SEQ ID NO: 2993 - RNA, 21 nt, Homo sapiens
  source 1..21: mol_type = transcribed RNA
gcaagcccagaccgcaaaaag

SEQ ID NO: 2994 - RNA, 21 nt, Homo sapiens
  source 1..21: mol_type = transcribed RNA
tcttgtgttctctagatcagt

SEQ ID NO: 2995 - RNA, 21 nt, Homo sapiens
  source 1..21: mol_type = transcribed RNA
actgatctagagaacacaaga

SEQ ID NO: 2996 - RNA, 23 nt, Homo sapiens
  source 1..23: mol_type = transcribed RNA
cccagtgttcagactacctgttc

SEQ ID NO: 2997 - RNA, 23 nt, Homo sapiens
  source 1..23: mol_type = transcribed RNA
gaacaggtagtctgaacactggg

SEQ ID NO: 2998 - RNA, 22 nt, Homo sapiens
  source 1..22: mol_type = transcribed RNA
acagtagtctgcacattggtta

SEQ ID NO: 2999 - RNA, 22 nt, Homo sapiens
  source 1..22: mol_type = transcribed RNA
taaccaatgtgcagactactgt

SEQ ID NO: 3000 - RNA, 22 nt, Homo sapiens
  source 1..22: mol_type = transcribed RNA
acagtagtctgcacattggtta

SEQ ID NO: 3001 - RNA, 22 nt, Homo sapiens
  source 1..22: mol_type = transcribed RNA
taaccaatgtgcagactactgt

SEQ ID NO: 3002 - RNA, 23 nt, Homo sapiens
  source 1..23: mol_type = transcribed RNA
cccagtgtttagactatctgttc

SEQ ID NO: 3003 - RNA, 23 nt, Homo sapiens
  source 1..23: mol_type = transcribed RNA
gaacagatagtctaaacactggg

SEQ ID NO: 3004 - RNA, 22 nt, Homo sapiens
  source 1..22: mol_type = transcribed RNA
tggagtgtgacaatggtgtttg

SEQ ID NO: 3005 - RNA, 22 nt, Homo sapiens
  source 1..22: mol_type = transcribed RNA
caaacaccattgtcacactcca

SEQ ID NO: 3006 - RNA, 22 nt, Homo sapiens
  source 1..22: mol_type = transcribed RNA
tgccctaaatgccccttctggc

SEQ ID NO: 3007 - RNA, 22 nt, Homo sapiens
  source 1..22: mol_type = transcribed RNA
gccagaaggggcatttagggca

SEQ ID NO: 3008 - RNA, 23 nt, Homo sapiens
  source 1..23: mol_type = transcribed RNA
taaggtgcatctagtgcagttag

SEQ ID NO: 3009 - RNA, 23 nt, Homo sapiens
  source 1..23: mol_type = transcribed RNA
ctaactgcactagatgcacctta

SEQ ID NO: 3010 - RNA, 22 nt, Homo sapiens
  source 1..22: mol_type = transcribed RNA
ctcctatatgatgcctttcttc

SEQ ID NO: 3011 - RNA, 22 nt, Homo sapiens
  source 1..22: mol_type = transcribed RNA
gaagaaaggcatcatataggag

SEQ ID NO: 3012 - RNA, 21 nt, Homo sapiens
  source 1..21: mol_type = transcribed RNA
gaacggcttcatacaggagtt

SEQ ID NO: 3013 - RNA, 21 nt, Homo sapiens
  source 1..21: mol_type = transcribed RNA
aactcctgtatgaagccgttc

SEQ ID NO: 3014 - RNA, 22 nt, Homo sapiens
  source 1..22: mol_type = transcribed RNA
tgtgactggttgaccagagggg

SEQ ID NO: 3015 - RNA, 22 nt, Homo sapiens
  source 1..22: mol_type = transcribed RNA
cccctctggtcaaccagtcaca

SEQ ID NO: 3016 - RNA, 23 nt, Homo sapiens
  source 1..23: mol_type = transcribed RNA
actgccctaagtgctccttctgg

SEQ ID NO: 3017 - RNA, 23 nt, Homo sapiens
  source 1..23: mol_type = transcribed RNA
ccagaaggagcacttagggcagt

SEQ ID NO: 3018 - RNA, 23 nt, Homo sapiens
  source 1..23: mol_type = transcribed RNA
taaggtgcatctagtgcagatag

SEQ ID NO: 3019 - RNA, 23 nt, Homo sapiens
  source 1..23: mol_type = transcribed RNA
ctatctgcactagatgcacctta

SEQ ID NO: 3020 - RNA, 22 nt, Homo sapiens
  source 1..22: mol_type = transcribed RNA
cagtgcaatgatgaaagggcat

SEQ ID NO: 3021 - RNA, 22 nt, Homo sapiens
  source 1..22: mol_type = transcribed RNA
atgccctttcatcattgcactg

SEQ ID NO: 3022 - RNA, 21 nt, Homo sapiens
  source 1..21: mol_type = transcribed RNA
actctttccctgttgcactac

SEQ ID NO: 3023 - RNA, 21 nt, Homo sapiens
  source 1..21: mol_type = transcribed RNA
gtagtgcaacagggaaagagt

SEQ ID NO: 3024 - RNA, 24 nt, Homo sapiens
  source 1..24: mol_type = transcribed RNA
tttggcaatggtagaactcacact

SEQ ID NO: 3025 - RNA, 24 nt, Homo sapiens
  source 1..24: mol_type = transcribed RNA
agtgtgagttctaccattgccaaa

SEQ ID NO: 3026 - RNA, 21 nt, Homo sapiens
  source 1..21: mol_type = transcribed RNA
agggccccccctcaatcctgt

SEQ ID NO: 3027 - RNA, 21 nt, Homo sapiens
  source 1..21: mol_type = transcribed RNA
acaggattgagggggggccct

SEQ ID NO: 3028 - RNA, 22 nt, Homo sapiens
  source 1..22: mol_type = transcribed RNA
cagtgcaatgttaaaagggcat

SEQ ID NO: 3029 - RNA, 22 nt, Homo sapiens
  source 1..22: mol_type = transcribed RNA
atgcccttttaacattgcactg

SEQ ID NO: 3030 - RNA, 22 nt, Homo sapiens
  source 1..22: mol_type = transcribed RNA
ttcacattgtgctactgtctgc

SEQ ID NO: 3031 - RNA, 22 nt, Homo sapiens
  source 1..22: mol_type = transcribed RNA
gcagacagtagcacaatgtgaa

SEQ ID NO: 3032 - RNA, 22 nt, Homo sapiens
  source 1..22: mol_type = transcribed RNA
tcggatccgtctgagcttggct

SEQ ID NO: 3033 - RNA, 22 nt, Homo sapiens
  source 1..22: mol_type = transcribed RNA
agccaagctcagacggatccga

SEQ ID NO: 3034 - RNA, 22 nt, Homo sapiens
  source 1..22: mol_type = transcribed RNA
ctgaagctcagagggctctgat

SEQ ID NO: 3035 - RNA, 22 nt, Homo sapiens
  source 1..22: mol_type = transcribed RNA
atcagagccctctgagcttcag

SEQ ID NO: 3036 - RNA, 22 nt, Homo sapiens
  source 1..22: mol_type = transcribed RNA
cctcttccccttgtctctccag

SEQ ID NO: 3037 - RNA, 22 nt, Homo sapiens
  source 1..22: mol_type = transcribed RNA
ctggagagacaaggggaagagg

SEQ ID NO: 3038 - RNA, 22 nt, Homo sapiens
  source 1..22: mol_type = transcribed RNA
tgagtgacaggggaaatgggga

SEQ ID NO: 3039 - RNA, 22 nt, Homo sapiens
  source 1..22: mol_type = transcribed RNA
tccccatttcccctgtcactca

SEQ ID NO: 3040 - RNA, 22 nt, Homo sapiens
  source 1..22: mol_type = transcribed RNA
tcaggacacttctgaacttgga

SEQ ID NO: 3041 - RNA, 22 nt, Homo sapiens
  source 1..22: mol_type = transcribed RNA
tccaagttcagaagtgtcctga

SEQ ID NO: 3042 - RNA, 22 nt, Homo sapiens
  source 1..22: mol_type = transcribed RNA
cagttcagaagtgttcctgagt

SEQ ID NO: 3043 - RNA, 22 nt, Homo sapiens
  source 1..22: mol_type = transcribed RNA
actcaggaacacttctgaactg

SEQ ID NO: 3044 - RNA, 21 nt, Homo sapiens
  source 1..21: mol_type = transcribed RNA
tttccctttccatcctggcag

SEQ ID NO: 3045 - RNA, 21 nt, Homo sapiens
  source 1..21: mol_type = transcribed RNA
ctgccaggatggaaagggaaa

SEQ ID NO: 3046 - RNA, 21 nt, Homo sapiens
  source 1..21: mol_type = transcribed RNA
ttgccagggcaggaggtggaa

SEQ ID NO: 3047 - RNA, 21 nt, Homo sapiens
  source 1..21: mol_type = transcribed RNA
ttccacctcctgccctggcaa

SEQ ID NO: 3048 - RNA, 21 nt, Homo sapiens
  source 1..21: mol_type = transcribed RNA
agagattggtagaaatcaggt

SEQ ID NO: 3049 - RNA, 21 nt, Homo sapiens
  source 1..21: mol_type = transcribed RNA
acctgatttctaccaatctct

SEQ ID NO: 3050 - RNA, 23 nt, Homo sapiens
  source 1..23: mol_type = transcribed RNA
aatcggacccatttaaaccggag

SEQ ID NO: 3051 - RNA, 23 nt, Homo sapiens
  source 1..23: mol_type = transcribed RNA
ctccggtttaaatgggtccgatt

SEQ ID NO: 3052 - RNA, 24 nt, Homo sapiens
  source 1..24: mol_type = transcribed RNA
tctgggcacaggcggatggacagg

SEQ ID NO: 3053 - RNA, 24 nt, Homo sapiens
  source 1..24: mol_type = transcribed RNA
cctgtccatccgcctgtgcccaga

SEQ ID NO: 3054 - RNA, 21 nt, Homo sapiens
  source 1..21: mol_type = transcribed RNA
ccagtgactgagctggagcca

SEQ ID NO: 3055 - RNA, 21 nt, Homo sapiens
  source 1..21: mol_type = transcribed RNA
tggctccagctcagtcactgg

SEQ ID NO: 3056 - RNA, 22 nt, Homo sapiens
  source 1..22: mol_type = transcribed RNA
aggataggaagaatgaagtgct

SEQ ID NO: 3057 - RNA, 22 nt, Homo sapiens
  source 1..22: mol_type = transcribed RNA
agcacttcattcttcctatcct

SEQ ID NO: 3058 - RNA, 22 nt, Homo sapiens
  source 1..22: mol_type = transcribed RNA
aggagagtggattccaggtggt

SEQ ID NO: 3059 - RNA, 22 nt, Homo sapiens
  source 1..22: mol_type = transcribed RNA
accacctggaatccactctcct

SEQ ID NO: 3060 - RNA, 22 nt, Homo sapiens
  source 1..22: mol_type = transcribed RNA
tcctcctctacctcatcccagt

SEQ ID NO: 3061 - RNA, 22 nt, Homo sapiens
  source 1..22: mol_type = transcribed RNA
actgggatgaggtagaggagga

SEQ ID NO: 3062 - RNA, 22 nt, Homo sapiens
  source 1..22: mol_type = transcribed RNA
tgaggggtttggaatgggatgg

SEQ ID NO: 3063 - RNA, 22 nt, Homo sapiens
  source 1..22: mol_type = transcribed RNA
ccatcccattccaaacccctca

SEQ ID NO: 3064 - RNA, 21 nt, Homo sapiens
  source 1..21: mol_type = transcribed RNA
atccagttctctgagggggct

SEQ ID NO: 3065 - RNA, 21 nt, Homo sapiens
  source 1..21: mol_type = transcribed RNA
agccccctcagagaactggat

SEQ ID NO: 3066 - RNA, 22 nt, Homo sapiens
  source 1..22: mol_type = transcribed RNA
aacccctaaggcaactggatgg

SEQ ID NO: 3067 - RNA, 22 nt, Homo sapiens
  source 1..22: mol_type = transcribed RNA
ccatccagttgccttaggggtt

SEQ ID NO: 3068 - RNA, 21 nt, Homo sapiens
  source 1..21: mol_type = transcribed RNA
tcatcctcgtctccctcccag

SEQ ID NO: 3069 - RNA, 21 nt, Homo sapiens
  source 1..21: mol_type = transcribed RNA
ctgggagggagacgaggatga

SEQ ID NO: 3070 - RNA, 22 nt, Homo sapiens
  source 1..22: mol_type = transcribed RNA
agggaaggggacgagggttggg

SEQ ID NO: 3071 - RNA, 22 nt, Homo sapiens
  source 1..22: mol_type = transcribed RNA
cccaaccctcgtccccttccct

SEQ ID NO: 3072 - RNA, 23 nt, Homo sapiens
  source 1..23: mol_type = transcribed RNA
aagaagagactgagtcatcgaat

SEQ ID NO: 3073 - RNA, 23 nt, Homo sapiens
  source 1..23: mol_type = transcribed RNA
attcgatgactcagtctcttctt

SEQ ID NO: 3074 - RNA, 23 nt, Homo sapiens
  source 1..23: mol_type = transcribed RNA
caatggcacaaactcattcttga

SEQ ID NO: 3075 - RNA, 23 nt, Homo sapiens
  source 1..23: mol_type = transcribed RNA
tcaagaatgagtttgtgccattg

SEQ ID NO: 3076 - RNA, 21 nt, Homo sapiens
  source 1..21: mol_type = transcribed RNA
actgaatcctcttttcctcag

SEQ ID NO: 3077 - RNA, 21 nt, Homo sapiens
  source 1..21: mol_type = transcribed RNA
ctgaggaaaagaggattcagt

SEQ ID NO: 3078 - RNA, 22 nt, Homo sapiens
  source 1..22: mol_type = transcribed RNA
tgggatgagggattgaagtgga

SEQ ID NO: 3079 - RNA, 22 nt, Homo sapiens
  source 1..22: mol_type = transcribed RNA
tccacttcaatccctcatccca

SEQ ID NO: 3080 - RNA, 22 nt, Homo sapiens
  source 1..22: mol_type = transcribed RNA
caggccatattgtgctgcctca

SEQ ID NO: 3081 - RNA, 22 nt, Homo sapiens
  source 1..22: mol_type = transcribed RNA
tgaggcagcacaatatggcctg

SEQ ID NO: 3082 - RNA, 22 nt, Homo sapiens
  source 1..22: mol_type = transcribed RNA
tagcagcacataatggtttgtg

SEQ ID NO: 3083 - RNA, 22 nt, Homo sapiens
  source 1..22: mol_type = transcribed RNA
cacaaaccattatgtgctgcta

SEQ ID NO: 3084 - RNA, 22 nt, Homo sapiens
  source 1..22: mol_type = transcribed RNA
cgaatcattatttgctgctcta

SEQ ID NO: 3085 - RNA, 22 nt, Homo sapiens
  source 1..22: mol_type = transcribed RNA
tagagcagcaaataatgattcg

SEQ ID NO: 3086 - RNA, 22 nt, Homo sapiens
  source 1..22: mol_type = transcribed RNA
tagcagcacatcatggtttaca

SEQ ID NO: 3087 - RNA, 22 nt, Homo sapiens
  source 1..22: mol_type = transcribed RNA
tgtaaaccatgatgtgctgcta

SEQ ID NO: 3088 - RNA, 22 nt, Homo sapiens
  source 1..22: mol_type = transcribed RNA
ccaatattactgtgctgcttta

SEQ ID NO: 3089 - RNA, 22 nt, Homo sapiens
  source 1..22: mol_type = transcribed RNA
taaagcagcacagtaatattgg

SEQ ID NO: 3090 - RNA, 22 nt, Homo sapiens
  source 1..22: mol_type = transcribed RNA
ctaggtatggtcccagggatcc

SEQ ID NO: 3091 - RNA, 22 nt, Homo sapiens
  source 1..22: mol_type = transcribed RNA
ggatccctgggaccatacctag

SEQ ID NO: 3092 - RNA, 20 nt, Homo sapiens
  source 1..20: mol_type = transcribed RNA
gtgtgtggaaatgcttctgc

SEQ ID NO: 3093 - RNA, 20 nt, Homo sapiens
  source 1..20: mol_type = transcribed RNA
gcagaagcatttccacacac

SEQ ID NO: 3094 - RNA, 22 nt, Homo sapiens
  source 1..22: mol_type = transcribed RNA
gtgtgcggaaatgcttctgcta

SEQ ID NO: 3095 - RNA, 22 nt, Homo sapiens
  source 1..22: mol_type = transcribed RNA
tagcagaagcatttccgcacac

SEQ ID NO: 3096 - RNA, 23 nt, Homo sapiens
  source 1..23: mol_type = transcribed RNA
agcagcattgtacagggctatca

SEQ ID NO: 3097 - RNA, 23 nt, Homo sapiens
  source 1..23: mol_type = transcribed RNA
tgatagccctgtacaatgctgct

SEQ ID NO: 3098 - RNA, 22 nt, Homo sapiens
  source 1..22: mol_type = transcribed RNA
aactggccctcaaagtcccgct

SEQ ID NO: 3099 - RNA, 22 nt, Homo sapiens
  source 1..22: mol_type = transcribed RNA
agcgggactttgagggccagtt

SEQ ID NO: 3100 - RNA, 22 nt, Homo sapiens
  source 1..22: mol_type = transcribed RNA
cggggttttgagggcgagatga

SEQ ID NO: 3101 - RNA, 22 nt, Homo sapiens
  source 1..22: mol_type = transcribed RNA
tcatctcgccctcaaaaccccg

SEQ ID NO: 3102 - RNA, 21 nt, Homo sapiens
  source 1..21: mol_type = transcribed RNA
gcagggacagcaaaggggtgc

SEQ ID NO: 3103 - RNA, 21 nt, Homo sapiens
  source 1..21: mol_type = transcribed RNA
gcacccctttgctgtccctgc

SEQ ID NO: 3104 - RNA, 22 nt, Homo sapiens
  source 1..22: mol_type = transcribed RNA
ttccctttgtcatccttcgcct

SEQ ID NO: 3105 - RNA, 22 nt, Homo sapiens
  source 1..22: mol_type = transcribed RNA
aggcgaaggatgacaaagggaa

SEQ ID NO: 3106 - RNA, 23 nt, Homo sapiens
  source 1..23: mol_type = transcribed RNA
atggccaaaactgcagttatttt

SEQ ID NO: 3107 - RNA, 23 nt, Homo sapiens
  source 1..23: mol_type = transcribed RNA
aaaataactgcagttttggccat

SEQ ID NO: 3108 - RNA, 25 nt, Homo sapiens
  source 1..25: mol_type = transcribed RNA
aaaaaccacaattacttttgcacca

SEQ ID NO: 3109 - RNA, 25 nt, Homo sapiens
  source 1..25: mol_type = transcribed RNA
tggtgcaaaagtaattgtggttttt

SEQ ID NO: 3110 - RNA, 21 nt, Homo sapiens
  source 1..21: mol_type = transcribed RNA
caaaagtgatcgtggtttttg

SEQ ID NO: 3111 - RNA, 21 nt, Homo sapiens
  source 1..21: mol_type = transcribed RNA
caaaaaccacgatcacttttg

SEQ ID NO: 3112 - RNA, 23 nt, Homo sapiens
  source 1..23: mol_type = transcribed RNA
caaagactgcaattacttttgcg

SEQ ID NO: 3113 - RNA, 23 nt, Homo sapiens
  source 1..23: mol_type = transcribed RNA
cgcaaaagtaattgcagtctttg

SEQ ID NO: 3114 - RNA, 23 nt, Homo sapiens
  source 1..23: mol_type = transcribed RNA
aaaagtaactgcggtttttgcct

SEQ ID NO: 3115 - RNA, 23 nt, Homo sapiens
  source 1..23: mol_type = transcribed RNA
aggcaaaaaccgcagttactttt

SEQ ID NO: 3116 - RNA, 22 nt, Homo sapiens
  source 1..22: mol_type = transcribed RNA
tgcctggaacatagtagggact

SEQ ID NO: 3117 - RNA, 22 nt, Homo sapiens
  source 1..22: mol_type = transcribed RNA
agtccctactatgttccaggca

SEQ ID NO: 3118 - RNA, 21 nt, Homo sapiens
  source 1..21: mol_type = transcribed RNA
ataggactcatatagtgccag

SEQ ID NO: 3119 - RNA, 21 nt, Homo sapiens
  source 1..21: mol_type = transcribed RNA
ctggcactatatgagtcctat

SEQ ID NO: 3120 - RNA, 20 nt, Homo sapiens
  source 1..20: mol_type = transcribed RNA
agacactatacgagtcatat

SEQ ID NO: 3121 - RNA, 20 nt, Homo sapiens
  source 1..20: mol_type = transcribed RNA
atatgactcgtatagtgtct

SEQ ID NO: 3122 - RNA, 23 nt, Homo sapiens
  source 1..23: mol_type = transcribed RNA
tgtgactgcattatgaaaattct

SEQ ID NO: 3123 - RNA, 23 nt, Homo sapiens
  source 1..23: mol_type = transcribed RNA
agaattttcataatgcagtcaca

SEQ ID NO: 3124 - RNA, 20 nt, Homo sapiens
  source 1..20: mol_type = transcribed RNA
tggcttttaactttgatggc

SEQ ID NO: 3125 - RNA, 20 nt, Homo sapiens
  source 1..20: mol_type = transcribed RNA
gccatcaaagttaaaagcca

SEQ ID NO: 3126 - RNA, 21 nt, Homo sapiens
  source 1..21: mol_type = transcribed RNA
cacagcaagtgtagacaggca

SEQ ID NO: 3127 - RNA, 21 nt, Homo sapiens
  source 1..21: mol_type = transcribed RNA
tgcctgtctacacttgctgtg

SEQ ID NO: 3128 - RNA, 21 nt, Homo sapiens
  source 1..21: mol_type = transcribed RNA
cctgtctgtgcctgctgtaca

SEQ ID NO: 3129 - RNA, 21 nt, Homo sapiens
  source 1..21: mol_type = transcribed RNA
tgtacagcaggcacagacagg

SEQ ID NO: 3130 - RNA, 22 nt, Homo sapiens
  source 1..22: mol_type = transcribed RNA
taaatagagtaggcaaaggaca

SEQ ID NO: 3131 - RNA, 22 nt, Homo sapiens
  source 1..22: mol_type = transcribed RNA
tgtcctttgcctactctattta

SEQ ID NO: 3132 - RNA, 22 nt, Homo sapiens
  source 1..22: mol_type = transcribed RNA
tcctttgcctattctatttaag

SEQ ID NO: 3133 - RNA, 22 nt, Homo sapiens
  source 1..22: mol_type = transcribed RNA
cttaaatagaataggcaaagga

SEQ ID NO: 3134 - RNA, 22 nt, Homo sapiens
  source 1..22: mol_type = transcribed RNA
gttgggacaagaggacggtctt

SEQ ID NO: 3135 - RNA, 22 nt, Homo sapiens
  source 1..22: mol_type = transcribed RNA
aagaccgtcctcttgtcccaac

SEQ ID NO: 3136 - RNA, 17 nt, Homo sapiens
  source 1..17: mol_type = transcribed RNA
cagagaattgtttaatc

SEQ ID NO: 3137 - RNA, 17 nt, Homo sapiens
  source 1..17: mol_type = transcribed RNA
gattaaacaattctctg

SEQ ID NO: 3138 - RNA, 20 nt, Homo sapiens
  source 1..20: mol_type = transcribed RNA
tagaggaagctgtggagaga

SEQ ID NO: 3139 - RNA, 20 nt, Homo sapiens
  source 1..20: mol_type = transcribed RNA
tctctccacagcttcctcta

SEQ ID NO: 3140 - RNA, 22 nt, Homo sapiens
  source 1..22: mol_type = transcribed RNA
tccccttctgcaggcctgctgg

SEQ ID NO: 3141 - RNA, 22 nt, Homo sapiens
  source 1..22: mol_type = transcribed RNA
ccagcaggcctgcagaagggga

SEQ ID NO: 3142 - RNA, 23 nt, Homo sapiens
  source 1..23: mol_type = transcribed RNA
atcagggcttgtggaatgggaag

SEQ ID NO: 3143 - RNA, 23 nt, Homo sapiens
  source 1..23: mol_type = transcribed RNA
cttcccattccacaagccctgat

SEQ ID NO: 3144 - RNA, 23 nt, Homo sapiens
  source 1..23: mol_type = transcribed RNA
tctggcaagtaaaaaactctcat

SEQ ID NO: 3145 - RNA, 23 nt, Homo sapiens
  source 1..23: mol_type = transcribed RNA
atgagagttttttacttgccaga

SEQ ID NO: 3146 - RNA, 23 nt, Homo sapiens
  source 1..23: mol_type = transcribed RNA
tcgaggactggtggaagggcctt

SEQ ID NO: 3147 - RNA, 23 nt, Homo sapiens
  source 1..23: mol_type = transcribed RNA
aaggcccttccaccagtcctcga

SEQ ID NO: 3148 - RNA, 24 nt, Homo sapiens
  source 1..24: mol_type = transcribed RNA
tgggtagagaaggagctcagagga

SEQ ID NO: 3149 - RNA, 24 nt, Homo sapiens
  source 1..24: mol_type = transcribed RNA
tcctctgagctccttctctaccca

SEQ ID NO: 3150 - RNA, 22 nt, Homo sapiens
  source 1..22: mol_type = transcribed RNA
taaagaactcttaaaacccaat

SEQ ID NO: 3151 - RNA, 22 nt, Homo sapiens
  source 1..22: mol_type = transcribed RNA
attgggttttaagagttcttta

SEQ ID NO: 3152 - RNA, 23 nt, Homo sapiens
  source 1..23: mol_type = transcribed RNA
tgatggataaaagactacatatt

SEQ ID NO: 3153 - RNA, 23 nt, Homo sapiens
  source 1..23: mol_type = transcribed RNA
aatatgtagtcttttatccatca

SEQ ID NO: 3154 - RNA, 22 nt, Homo sapiens
  source 1..22: mol_type = transcribed RNA
tgcctaggctgagactgcagtg

SEQ ID NO: 3155 - RNA, 22 nt, Homo sapiens
  source 1..22: mol_type = transcribed RNA
cactgcagtctcagcctaggca

SEQ ID NO: 3156 - RNA, 22 nt, Homo sapiens
  source 1..22: mol_type = transcribed RNA
tggcccaacctattcagttagt

SEQ ID NO: 3157 - RNA, 22 nt, Homo sapiens
  source 1..22: mol_type = transcribed RNA
actaactgaataggttgggcca

SEQ ID NO: 3158 - RNA, 23 nt, Homo sapiens
  source 1..23: mol_type = transcribed RNA
ctgactgaataggtagggtcatt

SEQ ID NO: 3159 - RNA, 23 nt, Homo sapiens
  source 1..23: mol_type = transcribed RNA
aatgaccctacctattcagtcag

SEQ ID NO: 3160 - RNA, 24 nt, Homo sapiens
  source 1..24: mol_type = transcribed RNA
tctgtagcctgggagcaatggggt

SEQ ID NO: 3161 - RNA, 24 nt, Homo sapiens
  source 1..24: mol_type = transcribed RNA
accccattgctcccaggctacaga

SEQ ID NO: 3162 - RNA, 23 nt, Homo sapiens
  source 1..23: mol_type = transcribed RNA
taggagctcaacagatgcctgtt

SEQ ID NO: 3163 - RNA, 23 nt, Homo sapiens
  source 1..23: mol_type = transcribed RNA
aacaggcatctgttgagctccta

SEQ ID NO: 3164 - RNA, 19 nt, Homo sapiens
  source 1..19: mol_type = transcribed RNA
gagggcgggtggaggagga

SEQ ID NO: 3165 - RNA, 19 nt, Homo sapiens
  source 1..19: mol_type = transcribed RNA
tcctcctccacccgccctc

SEQ ID NO: 3166 - RNA, 25 nt, Homo sapiens
  source 1..25: mol_type = transcribed RNA
ataacattgtaaagcgcttctttcg

SEQ ID NO: 3167 - RNA, 25 nt, Homo sapiens
  source 1..25: mol_type = transcribed RNA
cgaaagaagcgctttacaatgttat

SEQ ID NO: 3168 - RNA, 24 nt, Homo sapiens
  source 1..24: mol_type = transcribed RNA
agatattttgagtgtttggaattg

SEQ ID NO: 3169 - RNA, 24 nt, Homo sapiens
  source 1..24: mol_type = transcribed RNA
caattccaaacactcaaaatatct

SEQ ID NO: 3170 - RNA, 22 nt, Homo sapiens
  source 1..22: mol_type = transcribed RNA
aactccaaacactcaaaactca

SEQ ID NO: 3171 - RNA, 22 nt, Homo sapiens
  source 1..22: mol_type = transcribed RNA
tgagttttgagtgtttggagtt

SEQ ID NO: 3172 - RNA, 22 nt, Homo sapiens
  source 1..22: mol_type = transcribed RNA
catgctaggatagaaagaatgg

SEQ ID NO: 3173 - RNA, 22 nt, Homo sapiens
  source 1..22: mol_type = transcribed RNA
ccattctttctatcctagcatg

SEQ ID NO: 3174 - RNA, 24 nt, Homo sapiens
  source 1..24: mol_type = transcribed RNA
ggttgggcagtgaggagggtgtga

SEQ ID NO: 3175 - RNA, 24 nt, Homo sapiens
  source 1..24: mol_type = transcribed RNA
tcacaccctcctcactgcccaacc

SEQ ID NO: 3176 - RNA, 22 nt, Homo sapiens
  source 1..22: mol_type = transcribed RNA
tggaaaaaactggtgtgtgctt

SEQ ID NO: 3177 - RNA, 22 nt, Homo sapiens
  source 1..22: mol_type = transcribed RNA
aagcacacaccagttttttcca

SEQ ID NO: 3178 - RNA, 22 nt, Homo sapiens
  source 1..22: mol_type = transcribed RNA
ctggggagatcctcgaggttgg

SEQ ID NO: 3179 - RNA, 22 nt, Homo sapiens
  source 1..22: mol_type = transcribed RNA
ccaacctcgaggatctccccag

SEQ ID NO: 3180 - RNA, 22 nt, Homo sapiens
  source 1..22: mol_type = transcribed RNA
caacctcgacgatctcctcagc

SEQ ID NO: 3181 - RNA, 22 nt, Homo sapiens
  source 1..22: mol_type = transcribed RNA
gctgaggagatcgtcgaggttg

SEQ ID NO: 3182 - RNA, 21 nt, Homo sapiens
  source 1..21: mol_type = transcribed RNA
tgaggagatcgtcgaggttgg

SEQ ID NO: 3183 - RNA, 21 nt, Homo sapiens
  source 1..21: mol_type = transcribed RNA
ccaacctcgacgatctcctca

SEQ ID NO: 3184 - RNA, 22 nt, Homo sapiens
  source 1..22: mol_type = transcribed RNA
caacctcgaggatctccccagc

SEQ ID NO: 3185 - RNA, 22 nt, Homo sapiens
  source 1..22: mol_type = transcribed RNA
gctggggagatcctcgaggttg

SEQ ID NO: 3186 - RNA, 21 nt, Homo sapiens
  source 1..21: mol_type = transcribed RNA
ggtggggcaatgggatcaggt

SEQ ID NO: 3187 - RNA, 21 nt, Homo sapiens
  source 1..21: mol_type = transcribed RNA
acctgatcccattgccccacc

SEQ ID NO: 3188 - RNA, 23 nt, Homo sapiens
  source 1..23: mol_type = transcribed RNA
ggggaaagcgagtagggacattt

SEQ ID NO: 3189 - RNA, 23 nt, Homo sapiens
  source 1..23: mol_type = transcribed RNA
aaatgtccctactcgctttcccc

SEQ ID NO: 3190 - RNA, 22 nt, Homo sapiens
  source 1..22: mol_type = transcribed RNA
cagaaggggagttgggagcaga

SEQ ID NO: 3191 - RNA, 22 nt, Homo sapiens
  source 1..22: mol_type = transcribed RNA
tctgctcccaactccccttctg

SEQ ID NO: 3192 - RNA, 21 nt, Homo sapiens
  source 1..21: mol_type = transcribed RNA
ccaggctctgcagtgggaact

SEQ ID NO: 3193 - RNA, 21 nt, Homo sapiens
  source 1..21: mol_type = transcribed RNA
agttcccactgcagagcctgg

SEQ ID NO: 3194 - RNA, 21 nt, Homo sapiens
  source 1..21: mol_type = transcribed RNA
ctcccacttccagatctttct

SEQ ID NO: 3195 - RNA, 21 nt, Homo sapiens
  source 1..21: mol_type = transcribed RNA
agaaagatctggaagtgggag

SEQ ID NO: 3196 - RNA, 22 nt, Homo sapiens
  source 1..22: mol_type = transcribed RNA
aaagatctggaagtgggagaca

SEQ ID NO: 3197 - RNA, 22 nt, Homo sapiens
  source 1..22: mol_type = transcribed RNA
tgtctcccacttccagatcttt

SEQ ID NO: 3198 - RNA, 22 nt, Homo sapiens
  source 1..22: mol_type = transcribed RNA
ctgccctagtctagctgaagct

SEQ ID NO: 3199 - RNA, 22 nt, Homo sapiens
  source 1..22: mol_type = transcribed RNA
agcttcagctagactagggcag

SEQ ID NO: 3200 - RNA, 22 nt, Homo sapiens
  source 1..22: mol_type = transcribed RNA
ttcagccaggctagtgcagtct

SEQ ID NO: 3201 - RNA, 22 nt, Homo sapiens
  source 1..22: mol_type = transcribed RNA
agactgcactagcctggctgaa

SEQ ID NO: 3202 - RNA, 22 nt, Homo sapiens
  source 1..22: mol_type = transcribed RNA
taggattacaagtgtcggccac

SEQ ID NO: 3203 - RNA, 22 nt, Homo sapiens
  source 1..22: mol_type = transcribed RNA
gtggccgacacttgtaatccta

SEQ ID NO: 3204 - RNA, 22 nt, Homo sapiens
  source 1..22: mol_type = transcribed RNA
agagctgagactagaaagccca

SEQ ID NO: 3205 - RNA, 22 nt, Homo sapiens
  source 1..22: mol_type = transcribed RNA
tgggctttctagtctcagctct

SEQ ID NO: 3206 - RNA, 22 nt, Homo sapiens
  source 1..22: mol_type = transcribed RNA
ggctttctagtctcagctctcc

SEQ ID NO: 3207 - RNA, 22 nt, Homo sapiens
  source 1..22: mol_type = transcribed RNA
ggagagctgagactagaaagcc

SEQ ID NO: 3208 - RNA, 23 nt, Homo sapiens
  source 1..23: mol_type = transcribed RNA
ctgataagaacagaggcccagat

SEQ ID NO: 3209 - RNA, 23 nt, Homo sapiens
  source 1..23: mol_type = transcribed RNA
atctgggcctctgttcttatcag

SEQ ID NO: 3210 - RNA, 21 nt, Homo sapiens
  source 1..21: mol_type = transcribed RNA
tccctacccctccactcccca

SEQ ID NO: 3211 - RNA, 21 nt, Homo sapiens
  source 1..21: mol_type = transcribed RNA
tggggagtggaggggtaggga

SEQ ID NO: 3212 - RNA, 23 nt, Homo sapiens
  source 1..23: mol_type = transcribed RNA
ttagggagtagaagggtggggag

SEQ ID NO: 3213 - RNA, 23 nt, Homo sapiens
  source 1..23: mol_type = transcribed RNA
ctccccacccttctactccctaa

SEQ ID NO: 3214 - RNA, 22 nt, Homo sapiens
  source 1..22: mol_type = transcribed RNA
tataaaatgagggcagtaagac

SEQ ID NO: 3215 - RNA, 22 nt, Homo sapiens
  source 1..22: mol_type = transcribed RNA
gtcttactgccctcattttata

SEQ ID NO: 3216 - RNA, 22 nt, Homo sapiens
  source 1..22: mol_type = transcribed RNA
tgtgactttaagggaaatggcg

SEQ ID NO: 3217 - RNA, 22 nt, Homo sapiens
  source 1..22: mol_type = transcribed RNA
cgccatttcccttaaagtcaca

SEQ ID NO: 3218 - RNA, 22 nt, Homo sapiens
  source 1..22: mol_type = transcribed RNA
aggtggatgcaatgtgacctca

SEQ ID NO: 3219 - RNA, 22 nt, Homo sapiens
  source 1..22: mol_type = transcribed RNA
tgaggtcacattgcatccacct

SEQ ID NO: 3220 - RNA, 23 nt, Homo sapiens
  source 1..23: mol_type = transcribed RNA
cgcagacaatgcctactggccta

SEQ ID NO: 3221 - RNA, 23 nt, Homo sapiens
  source 1..23: mol_type = transcribed RNA
taggccagtaggcattgtctgcg

SEQ ID NO: 3222 - RNA, 17 nt, Homo sapiens
  source 1..17: mol_type = transcribed RNA
gagttctacagtcagac

SEQ ID NO: 3223 - RNA, 17 nt, Homo sapiens
  source 1..17: mol_type = transcribed RNA
gtctgactgtagaactc

SEQ ID NO: 3224 - RNA, 22 nt, Homo sapiens
  source 1..22: mol_type = transcribed RNA
taggactgtgcttggcacatag

SEQ ID NO: 3225 - RNA, 22 nt, Homo sapiens
  source 1..22: mol_type = transcribed RNA
ctatgtgccaagcacagtccta

SEQ ID NO: 3226 - RNA, 22 nt, Homo sapiens
  source 1..22: mol_type = transcribed RNA
ctggggttctgagacagacagt

SEQ ID NO: 3227 - RNA, 22 nt, Homo sapiens
  source 1..22: mol_type = transcribed RNA
actgtctgtctcagaaccccag

SEQ ID NO: 3228 - RNA, 22 nt, Homo sapiens
  source 1..22: mol_type = transcribed RNA
aaaggaggaaataggcaggcca

SEQ ID NO: 3229 - RNA, 22 nt, Homo sapiens
  source 1..22: mol_type = transcribed RNA
tggcctgcctatttcctccttt

SEQ ID NO: 3230 - RNA, 22 nt, Homo sapiens
  source 1..22: mol_type = transcribed RNA
tgccctgcctgttttctccttt

SEQ ID NO: 3231 - RNA, 22 nt, Homo sapiens
  source 1..22: mol_type = transcribed RNA
aaaggagaaaacaggcagggca

SEQ ID NO: 3232 - RNA, 23 nt, Homo sapiens
  source 1..23: mol_type = transcribed RNA
tagtgagttagagatgcagagcc

SEQ ID NO: 3233 - RNA, 23 nt, Homo sapiens
  source 1..23: mol_type = transcribed RNA
ggctctgcatctctaactcacta

SEQ ID NO: 3234 - RNA, 19 nt, Homo sapiens
  source 1..19: mol_type = transcribed RNA
actggcctgggactaccgg

SEQ ID NO: 3235 - RNA, 19 nt, Homo sapiens
  source 1..19: mol_type = transcribed RNA
ccggtagtcccaggccagt

SEQ ID NO: 3236 - RNA, 21 nt, Homo sapiens
  source 1..21: mol_type = transcribed RNA
tgcacggcactggggacacgt

SEQ ID NO: 3237 - RNA, 21 nt, Homo sapiens
  source 1..21: mol_type = transcribed RNA
acgtgtccccagtgccgtgca

SEQ ID NO: 3238 - RNA, 23 nt, Homo sapiens
  source 1..23: mol_type = transcribed RNA
tgtgtacacacgtgccaggcgct

SEQ ID NO: 3239 - RNA, 23 nt, Homo sapiens
  source 1..23: mol_type = transcribed RNA
agcgcctggcacgtgtgtacaca

SEQ ID NO: 3240 - RNA, 17 nt, Homo sapiens
  source 1..17: mol_type = transcribed RNA
ggggcgcggccggatcg

SEQ ID NO: 3241 - RNA, 17 nt, Homo sapiens
  source 1..17: mol_type = transcribed RNA
cgatccggccgcgcccc

SEQ ID NO: 3242 - RNA, 22 nt, Homo sapiens
  source 1..22: mol_type = transcribed RNA
agaaggggtgaaatttaaacgt

SEQ ID NO: 3243 - RNA, 22 nt, Homo sapiens
  source 1..22: mol_type = transcribed RNA
acgtttaaatttcaccccttct

SEQ ID NO: 3244 - RNA, 19 nt, Homo sapiens
  source 1..19: mol_type = transcribed RNA
atcgggccctcggcgccgg

SEQ ID NO: 3245 - RNA, 19 nt, Homo sapiens
  source 1..19: mol_type = transcribed RNA
ccggcgccgagggcccgat

SEQ ID NO: 3246 - RNA, 17 nt, Homo sapiens
  source 1..17: mol_type = transcribed RNA
gcttctgtagtgtagtc

SEQ ID NO: 3247 - RNA, 17 nt, Homo sapiens
  source 1..17: mol_type = transcribed RNA
gactacactacagaagc

SEQ ID NO: 3248 - RNA, 22 nt, Homo sapiens
  source 1..22: mol_type = transcribed RNA
gcctctctcggagtcgctcgga

SEQ ID NO: 3249 - RNA, 22 nt, Homo sapiens
  source 1..22: mol_type = transcribed RNA
tccgagcgactccgagagaggc

SEQ ID NO: 3250 - RNA, 23 nt, Homo sapiens
  source 1..23: mol_type = transcribed RNA
aaagtctcgctctctgcccctca

SEQ ID NO: 3251 - RNA, 23 nt, Homo sapiens
  source 1..23: mol_type = transcribed RNA
tgaggggcagagagcgagacttt

SEQ ID NO: 3252 - RNA, 24 nt, Homo sapiens
  source 1..24: mol_type = transcribed RNA
tgaggggcctcagaccgagctttt

SEQ ID NO: 3253 - RNA, 24 nt, Homo sapiens
  source 1..24: mol_type = transcribed RNA
aaaagctcggtctgaggcccctca

SEQ ID NO: 3254 - RNA, 23 nt, Homo sapiens
  source 1..23: mol_type = transcribed RNA
agaagaaggcggtcggtctgcgg

SEQ ID NO: 3255 - RNA, 23 nt, Homo sapiens
  source 1..23: mol_type = transcribed RNA
ccgcagaccgaccgccttcttct

SEQ ID NO: 3256 - RNA, 20 nt, Homo sapiens
  source 1..20: mol_type = transcribed RNA
ttggccatggggctgcgcgg

SEQ ID NO: 3257 - RNA, 20 nt, Homo sapiens
  source 1..20: mol_type = transcribed RNA
ccgcgcagccccatggccaa

SEQ ID NO: 3258 - RNA, 23 nt, Homo sapiens
  source 1..23: mol_type = transcribed RNA
cctgggcagcgtgtggctgaagg

SEQ ID NO: 3259 - RNA, 23 nt, Homo sapiens
  source 1..23: mol_type = transcribed RNA
ccttcagccacacgctgcccagg

SEQ ID NO: 3260 - RNA, 23 nt, Homo sapiens
  source 1..23: mol_type = transcribed RNA
agaggctttgtgcggatacgggg

SEQ ID NO: 3261 - RNA, 23 nt, Homo sapiens
  source 1..23: mol_type = transcribed RNA
ccccgtatccgcacaaagcctct

SEQ ID NO: 3262 - RNA, 21 nt, Homo sapiens
  source 1..21: mol_type = transcribed RNA
cccttgggtctgatggggtag

SEQ ID NO: 3263 - RNA, 21 nt, Homo sapiens
  source 1..21: mol_type = transcribed RNA
ctaccccatcagacccaaggg

SEQ ID NO: 3264 - RNA, 25 nt, Homo sapiens
  source 1..25: mol_type = transcribed RNA
tgccccatctgtgccctgggtagga

SEQ ID NO: 3265 - RNA, 25 nt, Homo sapiens
  source 1..25: mol_type = transcribed RNA
tcctacccagggcacagatggggca

SEQ ID NO: 3266 - RNA, 23 nt, Homo sapiens
  source 1..23: mol_type = transcribed RNA
tgtggaaggtagacggccagaga

SEQ ID NO: 3267 - RNA, 23 nt, Homo sapiens
  source 1..23: mol_type = transcribed RNA
tctctggccgtctaccttccaca

SEQ ID NO: 3268 - RNA, 20 nt, Homo sapiens
  source 1..20: mol_type = transcribed RNA
tctggccagctacgtcccca

SEQ ID NO: 3269 - RNA, 20 nt, Homo sapiens
  source 1..20: mol_type = transcribed RNA
tggggacgtagctggccaga

SEQ ID NO: 3270 - RNA, 23 nt, Homo sapiens
  source 1..23: mol_type = transcribed RNA
tggggacgtagctggccagacag

SEQ ID NO: 3271 - RNA, 23 nt, Homo sapiens
  source 1..23: mol_type = transcribed RNA
ctgtctggccagctacgtcccca

SEQ ID NO: 3272 - RNA, 22 nt, Homo sapiens
  source 1..22: mol_type = transcribed RNA
ctctctggccgtctaccttcca

SEQ ID NO: 3273 - RNA, 22 nt, Homo sapiens
  source 1..22: mol_type = transcribed RNA
tggaaggtagacggccagagag

SEQ ID NO: 3274 - RNA, 23 nt, Homo sapiens
  source 1..23: mol_type = transcribed RNA
tctgggaggttgtagcagtggaa

SEQ ID NO: 3275 - RNA, 23 nt, Homo sapiens
  source 1..23: mol_type = transcribed RNA
ttccactgctacaacctcccaga

SEQ ID NO: 3276 - RNA, 22 nt, Homo sapiens
  source 1..22: mol_type = transcribed RNA
tcctgcgtaggatctgaggagt

SEQ ID NO: 3277 - RNA, 22 nt, Homo sapiens
  source 1..22: mol_type = transcribed RNA
actcctcagatcctacgcagga

SEQ ID NO: 3278 - RNA, 22 nt, Homo sapiens
  source 1..22: mol_type = transcribed RNA
agctctgctgctcactggcagt

SEQ ID NO: 3279 - RNA, 22 nt, Homo sapiens
  source 1..22: mol_type = transcribed RNA
actgccagtgagcagcagagct

SEQ ID NO: 3280 - RNA, 21 nt, Homo sapiens
  source 1..21: mol_type = transcribed RNA
ggccagccaccaggagggctg

SEQ ID NO: 3281 - RNA, 21 nt, Homo sapiens
  source 1..21: mol_type = transcribed RNA
cagccctcctggtggctggcc

SEQ ID NO: 3282 - RNA, 17 nt, Homo sapiens
  source 1..17: mol_type = transcribed RNA
cgcgccgggcccgggtt

SEQ ID NO: 3283 - RNA, 17 nt, Homo sapiens
  source 1..17: mol_type = transcribed RNA
aacccgggcccggcgcg

SEQ ID NO: 3284 - RNA, 23 nt, Homo sapiens
  source 1..23: mol_type = transcribed RNA
ggaggcgcaggctcggaaaggcg

SEQ ID NO: 3285 - RNA, 23 nt, Homo sapiens
  source 1..23: mol_type = transcribed RNA
cgcctttccgagcctgcgcctcc

SEQ ID NO: 3286 - RNA, 22 nt, Homo sapiens
  source 1..22: mol_type = transcribed RNA
gtggagtcctggggaatggaga

SEQ ID NO: 3287 - RNA, 22 nt, Homo sapiens
  source 1..22: mol_type = transcribed RNA
tctccattccccaggactccac

SEQ ID NO: 3288 - RNA, 23 nt, Homo sapiens
  source 1..23: mol_type = transcribed RNA
agggactgccttaggagaaagtt

SEQ ID NO: 3289 - RNA, 23 nt, Homo sapiens
  source 1..23: mol_type = transcribed RNA
aactttctcctaaggcagtccct

SEQ ID NO: 3290 - RNA, 17 nt, Homo sapiens
  source 1..17: mol_type = transcribed RNA
gggatatgaagaaaaat

SEQ ID NO: 3291 - RNA, 17 nt, Homo sapiens
  source 1..17: mol_type = transcribed RNA
atttttcttcatatccc

SEQ ID NO: 3292 - RNA, 22 nt, Homo sapiens
  source 1..22: mol_type = transcribed RNA
tggaagggagaagagctttaat

SEQ ID NO: 3293 - RNA, 22 nt, Homo sapiens
  source 1..22: mol_type = transcribed RNA
attaaagctcttctcccttcca

SEQ ID NO: 3294 - RNA, 22 nt, Homo sapiens
  source 1..22: mol_type = transcribed RNA
actttcctcactcccgtgaagt

SEQ ID NO: 3295 - RNA, 22 nt, Homo sapiens
  source 1..22: mol_type = transcribed RNA
acttcacgggagtgaggaaagt

SEQ ID NO: 3296 - RNA, 21 nt, Homo sapiens
  source 1..21: mol_type = transcribed RNA
ttcgcgggcgaaggcaaagtc

SEQ ID NO: 3297 - RNA, 21 nt, Homo sapiens
  source 1..21: mol_type = transcribed RNA
gactttgccttcgcccgcgaa

SEQ ID NO: 3298 - RNA, 22 nt, Homo sapiens
  source 1..22: mol_type = transcribed RNA
catctggcatccgtcacacaga

SEQ ID NO: 3299 - RNA, 22 nt, Homo sapiens
  source 1..22: mol_type = transcribed RNA
tctgtgtgacggatgccagatg

SEQ ID NO: 3300 - RNA, 22 nt, Homo sapiens
  source 1..22: mol_type = transcribed RNA
tgagggacagatgccagaagca

SEQ ID NO: 3301 - RNA, 22 nt, Homo sapiens
  source 1..22: mol_type = transcribed RNA
tgcttctggcatctgtccctca

SEQ ID NO: 3302 - RNA, 22 nt, Homo sapiens
  source 1..22: mol_type = transcribed RNA
aaactaatctctacactgctgc

SEQ ID NO: 3303 - RNA, 22 nt, Homo sapiens
  source 1..22: mol_type = transcribed RNA
gcagcagtgtagagattagttt

SEQ ID NO: 3304 - RNA, 22 nt, Homo sapiens
  source 1..22: mol_type = transcribed RNA
gcagtagtgtagagattggttt

SEQ ID NO: 3305 - RNA, 22 nt, Homo sapiens
  source 1..22: mol_type = transcribed RNA
aaaccaatctctacactactgc

SEQ ID NO: 3306 - RNA, 21 nt, Homo sapiens
  source 1..21: mol_type = transcribed RNA
gctgcaccggagactgggtaa

SEQ ID NO: 3307 - RNA, 21 nt, Homo sapiens
  source 1..21: mol_type = transcribed RNA
ttacccagtctccggtgcagc

SEQ ID NO: 3308 - RNA, 21 nt, Homo sapiens
  source 1..21: mol_type = transcribed RNA
tacccagtctccggtgcagcc

SEQ ID NO: 3309 - RNA, 21 nt, Homo sapiens
  source 1..21: mol_type = transcribed RNA
ggctgcaccggagactgggta

SEQ ID NO: 3310 - RNA, 24 nt, Homo sapiens
  source 1..24: mol_type = transcribed RNA
tgtggacagtgaggtagagggagt

SEQ ID NO: 3311 - RNA, 24 nt, Homo sapiens
  source 1..24: mol_type = transcribed RNA
actccctctacctcactgtccaca

SEQ ID NO: 3312 - RNA, 22 nt, Homo sapiens
  source 1..22: mol_type = transcribed RNA
agcttttgggaattcaggtagt

SEQ ID NO: 3313 - RNA, 22 nt, Homo sapiens
  source 1..22: mol_type = transcribed RNA
actacctgaattcccaaaagct

SEQ ID NO: 3314 - RNA, 21 nt, Homo sapiens
  source 1..21: mol_type = transcribed RNA
acctgaattaccaaaagcttt

SEQ ID NO: 3315 - RNA, 21 nt, Homo sapiens
  source 1..21: mol_type = transcribed RNA
aaagcttttggtaattcaggt

SEQ ID NO: 3316 - RNA, 22 nt, Homo sapiens
  source 1..22: mol_type = transcribed RNA
atatacctgttcggtctcttta

SEQ ID NO: 3317 - RNA, 22 nt, Homo sapiens
  source 1..22: mol_type = transcribed RNA
taaagagaccgaacaggtatat

SEQ ID NO: 3318 - RNA, 22 nt, Homo sapiens
  source 1..22: mol_type = transcribed RNA
aggggaccaaagagatatatag

SEQ ID NO: 3319 - RNA, 22 nt, Homo sapiens
  source 1..22: mol_type = transcribed RNA
ctatatatctctttggtcccct

SEQ ID NO: 3320 - RNA, 23 nt, Homo sapiens
  source 1..23: mol_type = transcribed RNA
tttgtatggatatgtgtgtgtat

SEQ ID NO: 3321 - RNA, 23 nt, Homo sapiens
  source 1..23: mol_type = transcribed RNA
atacacacacatatccatacaaa

SEQ ID NO: 3322 - RNA, 22 nt, Homo sapiens
  source 1..22: mol_type = transcribed RNA
tgtgttagaataggggcaataa

SEQ ID NO: 3323 - RNA, 22 nt, Homo sapiens
  source 1..22: mol_type = transcribed RNA
ttattgcccctattctaacaca

SEQ ID NO: 3324 - RNA, 22 nt, Homo sapiens
  source 1..22: mol_type = transcribed RNA
attgcctctgttctaacacaag

SEQ ID NO: 3325 - RNA, 22 nt, Homo sapiens
  source 1..22: mol_type = transcribed RNA
cttgtgttagaacagaggcaat

SEQ ID NO: 3326 - RNA, 22 nt, Homo sapiens
  source 1..22: mol_type = transcribed RNA
aagggcttcctctctgcaggac

SEQ ID NO: 3327 - RNA, 22 nt, Homo sapiens
  source 1..22: mol_type = transcribed RNA
gtcctgcagagaggaagccctt

SEQ ID NO: 3328 - RNA, 21 nt, Homo sapiens
  source 1..21: mol_type = transcribed RNA
cctgcagagaggaagcccttc

SEQ ID NO: 3329 - RNA, 21 nt, Homo sapiens
  source 1..21: mol_type = transcribed RNA
gaagggcttcctctctgcagg

SEQ ID NO: 3330 - RNA, 22 nt, Homo sapiens
  source 1..22: mol_type = transcribed RNA
aggatttcagaaatactggtgt

SEQ ID NO: 3331 - RNA, 22 nt, Homo sapiens
  source 1..22: mol_type = transcribed RNA
acaccagtatttctgaaatcct

SEQ ID NO: 3332 - RNA, 24 nt, Homo sapiens
  source 1..24: mol_type = transcribed RNA
agatgtatggaatctgtatatatc

SEQ ID NO: 3333 - RNA, 24 nt, Homo sapiens
  source 1..24: mol_type = transcribed RNA
gatatatacagattccatacatct

SEQ ID NO: 3334 - RNA, 22 nt, Homo sapiens
  source 1..22: mol_type = transcribed RNA
cggggagagaacgcagtgacgt

SEQ ID NO: 3335 - RNA, 22 nt, Homo sapiens
  source 1..22: mol_type = transcribed RNA
acgtcactgcgttctctccccg

SEQ ID NO: 3336 - RNA, 19 nt, Homo sapiens
  source 1..19: mol_type = transcribed RNA
tggggcggagcttccggag

SEQ ID NO: 3337 - RNA, 19 nt, Homo sapiens
  source 1..19: mol_type = transcribed RNA
ctccggaagctccgcccca

SEQ ID NO: 3338 - RNA, 21 nt, Homo sapiens
  source 1..21: mol_type = transcribed RNA
tcacgcggagagatggctttg

SEQ ID NO: 3339 - RNA, 21 nt, Homo sapiens
  source 1..21: mol_type = transcribed RNA
caaagccatctctccgcgtga

SEQ ID NO: 3340 - RNA, 22 nt, Homo sapiens
  source 1..22: mol_type = transcribed RNA
caggcgtctgtctacgtggctt

SEQ ID NO: 3341 - RNA, 22 nt, Homo sapiens
  source 1..22: mol_type = transcribed RNA
aagccacgtagacagacgcctg

SEQ ID NO: 3342 - RNA, 22 nt, Homo sapiens
  source 1..22: mol_type = transcribed RNA
caccttgcgctactcaggtctg

SEQ ID NO: 3343 - RNA, 22 nt, Homo sapiens
  source 1..22: mol_type = transcribed RNA
cagacctgagtagcgcaaggtg

SEQ ID NO: 3344 - RNA, 22 nt, Homo sapiens
  source 1..22: mol_type = transcribed RNA
aatctgagaaggcgcacaaggt

SEQ ID NO: 3345 - RNA, 22 nt, Homo sapiens
  source 1..22: mol_type = transcribed RNA
accttgtgcgccttctcagatt

SEQ ID NO: 3346 - RNA, 22 nt, Homo sapiens
  source 1..22: mol_type = transcribed RNA
aaggcctttctgaaccttcaga

SEQ ID NO: 3347 - RNA, 22 nt, Homo sapiens
  source 1..22: mol_type = transcribed RNA
tctgaaggttcagaaaggcctt

SEQ ID NO: 3348 - RNA, 22 nt, Homo sapiens
  source 1..22: mol_type = transcribed RNA
gtgacatcacatatacggcagc

SEQ ID NO: 3349 - RNA, 22 nt, Homo sapiens
  source 1..22: mol_type = transcribed RNA
gctgccgtatatgtgatgtcac

SEQ ID NO: 3350 - RNA, 24 nt, Homo sapiens
  source 1..24: mol_type = transcribed RNA
tcagaacaaatgccggttcccaga

SEQ ID NO: 3351 - RNA, 24 nt, Homo sapiens
  source 1..24: mol_type = transcribed RNA
tctgggaaccggcatttgttctga

SEQ ID NO: 3352 - RNA, 22 nt, Homo sapiens
  source 1..22: mol_type = transcribed RNA
tgagaaccacgtctgctctgag

SEQ ID NO: 3353 - RNA, 22 nt, Homo sapiens
  source 1..22: mol_type = transcribed RNA
ctcagagcagacgtggttctca

SEQ ID NO: 3354 - RNA, 17 nt, Homo sapiens
  source 1..17: mol_type = transcribed RNA
tcatattgcttctttct

SEQ ID NO: 3355 - RNA, 17 nt, Homo sapiens
  source 1..17: mol_type = transcribed RNA
agaaagaagcaatatga

SEQ ID NO: 3356 - RNA, 22 nt, Homo sapiens
  source 1..22: mol_type = transcribed RNA
tgtgacagattgataactgaaa

SEQ ID NO: 3357 - RNA, 22 nt, Homo sapiens
  source 1..22: mol_type = transcribed RNA
tttcagttatcaatctgtcaca

SEQ ID NO: 3358 - RNA, 23 nt, Homo sapiens
  source 1..23: mol_type = transcribed RNA
tggagtccaggaatctgcatttt

SEQ ID NO: 3359 - RNA, 23 nt, Homo sapiens
  source 1..23: mol_type = transcribed RNA
aaaatgcagattcctggactcca

SEQ ID NO: 3360 - RNA, 22 nt, Homo sapiens
  source 1..22: mol_type = transcribed RNA
aagcccttaccccaaaaagtat

SEQ ID NO: 3361 - RNA, 22 nt, Homo sapiens
  source 1..22: mol_type = transcribed RNA
atactttttggggtaagggctt

SEQ ID NO: 3362 - RNA, 22 nt, Homo sapiens
  source 1..22: mol_type = transcribed RNA
aagcccttaccccaaaaagcat

SEQ ID NO: 3363 - RNA, 22 nt, Homo sapiens
  source 1..22: mol_type = transcribed RNA
atgctttttggggtaagggctt

SEQ ID NO: 3364 - RNA, 22 nt, Homo sapiens
  source 1..22: mol_type = transcribed RNA
tggaatgtaaggaagtgtgtgg

SEQ ID NO: 3365 - RNA, 22 nt, Homo sapiens
  source 1..22: mol_type = transcribed RNA
ccacacacttccttacattcca

SEQ ID NO: 3366 - RNA, 22 nt, Homo sapiens
  source 1..22: mol_type = transcribed RNA
cttatcagattgtattgtaatt

SEQ ID NO: 3367 - RNA, 22 nt, Homo sapiens
  source 1..22: mol_type = transcribed RNA
aattacaatacaatctgataag

SEQ ID NO: 3368 - RNA, 22 nt, Homo sapiens
  source 1..22: mol_type = transcribed RNA
ttataatacaacctgataagtg

SEQ ID NO: 3369 - RNA, 22 nt, Homo sapiens
  source 1..22: mol_type = transcribed RNA
cacttatcaggttgtattataa

SEQ ID NO: 3370 - RNA, 22 nt, Homo sapiens
  source 1..22: mol_type = transcribed RNA
cttagcaggttgtattatcatt

SEQ ID NO: 3371 - RNA, 22 nt, Homo sapiens
  source 1..22: mol_type = transcribed RNA
aatgataatacaacctgctaag

SEQ ID NO: 3372 - RNA, 22 nt, Homo sapiens
  source 1..22: mol_type = transcribed RNA
atataatacaacctgctaagtg

SEQ ID NO: 3373 - RNA, 22 nt, Homo sapiens
  source 1..22: mol_type = transcribed RNA
cacttagcaggttgtattatat

SEQ ID NO: 3374 - RNA, 22 nt, Homo sapiens
  source 1..22: mol_type = transcribed RNA
cacttagcaggttgtattatat

SEQ ID NO: 3375 - RNA, 22 nt, Homo sapiens
  source 1..22: mol_type = transcribed RNA
atataatacaacctgctaagtg

SEQ ID NO: 3376 - RNA, 22 nt, Homo sapiens
  source 1..22: mol_type = transcribed RNA
ataatacaacctgctaagtgct

SEQ ID NO: 3377 - RNA, 22 nt, Homo sapiens
  source 1..22: mol_type = transcribed RNA
agcacttagcaggttgtattat

SEQ ID NO: 3378 - RNA, 22 nt, Homo sapiens
  source 1..22: mol_type = transcribed RNA
tttggtccccttcaaccagctg

SEQ ID NO: 3379 - RNA, 22 nt, Homo sapiens
  source 1..22: mol_type = transcribed RNA
cagctggttgaaggggaccaaa

SEQ ID NO: 3380 - RNA, 22 nt, Homo sapiens
  source 1..22: mol_type = transcribed RNA
tttggtccccttcaaccagcta

SEQ ID NO: 3381 - RNA, 22 nt, Homo sapiens
  source 1..22: mol_type = transcribed RNA
tagctggttgaaggggaccaaa

SEQ ID NO: 3382 - RNA, 22 nt, Homo sapiens
  source 1..22: mol_type = transcribed RNA
tgtaaacatccttgactggaag

SEQ ID NO: 3383 - RNA, 22 nt, Homo sapiens
  source 1..22: mol_type = transcribed RNA
cttccagtcaaggatgtttaca

SEQ ID NO: 3384 - RNA, 22 nt, Homo sapiens
  source 1..22: mol_type = transcribed RNA
tgtcagtttgtcaaatacccca

SEQ ID NO: 3385 - RNA, 22 nt, Homo sapiens
  source 1..22: mol_type = transcribed RNA
tggggtatttgacaaactgaca

SEQ ID NO: 3386 - RNA, 22 nt, Homo sapiens
  source 1..22: mol_type = transcribed RNA
cgtgtatttgacaagctgagtt

SEQ ID NO: 3387 - RNA, 22 nt, Homo sapiens
  source 1..22: mol_type = transcribed RNA
aactcagcttgtcaaatacacg

SEQ ID NO: 3388 - RNA, 21 nt, Homo sapiens
  source 1..21: mol_type = transcribed RNA
ttcacagtggctaagttccgc

SEQ ID NO: 3389 - RNA, 21 nt, Homo sapiens
  source 1..21: mol_type = transcribed RNA
gcggaacttagccactgtgaa

SEQ ID NO: 3390 - RNA, 22 nt, Homo sapiens
  source 1..22: mol_type = transcribed RNA
agggcttagctgcttgtgagca

SEQ ID NO: 3391 - RNA, 22 nt, Homo sapiens
  source 1..22: mol_type = transcribed RNA
tgctcacaagcagctaagccct

SEQ ID NO: 3392 - RNA, 21 nt, Homo sapiens
  source 1..21: mol_type = transcribed RNA
atcacattgccagggattacc

SEQ ID NO: 3393 - RNA, 21 nt, Homo sapiens
  source 1..21: mol_type = transcribed RNA
ggtaatccctggcaatgtgat

SEQ ID NO: 3394 - RNA, 22 nt, Homo sapiens
  source 1..22: mol_type = transcribed RNA
tgggttcctggcatgctgattt

SEQ ID NO: 3395 - RNA, 22 nt, Homo sapiens
  source 1..22: mol_type = transcribed RNA
aaatcagcatgccaggaaccca

SEQ ID NO: 3396 - RNA, 22 nt, Homo sapiens
  source 1..22: mol_type = transcribed RNA
ctttcagtcggatgtttacagc

SEQ ID NO: 3397 - RNA, 22 nt, Homo sapiens
  source 1..22: mol_type = transcribed RNA
gctgtaaacatccgactgaaag

SEQ ID NO: 3398 - RNA, 22 nt, Homo sapiens
  source 1..22: mol_type = transcribed RNA
tgcctactgagctgatatcagt

SEQ ID NO: 3399 - RNA, 22 nt, Homo sapiens
  source 1..22: mol_type = transcribed RNA
actgatatcagctcagtaggca

SEQ ID NO: 3400 - RNA, 22 nt, Homo sapiens
  source 1..22: mol_type = transcribed RNA
tgcctactgagctgaaacacag

SEQ ID NO: 3401 - RNA, 22 nt, Homo sapiens
  source 1..22: mol_type = transcribed RNA
ctgtgtttcagctcagtaggca

SEQ ID NO: 3402 - RNA, 22 nt, Homo sapiens
  source 1..22: mol_type = transcribed RNA
tggctcagttcagcaggaacag

SEQ ID NO: 3403 - RNA, 22 nt, Homo sapiens
  source 1..22: mol_type = transcribed RNA
ctgttcctgctgaactgagcca

SEQ ID NO: 3404 - RNA, 21 nt, Homo sapiens
  source 1..21: mol_type = transcribed RNA
ttcacagtggctaagttctgc

SEQ ID NO: 3405 - RNA, 21 nt, Homo sapiens
  source 1..21: mol_type = transcribed RNA
gcagaacttagccactgtgaa

SEQ ID NO: 3406 - RNA, 22 nt, Homo sapiens
  source 1..22: mol_type = transcribed RNA
agagcttagctgattggtgaac

SEQ ID NO: 3407 - RNA, 22 nt, Homo sapiens
  source 1..22: mol_type = transcribed RNA
gttcaccaatcagctaagctct

SEQ ID NO: 3408 - RNA, 23 nt, Homo sapiens
  source 1..23: mol_type = transcribed RNA
tgtagtgtttcctactttatgga

SEQ ID NO: 3409 - RNA, 23 nt, Homo sapiens
  source 1..23: mol_type = transcribed RNA
tccataaagtaggaaacactaca

SEQ ID NO: 3410 - RNA, 21 nt, Homo sapiens
  source 1..21: mol_type = transcribed RNA
cataaagtagaaagcactact

SEQ ID NO: 3411 - RNA, 21 nt, Homo sapiens
  source 1..21: mol_type = transcribed RNA
agtagtgctttctactttatg

SEQ ID NO: 3412 - RNA, 22 nt, Homo sapiens
  source 1..22: mol_type = transcribed RNA
tgaaggtctactgtgtgccagg

SEQ ID NO: 3413 - RNA, 22 nt, Homo sapiens
  source 1..22: mol_type = transcribed RNA
cctggcacacagtagaccttca

SEQ ID NO: 3414 - RNA, 22 nt, Homo sapiens
  source 1..22: mol_type = transcribed RNA
ttgtacatggtaggctttcatt

SEQ ID NO: 3415 - RNA, 22 nt, Homo sapiens
  source 1..22: mol_type = transcribed RNA
aatgaaagcctaccatgtacaa

SEQ ID NO: 3416 - RNA, 21 nt, Homo sapiens
  source 1..21: mol_type = transcribed RNA
ctggatggctcctccatgtct

SEQ ID NO: 3417 - RNA, 21 nt, Homo sapiens
  source 1..21: mol_type = transcribed RNA
agacatggaggagccatccag

SEQ ID NO: 3418 - RNA, 23 nt, Homo sapiens
  source 1..23: mol_type = transcribed RNA
tcttggagtaggtcattgggtgg

SEQ ID NO: 3419 - RNA, 23 nt, Homo sapiens
  source 1..23: mol_type = transcribed RNA
ccacccaatgacctactccaaga

SEQ ID NO: 3420 - RNA, 22 nt, Homo sapiens
  source 1..22: mol_type = transcribed RNA
ctcatctgcaaagaagtaagtg

SEQ ID NO: 3421 - RNA, 22 nt, Homo sapiens
  source 1..22: mol_type = transcribed RNA
cacttacttctttgcagatgag

SEQ ID NO: 3422 - RNA, 22 nt, Homo sapiens
  source 1..22: mol_type = transcribed RNA
aactgtttgcagaggaaactga

SEQ ID NO: 3423 - RNA, 22 nt, Homo sapiens
  source 1..22: mol_type = transcribed RNA
tcagtttcctctgcaaacagtt

SEQ ID NO: 3424 - RNA, 22 nt, Homo sapiens
  source 1..22: mol_type = transcribed RNA
cttggttcagggagggtcccca

SEQ ID NO: 3425 - RNA, 22 nt, Homo sapiens
  source 1..22: mol_type = transcribed RNA
tggggaccctccctgaaccaag

SEQ ID NO: 3426 - RNA, 22 nt, Homo sapiens
  source 1..22: mol_type = transcribed RNA
aggaccttccctgaaccaagga

SEQ ID NO: 3427 - RNA, 22 nt, Homo sapiens
  source 1..22: mol_type = transcribed RNA
tccttggttcagggaaggtcct

SEQ ID NO: 3428 - RNA, 21 nt, Homo sapiens
  source 1..21: mol_type = transcribed RNA
acctcctgtgtgcatggatta

SEQ ID NO: 3429 - RNA, 21 nt, Homo sapiens
  source 1..21: mol_type = transcribed RNA
taatccatgcacacaggaggt

SEQ ID NO: 3430 - RNA, 22 nt, Homo sapiens
  source 1..22: mol_type = transcribed RNA
tacccattgcatatcggagttg

SEQ ID NO: 3431 - RNA, 22 nt, Homo sapiens
  source 1..22: mol_type = transcribed RNA
caactccgatatgcaatgggta

SEQ ID NO: 3432 - RNA, 18 nt, Homo sapiens
  source 1..18: mol_type = transcribed RNA
aaagctgggttgagaagg

SEQ ID NO: 3433 - RNA, 18 nt, Homo sapiens
  source 1..18: mol_type = transcribed RNA
ccttctcaacccagcttt

SEQ ID NO: 3434 - RNA, 20 nt, Homo sapiens
  source 1..20: mol_type = transcribed RNA
ggtatccgtttggggatggt

SEQ ID NO: 3435 - RNA, 20 nt, Homo sapiens
  source 1..20: mol_type = transcribed RNA
accatccccaaacggatacc

SEQ ID NO: 3436 - RNA, 22 nt, Homo sapiens
  source 1..22: mol_type = transcribed RNA
gaaggcagcagtgctcccctgt

SEQ ID NO: 3437 - RNA, 22 nt, Homo sapiens
  source 1..22: mol_type = transcribed RNA
acaggggagcactgctgccttc

SEQ ID NO: 3438 - RNA, 22 nt, Homo sapiens
  source 1..22: mol_type = transcribed RNA
tcagtgcatcacagaactttgt

SEQ ID NO: 3439 - RNA, 22 nt, Homo sapiens
  source 1..22: mol_type = transcribed RNA
acaaagttctgtgatgcactga

SEQ ID NO: 3440 - RNA, 22 nt, Homo sapiens
  source 1..22: mol_type = transcribed RNA
aagttctgttatacactcaggc

SEQ ID NO: 3441 - RNA, 22 nt, Homo sapiens
  source 1..22: mol_type = transcribed RNA
gcctgagtgtataacagaactt

SEQ ID NO: 3442 - RNA, 22 nt, Homo sapiens
  source 1..22: mol_type = transcribed RNA
ctggccctctctgcccttccgt

SEQ ID NO: 3443 - RNA, 22 nt, Homo sapiens
  source 1..22: mol_type = transcribed RNA
acggaagggcagagagggccag

SEQ ID NO: 3444 - RNA, 21 nt, Homo sapiens
  source 1..21: mol_type = transcribed RNA
ctagactgaagctccttgagg

SEQ ID NO: 3445 - RNA, 21 nt, Homo sapiens
  source 1..21: mol_type = transcribed RNA
cctcaaggagcttcagtctag

SEQ ID NO: 3446 - RNA, 21 nt, Homo sapiens
  source 1..21: mol_type = transcribed RNA
tcgaggagctcacagtctagt

SEQ ID NO: 3447 - RNA, 21 nt, Homo sapiens
  source 1..21: mol_type = transcribed RNA
actagactgtgagctcctcga

SEQ ID NO: 3448 - RNA, 21 nt, Homo sapiens
  source 1..21: mol_type = transcribed RNA
cacattacacggtcgacctct

SEQ ID NO: 3449 - RNA, 21 nt, Homo sapiens
  source 1..21: mol_type = transcribed RNA
agaggtcgaccgtgtaatgtg

SEQ ID NO: 3450 - RNA, 22 nt, Homo sapiens
  source 1..22: mol_type = transcribed RNA
aggtggtccgtggcgcgttcgc

SEQ ID NO: 3451 - RNA, 22 nt, Homo sapiens
  source 1..22: mol_type = transcribed RNA
gcgaacgcgccacggaccacct

SEQ ID NO: 3452 - RNA, 23 nt, Homo sapiens
  source 1..23: mol_type = transcribed RNA
cgcatcccctagggcattggtgt

SEQ ID NO: 3453 - RNA, 23 nt, Homo sapiens
  source 1..23: mol_type = transcribed RNA
acaccaatgccctaggggatgcg

SEQ ID NO: 3454 - RNA, 20 nt, Homo sapiens
  source 1..20: mol_type = transcribed RNA
cctctgggcccttcctccag

SEQ ID NO: 3455 - RNA, 20 nt, Homo sapiens
  source 1..20: mol_type = transcribed RNA
ctggaggaagggcccagagg

SEQ ID NO: 3456 - RNA, 23 nt, Homo sapiens
  source 1..23: mol_type = transcribed RNA
cctagtaggtgtccagtaagtgt

SEQ ID NO: 3457 - RNA, 23 nt, Homo sapiens
  source 1..23: mol_type = transcribed RNA
acacttactggacacctactagg

SEQ ID NO: 3458 - RNA, 21 nt, Homo sapiens
  source 1..21: mol_type = transcribed RNA
acggtgctggatgtggccttt

SEQ ID NO: 3459 - RNA, 21 nt, Homo sapiens
  source 1..21: mol_type = transcribed RNA
aaaggccacatccagcaccgt

SEQ ID NO: 3460 - RNA, 23 nt, Homo sapiens
  source 1..23: mol_type = transcribed RNA
tcagcaccaggatattgttggag

SEQ ID NO: 3461 - RNA, 23 nt, Homo sapiens
  source 1..23: mol_type = transcribed RNA
ctccaacaatatcctggtgctga

SEQ ID NO: 3462 - RNA, 23 nt, Homo sapiens
  source 1..23: mol_type = transcribed RNA
tcaacaaaatcactgatgctgga

SEQ ID NO: 3463 - RNA, 23 nt, Homo sapiens
  source 1..23: mol_type = transcribed RNA
tccagcatcagtgattttgttga

SEQ ID NO: 3464 - RNA, 22 nt, Homo sapiens
  source 1..22: mol_type = transcribed RNA
aacaatatcctggtgctgagtg

SEQ ID NO: 3465 - RNA, 22 nt, Homo sapiens
  source 1..22: mol_type = transcribed RNA
cactcagcaccaggatattgtt

SEQ ID NO: 3466 - RNA, 23 nt, Homo sapiens
  source 1..23: mol_type = transcribed RNA
ggcaggttctcaccctctctagg

SEQ ID NO: 3467 - RNA, 23 nt, Homo sapiens
  source 1..23: mol_type = transcribed RNA
cctagagagggtgagaacctgcc

SEQ ID NO: 3468 - RNA, 23 nt, Homo sapiens
  source 1..23: mol_type = transcribed RNA
gacacgggcgacagctgcggccc

SEQ ID NO: 3469 - RNA, 23 nt, Homo sapiens
  source 1..23: mol_type = transcribed RNA
gggccgcagctgtcgcccgtgtc

SEQ ID NO: 3470 - RNA, 21 nt, Homo sapiens
  source 1..21: mol_type = transcribed RNA
atgtatgtgtgcatgtgcatg

SEQ ID NO: 3471 - RNA, 21 nt, Homo sapiens
  source 1..21: mol_type = transcribed RNA
catgcacatgcacacatacat

SEQ ID NO: 3472 - RNA, 22 nt, Homo sapiens
  source 1..22: mol_type = transcribed RNA
tatacaagggcagactctctct

SEQ ID NO: 3473 - RNA, 22 nt, Homo sapiens
  source 1..22: mol_type = transcribed RNA
agagagagtctgcccttgtata

SEQ ID NO: 3474 - RNA, 20 nt, Homo sapiens
  source 1..20: mol_type = transcribed RNA
ggcggcggcggaggcggggg

SEQ ID NO: 3475 - RNA, 20 nt, Homo sapiens
  source 1..20: mol_type = transcribed RNA
cccccgcctccgccgccgcc

SEQ ID NO: 3476 - RNA, 22 nt, Homo sapiens
  source 1..22: mol_type = transcribed RNA
gcaggtgctcacttgtcctcct

SEQ ID NO: 3477 - RNA, 22 nt, Homo sapiens
  source 1..22: mol_type = transcribed RNA
aggaggacaagtgagcacctgc

SEQ ID NO: 3478 - RNA, 19 nt, Homo sapiens
  source 1..19: mol_type = transcribed RNA
ggggcctggcggtgggcgg

SEQ ID NO: 3479 - RNA, 19 nt, Homo sapiens
  source 1..19: mol_type = transcribed RNA
ccgcccaccgccaggcccc

SEQ ID NO: 3480 - RNA, 22 nt, Homo sapiens
  source 1..22: mol_type = transcribed RNA
gcccaaaggtgaattttttggg

SEQ ID NO: 3481 - RNA, 22 nt, Homo sapiens
  source 1..22: mol_type = transcribed RNA
cccaaaaaattcacctttgggc

SEQ ID NO: 3482 - RNA, 22 nt, Homo sapiens
  source 1..22: mol_type = transcribed RNA
caaagaattctccttttgggct

SEQ ID NO: 3483 - RNA, 22 nt, Homo sapiens
  source 1..22: mol_type = transcribed RNA
agcccaaaaggagaattctttg

SEQ ID NO: 3484 - RNA, 22 nt, Homo sapiens
  source 1..22: mol_type = transcribed RNA
ctgcaatgtaagcacttcttac

SEQ ID NO: 3485 - RNA, 22 nt, Homo sapiens
  source 1..22: mol_type = transcribed RNA
gtaagaagtgcttacattgcag

SEQ ID NO: 3486 - RNA, 23 nt, Homo sapiens
  source 1..23: mol_type = transcribed RNA
aaaagtgcttacagtgcaggtag

SEQ ID NO: 3487 - RNA, 23 nt, Homo sapiens
  source 1..23: mol_type = transcribed RNA
ctacctgcactgtaagcactttt

SEQ ID NO: 3488 - RNA, 22 nt, Homo sapiens
  source 1..22: mol_type = transcribed RNA
actgtagtatgggcacttccag

SEQ ID NO: 3489 - RNA, 22 nt, Homo sapiens
  source 1..22: mol_type = transcribed RNA
ctggaagtgcccatactacagt

SEQ ID NO: 3490 - RNA, 23 nt, Homo sapiens
  source 1..23: mol_type = transcribed RNA
caaagtgctcatagtgcaggtag

SEQ ID NO: 3491 - RNA, 23 nt, Homo sapiens
  source 1..23: mol_type = transcribed RNA
ctacctgcactatgagcactttg

SEQ ID NO: 3492 - RNA, 23 nt, Homo sapiens
  source 1..23: mol_type = transcribed RNA
ggggtattgtttccgctgccagg

SEQ ID NO: 3493 - RNA, 23 nt, Homo sapiens
  source 1..23: mol_type = transcribed RNA
cctggcagcggaaacaatacccc

SEQ ID NO: 3494 - RNA, 23 nt, Homo sapiens
  source 1..23: mol_type = transcribed RNA
tagcagcgggaacagttctgcag

SEQ ID NO: 3495 - RNA, 23 nt, Homo sapiens
  source 1..23: mol_type = transcribed RNA
ctgcagaactgttcccgctgcta

SEQ ID NO: 3496 - RNA, 21 nt, Homo sapiens
  source 1..21: mol_type = transcribed RNA
cgagcctcaagcaagggactt

SEQ ID NO: 3497 - RNA, 21 nt, Homo sapiens
  source 1..21: mol_type = transcribed RNA
aagtcccttgcttgaggctcg

SEQ ID NO: 3498 - RNA, 22 nt, Homo sapiens
  source 1..22: mol_type = transcribed RNA
tagtcccttccttgaagcggtc

SEQ ID NO: 3499 - RNA, 22 nt, Homo sapiens
  source 1..22: mol_type = transcribed RNA
gaccgcttcaaggaagggacta

SEQ ID NO: 3500 - RNA, 21 nt, Homo sapiens
  source 1..21: mol_type = transcribed RNA
actggacttggagtcagaagg

SEQ ID NO: 3501 - RNA, 21 nt, Homo sapiens
  source 1..21: mol_type = transcribed RNA
ccttctgactccaagtccagt

SEQ ID NO: 3502 - RNA, 22 nt, Homo sapiens
  source 1..22: mol_type = transcribed RNA
ctcctgactccaggtcctgtgt

SEQ ID NO: 3503 - RNA, 22 nt, Homo sapiens
  source 1..22: mol_type = transcribed RNA
acacaggacctggagtcaggag

SEQ ID NO: 3504 - RNA, 22 nt, Homo sapiens
  source 1..22: mol_type = transcribed RNA
tttgttcgttcggctcgcgtga

SEQ ID NO: 3505 - RNA, 22 nt, Homo sapiens
  source 1..22: mol_type = transcribed RNA
tcacgcgagccgaacgaacaaa

SEQ ID NO: 3506 - RNA, 22 nt, Homo sapiens
  source 1..22: mol_type = transcribed RNA
acggatgtttgagcatgtgcta

SEQ ID NO: 3507 - RNA, 22 nt, Homo sapiens
  source 1..22: mol_type = transcribed RNA
tagcacatgctcaaacatccgt

SEQ ID NO: 3508 - RNA, 23 nt, Homo sapiens
  source 1..23: mol_type = transcribed RNA
tcaaatgctcagactcctgtggt

SEQ ID NO: 3509 - RNA, 23 nt, Homo sapiens
  source 1..23: mol_type = transcribed RNA
accacaggagtctgagcatttga

SEQ ID NO: 3510 - RNA, 22 nt, Homo sapiens
  source 1..22: mol_type = transcribed RNA
cggcaacaagaaactgcctgag

SEQ ID NO: 3511 - RNA, 22 nt, Homo sapiens
  source 1..22: mol_type = transcribed RNA
ctcaggcagtttcttgttgccg

SEQ ID NO: 3512 - RNA, 22 nt, Homo sapiens
  source 1..22: mol_type = transcribed RNA
taggtagtttcatgttgttggg

SEQ ID NO: 3513 - RNA, 22 nt, Homo sapiens
  source 1..22: mol_type = transcribed RNA
cccaacaacatgaaactaccta

SEQ ID NO: 3514 - RNA, 22 nt, Homo sapiens
  source 1..22: mol_type = transcribed RNA
caatgtttccacagtgcatcac

SEQ ID NO: 3515 - RNA, 22 nt, Homo sapiens
  source 1..22: mol_type = transcribed RNA
gtgatgcactgtggaaacattg

SEQ ID NO: 3516 - RNA, 21 nt, Homo sapiens
  source 1..21: mol_type = transcribed RNA
gtgcattgtagttgcattgca

SEQ ID NO: 3517 - RNA, 21 nt, Homo sapiens
  source 1..21: mol_type = transcribed RNA
tgcaatgcaactacaatgcac

SEQ ID NO: 3518 - RNA, 18 nt, Homo sapiens
  source 1..18: mol_type = transcribed RNA
atcccacctctgccacca

SEQ ID NO: 3519 - RNA, 18 nt, Homo sapiens
  source 1..18: mol_type = transcribed RNA
tggtggcagaggtgggat

SEQ ID NO: 3520 - RNA, 19 nt, Homo sapiens
  source 1..19: mol_type = transcribed RNA
atcccaccactgccaccat

SEQ ID NO: 3521 - RNA, 19 nt, Homo sapiens
  source 1..19: mol_type = transcribed RNA
atggtggcagtggtgggat

SEQ ID NO: 3522 - RNA, 22 nt, Homo sapiens
  source 1..22: mol_type = transcribed RNA
accttcctctccatgggtcttt

SEQ ID NO: 3523 - RNA, 22 nt, Homo sapiens
  source 1..22: mol_type = transcribed RNA
aaagacccatggagaggaaggt

SEQ ID NO: 3524 - RNA, 22 nt, Homo sapiens
  source 1..22: mol_type = transcribed RNA
aaagacccattgaggagaaggt

SEQ ID NO: 3525 - RNA, 22 nt, Homo sapiens
  source 1..22: mol_type = transcribed RNA
accttctcctcaatgggtcttt

SEQ ID NO: 3526 - RNA, 21 nt, Homo sapiens
  source 1..21: mol_type = transcribed RNA
aatgtagagattgatcaaaat

SEQ ID NO: 3527 - RNA, 21 nt, Homo sapiens
  source 1..21: mol_type = transcribed RNA
attttgatcaatctctacatt

SEQ ID NO: 3528 - RNA, 23 nt, Homo sapiens
  source 1..23: mol_type = transcribed RNA
acggaatatgtatacggaatata

SEQ ID NO: 3529 - RNA, 23 nt, Homo sapiens
  source 1..23: mol_type = transcribed RNA
tatattccgtatacatattccgt

SEQ ID NO: 3530 - RNA, 24 nt, Homo sapiens
  source 1..24: mol_type = transcribed RNA
agagctcacagctgtccttctcta

SEQ ID NO: 3531 - RNA, 24 nt, Homo sapiens
  source 1..24: mol_type = transcribed RNA
tagagaaggacagctgtgagctct

SEQ ID NO: 3532 - RNA, 22 nt, Homo sapiens
  source 1..22: mol_type = transcribed RNA
atcaaataaggactagtctgca

SEQ ID NO: 3533 - RNA, 22 nt, Homo sapiens
  source 1..22: mol_type = transcribed RNA
tgcagactagtccttatttgat

SEQ ID NO: 3534 - RNA, 23 nt, Homo sapiens
  source 1..23: mol_type = transcribed RNA
atgagactcatgtaaaacatctt

SEQ ID NO: 3535 - RNA, 23 nt, Homo sapiens
  source 1..23: mol_type = transcribed RNA
aagatgttttacatgagtctcat

SEQ ID NO: 3536 - RNA, 21 nt, Homo sapiens
  source 1..21: mol_type = transcribed RNA
atggaatgtatatacggaata

SEQ ID NO: 3537 - RNA, 21 nt, Homo sapiens
  source 1..21: mol_type = transcribed RNA
tattccgtatatacattccat

SEQ ID NO: 3538 - RNA, 22 nt, Homo sapiens
  source 1..22: mol_type = transcribed RNA
attgtagaacctaagattggcc

SEQ ID NO: 3539 - RNA, 22 nt, Homo sapiens
  source 1..22: mol_type = transcribed RNA
ggccaatcttaggttctacaat

SEQ ID NO: 3540 - RNA, 22 nt, Homo sapiens
  source 1..22: mol_type = transcribed RNA
catctctaaggaactcccccaa

SEQ ID NO: 3541 - RNA, 22 nt, Homo sapiens
  source 1..22: mol_type = transcribed RNA
ttgggggagttccttagagatg

SEQ ID NO: 3542 - RNA, 23 nt, Homo sapiens
  source 1..23: mol_type = transcribed RNA
tatggggcttctgtagagatttc

SEQ ID NO: 3543 - RNA, 23 nt, Homo sapiens
  source 1..23: mol_type = transcribed RNA
gaaatctctacagaagccccata

SEQ ID NO: 3544 - RNA, 20 nt, Homo sapiens
  source 1..20: mol_type = transcribed RNA
ccgtgtttcccccacgcttt

SEQ ID NO: 3545 - RNA, 20 nt, Homo sapiens
  source 1..20: mol_type = transcribed RNA
aaagcgtgggggaaacacgg

SEQ ID NO: 3546 - RNA, 15 nt, Homo sapiens
  source 1..15: mol_type = transcribed RNA
aggagatcctgggtt

SEQ ID NO: 3547 - RNA, 15 nt, Homo sapiens
  source 1..15: mol_type = transcribed RNA
aacccaggatctcct

SEQ ID NO: 3548 - RNA, 22 nt, Homo sapiens
  source 1..22: mol_type = transcribed RNA
ctcgtgggctctggccacggcc

SEQ ID NO: 3549 - RNA, 22 nt, Homo sapiens
  source 1..22: mol_type = transcribed RNA
ggccgtggccagagcccacgag

SEQ ID NO: 3550 - RNA, 22 nt, Homo sapiens
  source 1..22: mol_type = transcribed RNA
cagtggccagagccctgcagtg

SEQ ID NO: 3551 - RNA, 22 nt, Homo sapiens
  source 1..22: mol_type = transcribed RNA
cactgcagggctctggccactg

SEQ ID NO: 3552 - RNA, 22 nt, Homo sapiens
  source 1..22: mol_type = transcribed RNA
ctgcagagtttgtacggaccgg

SEQ ID NO: 3553 - RNA, 22 nt, Homo sapiens
  source 1..22: mol_type = transcribed RNA
ccggtccgtacaaactctgcag

SEQ ID NO: 3554 - RNA, 20 nt, Homo sapiens
  source 1..20: mol_type = transcribed RNA
tccgtacaaactctgctgtg

SEQ ID NO: 3555 - RNA, 20 nt, Homo sapiens
  source 1..20: mol_type = transcribed RNA
cacagcagagtttgtacgga

SEQ ID NO: 3556 - RNA, 22 nt, Homo sapiens
  source 1..22: mol_type = transcribed RNA
cttccccccagtaatcttcatc

SEQ ID NO: 3557 - RNA, 22 nt, Homo sapiens
  source 1..22: mol_type = transcribed RNA
gatgaagattactggggggaag

SEQ ID NO: 3558 - RNA, 23 nt, Homo sapiens
  source 1..23: mol_type = transcribed RNA
tgaggatatggcagggaagggga

SEQ ID NO: 3559 - RNA, 23 nt, Homo sapiens
  source 1..23: mol_type = transcribed RNA
tccccttccctgccatatcctca

SEQ ID NO: 3560 - RNA, 23 nt, Homo sapiens
  source 1..23: mol_type = transcribed RNA
ttttgcatgaccctgggagtagg

SEQ ID NO: 3561 - RNA, 23 nt, Homo sapiens
  source 1..23: mol_type = transcribed RNA
cctactcccagggtcatgcaaaa

SEQ ID NO: 3562 - RNA, 22 nt, Homo sapiens
  source 1..22: mol_type = transcribed RNA
gactcactcacaggattgtgca

SEQ ID NO: 3563 - RNA, 22 nt, Homo sapiens
  source 1..22: mol_type = transcribed RNA
tgcacaatcctgtgagtgagtc

SEQ ID NO: 3564 - RNA, 22 nt, Homo sapiens
  source 1..22: mol_type = transcribed RNA
acacagtgcttcatccactact

SEQ ID NO: 3565 - RNA, 22 nt, Homo sapiens
  source 1..22: mol_type = transcribed RNA
agtagtggatgaagcactgtgt

SEQ ID NO: 3566 - RNA, 22 nt, Homo sapiens
  source 1..22: mol_type = transcribed RNA
tagtggatgatgcactctgtgc

SEQ ID NO: 3567 - RNA, 22 nt, Homo sapiens
  source 1..22: mol_type = transcribed RNA
gcacagagtgcatcatccacta

SEQ ID NO: 3568 - RNA, 21 nt, Homo sapiens
  source 1..21: mol_type = transcribed RNA
tgatgatacaggtggaggtag

SEQ ID NO: 3569 - RNA, 21 nt, Homo sapiens
  source 1..21: mol_type = transcribed RNA
ctacctccacctgtatcatca

SEQ ID NO: 3570 - RNA, 22 nt, Homo sapiens
  source 1..22: mol_type = transcribed RNA
ctacttctacctgtgttatcat

SEQ ID NO: 3571 - RNA, 22 nt, Homo sapiens
  source 1..22: mol_type = transcribed RNA
atgataacacaggtagaagtag

SEQ ID NO: 3572 - RNA, 22 nt, Homo sapiens
  source 1..22: mol_type = transcribed RNA
tgcgacattggaagtagtatca

SEQ ID NO: 3573 - RNA, 22 nt, Homo sapiens
  source 1..22: mol_type = transcribed RNA
tgatactacttccaatgtcgca

SEQ ID NO: 3574 - RNA, 21 nt, Homo sapiens
  source 1..21: mol_type = transcribed RNA
ttagacctagtacacgtcctt

SEQ ID NO: 3575 - RNA, 21 nt, Homo sapiens
  source 1..21: mol_type = transcribed RNA
aaggacgtgtactaggtctaa

SEQ ID NO: 3576 - RNA, 22 nt, Homo sapiens
  source 1..22: mol_type = transcribed RNA
tttcctaccctacctgaagact

SEQ ID NO: 3577 - RNA, 22 nt, Homo sapiens
  source 1..22: mol_type = transcribed RNA
agtcttcaggtagggtaggaaa

SEQ ID NO: 3578 - RNA, 22 nt, Homo sapiens
  source 1..22: mol_type = transcribed RNA
atctgtaagagaaagtaaatga

SEQ ID NO: 3579 - RNA, 22 nt, Homo sapiens
  source 1..22: mol_type = transcribed RNA
tcatttactttctcttacagat

SEQ ID NO: 3580 - RNA, 24 nt, Homo sapiens
  source 1..24: mol_type = transcribed RNA
cccggacaggcgttcgtgcgacgt

SEQ ID NO: 3581 - RNA, 24 nt, Homo sapiens
  source 1..24: mol_type = transcribed RNA
acgtcgcacgaacgcctgtccggg

SEQ ID NO: 3582 - RNA, 23 nt, Homo sapiens
  source 1..23: mol_type = transcribed RNA
acctggacccagcgtagacaaag

SEQ ID NO: 3583 - RNA, 23 nt, Homo sapiens
  source 1..23: mol_type = transcribed RNA
ctttgtctacgctgggtccaggt

SEQ ID NO: 3584 - RNA, 22 nt, Homo sapiens
  source 1..22: mol_type = transcribed RNA
accaagtctgcgtcatcctctc

SEQ ID NO: 3585 - RNA, 22 nt, Homo sapiens
  source 1..22: mol_type = transcribed RNA
gagaggatgacgcagacttggt

SEQ ID NO: 3586 - RNA, 23 nt, Homo sapiens
  source 1..23: mol_type = transcribed RNA
agtggatgatggagactcggtac

SEQ ID NO: 3587 - RNA, 23 nt, Homo sapiens
  source 1..23: mol_type = transcribed RNA
gtaccgagtctccatcatccact

SEQ ID NO: 3588 - RNA, 24 nt, Homo sapiens
  source 1..24: mol_type = transcribed RNA
gttccacactgacactgcagaagt

SEQ ID NO: 3589 - RNA, 24 nt, Homo sapiens
  source 1..24: mol_type = transcribed RNA
acttctgcagtgtcagtgtggaac

SEQ ID NO: 3590 - RNA, 24 nt, Homo sapiens
  source 1..24: mol_type = transcribed RNA
cctgctggtcaggagtggatactg

SEQ ID NO: 3591 - RNA, 24 nt, Homo sapiens
  source 1..24: mol_type = transcribed RNA
cagtatccactcctgaccagcagg

SEQ ID NO: 3592 - RNA, 23 nt, Homo sapiens
  source 1..23: mol_type = transcribed RNA
gagggtcttgggagggatgtgac

SEQ ID NO: 3593 - RNA, 23 nt, Homo sapiens
  source 1..23: mol_type = transcribed RNA
gtcacatccctcccaagaccctc

SEQ ID NO: 3594 - RNA, 22 nt, Homo sapiens
  source 1..22: mol_type = transcribed RNA
atatacagggggagactcttat

SEQ ID NO: 3595 - RNA, 22 nt, Homo sapiens
  source 1..22: mol_type = transcribed RNA
ataagagtctccccctgtatat

SEQ ID NO: 3596 - RNA, 22 nt, Homo sapiens
  source 1..22: mol_type = transcribed RNA
atatacagggggagactctcat

SEQ ID NO: 3597 - RNA, 22 nt, Homo sapiens
  source 1..22: mol_type = transcribed RNA
atgagagtctccccctgtatat

SEQ ID NO: 3598 - RNA, 21 nt, Homo sapiens
  source 1..21: mol_type = transcribed RNA
agaggataccctttgtatgtt

SEQ ID NO: 3599 - RNA, 21 nt, Homo sapiens
  source 1..21: mol_type = transcribed RNA
aacatacaaagggtatcctct

SEQ ID NO: 3600 - RNA, 22 nt, Homo sapiens
  source 1..22: mol_type = transcribed RNA
tctacaaaggaaagcgctttct

SEQ ID NO: 3601 - RNA, 22 nt, Homo sapiens
  source 1..22: mol_type = transcribed RNA
agaaagcgctttcctttgtaga

SEQ ID NO: 3602 - RNA, 22 nt, Homo sapiens
  source 1..22: mol_type = transcribed RNA
tcaaaactgaggggcattttct

SEQ ID NO: 3603 - RNA, 22 nt, Homo sapiens
  source 1..22: mol_type = transcribed RNA
agaaaatgcccctcagttttga

SEQ ID NO: 3604 - RNA, 24 nt, Homo sapiens
  source 1..24: mol_type = transcribed RNA
ttctccaaaagaaagcactttctg

SEQ ID NO: 3605 - RNA, 24 nt, Homo sapiens
  source 1..24: mol_type = transcribed RNA
cagaaagtgctttcttttggagaa

SEQ ID NO: 3606 - RNA, 23 nt, Homo sapiens
  source 1..23: mol_type = transcribed RNA
ttctcgaggaaagaagcactttc

SEQ ID NO: 3607 - RNA, 23 nt, Homo sapiens
  source 1..23: mol_type = transcribed RNA
gaaagtgcttctttcctcgagaa

SEQ ID NO: 3608 - RNA, 22 nt, Homo sapiens
  source 1..22: mol_type = transcribed RNA
cctctagatggaagcactgtct

SEQ ID NO: 3609 - RNA, 22 nt, Homo sapiens
  source 1..22: mol_type = transcribed RNA
agacagtgcttccatctagagg

SEQ ID NO: 3610 - RNA, 22 nt, Homo sapiens
  source 1..22: mol_type = transcribed RNA
atcgtgcatccctttagagtgt

SEQ ID NO: 3611 - RNA, 22 nt, Homo sapiens
  source 1..22: mol_type = transcribed RNA
acactctaaagggatgcacgat

SEQ ID NO: 3612 - RNA, 22 nt, Homo sapiens
  source 1..22: mol_type = transcribed RNA
atcgtgcatccctttagagtgt

SEQ ID NO: 3613 - RNA, 22 nt, Homo sapiens
  source 1..22: mol_type = transcribed RNA
acactctaaagggatgcacgat

SEQ ID NO: 3614 - RNA, 22 nt, Homo sapiens
  source 1..22: mol_type = transcribed RNA
atcgtgcatccttttagagtgt

SEQ ID NO: 3615 - RNA, 22 nt, Homo sapiens
  source 1..22: mol_type = transcribed RNA
acactctaaaaggatgcacgat

SEQ ID NO: 3616 - RNA, 22 nt, Homo sapiens
  source 1..22: mol_type = transcribed RNA
caaagcgctcccctttagaggt

SEQ ID NO: 3617 - RNA, 22 nt, Homo sapiens
  source 1..22: mol_type = transcribed RNA
acctctaaaggggagcgctttg

SEQ ID NO: 3618 - RNA, 23 nt, Homo sapiens
  source 1..23: mol_type = transcribed RNA
caaagcgcttctctttagagtgt

SEQ ID NO: 3619 - RNA, 23 nt, Homo sapiens
  source 1..23: mol_type = transcribed RNA
acactctaaagagaagcgctttg

SEQ ID NO: 3620 - RNA, 23 nt, Homo sapiens
  source 1..23: mol_type = transcribed RNA
tctctggagggaagcactttctg

SEQ ID NO: 3621 - RNA, 23 nt, Homo sapiens
  source 1..23: mol_type = transcribed RNA
cagaaagtgcttccctccagaga

SEQ ID NO: 3622 - RNA, 21 nt, Homo sapiens
  source 1..21: mol_type = transcribed RNA
gaaagcgcttctctttagagg

SEQ ID NO: 3623 - RNA, 21 nt, Homo sapiens
  source 1..21: mol_type = transcribed RNA
cctctaaagagaagcgctttc

SEQ ID NO: 3624 - RNA, 22 nt, Homo sapiens
  source 1..22: mol_type = transcribed RNA
ctctagagggaagcactttctc

SEQ ID NO: 3625 - RNA, 22 nt, Homo sapiens
  source 1..22: mol_type = transcribed RNA
gagaaagtgcttccctctagag

SEQ ID NO: 3626 - RNA, 22 nt, Homo sapiens
  source 1..22: mol_type = transcribed RNA
aaagtgcatccttttagagtgt

SEQ ID NO: 3627 - RNA, 22 nt, Homo sapiens
  source 1..22: mol_type = transcribed RNA
acactctaaaaggatgcacttt

SEQ ID NO: 3628 - RNA, 22 nt, Homo sapiens
  source 1..22: mol_type = transcribed RNA
ctctagagggaagcgctttctg

SEQ ID NO: 3629 - RNA, 22 nt, Homo sapiens
  source 1..22: mol_type = transcribed RNA
cagaaagcgcttccctctagag

SEQ ID NO: 3630 - RNA, 22 nt, Homo sapiens
  source 1..22: mol_type = transcribed RNA
caaagtgcctccctttagagtg

SEQ ID NO: 3631 - RNA, 22 nt, Homo sapiens
  source 1..22: mol_type = transcribed RNA
cactctaaagggaggcactttg

SEQ ID NO: 3632 - RNA, 22 nt, Homo sapiens
  source 1..22: mol_type = transcribed RNA
aagtgcctccttttagagtgtt

SEQ ID NO: 3633 - RNA, 22 nt, Homo sapiens
  source 1..22: mol_type = transcribed RNA
aacactctaaaaggaggcactt

SEQ ID NO: 3634 - RNA, 22 nt, Homo sapiens
  source 1..22: mol_type = transcribed RNA
ttctccaaaagggagcactttc

SEQ ID NO: 3635 - RNA, 22 nt, Homo sapiens
  source 1..22: mol_type = transcribed RNA
gaaagtgctcccttttggagaa

SEQ ID NO: 3636 - RNA, 22 nt, Homo sapiens
  source 1..22: mol_type = transcribed RNA
aaagtgcttccctttggactgt

SEQ ID NO: 3637 - RNA, 22 nt, Homo sapiens
  source 1..22: mol_type = transcribed RNA
acagtccaaagggaagcacttt

SEQ ID NO: 3638 - RNA, 21 nt, Homo sapiens
  source 1..21: mol_type = transcribed RNA
ctccagagggaagtactttct

SEQ ID NO: 3639 - RNA, 21 nt, Homo sapiens
  source 1..21: mol_type = transcribed RNA
agaaagtacttccctctggag

SEQ ID NO: 3640 - RNA, 22 nt, Homo sapiens
  source 1..22: mol_type = transcribed RNA
acaaagtgcttccctttagagt

SEQ ID NO: 3641 - RNA, 22 nt, Homo sapiens
  source 1..22: mol_type = transcribed RNA
actctaaagggaagcactttgt

SEQ ID NO: 3642 - RNA, 22 nt, Homo sapiens
  source 1..22: mol_type = transcribed RNA
ctacaaagggaagcactttctc

SEQ ID NO: 3643 - RNA, 22 nt, Homo sapiens
  source 1..22: mol_type = transcribed RNA
gagaaagtgcttccctttgtag

SEQ ID NO: 3644 - RNA, 22 nt, Homo sapiens
  source 1..22: mol_type = transcribed RNA
gaaggcgcttccctttagagcg

SEQ ID NO: 3645 - RNA, 22 nt, Homo sapiens
  source 1..22: mol_type = transcribed RNA
cgctctaaagggaagcgccttc

SEQ ID NO: 3646 - RNA, 21 nt, Homo sapiens
  source 1..21: mol_type = transcribed RNA
ctccagagggatgcactttct

SEQ ID NO: 3647 - RNA, 21 nt, Homo sapiens
  source 1..21: mol_type = transcribed RNA
agaaagtgcatccctctggag

SEQ ID NO: 3648 - RNA, 22 nt, Homo sapiens
  source 1..22: mol_type = transcribed RNA
ctctagagggaagcactttctg

SEQ ID NO: 3649 - RNA, 22 nt, Homo sapiens
  source 1..22: mol_type = transcribed RNA
cagaaagtgcttccctctagag

SEQ ID NO: 3650 - RNA, 22 nt, Homo sapiens
  source 1..22: mol_type = transcribed RNA
gaaagtgcttccttttagaggc

SEQ ID NO: 3651 - RNA, 22 nt, Homo sapiens
  source 1..22: mol_type = transcribed RNA
gcctctaaaaggaagcactttc

SEQ ID NO: 3652 - RNA, 23 nt, Homo sapiens
  source 1..23: mol_type = transcribed RNA
ctcttgagggaagcactttctgt

SEQ ID NO: 3653 - RNA, 23 nt, Homo sapiens
  source 1..23: mol_type = transcribed RNA
acagaaagtgcttccctcaagag

SEQ ID NO: 3654 - RNA, 22 nt, Homo sapiens
  source 1..22: mol_type = transcribed RNA
actggacttagggtcagaaggc

SEQ ID NO: 3655 - RNA, 22 nt, Homo sapiens
  source 1..22: mol_type = transcribed RNA
gccttctgaccctaagtccagt

SEQ ID NO: 3656 - RNA, 22 nt, Homo sapiens
  source 1..22: mol_type = transcribed RNA
aaacaaacatggtgcacttctt

SEQ ID NO: 3657 - RNA, 22 nt, Homo sapiens
  source 1..22: mol_type = transcribed RNA
aagaagtgcaccatgtttgttt

SEQ ID NO: 3658 - RNA, 22 nt, Homo sapiens
  source 1..22: mol_type = transcribed RNA
gaagttgcccatgttattttcg

SEQ ID NO: 3659 - RNA, 22 nt, Homo sapiens
  source 1..22: mol_type = transcribed RNA
cgaaaataacatgggcaacttc

SEQ ID NO: 3660 - RNA, 21 nt, Homo sapiens
  source 1..21: mol_type = transcribed RNA
aatcattcacggacaacactt

SEQ ID NO: 3661 - RNA, 21 nt, Homo sapiens
  source 1..21: mol_type = transcribed RNA
aagtgttgtccgtgaatgatt

SEQ ID NO: 3662 - RNA, 22 nt, Homo sapiens
  source 1..22: mol_type = transcribed RNA
gaagttgttcgtggtggattcg

SEQ ID NO: 3663 - RNA, 22 nt, Homo sapiens
  source 1..22: mol_type = transcribed RNA
cgaatccaccacgaacaacttc

SEQ ID NO: 3664 - RNA, 23 nt, Homo sapiens
  source 1..23: mol_type = transcribed RNA
cctccgtgttacctgtcctctag

SEQ ID NO: 3665 - RNA, 23 nt, Homo sapiens
  source 1..23: mol_type = transcribed RNA
ctagaggacaggtaacacggagg

SEQ ID NO: 3666 - RNA, 23 nt, Homo sapiens
  source 1..23: mol_type = transcribed RNA
tgaggatggatagcaaggaagcc

SEQ ID NO: 3667 - RNA, 23 nt, Homo sapiens
  source 1..23: mol_type = transcribed RNA
ggcttccttgctatccatcctca

SEQ ID NO: 3668 - RNA, 22 nt, Homo sapiens
  source 1..22: mol_type = transcribed RNA
ttcagatcccagcggtgcctct

SEQ ID NO: 3669 - RNA, 22 nt, Homo sapiens
  source 1..22: mol_type = transcribed RNA
agaggcaccgctgggatctgaa

SEQ ID NO: 3670 - RNA, 19 nt, Homo sapiens
  source 1..19: mol_type = transcribed RNA
gtcctaggaggctcctctg

SEQ ID NO: 3671 - RNA, 19 nt, Homo sapiens
  source 1..19: mol_type = transcribed RNA
cagaggagcctcctaggac

SEQ ID NO: 3672 - RNA, 21 nt, Homo sapiens
  source 1..21: mol_type = transcribed RNA
caattctcaaaggagcctccc

SEQ ID NO: 3673 - RNA, 21 nt, Homo sapiens
  source 1..21: mol_type = transcribed RNA
gggaggctcctttgagaattg

SEQ ID NO: 3674 - RNA, 21 nt, Homo sapiens
  source 1..21: mol_type = transcribed RNA
gttggggtgcaggggtctgct

SEQ ID NO: 3675 - RNA, 21 nt, Homo sapiens
  source 1..21: mol_type = transcribed RNA
agcagacccctgcaccccaac

SEQ ID NO: 3676 - RNA, 22 nt, Homo sapiens
  source 1..22: mol_type = transcribed RNA
tttccggctcgcgtgggtgtgt

SEQ ID NO: 3677 - RNA, 22 nt, Homo sapiens
  source 1..22: mol_type = transcribed RNA
acacacccacgcgagccggaaa

SEQ ID NO: 3678 - RNA, 23 nt, Homo sapiens
  source 1..23: mol_type = transcribed RNA
tgagtgtgtgtgtgtgagtgtgt

SEQ ID NO: 3679 - RNA, 23 nt, Homo sapiens
  source 1..23: mol_type = transcribed RNA
acacactcacacacacacactca

SEQ ID NO: 3680 - RNA, 22 nt, Homo sapiens
  source 1..22: mol_type = transcribed RNA
agtgggaggccagggcacggca

SEQ ID NO: 3681 - RNA, 22 nt, Homo sapiens
  source 1..22: mol_type = transcribed RNA
tgccgtgccctggcctcccact

SEQ ID NO: 3682 - RNA, 20 nt, Homo sapiens
  source 1..20: mol_type = transcribed RNA
tgagccctgtcctcccgcag

SEQ ID NO: 3683 - RNA, 20 nt, Homo sapiens
  source 1..20: mol_type = transcribed RNA
ctgcgggaggacagggctca

SEQ ID NO: 3684 - RNA, 23 nt, Homo sapiens
  source 1..23: mol_type = transcribed RNA
aagtgccgccatcttttgagtgt

SEQ ID NO: 3685 - RNA, 23 nt, Homo sapiens
  source 1..23: mol_type = transcribed RNA
acactcaaaagatggcggcactt

SEQ ID NO: 3686 - RNA, 20 nt, Homo sapiens
  source 1..20: mol_type = transcribed RNA
actcaaactgtgggggcact

SEQ ID NO: 3687 - RNA, 20 nt, Homo sapiens
  source 1..20: mol_type = transcribed RNA
agtgcccccacagtttgagt

SEQ ID NO: 3688 - RNA, 23 nt, Homo sapiens
  source 1..23: mol_type = transcribed RNA
aagtgcccccacagtttgagtgc

SEQ ID NO: 3689 - RNA, 23 nt, Homo sapiens
  source 1..23: mol_type = transcribed RNA
gcactcaaactgtgggggcactt

SEQ ID NO: 3690 - RNA, 22 nt, Homo sapiens
  source 1..22: mol_type = transcribed RNA
actcaaaagatggcggcacttt

SEQ ID NO: 3691 - RNA, 22 nt, Homo sapiens
  source 1..22: mol_type = transcribed RNA
aaagtgccgccatcttttgagt

SEQ ID NO: 3692 - RNA, 22 nt, Homo sapiens
  source 1..22: mol_type = transcribed RNA
aaacctgtgttgttcaagagtc

SEQ ID NO: 3693 - RNA, 22 nt, Homo sapiens
  source 1..22: mol_type = transcribed RNA
gactcttgaacaacacaggttt

SEQ ID NO: 3694 - RNA, 22 nt, Homo sapiens
  source 1..22: mol_type = transcribed RNA
acagtagagggaggaatcgcag

SEQ ID NO: 3695 - RNA, 22 nt, Homo sapiens
  source 1..22: mol_type = transcribed RNA
ctgcgattcctccctctactgt

SEQ ID NO: 3696 - RNA, 22 nt, Homo sapiens
  source 1..22: mol_type = transcribed RNA
gtgaaatgtttaggaccactag

SEQ ID NO: 3697 - RNA, 22 nt, Homo sapiens
  source 1..22: mol_type = transcribed RNA
ctagtggtcctaaacatttcac

SEQ ID NO: 3698 - RNA, 23 nt, Homo sapiens
  source 1..23: mol_type = transcribed RNA
ttgaactgttaagaaccactgga

SEQ ID NO: 3699 - RNA, 23 nt, Homo sapiens
  source 1..23: mol_type = transcribed RNA
tccagtggttcttaacagttcaa

SEQ ID NO: 3700 - RNA, 22 nt, Homo sapiens
  source 1..22: mol_type = transcribed RNA
tagtggtcctaaacatttcaca

SEQ ID NO: 3701 - RNA, 22 nt, Homo sapiens
  source 1..22: mol_type = transcribed RNA
tgtgaaatgtttaggaccacta

SEQ ID NO: 3702 - RNA, 21 nt, Homo sapiens
  source 1..21: mol_type = transcribed RNA
tgcaggaccaagatgagccct

SEQ ID NO: 3703 - RNA, 21 nt, Homo sapiens
  source 1..21: mol_type = transcribed RNA
agggctcatcttggtcctgca

SEQ ID NO: 3704 - RNA, 21 nt, Homo sapiens
  source 1..21: mol_type = transcribed RNA
ctcccacatgcagggtttgca

SEQ ID NO: 3705 - RNA, 21 nt, Homo sapiens
  source 1..21: mol_type = transcribed RNA
tgcaaaccctgcatgtgggag

SEQ ID NO: 3706 - RNA, 21 nt, Homo sapiens
  source 1..21: mol_type = transcribed RNA
catcccttgcatggtggaggg

SEQ ID NO: 3707 - RNA, 21 nt, Homo sapiens
  source 1..21: mol_type = transcribed RNA
ccctccaccatgcaagggatg

SEQ ID NO: 3708 - RNA, 22 nt, Homo sapiens
  source 1..22: mol_type = transcribed RNA
aaaatgaaatgagcccagccca

SEQ ID NO: 3709 - RNA, 22 nt, Homo sapiens
  source 1..22: mol_type = transcribed RNA
tgggctgggctcatttcatttt

SEQ ID NO: 3710 - RNA, 21 nt, Homo sapiens
  source 1..21: mol_type = transcribed RNA
agccgcggggatcgccgaggg

SEQ ID NO: 3711 - RNA, 21 nt, Homo sapiens
  source 1..21: mol_type = transcribed RNA
ccctcggcgatccccgcggct

SEQ ID NO: 3712 - RNA, 19 nt, Homo sapiens
  source 1..19: mol_type = transcribed RNA
agggacctgagtgtctaag

SEQ ID NO: 3713 - RNA, 19 nt, Homo sapiens
  source 1..19: mol_type = transcribed RNA
cttagacactcaggtccct

SEQ ID NO: 3714 - RNA, 19 nt, Homo sapiens
  source 1..19: mol_type = transcribed RNA
aggtgtgtctgtagagtcc

SEQ ID NO: 3715 - RNA, 19 nt, Homo sapiens
  source 1..19: mol_type = transcribed RNA
ggactctacagacacacct

SEQ ID NO: 3716 - RNA, 24 nt, Homo sapiens
  source 1..24: mol_type = transcribed RNA
catagcccggtcgctggtacatga

SEQ ID NO: 3717 - RNA, 24 nt, Homo sapiens
  source 1..24: mol_type = transcribed RNA
tcatgtaccagcgaccgggctatg

SEQ ID NO: 3718 - RNA, 18 nt, Homo sapiens
  source 1..18: mol_type = transcribed RNA
cggctggaggtgtgagga

SEQ ID NO: 3719 - RNA, 18 nt, Homo sapiens
  source 1..18: mol_type = transcribed RNA
tcctcacacctccagccg

SEQ ID NO: 3720 - RNA, 18 nt, Homo sapiens
  source 1..18: mol_type = transcribed RNA
ctaagaagttgactgaag

SEQ ID NO: 3721 - RNA, 18 nt, Homo sapiens
  source 1..18: mol_type = transcribed RNA
cttcagtcaacttcttag

SEQ ID NO: 3722 - RNA, 19 nt, Homo sapiens
  source 1..19: mol_type = transcribed RNA
gactggacaagctgaggaa

SEQ ID NO: 3723 - RNA, 19 nt, Homo sapiens
  source 1..19: mol_type = transcribed RNA
ttcctcagcttgtccagtc

SEQ ID NO: 3724 - RNA, 21 nt, Homo sapiens
  source 1..21: mol_type = transcribed RNA
gcttgtcgctgcggtgttgct

SEQ ID NO: 3725 - RNA, 21 nt, Homo sapiens
  source 1..21: mol_type = transcribed RNA
agcaacaccgcagcgacaagc

SEQ ID NO: 3726 - RNA, 17 nt, Homo sapiens
  source 1..17: mol_type = transcribed RNA
ggcgggtgcgggggtgg

SEQ ID NO: 3727 - RNA, 17 nt, Homo sapiens
  source 1..17: mol_type = transcribed RNA
ccacccccgcacccgcc

SEQ ID NO: 3728 - RNA, 21 nt, Homo sapiens
  source 1..21: mol_type = transcribed RNA
tgtgtcccattattggtgatt

SEQ ID NO: 3729 - RNA, 21 nt, Homo sapiens
  source 1..21: mol_type = transcribed RNA
aatcaccaataatgggacaca

SEQ ID NO: 3730 - RNA, 22 nt, Homo sapiens
  source 1..22: mol_type = transcribed RNA
tttaagaaaacaccatggagat

SEQ ID NO: 3731 - RNA, 22 nt, Homo sapiens
  source 1..22: mol_type = transcribed RNA
atctccatggtgttttcttaaa

SEQ ID NO: 3732 - RNA, 22 nt, Homo sapiens
  source 1..22: mol_type = transcribed RNA
gctatttcacgacaccagggtt

SEQ ID NO: 3733 - RNA, 22 nt, Homo sapiens
  source 1..22: mol_type = transcribed RNA
aaccctggtgtcgtgaaatagc

SEQ ID NO: 3734 - RNA, 23 nt, Homo sapiens
  source 1..23: mol_type = transcribed RNA
agctggtgttgtgaatcaggccg

SEQ ID NO: 3735 - RNA, 23 nt, Homo sapiens
  source 1..23: mol_type = transcribed RNA
cggcctgattcacaacaccagct

SEQ ID NO: 3736 - RNA, 21 nt, Homo sapiens
  source 1..21: mol_type = transcribed RNA
aataatacatggttgatcttt

SEQ ID NO: 3737 - RNA, 21 nt, Homo sapiens
  source 1..21: mol_type = transcribed RNA
aaagatcaaccatgtattatt

SEQ ID NO: 3738 - RNA, 22 nt, Homo sapiens
  source 1..22: mol_type = transcribed RNA
agatcgaccgtgttatattcgc

SEQ ID NO: 3739 - RNA, 22 nt, Homo sapiens
  source 1..22: mol_type = transcribed RNA
gcgaatataacacggtcgatct

SEQ ID NO: 3740 - RNA, 22 nt, Homo sapiens
  source 1..22: mol_type = transcribed RNA
aatcatgtgcagtgccaatatg

SEQ ID NO: 3741 - RNA, 22 nt, Homo sapiens
  source 1..22: mol_type = transcribed RNA
catattggcactgcacatgatt

SEQ ID NO: 3742 - RNA, 23 nt, Homo sapiens
  source 1..23: mol_type = transcribed RNA
tttggcactagcacatttttgct

SEQ ID NO: 3743 - RNA, 23 nt, Homo sapiens
  source 1..23: mol_type = transcribed RNA
agcaaaaatgtgctagtgccaaa

SEQ ID NO: 3744 - RNA, 22 nt, Homo sapiens
  source 1..22: mol_type = transcribed RNA
tcctgtactgagctgccccgag

SEQ ID NO: 3745 - RNA, 22 nt, Homo sapiens
  source 1..22: mol_type = transcribed RNA
ctcggggcagctcagtacagga

SEQ ID NO: 3746 - RNA, 22 nt, Homo sapiens
  source 1..22: mol_type = transcribed RNA
gctacttcacaacaccagggcc

SEQ ID NO: 3747 - RNA, 22 nt, Homo sapiens
  source 1..22: mol_type = transcribed RNA
ggccctggtgttgtgaagtagc

SEQ ID NO: 3748 - RNA, 22 nt, Homo sapiens
  source 1..22: mol_type = transcribed RNA
catcatcgtctcaaatgagtct

SEQ ID NO: 3749 - RNA, 22 nt, Homo sapiens
  source 1..22: mol_type = transcribed RNA
agactcatttgagacgatgatg

SEQ ID NO: 3750 - RNA, 23 nt, Homo sapiens
  source 1..23: mol_type = transcribed RNA
actccatttgttttgatgatgga

SEQ ID NO: 3751 - RNA, 23 nt, Homo sapiens
  source 1..23: mol_type = transcribed RNA
tccatcatcaaaacaaatggagt

SEQ ID NO: 3752 - RNA, 22 nt, Homo sapiens
  source 1..22: mol_type = transcribed RNA
ctcctacatattagcattaaca

SEQ ID NO: 3753 - RNA, 22 nt, Homo sapiens
  source 1..22: mol_type = transcribed RNA
tgttaatgctaatatgtaggag

SEQ ID NO: 3754 - RNA, 23 nt, Homo sapiens
  source 1..23: mol_type = transcribed RNA
ttaatgctaatcgtgataggggt

SEQ ID NO: 3755 - RNA, 23 nt, Homo sapiens
  source 1..23: mol_type = transcribed RNA
acccctatcacgattagcattaa

SEQ ID NO: 3756 - RNA, 22 nt, Homo sapiens
  source 1..22: mol_type = transcribed RNA
agatcagaaggtgattgtggct

SEQ ID NO: 3757 - RNA, 22 nt, Homo sapiens
  source 1..22: mol_type = transcribed RNA
agccacaatcaccttctgatct

SEQ ID NO: 3758 - RNA, 22 nt, Homo sapiens
  source 1..22: mol_type = transcribed RNA
tactgcagacgtggcaatcatg

SEQ ID NO: 3759 - RNA, 22 nt, Homo sapiens
  source 1..22: mol_type = transcribed RNA
catgattgccacgtctgcagta

SEQ ID NO: 3760 - RNA, 21 nt, Homo sapiens
  source 1..21: mol_type = transcribed RNA
gttagggccaacatctcttgg

SEQ ID NO: 3761 - RNA, 21 nt, Homo sapiens
  source 1..21: mol_type = transcribed RNA
ccaagagatgttggccctaac

SEQ ID NO: 3762 - RNA, 21 nt, Homo sapiens
  source 1..21: mol_type = transcribed RNA
aacatagaggaaattccacgt

SEQ ID NO: 3763 - RNA, 21 nt, Homo sapiens
  source 1..21: mol_type = transcribed RNA
acgtggaatttcctctatgtt

SEQ ID NO: 3764 - RNA, 21 nt, Homo sapiens
  source 1..21: mol_type = transcribed RNA
ggtggatattccttctatgtt

SEQ ID NO: 3765 - RNA, 21 nt, Homo sapiens
  source 1..21: mol_type = transcribed RNA
aacatagaaggaatatccacc

SEQ ID NO: 3766 - RNA, 23 nt, Homo sapiens
  source 1..23: mol_type = transcribed RNA
tcatagccctgtacaatgctgct

SEQ ID NO: 3767 - RNA, 23 nt, Homo sapiens
  source 1..23: mol_type = transcribed RNA
agcagcattgtacagggctatga

SEQ ID NO: 3768 - RNA, 22 nt, Homo sapiens
  source 1..22: mol_type = transcribed RNA
taacactgtctggtaaagatgg

SEQ ID NO: 3769 - RNA, 22 nt, Homo sapiens
  source 1..22: mol_type = transcribed RNA
ccatctttaccagacagtgtta

SEQ ID NO: 3770 - RNA, 22 nt, Homo sapiens
  source 1..22: mol_type = transcribed RNA
catcttccagtacagtgttgga

SEQ ID NO: 3771 - RNA, 22 nt, Homo sapiens
  source 1..22: mol_type = transcribed RNA
tccaacactgtactggaagatg

SEQ ID NO: 3772 - RNA, 22 nt, Homo sapiens
  source 1..22: mol_type = transcribed RNA
aactggcctacaaagtcccagt

SEQ ID NO: 3773 - RNA, 22 nt, Homo sapiens
  source 1..22: mol_type = transcribed RNA
actgggactttgtaggccagtt

SEQ ID NO: 3774 - RNA, 22 nt, Homo sapiens
  source 1..22: mol_type = transcribed RNA
tgggtctttgcgggcgagatga

SEQ ID NO: 3775 - RNA, 22 nt, Homo sapiens
  source 1..22: mol_type = transcribed RNA
tcatctcgcccgcaaagaccca

SEQ ID NO: 3776 - RNA, 21 nt, Homo sapiens
  source 1..21: mol_type = transcribed RNA
atgacctatgaattgacagac

SEQ ID NO: 3777 - RNA, 21 nt, Homo sapiens
  source 1..21: mol_type = transcribed RNA
gtctgtcaattcataggtcat

SEQ ID NO: 3778 - RNA, 22 nt, Homo sapiens
  source 1..22: mol_type = transcribed RNA
aagctgccagttgaagaactgt

SEQ ID NO: 3779 - RNA, 22 nt, Homo sapiens
  source 1..22: mol_type = transcribed RNA
acagttcttcaactggcagctt

SEQ ID NO: 3780 - RNA, 22 nt, Homo sapiens
  source 1..22: mol_type = transcribed RNA
agttcttcagtggcaagcttta

SEQ ID NO: 3781 - RNA, 22 nt, Homo sapiens
  source 1..22: mol_type = transcribed RNA
taaagcttgccactgaagaact

SEQ ID NO: 3782 - RNA, 22 nt, Homo sapiens
  source 1..22: mol_type = transcribed RNA
acagattcgattctaggggaat

SEQ ID NO: 3783 - RNA, 22 nt, Homo sapiens
  source 1..22: mol_type = transcribed RNA
attcccctagaatcgaatctgt

SEQ ID NO: 3784 - RNA, 23 nt, Homo sapiens
  source 1..23: mol_type = transcribed RNA
taccctgtagaaccgaatttgtg

SEQ ID NO: 3785 - RNA, 23 nt, Homo sapiens
  source 1..23: mol_type = transcribed RNA
cacaaattcggttctacagggta

SEQ ID NO: 3786 - RNA, 22 nt, Homo sapiens
  source 1..22: mol_type = transcribed RNA
tagcagcacgtaaatattggcg

SEQ ID NO: 3787 - RNA, 22 nt, Homo sapiens
  source 1..22: mol_type = transcribed RNA
cgccaatatttacgtgctgcta

SEQ ID NO: 3788 - RNA, 21 nt, Homo sapiens
  source 1..21: mol_type = transcribed RNA
tgagatgaagcactgtagctc

SEQ ID NO: 3789 - RNA, 21 nt, Homo sapiens
  source 1..21: mol_type = transcribed RNA
gagctacagtgcttcatctca

SEQ ID NO: 3790 - RNA, 22 nt, Homo sapiens
  source 1..22: mol_type = transcribed RNA
ggtgcagtgctgcatctctggt

SEQ ID NO: 3791 - RNA, 22 nt, Homo sapiens
  source 1..22: mol_type = transcribed RNA
accagagatgcagcactgcacc

SEQ ID NO: 3792 - RNA, 21 nt, Homo sapiens
  source 1..21: mol_type = transcribed RNA
ttgctcactgttcttccctag

SEQ ID NO: 3793 - RNA, 21 nt, Homo sapiens
  source 1..21: mol_type = transcribed RNA
ctagggaagaacagtgagcaa

SEQ ID NO: 3794 - RNA, 18 nt, Homo sapiens
  source 1..18: mol_type = transcribed RNA
cagggtcagctgagcatg

SEQ ID NO: 3795 - RNA, 18 nt, Homo sapiens
  source 1..18: mol_type = transcribed RNA
catgctcagctgaccctg

SEQ ID NO: 3796 - RNA, 21 nt, Homo sapiens
  source 1..21: mol_type = transcribed RNA
aagcattctttcattggttgg

SEQ ID NO: 3797 - RNA, 21 nt, Homo sapiens
  source 1..21: mol_type = transcribed RNA
ccaaccaatgaaagaatgctt

SEQ ID NO: 3798 - RNA, 21 nt, Homo sapiens
  source 1..21: mol_type = transcribed RNA
ccgtcgccgccacccgagccg

SEQ ID NO: 3799 - RNA, 21 nt, Homo sapiens
  source 1..21: mol_type = transcribed RNA
cggctcgggtggcggcgacgg

SEQ ID NO: 3800 - RNA, 27 nt, Homo sapiens
  source 1..27: mol_type = transcribed RNA
cactgtaggtgatggtgagagtgggca

SEQ ID NO: 3801 - RNA, 27 nt, Homo sapiens
  source 1..27: mol_type = transcribed RNA
tgcccactctcaccatcacctacagtg

SEQ ID NO: 3802 - RNA, 23 nt, Homo sapiens
  source 1..23: mol_type = transcribed RNA
gggatggtagaccggtgacgtgc

SEQ ID NO: 3803 - RNA, 23 nt, Homo sapiens
  source 1..23: mol_type = transcribed RNA
gcacgtcaccggtctaccatccc

SEQ ID NO: 3804 - RNA, 21 nt, Homo sapiens
  source 1..21: mol_type = transcribed RNA
taggacacatggtctacttct

SEQ ID NO: 3805 - RNA, 21 nt, Homo sapiens
  source 1..21: mol_type = transcribed RNA
agaagtagaccatgtgtccta

SEQ ID NO: 3806 - RNA, 22 nt, Homo sapiens
  source 1..22: mol_type = transcribed RNA
ctcctgagccattctgagcctc

SEQ ID NO: 3807 - RNA, 22 nt, Homo sapiens
  source 1..22: mol_type = transcribed RNA
gaggctcagaatggctcaggag

SEQ ID NO: 3808 - RNA, 21 nt, Homo sapiens
  source 1..21: mol_type = transcribed RNA
gtgccagctgcagtgggggag

SEQ ID NO: 3809 - RNA, 21 nt, Homo sapiens
  source 1..21: mol_type = transcribed RNA
ctcccccactgcagctggcac

SEQ ID NO: 3810 - RNA, 21 nt, Homo sapiens
  source 1..21: mol_type = transcribed RNA
cccggagccaggatgcagctc

SEQ ID NO: 3811 - RNA, 21 nt, Homo sapiens
  source 1..21: mol_type = transcribed RNA
gagctgcatcctggctccggg

SEQ ID NO: 3812 - RNA, 21 nt, Homo sapiens
  source 1..21: mol_type = transcribed RNA
tcgtggcctggtctccattat

SEQ ID NO: 3813 - RNA, 21 nt, Homo sapiens
  source 1..21: mol_type = transcribed RNA
ataatggagaccaggccacga

SEQ ID NO: 3814 - RNA, 20 nt, Homo sapiens
  source 1..20: mol_type = transcribed RNA
tctgcagggtttgctttgag

SEQ ID NO: 3815 - RNA, 20 nt, Homo sapiens
  source 1..20: mol_type = transcribed RNA
ctcaaagcaaaccctgcaga

SEQ ID NO: 3816 - RNA, 21 nt, Homo sapiens
  source 1..21: mol_type = transcribed RNA
tgttcatgtagatgtttaagc

SEQ ID NO: 3817 - RNA, 21 nt, Homo sapiens
  source 1..21: mol_type = transcribed RNA
gcttaaacatctacatgaaca

SEQ ID NO: 3818 - RNA, 18 nt, Homo sapiens
  source 1..18: mol_type = transcribed RNA
tcagctggccctcatttc

SEQ ID NO: 3819 - RNA, 18 nt, Homo sapiens
  source 1..18: mol_type = transcribed RNA
gaaatgagggccagctga

SEQ ID NO: 3820 - RNA, 21 nt, Homo sapiens
  source 1..21: mol_type = transcribed RNA
tggcagggaggctgggagggg

SEQ ID NO: 3821 - RNA, 21 nt, Homo sapiens
  source 1..21: mol_type = transcribed RNA
cccctcccagcctccctgcca

SEQ ID NO: 3822 - RNA, 20 nt, Homo sapiens
  source 1..20: mol_type = transcribed RNA
tcactgttcagacaggcgga

SEQ ID NO: 3823 - RNA, 20 nt, Homo sapiens
  source 1..20: mol_type = transcribed RNA
tccgcctgtctgaacagtga

SEQ ID NO: 3824 - RNA, 21 nt, Homo sapiens
  source 1..21: mol_type = transcribed RNA
ccccacctcctctctcctcag

SEQ ID NO: 3825 - RNA, 21 nt, Homo sapiens
  source 1..21: mol_type = transcribed RNA
ctgaggagagaggaggtgggg

SEQ ID NO: 3826 - RNA, 19 nt, Homo sapiens
  source 1..19: mol_type = transcribed RNA
gtgaggactcgggaggtgg

SEQ ID NO: 3827 - RNA, 19 nt, Homo sapiens
  source 1..19: mol_type = transcribed RNA
ccacctcccgagtcctcac

SEQ ID NO: 3828 - RNA, 22 nt, Homo sapiens
  source 1..22: mol_type = transcribed RNA
tgagcccctgtgccgcccccag

SEQ ID NO: 3829 - RNA, 22 nt, Homo sapiens
  source 1..22: mol_type = transcribed RNA
ctgggggcggcacaggggctca

SEQ ID NO: 3830 - RNA, 22 nt, Homo sapiens
  source 1..22: mol_type = transcribed RNA
gtgggtacggcccagtgggggg

SEQ ID NO: 3831 - RNA, 22 nt, Homo sapiens
  source 1..22: mol_type = transcribed RNA
ccccccactgggccgtacccac

SEQ ID NO: 3832 - RNA, 22 nt, Homo sapiens
  source 1..22: mol_type = transcribed RNA
tcaccagccctgtgttccctag

SEQ ID NO: 3833 - RNA, 22 nt, Homo sapiens
  source 1..22: mol_type = transcribed RNA
ctagggaacacagggctggtga

SEQ ID NO: 3834 - RNA, 26 nt, Homo sapiens
  source 1..26: mol_type = transcribed RNA
gtgagggcatgcaggcctggatgggg

SEQ ID NO: 3835 - RNA, 26 nt, Homo sapiens
  source 1..26: mol_type = transcribed RNA
ccccatccaggcctgcatgccctcac

SEQ ID NO: 3836 - RNA, 23 nt, Homo sapiens
  source 1..23: mol_type = transcribed RNA
ctctcaccactgccctcccacag

SEQ ID NO: 3837 - RNA, 23 nt, Homo sapiens
  source 1..23: mol_type = transcribed RNA
ctgtgggagggcagtggtgagag

SEQ ID NO: 3838 - RNA, 24 nt, Homo sapiens
  source 1..24: mol_type = transcribed RNA
gtgggtagggtttgggggagagcg

SEQ ID NO: 3839 - RNA, 24 nt, Homo sapiens
  source 1..24: mol_type = transcribed RNA
cgctctcccccaaaccctacccac

SEQ ID NO: 3840 - RNA, 20 nt, Homo sapiens
  source 1..20: mol_type = transcribed RNA
gtgtctgggcggacagctgc

SEQ ID NO: 3841 - RNA, 20 nt, Homo sapiens
  source 1..20: mol_type = transcribed RNA
gcagctgtccgcccagacac

SEQ ID NO: 3842 - RNA, 20 nt, Homo sapiens
  source 1..20: mol_type = transcribed RNA
cttcctcgtctgtctgcccc

SEQ ID NO: 3843 - RNA, 20 nt, Homo sapiens
  source 1..20: mol_type = transcribed RNA
ggggcagacagacgaggaag

SEQ ID NO: 3844 - RNA, 23 nt, Homo sapiens
  source 1..23: mol_type = transcribed RNA
gtgagtgggagccccagtgtgtg

SEQ ID NO: 3845 - RNA, 23 nt, Homo sapiens
  source 1..23: mol_type = transcribed RNA
cacacactggggctcccactcac

SEQ ID NO: 3846 - RNA, 27 nt, Homo sapiens
  source 1..27: mol_type = transcribed RNA
accttcttgtataagcactgtgctaaa

SEQ ID NO: 3847 - RNA, 27 nt, Homo sapiens
  source 1..27: mol_type = transcribed RNA
tttagcacagtgcttatacaagaaggt

SEQ ID NO: 3848 - RNA, 22 nt, Homo sapiens
  source 1..22: mol_type = transcribed RNA
ggcgacaaaacgagaccctgtc

SEQ ID NO: 3849 - RNA, 22 nt, Homo sapiens
  source 1..22: mol_type = transcribed RNA
gacagggtctcgttttgtcgcc

SEQ ID NO: 3850 - RNA, 22 nt, Homo sapiens
  source 1..22: mol_type = transcribed RNA
ttgcttgaacccaggaagtgga

SEQ ID NO: 3851 - RNA, 22 nt, Homo sapiens
  source 1..22: mol_type = transcribed RNA
tccacttcctgggttcaagcaa

SEQ ID NO: 3852 - RNA, 19 nt, Homo sapiens
  source 1..19: mol_type = transcribed RNA
ggagatggaggttgcagtg

SEQ ID NO: 3853 - RNA, 19 nt, Homo sapiens
  source 1..19: mol_type = transcribed RNA
cactgcaacctccatctcc

SEQ ID NO: 3854 - RNA, 21 nt, Homo sapiens
  source 1..21: mol_type = transcribed RNA
accactgcactccagcctgag

SEQ ID NO: 3855 - RNA, 21 nt, Homo sapiens
  source 1..21: mol_type = transcribed RNA
ctcaggctggagtgcagtggt

SEQ ID NO: 3856 - RNA, 22 nt, Homo sapiens
  source 1..22: mol_type = transcribed RNA
ggtggttgaggctgcagtaagt

SEQ ID NO: 3857 - RNA, 22 nt, Homo sapiens
  source 1..22: mol_type = transcribed RNA
acttactgcagcctcaaccacc

SEQ ID NO: 3858 - RNA, 17 nt, Homo sapiens
  source 1..17: mol_type = transcribed RNA
tcgcctcctcctctccc

SEQ ID NO: 3859 - RNA, 17 nt, Homo sapiens
  source 1..17: mol_type = transcribed RNA
gggagaggaggaggcga

SEQ ID NO: 3860 - RNA, 22 nt, Homo sapiens
  source 1..22: mol_type = transcribed RNA
tctatacagaccctggcttttc

SEQ ID NO: 3861 - RNA, 22 nt, Homo sapiens
  source 1..22: mol_type = transcribed RNA
gaaaagccagggtctgtataga

SEQ ID NO: 3862 - RNA, 22 nt, Homo sapiens
  source 1..22: mol_type = transcribed RNA
tctgggcaacaaagtgagacct

SEQ ID NO: 3863 - RNA, 22 nt, Homo sapiens
  source 1..22: mol_type = transcribed RNA
aggtctcactttgttgcccaga

SEQ ID NO: 3864 - RNA, 21 nt, Homo sapiens
  source 1..21: mol_type = transcribed RNA
gatctcactttgttgcccagg

SEQ ID NO: 3865 - RNA, 21 nt, Homo sapiens
  source 1..21: mol_type = transcribed RNA
cctgggcaacaaagtgagatc

SEQ ID NO: 3866 - RNA, 20 nt, Homo sapiens
  source 1..20: mol_type = transcribed RNA
tcgcgccccggctcccgttc

SEQ ID NO: 3867 - RNA, 20 nt, Homo sapiens
  source 1..20: mol_type = transcribed RNA
gaacgggagccggggcgcga

SEQ ID NO: 3868 - RNA, 25 nt, Homo sapiens
  source 1..25: mol_type = transcribed RNA
tgggaacgggttccggcagacgctg

SEQ ID NO: 3869 - RNA, 25 nt, Homo sapiens
  source 1..25: mol_type = transcribed RNA
cagcgtctgccggaacccgttccca

SEQ ID NO: 3870 - RNA, 21 nt, Homo sapiens
  source 1..21: mol_type = transcribed RNA
ttaggccgcagatctgggtga

SEQ ID NO: 3871 - RNA, 21 nt, Homo sapiens
  source 1..21: mol_type = transcribed RNA
tcacccagatctgcggcctaa

SEQ ID NO: 3872 - RNA, 22 nt, Homo sapiens
  source 1..22: mol_type = transcribed RNA
aataggccacggatctgggcaa

SEQ ID NO: 3873 - RNA, 22 nt, Homo sapiens
  source 1..22: mol_type = transcribed RNA
ttgcccagatccgtggcctatt

SEQ ID NO: 3874 - RNA, 21 nt, Homo sapiens
  source 1..21: mol_type = transcribed RNA
cacccagatctgcggcctaat

SEQ ID NO: 3875 - RNA, 21 nt, Homo sapiens
  source 1..21: mol_type = transcribed RNA
attaggccgcagatctgggtg

SEQ ID NO: 3876 - RNA, 22 nt, Homo sapiens
  source 1..22: mol_type = transcribed RNA
ttagggccctggctccatctcc

SEQ ID NO: 3877 - RNA, 22 nt, Homo sapiens
  source 1..22: mol_type = transcribed RNA
ggagatggagccagggccctaa

SEQ ID NO: 3878 - RNA, 22 nt, Homo sapiens
  source 1..22: mol_type = transcribed RNA
ttcattcggctgtccagatgta

SEQ ID NO: 3879 - RNA, 22 nt, Homo sapiens
  source 1..22: mol_type = transcribed RNA
tacatctggacagccgaatgaa

SEQ ID NO: 3880 - RNA, 24 nt, Homo sapiens
  source 1..24: mol_type = transcribed RNA
ttgcagctgcctgggagtgacttc

SEQ ID NO: 3881 - RNA, 24 nt, Homo sapiens
  source 1..24: mol_type = transcribed RNA
gaagtcactcccaggcagctgcaa

SEQ ID NO: 3882 - RNA, 21 nt, Homo sapiens
  source 1..21: mol_type = transcribed RNA
ttgggacatacttatgctaaa

SEQ ID NO: 3883 - RNA, 21 nt, Homo sapiens
  source 1..21: mol_type = transcribed RNA
tttagcataagtatgtcccaa

SEQ ID NO: 3884 - RNA, 22 nt, Homo sapiens
  source 1..22: mol_type = transcribed RNA
tctcactgtagcctcgaacccc

SEQ ID NO: 3885 - RNA, 22 nt, Homo sapiens
  source 1..22: mol_type = transcribed RNA
ggggttcgaggctacagtgaga

SEQ ID NO: 3886 - RNA, 22 nt, Homo sapiens
  source 1..22: mol_type = transcribed RNA
tttgaggctacagtgagatgtg

SEQ ID NO: 3887 - RNA, 22 nt, Homo sapiens
  source 1..22: mol_type = transcribed RNA
cacatctcactgtagcctcaaa

SEQ ID NO: 3888 - RNA, 18 nt, Homo sapiens
  source 1..18: mol_type = transcribed RNA
cagggaggtgaatgtgat

SEQ ID NO: 3889 - RNA, 18 nt, Homo sapiens
  source 1..18: mol_type = transcribed RNA
atcacattcacctccctg

SEQ ID NO: 3890 - RNA, 19 nt, Homo sapiens
  source 1..19: mol_type = transcribed RNA
gatgatgctgctgatgctg

SEQ ID NO: 3891 - RNA, 19 nt, Homo sapiens
  source 1..19: mol_type = transcribed RNA
cagcatcagcagcatcatc

SEQ ID NO: 3892 - RNA, 24 nt, Homo sapiens
  source 1..24: mol_type = transcribed RNA
ccagacagaattctatgcactttc

SEQ ID NO: 3893 - RNA, 24 nt, Homo sapiens
  source 1..24: mol_type = transcribed RNA
gaaagtgcatagaattctgtctgg

SEQ ID NO: 3894 - RNA, 22 nt, Homo sapiens
  source 1..22: mol_type = transcribed RNA
ctcctggggcccgcactctcgc

SEQ ID NO: 3895 - RNA, 22 nt, Homo sapiens
  source 1..22: mol_type = transcribed RNA
gcgagagtgcgggccccaggag

SEQ ID NO: 3896 - RNA, 21 nt, Homo sapiens
  source 1..21: mol_type = transcribed RNA
ctccgtttgcctgtttcgctg

SEQ ID NO: 3897 - RNA, 21 nt, Homo sapiens
  source 1..21: mol_type = transcribed RNA
cagcgaaacaggcaaacggag

SEQ ID NO: 3898 - RNA, 22 nt, Homo sapiens
  source 1..22: mol_type = transcribed RNA
ctcggcgcggggcgcgggctcc

SEQ ID NO: 3899 - RNA, 22 nt, Homo sapiens
  source 1..22: mol_type = transcribed RNA
ggagcccgcgccccgcgccgag

SEQ ID NO: 3900 - RNA, 21 nt, Homo sapiens
  source 1..21: mol_type = transcribed RNA
gccctccgcccgtgcaccccg

SEQ ID NO: 3901 - RNA, 21 nt, Homo sapiens
  source 1..21: mol_type = transcribed RNA
cggggtgcacgggcggagggc

SEQ ID NO: 3902 - RNA, 22 nt, Homo sapiens
  source 1..22: mol_type = transcribed RNA
gcccgcgtgtggagccaggtgt

SEQ ID NO: 3903 - RNA, 22 nt, Homo sapiens
  source 1..22: mol_type = transcribed RNA
acacctggctccacacgcgggc

SEQ ID NO: 3904 - RNA, 22 nt, Homo sapiens
  source 1..22: mol_type = transcribed RNA
aaaaccgtctagttacagttgt

SEQ ID NO: 3905 - RNA, 22 nt, Homo sapiens
  source 1..22: mol_type = transcribed RNA
acaactgtaactagacggtttt

SEQ ID NO: 3906 - RNA, 18 nt, Homo sapiens
  source 1..18: mol_type = transcribed RNA
tccagtgccctcctctcc

SEQ ID NO: 3907 - RNA, 18 nt, Homo sapiens
  source 1..18: mol_type = transcribed RNA
ggagaggagggcactgga

SEQ ID NO: 3908 - RNA, 18 nt, Homo sapiens
  source 1..18: mol_type = transcribed RNA
tgaggcagtagattgaat

SEQ ID NO: 3909 - RNA, 18 nt, Homo sapiens
  source 1..18: mol_type = transcribed RNA
attcaatctactgcctca

SEQ ID NO: 3910 - RNA, 22 nt, Homo sapiens
  source 1..22: mol_type = transcribed RNA
aggggctggctttcctctggtc

SEQ ID NO: 3911 - RNA, 22 nt, Homo sapiens
  source 1..22: mol_type = transcribed RNA
gaccagaggaaagccagcccct

SEQ ID NO: 3912 - RNA, 22 nt, Homo sapiens
  source 1..22: mol_type = transcribed RNA
tggagagaaaggcagttcctga

SEQ ID NO: 3913 - RNA, 22 nt, Homo sapiens
  source 1..22: mol_type = transcribed RNA
tcaggaactgcctttctctcca

SEQ ID NO: 3914 - RNA, 22 nt, Homo sapiens
  source 1..22: mol_type = transcribed RNA
tcgtgtcttgtgttgcagccgg

SEQ ID NO: 3915 - RNA, 22 nt, Homo sapiens
  source 1..22: mol_type = transcribed RNA
ccggctgcaacacaagacacga

SEQ ID NO: 3916 - RNA, 22 nt, Homo sapiens
  source 1..22: mol_type = transcribed RNA
ggctacaacacaggacccgggc

SEQ ID NO: 3917 - RNA, 22 nt, Homo sapiens
  source 1..22: mol_type = transcribed RNA
gcccgggtcctgtgttgtagcc

SEQ ID NO: 3918 - RNA, 21 nt, Homo sapiens
  source 1..21: mol_type = transcribed RNA
cggcggggacggcgattggtc

SEQ ID NO: 3919 - RNA, 21 nt, Homo sapiens
  source 1..21: mol_type = transcribed RNA
gaccaatcgccgtccccgccg

SEQ ID NO: 3920 - RNA, 22 nt, Homo sapiens
  source 1..22: mol_type = transcribed RNA
cgcaggggccgggtgctcaccg

SEQ ID NO: 3921 - RNA, 22 nt, Homo sapiens
  source 1..22: mol_type = transcribed RNA
cggtgagcacccggcccctgcg

SEQ ID NO: 3922 - RNA, 21 nt, Homo sapiens
  source 1..21: mol_type = transcribed RNA
tgagtgccggtgcctgccctg

SEQ ID NO: 3923 - RNA, 21 nt, Homo sapiens
  source 1..21: mol_type = transcribed RNA
cagggcaggcaccggcactca

SEQ ID NO: 3924 - RNA, 22 nt, Homo sapiens
  source 1..22: mol_type = transcribed RNA
gctgcgcttggatttcgtcccc

SEQ ID NO: 3925 - RNA, 22 nt, Homo sapiens
  source 1..22: mol_type = transcribed RNA
ggggacgaaatccaagcgcagc

SEQ ID NO: 3926 - RNA, 23 nt, Homo sapiens
  source 1..23: mol_type = transcribed RNA
caacggaatcccaaaagcagctg

SEQ ID NO: 3927 - RNA, 23 nt, Homo sapiens
  source 1..23: mol_type = transcribed RNA
cagctgcttttgggattccgttg

SEQ ID NO: 3928 - RNA, 22 nt, Homo sapiens
  source 1..22: mol_type = transcribed RNA
tcaggccaggcacagtggctca

SEQ ID NO: 3929 - RNA, 22 nt, Homo sapiens
  source 1..22: mol_type = transcribed RNA
tgagccactgtgcctggcctga

SEQ ID NO: 3930 - RNA, 19 nt, Homo sapiens
  source 1..19: mol_type = transcribed RNA
accgtgcaaaggtagcata

SEQ ID NO: 3931 - RNA, 19 nt, Homo sapiens
  source 1..19: mol_type = transcribed RNA
tatgctacctttgcacggt

SEQ ID NO: 3932 - RNA, 20 nt, Homo sapiens
  source 1..20: mol_type = transcribed RNA
cctcctgccctccttgctgt

SEQ ID NO: 3933 - RNA, 20 nt, Homo sapiens
  source 1..20: mol_type = transcribed RNA
acagcaaggagggcaggagg

SEQ ID NO: 3934 - RNA, 20 nt, Homo sapiens
  source 1..20: mol_type = transcribed RNA
tgttttgataacagtaatgt

SEQ ID NO: 3935 - RNA, 20 nt, Homo sapiens
  source 1..20: mol_type = transcribed RNA
acattactgttatcaaaaca

SEQ ID NO: 3936 - RNA, 23 nt, Homo sapiens
  source 1..23: mol_type = transcribed RNA
gtgttaattaaacctctatttac

SEQ ID NO: 3937 - RNA, 23 nt, Homo sapiens
  source 1..23: mol_type = transcribed RNA
gtaaatagaggtttaattaacac

SEQ ID NO: 3938 - RNA, 23 nt, Homo sapiens
  source 1..23: mol_type = transcribed RNA
ctgtaatataaatttaatttatt

SEQ ID NO: 3939 - RNA, 23 nt, Homo sapiens
  source 1..23: mol_type = transcribed RNA
aataaattaaatttatattacag

SEQ ID NO: 3940 - RNA, 22 nt, Homo sapiens
  source 1..22: mol_type = transcribed RNA
ttggggaaacggccgctgagtg

SEQ ID NO: 3941 - RNA, 22 nt, Homo sapiens
  source 1..22: mol_type = transcribed RNA
cactcagcggccgtttccccaa

SEQ ID NO: 3942 - RNA, 21 nt, Homo sapiens
  source 1..21: mol_type = transcribed RNA
cctcccatgccaagaactccc

SEQ ID NO: 3943 - RNA, 21 nt, Homo sapiens
  source 1..21: mol_type = transcribed RNA
gggagttcttggcatgggagg

SEQ ID NO: 3944 - RNA, 21 nt, Homo sapiens
  source 1..21: mol_type = transcribed RNA
ggttcttagcataggaggtct

SEQ ID NO: 3945 - RNA, 21 nt, Homo sapiens
  source 1..21: mol_type = transcribed RNA
agacctcctatgctaagaacc

SEQ ID NO: 3946 - RNA, 21 nt, Homo sapiens
  source 1..21: mol_type = transcribed RNA
tgttctctttgccaaggacag

SEQ ID NO: 3947 - RNA, 21 nt, Homo sapiens
  source 1..21: mol_type = transcribed RNA
ctgtccttggcaaagagaaca

SEQ ID NO: 3948 - RNA, 22 nt, Homo sapiens
  source 1..22: mol_type = transcribed RNA
aaatctctgcaggcaaatgtga

SEQ ID NO: 3949 - RNA, 22 nt, Homo sapiens
  source 1..22: mol_type = transcribed RNA
tcacatttgcctgcagagattt

SEQ ID NO: 3950 - RNA, 22 nt, Homo sapiens
  source 1..22: mol_type = transcribed RNA
catggttctgtcaagcaccgcg

SEQ ID NO: 3951 - RNA, 22 nt, Homo sapiens
  source 1..22: mol_type = transcribed RNA
cgcggtgcttgacagaaccatg

SEQ ID NO: 3952 - RNA, 21 nt, Homo sapiens
  source 1..21: mol_type = transcribed RNA
ttgtgcttgatctaaccatgt

SEQ ID NO: 3953 - RNA, 21 nt, Homo sapiens
  source 1..21: mol_type = transcribed RNA
acatggttagatcaagcacaa

SEQ ID NO: 3954 - RNA, 22 nt, Homo sapiens
  source 1..22: mol_type = transcribed RNA
tctgcaagtgtcagaggcgagg

SEQ ID NO: 3955 - RNA, 22 nt, Homo sapiens
  source 1..22: mol_type = transcribed RNA
cctcgcctctgacacttgcaga

SEQ ID NO: 3956 - RNA, 22 nt, Homo sapiens
  source 1..22: mol_type = transcribed RNA
gagagcagtgtgtgttgcctgg

SEQ ID NO: 3957 - RNA, 22 nt, Homo sapiens
  source 1..22: mol_type = transcribed RNA
ccaggcaacacacactgctctc

SEQ ID NO: 3958 - RNA, 22 nt, Homo sapiens
  source 1..22: mol_type = transcribed RNA
atcacattgccagtgattaccc

SEQ ID NO: 3959 - RNA, 22 nt, Homo sapiens
  source 1..22: mol_type = transcribed RNA
gggtaatcactggcaatgtgat

SEQ ID NO: 3960 - RNA, 22 nt, Homo sapiens
  source 1..22: mol_type = transcribed RNA
agcagaggcagagaggctcagg

SEQ ID NO: 3961 - RNA, 22 nt, Homo sapiens
  source 1..22: mol_type = transcribed RNA
cctgagcctctctgcctctgct

SEQ ID NO: 3962 - RNA, 23 nt, Homo sapiens
  source 1..23: mol_type = transcribed RNA
tgaggctctgttagccttggctc

SEQ ID NO: 3963 - RNA, 23 nt, Homo sapiens
  source 1..23: mol_type = transcribed RNA
gagccaaggctaacagagcctca

SEQ ID NO: 3964 - RNA, 22 nt, Homo sapiens
  source 1..22: mol_type = transcribed RNA
tatcatggagttggtaaagcac

SEQ ID NO: 3965 - RNA, 22 nt, Homo sapiens
  source 1..22: mol_type = transcribed RNA
gtgctttaccaactccatgata

SEQ ID NO: 3966 - RNA, 22 nt, Homo sapiens
  source 1..22: mol_type = transcribed RNA
gttttaccacctccaggagact

SEQ ID NO: 3967 - RNA, 22 nt, Homo sapiens
  source 1..22: mol_type = transcribed RNA
agtctcctggaggtggtaaaac

SEQ ID NO: 3968 - RNA, 22 nt, Homo sapiens
  source 1..22: mol_type = transcribed RNA
cgcctcttcagcgctgtcttcc

SEQ ID NO: 3969 - RNA, 22 nt, Homo sapiens
  source 1..22: mol_type = transcribed RNA
ggaagacagcgctgaagaggcg

SEQ ID NO: 3970 - RNA, 23 nt, Homo sapiens
  source 1..23: mol_type = transcribed RNA
caggcagtgactgttcagacgtc

SEQ ID NO: 3971 - RNA, 23 nt, Homo sapiens
  source 1..23: mol_type = transcribed RNA
gacgtctgaacagtcactgcctg

SEQ ID NO: 3972 - RNA, 23 nt, Homo sapiens
  source 1..23: mol_type = transcribed RNA
agaattgcgtttggacaatcagt

SEQ ID NO: 3973 - RNA, 23 nt, Homo sapiens
  source 1..23: mol_type = transcribed RNA
actgattgtccaaacgcaattct

SEQ ID NO: 3974 - RNA, 22 nt, Homo sapiens
  source 1..22: mol_type = transcribed RNA
agatgtccagccacaattctcg

SEQ ID NO: 3975 - RNA, 22 nt, Homo sapiens
  source 1..22: mol_type = transcribed RNA
cgagaattgtggctggacatct

SEQ ID NO: 3976 - RNA, 24 nt, Homo sapiens
  source 1..24: mol_type = transcribed RNA
agcagaagcagggaggttctccca

SEQ ID NO: 3977 - RNA, 24 nt, Homo sapiens
  source 1..24: mol_type = transcribed RNA
tgggagaacctccctgcttctgct

SEQ ID NO: 3978 - RNA, 22 nt, Homo sapiens
  source 1..22: mol_type = transcribed RNA
tatgtgggatggtaaaccgctt

SEQ ID NO: 3979 - RNA, 22 nt, Homo sapiens
  source 1..22: mol_type = transcribed RNA
aagcggtttaccatcccacata

SEQ ID NO: 3980 - RNA, 22 nt, Homo sapiens
  source 1..22: mol_type = transcribed RNA
tggtttaccgtcccacatacat

SEQ ID NO: 3981 - RNA, 22 nt, Homo sapiens
  source 1..22: mol_type = transcribed RNA
atgtatgtgggacggtaaacca

SEQ ID NO: 3982 - RNA, 23 nt, Homo sapiens
  source 1..23: mol_type = transcribed RNA
cagtgcaatgatattgtcaaagc

SEQ ID NO: 3983 - RNA, 23 nt, Homo sapiens
  source 1..23: mol_type = transcribed RNA
gctttgacaatatcattgcactg

SEQ ID NO: 3984 - RNA, 17 nt, Homo sapiens
  source 1..17: mol_type = transcribed RNA
taattgcttccatgttt

SEQ ID NO: 3985 - RNA, 17 nt, Homo sapiens
  source 1..17: mol_type = transcribed RNA
aaacatggaagcaatta

SEQ ID NO: 3986 - RNA, 23 nt, Homo sapiens
  source 1..23: mol_type = transcribed RNA
ttgccacactgcaacaccttaca

SEQ ID NO: 3987 - RNA, 23 nt, Homo sapiens
  source 1..23: mol_type = transcribed RNA
tgtaaggtgttgcagtgtggcaa

SEQ ID NO: 3988 - RNA, 21 nt, Homo sapiens
  source 1..21: mol_type = transcribed RNA
tctggctgttgtggtgtgcaa

SEQ ID NO: 3989 - RNA, 21 nt, Homo sapiens
  source 1..21: mol_type = transcribed RNA
ttgcacaccacaacagccaga

SEQ ID NO: 3990 - RNA, 22 nt, Homo sapiens
  source 1..22: mol_type = transcribed RNA
gatatcagctcagtaggcaccg

SEQ ID NO: 3991 - RNA, 22 nt, Homo sapiens
  source 1..22: mol_type = transcribed RNA
cggtgcctactgagctgatatc

SEQ ID NO: 3992 - RNA, 21 nt, Homo sapiens
  source 1..21: mol_type = transcribed RNA
gttcctgctgaactgagccag

SEQ ID NO: 3993 - RNA, 21 nt, Homo sapiens
  source 1..21: mol_type = transcribed RNA
ctggctcagttcagcaggaac

SEQ ID NO: 3994 - RNA, 20 nt, Homo sapiens
  source 1..20: mol_type = transcribed RNA
atatgggtttactagttggt

SEQ ID NO: 3995 - RNA, 20 nt, Homo sapiens
  source 1..20: mol_type = transcribed RNA
accaactagtaaacccatat

SEQ ID NO: 3996 - RNA, 22 nt, Homo sapiens
  source 1..22: mol_type = transcribed RNA
tgctatgccaacatattgccat

SEQ ID NO: 3997 - RNA, 22 nt, Homo sapiens
  source 1..22: mol_type = transcribed RNA
atggcaatatgttggcatagca

SEQ ID NO: 3998 - RNA, 21 nt, Homo sapiens
  source 1..21: mol_type = transcribed RNA
aggcaagatgctggcatagct

SEQ ID NO: 3999 - RNA, 21 nt, Homo sapiens
  source 1..21: mol_type = transcribed RNA
agctatgccagcatcttgcct

SEQ ID NO: 4000 - RNA, 18 nt, Homo sapiens
  source 1..18: mol_type = transcribed RNA
cggggcggcaggggcctc

SEQ ID NO: 4001 - RNA, 18 nt, Homo sapiens
  source 1..18: mol_type = transcribed RNA
gaggcccctgccgccccg

SEQ ID NO: 4002 - RNA, 19 nt, Homo sapiens
  source 1..19: mol_type = transcribed RNA
aaaagctgggttgagagga

SEQ ID NO: 4003 - RNA, 19 nt, Homo sapiens
  source 1..19: mol_type = transcribed RNA
tcctctcaacccagctttt

SEQ ID NO: 4004 - RNA, 22 nt, Homo sapiens
  source 1..22: mol_type = transcribed RNA
cccaatacacggtcgacctctt

SEQ ID NO: 4005 - RNA, 22 nt, Homo sapiens
  source 1..22: mol_type = transcribed RNA
aagaggtcgaccgtgtattggg

SEQ ID NO: 4006 - RNA, 23 nt, Homo sapiens
  source 1..23: mol_type = transcribed RNA
aggttgtccgtggtgagttcgca

SEQ ID NO: 4007 - RNA, 23 nt, Homo sapiens
  source 1..23: mol_type = transcribed RNA
tgcgaactcaccacggacaacct

SEQ ID NO: 4008 - RNA, 23 nt, Homo sapiens
  source 1..23: mol_type = transcribed RNA
gcaaagcacacggcctgcagaga

SEQ ID NO: 4009 - RNA, 23 nt, Homo sapiens
  source 1..23: mol_type = transcribed RNA
tctctgcaggccgtgtgctttgc

SEQ ID NO: 4010 - RNA, 22 nt, Homo sapiens
  source 1..22: mol_type = transcribed RNA
tctctgggcctgtgtcttaggc

SEQ ID NO: 4011 - RNA, 22 nt, Homo sapiens
  source 1..22: mol_type = transcribed RNA
gcctaagacacaggcccagaga

SEQ ID NO: 4012 - RNA, 21 nt, Homo sapiens
  source 1..21: mol_type = transcribed RNA
gcccctgggcctatcctagaa

SEQ ID NO: 4013 - RNA, 21 nt, Homo sapiens
  source 1..21: mol_type = transcribed RNA
ttctaggataggcccaggggc

SEQ ID NO: 4014 - RNA, 22 nt, Homo sapiens
  source 1..22: mol_type = transcribed RNA
tccgtctcagttactttatagc

SEQ ID NO: 4015 - RNA, 22 nt, Homo sapiens
  source 1..22: mol_type = transcribed RNA
gctataaagtaactgagacgga

SEQ ID NO: 4016 - RNA, 22 nt, Homo sapiens
  source 1..22: mol_type = transcribed RNA
aacacacctattcaaggattca

SEQ ID NO: 4017 - RNA, 22 nt, Homo sapiens
  source 1..22: mol_type = transcribed RNA
tgaatccttgaataggtgtgtt

SEQ ID NO: 4018 - RNA, 24 nt, Homo sapiens
  source 1..24: mol_type = transcribed RNA
aatccttggaacctaggtgtgagt

SEQ ID NO: 4019 - RNA, 24 nt, Homo sapiens
  source 1..24: mol_type = transcribed RNA
actcacacctaggttccaaggatt

SEQ ID NO: 4020 - RNA, 22 nt, Homo sapiens
  source 1..22: mol_type = transcribed RNA
taatgcccctaaaaatccttat

SEQ ID NO: 4021 - RNA, 22 nt, Homo sapiens
  source 1..22: mol_type = transcribed RNA
ataaggatttttaggggcatta

SEQ ID NO: 4022 - RNA, 23 nt, Homo sapiens
  source 1..23: mol_type = transcribed RNA
agggacttttgggggcagatgtg

SEQ ID NO: 4023 - RNA, 23 nt, Homo sapiens
  source 1..23: mol_type = transcribed RNA
cacatctgcccccaaaagtccct

SEQ ID NO: 4024 - RNA, 22 nt, Homo sapiens
  source 1..22: mol_type = transcribed RNA
taatgcccctaaaaatccttat

SEQ ID NO: 4025 - RNA, 22 nt, Homo sapiens
  source 1..22: mol_type = transcribed RNA
ataaggatttttaggggcatta

SEQ ID NO: 4026 - RNA, 22 nt, Homo sapiens
  source 1..22: mol_type = transcribed RNA
agggactttcaggggcagctgt

SEQ ID NO: 4027 - RNA, 22 nt, Homo sapiens
  source 1..22: mol_type = transcribed RNA
acagctgcccctgaaagtccct

SEQ ID NO: 4028 - RNA, 24 nt, Homo sapiens
  source 1..24: mol_type = transcribed RNA
gaaaatgatgagtagtgactgatg

SEQ ID NO: 4029 - RNA, 24 nt, Homo sapiens
  source 1..24: mol_type = transcribed RNA
catcagtcactactcatcattttc

SEQ ID NO: 4030 - RNA, 23 nt, Homo sapiens
  source 1..23: mol_type = transcribed RNA
tgagcaccacacaggccgggcgc

SEQ ID NO: 4031 - RNA, 23 nt, Homo sapiens
  source 1..23: mol_type = transcribed RNA
gcgcccggcctgtgtggtgctca

SEQ ID NO: 4032 - RNA, 21 nt, Homo sapiens
  source 1..21: mol_type = transcribed RNA
gctggtctgcgtggtgctcgg

SEQ ID NO: 4033 - RNA, 21 nt, Homo sapiens
  source 1..21: mol_type = transcribed RNA
ccgagcaccacgcagaccagc

SEQ ID NO: 4034 - RNA, 22 nt, Homo sapiens
  source 1..22: mol_type = transcribed RNA
gcctgctggggtggaacctggt

SEQ ID NO: 4035 - RNA, 22 nt, Homo sapiens
  source 1..22: mol_type = transcribed RNA
accaggttccaccccagcaggc

SEQ ID NO: 4036 - RNA, 23 nt, Homo sapiens
  source 1..23: mol_type = transcribed RNA
gaagtgcttcgattttggggtgt

SEQ ID NO: 4037 - RNA, 23 nt, Homo sapiens
  source 1..23: mol_type = transcribed RNA
acaccccaaaatcgaagcacttc

SEQ ID NO: 4038 - RNA, 22 nt, Homo sapiens
  source 1..22: mol_type = transcribed RNA
actcaaaatgggggcgctttcc

SEQ ID NO: 4039 - RNA, 22 nt, Homo sapiens
  source 1..22: mol_type = transcribed RNA
ggaaagcgcccccattttgagt

SEQ ID NO: 4040 - RNA, 22 nt, Homo sapiens
  source 1..22: mol_type = transcribed RNA
tatgtaacatggtccactaact

SEQ ID NO: 4041 - RNA, 22 nt, Homo sapiens
  source 1..22: mol_type = transcribed RNA
agttagtggaccatgttacata

SEQ ID NO: 4042 - RNA, 21 nt, Homo sapiens
  source 1..21: mol_type = transcribed RNA
tggtagactatggaacgtagg

SEQ ID NO: 4043 - RNA, 21 nt, Homo sapiens
  source 1..21: mol_type = transcribed RNA
cctacgttccatagtctacca

SEQ ID NO: 4044 - RNA, 22 nt, Homo sapiens
  source 1..22: mol_type = transcribed RNA
tgtagatacgagcaccagccac

SEQ ID NO: 4045 - RNA, 22 nt, Homo sapiens
  source 1..22: mol_type = transcribed RNA
gtggctggtgctcgtatctaca

SEQ ID NO: 4046 - RNA, 23 nt, Homo sapiens
  source 1..23: mol_type = transcribed RNA
acaggcggctgtagcaatggggg

SEQ ID NO: 4047 - RNA, 23 nt, Homo sapiens
  source 1..23: mol_type = transcribed RNA
cccccattgctacagccgcctgt

SEQ ID NO: 4048 - RNA, 22 nt, Homo sapiens
  source 1..22: mol_type = transcribed RNA
aattcccttgtagataacccgg

SEQ ID NO: 4049 - RNA, 22 nt, Homo sapiens
  source 1..22: mol_type = transcribed RNA
ccgggttatctacaagggaatt

SEQ ID NO: 4050 - RNA, 22 nt, Homo sapiens
  source 1..22: mol_type = transcribed RNA
tacgcgcagaccacaggatgtc

SEQ ID NO: 4051 - RNA, 22 nt, Homo sapiens
  source 1..22: mol_type = transcribed RNA
gacatcctgtggtctgcgcgta

SEQ ID NO: 4052 - RNA, 22 nt, Homo sapiens
  source 1..22: mol_type = transcribed RNA
ttacacacaactgaggatcata

SEQ ID NO: 4053 - RNA, 22 nt, Homo sapiens
  source 1..22: mol_type = transcribed RNA
tatgatcctcagttgtgtgtaa

SEQ ID NO: 4054 - RNA, 23 nt, Homo sapiens
  source 1..23: mol_type = transcribed RNA
tagcccccaggcttcacttggcg

SEQ ID NO: 4055 - RNA, 23 nt, Homo sapiens
  source 1..23: mol_type = transcribed RNA
cgccaagtgaagcctgggggcta

SEQ ID NO: 4056 - RNA, 23 nt, Homo sapiens
  source 1..23: mol_type = transcribed RNA
agggcataggagagggttgatat

SEQ ID NO: 4057 - RNA, 23 nt, Homo sapiens
  source 1..23: mol_type = transcribed RNA
atatcaaccctctcctatgccct

SEQ ID NO: 4058 - RNA, 22 nt, Homo sapiens
  source 1..22: mol_type = transcribed RNA
gaatgttgctcggtgaacccct

SEQ ID NO: 4059 - RNA, 22 nt, Homo sapiens
  source 1..22: mol_type = transcribed RNA
aggggttcaccgagcaacattc

SEQ ID NO: 4060 - RNA, 23 nt, Homo sapiens
  source 1..23: mol_type = transcribed RNA
aggttacccgagcaactttgcat

SEQ ID NO: 4061 - RNA, 23 nt, Homo sapiens
  source 1..23: mol_type = transcribed RNA
atgcaaagttgctcgggtaacct

SEQ ID NO: 4062 - RNA, 22 nt, Homo sapiens
  source 1..22: mol_type = transcribed RNA
tatgtaacacggtccactaacc

SEQ ID NO: 4063 - RNA, 22 nt, Homo sapiens
  source 1..22: mol_type = transcribed RNA
ggttagtggaccgtgttacata

SEQ ID NO: 4064 - RNA, 21 nt, Homo sapiens
  source 1..21: mol_type = transcribed RNA
tagtagaccgtatagcgtacg

SEQ ID NO: 4065 - RNA, 21 nt, Homo sapiens
  source 1..21: mol_type = transcribed RNA
cgtacgctatacggtctacta

SEQ ID NO: 4066 - RNA, 23 nt, Homo sapiens
  source 1..23: mol_type = transcribed RNA
acttcacctggtccactagccgt

SEQ ID NO: 4067 - RNA, 23 nt, Homo sapiens
  source 1..23: mol_type = transcribed RNA
acggctagtggaccaggtgaagt

SEQ ID NO: 4068 - RNA, 18 nt, Homo sapiens
  source 1..18: mol_type = transcribed RNA
gtgttctctgatggacag

SEQ ID NO: 4069 - RNA, 18 nt, Homo sapiens
  source 1..18: mol_type = transcribed RNA
ctgtccatcagagaacac

SEQ ID NO: 4070 - RNA, 22 nt, Homo sapiens
  source 1..22: mol_type = transcribed RNA
caggtcgtcttgcagggcttct

SEQ ID NO: 4071 - RNA, 22 nt, Homo sapiens
  source 1..22: mol_type = transcribed RNA
agaagccctgcaagacgacctg

SEQ ID NO: 4072 - RNA, 21 nt, Homo sapiens
  source 1..21: mol_type = transcribed RNA
tgtcttgcaggccgtcatgca

SEQ ID NO: 4073 - RNA, 21 nt, Homo sapiens
  source 1..21: mol_type = transcribed RNA
tgcatgacggcctgcaagaca

SEQ ID NO: 4074 - RNA, 22 nt, Homo sapiens
  source 1..22: mol_type = transcribed RNA
atcatgatgggctcctcggtgt

SEQ ID NO: 4075 - RNA, 22 nt, Homo sapiens
  source 1..22: mol_type = transcribed RNA
acaccgaggagcccatcatgat

SEQ ID NO: 4076 - RNA, 23 nt, Homo sapiens
  source 1..23: mol_type = transcribed RNA
ttgctagttgcactcctctctgt

SEQ ID NO: 4077 - RNA, 23 nt, Homo sapiens
  source 1..23: mol_type = transcribed RNA
acagagaggagtgcaactagcaa

SEQ ID NO: 4078 - RNA, 25 nt, Homo sapiens
  source 1..25: mol_type = transcribed RNA
taggcagtgtattgctagcggctgt

SEQ ID NO: 4079 - RNA, 25 nt, Homo sapiens
  source 1..25: mol_type = transcribed RNA
acagccgctagcaatacactgccta

SEQ ID NO: 4080 - RNA, 22 nt, Homo sapiens
  source 1..22: mol_type = transcribed RNA
attggggacattttgcattcat

SEQ ID NO: 4081 - RNA, 22 nt, Homo sapiens
  source 1..22: mol_type = transcribed RNA
atgaatgcaaaatgtccccaat

SEQ ID NO: 4082 - RNA, 22 nt, Homo sapiens
  source 1..22: mol_type = transcribed RNA
ttttgcgatgtgttcctaatat

SEQ ID NO: 4083 - RNA, 22 nt, Homo sapiens
  source 1..22: mol_type = transcribed RNA
atattaggaacacatcgcaaaa

SEQ ID NO: 4084 - RNA, 22 nt, Homo sapiens
  source 1..22: mol_type = transcribed RNA
ttgggatcattttgcatccata

SEQ ID NO: 4085 - RNA, 22 nt, Homo sapiens
  source 1..22: mol_type = transcribed RNA
tatggatgcaaaatgatcccaa

SEQ ID NO: 4086 - RNA, 22 nt, Homo sapiens
  source 1..22: mol_type = transcribed RNA
ttttgcaatatgttcctgaata

SEQ ID NO: 4087 - RNA, 22 nt, Homo sapiens
  source 1..22: mol_type = transcribed RNA
tattcaggaacatattgcaaaa

SEQ ID NO: 4088 - RNA, 21 nt, Homo sapiens
  source 1..21: mol_type = transcribed RNA
gcagtccatgggcatatacac

SEQ ID NO: 4089 - RNA, 21 nt, Homo sapiens
  source 1..21: mol_type = transcribed RNA
gtgtatatgcccatggactgc

SEQ ID NO: 4090 - RNA, 22 nt, Homo sapiens
  source 1..22: mol_type = transcribed RNA
tatgtgcctttggactacatcg

SEQ ID NO: 4091 - RNA, 22 nt, Homo sapiens
  source 1..22: mol_type = transcribed RNA
cgatgtagtccaaaggcacata

SEQ ID NO: 4092 - RNA, 23 nt, Homo sapiens
  source 1..23: mol_type = transcribed RNA
atacacatacacgcaacacacat

SEQ ID NO: 4093 - RNA, 23 nt, Homo sapiens
  source 1..23: mol_type = transcribed RNA
atgtgtgttgcgtgtatgtgtat

SEQ ID NO: 4094 - RNA, 23 nt, Homo sapiens
  source 1..23: mol_type = transcribed RNA
ttgcatgtcagattgtaattccc

SEQ ID NO: 4095 - RNA, 23 nt, Homo sapiens
  source 1..23: mol_type = transcribed RNA
gggaattacaatctgacatgcaa

SEQ ID NO: 4096 - RNA, 21 nt, Homo sapiens
  source 1..21: mol_type = transcribed RNA
tcactcctctcctcccgtctt

SEQ ID NO: 4097 - RNA, 21 nt, Homo sapiens
  source 1..21: mol_type = transcribed RNA
aagacgggaggagaggagtga

SEQ ID NO: 4098 - RNA, 22 nt, Homo sapiens
  source 1..22: mol_type = transcribed RNA
tcaggctcagtcccctcccgat

SEQ ID NO: 4099 - RNA, 22 nt, Homo sapiens
  source 1..22: mol_type = transcribed RNA
atcgggaggggactgagcctga

SEQ ID NO: 4100 - RNA, 22 nt, Homo sapiens
  source 1..22: mol_type = transcribed RNA
gtcatacacggctctcctctct

SEQ ID NO: 4101 - RNA, 22 nt, Homo sapiens
  source 1..22: mol_type = transcribed RNA
agagaggagagccgtgtatgac

SEQ ID NO: 4102 - RNA, 22 nt, Homo sapiens
  source 1..22: mol_type = transcribed RNA
agaggctggccgtgatgaattc

SEQ ID NO: 4103 - RNA, 22 nt, Homo sapiens
  source 1..22: mol_type = transcribed RNA
gaattcatcacggccagcctct

SEQ ID NO: 4104 - RNA, 22 nt, Homo sapiens
  source 1..22: mol_type = transcribed RNA
aatcatacagggacatccagtt

SEQ ID NO: 4105 - RNA, 22 nt, Homo sapiens
  source 1..22: mol_type = transcribed RNA
aactggatgtccctgtatgatt

SEQ ID NO: 4106 - RNA, 22 nt, Homo sapiens
  source 1..22: mol_type = transcribed RNA
aatcgtacagggtcatccactt

SEQ ID NO: 4107 - RNA, 22 nt, Homo sapiens
  source 1..22: mol_type = transcribed RNA
aagtggatgaccctgtacgatt

SEQ ID NO: 4108 - RNA, 21 nt, Homo sapiens
  source 1..21: mol_type = transcribed RNA
ttgaaaggctatttcttggtc

SEQ ID NO: 4109 - RNA, 21 nt, Homo sapiens
  source 1..21: mol_type = transcribed RNA
gaccaagaaatagcctttcaa

SEQ ID NO: 4110 - RNA, 21 nt, Homo sapiens
  source 1..21: mol_type = transcribed RNA
cccagataatggcactctcaa

SEQ ID NO: 4111 - RNA, 21 nt, Homo sapiens
  source 1..21: mol_type = transcribed RNA
ttgagagtgccattatctggg

SEQ ID NO: 4112 - RNA, 22 nt, Homo sapiens
  source 1..22: mol_type = transcribed RNA
caacctggaggactccatgctg

SEQ ID NO: 4113 - RNA, 22 nt, Homo sapiens
  source 1..22: mol_type = transcribed RNA
cagcatggagtcctccaggttg

SEQ ID NO: 4114 - RNA, 20 nt, Homo sapiens
  source 1..20: mol_type = transcribed RNA
ccatggatctccaggtgggt

SEQ ID NO: 4115 - RNA, 20 nt, Homo sapiens
  source 1..20: mol_type = transcribed RNA
acccacctggagatccatgg

SEQ ID NO: 4116 - RNA, 22 nt, Homo sapiens
  source 1..22: mol_type = transcribed RNA
cttatgcaagattcccttctac

SEQ ID NO: 4117 - RNA, 22 nt, Homo sapiens
  source 1..22: mol_type = transcribed RNA
gtagaagggaatcttgcataag

SEQ ID NO: 4118 - RNA, 22 nt, Homo sapiens
  source 1..22: mol_type = transcribed RNA
agtggggaacccttccatgagg

SEQ ID NO: 4119 - RNA, 22 nt, Homo sapiens
  source 1..22: mol_type = transcribed RNA
cctcatggaagggttccccact

SEQ ID NO: 4120 - RNA, 23 nt, Homo sapiens
  source 1..23: mol_type = transcribed RNA
aggacctgcgggacaagattctt

SEQ ID NO: 4121 - RNA, 23 nt, Homo sapiens
  source 1..23: mol_type = transcribed RNA
aagaatcttgtcccgcaggtcct

SEQ ID NO: 4122 - RNA, 22 nt, Homo sapiens
  source 1..22: mol_type = transcribed RNA
caaaccacactgtggtgttaga

SEQ ID NO: 4123 - RNA, 22 nt, Homo sapiens
  source 1..22: mol_type = transcribed RNA
tctaacaccacagtgtggtttg

SEQ ID NO: 4124 - RNA, 21 nt, Homo sapiens
  source 1..21: mol_type = transcribed RNA
cagcagcacactgtggtttgt

SEQ ID NO: 4125 - RNA, 21 nt, Homo sapiens
  source 1..21: mol_type = transcribed RNA
acaaaccacagtgtgctgctg

SEQ ID NO: 4126 - RNA, 23 nt, Homo sapiens
  source 1..23: mol_type = transcribed RNA
tttcaagccagggggcgtttttc

SEQ ID NO: 4127 - RNA, 23 nt, Homo sapiens
  source 1..23: mol_type = transcribed RNA
gaaaaacgccccctggcttgaaa

SEQ ID NO: 4128 - RNA, 20 nt, Homo sapiens
  source 1..20: mol_type = transcribed RNA
tcactacctgacaatacagt

SEQ ID NO: 4129 - RNA, 20 nt, Homo sapiens
  source 1..20: mol_type = transcribed RNA
actgtattgtcaggtagtga

SEQ ID NO: 4130 - RNA, 21 nt, Homo sapiens
  source 1..21: mol_type = transcribed RNA
tgctgtattgtcaggtagtga

SEQ ID NO: 4131 - RNA, 21 nt, Homo sapiens
  source 1..21: mol_type = transcribed RNA
tcactacctgacaatacagca

SEQ ID NO: 4132 - RNA, 22 nt, Homo sapiens
  source 1..22: mol_type = transcribed RNA
ttctgcctctgtccaggtcctt

SEQ ID NO: 4133 - RNA, 22 nt, Homo sapiens
  source 1..22: mol_type = transcribed RNA
aaggacctggacagaggcagaa

SEQ ID NO: 4134 - RNA, 24 nt, Homo sapiens
  source 1..24: mol_type = transcribed RNA
agggctggactcagcggcggagct

SEQ ID NO: 4135 - RNA, 24 nt, Homo sapiens
  source 1..24: mol_type = transcribed RNA
agctccgccgctgagtccagccct

SEQ ID NO: 4136 - RNA, 21 nt, Homo sapiens
  source 1..21: mol_type = transcribed RNA
tgactgcctcactgaccactt

SEQ ID NO: 4137 - RNA, 21 nt, Homo sapiens
  source 1..21: mol_type = transcribed RNA
aagtggtcagtgaggcagtca

SEQ ID NO: 4138 - RNA, 24 nt, Homo sapiens
  source 1..24: mol_type = transcribed RNA
aatttggtttctgaggcacttagt

SEQ ID NO: 4139 - RNA, 24 nt, Homo sapiens
  source 1..24: mol_type = transcribed RNA
actaagtgcctcagaaaccaaatt

SEQ ID NO: 4140 - RNA, 21 nt, Homo sapiens
  source 1..21: mol_type = transcribed RNA
tacttttctaggttgttgggg

SEQ ID NO: 4141 - RNA, 21 nt, Homo sapiens
  source 1..21: mol_type = transcribed RNA
ccccaacaacctagaaaagta

SEQ ID NO: 4142 - RNA, 23 nt, Homo sapiens
  source 1..23: mol_type = transcribed RNA
tcacaacaaccttgcagggtaga

SEQ ID NO: 4143 - RNA, 23 nt, Homo sapiens
  source 1..23: mol_type = transcribed RNA
tctaccctgcaaggttgttgtga

SEQ ID NO: 4144 - RNA, 22 nt, Homo sapiens
  source 1..22: mol_type = transcribed RNA
cttggattttcctgggcctcag

SEQ ID NO: 4145 - RNA, 22 nt, Homo sapiens
  source 1..22: mol_type = transcribed RNA
ctgaggcccaggaaaatccaag

SEQ ID NO: 4146 - RNA, 22 nt, Homo sapiens
  source 1..22: mol_type = transcribed RNA
tgaggacagggcaaattcacga

SEQ ID NO: 4147 - RNA, 22 nt, Homo sapiens
  source 1..22: mol_type = transcribed RNA
tcgtgaatttgccctgtcctca

SEQ ID NO: 4148 - RNA, 22 nt, Homo sapiens
  source 1..22: mol_type = transcribed RNA
atcatatgaaccaaactctaat

SEQ ID NO: 4149 - RNA, 22 nt, Homo sapiens
  source 1..22: mol_type = transcribed RNA
attagagtttggttcatatgat

SEQ ID NO: 4150 - RNA, 22 nt, Homo sapiens
  source 1..22: mol_type = transcribed RNA
tagagtctggctgatatggttt

SEQ ID NO: 4151 - RNA, 22 nt, Homo sapiens
  source 1..22: mol_type = transcribed RNA
aaaccatatcagccagactcta

SEQ ID NO: 4152 - RNA, 21 nt, Homo sapiens
  source 1..21: mol_type = transcribed RNA
cctgtgctcccagggcctcgc

SEQ ID NO: 4153 - RNA, 21 nt, Homo sapiens
  source 1..21: mol_type = transcribed RNA
gcgaggccctgggagcacagg

SEQ ID NO: 4154 - RNA, 22 nt, Homo sapiens
  source 1..22: mol_type = transcribed RNA
tgaggcccttggggcacagtgg

SEQ ID NO: 4155 - RNA, 22 nt, Homo sapiens
  source 1..22: mol_type = transcribed RNA
ccactgtgccccaagggcctca

SEQ ID NO: 4156 - RNA, 22 nt, Homo sapiens
  source 1..22: mol_type = transcribed RNA
tcctaaatctgaaagtccaaaa

SEQ ID NO: 4157 - RNA, 22 nt, Homo sapiens
  source 1..22: mol_type = transcribed RNA
ttttggactttcagatttagga

SEQ ID NO: 4158 - RNA, 24 nt, Homo sapiens
  source 1..24: mol_type = transcribed RNA
ttggactttttcagatttggggat

SEQ ID NO: 4159 - RNA, 24 nt, Homo sapiens
  source 1..24: mol_type = transcribed RNA
atccccaaatctgaaaaagtccaa

SEQ ID NO: 4160 - RNA, 22 nt, Homo sapiens
  source 1..22: mol_type = transcribed RNA
atgcacctgggcaaggattctg

SEQ ID NO: 4161 - RNA, 22 nt, Homo sapiens
  source 1..22: mol_type = transcribed RNA
cagaatccttgcccaggtgcat

SEQ ID NO: 4162 - RNA, 23 nt, Homo sapiens
  source 1..23: mol_type = transcribed RNA
taatccttgctacctgggtgaga

SEQ ID NO: 4163 - RNA, 23 nt, Homo sapiens
  source 1..23: mol_type = transcribed RNA
tctcacccaggtagcaaggatta

SEQ ID NO: 4164 - RNA, 22 nt, Homo sapiens
  source 1..22: mol_type = transcribed RNA
ttttgtgtctcccattccccag

SEQ ID NO: 4165 - RNA, 22 nt, Homo sapiens
  source 1..22: mol_type = transcribed RNA
ctggggaatgggagacacaaaa

SEQ ID NO: 4166 - RNA, 22 nt, Homo sapiens
  source 1..22: mol_type = transcribed RNA
agggggatggcagagcaaaatt

SEQ ID NO: 4167 - RNA, 22 nt, Homo sapiens
  source 1..22: mol_type = transcribed RNA
aattttgctctgccatccccct

SEQ ID NO: 4168 - RNA, 22 nt, Homo sapiens
  source 1..22: mol_type = transcribed RNA
gtgcatggctgtatatataaca

SEQ ID NO: 4169 - RNA, 22 nt, Homo sapiens
  source 1..22: mol_type = transcribed RNA
tgttatatatacagccatgcac

SEQ ID NO: 4170 - RNA, 21 nt, Homo sapiens
  source 1..21: mol_type = transcribed RNA
tatatatacagccatgcactc

SEQ ID NO: 4171 - RNA, 21 nt, Homo sapiens
  source 1..21: mol_type = transcribed RNA
gagtgcatggctgtatatata

SEQ ID NO: 4172 - RNA, 22 nt, Homo sapiens
  source 1..22: mol_type = transcribed RNA
aatgcacccgggcaaggattct

SEQ ID NO: 4173 - RNA, 22 nt, Homo sapiens
  source 1..22: mol_type = transcribed RNA
agaatccttgcccgggtgcatt

SEQ ID NO: 4174 - RNA, 22 nt, Homo sapiens
  source 1..22: mol_type = transcribed RNA
aatcctttgtccctgggtgaga

SEQ ID NO: 4175 - RNA, 22 nt, Homo sapiens
  source 1..22: mol_type = transcribed RNA
tctcacccagggacaaaggatt

SEQ ID NO: 4176 - RNA, 22 nt, Homo sapiens
  source 1..22: mol_type = transcribed RNA
aatgcacctgggcaaggattca

SEQ ID NO: 4177 - RNA, 22 nt, Homo sapiens
  source 1..22: mol_type = transcribed RNA
tgaatccttgcccaggtgcatt

SEQ ID NO: 4178 - RNA, 21 nt, Homo sapiens
  source 1..21: mol_type = transcribed RNA
atccttgctatctgggtgcta

SEQ ID NO: 4179 - RNA, 21 nt, Homo sapiens
  source 1..21: mol_type = transcribed RNA
tagcacccagatagcaaggat

SEQ ID NO: 4180 - RNA, 22 nt, Homo sapiens
  source 1..22: mol_type = transcribed RNA
agaccctggtctgcactctatc

SEQ ID NO: 4181 - RNA, 22 nt, Homo sapiens
  source 1..22: mol_type = transcribed RNA
gatagagtgcagaccagggtct

SEQ ID NO: 4182 - RNA, 21 nt, Homo sapiens
  source 1..21: mol_type = transcribed RNA
ttgcagctgcggttgtaaggt

SEQ ID NO: 4183 - RNA, 21 nt, Homo sapiens
  source 1..21: mol_type = transcribed RNA
accttacaaccgcagctgcaa

SEQ ID NO: 4184 - RNA, 22 nt, Homo sapiens
  source 1..22: mol_type = transcribed RNA
cgtcaacacttgctggtttcct

SEQ ID NO: 4185 - RNA, 22 nt, Homo sapiens
  source 1..22: mol_type = transcribed RNA
aggaaaccagcaagtgttgacg

SEQ ID NO: 4186 - RNA, 22 nt, Homo sapiens
  source 1..22: mol_type = transcribed RNA
gggagccaggaagtattgatgt

SEQ ID NO: 4187 - RNA, 22 nt, Homo sapiens
  source 1..22: mol_type = transcribed RNA
acatcaatacttcctggctccc

SEQ ID NO: 4188 - RNA, 21 nt, Homo sapiens
  source 1..21: mol_type = transcribed RNA
taaggcacccttctgagtaga

SEQ ID NO: 4189 - RNA, 21 nt, Homo sapiens
  source 1..21: mol_type = transcribed RNA
tctactcagaagggtgcctta

SEQ ID NO: 4190 - RNA, 22 nt, Homo sapiens
  source 1..22: mol_type = transcribed RNA
tattcaggaaggtgttacttaa

SEQ ID NO: 4191 - RNA, 22 nt, Homo sapiens
  source 1..22: mol_type = transcribed RNA
ttaagtaacaccttcctgaata

SEQ ID NO: 4192 - RNA, 21 nt, Homo sapiens
  source 1..21: mol_type = transcribed RNA
ttttgcaccttttggagtgaa

SEQ ID NO: 4193 - RNA, 21 nt, Homo sapiens
  source 1..21: mol_type = transcribed RNA
ttcactccaaaaggtgcaaaa

SEQ ID NO: 4194 - RNA, 23 nt, Homo sapiens
  source 1..23: mol_type = transcribed RNA
tgattgtagccttttggagtaga

SEQ ID NO: 4195 - RNA, 23 nt, Homo sapiens
  source 1..23: mol_type = transcribed RNA
tctactccaaaaggctacaatca

SEQ ID NO: 4196 - RNA, 23 nt, Homo sapiens
  source 1..23: mol_type = transcribed RNA
gggtttgtagctttgctggcatg

SEQ ID NO: 4197 - RNA, 23 nt, Homo sapiens
  source 1..23: mol_type = transcribed RNA
catgccagcaaagctacaaaccc

SEQ ID NO: 4198 - RNA, 23 nt, Homo sapiens
  source 1..23: mol_type = transcribed RNA
cagggctcagggattggatggag

SEQ ID NO: 4199 - RNA, 23 nt, Homo sapiens
  source 1..23: mol_type = transcribed RNA
ctccatccaatccctgagccctg

SEQ ID NO: 4200 - RNA, 23 nt, Homo sapiens
  source 1..23: mol_type = transcribed RNA
atgctactcggaaatcccactga

SEQ ID NO: 4201 - RNA, 23 nt, Homo sapiens
  source 1..23: mol_type = transcribed RNA
tcagtgggatttccgagtagcat

SEQ ID NO: 4202 - RNA, 21 nt, Homo sapiens
  source 1..21: mol_type = transcribed RNA
gtgggatttctgagtagcatc

SEQ ID NO: 4203 - RNA, 21 nt, Homo sapiens
  source 1..21: mol_type = transcribed RNA
gatgctactcagaaatcccac

SEQ ID NO: 4204 - RNA, 23 nt, Homo sapiens
  source 1..23: mol_type = transcribed RNA
ccggggcagattggtgtagggtg

SEQ ID NO: 4205 - RNA, 23 nt, Homo sapiens
  source 1..23: mol_type = transcribed RNA
caccctacaccaatctgccccgg

SEQ ID NO: 4206 - RNA, 23 nt, Homo sapiens
  source 1..23: mol_type = transcribed RNA
acggagacgacaagactgtgctg

SEQ ID NO: 4207 - RNA, 23 nt, Homo sapiens
  source 1..23: mol_type = transcribed RNA
cagcacagtcttgtcgtctccgt

SEQ ID NO: 4208 - RNA, 22 nt, Homo sapiens
  source 1..22: mol_type = transcribed RNA
aatccacgctgagcttggcatc

SEQ ID NO: 4209 - RNA, 22 nt, Homo sapiens
  source 1..22: mol_type = transcribed RNA
gatgccaagctcagcgtggatt

SEQ ID NO: 4210 - RNA, 23 nt, Homo sapiens
  source 1..23: mol_type = transcribed RNA
aggaaatgaggctggctaggagc

SEQ ID NO: 4211 - RNA, 23 nt, Homo sapiens
  source 1..23: mol_type = transcribed RNA
gctcctagccagcctcatttcct

SEQ ID NO: 4212 - RNA, 22 nt, Homo sapiens
  source 1..22: mol_type = transcribed RNA
tgattggtacgtctgtgggtag

SEQ ID NO: 4213 - RNA, 22 nt, Homo sapiens
  source 1..22: mol_type = transcribed RNA
ctacccacagacgtaccaatca

SEQ ID NO: 4214 - RNA, 22 nt, Homo sapiens
  source 1..22: mol_type = transcribed RNA
aatcagtgaatgccttgaacct

SEQ ID NO: 4215 - RNA, 22 nt, Homo sapiens
  source 1..22: mol_type = transcribed RNA
aggttcaaggcattcactgatt

SEQ ID NO: 4216 - RNA, 21 nt, Homo sapiens
  source 1..21: mol_type = transcribed RNA
ttacaggcgtgaaccaccgcg

SEQ ID NO: 4217 - RNA, 21 nt, Homo sapiens
  source 1..21: mol_type = transcribed RNA
cgcggtggttcacgcctgtaa

SEQ ID NO: 4218 - RNA, 21 nt, Homo sapiens
  source 1..21: mol_type = transcribed RNA
tactgcagacagtggcaatca

SEQ ID NO: 4219 - RNA, 21 nt, Homo sapiens
  source 1..21: mol_type = transcribed RNA
tgattgccactgtctgcagta

SEQ ID NO: 4220 - RNA, 21 nt, Homo sapiens
  source 1..21: mol_type = transcribed RNA
gtttcaccatgttggtcaggc

SEQ ID NO: 4221 - RNA, 21 nt, Homo sapiens
  source 1..21: mol_type = transcribed RNA
gcctgaccaacatggtgaaac

SEQ ID NO: 4222 - RNA, 23 nt, Homo sapiens
  source 1..23: mol_type = transcribed RNA
taaatttcacctttctgagaagg

SEQ ID NO: 4223 - RNA, 23 nt, Homo sapiens
  source 1..23: mol_type = transcribed RNA
ccttctcagaaaggtgaaattta

SEQ ID NO: 4224 - RNA, 22 nt, Homo sapiens
  source 1..22: mol_type = transcribed RNA
ttcacaaggaggtgtcatttat

SEQ ID NO: 4225 - RNA, 22 nt, Homo sapiens
  source 1..22: mol_type = transcribed RNA
ataaatgacacctccttgtgaa

SEQ ID NO: 4226 - RNA, 23 nt, Homo sapiens
  source 1..23: mol_type = transcribed RNA
taaatttcacctttctgagaaga

SEQ ID NO: 4227 - RNA, 23 nt, Homo sapiens
  source 1..23: mol_type = transcribed RNA
tcttctcagaaaggtgaaattta

SEQ ID NO: 4228 - RNA, 22 nt, Homo sapiens
  source 1..22: mol_type = transcribed RNA
ttctcaaggaggtgtcgtttat

SEQ ID NO: 4229 - RNA, 22 nt, Homo sapiens
  source 1..22: mol_type = transcribed RNA
ataaacgacacctccttgagaa

SEQ ID NO: 4230 - RNA, 21 nt, Homo sapiens
  source 1..21: mol_type = transcribed RNA
attgacacttctgtgagtaga

SEQ ID NO: 4231 - RNA, 21 nt, Homo sapiens
  source 1..21: mol_type = transcribed RNA
tctactcacagaagtgtcaat

SEQ ID NO: 4232 - RNA, 23 nt, Homo sapiens
  source 1..23: mol_type = transcribed RNA
tactctggagagtgacaatcatg

SEQ ID NO: 4233 - RNA, 23 nt, Homo sapiens
  source 1..23: mol_type = transcribed RNA
catgattgtcactctccagagta

SEQ ID NO: 4234 - RNA, 21 nt, Homo sapiens
  source 1..21: mol_type = transcribed RNA
attgacacctctgtgagtgga

SEQ ID NO: 4235 - RNA, 21 nt, Homo sapiens
  source 1..21: mol_type = transcribed RNA
tccactcacagaggtgtcaat

SEQ ID NO: 4236 - RNA, 22 nt, Homo sapiens
  source 1..22: mol_type = transcribed RNA
ttctcaagagggaggcaatcat

SEQ ID NO: 4237 - RNA, 22 nt, Homo sapiens
  source 1..22: mol_type = transcribed RNA
atgattgcctccctcttgagaa

SEQ ID NO: 4238 - RNA, 22 nt, Homo sapiens
  source 1..22: mol_type = transcribed RNA
gagtgccttcttttggagcgtt

SEQ ID NO: 4239 - RNA, 22 nt, Homo sapiens
  source 1..22: mol_type = transcribed RNA
aacgctccaaaagaaggcactc

SEQ ID NO: 4240 - RNA, 18 nt, Homo sapiens
  source 1..18: mol_type = transcribed RNA
tgcttcctttcagagggt

SEQ ID NO: 4241 - RNA, 18 nt, Homo sapiens
  source 1..18: mol_type = transcribed RNA
accctctgaaaggaagca

SEQ ID NO: 4242 - RNA, 22 nt, Homo sapiens
  source 1..22: mol_type = transcribed RNA
atctggaggtaagaagcacttt

SEQ ID NO: 4243 - RNA, 22 nt, Homo sapiens
  source 1..22: mol_type = transcribed RNA
aaagtgcttcttacctccagat

SEQ ID NO: 4244 - RNA, 22 nt, Homo sapiens
  source 1..22: mol_type = transcribed RNA
gaaagcgcttccctttgctgga

SEQ ID NO: 4245 - RNA, 22 nt, Homo sapiens
  source 1..22: mol_type = transcribed RNA
tccagcaaagggaagcgctttc

SEQ ID NO: 4246 - RNA, 20 nt, Homo sapiens
  source 1..20: mol_type = transcribed RNA
ctgcaaagggaagccctttc

SEQ ID NO: 4247 - RNA, 20 nt, Homo sapiens
  source 1..20: mol_type = transcribed RNA
gaaagggcttccctttgcag

SEQ ID NO: 4248 - RNA, 21 nt, Homo sapiens
  source 1..21: mol_type = transcribed RNA
caaagcgcttccctttggagc

SEQ ID NO: 4249 - RNA, 21 nt, Homo sapiens
  source 1..21: mol_type = transcribed RNA
gctccaaagggaagcgctttg

SEQ ID NO: 4250 - RNA, 22 nt, Homo sapiens
  source 1..22: mol_type = transcribed RNA
ctctagagggaagcactttctg

SEQ ID NO: 4251 - RNA, 22 nt, Homo sapiens
  source 1..22: mol_type = transcribed RNA
cagaaagtgcttccctctagag

SEQ ID NO: 4252 - RNA, 21 nt, Homo sapiens
  source 1..21: mol_type = transcribed RNA
aaagcgcttcccttcagagtg

SEQ ID NO: 4253 - RNA, 21 nt, Homo sapiens
  source 1..21: mol_type = transcribed RNA
cactctgaagggaagcgcttt

SEQ ID NO: 4254 - RNA, 22 nt, Homo sapiens
  source 1..22: mol_type = transcribed RNA
ctctagagggaagcgctttctg

SEQ ID NO: 4255 - RNA, 22 nt, Homo sapiens
  source 1..22: mol_type = transcribed RNA
cagaaagcgcttccctctagag

SEQ ID NO: 4256 - RNA, 22 nt, Homo sapiens
  source 1..22: mol_type = transcribed RNA
aaagtgcatccttttagaggtt

SEQ ID NO: 4257 - RNA, 22 nt, Homo sapiens
  source 1..22: mol_type = transcribed RNA
aacctctaaaaggatgcacttt

SEQ ID NO: 4258 - RNA, 22 nt, Homo sapiens
  source 1..22: mol_type = transcribed RNA
ctctagagggaagcgctttctg

SEQ ID NO: 4259 - RNA, 22 nt, Homo sapiens
  source 1..22: mol_type = transcribed RNA
cagaaagcgcttccctctagag

SEQ ID NO: 4260 - RNA, 22 nt, Homo sapiens
  source 1..22: mol_type = transcribed RNA
aaagtgcatctttttagaggat

SEQ ID NO: 4261 - RNA, 22 nt, Homo sapiens
  source 1..22: mol_type = transcribed RNA
atcctctaaaaagatgcacttt

SEQ ID NO: 4262 - RNA, 22 nt, Homo sapiens
  source 1..22: mol_type = transcribed RNA
ctctagagggaagcgctttctg

SEQ ID NO: 4263 - RNA, 22 nt, Homo sapiens
  source 1..22: mol_type = transcribed RNA
cagaaagcgcttccctctagag

SEQ ID NO: 4264 - RNA, 21 nt, Homo sapiens
  source 1..21: mol_type = transcribed RNA
aaagtgcttccttttagaggg

SEQ ID NO: 4265 - RNA, 21 nt, Homo sapiens
  source 1..21: mol_type = transcribed RNA
ccctctaaaaggaagcacttt

SEQ ID NO: 4266 - RNA, 22 nt, Homo sapiens
  source 1..22: mol_type = transcribed RNA
aaagtgcttccttttagagggt

SEQ ID NO: 4267 - RNA, 22 nt, Homo sapiens
  source 1..22: mol_type = transcribed RNA
accctctaaaaggaagcacttt

SEQ ID NO: 4268 - RNA, 22 nt, Homo sapiens
  source 1..22: mol_type = transcribed RNA
ctctagagggaagcactttctg

SEQ ID NO: 4269 - RNA, 22 nt, Homo sapiens
  source 1..22: mol_type = transcribed RNA
cagaaagtgcttccctctagag

SEQ ID NO: 4270 - RNA, 22 nt, Homo sapiens
  source 1..22: mol_type = transcribed RNA
aaagtgcttctctttggtgggt

SEQ ID NO: 4271 - RNA, 22 nt, Homo sapiens
  source 1..22: mol_type = transcribed RNA
acccaccaaagagaagcacttt

SEQ ID NO: 4272 - RNA, 20 nt, Homo sapiens
  source 1..20: mol_type = transcribed RNA
ctacaaagggaagccctttc

SEQ ID NO: 4273 - RNA, 20 nt, Homo sapiens
  source 1..20: mol_type = transcribed RNA
gaaagggcttccctttgtag

SEQ ID NO: 4274 - RNA, 21 nt, Homo sapiens
  source 1..21: mol_type = transcribed RNA
aaagtgcttcctttttgaggg

SEQ ID NO: 4275 - RNA, 21 nt, Homo sapiens
  source 1..21: mol_type = transcribed RNA
ccctcaaaaaggaagcacttt

SEQ ID NO: 4276 - RNA, 22 nt, Homo sapiens
  source 1..22: mol_type = transcribed RNA
aagtgcttccttttagagggtt

SEQ ID NO: 4277 - RNA, 22 nt, Homo sapiens
  source 1..22: mol_type = transcribed RNA
aaccctctaaaaggaagcactt

SEQ ID NO: 4278 - RNA, 24 nt, Homo sapiens
  source 1..24: mol_type = transcribed RNA
acaaagtgcttccctttagagtgt

SEQ ID NO: 4279 - RNA, 24 nt, Homo sapiens
  source 1..24: mol_type = transcribed RNA
acactctaaagggaagcactttgt

SEQ ID NO: 4280 - RNA, 22 nt, Homo sapiens
  source 1..22: mol_type = transcribed RNA
aacgcacttccctttagagtgt

SEQ ID NO: 4281 - RNA, 22 nt, Homo sapiens
  source 1..22: mol_type = transcribed RNA
acactctaaagggaagtgcgtt

SEQ ID NO: 4282 - RNA, 22 nt, Homo sapiens
  source 1..22: mol_type = transcribed RNA
aaaatggttccctttagagtgt

SEQ ID NO: 4283 - RNA, 22 nt, Homo sapiens
  source 1..22: mol_type = transcribed RNA
acactctaaagggaaccatttt

SEQ ID NO: 4284 - RNA, 22 nt, Homo sapiens
  source 1..22: mol_type = transcribed RNA
ctctagagggaagcgctttctg

SEQ ID NO: 4285 - RNA, 22 nt, Homo sapiens
  source 1..22: mol_type = transcribed RNA
cagaaagcgcttccctctagag

SEQ ID NO: 4286 - RNA, 23 nt, Homo sapiens
  source 1..23: mol_type = transcribed RNA
gaacgcgcttccctatagagggt

SEQ ID NO: 4287 - RNA, 23 nt, Homo sapiens
  source 1..23: mol_type = transcribed RNA
accctctatagggaagcgcgttc

SEQ ID NO: 4288 - RNA, 22 nt, Homo sapiens
  source 1..22: mol_type = transcribed RNA
ctctagagggaagcgctttctg

SEQ ID NO: 4289 - RNA, 22 nt, Homo sapiens
  source 1..22: mol_type = transcribed RNA
cagaaagcgcttccctctagag

SEQ ID NO: 4290 - RNA, 21 nt, Homo sapiens
  source 1..21: mol_type = transcribed RNA
gaaggcgcttccctttggagt

SEQ ID NO: 4291 - RNA, 21 nt, Homo sapiens
  source 1..21: mol_type = transcribed RNA
actccaaagggaagcgccttc

SEQ ID NO: 4292 - RNA, 20 nt, Homo sapiens
  source 1..20: mol_type = transcribed RNA
ctgcaaagggaagccctttc

SEQ ID NO: 4293 - RNA, 20 nt, Homo sapiens
  source 1..20: mol_type = transcribed RNA
gaaagggcttccctttgcag

SEQ ID NO: 4294 - RNA, 22 nt, Homo sapiens
  source 1..22: mol_type = transcribed RNA
cctcccacacccaaggcttgca

SEQ ID NO: 4295 - RNA, 22 nt, Homo sapiens
  source 1..22: mol_type = transcribed RNA
tgcaagccttgggtgtgggagg

SEQ ID NO: 4296 - RNA, 22 nt, Homo sapiens
  source 1..22: mol_type = transcribed RNA
catgccttgagtgtaggaccgt

SEQ ID NO: 4297 - RNA, 22 nt, Homo sapiens
  source 1..22: mol_type = transcribed RNA
acggtcctacactcaaggcatg

SEQ ID NO: 4298 - RNA, 22 nt, Homo sapiens
  source 1..22: mol_type = transcribed RNA
atcatacaaggacaatttcttt

SEQ ID NO: 4299 - RNA, 22 nt, Homo sapiens
  source 1..22: mol_type = transcribed RNA
aaagaaattgtccttgtatgat

SEQ ID NO: 4300 - RNA, 22 nt, Homo sapiens
  source 1..22: mol_type = transcribed RNA
ggagaaattatccttggtgtgt

SEQ ID NO: 4301 - RNA, 22 nt, Homo sapiens
  source 1..22: mol_type = transcribed RNA
acacaccaaggataatttctcc

SEQ ID NO: 4302 - RNA, 22 nt, Homo sapiens
  source 1..22: mol_type = transcribed RNA
tggtgggcacagaatctggact

SEQ ID NO: 4303 - RNA, 22 nt, Homo sapiens
  source 1..22: mol_type = transcribed RNA
agtccagattctgtgcccacca

SEQ ID NO: 4304 - RNA, 25 nt, Homo sapiens
  source 1..25: mol_type = transcribed RNA
aaaggattctgctgtcggtcccact

SEQ ID NO: 4305 - RNA, 25 nt, Homo sapiens
  source 1..25: mol_type = transcribed RNA
agtgggaccgacagcagaatccttt

SEQ ID NO: 4306 - RNA, 23 nt, Homo sapiens
  source 1..23: mol_type = transcribed RNA
tcggggatcatcatgtcacgaga

SEQ ID NO: 4307 - RNA, 23 nt, Homo sapiens
  source 1..23: mol_type = transcribed RNA
tctcgtgacatgatgatccccga

SEQ ID NO: 4308 - RNA, 22 nt, Homo sapiens
  source 1..22: mol_type = transcribed RNA
aaacattcgcggtgcacttctt

SEQ ID NO: 4309 - RNA, 22 nt, Homo sapiens
  source 1..22: mol_type = transcribed RNA
aagaagtgcaccgcgaatgttt

SEQ ID NO: 4310 - RNA, 22 nt, Homo sapiens
  source 1..22: mol_type = transcribed RNA
attctgcatttttagcaagttc

SEQ ID NO: 4311 - RNA, 22 nt, Homo sapiens
  source 1..22: mol_type = transcribed RNA
gaacttgctaaaaatgcagaat

SEQ ID NO: 4312 - RNA, 22 nt, Homo sapiens
  source 1..22: mol_type = transcribed RNA
acctgaggttgtgcatttctaa

SEQ ID NO: 4313 - RNA, 22 nt, Homo sapiens
  source 1..22: mol_type = transcribed RNA
ttagaaatgcacaacctcaggt

SEQ ID NO: 4314 - RNA, 22 nt, Homo sapiens
  source 1..22: mol_type = transcribed RNA
tcagcaaacatttattgtgtgc

SEQ ID NO: 4315 - RNA, 22 nt, Homo sapiens
  source 1..22: mol_type = transcribed RNA
gcacacaataaatgtttgctga

SEQ ID NO: 4316 - RNA, 22 nt, Homo sapiens
  source 1..22: mol_type = transcribed RNA
tcagtaaatgtttattagatga

SEQ ID NO: 4317 - RNA, 22 nt, Homo sapiens
  source 1..22: mol_type = transcribed RNA
tcatctaataaacatttactga

SEQ ID NO: 4318 - RNA, 22 nt, Homo sapiens
  source 1..22: mol_type = transcribed RNA
agctacagttacttttgcacca

SEQ ID NO: 4319 - RNA, 22 nt, Homo sapiens
  source 1..22: mol_type = transcribed RNA
tggtgcaaaagtaactgtagct

SEQ ID NO: 4320 - RNA, 20 nt, Homo sapiens
  source 1..20: mol_type = transcribed RNA
taaaaactgcaattactttc

SEQ ID NO: 4321 - RNA, 20 nt, Homo sapiens
  source 1..20: mol_type = transcribed RNA
gaaagtaattgcagttttta

SEQ ID NO: 4322 - RNA, 23 nt, Homo sapiens
  source 1..23: mol_type = transcribed RNA
tgcaaaagtaattgcagtttttg

SEQ ID NO: 4323 - RNA, 23 nt, Homo sapiens
  source 1..23: mol_type = transcribed RNA
caaaaactgcaattacttttgca

SEQ ID NO: 4324 - RNA, 22 nt, Homo sapiens
  source 1..22: mol_type = transcribed RNA
aaagaccgtgactacttttgca

SEQ ID NO: 4325 - RNA, 22 nt, Homo sapiens
  source 1..22: mol_type = transcribed RNA
tgcaaaagtagtcacggtcttt

SEQ ID NO: 4326 - RNA, 22 nt, Homo sapiens
  source 1..22: mol_type = transcribed RNA
agaagtaactacggtttttgca

SEQ ID NO: 4327 - RNA, 22 nt, Homo sapiens
  source 1..22: mol_type = transcribed RNA
tgcaaaaaccgtagttacttct

SEQ ID NO: 4328 - RNA, 19 nt, Homo sapiens
  source 1..19: mol_type = transcribed RNA
aaaaaccacaattactttt

SEQ ID NO: 4329 - RNA, 19 nt, Homo sapiens
  source 1..19: mol_type = transcribed RNA
aaaagtaattgtggttttt

SEQ ID NO: 4330 - RNA, 19 nt, Homo sapiens
  source 1..19: mol_type = transcribed RNA
aaaagtaattgcggtcttt

SEQ ID NO: 4331 - RNA, 19 nt, Homo sapiens
  source 1..19: mol_type = transcribed RNA
aaagaccgcaattactttt

SEQ ID NO: 4332 - RNA, 22 nt, Homo sapiens
  source 1..22: mol_type = transcribed RNA
caaaaactgcaattacttttgc

SEQ ID NO: 4333 - RNA, 22 nt, Homo sapiens
  source 1..22: mol_type = transcribed RNA
gcaaaagtaattgcagtttttg

SEQ ID NO: 4334 - RNA, 22 nt, Homo sapiens
  source 1..22: mol_type = transcribed RNA
gaaagtaattgctgtttttgcc

SEQ ID NO: 4335 - RNA, 22 nt, Homo sapiens
  source 1..22: mol_type = transcribed RNA
ggcaaaaacagcaattactttc

SEQ ID NO: 4336 - RNA, 21 nt, Homo sapiens
  source 1..21: mol_type = transcribed RNA
taaaactgcagttatttttgc

SEQ ID NO: 4337 - RNA, 21 nt, Homo sapiens
  source 1..21: mol_type = transcribed RNA
gcaaaaataactgcagtttta

SEQ ID NO: 4338 - RNA, 21 nt, Homo sapiens
  source 1..21: mol_type = transcribed RNA
aaaagtaattgcagtttttgc

SEQ ID NO: 4339 - RNA, 21 nt, Homo sapiens
  source 1..21: mol_type = transcribed RNA
gcaaaaactgcaattactttt

SEQ ID NO: 4340 - RNA, 22 nt, Homo sapiens
  source 1..22: mol_type = transcribed RNA
taaaacccacaattatgtttgt

SEQ ID NO: 4341 - RNA, 22 nt, Homo sapiens
  source 1..22: mol_type = transcribed RNA
acaaacataattgtgggtttta

SEQ ID NO: 4342 - RNA, 22 nt, Homo sapiens
  source 1..22: mol_type = transcribed RNA
aaaagtaattgcgggttttgcc

SEQ ID NO: 4343 - RNA, 22 nt, Homo sapiens
  source 1..22: mol_type = transcribed RNA
ggcaaaacccgcaattactttt

SEQ ID NO: 4344 - RNA, 21 nt, Homo sapiens
  source 1..21: mol_type = transcribed RNA
caaaaccgcagtaacttttgt

SEQ ID NO: 4345 - RNA, 21 nt, Homo sapiens
  source 1..21: mol_type = transcribed RNA
acaaaagttactgcggttttg

SEQ ID NO: 4346 - RNA, 22 nt, Homo sapiens
  source 1..22: mol_type = transcribed RNA
aaaagttattgcggttttggct

SEQ ID NO: 4347 - RNA, 22 nt, Homo sapiens
  source 1..22: mol_type = transcribed RNA
agccaaaaccgcaataactttt

SEQ ID NO: 4348 - RNA, 21 nt, Homo sapiens
  source 1..21: mol_type = transcribed RNA
tggcagttacttttgcaccag

SEQ ID NO: 4349 - RNA, 21 nt, Homo sapiens
  source 1..21: mol_type = transcribed RNA
ctggtgcaaaagtaactgcca

SEQ ID NO: 4350 - RNA, 21 nt, Homo sapiens
  source 1..21: mol_type = transcribed RNA
aaaagtaattgcggtttttgc

SEQ ID NO: 4351 - RNA, 21 nt, Homo sapiens
  source 1..21: mol_type = transcribed RNA
gcaaaaaccgcaattactttt

SEQ ID NO: 4352 - RNA, 20 nt, Homo sapiens
  source 1..20: mol_type = transcribed RNA
aaaactgcagttacttttgc

SEQ ID NO: 4353 - RNA, 20 nt, Homo sapiens
  source 1..20: mol_type = transcribed RNA
gcaaaagtaactgcagtttt

SEQ ID NO: 4354 - RNA, 18 nt, Homo sapiens
  source 1..18: mol_type = transcribed RNA
aaaagtacttgcggattt

SEQ ID NO: 4355 - RNA, 18 nt, Homo sapiens
  source 1..18: mol_type = transcribed RNA
aaatccgcaagtactttt

SEQ ID NO: 4356 - RNA, 20 nt, Homo sapiens
  source 1..20: mol_type = transcribed RNA
gtgcaaaagtcatcacggtt

SEQ ID NO: 4357 - RNA, 20 nt, Homo sapiens
  source 1..20: mol_type = transcribed RNA
aaccgtgatgacttttgcac

SEQ ID NO: 4358 - RNA, 22 nt, Homo sapiens
  source 1..22: mol_type = transcribed RNA
gctggtgcaaaagtaatggcgg

SEQ ID NO: 4359 - RNA, 22 nt, Homo sapiens
  source 1..22: mol_type = transcribed RNA
ccgccattacttttgcaccagc

SEQ ID NO: 4360 - RNA, 22 nt, Homo sapiens
  source 1..22: mol_type = transcribed RNA
aaaagtaatcactgtttttgcc

SEQ ID NO: 4361 - RNA, 22 nt, Homo sapiens
  source 1..22: mol_type = transcribed RNA
ggcaaaaacagtgattactttt

SEQ ID NO: 4362 - RNA, 20 nt, Homo sapiens
  source 1..20: mol_type = transcribed RNA
agtgcctgagggagtaagag

SEQ ID NO: 4363 - RNA, 20 nt, Homo sapiens
  source 1..20: mol_type = transcribed RNA
ctcttactccctcaggcact

SEQ ID NO: 4364 - RNA, 22 nt, Homo sapiens
  source 1..22: mol_type = transcribed RNA
tgtcttactccctcaggcacat

SEQ ID NO: 4365 - RNA, 22 nt, Homo sapiens
  source 1..22: mol_type = transcribed RNA
atgtgcctgagggagtaagaca

SEQ ID NO: 4366 - RNA, 23 nt, Homo sapiens
  source 1..23: mol_type = transcribed RNA
agtgcctgagggagtaagagccc

SEQ ID NO: 4367 - RNA, 23 nt, Homo sapiens
  source 1..23: mol_type = transcribed RNA
gggctcttactccctcaggcact

SEQ ID NO: 4368 - RNA, 21 nt, Homo sapiens
  source 1..21: mol_type = transcribed RNA
gcgacccactcttggtttcca

SEQ ID NO: 4369 - RNA, 21 nt, Homo sapiens
  source 1..21: mol_type = transcribed RNA
tggaaaccaagagtgggtcgc

SEQ ID NO: 4370 - RNA, 22 nt, Homo sapiens
  source 1..22: mol_type = transcribed RNA
ttagcttaaggagtaccagatc

SEQ ID NO: 4371 - RNA, 22 nt, Homo sapiens
  source 1..22: mol_type = transcribed RNA
gatctggtactccttaagctaa

SEQ ID NO: 4372 - RNA, 21 nt, Homo sapiens
  source 1..21: mol_type = transcribed RNA
tatggtactccttaagctaac

SEQ ID NO: 4373 - RNA, 21 nt, Homo sapiens
  source 1..21: mol_type = transcribed RNA
gttagcttaaggagtaccata

SEQ ID NO: 4374 - RNA, 19 nt, Homo sapiens
  source 1..19: mol_type = transcribed RNA
tgagctgctgtaccaaaat

SEQ ID NO: 4375 - RNA, 19 nt, Homo sapiens
  source 1..19: mol_type = transcribed RNA
attttggtacagcagctca

SEQ ID NO: 4376 - RNA, 22 nt, Homo sapiens
  source 1..22: mol_type = transcribed RNA
cacatatgaagtgagccagcac

SEQ ID NO: 4377 - RNA, 22 nt, Homo sapiens
  source 1..22: mol_type = transcribed RNA
gtgctggctcacttcatatgtg

SEQ ID NO: 4378 - RNA, 22 nt, Homo sapiens
  source 1..22: mol_type = transcribed RNA
tgctggctcatttcatatgtgt

SEQ ID NO: 4379 - RNA, 22 nt, Homo sapiens
  source 1..22: mol_type = transcribed RNA
acacatatgaaatgagccagca

SEQ ID NO: 4380 - RNA, 22 nt, Homo sapiens
  source 1..22: mol_type = transcribed RNA
ttccatgcctcctagaagttcc

SEQ ID NO: 4381 - RNA, 22 nt, Homo sapiens
  source 1..22: mol_type = transcribed RNA
ggaacttctaggaggcatggaa

SEQ ID NO: 4382 - RNA, 22 nt, Homo sapiens
  source 1..22: mol_type = transcribed RNA
agccttccaggagaaatggaga

SEQ ID NO: 4383 - RNA, 22 nt, Homo sapiens
  source 1..22: mol_type = transcribed RNA
tctccatttctcctggaaggct

SEQ ID NO: 4384 - RNA, 22 nt, Homo sapiens
  source 1..22: mol_type = transcribed RNA
taaaactttaagtgtgcctagg

SEQ ID NO: 4385 - RNA, 22 nt, Homo sapiens
  source 1..22: mol_type = transcribed RNA
cctaggcacacttaaagtttta

SEQ ID NO: 4386 - RNA, 22 nt, Homo sapiens
  source 1..22: mol_type = transcribed RNA
taggcacacttaaagttatagc

SEQ ID NO: 4387 - RNA, 22 nt, Homo sapiens
  source 1..22: mol_type = transcribed RNA
gctataactttaagtgtgccta

SEQ ID NO: 4388 - RNA, 22 nt, Homo sapiens
  source 1..22: mol_type = transcribed RNA
gaatatgggtatattagtttgg

SEQ ID NO: 4389 - RNA, 22 nt, Homo sapiens
  source 1..22: mol_type = transcribed RNA
ccaaactaatatacccatattc

SEQ ID NO: 4390 - RNA, 22 nt, Homo sapiens
  source 1..22: mol_type = transcribed RNA
aaactaatatacccatattctg

SEQ ID NO: 4391 - RNA, 22 nt, Homo sapiens
  source 1..22: mol_type = transcribed RNA
cagaatatgggtatattagttt

SEQ ID NO: 4392 - RNA, 22 nt, Homo sapiens
  source 1..22: mol_type = transcribed RNA
tagttcttccctttgcccaatt

SEQ ID NO: 4393 - RNA, 22 nt, Homo sapiens
  source 1..22: mol_type = transcribed RNA
aattgggcaaagggaagaacta

SEQ ID NO: 4394 - RNA, 22 nt, Homo sapiens
  source 1..22: mol_type = transcribed RNA
cagggaaatgggaagaactaga

SEQ ID NO: 4395 - RNA, 22 nt, Homo sapiens
  source 1..22: mol_type = transcribed RNA
tctagttcttcccatttccctg

SEQ ID NO: 4396 - RNA, 22 nt, Homo sapiens
  source 1..22: mol_type = transcribed RNA
ctgaatagctgggactacaggt

SEQ ID NO: 4397 - RNA, 22 nt, Homo sapiens
  source 1..22: mol_type = transcribed RNA
acctgtagtcccagctattcag

SEQ ID NO: 4398 - RNA, 22 nt, Homo sapiens
  source 1..22: mol_type = transcribed RNA
tgaagtaccagctactcgagag

SEQ ID NO: 4399 - RNA, 22 nt, Homo sapiens
  source 1..22: mol_type = transcribed RNA
ctctcgagtagctggtacttca

SEQ ID NO: 4400 - RNA, 22 nt, Homo sapiens
  source 1..22: mol_type = transcribed RNA
cagagtgacaagctggttaaag

SEQ ID NO: 4401 - RNA, 22 nt, Homo sapiens
  source 1..22: mol_type = transcribed RNA
ctttaaccagcttgtcactctg

SEQ ID NO: 4402 - RNA, 22 nt, Homo sapiens
  source 1..22: mol_type = transcribed RNA
tatccagcttgttactatatgc

SEQ ID NO: 4403 - RNA, 22 nt, Homo sapiens
  source 1..22: mol_type = transcribed RNA
gcatatagtaacaagctggata

SEQ ID NO: 4404 - RNA, 21 nt, Homo sapiens
  source 1..21: mol_type = transcribed RNA
gccccgggcagtgtgatcatc

SEQ ID NO: 4405 - RNA, 21 nt, Homo sapiens
  source 1..21: mol_type = transcribed RNA
gatgatcacactgcccggggc

SEQ ID NO: 4406 - RNA, 18 nt, Homo sapiens
  source 1..18: mol_type = transcribed RNA
atggtcacctccgggact

SEQ ID NO: 4407 - RNA, 18 nt, Homo sapiens
  source 1..18: mol_type = transcribed RNA
agtcccggaggtgaccat

SEQ ID NO: 4408 - RNA, 19 nt, Homo sapiens
  source 1..19: mol_type = transcribed RNA
aagtcccactaatgccagc

SEQ ID NO: 4409 - RNA, 19 nt, Homo sapiens
  source 1..19: mol_type = transcribed RNA
gctggcattagtgggactt

SEQ ID NO: 4410 - RNA, 21 nt, Homo sapiens
  source 1..21: mol_type = transcribed RNA
actggcattagtgggactttt

SEQ ID NO: 4411 - RNA, 21 nt, Homo sapiens
  source 1..21: mol_type = transcribed RNA
aaaagtcccactaatgccagt

SEQ ID NO: 4412 - RNA, 23 nt, Homo sapiens
  source 1..23: mol_type = transcribed RNA
tgcacatggcaacctagctccca

SEQ ID NO: 4413 - RNA, 23 nt, Homo sapiens
  source 1..23: mol_type = transcribed RNA
tgggagctaggttgccatgtgca

SEQ ID NO: 4414 - RNA, 21 nt, Homo sapiens
  source 1..21: mol_type = transcribed RNA
ggctgggtgctcttgtgcagt

SEQ ID NO: 4415 - RNA, 21 nt, Homo sapiens
  source 1..21: mol_type = transcribed RNA
actgcacaagagcacccagcc

SEQ ID NO: 4416 - RNA, 21 nt, Homo sapiens
  source 1..21: mol_type = transcribed RNA
taaagtaaatatgcaccaaaa

SEQ ID NO: 4417 - RNA, 21 nt, Homo sapiens
  source 1..21: mol_type = transcribed RNA
ttttggtgcatatttacttta

SEQ ID NO: 4418 - RNA, 21 nt, Homo sapiens
  source 1..21: mol_type = transcribed RNA
aataaagttcatgtatggcaa

SEQ ID NO: 4419 - RNA, 21 nt, Homo sapiens
  source 1..21: mol_type = transcribed RNA
ttgccatacatgaactttatt

SEQ ID NO: 4420 - RNA, 21 nt, Homo sapiens
  source 1..21: mol_type = transcribed RNA
ttgccatacatagactttatt

SEQ ID NO: 4421 - RNA, 21 nt, Homo sapiens
  source 1..21: mol_type = transcribed RNA
aataaagtctatgtatggcaa

SEQ ID NO: 4422 - RNA, 21 nt, Homo sapiens
  source 1..21: mol_type = transcribed RNA
atacccatagcttagctccca

SEQ ID NO: 4423 - RNA, 21 nt, Homo sapiens
  source 1..21: mol_type = transcribed RNA
tgggagctaagctatgggtat

SEQ ID NO: 4424 - RNA, 21 nt, Homo sapiens
  source 1..21: mol_type = transcribed RNA
tgggagctaagctatgggtat

SEQ ID NO: 4425 - RNA, 21 nt, Homo sapiens
  source 1..21: mol_type = transcribed RNA
atacccatagcttagctccca

SEQ ID NO: 4426 - RNA, 22 nt, Homo sapiens
  source 1..22: mol_type = transcribed RNA
caaagtttaagatccttgaagt

SEQ ID NO: 4427 - RNA, 22 nt, Homo sapiens
  source 1..22: mol_type = transcribed RNA
acttcaaggatcttaaactttg

SEQ ID NO: 4428 - RNA, 22 nt, Homo sapiens
  source 1..22: mol_type = transcribed RNA
atcaaggatcttaaactttgcc

SEQ ID NO: 4429 - RNA, 22 nt, Homo sapiens
  source 1..22: mol_type = transcribed RNA
ggcaaagtttaagatccttgat

SEQ ID NO: 4430 - RNA, 20 nt, Homo sapiens
  source 1..20: mol_type = transcribed RNA
aaagtagctgtaccatttgc

SEQ ID NO: 4431 - RNA, 20 nt, Homo sapiens
  source 1..20: mol_type = transcribed RNA
gcaaatggtacagctacttt

SEQ ID NO: 4432 - RNA, 19 nt, Homo sapiens
  source 1..19: mol_type = transcribed RNA
aggcacggtgtcagcaggc

SEQ ID NO: 4433 - RNA, 19 nt, Homo sapiens
  source 1..19: mol_type = transcribed RNA
gcctgctgacaccgtgcct

SEQ ID NO: 4434 - RNA, 19 nt, Homo sapiens
  source 1..19: mol_type = transcribed RNA
gggcgcctgtgatcccaac

SEQ ID NO: 4435 - RNA, 19 nt, Homo sapiens
  source 1..19: mol_type = transcribed RNA
gttgggatcacaggcgccc

SEQ ID NO: 4436 - RNA, 23 nt, Homo sapiens
  source 1..23: mol_type = transcribed RNA
agtatgttcttccaggacagaac

SEQ ID NO: 4437 - RNA, 23 nt, Homo sapiens
  source 1..23: mol_type = transcribed RNA
gttctgtcctggaagaacatact

SEQ ID NO: 4438 - RNA, 22 nt, Homo sapiens
  source 1..22: mol_type = transcribed RNA
gagaaatgctggactaatctgc

SEQ ID NO: 4439 - RNA, 22 nt, Homo sapiens
  source 1..22: mol_type = transcribed RNA
gcagattagtccagcatttctc

SEQ ID NO: 4440 - RNA, 22 nt, Homo sapiens
  source 1..22: mol_type = transcribed RNA
agaaagggtggcaatacctctt

SEQ ID NO: 4441 - RNA, 22 nt, Homo sapiens
  source 1..22: mol_type = transcribed RNA
aagaggtattgccaccctttct

SEQ ID NO: 4442 - RNA, 22 nt, Homo sapiens
  source 1..22: mol_type = transcribed RNA
aggtattgccaccctttctagt

SEQ ID NO: 4443 - RNA, 22 nt, Homo sapiens
  source 1..22: mol_type = transcribed RNA
actagaaagggtggcaatacct

SEQ ID NO: 4444 - RNA, 22 nt, Homo sapiens
  source 1..22: mol_type = transcribed RNA
gtagcaccttgcaggataaggt

SEQ ID NO: 4445 - RNA, 22 nt, Homo sapiens
  source 1..22: mol_type = transcribed RNA
accttatcctgcaaggtgctac

SEQ ID NO: 4446 - RNA, 24 nt, Homo sapiens
  source 1..24: mol_type = transcribed RNA
tacagatgcagattctctgacttc

SEQ ID NO: 4447 - RNA, 24 nt, Homo sapiens
  source 1..24: mol_type = transcribed RNA
gaagtcagagaatctgcatctgta

SEQ ID NO: 4448 - RNA, 20 nt, Homo sapiens
  source 1..20: mol_type = transcribed RNA
aactctagcctgagcaacag

SEQ ID NO: 4449 - RNA, 20 nt, Homo sapiens
  source 1..20: mol_type = transcribed RNA
ctgttgctcaggctagagtt

SEQ ID NO: 4450 - RNA, 22 nt, Homo sapiens
  source 1..22: mol_type = transcribed RNA
acagcccagcagttatcacggg

SEQ ID NO: 4451 - RNA, 22 nt, Homo sapiens
  source 1..22: mol_type = transcribed RNA
cccgtgataactgctgggctgt

SEQ ID NO: 4452 - RNA, 21 nt, Homo sapiens
  source 1..21: mol_type = transcribed RNA
tatcgtatcgtattgtattgt

SEQ ID NO: 4453 - RNA, 21 nt, Homo sapiens
  source 1..21: mol_type = transcribed RNA
acaatacaatacgatacgata

SEQ ID NO: 4454 - RNA, 22 nt, Homo sapiens
  source 1..22: mol_type = transcribed RNA
ttagaacgttttagggtcaaat

SEQ ID NO: 4455 - RNA, 22 nt, Homo sapiens
  source 1..22: mol_type = transcribed RNA
atttgaccctaaaacgttctaa

SEQ ID NO: 4456 - RNA, 22 nt, Homo sapiens
  source 1..22: mol_type = transcribed RNA
taacaaacacctgtaaaacagc

SEQ ID NO: 4457 - RNA, 22 nt, Homo sapiens
  source 1..22: mol_type = transcribed RNA
gctgttttacaggtgtttgtta

SEQ ID NO: 4458 - RNA, 22 nt, Homo sapiens
  source 1..22: mol_type = transcribed RNA
agcatacacctgtagtcctaga

SEQ ID NO: 4459 - RNA, 22 nt, Homo sapiens
  source 1..22: mol_type = transcribed RNA
tctaggactacaggtgtatgct

SEQ ID NO: 4460 - RNA, 21 nt, Homo sapiens
  source 1..21: mol_type = transcribed RNA
agttaatgaatcctggaaagt

SEQ ID NO: 4461 - RNA, 21 nt, Homo sapiens
  source 1..21: mol_type = transcribed RNA
actttccaggattcattaact

SEQ ID NO: 4462 - RNA, 21 nt, Homo sapiens
  source 1..21: mol_type = transcribed RNA
tcagctactacctctattagg

SEQ ID NO: 4463 - RNA, 21 nt, Homo sapiens
  source 1..21: mol_type = transcribed RNA
cctaatagaggtagtagctga

SEQ ID NO: 4464 - RNA, 22 nt, Homo sapiens
  source 1..22: mol_type = transcribed RNA
ttgctctgagctccgagaaagc

SEQ ID NO: 4465 - RNA, 22 nt, Homo sapiens
  source 1..22: mol_type = transcribed RNA
gctttctcggagctcagagcaa

SEQ ID NO: 4466 - RNA, 22 nt, Homo sapiens
  source 1..22: mol_type = transcribed RNA
caaataataccacagtgggtgt

SEQ ID NO: 4467 - RNA, 22 nt, Homo sapiens
  source 1..22: mol_type = transcribed RNA
acacccactgtggtattatttg

SEQ ID NO: 4468 - RNA, 20 nt, Homo sapiens
  source 1..20: mol_type = transcribed RNA
aataatatcacagtaggtgt

SEQ ID NO: 4469 - RNA, 20 nt, Homo sapiens
  source 1..20: mol_type = transcribed RNA
acacctactgtgatattatt

SEQ ID NO: 4470 - RNA, 22 nt, Homo sapiens
  source 1..22: mol_type = transcribed RNA
aataatatcacagtaggtgtac

SEQ ID NO: 4471 - RNA, 22 nt, Homo sapiens
  source 1..22: mol_type = transcribed RNA
gtacacctactgtgatattatt

SEQ ID NO: 4472 - RNA, 22 nt, Homo sapiens
  source 1..22: mol_type = transcribed RNA
gcagtggctctgaaatgaactc

SEQ ID NO: 4473 - RNA, 22 nt, Homo sapiens
  source 1..22: mol_type = transcribed RNA
gagttcatttcagagccactgc

SEQ ID NO: 4474 - RNA, 21 nt, Homo sapiens
  source 1..21: mol_type = transcribed RNA
cagatcatgggactgtctcag

SEQ ID NO: 4475 - RNA, 21 nt, Homo sapiens
  source 1..21: mol_type = transcribed RNA
ctgagacagtcccatgatctg

SEQ ID NO: 4476 - RNA, 22 nt, Homo sapiens
  source 1..22: mol_type = transcribed RNA
actccaagaagaatctagacag

SEQ ID NO: 4477 - RNA, 22 nt, Homo sapiens
  source 1..22: mol_type = transcribed RNA
ctgtctagattcttcttggagt

SEQ ID NO: 4478 - RNA, 22 nt, Homo sapiens
  source 1..22: mol_type = transcribed RNA
ctcatttaagtagtctgatgcc

SEQ ID NO: 4479 - RNA, 22 nt, Homo sapiens
  source 1..22: mol_type = transcribed RNA
ggcatcagactacttaaatgag

SEQ ID NO: 4480 - RNA, 22 nt, Homo sapiens
  source 1..22: mol_type = transcribed RNA
tcaagtagtttcatgataaagg

SEQ ID NO: 4481 - RNA, 22 nt, Homo sapiens
  source 1..22: mol_type = transcribed RNA
cctttatcatgaaactacttga

SEQ ID NO: 4482 - RNA, 22 nt, Homo sapiens
  source 1..22: mol_type = transcribed RNA
tgggggagtgcagtgattgtgg

SEQ ID NO: 4483 - RNA, 22 nt, Homo sapiens
  source 1..22: mol_type = transcribed RNA
ccacaatcactgcactccccca

SEQ ID NO: 4484 - RNA, 22 nt, Homo sapiens
  source 1..22: mol_type = transcribed RNA
tcctgtctttccttgttggagc

SEQ ID NO: 4485 - RNA, 22 nt, Homo sapiens
  source 1..22: mol_type = transcribed RNA
gctccaacaaggaaagacagga

SEQ ID NO: 4486 - RNA, 22 nt, Homo sapiens
  source 1..22: mol_type = transcribed RNA
taatgcattaaattattgaagg

SEQ ID NO: 4487 - RNA, 22 nt, Homo sapiens
  source 1..22: mol_type = transcribed RNA
ccttcaataatttaatgcatta

SEQ ID NO: 4488 - RNA, 19 nt, Homo sapiens
  source 1..19: mol_type = transcribed RNA
ttattgtcacgttctgatt

SEQ ID NO: 4489 - RNA, 19 nt, Homo sapiens
  source 1..19: mol_type = transcribed RNA
aatcagaacgtgacaataa

SEQ ID NO: 4490 - RNA, 22 nt, Homo sapiens
  source 1..22: mol_type = transcribed RNA
tgagtcagcaacatatcccatg

SEQ ID NO: 4491 - RNA, 22 nt, Homo sapiens
  source 1..22: mol_type = transcribed RNA
catgggatatgttgctgactca

SEQ ID NO: 4492 - RNA, 18 nt, Homo sapiens
  source 1..18: mol_type = transcribed RNA
aggagaagtcgggaaggt

SEQ ID NO: 4493 - RNA, 18 nt, Homo sapiens
  source 1..18: mol_type = transcribed RNA
accttcccgacttctcct

SEQ ID NO: 4494 - RNA, 22 nt, Homo sapiens
  source 1..22: mol_type = transcribed RNA
cgaaaacagcaattacctttgc

SEQ ID NO: 4495 - RNA, 22 nt, Homo sapiens
  source 1..22: mol_type = transcribed RNA
gcaaaggtaattgctgttttcg

SEQ ID NO: 4496 - RNA, 22 nt, Homo sapiens
  source 1..22: mol_type = transcribed RNA
ttaggccatcatcccattatgc

SEQ ID NO: 4497 - RNA, 22 nt, Homo sapiens
  source 1..22: mol_type = transcribed RNA
gcataatgggatgatggcctaa

SEQ ID NO: 4498 - RNA, 23 nt, Homo sapiens
  source 1..23: mol_type = transcribed RNA
tgtttcggggctcatggcctgtg

SEQ ID NO: 4499 - RNA, 23 nt, Homo sapiens
  source 1..23: mol_type = transcribed RNA
cacaggccatgagccccgaaaca

SEQ ID NO: 4500 - RNA, 22 nt, Homo sapiens
  source 1..22: mol_type = transcribed RNA
aaaggtaattgcagtttttccc

SEQ ID NO: 4501 - RNA, 22 nt, Homo sapiens
  source 1..22: mol_type = transcribed RNA
gggaaaaactgcaattaccttt

SEQ ID NO: 4502 - RNA, 22 nt, Homo sapiens
  source 1..22: mol_type = transcribed RNA
ttctggataacatgctgaagct

SEQ ID NO: 4503 - RNA, 22 nt, Homo sapiens
  source 1..22: mol_type = transcribed RNA
agcttcagcatgttatccagaa

SEQ ID NO: 4504 - RNA, 22 nt, Homo sapiens
  source 1..22: mol_type = transcribed RNA
acgtttgaatgctgtacaaggc

SEQ ID NO: 4505 - RNA, 22 nt, Homo sapiens
  source 1..22: mol_type = transcribed RNA
gccttgtacagcattcaaacgt

SEQ ID NO: 4506 - RNA, 20 nt, Homo sapiens
  source 1..20: mol_type = transcribed RNA
atgagcgactgtgcctgacc

SEQ ID NO: 4507 - RNA, 20 nt, Homo sapiens
  source 1..20: mol_type = transcribed RNA
ggtcaggcacagtcgctcat

SEQ ID NO: 4508 - RNA, 19 nt, Homo sapiens
  source 1..19: mol_type = transcribed RNA
gagccagttggacaggagc

SEQ ID NO: 4509 - RNA, 19 nt, Homo sapiens
  source 1..19: mol_type = transcribed RNA
gctcctgtccaactggctc

SEQ ID NO: 4510 - RNA, 23 nt, Homo sapiens
  source 1..23: mol_type = transcribed RNA
ttcatttggtataaaccgcgatt

SEQ ID NO: 4511 - RNA, 23 nt, Homo sapiens
  source 1..23: mol_type = transcribed RNA
aatcgcggtttataccaaatgaa

SEQ ID NO: 4512 - RNA, 22 nt, Homo sapiens
  source 1..22: mol_type = transcribed RNA
ttgagaatgatgaatcattagg

SEQ ID NO: 4513 - RNA, 22 nt, Homo sapiens
  source 1..22: mol_type = transcribed RNA
cctaatgattcatcattctcaa

SEQ ID NO: 4514 - RNA, 23 nt, Homo sapiens
  source 1..23: mol_type = transcribed RNA
ttacagttgttcaaccagttact

SEQ ID NO: 4515 - RNA, 23 nt, Homo sapiens
  source 1..23: mol_type = transcribed RNA
agtaactggttgaacaactgtaa

SEQ ID NO: 4516 - RNA, 21 nt, Homo sapiens
  source 1..21: mol_type = transcribed RNA
caaagaggaaggtcccattac

SEQ ID NO: 4517 - RNA, 21 nt, Homo sapiens
  source 1..21: mol_type = transcribed RNA
gtaatgggaccttcctctttg

SEQ ID NO: 4518 - RNA, 22 nt, Homo sapiens
  source 1..22: mol_type = transcribed RNA
tcagttccaggccaaccaggct

SEQ ID NO: 4519 - RNA, 22 nt, Homo sapiens
  source 1..22: mol_type = transcribed RNA
agcctggttggcctggaactga

SEQ ID NO: 4520 - RNA, 22 nt, Homo sapiens
  source 1..22: mol_type = transcribed RNA
ttatggtttgcctgggactgag

SEQ ID NO: 4521 - RNA, 22 nt, Homo sapiens
  source 1..22: mol_type = transcribed RNA
ctcagtcccaggcaaaccataa

SEQ ID NO: 4522 - RNA, 19 nt, Homo sapiens
  source 1..19: mol_type = transcribed RNA
tgggcgtatctgtatgcta

SEQ ID NO: 4523 - RNA, 19 nt, Homo sapiens
  source 1..19: mol_type = transcribed RNA
tagcatacagatacgccca

SEQ ID NO: 4524 - RNA, 20 nt, Homo sapiens
  source 1..20: mol_type = transcribed RNA
agaccatgggttctcattgt

SEQ ID NO: 4525 - RNA, 20 nt, Homo sapiens
  source 1..20: mol_type = transcribed RNA
acaatgagaacccatggtct

SEQ ID NO: 4526 - RNA, 22 nt, Homo sapiens
  source 1..22: mol_type = transcribed RNA
ttgtgtcaatatgcgatgatgt

SEQ ID NO: 4527 - RNA, 22 nt, Homo sapiens
  source 1..22: mol_type = transcribed RNA
acatcatcgcatattgacacaa

SEQ ID NO: 4528 - RNA, 19 nt, Homo sapiens
  source 1..19: mol_type = transcribed RNA
tgtctctgctggggtttct

SEQ ID NO: 4529 - RNA, 19 nt, Homo sapiens
  source 1..19: mol_type = transcribed RNA
agaaaccccagcagagaca

SEQ ID NO: 4530 - RNA, 25 nt, Homo sapiens
  source 1..25: mol_type = transcribed RNA
aggcaccagccaggcattgctcagc

SEQ ID NO: 4531 - RNA, 25 nt, Homo sapiens
  source 1..25: mol_type = transcribed RNA
gctgagcaatgcctggctggtgcct

SEQ ID NO: 4532 - RNA, 21 nt, Homo sapiens
  source 1..21: mol_type = transcribed RNA
gaagtgtgccgtggtgtgtct

SEQ ID NO: 4533 - RNA, 21 nt, Homo sapiens
  source 1..21: mol_type = transcribed RNA
agacacaccacggcacacttc

SEQ ID NO: 4534 - RNA, 21 nt, Homo sapiens
  source 1..21: mol_type = transcribed RNA
aagcctgcccggctcctcggg

SEQ ID NO: 4535 - RNA, 21 nt, Homo sapiens
  source 1..21: mol_type = transcribed RNA
cccgaggagccgggcaggctt

SEQ ID NO: 4536 - RNA, 20 nt, Homo sapiens
  source 1..20: mol_type = transcribed RNA
gttgtgtcagtttatcaaac

SEQ ID NO: 4537 - RNA, 20 nt, Homo sapiens
  source 1..20: mol_type = transcribed RNA
gtttgataaactgacacaac

SEQ ID NO: 4538 - RNA, 22 nt, Homo sapiens
  source 1..22: mol_type = transcribed RNA
tggtctaggattgttggaggag

SEQ ID NO: 4539 - RNA, 22 nt, Homo sapiens
  source 1..22: mol_type = transcribed RNA
ctcctccaacaatcctagacca

SEQ ID NO: 4540 - RNA, 22 nt, Homo sapiens
  source 1..22: mol_type = transcribed RNA
cacacactgcaattacttttgc

SEQ ID NO: 4541 - RNA, 22 nt, Homo sapiens
  source 1..22: mol_type = transcribed RNA
gcaaaagtaattgcagtgtgtg

SEQ ID NO: 4542 - RNA, 25 nt, Homo sapiens
  source 1..25: mol_type = transcribed RNA
aggggtggtgttgggacagctccgt

SEQ ID NO: 4543 - RNA, 25 nt, Homo sapiens
  source 1..25: mol_type = transcribed RNA
acggagctgtcccaacaccacccct

SEQ ID NO: 4544 - RNA, 21 nt, Homo sapiens
  source 1..21: mol_type = transcribed RNA
tgagctaaatgtgtgctggga

SEQ ID NO: 4545 - RNA, 21 nt, Homo sapiens
  source 1..21: mol_type = transcribed RNA
tcccagcacacatttagctca

SEQ ID NO: 4546 - RNA, 23 nt, Homo sapiens
  source 1..23: mol_type = transcribed RNA
gcgaggacccctcggggtctgac

SEQ ID NO: 4547 - RNA, 23 nt, Homo sapiens
  source 1..23: mol_type = transcribed RNA
gtcagaccccgaggggtcctcgc

SEQ ID NO: 4548 - RNA, 25 nt, Homo sapiens
  source 1..25: mol_type = transcribed RNA
gctgggcagggcttctgagctcctt

SEQ ID NO: 4549 - RNA, 25 nt, Homo sapiens
  source 1..25: mol_type = transcribed RNA
aaggagctcagaagccctgcccagc

SEQ ID NO: 4550 - RNA, 20 nt, Homo sapiens
  source 1..20: mol_type = transcribed RNA
gggaaaaggaagggggagga

SEQ ID NO: 4551 - RNA, 20 nt, Homo sapiens
  source 1..20: mol_type = transcribed RNA
tcctcccccttccttttccc

SEQ ID NO: 4552 - RNA, 20 nt, Homo sapiens
  source 1..20: mol_type = transcribed RNA
gcggaaggcggagcggcgga

SEQ ID NO: 4553 - RNA, 20 nt, Homo sapiens
  source 1..20: mol_type = transcribed RNA
tccgccgctccgccttccgc

SEQ ID NO: 4554 - RNA, 18 nt, Homo sapiens
  source 1..18: mol_type = transcribed RNA
gtgaaggcccggcggaga

SEQ ID NO: 4555 - RNA, 18 nt, Homo sapiens
  source 1..18: mol_type = transcribed RNA
tctccgccgggccttcac

SEQ ID NO: 4556 - RNA, 19 nt, Homo sapiens
  source 1..19: mol_type = transcribed RNA
tgagggagtgggtgggagg

SEQ ID NO: 4557 - RNA, 19 nt, Homo sapiens
  source 1..19: mol_type = transcribed RNA
cctcccacccactccctca

SEQ ID NO: 4558 - RNA, 19 nt, Homo sapiens
  source 1..19: mol_type = transcribed RNA
actggaattggagtcaaaa

SEQ ID NO: 4559 - RNA, 19 nt, Homo sapiens
  source 1..19: mol_type = transcribed RNA
ttttgactccaattccagt

SEQ ID NO: 4560 - RNA, 19 nt, Homo sapiens
  source 1..19: mol_type = transcribed RNA
tgagggagttgggtgtata

SEQ ID NO: 4561 - RNA, 19 nt, Homo sapiens
  source 1..19: mol_type = transcribed RNA
tatacacccaactccctca

SEQ ID NO: 4562 - RNA, 19 nt, Homo sapiens
  source 1..19: mol_type = transcribed RNA
tgagggagtggattgtatg

SEQ ID NO: 4563 - RNA, 19 nt, Homo sapiens
  source 1..19: mol_type = transcribed RNA
catacaatccactccctca

SEQ ID NO: 4564 - RNA, 19 nt, Homo sapiens
  source 1..19: mol_type = transcribed RNA
ggctggtcagatgggagtg

SEQ ID NO: 4565 - RNA, 19 nt, Homo sapiens
  source 1..19: mol_type = transcribed RNA
cactcccatctgaccagcc

SEQ ID NO: 4566 - RNA, 19 nt, Homo sapiens
  source 1..19: mol_type = transcribed RNA
agcagggctggggattgca

SEQ ID NO: 4567 - RNA, 19 nt, Homo sapiens
  source 1..19: mol_type = transcribed RNA
tgcaatccccagccctgct

SEQ ID NO: 4568 - RNA, 19 nt, Homo sapiens
  source 1..19: mol_type = transcribed RNA
tgagggaggaggttgggta

SEQ ID NO: 4569 - RNA, 19 nt, Homo sapiens
  source 1..19: mol_type = transcribed RNA
tacccaacctcctccctca

SEQ ID NO: 4570 - RNA, 19 nt, Homo sapiens
  source 1..19: mol_type = transcribed RNA
tgaggtggtaggatgtaga

SEQ ID NO: 4571 - RNA, 19 nt, Homo sapiens
  source 1..19: mol_type = transcribed RNA
tctacatcctaccacctca

SEQ ID NO: 4572 - RNA, 22 nt, Homo sapiens
  source 1..22: mol_type = transcribed RNA
tccgagcctgggtctccctctt

SEQ ID NO: 4573 - RNA, 22 nt, Homo sapiens
  source 1..22: mol_type = transcribed RNA
aagagggagacccaggctcgga

SEQ ID NO: 4574 - RNA, 22 nt, Homo sapiens
  source 1..22: mol_type = transcribed RNA
gggggtccccggtgctcggatc

SEQ ID NO: 4575 - RNA, 22 nt, Homo sapiens
  source 1..22: mol_type = transcribed RNA
gatccgagcaccggggaccccc

SEQ ID NO: 4576 - RNA, 22 nt, Homo sapiens
  source 1..22: mol_type = transcribed RNA
agtcattggagggtttgagcag

SEQ ID NO: 4577 - RNA, 22 nt, Homo sapiens
  source 1..22: mol_type = transcribed RNA
ctgctcaaaccctccaatgact

SEQ ID NO: 4578 - RNA, 19 nt, Homo sapiens
  source 1..19: mol_type = transcribed RNA
cagcaggaggtgaggggag

SEQ ID NO: 4579 - RNA, 19 nt, Homo sapiens
  source 1..19: mol_type = transcribed RNA
ctcccctcacctcctgctg

SEQ ID NO: 4580 - RNA, 22 nt, Homo sapiens
  source 1..22: mol_type = transcribed RNA
actcaaaacccttcagtgactt

SEQ ID NO: 4581 - RNA, 22 nt, Homo sapiens
  source 1..22: mol_type = transcribed RNA
aagtcactgaagggttttgagt

SEQ ID NO: 4582 - RNA, 22 nt, Homo sapiens
  source 1..22: mol_type = transcribed RNA
agacttcccatttgaaggtggc

SEQ ID NO: 4583 - RNA, 22 nt, Homo sapiens
  source 1..22: mol_type = transcribed RNA
gccaccttcaaatgggaagtct

SEQ ID NO: 4584 - RNA, 23 nt, Homo sapiens
  source 1..23: mol_type = transcribed RNA
aaactctacttgtccttctgagt

SEQ ID NO: 4585 - RNA, 23 nt, Homo sapiens
  source 1..23: mol_type = transcribed RNA
actcagaaggacaagtagagttt

SEQ ID NO: 4586 - RNA, 21 nt, Homo sapiens
  source 1..21: mol_type = transcribed RNA
ggctagcaacagcgcttacct

SEQ ID NO: 4587 - RNA, 21 nt, Homo sapiens
  source 1..21: mol_type = transcribed RNA
aggtaagcgctgttgctagcc

SEQ ID NO: 4588 - RNA, 21 nt, Homo sapiens
  source 1..21: mol_type = transcribed RNA
acagtctgctgaggttggagc

SEQ ID NO: 4589 - RNA, 21 nt, Homo sapiens
  source 1..21: mol_type = transcribed RNA
gctccaacctcagcagactgt

SEQ ID NO: 4590 - RNA, 23 nt, Homo sapiens
  source 1..23: mol_type = transcribed RNA
atcccttgcaggggctgttgggt

SEQ ID NO: 4591 - RNA, 23 nt, Homo sapiens
  source 1..23: mol_type = transcribed RNA
acccaacagcccctgcaagggat

SEQ ID NO: 4592 - RNA, 22 nt, Homo sapiens
  source 1..22: mol_type = transcribed RNA
gtgagtctctaagaaaagagga

SEQ ID NO: 4593 - RNA, 22 nt, Homo sapiens
  source 1..22: mol_type = transcribed RNA
tcctcttttcttagagactcac

SEQ ID NO: 4594 - RNA, 21 nt, Homo sapiens
  source 1..21: mol_type = transcribed RNA
tctagtaagagtggcagtcga

SEQ ID NO: 4595 - RNA, 21 nt, Homo sapiens
  source 1..21: mol_type = transcribed RNA
tcgactgccactcttactaga

SEQ ID NO: 4596 - RNA, 22 nt, Homo sapiens
  source 1..22: mol_type = transcribed RNA
atgctgacatatttactagagg

SEQ ID NO: 4597 - RNA, 22 nt, Homo sapiens
  source 1..22: mol_type = transcribed RNA
cctctagtaaatatgtcagcat

SEQ ID NO: 4598 - RNA, 22 nt, Homo sapiens
  source 1..22: mol_type = transcribed RNA
gttctcccaacgtaagcccagc

SEQ ID NO: 4599 - RNA, 22 nt, Homo sapiens
  source 1..22: mol_type = transcribed RNA
gctgggcttacgttgggagaac

SEQ ID NO: 4600 - RNA, 21 nt, Homo sapiens
  source 1..21: mol_type = transcribed RNA
tgggtttacgttgggagaact

SEQ ID NO: 4601 - RNA, 21 nt, Homo sapiens
  source 1..21: mol_type = transcribed RNA
agttctcccaacgtaaaccca

SEQ ID NO: 4602 - RNA, 19 nt, Homo sapiens
  source 1..19: mol_type = transcribed RNA
gtgtctgcttcctgtggga

SEQ ID NO: 4603 - RNA, 19 nt, Homo sapiens
  source 1..19: mol_type = transcribed RNA
tcccacaggaagcagacac

SEQ ID NO: 4604 - RNA, 23 nt, Homo sapiens
  source 1..23: mol_type = transcribed RNA
ctaatagtatctaccacaataaa

SEQ ID NO: 4605 - RNA, 23 nt, Homo sapiens
  source 1..23: mol_type = transcribed RNA
tttattgtggtagatactattag

SEQ ID NO: 4606 - RNA, 23 nt, Homo sapiens
  source 1..23: mol_type = transcribed RNA
tgtgcttgctcgtcccgcccgca

SEQ ID NO: 4607 - RNA, 23 nt, Homo sapiens
  source 1..23: mol_type = transcribed RNA
tgcgggcgggacgagcaagcaca

SEQ ID NO: 4608 - RNA, 25 nt, Homo sapiens
  source 1..25: mol_type = transcribed RNA
agggatcgcgggcgggtggcggcct

SEQ ID NO: 4609 - RNA, 25 nt, Homo sapiens
  source 1..25: mol_type = transcribed RNA
aggccgccacccgcccgcgatccct

SEQ ID NO: 4610 - RNA, 21 nt, Homo sapiens
  source 1..21: mol_type = transcribed RNA
atgatccaggaacctgcctct

SEQ ID NO: 4611 - RNA, 21 nt, Homo sapiens
  source 1..21: mol_type = transcribed RNA
agaggcaggttcctggatcat

SEQ ID NO: 4612 - RNA, 19 nt, Homo sapiens
  source 1..19: mol_type = transcribed RNA
agtgtggctttcttagagc

SEQ ID NO: 4613 - RNA, 19 nt, Homo sapiens
  source 1..19: mol_type = transcribed RNA
gctctaagaaagccacact

SEQ ID NO: 4614 - RNA, 19 nt, Homo sapiens
  source 1..19: mol_type = transcribed RNA
tctaggctggtactgctga

SEQ ID NO: 4615 - RNA, 19 nt, Homo sapiens
  source 1..19: mol_type = transcribed RNA
tcagcagtaccagcctaga

SEQ ID NO: 4616 - RNA, 19 nt, Homo sapiens
  source 1..19: mol_type = transcribed RNA
aagcagctgcctctgaggc

SEQ ID NO: 4617 - RNA, 19 nt, Homo sapiens
  source 1..19: mol_type = transcribed RNA
gcctcagaggcagctgctt

SEQ ID NO: 4618 - RNA, 21 nt, Homo sapiens
  source 1..21: mol_type = transcribed RNA
gtggctgcactcacttccttc

SEQ ID NO: 4619 - RNA, 21 nt, Homo sapiens
  source 1..21: mol_type = transcribed RNA
gaaggaagtgagtgcagccac

SEQ ID NO: 4620 - RNA, 21 nt, Homo sapiens
  source 1..21: mol_type = transcribed RNA
aggaggcagcgctctcaggac

SEQ ID NO: 4621 - RNA, 21 nt, Homo sapiens
  source 1..21: mol_type = transcribed RNA
gtcctgagagcgctgcctcct

SEQ ID NO: 4622 - RNA, 21 nt, Homo sapiens
  source 1..21: mol_type = transcribed RNA
aatggcgccactagggttgtg

SEQ ID NO: 4623 - RNA, 21 nt, Homo sapiens
  source 1..21: mol_type = transcribed RNA
cacaaccctagtggcgccatt

SEQ ID NO: 4624 - RNA, 25 nt, Homo sapiens
  source 1..25: mol_type = transcribed RNA
caaccctaggagagggtgccattca

SEQ ID NO: 4625 - RNA, 25 nt, Homo sapiens
  source 1..25: mol_type = transcribed RNA
tgaatggcaccctctcctagggttg

SEQ ID NO: 4626 - RNA, 22 nt, Homo sapiens
  source 1..22: mol_type = transcribed RNA
ataatacatggttaacctcttt

SEQ ID NO: 4627 - RNA, 22 nt, Homo sapiens
  source 1..22: mol_type = transcribed RNA
aaagaggttaaccatgtattat

SEQ ID NO: 4628 - RNA, 21 nt, Homo sapiens
  source 1..21: mol_type = transcribed RNA
aatattatacagtcaacctct

SEQ ID NO: 4629 - RNA, 21 nt, Homo sapiens
  source 1..21: mol_type = transcribed RNA
agaggttgactgtataatatt

SEQ ID NO: 4630 - RNA, 25 nt, Homo sapiens
  source 1..25: mol_type = transcribed RNA
ggcggagggaagtaggtccgttggt

SEQ ID NO: 4631 - RNA, 25 nt, Homo sapiens
  source 1..25: mol_type = transcribed RNA
accaacggacctacttccctccgcc

SEQ ID NO: 4632 - RNA, 24 nt, Homo sapiens
  source 1..24: mol_type = transcribed RNA
tgcctgggtctctggcctgcgcgt

SEQ ID NO: 4633 - RNA, 24 nt, Homo sapiens
  source 1..24: mol_type = transcribed RNA
acgcgcaggccagagacccaggca

SEQ ID NO: 4634 - RNA, 22 nt, Homo sapiens
  source 1..22: mol_type = transcribed RNA
aggcggggcgccgcgggaccgc

SEQ ID NO: 4635 - RNA, 22 nt, Homo sapiens
  source 1..22: mol_type = transcribed RNA
gcggtcccgcggcgccccgcct

SEQ ID NO: 4636 - RNA, 22 nt, Homo sapiens
  source 1..22: mol_type = transcribed RNA
ggtggcccggccgtgcctgagg

SEQ ID NO: 4637 - RNA, 22 nt, Homo sapiens
  source 1..22: mol_type = transcribed RNA
cctcaggcacggccgggccacc

SEQ ID NO: 4638 - RNA, 20 nt, Homo sapiens
  source 1..20: mol_type = transcribed RNA
accaggaggctgaggcccct

SEQ ID NO: 4639 - RNA, 20 nt, Homo sapiens
  source 1..20: mol_type = transcribed RNA
aggggcctcagcctcctggt

SEQ ID NO: 4640 - RNA, 20 nt, Homo sapiens
  source 1..20: mol_type = transcribed RNA
gtccctgagtgtatgtggtg

SEQ ID NO: 4641 - RNA, 20 nt, Homo sapiens
  source 1..20: mol_type = transcribed RNA
caccacatacactcagggac

SEQ ID NO: 4642 - RNA, 21 nt, Homo sapiens
  source 1..21: mol_type = transcribed RNA
tccggttctcagggctccacc

SEQ ID NO: 4643 - RNA, 21 nt, Homo sapiens
  source 1..21: mol_type = transcribed RNA
ggtggagccctgagaaccgga

SEQ ID NO: 4644 - RNA, 23 nt, Homo sapiens
  source 1..23: mol_type = transcribed RNA
aggaagccctggaggggctggag

SEQ ID NO: 4645 - RNA, 23 nt, Homo sapiens
  source 1..23: mol_type = transcribed RNA
ctccagcccctccagggcttcct

SEQ ID NO: 4646 - RNA, 20 nt, Homo sapiens
  source 1..20: mol_type = transcribed RNA
ctgtatgccctcaccgctca

SEQ ID NO: 4647 - RNA, 20 nt, Homo sapiens
  source 1..20: mol_type = transcribed RNA
tgagcggtgagggcatacag

SEQ ID NO: 4648 - RNA, 23 nt, Homo sapiens
  source 1..23: mol_type = transcribed RNA
tggtgcggagagggcccacagtg

SEQ ID NO: 4649 - RNA, 23 nt, Homo sapiens
  source 1..23: mol_type = transcribed RNA
cactgtgggccctctccgcacca

SEQ ID NO: 4650 - RNA, 22 nt, Homo sapiens
  source 1..22: mol_type = transcribed RNA
caactagactgtgagcttctag

SEQ ID NO: 4651 - RNA, 22 nt, Homo sapiens
  source 1..22: mol_type = transcribed RNA
ctagaagctcacagtctagttg

SEQ ID NO: 4652 - RNA, 23 nt, Homo sapiens
  source 1..23: mol_type = transcribed RNA
aaggagcttacaatctagctggg

SEQ ID NO: 4653 - RNA, 23 nt, Homo sapiens
  source 1..23: mol_type = transcribed RNA
cccagctagattgtaagctcctt

SEQ ID NO: 4654 - RNA, 22 nt, Homo sapiens
  source 1..22: mol_type = transcribed RNA
gggacccagggagagacgtaag

SEQ ID NO: 4655 - RNA, 22 nt, Homo sapiens
  source 1..22: mol_type = transcribed RNA
cttacgtctctccctgggtccc

SEQ ID NO: 4656 - RNA, 22 nt, Homo sapiens
  source 1..22: mol_type = transcribed RNA
gcagagtgcaaacaattttgac

SEQ ID NO: 4657 - RNA, 22 nt, Homo sapiens
  source 1..22: mol_type = transcribed RNA
gtcaaaattgtttgcactctgc

SEQ ID NO: 4658 - RNA, 20 nt, Homo sapiens
  source 1..20: mol_type = transcribed RNA
cggctctgggtctgtgggga

SEQ ID NO: 4659 - RNA, 20 nt, Homo sapiens
  source 1..20: mol_type = transcribed RNA
tccccacagacccagagccg

SEQ ID NO: 4660 - RNA, 22 nt, Homo sapiens
  source 1..22: mol_type = transcribed RNA
gcagcagggtgaaactgacaca

SEQ ID NO: 4661 - RNA, 22 nt, Homo sapiens
  source 1..22: mol_type = transcribed RNA
tgtgtcagtttcaccctgctgc

SEQ ID NO: 4662 - RNA, 21 nt, Homo sapiens
  source 1..21: mol_type = transcribed RNA
tggaggagaaggaaggtgatg

SEQ ID NO: 4663 - RNA, 21 nt, Homo sapiens
  source 1..21: mol_type = transcribed RNA
catcaccttccttctcctcca

SEQ ID NO: 4664 - RNA, 23 nt, Homo sapiens
  source 1..23: mol_type = transcribed RNA
tctgctcataccccatggtttct

SEQ ID NO: 4665 - RNA, 23 nt, Homo sapiens
  source 1..23: mol_type = transcribed RNA
agaaaccatggggtatgagcaga

SEQ ID NO: 4666 - RNA, 23 nt, Homo sapiens
  source 1..23: mol_type = transcribed RNA
tgcaccatggttgtctgagcatg

SEQ ID NO: 4667 - RNA, 23 nt, Homo sapiens
  source 1..23: mol_type = transcribed RNA
catgctcagacaaccatggtgca

SEQ ID NO: 4668 - RNA, 23 nt, Homo sapiens
  source 1..23: mol_type = transcribed RNA
ctgggatctccggggtcttggtt

SEQ ID NO: 4669 - RNA, 23 nt, Homo sapiens
  source 1..23: mol_type = transcribed RNA
aaccaagaccccggagatcccag

SEQ ID NO: 4670 - RNA, 22 nt, Homo sapiens
  source 1..22: mol_type = transcribed RNA
tgagacctctgggttctgagct

SEQ ID NO: 4671 - RNA, 22 nt, Homo sapiens
  source 1..22: mol_type = transcribed RNA
agctcagaacccagaggtctca

SEQ ID NO: 4672 - RNA, 23 nt, Homo sapiens
  source 1..23: mol_type = transcribed RNA
tccagtaccacgtgtcagggcca

SEQ ID NO: 4673 - RNA, 23 nt, Homo sapiens
  source 1..23: mol_type = transcribed RNA
tggccctgacacgtggtactgga

SEQ ID NO: 4674 - RNA, 22 nt, Homo sapiens
  source 1..22: mol_type = transcribed RNA
ggagactgatgagttcccggga

SEQ ID NO: 4675 - RNA, 22 nt, Homo sapiens
  source 1..22: mol_type = transcribed RNA
tcccgggaactcatcagtctcc

SEQ ID NO: 4676 - RNA, 21 nt, Homo sapiens
  source 1..21: mol_type = transcribed RNA
gcaggaacttgtgagtctcct

SEQ ID NO: 4677 - RNA, 21 nt, Homo sapiens
  source 1..21: mol_type = transcribed RNA
aggagactcacaagttcctgc

SEQ ID NO: 4678 - RNA, 22 nt, Homo sapiens
  source 1..22: mol_type = transcribed RNA
ctgccctggcccgagggaccga

SEQ ID NO: 4679 - RNA, 22 nt, Homo sapiens
  source 1..22: mol_type = transcribed RNA
tcggtccctcgggccagggcag

SEQ ID NO: 4680 - RNA, 21 nt, Homo sapiens
  source 1..21: mol_type = transcribed RNA
cctggaaacactgaggttgtg

SEQ ID NO: 4681 - RNA, 21 nt, Homo sapiens
  source 1..21: mol_type = transcribed RNA
cacaacctcagtgtttccagg

SEQ ID NO: 4682 - RNA, 22 nt, Homo sapiens
  source 1..22: mol_type = transcribed RNA
tatacctcagttttatcaggtg

SEQ ID NO: 4683 - RNA, 22 nt, Homo sapiens
  source 1..22: mol_type = transcribed RNA
cacctgataaaactgaggtata

SEQ ID NO: 4684 - RNA, 22 nt, Homo sapiens
  source 1..22: mol_type = transcribed RNA
tggtggtttacaaagtaattca

SEQ ID NO: 4685 - RNA, 22 nt, Homo sapiens
  source 1..22: mol_type = transcribed RNA
tgaattactttgtaaaccacca

SEQ ID NO: 4686 - RNA, 22 nt, Homo sapiens
  source 1..22: mol_type = transcribed RNA
tggatttctttgtgaatcacca

SEQ ID NO: 4687 - RNA, 22 nt, Homo sapiens
  source 1..22: mol_type = transcribed RNA
tggtgattcacaaagaaatcca

SEQ ID NO: 4688 - RNA, 21 nt, Homo sapiens
  source 1..21: mol_type = transcribed RNA
tcctcttctccctcctcccag

SEQ ID NO: 4689 - RNA, 21 nt, Homo sapiens
  source 1..21: mol_type = transcribed RNA
ctgggaggagggagaagagga

SEQ ID NO: 4690 - RNA, 20 nt, Homo sapiens
  source 1..20: mol_type = transcribed RNA
gtagaggagatggcgcaggg

SEQ ID NO: 4691 - RNA, 20 nt, Homo sapiens
  source 1..20: mol_type = transcribed RNA
ccctgcgccatctcctctac

SEQ ID NO: 4692 - RNA, 22 nt, Homo sapiens
  source 1..22: mol_type = transcribed RNA
gtgaacgggcgccatcccgagg

SEQ ID NO: 4693 - RNA, 22 nt, Homo sapiens
  source 1..22: mol_type = transcribed RNA
cctcgggatggcgcccgttcac

SEQ ID NO: 4694 - RNA, 22 nt, Homo sapiens
  source 1..22: mol_type = transcribed RNA
gactgacacctctttgggtgaa

SEQ ID NO: 4695 - RNA, 22 nt, Homo sapiens
  source 1..22: mol_type = transcribed RNA
ttcacccaaagaggtgtcagtc

SEQ ID NO: 4696 - RNA, 21 nt, Homo sapiens
  source 1..21: mol_type = transcribed RNA
tactcaaaaagctgtcagtca

SEQ ID NO: 4697 - RNA, 21 nt, Homo sapiens
  source 1..21: mol_type = transcribed RNA
tgactgacagctttttgagta

SEQ ID NO: 4698 - RNA, 21 nt, Homo sapiens
  source 1..21: mol_type = transcribed RNA
ttaatatcggacaaccattgt

SEQ ID NO: 4699 - RNA, 21 nt, Homo sapiens
  source 1..21: mol_type = transcribed RNA
acaatggttgtccgatattaa

SEQ ID NO: 4700 - RNA, 22 nt, Homo sapiens
  source 1..22: mol_type = transcribed RNA
atccgcgctctgactctctgcc

SEQ ID NO: 4701 - RNA, 22 nt, Homo sapiens
  source 1..22: mol_type = transcribed RNA
ggcagagagtcagagcgcggat

SEQ ID NO: 4702 - RNA, 20 nt, Homo sapiens
  source 1..20: mol_type = transcribed RNA
gtgagtcagggtggggctgg

SEQ ID NO: 4703 - RNA, 20 nt, Homo sapiens
  source 1..20: mol_type = transcribed RNA
ccagccccaccctgactcac

SEQ ID NO: 4704 - RNA, 22 nt, Homo sapiens
  source 1..22: mol_type = transcribed RNA
tgcccttaaaggtgaacccagt

SEQ ID NO: 4705 - RNA, 22 nt, Homo sapiens
  source 1..22: mol_type = transcribed RNA
actgggttcacctttaagggca

SEQ ID NO: 4706 - RNA, 22 nt, Homo sapiens
  source 1..22: mol_type = transcribed RNA
tcttctctgttttggccatgtg

SEQ ID NO: 4707 - RNA, 22 nt, Homo sapiens
  source 1..22: mol_type = transcribed RNA
cacatggccaaaacagagaaga

SEQ ID NO: 4708 - RNA, 22 nt, Homo sapiens
  source 1..22: mol_type = transcribed RNA
aaattattgtacatcggatgag

SEQ ID NO: 4709 - RNA, 22 nt, Homo sapiens
  source 1..22: mol_type = transcribed RNA
ctcatccgatgtacaataattt

SEQ ID NO: 4710 - RNA, 22 nt, Homo sapiens
  source 1..22: mol_type = transcribed RNA
ttcaacgggtatttattgagca

SEQ ID NO: 4711 - RNA, 22 nt, Homo sapiens
  source 1..22: mol_type = transcribed RNA
tgctcaataaatacccgttgaa

SEQ ID NO: 4712 - RNA, 22 nt, Homo sapiens
  source 1..22: mol_type = transcribed RNA
ctatacaacttactactttccc

SEQ ID NO: 4713 - RNA, 22 nt, Homo sapiens
  source 1..22: mol_type = transcribed RNA
gggaaagtagtaagttgtatag

SEQ ID NO: 4714 - RNA, 22 nt, Homo sapiens
  source 1..22: mol_type = transcribed RNA
tgaggtagtaagttgtattgtt

SEQ ID NO: 4715 - RNA, 22 nt, Homo sapiens
  source 1..22: mol_type = transcribed RNA
aacaatacaacttactacctca

SEQ ID NO: 4716-4733 - skipped (18 entries)

SEQ ID NO: 4734 - DNA, 3131 bp, Adeno-associated virus
  source 1..3131: mol_type = genomic DNA
gcggccgcgaattcgcccttggctgcgtcaactggaccaatgagaactttcccttcaatgattgcgtcgacaagatggtgatctggtgggaggagggcaagatgacggccaaggtcgtggagtccgccaaggccattctcggcggcagcaaggtgcgcgtggaccaaaagtgcaagtcgtccgcccagatcgaccccacccccgtgatcgtcacctccaacaccaacatgtgcgccgtgattgacgggaacagcaccaccttcgagcaccagcagcctctccaggaccggatgtttaagttcgaactcacccgccgtctggagcacgactttggcaaggtgacaaagcaggaagtcaaagagttcttccgctgggccagtgatcacgtgaccgaggtggcgcatgagttttacgtcagaaagggcggagccagcaaaagacccgcccccgatgacgcggataaaagcgagcccaagcgggcctgcccctcagtcgcggatccatcgacgtcagacgcggaaggagctccggtggactttgccgacaggtaccaaaacaaatgttctcgtcacgcgggcatgcttcagatgctgtttccctgcaaaacgtgcgagagaatgaatcggaatttcaacatttgcttcacacacggggtcagagactgctcagagtgtttccccggcgtgtcagaatctcaaccggtcgtcagaaagaggacgtatcggaaactccgtgcgattcatcatctgctggggcgggctcccgagattgcttgctcggcctgcgatctggtcaacgtggacctggatgactgtgtttctgagcaataaatgacttaaaccaggtatggctgccgatggttatcttccagattggctcgaggacaacctctctgagggcattcgcgagtggtgggcgctgaaacctggagccccgaagcccaaagccaaccagcaaaagcaggacgacggccggggtctggtgcttcctggctacaagtacctcggacccttcaacggactcgacaagggggagcccgtcaacgcggcggacgcagcggccctcgagcacgacaaggcttacgaccagcagctgcaggcgggtgacaatccgtacctgcggtataaccacgccgacgccgagtttcaggagcgtctgcaagaagatacgtcttttgggggcaacctcgggcgagcagtcttccaggccaagaagcgggttctcgaacctctcggtctggttgaggaaggcgctaagacggctcctggaaagaagagaccggtagagccatcaccccagcgttctccagactcctctacgggcatcggcaagaaaggccaacagcccgccagaaaaagactcaattttggtcagactggcgactcagagtcagttccagaccctcaacctctcggagaacctccagcagcgccctctggtgtgggacctaatacaatggctgcaggcggtggcgcaccaatggcagacaataacgaaggcgccgacggagtgggtagttcctcgggaaattggcattgcgattccacatggctgggcgacagagtcatcaccaccagcacccgaacctgggccctgcccacctacaacaaccacctctacaagcaaatctccaacgggacatcgggaggagccaccaacgacaacacctacttcggctacagcaccccctgggggtattttgactttaacagattccactgccacctttcaccacgtgactggcagcgactcatcaacaacaactggggattccgacccaagagactcagcttcaagctcttcaacatccaggtcaaggaggtcacgcagaatgaaggcaccaagaccatcgccaataacctcaccagcaccatccaggtgtttacggactcggagtaccagctgccgtacgttctcggctctgtccaccagggctgcctgcctccgttcccggcggacgtgttcatgattccccagtacggctacctaacactcaacaacggtagtcaggccgtgggacgctcctccttctactgcctggaatactttccttcgcagatgctgagaaccggcaacaacttccagtttacttacaccttcgaggacgtgcctttccacagcagctacgcccacagctagagcttggaccggctgatgaatcctctgattgaccagtacctgtactacttgtctcggactcaaacaacaggaggcacggcaaatacgcagactctgggcttcagccaaggtgggcctaatacaatggccaatcaggcaaagaactggctgccaggaccctgttaccgccaacaacgcgtctcaacgacaaccgggcaaaacaacaatagcaactttgcctggactgctgggaccaaataccatctgaatggaagaaattcattggctaatcctggcatcgctatggcaacacacaaagacgacgaggagcgtttttttcccagtaacgggatcctgatttttggcaaacaaaatgctgccagagacaatgcggattacagcgatgtcatgctcaccagcgaggaagaaatcaaaaccactaaccctgtggctacagaggaatacggtatcgtggcagataacttgcagcagcaaaacacggctcctcaaattggaactgtcaacagccagggggccttacccggtatggtctggcagaaccgggacgtgtacctgcagggtcccatctgggccaagattcctcacacggacggcaacttccacccgtctccgctgatgggcggctttggcctgaaacatcctccgcctcagatcctgatcaagaacacgcctgtacctgcggatcctccgaccaccttcaaccagtcaaagctgaactctttcatcacgcaatacagcaccggacaggtcagcgtggaaattgaatgggagctgcagaaggaaaacagcaagcgctggaaccccgagatccagtacacctccaactactacaaatctataagtgtggactttgctgttaatacagaaggcgtgtactctgaaccccgccccattggcacccgttacctcacccgtaatctgtaattgcctgttaatcaataaaccggttgattcgtttcagttgaactttggtctctgcgaagggcgaattc

SEQ ID NO: 4735 - protein, 728 aa, Adeno-associated virus
MAADGYLPDWLEDNLSEGIREWWDLKPGAPKPKANQQKQDDGRGLVLPGYKYLGPFNGLDKGEPVNEADAAALEHDKAYDKQLEQGDNPYLKYNHADAEFQERLQEDTSFGGNLGRAVFQAKKRVLEPLGLVEEGAKTAPGKKRPIESPDSSTGIGKKGQQPAKKKLNFGQTGDSESVPDPQPLGEPPAAPSGLGSGTMAAGGGAPMADNNEGADGVGNASGNWHCDSTWLGDRVITTSTRTWALPTYNNHLYKQISSQSGATNDNHFFGYSTPWGYFDFNRFHCHFSPRDWQRLINNNWGFRPRKLRFKLFNIQVKEVTTNDGVTTIANNLTSTIQVFSDSEYQLPYVLGSAHQGCLPPFPADVFMIPQYGYLTLNNGSQSMGRSSFYCLEYFPSQMLRTGNNFEFSYTFEEVPFHSSYAHSQSLDRLMNPLIDQYLYYLARTQSTTGSTRELQFHQAGPNTMAEQSKNWLPGPCYRQQRLSKNIDSNNNSNFAWTGATKYHLNGRNSLTNPGVAMATNKDDEGQFFPINGVLVFGKTGAANKTTLENVLMTSEEEIKTTNPVATEEYGVVSSNLQSSTAGPQTQTVNSQGALPGMVWQNRDVYLQGPIWAKIPHTDGNFHPSPLMGGFGLKHPPPQILIKNTPVPANPPGVFTPALFASFITQYSTGQVSVEIEWELQKENSKRWNPEIQYTSNYAKSNNVEFAVNNEGVYTEPRPIGTRYLTRNL

SEQ ID NO: 4736 - protein, 644 aa, Adeno-associated virus
  MOD_RES 434: note = Any amino acid
KAYDQQLKAGDNPYLRYNHADAEFQERLQEDTSFGGNLGRAVFQAKKRVLEPLGLVETPAKTAPGKKRPVDSPDSTSGIGKKGQQPAKKRLNFGQTGDSESVPDPQPIGEPPAGPSGLGSGTMAAGGGAPMADNNEGADGVGNASGNWHCDSTWLGDRVITTSTRTWALPTYNNHLYKQISSQSAGSTNDNVYFGYSTPWGYFDFNRFHCHFSPRDWQRLINNNWGFRPKKLNFKLFNIQVKEVTTNDGVTTIANNLTSTVQVFSDSEYQLPYVLGSAHQGCLPPFPADVFMIPQYGYLTLNNGSQSVGRSSFYCLEYFPSQMLRTGNNFTFSYTFEDVPFHSSYAHSQSLDRLMNPLIDQYLYYLARTQSNAGGTAGNRELQFYQGGPTTMAEQAKNWLPGPCFRQQRVSKTLDQNNNSNFAWTGATKYHLNXRNSLVNPGVAMATHKDDEERFFPSSGVLIFGKTGAANKTTLENVLMTNEEEIRPTNPVATEEYGIVSSNLQAASTAAQTQVVNNQGALPGMVWQNRDVYLQGPIWAKIPHTDGNFHPSPLMGGFGLKHPPPQILIKNTPVPANPPEVFTPAKFASFITQYSTGQVSVEIEWELQKENSKRWNPEIQYTSNFDKQTGVDFAVDSQGVYSEP

SEQ ID NO: 4737 - DNA, 1933 bp, Adeno-associated virus
  source 1..1933: mol_type = genomic DNA
caaggcctacgaccagcagctcaaagcgggtgacaatccgtacctgcggtataaccacgccgacgccgagtttcaggagtgtcttcaagaagatacgtcttttgggggcaacctcgggcgagcagtcttccaggccaaaaagcgggttctcgaacctcttggtctggttgagacgccagctaagacggcacctggaaagaagcgaccggtagactcgccagactccacctcgggcatcggcaagaaaggccagcagcccgcgaaaaagagactcaactttgggcagactggcgactcagagtcagtccccgaccctcaaccaatcggagaaccaccagcaggcccctctggtctgggatctggtacaatggttgcaggcggtggcgcaccaatggctgacaataacgagggcgccgacggagtgggtaatgcctcaggaaattggcattgcgattccacatggctgggcgacagagtcatcaccaccagcacccgaacctgggccctgcccacctacaacaaccacctctacaagcaaatctccagtcagtcagcagggagcaccaacgataacgtctatttcggctacagcaccccctgggggtattttgacttcaacagattccattgccacttctcaccacgtgactggcagcgacttatcaacaacaactggggattccggcccaagaagctcaacttcaagctcttcaacatccaggtcaaggaggtcacgacgaatgacggtgtcacaaccatcgctaataaccttaccagcacggttcaggtcttttcggactcggaatatcaactgccgtacgtcctcggctccgcgcaccagggctgcctgcctccgttcccggcagacgtgttcatgattccgcagtacggatacctgactctgaacaatggcagccaatcggtaggccgttcctccttctactgcctggagtactttccttctcagatgctgagaacgggcaacaacttcacctttagctacaccttcgaggacgtgcctttccacagcagctacgcgcacagccagagtctggaccggctgatgaatcccctcatcgaccagtacctgtactacttggccagaacacagagcaacgcaggaggtactgctggcaatcgggaactgcagttttatcagggcggacctaccaccatggccgaacaagcaaagaactggctgcccggaccttgcttccggcaacagagagtatccaagacgctggatcaaaataacaacagcaactttgcctggactggtgccacaaaataccatttaaatggaagaaattcattggttaatcccggtgtcgccatggcaacccacaaggacgacgaggaacgcttctccccttcgagcggagttctaatttttggcaaaactggagcagctaataaaactacattagaaaacgtgctcatgacaaatgaagaagaaattcgtcctaccaacccggtagctaccgaggaatacgggattgtaagcagcaacttgcaggcggctagcaccgcagcccagacacaagttgttaacaaccagggagccttacctggcatggtctggcagaaccgggacgtgtacctgcaaggtcccatttgggccaagattcctcacacggacggcaactttcacccgtctcctctaatgggtggctttggactgaaacacccgcctccccagatcctgatcaaaaacacgccggtacctgctaatcctccagaagtgtttactcctgccaagtttgcttccttcatcacgcagtacagcaccgggcaagtcagcgttgagatcgagtgggagctgcagaaagagaacagcaagcgctggaacccagagattcagtacacctccaactttgacaaacagactggagtggactttgctgttgacagccagggtgtttactctgagcct

SEQ ID NO: 4738 - protein, 644 aa, Adeno-associated virus
KAYDQQLKAGDNPYLRYNHADAEFQECLQEDTSFGGNLGRAVFQAKKRVLEPLGLVETPAKTAPGKKRPVDSPDSTSGIGKKGQQPAKKRLNFGQTGDSESVPDPQPIGEPPAGPSGLGSGTMVAGGGAPMADNNEGADGVGNASGNWHCDSTWLGDRVITTSTRTWALPTYNNHLYKQISSQSAGSTNDNVYFGYSTPWGYFDFNRFHCHFSPRDWQRLINNNWGFRPKKLNFKLFNIQVKEVTTNDGVTTIANNLTSTVQVFSDSEYQLPYVLGSAHQGCLPPFPADVFMIPQYGYLTLNNGSQSVGRSSFYCLEYFPSQMLRTGNNFTFSYTFEDVPFHSSYAHSQSLDRLMNPLIDQYLYYLARTQSNAGGTAGNRELQFYQGGPTTMAEQAKNWLPGPCFRQQRVSKTLDQNNNSNFAWTGATKYHLNGRNSLVNPGVAMATHKDDEERFSPSSGVLIFGKTGAANKTTLENVLMTNEEEIRPTNPVATEEYGIVSSNLQAASTAAQTQVVNNQGALPGMVWQNRDVYLQGPIWAKIPHTDGNFHPSPLMGGFGLKHPPPQILIKNTPVPANPPEVFTPAKFASFITQYSTGQVSVEIEWELQKENSKRWNPEIQYTSNFDKQTGVDFAVDSQGVYSEP

SEQ ID NO: 4739 - DNA, 1933 bp, Adeno-associated virus
  source 1..1933: mol_type = genomic DNA
caaggcctacgaccagcagctcaaagcgggtgacaatccgtacctgcggtataaccacgccgacgccgagtttcaggagcgtcttcaagaagatacgtcttttgggggcaacctcgggcgagcagtcttccaggccaaaaagcgggttctcgaacctcttggtctggttgagacgccagctaagacggcacctggaaagaagcgaccggtagactcgccagactccacctcgggcatcggcaagaaaggccagcagcccgcgaaaaagagactcaactttgggcagactggcgactcagagccagtccccgaccctcaaccaatcggagaaccaccagcaggcccctctggtctgggatctggtacaatggctgcaggcggtggcgcaccaatggctgacaataacgagggcgccgacggagtgggtaatgcctcaggaaattggcattgcgattccacacggctgggcgacagagtcatcaccaccagcacccgaacctgggccctgcccacctacaacaaccacctctacaagcaaatctccagtcagtcagcagggagcaccaacgataacgtctatttcggctacagcaccccctgggggtattttgacttcaacagattccattgccacttctcaccacgtgactggcagcgacttatcaacaacaactggggattccggcccaagaagctcaacttcaagctcttcaacatccaggtcaaggaggtcacgacgaatgacggcgtcacaaccatcgctaataaccttaccagcacggttcaggtcttttcggactcggaatatcaactgccgtacgtcctcggctccgcgcaccagggctgcctgcctccgttcccggcagacgtgttcatgattccgcagtacggatacctgactctgaacaatggcagccaatcggtaggccgttcctccttctactgcctggagtactttccttctcagatgctgagaacgggcaacaacttcacctttagctacaccttcgaggacgtgcctttccacagcagctacgcgcacagccagagtctgggccggctgatgaatcccctcatcgaccagtacctgtactacttggccagaacacagagcaacgcaggaggtactgctggcaatcgggaactgcagttttatcagggcggacctaccaccatggccgaacaagcaaagaactggctgcccggaccttgcttccggcaacagagagtatccaagacgctggatcaaaataacaacagcaactttgcctggactggtgccacaaaataccatttaaatggaagaaattcattggttaatcccggtgtcgccatggcaacccacaaggacgacgaggaacgcttcttcccttcgagcggagttctaatttttggcaaaactggagcagctaataaaactacattagaaaacgtgctcatgacaaatgaagaagaaattcgtcctaccaacccggtagctaccgaggaatacgggattgtaagcagcaacttgcaggcggctagcaccgcagcccagacacaagttgttaacaaccagggagccttacctggcatggtctggcagaaccgggacgtgtacctgcaaggtcccatttgggccaagattcctcacacggacggcaactttcacccgtctcctctaatgggtggctttggactgaaacacccgcctccccagatcctgatcaaaaacacaccggtacctgctaatcctccagaagtgtttactcctgccaagtttgcttccttcatcacgcagtacagcaccgggcaagtcagcgttgagatcgaatgggagctgcagaaagagaacagcaagcgctggaacccagagattcagtacacctccaactttgacaaacagactggagtggactttgctgttgacagccagggtgtttactctgagcct

SEQ ID NO: 4740 - protein, 644 aa, Adeno-associated virus
KAYDQQLKAGDNPYLRYNHADAEFQERLQEDTSFGGNLGRAVFQAKKRVLEPLGLVETPAKTAPGKKRPVDSPDSTSGIGKKGQQPAKKRLNFGQTGDSEPVPDPQPIGEPPAGPSGLGSGTMAAGGGAPMADNNEGADGVGNASGNWHCDSTRLGDRVITTSTRTWALPTYNNHLYKQISSQSAGSTNDNVYFGYSTPWGYFDFNRFHCHFSPRDWQRLINNNWGFRPKKLNFKLFNIQVKEVTTNDGVTTIANNLTSTVQVFSDSEYQLPYVLGSAHQGCLPPFPADVFMIPQYGYLTLNNGSQSVGRSSFYCLEYFPSQMLRTGNNFTFSYTFEDVPFHSSYAHSQSLGRLMNPLIDQYLYYLARTQSNAGGTAGNRELQFYQGGPTTMAEQAKNWLPGPCFRQQRVSKTLDQNNNSNFAWTGATKYHLNGRNSLVNPGVAMATHKDDEERFFPSSGVLIFGKTGAANKTTLENVLMTNEEEIRPTNPVATEEYGIVSSNLQAASTAAQTQVVNNQGALPGMVWQNRDVYLQGPIWAKIPHTDGNFHPSPLMGGFGLKHPPPQILIKNTPVPANPPEVFTPAKFASFITQYSTGQVSVEIEWELQKENSKRWNPEIQYTSNFDKQTGVDFAVDSQGVYSEP

SEQ ID NO: 4741 - DNA, 1933 bp, Adeno-associated virus; identical to SEQ ID NO: 4739
  source 1..1933: mol_type = genomic DNA

SEQ ID NO: 4742 - protein, 644 aa, Adeno-associated virus; identical to SEQ ID NO: 4740

SEQ ID NO: 4743 - DNA, 1933 bp, Adeno-associated virus
  source 1..1933: mol_type = genomic DNA
caaggcctacgaccagcagctcaaagcgggtgacaatccgtacctgcggtataaccacgccgacgccgagtttcaggagcgtcttcaagaagatacgtcttttgggggcaacctcgggcgagcagtcttccaggccaaaaagcgggttctcgaacctcttggtctggttgagacgccagctaagacggcacctggaaagaagcgaccggtagactcgccagactccacctcgggcatcggcaagaaaggccagcagcccgcgaaaaagagactcaactttgggcagactggcgactcagagtcagtccccgaccctcaaccaatcggagaaccaccagcaggcccctctggtctgggatctggtacaatggctgcaggcggtggcgcaccaatggctgacaatagcgagggcgccgacggagtgggtaatgcctcaggaaattggcattgcgattccacatggctgggcgacagagtcatcaccaccagcacccgaacctgggccctgcccacctacaacaaccacctctacaagcaaatctccagtcagtcagcagggagcaccaacgataacgtctatttcggctacagcaccccctgggggtattttgacttcaacagattccattgccacttctcaccacgtgactggcagcgacttatcaacaacaactggggattccggcccaagaagctcaacttcaagctcttcaacatccaggtcaaggaggtcacgacgaatgacggtgtcacaaccatcgctaataaccttaccagcacggttcaggtcttttcggactcggaatatcaactgccgtacgtcctcggctccgcgcaccagggctgcctgcctccgttcccggcagacgtgttcatgattccgcagtacggatacctgactctgaacaatggcagccaatcggtaggccgttcctccttctactgcctggagtactttccttctcagatgctgagaacgggcaacaacttcacctttagctacaccttcgaggacgtgcctttccacagcagctacgcgcacagccagagtctggaccggctgatgaatcccctcatcgaccagtacctgtactacttggccagaacacagagcaacgcaggaggtactgctggcaatcgggaactgcagttttatcagggcggacctaccaccatggccgaacaagcaaagaactggctgcccggaccttgcttccggcaacagagagtatccaagacgctggatcaaaataacaacagcaactttgcctggactggtgccacaaaataccatttaaatggaagaaattcattggttaatcccggtgtcgccatggcaacccacaaggacgacgaggaacgcttcttcccttcgagcggagttctaatttttggcaaaactggagcagctaataaaactacattagaaaacgtgctcatgacaaatgaagaagaaattcgtcctaccaacccggtagctaccgaggaatacgggattgtaagcagcaacttgcaggcggctagcaccgcagcccagacacaagttgttaacaaccagggagccttacctggcatggtctggcagaaccgggacgtgtacctgcaaggtcccatttgggccaagattcctcacacggacggcaactttcacccgtctcctctaatgggtggctttggactgaaacacccgcctccccagatcctgatcaaaaacacaccggtacctgctaatcctccagaagtgtttactcctgccaagcttgcttccttcatcacgcagtacagcaccgggcaagtcagcgttgagatcgagtgggagctgcagaaagagaacagcaagcgctggaacccagagattcagtacacctccaactttgacaaacagactggagtggactttgctgttgacagccagggtgtttactctgagcct

SEQ ID NO: 4744 - protein, 644 aa, Adeno-associated virus
KAYDQQLKAGDNPYLRYNHADAEFQERLQEDTSFGGNLGRAVFQAKKRVLEPLGLVETPAKTAPGKKRPVDSPDSTSGIGKKGQQPAKKRLNFGQTGDSESVPDPQPIGEPPAGPSGLGSGTMAAGGGAPMADNSEGADGVGNASGNWHCDSTWLGDRVITTSTRTWALPTYNNHLYKQISSQSAGSTNDNVYFGYSTPWGYFDFNRFHCHFSPRDWQRLINNNWGFRPKKLNFKLFNIQVKEVTTNDGVTTIANNLTSTVQVFSDSEYQLPYVLGSAHQGCLPPFPADVFMIPQYGYLTLNNGSQSVGRSSFYCLEYFPSQMLRTGNNFTFSYTFEDVPFHSSYAHSQSLDRLMNPLIDQYLYYLARTQSNAGGTAGNRELQFYQGGPTTMAEQAKNWLPGPCFRQQRVSKTLDQNNNSNFAWTGATKYHLNGRNSLVNPGVAMATHKDDEERFFPSSGVLIFGKTGAANKTTLENVLMTNEEEIRPTNPVATEEYGIVSSNLQAASTAAQTQVVNNQGALPGMVWQNRDVYLQGPIWAKIPHTDGNFHPSPLMGGFGLKHPPPQILIKNTPVPANPPEVFTPAKLASFITQYSTGQVSVEIEWELQKENSKRWNPEIQYTSNFDKQTGVDFAVDSQGVYSEP

SEQ ID NO: 4745 - DNA, 1933 bp, Adeno-associated virus
  source 1..1933: mol_type = genomic DNA
caaggcctacgaccagcagctcaaagcgggtgacaatccgtacctgcggtataaccacgccgacgccgagtttcaggagcgtcttcaagaagatacgtcttttgggggcaacctcgggcgagcagtcttccaggccaaaaagcgggttctcgaacctcttggtctggttgagacgccagctaagacggcacctggaaagaagcgaccggtagactcgccagactccacctcgggcatcggcaagaaaggccagcagcccgcgaaaaagagactcaactttgggcagactggcgactcagagtcagtccccgaccctcaaccaatcggagaaccaccagcaggcccctctggtctgggatctggtacaatggctgcaggcggtggcgcaccaatggctgacaataacgagggcgccgacggagtgggtaatgcctcaggaaattggcattgcgattccacatggctgggcgacagagtcatcaccaccagcacccgaacctgggccctgcccacctacaacaaccacctctacaagcaaatctccagtcagtcagcagggagcaccaacgataacgtctatttcggctacagcaccccctgggggtattttgacttcaacagattccattgccacttctcaccacgtgactggcagcgacttatcaacaacaactggggattccggcccaagaagctcaacttcaagctcttcaacatccaggtcaaggaggtcacgacgaatgacggcgtcacaaccatcgctaataaccttaccagcacggttcaggtcttttcggacccggaatatcaactgccgtacgtcctcggctccgcgcaccagggctgcctgcctccgttcccggcagacgtgttcatgattccgcagtacggatacctgactctgaacaatggcagccaatcggtaggccgttcctccttctactgcctggagtactttccttctcagatgctgagaacgggcaacaacttcacctttagctacaccttcgaggacgtgcctttccacagcagctacgcgcacagccagagtctggaccggctgatgaatcccctcatcgaccagtacctgtactacttggccagaacacagagcaacgcaggaggtactgctggcaatcgggaactgcagttttatcagggcggacctaccaccatggccgaacaagcaaagaactggctgcccggaccttgcttccggcaacagagagtatccaagacgctggatcaaaataacaacagcaactttgcctggactggtgccacaaaataccatttaaatggaagaaattcattggttaatcccggtgtcgccatggcaacccacaaggacgacgaggaacgcttcttcccttcgagcggagttctaatttttggcaaaactggagcagctaataaaactacattagaaaacgtgctcatgacaaatgaagaagaaattcgtcctaccaacccggtagctaccgaggaatacgggattgtaagcagcaacttgcaggcggctagcaccgcagcccagacacaagttgttaacaaccagggagccttacctggcatggtctggcagaaccgggacgtgtacctgcaaggtcccatttgggccaagattcctcacacggacggcaactttcacccgtctcctctaatgggtggctttggactgaaacacccgcctccccagatcctgatcaaaaacacaccggtacctgctaatcctccagaagtgtttactcctgccaagattgcttccttcatcacgcagtacagcaccgggcaagtcagcgttgagatcgagtgggagctgcagaaagagaacagcaagcgctggaacccagagattcagtacacctccaactttgacaaacagactggagtggactttgctgttgacagccagggtgtttactctgagcct

SEQ ID NO: 4746 - protein, 644 aa, Adeno-associated virus
KAYDQQLKAGDNPYLRYNHADAEFQERLQEDTSFGGNLGRAVFQAKKRVLEPLGLVETPAKTAPGKKRPVDSPDSTSGIGKKGQQPAKKRLNFGQTGDSESVPDPQPIGEPPAGPSGLGSGTMAAGGGAPMADNNEGADGVGNASGNWHCDSTWLGDRVITTSTRTWALPTYNNHLYKQISSQSAGSTNDNVYFGYSTPWGYFDFNRFHCHFSPRDWQRLINNNWGFRPKKLNFKLFNIQVKEVTTNDGVTTIANNLTSTVQVFSDPEYQLPYVLGSAHQGCLPPFPADVFMIPQYGYLTLNNGSQSVGRSSFYCLEYFPSQMLRTGNNFTFSYTFEDVPFHSSYAHSQSLDRLMNPLIDQYLYYLARTQSNAGGTAGNRELQFYQGGPTTMAEQAKNWLPGPCFRQQRVSKTLDQNNNSNFAWTGATKYHLNGRNSLVNPGVAMATHKDDEERFFPSSGVLIFGKTGAANKTTLENVLMTNEEEIRPTNPVATEEYGIVSSNLQAASTAAQTQVVNNQGALPGMVWQNRDVYLQGPIWAKIPHTDGNFHPSPLMGGFGLKHPPPQILIKNTPVPANPPEVFTPAKIASFITQYSTGQVSVEIEWELQKENSKRWNPEIQYTSNFDKQTGVDFAVDSQGVYSEP

SEQ ID NO: 4747 - protein, 728 aa, Adeno-associated virus
MAADGYLPDWLEDNLSEGIREWWDLKPGAPKPKANQQKQDDGRGLVLPGYKYLRPFNGLDKGEPVNEADAAALEHDKAYDKQLEQGDNPYLKYNHADAEFQERLQEDTSFGGNLGRAVFQAKKRVLEPLGLVEEVAKTAPGKKRPIESPDSSTGIGKKGQQPAKKKLNFGQTGDSESVPDPQPLGEPPAAPSGLGSGTMAAGGGAPMADNNEGADGVGNASGNWHCDSTWLGDRVITTSTRTWALPTYNNHLYKQISSQSGATNDNHFFSYSTPWGYFDFNRFHCHFSPRDWQRLINNNWGFRPRKLRFKLFNIQVKEVTTNDGVTTIANNLTSTIQVFSDSEYQLPYVLGSAHQGCLPPFPADVFMIPQYGYLTLNNGSQSVGRSSFYCLEYFPSQMLRTGNNFEFSYTFEEVPFHSSYVHSQSLDRLMNPLIDQYLYYLARTQSTTGSTRELQFHQAGPNTMAEQSKNWLPGPCYRQQRLSKNIDSNNNSNFAWTGATKYHLNGRNSLTNPGVAMATNKDDEDQFFPINGVLVFGKTGAANKTTLENVLMTSEEEIKTTNPVATEEYGVVSSNLQSSTAGPQTQTVNSQGALPGMVWQNRDVCLQGPIWAKIPHTDGNFHPSPLMGGFGLKHPPPQILIKNTPVPANPPEVFTPAKFASFITQYSTGQVSVEIEWELQKENSKRWNPEIQYTSNYAKSNNVEFAVNNEGVYTEPRPIGTRYLTRNL

SEQ ID NO: 4748 - protein, 728 aa, Adeno-associated virus
MAADGYLPDWLEDNLSEGIREWWDLKPGAPKPKANQQKQDDGRGLVLPGYKYLGPFNGLDKGEPVNEADAAALEHDKAYDKQLEQGDNPYLKYNHADAEFQERLQEDTSFGGNLGRAVFQAKKRVLEPLGLVEEGAKTASGKKRPIESPDSSTGIGKKGQQPAKKKLNFGQTGDSESVPDPQPLGEPPAAPSGLGSGTMAAGGGAPMADNNEGADGVGNASGNWHCDSTWLGDRVITTSTRTWALPTYNNHLYKQISSQSGATNDNHFFGYSTPWGYFDFNRFHCHFSPRDWQRLINNNWGFRPRKLRFKLFNIQVKEVTTNDGVTTIANNLTSTIQVFSDSEYQLPYVLGSAHQGCLPPFPADVFMIPQYGYLTLNNGSQSVGRSSFCCLEYFPSQMLRTGNNFEFSYTFEEVPFHSSYAHSQSLDRLMNPLIDQYLYYLARTQSTTGSTRELQFHQAGPNTVAEQSKNWLPGPCYRQQRLSKNIDSNNNSNFAWTGATKYHLNGRNSLTNPGVAMATNKDDEDQFLPINGVLVFGKTGAANKTTLENVLMTSEEEIKTTNPVATEEYGVVSSNLQSSTAGPRTQTVNSQGALPGMVWQNRDVYLQGPIWAEIPHTDGNFHPSPLMGGFGLKHPPPQILIKNTPVPANPPEVFTPAKFASFITQYSTGQVSVEIEWELQKENSKRWNPEIQYTSNYAKSNNVEFAVNNEGVYTEPRPIGTRYLTRNL

SEQ ID NO: 4749 - protein, 738 aa, Adeno-associated virus
MAADGYLPDWLEDNLSEGIREWWALKPGAPKPKANQQKQDDGRGLVLPGYKYLGPFNGLDKGEPVNAADAAALEHDKAYDQQLKAGDNPYLRYNHADAEFQERLQEDTSFGGNLGRAVFQAKKRVLEPLGLVEEGAKTAPGKKRPVEPSPQRSPDSTTGIGKKGQQPAKKRLNFGQTGDSESVPDPQPIGEPPAGPSGLGSGTMAAGGGAPMADNNEGADGVGSSSGNWHCDSTWLGDRVITTSTRTWALPTYNNHLYKQISNGTSGGSTNDNTYFGYSTPWGYFDFNRFHCHFSPRDWQRLINNNWGFRPKRLNFKLFNIQVKEVTQNEGTKTIANNLTSTIQVFTDSEYQLPYVLGSARQGCLPPFPADVFMIPQYGYLTLNNGSQAVGRSSFYCLEYFPSQMLRTGNNFEFSYQFEDVPFHSSYAHSQSLDRLMNPLIDQYLYYLSRTQSTGGTAGTQQLLFSQAGPNNMSAQAKNWLPGPCYRQQRVSTTLSQNNNSNFAWTGATKYHLNGRDSLVNPGVAMATHKDDEERFFPSSGVLMFGKQGAGKGNVDYSSVMLTSEEEIKTTNPVATEQYGVVADNLQQQNAAPIVGAVNSQGALPGMVWQNRDVYLQGPIWAKIPHTDGNFHPSPLMGGFGLKHPPPQILIKNTPVPADPPTTFSQAKLASFITQYSTGQVSVEIEWELQKENSKRWNPEIQYTSNYYKSTNVDFAVNTDGTYSEPRPIGTRYLTRNL

SEQ ID NO: 4750 - DNA, 3121 bp, Adeno-associated virus
  source 1..3121: mol_type = genomic DNA
gaattcgcccttcgcagagaccaaagttcaactgaaacgaatcaaccggtttattgattaacaagcaattacagattacgggtgaggtaacgggtgccgatggggcgaggctcagaataagtgccatctgtgttaacagcaaagtccacatttgtagatttgtagtagttggaagtgtattgaatctctgggttccagcgtttgctgttttctttctgcagctcccattcaatttccacgctgacctgtccggtgctgtactgcgtgatgaacgacgccagcttagcttgactgaaggtagttggaggatccgcgggaacaggtgtattcttaatcaggatctgaggaggcgggtgtttcagtccaaagccccccatcagcggcgagggatgaaagtttccgtccgtgtgaggaatcttggcccagataggaccctgcaggtacacgtcccggttctgccagaccatgccaggtaaggctccttgactgttgacggcccctacaataggagcggcgttttgctgttgcaggttatcggccaccacgccgtactgttctgtggccactgggttggtggttttaatttcttcctcactggttagcataacgctgctatagtccacgttgccttttccagctccctgtttcccaaacattaagactccgctggacggaaaaaatcgctcttcgtcgtccttgtgggttgccatagcgacaccgggatttaccagagagtctctgccattcagatgatacttggtggcaccggtccaggcaaagttgctgttgttattttgcgacagtgtcgtggagacgcgttgctgccggtagcagggcccgggtagccagtttttggcctgagccgacatgttattaggcccggcctgagaaaatagcaactgctgagttcctgcggtacctcccgtggactgagtccgagacaggtagtacaggtactggtcgatgagggggttcatcagccggtccaggctttggctgtgcgcgtagctgctgtgaaaaggcacgtcctcaaactggtagctgaactcaaagttgttgcccgttctcagcatttgagaaggaaagtactccaggcagtagaaggaggaacggcccacggcctgactgccattgttcagagtcaggtacccgtactgaggaatcatgaagacgtccgccgggaacggaggcaggcagccctggcgcgcagagccgaggacgtacgggagctggtattccgagtccgtaaagacctgaatcgtgctggtaaggttattggcgatggtcttggtgccttcattctgcgtgacctccttgacctggatgttgaagagcttgaagttgagtctcttgggccggaatccccagttgttgttgatgagtcgctgccagtcacgtggtgagaagtggcagtggaatctgttaaagtcaaaatacccccagggggtgctgtagccgaagtaggtgttgtcgttggtgcttcctcccgaagtcccgttggagatttgcttgtagaggtggttgttgtaggtggggagggcccaggttcgggtgctggtggtgatgactctgtcgcccagccatgtggaatcgcaatgccaatttcctgaggaactacccactccgtcggcgccttcgttattgtctgccattggagcgccaccgcctgcagccattgtaccagatcccagaccagaggggcctgcggggggttctccgattggttgagggtcgggcactgactctgagtcgccagtctgcccaaagttgagtctctttttcgcgggctgctggcctttcttgccgatgcccgtagtggagtctggagaacgctggggtgatggctctaccggtctcttctttccaggagccgtcttagcgccttcctcaaccagaccgagaggttcgagaacccgcttcttggcctggaagactgctcgtccgaggttgcccccaaaagacgtatcttcttgcagacgctcctgaaactcggcgtcggcgtggttataccgcaggtacggattgtcacccgctttgagctgctggtcgtaggccttgtcgtgctcgagggccgctgcgtccgccgcgttgacgggctcccccttgtcgagtccgttgaagggtccgaggtacttgtagccaggaagcaccagaccccggccgtcgtcctgcttttgctggttggctttgggcttcggggctccaggtttcagcgcccaccactcgcgaatgccctcagagaggttgtcctcgagccaatctggaagataaccatcggcagccatacctgatctaaatcatttattgttcaaagatgcagtcatccaaatccacattgaccagatcgcaggcagtgcaagcgtctggcacctttcccatgatatgatgaatgtagcacagtttctgatacgcctttttgacgacagaaacgggttgagattctgacacgggaaagcactctaaacagtctttctgtccgtgagtgaagcagatatttgaattctgattcattctctcgcattgtctgcagggaaacagcatcagattcatgcccacgtgacgagaacatttgttttggtacctgtccgcgtagttgatcgaagcttccgcgtctgacgtcgatggctgcgcaactgactcgcgcacccgtttgggctcacttatatctgcgtcactgggggcgggtcttttcttggctccaccctttttgacgtagaattcatgctccacctcaaccacgtgatcctttgcccaccggaaaaagtctttgacttcctgcttggtgaccttcccaaagtcatgatccagacggcgggtgagttcaaatttgaacatccggtcttgcaacggctgctggtgttcgaaggtcgttgagttcccgtcaatcacggcgcacatgttggtgttggaggtgacgatcacgggagtcgggtctatctgggccgaggacttgcatttctggtccacgcgcaccttgcttcctccgagaatggctttggccgactccacgaccttggcggtcatcttcccctcctcccaccagatcaccatcttgtcgacacagtcgttgaagggaaagttctcattggtccagttgacgcagccgtagaagggcgaattc

SEQ ID NO: 4751 - DNA, 3121 bp, Adeno-associated virus
  source 1..3121: mol_type = genomic DNA
gaattcgcccttctacggctgcgtcaactggaccaatgagaactttcccttcaacgactgtgtcgacaagatggtgatctggtgggaggaggggaagatgaccgccaaggtcgtggagtcggccaaagccattctcggaggaagcaaggtgcgcgtggaccagaaatgcaagtcctcggcccagatagacccgactcccgtgatcgtcacctccaacaccaacatgtgcgccgtgattgacgggaactcaacgaccttcgaacaccagcagccgttgcaagaccggatgttcaaatttgaactcacccgccgtctggatcatgactttgggaaggtcaccaagcaggaagtcaaagactttttccggtgggcaaaggatcacgtggttgaggtggagcacgaattctacgtcaaaaagggtggagccaagaaaagacccgcccccagtgacgcagatataagtgagcccaaacgggtgcgcgagtcagttgcgcagccatcgacgtcagacgcggaagcttcgatcaactacgcagacaggtaccaaaacaaatgttctcgtcacgcgggcatgaatctgatgctgtttccctgcagacaatgcgagagaatgaatcagaattcaaatatctgcttcactcacggacagaaagactgtttagagtgctttcccgtgtcagaatctcaacccgtttctgtcgtcaaaaaggcgtatcagaaactgtgctacattcatcatatcatgggaaaggtgccagacgcttgcactgcctgcgatctggtcgatgtggatttggatgactgcatctttgaacaataaatgatttaaatcaggtatggctgccgatggttatcttccagattggctcgaggacaacctctctgagggcattcgcgagtggtgggcgctgaaacctggagccccgaagcccaaagccaaccagcaaaagcaggacggcggccggggtctggtgcttcctggctacaagtacctcggacccttcaacggactcgacaagggggagcccgtcaacgcggcggacgcagcggccctcgagcacgacaaggcctacgaccagcagctcaaagcgggtgacaatccgtacctgcggtataaccacgccgacgccgagtttcaggagcgtctgcaagaagatacgtcttttgggggcaacctcgggcgagcagtcttccaggccaagaagcgggttctcgaacctctcggtctggttgaggaaggcgctaagacggctcctggaaagaagagaccggtagagccatcaccccagcgttctccagactcctctacgggcatcggcaagaaaggccagcagcccgcgaaaaagagactcaactttgggcagactggcgactcagagtcagtgcccgaccctcaaccaatcggagaaccccccgcaggcccctctggtctgggatctggtacaatggctgcaggcggtggcgctccaatggcagacaataacgaaggcgccgacggagtgggtagttcctcaggaaattggcattgcgattccacatggctgggcgactgagtcatcaccaccagcacccgaacctgggccctccccacctacaacaaccacctctacaagcaaatctccaacgggacttcgggaggaagcaccaacgacaacacctacttcggctacagcaccccctgggggtattttgactttaacagattccactgccacttctcaccacgtgactggcagcgactcatcaacaacaactggggattccggcccaagagactcaacttcaagctcttcaacatccaggtcaaggaggtcacgcagaatgaaggcaccaagaccatcgccaataaccttaccagcacgattcaggtctttacggactcggaataccagctcccgtacgtcctcggctctgcgcaccagggctgcctgcctccgttcccggcggacgtcttcatgattcctcagtacgggtacctgactctgaacaatggcagtcaggccgtgggccgttcctccttctactgcctggagtactttccttctcaaatgctgagaacgggcaacaactttgagttcagctaccagtttgaggacgtgccttttcacagcagctacgcgcacagccaaagcctggaccggctgatgaaccccctcatcgaccagtacctgtactacctgtctcggactcagtccacgggaggtaccgcaggaactcagcagttgctattttctcaggccgggcctaataacatgtcggctcaggccaaaaactggctacccgggccctgctaccggcagtaacgcgtctccacgacactgtcgcaaaataacaacagcaactttgtctggaccggtgccaccaagtatcatctgaatggcagagactctctggtagatcccggtgtcgctatggcaacccacaaggacgacgaagagcgattttttccgtccagcggagtcataatgtttgggaaacagggagctggaaaagacaacgtggactatagcagcgtcatgctaaccagtgaggaagaaattaaaaccaccaacccagtggccacagaacagtacggcgtggtggccgataacctgcaacagcaaaacgccgctcctattgtaggggccgtcaacagtcaaggagccttacctggcatggtctggcagaaccgggacgtgtacctgcagggtcctacctgggccaagattcctcacacggacggaaactttcatccctcgccgctgatgggaggctttggactgaaacacccgcctcctcagatcctgattaagaatacacctgttcccgcggatcctccaactaccttcagtcaagctaagctggcgtcgttcatcacgcagtacagcaccggacaggtcagcgtggaaattgaatgggagctgcaggaagaaaacagcaaacgctggaacccagagattcaatacacttccaactactacaaatctacaaatgtggactttgctgttaacacagatggcacttattctgagcctcgccccatcggcacccgttacctcacccgtaatctgtaattgcttgttaatcaataaaccggttgattcgtttcagttgaactttggtctctgcgaagggcgaattc

SEQ ID NO: 4752 - protein, 738 aa, Adeno-associated virus
MAADGYLPDWLEDNLSEGIREWWALKPGAPKPKANQQKQDDGRGLVLPGYKYLGPFNGLDKGEPVNAADAAALEHDKAYDQQLKAGDNPYLRYNHADAEFQERLQEDTSFGGNLGRAVFQAKKRVLEPLGLVEEGAKTAPGKKRPVEPSPQRSPDSSTGIGKKGQQPAKKRLNFGQTGDSESVPDPQPIGEPPAGPSGLGSGTMAAGGGAPMADNNEGADGVGSSSGNWHCDSTWLGDGVITTSTRTWALPTYNNHLYKQISNGTSGGSTNDNTYFGYSTPWGYFDFNRFHCHFSPRDWQRLINNNWGFRPKSLNFKLFNIQVKEVTQNEGTKTIANNLTSTIQVFTDSEYQLPYVLGSAHQGCLPPFPADVFMIPQYGYLTLNNGSQAVGRSSFYCLEYFPSQMLRTGNNFEFSYQFEDVPFHSSYAHSQSLDRLMNPLIDQYLYYLSRTQSTGGTAGTQQLLFSQAGPNNMSAQAKNWLPGPCYRQQRVSTTLSQNDNSNFAWTGATKYHLNGRDSLVNPGVAMATHKDDEERFFPSSGVLMFGKQGAGKDNVDYSSVMLTSEEEIKTTNPVATEQYGVVADNLQQQNAAPIVGAVNSQGALPGMVWQNRDVYLQGPIWAKIPHTDGNFHPSPLMGGFGLKHPPPQILIKNTPVPADPPTTFSQAKLASFITQYSTGQVSVEIEWELQKENSKRWNPEIQYTSNYYKSTNVDFAVNTDGTYSEPRPIGTRYLTRNL

SEQ ID NO: 4753 - DNA, 3121 bp, Adeno-associated virus
  source 1..3121: mol_type = genomic DNA
gaattcgcccttcgcgagaccaaagttcaactgaaacgaatcaaccggtttattgattaacaagcaattacagattacgggtgaggtaacgggtgccgatggggcgaggctcagaataagtgccatctgtgttaacagcaaagtccacatttgtagatttgtagtagttggaagtgtattgaatctctgggttccagcgtttgctgttttctttctgcagctcccattcaatttccacgctgacctgtccggtgctgtactgcgtgatgaacgacgccagcttagcttgactgaaggtagttggaggatccgcgggaacaggtgtattcttaatcaggatctgaggaggcgggtgtttcagtccaaagcctcccatcagcggcgagggatgaaagtttccgtccgtgtgaggaatcttggcccagataggaccctgcaggtacacgtcccggttctgccagaccatgccaggtaaggctccttgactgttgacggcccctacaataggagcggcgttttgctgttgcaggttatcggccaccacgccgtactgttctgtggccactgggttggtggttttaatttcttcctcactggttagcataacgctgctatagtccacgttgtcttttccagctccctgtttcccaaacattaagactccgctggacggaaaaaatcgctcttcgtcgtccttgtgggttgccatagcgacaccgggatttaccagagagtctctgccattcagatgatacttggtggcaccggtccaggcaaagttgctgttgtcattttgcgacagtgtcgtggagacgcgttgctgccggtagcagggcccgggtagccagtttttggcctgagccgacatgttattaggcccggcctgagaaaatagcaactgctgagttcctgcggtacctcccgtggactgagtccgagacaggtagtacaggtactggtcgatgagggggttcatcagccggtccaggctttggctgtgcgcgtagctgctgtgaaaaggcacgtcctcaaactggtagctgaactcaaagttgttgcccgttctcagcatttgagaaggaaagtactccaggcagtagaaggaggaacggcccacggcctgactgccattgttcagagtcaggtacccgtactgaggaatcatgaagacgtccgccgggaacggaggcaggcagccctggtgcgcagagccgaggacgtacgggagctggtattccgagtccgtaaagacctgaatcgtgctggtaaggttattggcgatggtcttggtgccttcattctgcgtgacctccttgacctggatgttgaagagcttgaagttgaggctcttgggccggaatccccagttgttgttgatgagtcgctgccagtcacgtggtgagaagtggcagtggaatctgttaaagtcaaaatacccccagggggtgctgtagccgaagtaggtgttgtcgttggtgcttcctcccgaagtcccgttggagatttgcttgtagaggtggttgttgtaggtggggagggcccaggttcgggtgctggtggtgatgactccgtcgcccagccatgtggaatcgcaatgccaatttcctgaggaactacccactccgtcggcgccttcgttattgtctgccattggagcgccaccgcctgcagccattgtaccagatcccagaccagaggggcctgcggggggttctccgattggttgagggtcgggcactgactctgagtcgccagtctgcccaaagttgagtctctttttcgcgggctgctggcctttcttgccgatgcccgtagaggagtctggagaacgctggggtgatggctctaccggtctcttctttccaggagccgtcttagcgccttcctcaaccagaccgagaggttcgagaacccgcttcttggcctggaagactgctcgcccgaggttgcccccaaaagacgtatcttcttgcagacgctcctgaaactcggcgtcggcgtggttataccgcaggtacggattgtcacccgctttgagctgctggtcgtaggccttgtcgtgctcgagggccgctgcgtccgccgcgttgacgggctcccccttgtcgagtccgttgaagggtccgaggtacttgtagccaggaagcaccagaccccggccgtcgtcctgcttttgctggttggctttgggcttcggggctccaggtttcagcgcccaccactcgcgaatgccctcagagaggttgtcctcgagccaatctggaagataaccatcggcagccatacctgatttaaatcatttattgttcaaagatgcagtcatccaaatccacattgaccagatcgcaggcagtgcaagcgtctggcacctttcccatgatatgatgaatgtagcacagtttctgatacgcctttttgacgacagaaacgggttgagattctgacacgggaaagcactctaaacagtctttctgtccgtgagtgaagcagatatttgaattctgattcattctctcgcattgtctgcagggaaacagcatcagattcatgcccacgtgacgagaacatttgttttggtacctgtctgcgtagttgatcgaagcttccgcgtctgacgtcgatggctgcgcaactgactcgcgcacccgtttgggctcacttatatctgcgtcactgggggcgggtcttttcttggctccaccctttttgacgtagaattcatgctccacctcaaccacgtgatcctttgcccaccggaaaaagtctttgacttcctgcttggtgaccttcccaaagtcatgatccagacggcgggtgagttcaaatttgaacatccggtcttgcaacggctgctggtgttcgaaggtcgttgagttcccgtcaatcacggcgcacatgttggtgttggaggtgacgatcacgggagtcgggtctatctgggccgaggacttgcatttctggtccacgcgcaccttgcttcctccgagaatggctttggccgactccacgaccttggcggtcatcttcccctcctcccaccagatcaccatcttgtcgacacagtcgttgaagggaaagttctcattggtccagttgacgcagccgtagaaagggcgaattc

SEQ ID NO: 4754 - DNA, 2211 bp, Adeno-associated virus
  source 1..2211: mol_type = genomic DNA
atggctgctgacggttatcttccagattggctcgaggacaacctttctgaaggcattcgtgagtggtgggctctgaaacctggagtccctcaacccaaagcgaaccaacaacaccaggacaaccgtcggggtcttgtgcttccgggttacaaatacctcggacccggtaacggactcgacaaaggagagccggtcaacgaggcggacgcggcagccctcgaacacgacaaagcttacgaccagcagctcaaggccggtgacaacccgtacctcaagtacaaccacgccgacgccgagtttcaggagcgtcttcaagaagatacgtcttttgggggcaaccttggcagagcagtcttccaggccaaaaagaggatccttgagcctcttggtctggttgaggaagcagctaaaacggctcctggaaagaagggggctgtagatcagtctcctcaggaaccggactcatcatctggtgttggcaaatcgggcaaacagcctgccagaaaaagactaaatttcggtcagactggagactcagagtcagtcccagaccctcaacctctcggagaaccaccagcagcccccacaagtttgggatctaatacaatggcttcaggcggtggcgcaccaatggcagacaataacgagggtgccgatggagtgggtaattcctcaggaaattggcattgcgattcccaatggctgggcgacagagtcatcaccaccagcaccagaacctgggccctgcccacttacaacaaccatctctacaagcaaatctccagccaatcaggagcttcaaacgacaaccactactttggctacagcaccccttgggggtattttgactttaacagattccactgccacttctcaccacgtgactggcagcgactcattaacaacaactggggattccggcccaagaaactcagcttcaagctcttcaacatccaagttagaggggtcacgcagaacgatggcacgacgactattgccaataaccttaccagcacggttcaagtgtttacggactcggagtatcagctcccgtacgtgctcgggtcggcgcaccaaggctgtctcccgccgtttccagcggacgtcttcatggtccctcagtatggatacctcaccctgaacaacggaagtcaagcggtgggacgctcatccttttactgcctggagtacttcccttcgcagatgctaaggactggaaataacttccaattcagctataccttcgaggatgtaccttttcacagcagctacgctcacagccagagtttggatcgcttgatgaatcctcttattgatcagtatctgtactacctgaacagaacgcaaggaacaacctctggaacaaccaaccaatcacggctgctttttagccaggctgggcctcagtctatgtctttgcaggccagaaattggctacctgggccctgctaccggcaacagagactttcaaagactgctaacgacaacaacaacagtaactttccttggacagcggccagcaaatatcatctcaatggccgcgactcgctggtgaatccaggaccagctatggccagtcacaaggacgatgaagaaaaatttttccctatgcacggcaatctaatatttggcaaagaagggacaacggcaagtaacgcagaattagataatgtaatgattacggatgaagaagagattcgtaccaccaatcctgtggcaacagagcagtatggaactgtggcaaataacttgcagagctcaaatacagctcccacgactggaactgtcaatcatcagggggccttacctggcatggtgtggcaagatcgtgacgtgtaccttcaaggacctatctgggcaaagattcctcacacggatggacactttcatccttctcctctgatgggaggctttggactgaaacatccgcctcctcaaatcatgatcaaaaatactccggtaccggcaaatcctccgacgactttcagcccggccaagtttgcttcatttatcactcagtactccactggacaggtcagcgtggaaattgagtgggagctacagaaagaaaacagcaaacgttggaatccagagattcagtacacttccaactacaacaagtctgttaatgtggactttactgtagacactaatggtgtttatagtgaacctcgccctattggaacccggtatctcacacgaaacttgtga

SEQ ID NO: 4755 - protein, 737 aa, Adeno-associated virus
MAADGYLPDWLEDNLSEGIREWWDLKPGAPKPKANQQKQDNGRGLVLPGYKYLGPFNGLDKGEPVNAADAAALEHDKAYDQQLNAGDNPYLRYNHADAEFQERLQEDTSFGGNLGRAVFQAKKRVLEPLGLVEEGAKTAPAKKRPVEPSPQRSPDSSTGIGKKGQQPARKRLNFGQTGDSESVPDPQPLGEPPAAPSSVGSGTVAAGGGAPMADNNEGADGVGNASGNWHCDSTWLGDRVITTSTRTWALPTYNNHLYEQISSETAGSTNDNTYFGYSTPWGYFDFNRFHCHFSPRDWQRLINNNWGFRPKKLRFKLFNIQVKEVTTNDGVTTIANNLTSTIQVFSDSEYQLPYVLGSAHQGCLPPFPADVFMIPQYGYLTLNNGSQSVGRSSFYCLEYFPSQMLRTGNNFEFSYSFEDVPFHSSYAHSQSLDRLMNPLIDQYLYYLARTQSDPGGTAGNRELQFYQGGPSTMAEQAKNWLPGPCFRQQRVSKTLDQNNNSNFAWTGATKYHLNGRNSLVNPGVAMATHKDDEDRFFPSSGVLIFGKTGATNKTTLENVLMTNEEEIRPTNPVATEEYGIVSSNLQAANTAAQTQVVNNQGALPGMVWQNRDVYLQGPIWAKIPHTDGNFHPSPLMGGFGLKHPPPQILIKNTPVPANPPEVFTPAKFASFITQYSTGQVSVEIEWELQKENSKRWDPEIQYTSNFEKQTGVDFAVDSQGVYSEPRPIGTRYLTRNL

SEQ ID NO: 4756 - DNA, 2211 bp, Adeno-associated virus
  source 1..2211: mol_type = genomic DNA
atggctgctgacggttatcttccagattggctcgaggacaacctttctgaaggcattcgtgagtggtgggctctgaaacctggagtccctcaacccaaagcgaaccaacaacaccaggacaaccgtcggggtcttgtgcttccgggttacaaatacctcggacccggtaacggactcgacaaaggagagccggtcaacgaggcggacgcggcagccctcgaacacgacaaagcttacgaccagcagctcaaggccggtgacaacccgtacctcaagtacaaccacgccgacgccgagtttcaggagcgtcttcaagaagatacgtcttttgggggcaaccttggcagagcagtcttccaggccaaaaagaggatccttgagcctcttggtctggttgaggaagcagctaaaacggctcctggaaagaagggggctgtagatcagtctcctcaggaaccggactcatcatctggtgttggcaaatcgggcaaacagcctgccagaaaaagactaaatttcggtcagactggagactcagagtcagtcccagaccctcaacctctcggagaaccaccagcagcccccacaagtttgggatctaatacaatggcttcaggcggtggcgcaccaatggcagacaataacgagggtgccgatggagtgggtaattcctcaggaaattggcattgcgattcccaatggctgggcgacagagtcatcaccaccagcaccagaacctgggccctgcccacttacaacaaccatctctacaagcaaatctccagccaatcaggagcttcaaacgacaaccactactttggctacagcaccccttgggggtattttgactttaacagattccactgccacttctcaccacgtgactggcagcgactcattaacaacaactggggattccggcccaagaaactcagcttcaagctcttcaacatccaagttagaggggtcacgcagaacgatggcacgacgactattgccaataaccttaccagcacggttcaagtgtttacggactcggagtatcagctcccgtacgtgctcgggtcggcgcaccaaggctgtctcccgccgtttccagcggacgtcttcatggtccctcagtatggatacctcaccctgaacaacggaagtcaagcggtgggacgctcatccttttactgcctggagtacttcccttcgcagatgctaaggactggaaataacttccaattcagctataccttcgaggatgtaccttttcacagcagctacgctcacagccagagtttggatcgcttgatgaatcctcttattgatcagtatctgtactacctgaacagaacgcaaggaacaacctctggaacaaccaaccaatcacggctgctttttagccaggctgggcctcagtctatgtctttgcaggccagaaattggctacctgggccctgctaccggcaacagagactttcaaagactgctaacgacaacaacaacagtaactttccttggacagcggccagcaaatatcatctcaatggccgcgactcgctggtgaatccaggaccagctatggccagtcacaaggacgatgaagaaaaatttttccctatgcacggcaatctaatatttggcaaagaagggacaacggcaagtaacgcagaattagataatgtaatgattacggatgaagaagagattcgtaccaccaatcctgtggcaacagagcagtatggaactgtggcaaataacttgcagagctcaaatacagctcccacgactggaactgtcaatcatcagggggccttacctggcatggtgtggcaagatcgtgacgtgtaccttcaaggacctatctgggcaaagattcctcacacggatggacactttcatccttctcctctgatgggaggctttggactgaaacatccgcctcctcaaatcatgatcaaaaatactccggtaccggcaaatcctccgacgactttcagcccggccaagtttgcttcatttatcactcagtactccactggacaggtcagcgtggaaattgagtgggagctacagaaagaaaacagcaaacgttggaatccagagattcagtacacttccaactacaacaagtctgttaatgtggactttactgtagacactaatggtgtttatagtgaacctcgccctattggaacccggtatctcacacgaaacttgtaa

SEQ ID NO: 4757 - protein, 736 aa, Adeno-associated virus
MAADGYLPDWLEDNLSEGIREWWALKPGVPQPKANQQHQDNRRGLVLPGYKYLGPGNGLDKGEPVNEADAAALEHDKAYDQQLKAGDNPYLKYNHADAEFQERLQEDTSFGGNLGRAVFQAKKRILEPLGLVEEAAKTAPGKKGAVDQSPQEPDSSSGVGKSGKQPARKRLNFGQTGDSESVPDPQPLGEPPAAPTSLGSNTMASGGGAPMADNNEGADGVGNSSGNWHCDSQWLGDRVITTSTRTWALPTYNNHLYKQISSQSGASNDNHYFGYSTPWGYFDFNRFHCHFSPRDWQRLINNNWGFRPKKLSFKLFNIQVRGVTQNDGTTTIANNLTSTVQVFTDSEYQLPYVLGSAHQGCLPPFPADVFMVPQYGYLTLNNGSQAVGRSSFYCLEYFPSQMLRTGNNFQFSYTFEDVPFHSSYAHSQSLDRLMNPLIDQYLYYLNRTQGTTSGTTNQSRLLFSQAGPQSMSLQARNWLPGPCYRQQRLSKTANDNNNSNFPWTAASKYHLNGRDSLVNPGPAMASHKDDEEKFFPMHGNLIFGKEGTTASNAELDNVMITDEEEIRTTNPVATEQYGTVANNLQSSNTAPTTGTVNHQGALPGMVWQDRDVYLQGPIWAKIPHTDGHFHPSPLMGGFGLKHPPPQIMIKNTPVPANPPTTFSPAKFASFITQYSTGQVSVEIEWELQKENSKRWNPEIQYTSNYNKSVNVDFTVDTNGVYSEPRPIGTRYLTRNL

SEQ ID NO: 4758 - protein, 728 aa, Adeno-associated virus
MAADGYLPDWLEDNLSEGIREWWDLKPGAPKPKANQQKQDDGRGLVLPGYKYLGPFNGLDKGEPVNEADAAALEHDKAYDKQLEQGDNPYLKYNHADAEFQERLQEDTSFGGNLGRAVFQAKKRVLEPLGLVEEGAKTAPGKKRPIESPDSSTGIGRKGQQPAKKKLNFGQTGDSESVPDPQPIGEPPAGPSGLGSGTMAAGGGAPMADNNEGADGVGNASGNWHCDSTWLGDRVITTSTRTWALPTYNNHLYKQISSQSGATNDNHFFGYSTPWGYFDFNRFHCHFSPRDWQRLINNNWGFRPRKLRFKLFNIQVKEVTTNDGVTTIANNLTSTIQVFSDSEYQLPYVLGSAHQGCLPPFPADVFMIPQYGYLTLNNGSQSVGRSSFYCLEYFPSQMLRTGNNFEFSYTFEEVPFHSSYAHSQSLDRLMNPLIDQYLYYLARTQSTTGSTRELQFHQAGPNTMAEQSKNWLPGPCYRQQRLSKNIDSNNNSNFAWTGATKYHLNGRNSLTNPGVAMATNKDDEDQFFPINGVLVFGKTGAANKTTLENVLMTSEEEIKTTNPVATEEYGVVSSNLQSSTAGPQTQTVNSQGALPGMVWQNRDVYLQGPIWAKIPHTDGNFHPSPLMGGFGLKHPPPQILIKNTPVPANPPEVFTPAKFASFITQYSTGQVSVEIEWELQKENSKRWNPEIQYTSNYAKSNNVEFAVNNEGVYTEPRPIGTRYLTRNL

SEQ ID NO: 4759 - protein, 728 aa, Adeno-associated virus
MAADGYLPDWLEDNLSEGIREWWDLKPGAPKPKANQQKQDDGRGLVLPGYKYLGPFNGLDKGEPVNAADAAALEHDKAYDQQLKAGDNPYLRYNHADAEFQERLQEDTSFGGNLGRAVFQAKKRVLEPLGLVEEGAKTAPGKKRPIESPDSSTGIGKKGQQPAKKKLNFGQTGDSESVPDPQPIGEPPAGPSGLGSGTMAAGGGAPMADNNEGADGVGNASGNWHCDSTWLGDRVITTSTRTWALPTYNNHLYKQISSQSGATNDNHFFGYSTPWGYFDFNRFHCHFSPRDWQRLINNNWGFRPRKLRFKLFNIQVKEVTTNDGVTTIANNLTSTIQVFSDSEYQLPYVLGSAHQGCLPPFPADVFMIPQYGYLTLNNGSQSVGRSSFYCLEYFPSQMLRTGNNFEFSYTFEEVPFHSSYAHSQSLDRLMNPLIDQYLYYLARTQSTTGSTRELQFHQAGPNTMAEQSKNWLPGPCYRRQRLSKDIDSNNNSNFAWTGATKYHLNGRNSLTNPGVAMATNKDDEDQFFPINGVLVFGKTGAANKTTLENVLMTSEEEIKTTNPVATEEYGVVSSNLQSSTAGPQTQTVNSQGALPGMVWQNRDVYLQGPIWAKIPHTDGNFHPSPLMGGFGLKHPPPQILIKNTPVPANPPEVFTPAKFASFITQYSTGQVSVEIEWELQKENSKRWNPEIQYTSNYAKSNNVEFAVNNEGVYTEPRPIGTRYLTRNL

SEQ ID NO: 4760 - protein, 685 aa, Adeno-associated virus
MAADGYLPDWLEDNLSEGIREWWDLKPGAPKPKANQQKQDDGRGLVLPGYKYLGPFNGLDKGEPVNEADAAALEHDKAYDKQLEQGDNPYLKYNHADAEFQERLQEDTSFGGNLGRAVFQAKKRVLEPLGLVEEGAKTAPGKKRPVEPSPQRSPDSSTGIGKTGQQPAKKRLNFGQTGDSESVPDPQPIGEPPAGPSGLGSGTMAAGGGAPMADNNEGADGVGSSSGNWHCDSTWLGDRVITTSTRTWALPTYNNHLYKQISNGTSGGSTNDNTYFGYSTPWGYFDFNRFHCHFSPRDWQRLINNNWGFRPKRLNFKLFNIQVKEVTQNEGTKTIANNLTSTIQVFTDSEYQLPYVLGSAHQGCLPPFPADVFMIPQYGYLTLNNGSQAVGRSSFYCLEYFPSQMLRTGNNFEFSYQFEDVPFHSSYAHSQSLDRLTNPLIDQYLYYLARTQSTTGSTRGLQFHQAGPNTMAEQSKNWLPGPCYRQQRLSKNIDSNNNSNFAWTGATKYHLNGRNSLTNPGVAMATNKDDEDQFFPINGVLVFGKTGAANKTTLENVLMTSEEEIKTTNPVATEEYGVVSSNLQSSTAGPQTQTVNSQGALPGMVWQNRDVYLQGPIWAKIPHTDGNFHPSPLMGGFGLKHPPPQILIKYTSNYYKSTNVDFAVNTEGTYSEPRPIGTRYLTRNL

SEQ ID NO: 4761 - protein, 733 aa, Adeno-associated virus
MAADGYLPDWLEDNLSEGIREWWDLKPGAPKPKANQQKQDDGRGLVLPGYKYLGPFNGLDKGEPVNAADAAALEHDKAYDQQLKAGDNPYLRYNHADAEFQERLQEDTSFGGNLGRAVFQAKKRVLEPLGLVEEGAKTAPGKKRPIESPDSSTGIGKKGQQPAKKKLNFGQTGDSESVPDPQPIGEPPAGPSGLGSGTMAAGGGAPMADNNEGADGVGSSSGNWHCDSTWLGDRVITTSTRTWALPTYNNHLYKQISNGTSGGSTNDNTYFGYSTPWGYFDFNRFHCHFSPRDWQRLINNNWGFRPKRLNFKLFNIQVKEVTQNEGTKTIANNLTSTIQVFTDSEYQLPYVLGSAHQGCLPPFPADVFMIPQYGYLTLNNGSQAVGRSSFYCLEYFPSQMLRTGNNFEFSYQFEDVPFHSSYAHSQSLDRLMNPLIDQYLYYLSRTQSTGGTAGTQQLLFSQAGPNNMSAQAKNWLPGPCYRQQRVSTTVSQNNNSNFAWTGATKYHLNGRDSLVNPGVAMATHKGDEERFFPSSGVLMFGKQGAGKDNVDYSSVMLTSEEEIKTTNPVATEQYGVVADNLQQQNAAPIVGAVNSQGALPGMVWQNRDVYLQGPIWAKIPHTDGNFHPSPLMGGFGLKHPPPQILIKNTPVPADPPTTFSQAKLASFITQYSTGQVSVEIEWELQKENSKRWNPEIQYTSNYYKSTNVDFAVNTEGTYSEPRPIGTRYLTRSL

SEQ ID NO: 4762 - protein, 738 aa, Adeno-associated virus
MAADGYLPDWLEDNLSEGIREWWDLKPGAPKPKANQQKQDDGRGLVLPGYKYLGPFNGLDKGEPVNAADAAALEHDKAYDQQLKAGDNPYLRYNHADAEFQERLQEDTSFGGNLGRAVFQAKKRVLEPLGLVEEGAKTAPGKKRPVEPSPQRSPDSSTGIGKTGQQPAKKRLNFGQTGDSESVPDPQPIGEPPAGPSGLGSGTMAAGGGAPMADNNEGADGVGSSSGNWHCDSTWLGDRVITTSTRTWALPTYNNHLYKQISNGTSGGSTNDNTYFGYSTPWGYFDFNRFHCHFSPRDWQRLINNNWGFRPKRLNFKLFNIQVKEVTQNEGTKTIANNLTSTIQVFTDSEYQLPYVLGSAHQGCPPPFPADVFMIPQYGYLTLNNGSQAVGRSSFYCLEYFPSQMRRTGNNFEFSYQFEDVPFHSSYAHSQSLDRLMNPLIDQYLYYLSRTQSTGGTAGTQQLLFSQAGPNNMSAQAKNWLPGPCYRQQRVSTTLSQNNNSNFAWTGATKYHLNGRDSLVNPGVAMATHKDDEERFFPSSGVLMFGKQGAGKDNVDYSSVMLTSEEEIKTTNPVATEQYGVVADNLQQQNAAPIVGAVNSQGALPGMVWQNRDVYLQGPIWAKIPHTDGNFHPSPLMGGFGLKHPPPQILIKNTPVPADPPTTFSQAKLASFITQYSTGQVSVEIEWELQKENSKRWNPEIQYTSNYYKSTNVDFAVNTEGTYSEPRPIGTRYLTRNL

SEQ ID NO: 4763 - protein, 733 aa, Adeno-associated virus
MAADGYLPDWLEDNLSEGIREWWDLRPGAPKPKANQQKQDDGRGLVLPGYKYLGPFNGLDKGEPVNEADAAALEHDKAYDKQLEQGDNPYLKYNHADAEFQERLQEDTSFGGNLGRAVFQAKKRVLEPLGLVEEGAKTAPGKKRPIESPDSSTGIGKKGQQPAKKRLNFGQTGDSESVPDPQPIGEPPAGPSGLGSGTMAAGGGAPMADNNEGADGVGSSSGNWHCDSTWLGDRVITTSTRTWALPTYNNHLYKQISNGTSGGSTNDNTYFGYSTPWGYFDFNRFHCHFSPRDWQRLINNNWGFRPKRLNFKLFNIQVKEVTQNEGTKTIANNLTSTIQVFTDSEYQLPYVLGSAHQGCLPPFPADVFMIPQYGYLTLNNGSQAVGRSSFYCLEYFPSQMLRTGNNFEFSYQFEDVPFHSSYAHSQSLDRLMNPLIDQYLYYLSRTQSTGGTAGTQQLLFSQAGPNNMSAQAKNWLPGPCYRQQRVSTTVSQNNNSNFAWTGATKYHLNGRDSLVNPGVAMATHKGDEERFFPSSGVLMFGKQGAGKDNVDYSSVMLTSEEEIKTTNPVATEQYGVVADNLQQQNAAPIVGAVNSQGALPGMVWQNRDVYLQGPIWAKIPHTDGNFHPSPLMGGFGLKHPPPQILIKNTPVPADPPTTFSQAKLASFITQYSTGQVSVEIEWELQKENSKRWNPEIQYTSNYYKSTNVDFAVNTEGTYSEPRPIGTRYLTRNL

SEQ ID NO: 4764 - DNA, 3098 bp, Adeno-associated virus
  source 1..3098: mol_type = genomic DNA
gaattcgccctttctacggctgcgtcaactggaccaatgagaactttcccttcaacgattgcgtcgacaagatggtgatctggtgggaggagggcaagatgacggccaaggtcgtggagtccgccaaggccattctcggcggcagcaaggtgcgcgtggaccaaaagtgcaagtcttccgcccagatcgatcccacccccgtgatcgtcacttccaacaccaacatgtgcgctgtgattgacgggaacagcaccaccttcgagcaccagcagccgttacaagaccggatgttcaaatttgaactcacccgccgtctggagcacgactttggcaaggtgacaaagcaggaagtcaaagagttcttccgctgggcgcaggatcacgtgaccgaggtggcgcatgagttctacgtcagaaagggtggagccaacaagagacccgcccccgatgacgcggataaaagcgagcccaagcgggcctgcccctcagtcgcggatccatcgacgtcagacgcggaaggagctccggtggactttgccgacaggtaccaaaacaaatgttctcgtcacgcgggcatgcttcagatgctgtttccctgcaagacatgcgagagaatgaatcagaatttcaacatttgcttcacgcacgggaccagagactgttcagaatgtttccccggcgtgtcagaatctcaaccggtcgtcagaaagaggacgtatcggaaactctgtgccattcatcatctgctggggcgggctcccgagattgcttgctcggcctgcgatctggtcaacgtggacctggatgaccgtgtttctgagcaataaatgacttaaaccaggtatggctgccgatggttatcttccagattggctcgaggacaacctctctgagggcattcgcgagtggtgggacttgaaacctggagccccgaaacccaaagccaaccagcaaaagcaggacgacggccggggtctggtgcttcctggctacaagtacctcggacccttcaacggactcgacaagggagagccggtcaacgaggcagacgccgcggccctcgagcacgacaaggcctacgacaagcagctcgagcagggggacaacccgtacctcaagtacaaccacgccgacgccgagtttcaggagcgtcttcaagaagatacgtcttttgggggcaacctcgggcgagcagtcttccaggccaagaagcgggttctcgaacctctcggtctggttgaggaaggcgctaagacggctcctggaaagaagagacccatagaatcccccgactcctccacgggcatcggcaagaaaggccagcagcccgctaaaaagaagctcaactttgggcagactggcgactcagagtcagtgcccgacccccaacctctcggagaacctcccgccgcgccctcaggtctgggatctggtacaatggctgcaggcggtggcgcaccaatggcagacaataacgaaggcgccgacggagtgggtaatgcctccggaaattggcattgcgattccacatggctgggcgacagagtcatcaccaccagcacccgcacctgggccctgcccacctacaacaaccacctctacaagcagatatcaagtcagagcggggctaccaacgacaaccacttcttcggctacagcaccccctggggctattttgacttcaacagattccactgccacttctcaccacgtgactggcagcgactcatcaacaacaactggggattccggcccagaaagctgcggttcaagttgttcaacatccaggtcaaggaggtcacgacgaacgacggcgttacgaccatcgctaataaccttaccagcacgattcaggtcttctcggactcggagtaccaactgccgtacgtcctcggctctgcgcaccagggctgcctccctccgttccctgcggacgtgttcatgattcctcagtacggatatctgactctaaacaacggcagtcagtctgtgggacgttcctccttctactgcctggagtactttccttctcagatgctgagaacgggcaataactttgaattcagctacacctttgaggaagtgcctttccacagcagctatgcgcacagccagagcctggaccggctgatgaatcccctcatcgaccagtacctgtactacctggcccggacccagagcactacggggtccacaagggagctgcagttccatcaggctgggcccaacaccatggccgagcaatcaaagaactggctgcccggaccctgttatcggcagcagagactgtcaaaaaacatagacagcaacaacaacagtaactttgcctggaccggggccactaaataccatctgaatggtagaaattcattaaccaacccgggcgtagccatggccaccaacaaggacgacgaggaccagttctttcccatcaacggagtgctggtttttggcgaaacgggggctgccaacaagacaacgctggaaaacgtgctaatgaccagcgaggaggagatcaaaaccaccaatcccgtggctacagaagaatacggtgtggtctccagcaacctgcaatcgtctacggccggaccccagacacagactgtcaacagccagggggctctgcccggcatggtctggcagaaccgggacgtgtacctgcagggtcccatctgggccaaaattcctcacacggacggcaactttcacccgtctcccctgatgggcggatttggactcaaacacccgcctcctcaaattctcatcaaaaacaccccggtacctgctaatcctccagaggtgtttactcctgccaagtttgcctcatttatcacgcagtacagcaccggccaggtcagcgtggagatcgagtgggaactgcagaaagaaaacagcaaacgctggaatccagagattcagtacacctcaaattatgccaagtctaataatgtggaatttgctgtcaacaacgaaggggtttatactgagcctcgccccattggcacccgttacctcacccgtaacctgtaattgcctgttaatcaataaaccggttaattcgtttcagttgaactttggtctctgcgaagggcgaattc

SEQ ID NO: 4765 - protein, 728 aa, Adeno-associated virus
MAADGYLPDWLEDNLSEGIREWWDLKPGAPKPKANQQKQDDGRGLVLPGYKYLGPFNGLDKGEPVNEADAAALEHDKAYDKQLEQGDNPYLKYNHADAEFQERLQEDTSFGGNLGRAVFQAKKRVLEPLGLVEEGAKTAPGKKRPIESPDSSTGIGKKGQQPAKKKLNFGQTGDSESVPDPQPLGEPPAAPSGLGSGTMAAGGGAPMADNNEGADGVGNASGNWHCDSTWLGDRVITTSTRTWALPTYNNHLYKQISSQSGATNDNHFFGYSTPWGYFDFNRFHCHFSPRDWQRLINNNWGFRPRKLRFKLFNIQVKEVTTNDGVTTIANNLTSTIQVFSDSEYQLPYVLGSAHQGCLPPFPADVFMIPQYGYLTLNNGSQSVGRSSFYCLEYFPSQMLRTGNNFEFSYTFEEVPFHSSYAHSQSLDRLMNPLIDQYLYYLARTQSTTGSTRELQFHQAGPNTMAEQSKNWLPGPCYRQQRLSKNIDSNNNSNFAWTGATKYHLNGRNSLTNPGVAMATNKDDEDQFFPINGVLVFGETGAANKTTLENVLMTSEEEIKTTNPVATEEYGVVSSNLQSSTAGPQTQTVNSQGALPGMVWQNRDVYLQGPIWAKIPHTDGNFHPSPLMGGFGLKHPPPQILIKNTPVPANPPEVFTPAKFASFITQYSTGQVSVEIEWELQKENSKRWNPEIQYTSNYAKSNNVEFAVNNEGVYTEPRPIGTRYLTRNL

SEQ ID NO: 4766 - protein, 733 aa, Adeno-associated virus
MAADGHLPDWLEDNLSEGIREWWDLKPGAPKPKANQQKQDDGRGLVLPGYKYLGPFNGLDKGEPVNAADAAALEHDKAYDQQLKAGDNPYLRYNHADAEFQERLQEDTSFGGNLGRAVFQAKKRVLEPLGLVEEGAKTAPGKKRPIESPDSSTGIGKKGQQPAKKKLNFGQTGDSESVPDPQPIGEPPAGPSGLGSGTMAAGGGAPMADNNEGADGVGSSSGNWHCDSTWLGDRVITTSTRTWALPTYNNHLYKQISNGTSGGSTNDNTYFGYSTPWGYFDFNRFHCHFSPRDWQRLINNSWGFRPKRLNFKLFNIQVKEVTQNEGTKTIANNLTSTIQVFTDSEYQLPYVLGSAHQGCLPPFPADVFMIPQYGYLTLNNGSQAVGRSSFYCLEYFPSQMLRTGNNFEFSYQFEDVPFHSSYAHSQSLDRLMNPLIDQYLYYLSRTQSTGGTAGTQQLLFSQAGPNNMSAQAKNWLPGPCYRQQRVSTTLSQNNNSNFAWTGATKYHLNGRDSLVNPGVAMATHKDDEERFFPSSGVLMFGKQGAGKDNVDYSSVMLTSEEEIKTTNPVATEQYGVVADNLQQQNAAPIVGAVNSQGALPGMVWQNRDVYLQGPIWAKIPHTDGNFHPSPLMGGFGLKHPPPQILIKNTPVPADPPTTFSQAKLASFITQYSTGQVSVEIEWELQKENSKRWNPEIQYTSNYYKSTNVDFAVNTEGTYSEPRPIGTRYLTRNL

SEQ ID NO: 4767 - DNA, 2495 bp, Adeno-associated virus
  source 1..2495: mol_type = genomic DNA
gaattcgccctttctacggctgcgtcaactagaccaatgagaactttcccttcaacgattgcgtcgacaagatggtgatctggtgggaggagggcaagatgacggccaaggtcgtggagtccgccaaggccattcatcatctgctggggcgggctcccgagattgcttgctcggcctgcgatctggtcaacgtggacctggatgactgtgtttctgagcaataaatgacttaaaccaggtatggctgccgatggttatcttccagattggctcgaggacaacctctctgagggcattcgcgagtggtgggacttgaaacctggagccccgaaacccaaagccaaccagcaaaagcaggacgacggccggggtctggtgcttcctggctacaagtacctcggacccttcaacggactcgacaagggagagccggtcaacgaggcagacgccgcggccctcgagcacgacaaggcctacgacaagcagctcgagcagggggacaacccgtacctcaagtacaaccacgccgacgccgagtttcaggagcgtcttcaagaagatacgtcttttgggggcaacctcgggcgagcagtcttccaggccaagaagcgggttctcgaacctctcggtctggttgaggaaggcgctaagacggctcctggaaagaagagacccatagaatcccccgactcctccacgggcatcggcaagaaaggccagcagcccgctaaaaagaagctcaactttgggcagactggcgactcagagtcagtgcccgaccctcaaccaatcggagaaccccccgcaggcccctctggtctgggatctggtacaatggctgcaggcggtggcgctccaatggcagacaataacgaaggcgccgacggagtgggtaatgcctccggaaattggcattgcgattccacatggctgggcgacagagtcatcaccaccagcacccgcacctgggccctgcccacctacaacaaccacctctacaagcagatatcaagtcagagcggggctaccaacgacaaccacttcttcggctacagcaccccctggggctattttgacttcaacagattccactgccacttctcaccacgtgactggcagcgactcatcaacaacaactggggattccggcccagaaagctgcggttcaagttgttcaacatccaggtcaaggaggtcacgacgaacgacggcgttacgaccatcgctaataaccttaccagcacgattcaggtcttctcggactcggagtaccaactgccgtacgtcctcggctctgcgcaccagggctgcctccctccgttccctgcggacgtgttcatgattcctcagtacggatatctgactctaaacaacggcagtcagtctgtgggacgttcctccttctactgcctggagtactttccttctcagatgctgagaacgggcaataactttgaattcagctacacctttgaggaagtgcctttccacagcagctatgcgcacagccagagcctggaccggctgatgaatcccctcatcgaccagtacctgtactacctggcccggacccagagcactacggggtccacaagggagctgcagttccatcaggctgggcccaacaccatggccgagcaatcaaagaactggctgcccggaccctgttatcggcagcagagactgtcaaaaaacatagacagcaacaacaccagtaactttgcctggaccggggccactaaataccatctgaatggtagaaattcattaaccaacccgggcgtagccatggccaccaacaaggacgacgaggaccagttctttcccatcaacggagtgctggtttttggcaaaacgggggctgccaacaagacaacgctggaaaacgtgctaatgaccagcgaggaggagatcaaaaccaccaatcccgtggctacagaacagtacggtgtggtctccagcaacctgcaatcgtctacggccggaccccagacacagactgtcaacagccagggggctctgcccggcatggtctggcagaaccgggacgtgtacctgcagggtcccatctgggccaaaattcctcacacggacggcaactttcacccgtctcccctgatgggcggatttggactcaaacacccgcctcctcaaattctcatcaaaaacaccccggtacctgctaatcctccagaggtgtttactcctgccaagtttgcctcatttatcacgcagtacagcaccggccaggtcagcgtggagatcgagtgggaactgcagaaagaaaacagcaaacgctggaatccagagattcagtacacctcaaattatgccaagtctaataatgtggaatttgctgtcaacaacgaaggggtttatactgagcctcgccccattggcacccgttacctcacccgtaacctgtaattgcctgttaatcaataaaccggttaattcgtttcagttgaactttggtctctgcgaagggcgaattc

SEQ ID NO: 4768 - protein, 728 aa, Adeno-associated virus
MAADGYLPDWLEDNLSEGIREWWDLKPGAPKPKANQQKQDDGRGLVLPGYKYLGPFNGLDKGEPVNEADAAALEHDKAYDKQLEQGDNPYLKYNHADAEFQERLQEDTSFGGNLGRAVFQAKKRVLEPLGLVEEGAKTAPGKKRPIESPDSSTGIGKKGQQPAKKKLNFGQTGDSESVPDPQPIGEPPAGPSGLGSGTMAAGGGAPMADNNEGADGVGNASGNWHCDSTWLGDRVITTSTRTWALPTYNNHLYKQISSQSGATNDNHFFGYSTPWGYFDFNRFHCHFSPRDWQRLINNNWGFRPRKLRFKLFNIQVKEVTTNDGVTTIANNLTSTIQVFSDSEYQLPYVLGSAHQGCLPPFPADVFMIPQYGYLTLNNGSQSVGRSSFYCLEYFPSQMLRTGNNFEFSYTFEEVPFHSSYAHSQSLDRLMNPLIDQYLYYLARTQSTTGSTRELQFHQAGPNTMAEQSKNWLPGPCYRQQRLSKNIDSNNTSNFAWTGATKYHLNGRNSLTNPGVAMATNKDDEDQFFPINGVLVFGKTGAANKTTLENVLMTSEEEIKTTNPVATEQYGVVSSNLQSSTAGPQTQTVNSQGALPGMVWQNRDVYLQGPIWAKIPHTDGNFHPSPLMGGFGLKHPPPQILIKNTPVPANPPEVFTPAKFASFITQYSTGQVSVEIEWELQKENSKRWNPEIQYTSNYAKSNNVEFAVNNEGVYTEPRPIGTRYLTRNL

SEQ ID NO: 4769 - DNA, 2504 bp, Adeno-associated virus
  source 1..2504: mol_type = genomic DNA
gaattcgccctttctacggctgcgtcaactggaccaatgagaactttcccttcaacgattgcgtcgacaagatggtgatctggtgggaggagggcaagatgacggccaaggtcgtggagtccgccaaggccattcatcatctgctggggcgggctcccgagattgcttgctcggcctgcgatctggtcaacgtggacctggatgactgtgtttctgagcaataaatgacttaaaccaggtatggctgccgatggttatcttccagattggctcgaggacaacctctctgagggcattcgcgagtggtgggacttgaaacctggagccccgaaacccaaagccaaccagcaaaagcaggacgacggccggggtctggtgcttcctggctacaagtacctcggacccttcaacggactcgacaagggagagccggtcaacgaggcagacgccgcggccctcgagcacgacaaggcctacgacaagcagctcgagcagggggacaacccgtacctcaagtacaaccacgccgacgccgagtttcaggagcgtcttcaagaagatacgtcttttgggggcaacctcgggcgagcagtcttccaggccaagaagcgggttctcgaacctctcggtctggttgaggaaggcgctaagacggctcctggaaagaagagacccatagaatcccccgactcctccacgggcatcggcaagaaaggccagcagcccgctaaaaagaagctcaactttgggcagactggcgactcagagtcagtgcccgaccctcaaccaatcggagaaccccccgcaggcccctctggtctgggatctggtacaatggctgcaggcggtggcgctccaatggcagacaataacgaaggcgccgacggagtgggtaatgcctccggaaattggcattgcgattccacatggctgggcgacagagtcatcaccaccagcacccgcacctgggccctgcccacctacaacaaccacctctacaagcagatatcaagtcagagcggggctaccaacgacaaccacttcttcggctacagcaccccctggggctattttgacttcaacagattccactgccacttctcatcacgtgactggcagcgactcatcaacaacaactggggattccggcccaagagactcaacttcaagctcttcaacatccaggtcaaggaggtcacgcagaatgaaggcaccaagaccatcgccaataaccttaccagcacgattcaggtctttacggactcggaataccggctcccgtacgtcctcggctctgcgcaccagggctgcctgcctccgttcccggcggacgtcttcatgattcctcagtacgggtacctgactctgaacaacggcagtcaggccgtgggccgttcctccttctactgcctggagtactttccttctcaaatgctgagaacgggcaacaactttgagttcagctaccagtttgaggacgtgccttttcacagcagctacgcgcacagccaaagcctggaccggctgatgaaccccctcatcgaccagtacctgtactacctgtctcggactcagtccacgggaggtaccgcaggaactcagcagttgctattttctcaggccgggcctaataacatgtcggctcaggccaaaaactggctacccgggccctgctaccggcagcaacgcgtctccacgacactgtcgcaaaataacaacagcaactttgcttggaccggtgccaccaagtatcatctgaatggcagagactctctggtaaatcccggtgtcgctatggcaacgcacaaggacgacgaagagcgattttttccatccagcggagtcttgatgtttgggaaacagggagctggaaaagacaacgtggactatagcagcgttatgctaaccagtgaggaagaaatcaaaaccaccaacccagtggccacagaacagtacggcgtggtggccgataacctgcaacagcaaaacgccgctcctattgtaggggccgtcaacagtcaaggagccttacctggcatggtctggcagaaccgggacgtgtacctgcagggtcctatctgggccaagattcctcacacggacggcaactttcatccttcgccgctgatgggaggctttggactgaaacacccgcctcctcagatcctgattaagaatacacctgttcccgcggatcctccaactaccttcagtcaagccaagccggcgtcgttcatcacgcagtacagcaccggacaggtcagcgtggaaattgaatgggagctgcagaaagagaacagcaagcgctggaacccagagattcagtatacttccaactactacaaatctacaaatgtggactttgctgtcaatactgagggtacttattcagagcctcgccccattggcacccgttacctcacccgtaacctgtaattgcctgttaatcaataaaccggttaattcgtttcagttgaactttggtctctgcgaagggcgaattc

SEQ ID NO: 4770 - protein, 731 aa, Adeno-associated virus
MAADGYLPDWLEDNLSEGIREWWDLKPGAPKPKANQQKQDDGRGLVLPGYKYLGPFNGLDKGEPVNEADAAALEHDKAYDKQLEQGDNPYLKYNHADAEFQERLQEDTSFGGNLGRAVFQAKKRVLEPLGLVEEGAKTAPGKKRPIESPDSSTGIGKKGQQPAKKKLNFGQTGDSESVPDPQPIGEPPAGPSGLGSGTMAAGGGAPMADNNEGADGVGNASGNWHCDSTWLGDRVITTSTRTWALPTYNNHLYKQISSQSGATNDNHFFGYSTPWGYFDFNRFHCHFSSRDWQRLINNNWGFRPKRLNFKLFNIQVKEVTQNEGTKTIANNLTSTIQVFTDSEYRLPYVLGSAHQGCLPPFPADVFMIPQYGYLTLNNGSQAVGRSSFYCLEYFPSQMLRTGNNFEFSYQFEDVPFHSSYAHSQSLDRLMNPLIDQYLYYLSRTQSTGGTAGTQQLLFSQAGPNNMSAQAKNWLPGPCYRQQRVSTTLSQNNNSNFAWTGATKYHLNGRDSLVNPGVAMATHKDDEERFFPSSGVLMFGKQGAGKDNVDYSSVMLTSEEEIKTTNPVATEQYGVVADNLQQQNAAPIVGAVNSQGALPGMVWQNRDVYLQGPIWAKIPHTDGNFHPSPLMGGFGLKHPPPQILIKNTPVPADPPTTFSQAKPASFITQYSTGQVSVEIEWELQKENSKRWNPEIQYTSNYYKSTNVDFAVNTEGTYSEPRPIGTRYLTRNL

SEQ ID NO: 4771 - protein, 731 aa, Adeno-associated virus
MAADGYLPDWLEDNLSEGIREWWDLKPGAPKPKANQQKQDDGRGLVLPGYKYLGPFNGLDKGEPVNEADAAALEHDKAYDKQLEQGDNPYLKYNHADAEFQERLQEDTSFGGNLGRAVFRAKKRVLEPLGLVEEGAKTAPGKKRPIESPDSSTGIGKKGQQPAKKKLNFGQTGDSESVPDPQPLGEPPAAPSGLGSGTMAAGGGAPMADNNEGADGVGNASGNWHCDSTWLGDRVITTSTRTWALPTYNNHLYKQISSQSGATNDNHFFGYSTPWGYFDFNRFHCHFSPRDWQRLINNNRGFRPRKLRFKLFNIQVKEVTTNDGVTTIANNLTSTIQVFSDSEYQLPYVLGSAHQGCLPPFPADVFMIPQYGYLTLNNGSQSVGRSSFYCLEYFPSQMLRTGNNFEFSYQFEDVPFHSSYAHSQSLDRLMNPLIDQYLYYLSRTQSTGGTAGTQQLLFSQAGPNNMSAQAKNWLPGPCYRQQRVSTTLSQNNNSNFAWTGATKYHLNGRDSLVNPGVAMATHKDDEERFFPSSGVLMFGKQGAGKDNVDYSSVMLTSEEEIKTTNPVATEQYGVVADNLQQQNAAPIVGAVNSQGALPGMAWQNRDVYLQGPIWAKIPHTDGNFHPSPLMGGFGLKHPPPQILIKNTPVPADPPTTFSQAKLASFITQYSTGQVSVEIEWELQKENSKRWNPEIQYTSNYYKSTNVDFAVNTEGTYSEPRPIGTRYLTRNL

SEQ ID NO: 4772 - protein, 738 aa, Adeno-associated virus
MAADGYLPDWLEDNLSEGIREWWDLKPGAPKPKANQQKQDDGRGLVLPGYKYLGPFNGLDKGEPVNEADAAALEHDKAYDKQLEQGDNPYLKYNHADAEFQERLQEDTSFGGNLGRAVFQAKKRVLEPLGLVEEGAKTAPGKKRPVEPSPQRSPDSSTGIGKTGQQPAKKRLNFGQTGDSESVPDPQPIGEPPAGPSGLGSGTMAAGGGAPMADNNEGADGVGSSSGNWHCDSTWLGDRVITTSTRTWALPTYNNHLYKQISNGTSGGSTNDNTYFGYSTPWGYFDFNRFHCHFSPRDWQRLINNNWGFRPKRLNFKLFNIQVKEVTQNEGTKTIANNLTSTIQVFTDSEYQLPYVLGSAHQGCLPPFPADVFMIPQYGYLTLNNGSQAVGRSSFYCLEYFPSQMLRTGNNFEFSYQFEDVPFHSSYAHSQSLDRLMNPLIDQYLYYLSRTQSTGGTAGTQQLLFSQAGPNNMSAQAKNWLPGPCYRQQRVSTTLSQNNNSNFAWTGATKYHLNGRDSLVNPGVAMATHKDDEERFFPSSGVLMFGKQGAGKDNVDYSSVMLTSEEEIKTTNPVATEQYGVVADNLQQQNAAPIVGAVNSQGALPGMVWQNRDVYLQGPIWAKIPHTDGNFHPSPLMGGFGLKHPPPQILIKNTPVPADPPTTFSQAKLASFITQYSTGQVSVEIEWELQKENSKRWNPEIQYTSNYYKSTNVDFAVNTEGTYSEPRPIGTRYLTRNL

SEQ ID NO: 4773 - protein, 735 aa, Adeno-associated virus
MAADGYLPDWLEDNLSEGIREWWDLKPGAPKPKANQQKQDDGRGLVLPGYKYLGPFNGLDKGEPVNEADAAALEHDKAYDKQLEQGDNPYLKYNHADAEFQERLQEDTSFGGNLGRAVFQAKKRVLEPLGLVEEGAKTAPGKKRPVEPSPQRSPDSSTGIGKTGQQPAKKRLNFGQTGDSESVPDPQPIGEPPAGPSGLGSGTMAAGGGAPMADNNEGADGVGSSSGNWHCDSTWLGDRVITTSTRTWALPTYNNHLYKQISNGTSGGSTNDNTYFGYSTPWGYFDFNRFHCHFSPRDWQRLINNNWGFRPRKLRFKLFNIQVKEVTTDDGVTTIANNLTSTIQVFSDSEYQLPYVLGSAHQGCLPPFPADVFMIPQYGYLTLNNGSQSVGRSSFYCLEYFPSQMLRTGNNFEFSYTFEEVPFHSSYAHSQSLDRLMNPLIDQYLYYLARTQSTTGSTRELQFHQAGPNTMAEQSKNWLPGPCYRQQRLSKNIDSNNNSNFAWTGATKYHLNGRNSLTNPGVAMATNKDDEDQFFPINGVLVFGKTGAANKTTLENVLMTSEEEIKTTNPVATEEYGVVSSNLQSSTAGPQTQTVNSQGALPGMVWQNRDVYLQGPIWAKIPHTDGNFHPSPLMDGFGLKHPPPQILIKNTPVPANPPEVFTPAKFASFITQYSTGQVSVEIEWELQKENSKRWNPEIQYTSNYAKSNNVEFAVNNEGVYTEPRPIGTRYLTRNL

SEQ ID NO: 4774 - DNA, 3128 bp, Adeno-associated virus
  source 1..3128: mol_type = genomic DNA
gaattcgccctttctacggctgcgtcaactggaccaatgagaactttcccttcaacgattgcgtcgacaagatggtgatctggtgggaggagggcaagatgacggccaaggtcgtggagtccgccaaggccattctcggcggcagcaaggtgcgcgtggaccaaaagtgcaagtcttccgcccagatcgatcccacccccgtgatcgtcacttccaacaccaacatgtgcgccgtgattgacgggaacagcaccaccttcgagcaccagcagccgttacaagaccggatgttcaaatttgaactcacccgccgtctggagcacgactttggcaaggtgacaaagcaggaagtcaaagagttcttccgctgggcgcaggatcacgtgaccgaggtggcgcatgagttctacgtcagaaagggtggagccaacaagagacccgcccccgatgacgcggataaaagcgagcccaagcgggcctgcccctcagtcgcggatccatcgacgtcagacgcggaaggagctccggtggactttgccgacaggtaccaaaacaaatgttctcgtcacgcgggcatgcttcagatgctgtttccctgcaagacatgcgagagaatgaatcagaatttcaacatttgcttcacgcacgggaccagagactgttcagaatgtttccccggcgtgtcagaatctcaaccggtcgtcagaaagaggacgtatcggaaactctgtgccattcatcatctgctagggcgggctcccgagattgcttgctcggcctgcgatctggtcaacgtggacctggatgactgtgtttctgagcaataaatgacttaaaccaggtatggctgccgatggttatcttccagattggctcgaggacaacctctctgagggcattcgcgagtggtgggacttgaaacctggagccccgaaacccaaagccaaccagcaaaagcaggacgacggccggggtctggtgcttcctggctacaagtacctcggacccttcaacggactcgacaagggggagcccgtcaacgcggcggacgcagcggccctcgagcacgacaaggcctacgaccagcagctcaaagcgggtgacaatccgtacctgcggtataaccacgccgacgccgagtttcaggagcgtctgcaagaagatacgtcttttgggggcaacctcgggcgagcagtcttccaggccaagaagcgggttctcgaacctctcggtctggttgaggaaggcgctaagacggctcctggaaagaagagaccggtagagccatcaccccagcgttctccagactcctctacgggcatcggcaagacaggccagcagcccgcgaaaaagagactcaactttgggcagactggcgactcagagtcagtgcccgaccctcaaccaatcggagaaccccccgcaggcccctctggtctgggatctggtacaatggctgcaggcggtggcgctccaatggcagacaataacgaaggcgccgacggagtgggtagttcctcaggaaattggcattgcgattccacatggctgggcgacagagtcatcaccaccagcacccgaacctgggccctccccacctacaacaaccacctctacaagcaaatctccaacgggacatcgggaggaagcaccaacgacaacacctacttcggctacagcaccccctgggggtattttgactttaacagattccactgccacttctcaccacgtgactggcagcgactcatcaacaacaactggggattccggcccaagagactcaacttcaagctcttcaacatccaggtcaaggaggtcacgcagaatgaaggcaccaagaccatcgccaataaccttaccagcacgattcaggtctttacggactcggaataccagctcccgtacgtcctcggctctgcgcaccagggctgcctgcctccgttcccggcggacgtcttcatgattcctcagtacgggtacctgactctgaacaacggcagtcaggccgtgggccgttcctccttctactgcctggagtactttccttctcaaatgctgagaacgggcaacaactttgagttcagctaccagtttgaggacgtgccttttcacagcagctacgcgcacagccaaagcctggaccggctgatgaaccccctcatcgaccagtacctgtactacctgtctcggactcagtccacgggaggtaccgcaggaactcagcagttgctattttctcaggccgggcctaataacatgtcggctcaggccaaaaactggctacccgggccctgctaccggcagcaacgcgtctccacgacactgtcgcaaaataacaacagcaactttgcttggaccggtgccaccaagtatcatctgaatggcagagactctctggtaaatcccggtgtcgctatggcaacgcacaaggacgacgaagagcgattttttccatccagcggagtcttgatgtttgggaaacagggagctggaaaagacaacgtggactatagcagcgttatgctaaccagtgaggaagaaatcaaaaccaccaacccagtggccacagaacagtacggcgtggtggccgataacctgcaacagcaaaacgccgctcctattgtaggggccgtcaacagtcaaggagccttacctggcatggtctggcagaaccgggacgtgtacctgcagggtcctatctgggccaagattcctcacacggacggcaactttcatccttcgccgctgatgggaggctttggactgaaacacccgcctcctcagatcctgattaagaatacacctgttcccgcggatcctccaactaccttcagtcaagccaagctggcgtcgttcatcacgcagtacagcaccggacaggtcagcgtggaaattgaatgggagctgcagaaagagaacagcaagcgctggaacccagagattcagtatacttccaactactacaaatctacaaatgtggactttgctgtcaatactgagggtacttattcagagcctcgccccattggcacccgttacctcacccgtaacctgtaattgcctgttaatcaataaaccggctaattcgtttcagttgaactttggtctctgcgaagggcgaattc

SEQ ID NO: 4775 - protein, 738 aa, Adeno-associated virus
MAADGYLPDWLEDNLSEGIREWWDLKPGAPKPKANQQKQDDGRGLVLPGYKYLGPFNGLDKGEPVNAADAAALEHDKAYDQQLKAGDNPYLRYNHADAEFQERLQEDTSFGGNLGRAVFQAKKRVLEPLGLVEEGAKTAPGKKRPVEPSPQRSPDSSTGIGKTGQQPAKKRLNFGQTGDSESVPDPQPIGEPPAGPSGLGSGTMAAGGGAPMADNNEGADGVGSSSGNWHCDSTWLGDRVITTSTRTWALPTYNNHLYKQISNGTSGGSTNDNTYFGYSTPWGYFDFNRFHCHFSPRDWQRLINNNWGFRPKRLNFKLFNIQVKEVTQNEGTKTIANNLTSTIQVFTDSEYQLPYVLGSAHQGCLPPFPADVFMIPQYGYLTLNNGSQAVGRSSFYCLEYFPSQMLRTGNNFEFSYQFEDVPFHSSYAHSQSLDRLMNPLIDQYLYYLSRTQSTGGTAGTQQLLFSQAGPNNMSAQAKNWLPGPCYRQQRVSTTLSQNNNSNFAWTGATKYHLNGRDSLVNPGVAMATHKDDEERFFPSSGVLMFGKQGAGKDNVDYSSVMLTSEEEIKTTNPVATEQYGVVADNLQQQNAAPIVGAVNSQGALPGMVWQNRDVYLQGPIWAKIPHTDGNFHPSPLMGGFGLKHPPPQILIKNTPVPADPPTTFSQAKLASFITQYSTGQVSVEIEWELQKENSKRWNPEIQYTSNYYKSTNVDFAVNTEGTYSEPRPIGTRYLTRNL

SEQ ID NO: 4776 - DNA, 3084 bp, Adeno-associated virus
  source 1..3084: mol_type = genomic DNA
gaattcgccctttctacggctgcatcaactggaccaatgagaactttcccttcaacgattgcgtcgacaagatggtgatctggtgggaggagggcaagatgacggccaaggtcgtggagtccgccaaggccattctcggcggcagcaaggtgcgcgtggaccaaaagtgcaagtcgtccgcccagatcgaccccacccccgtgatcgtcacctccaacaccaacatgtgcgccgtgattgacgggaacagcaccaccttcgagcaccagcagccgttgcaggaccggatgttcaagttcgaactcacccgccgtctggagcacgactttggcaaggtgaccaagcaggaagtcaaagagttcttccgctgggcgcaggatcacgtgaccgaggtggcgcatgagttctacgtcagaaagggcggagccagcaaaagacccgcccccgatgacgcggatataagcgagcccaagcgggcctgcccctcagtcgcggatccatcgacgtcagacgcggaaggagctccggtggactttgccgacaggtaccaaaacaaatgttctcgtcacgcgggcatgcttcagatgctgtttccctgcaaaacgtgcgagaaaatgaatcagaatttcaacatttgcttcacgcacggggtcagagactgctcagaatgtttccccggtgcatcagaatctcaaccggtcgtcagaaaaaaaacgtatcagaaactgtgtgccattcatcatctgctggggcgggcacccgagattgcttgctcggcctgcgatctggtcaacgtggacctggacgactgtgtttctgagcaataaatgacttaaaccaggtatggctgccgatggttatcttccagattggcttgaggacaacctctctgagggcattcgcgagtggtgggacctgaaacctggagccccgaaacccaaagccaaccagcaaaagcaggacgacggccggggtctggtgcttcctggctacaagtacctcggacccttcaacggactcgacaagggggagcccgtcaacgcggcggacgcagcggccctcgagcacgacaaggcctacgaccagcagctcaaagcgggtgacaatccgtacctgcggtataaccacgccgacgccgagtttcaggagcgtctgcaagaagatacgtcttttgggggcaacctcgggcgagcagtcttccaggccaagaagcgggttctcgaacctctcggtctggttgaggaaggcgctaagacggctcctggaaagaagagaccggtagagccatcacctcagcgttcccccgactcctccacgggcatcggcaagaaaggccaccagcccgcgagaaagagactgaactttgggcagactggcgactcggagtcagtccccgaccctcaaccaatcggagaaccaccagcaggcccctctggtctgggatctggtacaatggctgcaggcggtggcgctccaatggcagacaataacgaaggcgccgacggagtgggtagttcctcaggaaattggcattgcgattccacatggctgggcgacagagtcatcaccaccagcacccgaacctgggccctgcccacctacaacaaccatctctacaagcaaatctccaacgggacatcgggaggaagcactaacgacaacacctactttggctacagcaccccctgggggtattttgacttcaacagattccactgccacttctcaccacgtgactggcagcgactcatcaacaataactggggattccggcccaagagactcaacttcaagctcttcaacatccaggtcaaggaggtcacgcagaatgaaggcaccaagaccatcgccaataaccttaccagcacgattcaggtgtttacggactcggaataccagctcccgtacgtccccggctctgcgcaccagggctgcctccctccgttcccggcggacgtcttcatgattcctcagtacgggtatctgaccctaaacaatggcagtcaggctgtgggccgttcctccttctactgcctggaatacttcccttctcaaatgctgaggacgggcaacaactttgaattcagctacaccttcgaggacgtgcctttccacagcagctacgcgcacagccagagcctggaccggctgatgaaccctctcatcgaccagtacctgtattacttatccagaactcagtccacaggaggaactcaaggtactcagcaattgttattttctcaagccgggcccgcaaacatgtcggctcaggccaagaactggctacctggaccgtgttaccgtcagcaacgagtttccacgacactgtcgcaaaacaacaacagcaattttgcttggaccggtgccaccaagtatcacctgaatggcagagactccctggttaatcccggcgttgccatggctacccacaaggacgacgaggagcgcttcttcccgtcaagcggagttctaatgtttggcaagcagggggctggaaaagacaatgtggactacagcagcgtgatgctcaccagcgaagaagaaattaaaactactaacccagtggctacagagcagtatggtgtggtggcagacaacctgcagcagaccaacggagctcccattgtgggaactgtcaacagccagggggccttacctggtatggtctggcaaaaccgggacgtgtacctgcagggccccatctgggccaaaattcctcacacggacggcaactttcatccttcgccgctgatgggaggctttggactgaaacacccgcctcctcagatcctggtgaaaaacactcctgttcctgcggatcctccgaccaccttcagccaggccaagctggcttcttttatcacgcagtacagcaccggacaggtcagcgtggaaatcgaatgggagctgcagaaagaaaacagcaagcgctggaacccagagattcagtatacttccaactactacaaatctacaaatgtggactttgctgtcaatactgagggtacttattcagagcctcgccccattggcactcgttatctcacccgtaatctgtaattgcttgttaatcaataaaccggt

SEQ ID NO: 4777 - protein, 738 aa, Adeno-associated virus
MAADGYLPDWLEDNLSEGIREWWDLKPGAPKPKANQQKQDDGRGLVLPGYKYLGPFNGLDKGEPVNAADAAALEHDKAYDQQLKAGDNPYLRYNHADAEFQERLQEDTSFGGNLGRAVFQAKKRVLEPLGLVEEGAKTAPGKKRPVEPSPQRSPDSSTGIGKKGHQPARKRLNFGQTGDSESVPDPQPIGEPPAGPSGLGSGTMAAGGGAPMADNNEGADGVGSSSGNWHCDSTWLGDRVITTSTRTWALPTYNNHLYKQISNGTSGGSTNDNTYFGYSTPWGYFDFNRFHCHFSPRDWQRLINNNWGFRPKRLNFKLFNIQVKEVTQNEGTKTIANNLTSTIQVFTDSEYQLPYVPGSAHQGCLPPFPADVFMIPQYGYLTLNNGSQAVGRSSFYCLEYFPSQMLRTGNNFEFSYTFEDVPFHSSYAHSQSLDRLMNPLIDQYLYYLSRTQSTGGTQGTQQLLFSQAGPANMSAQAKNWLPGPCYRQQRVSTTLSQNNNSNFAWTGATKYHLNGRDSLVNPGVAMATHKDDEERFFPSSGVLMFGKQGAGKDNVDYSSVMLTSEEEIKTTNPVATEQYGVVADNLQQTNGAPIVGTVNSQGALPGMVWQNRDVYLQGPIWAKIPHTDGNFHPSPLMGGFGLKHPPPQILVKNTPVPADPPTTFSQAKLASFITQYSTGQVSVEIEWELQKENSKRWNPEIQYTSNYYKSTNVDFAVNTEGTYSEPRPIGTRYLTRNL

SEQ ID NO: 4778 - DNA, 3123 bp, Adeno-associated virus
  source 1..3123: mol_type = genomic DNA
gaattcgcccttggctgcgtcaactggaccaatgagaactttcccttcaacgattgcgtcgacaagatggtgatctggtgggaggagggcaagatgacggccaaggtcgtggagtccgccaaggccattctcggcggcagcaaggtgcgcgtggaccaaaagtgcaagtcgtccgcccagatcgaccccacccccgtgatcgtcacctccaacaccaacatgtgcgccgtgattgacgggaacagcaccaccttcgagcaccagcagccgttgcaggaccggatgttcaagttcgaactcacccgccgtctggagcacgactttggcaaggtgaccaagcaggaagtcaaagagttcttccgctgggcgcaggatcacgtgaccgaggtggcgcatgagttctacgtcagaaagggcggagccagcaaaagacccgcccccgatgacgcggatataagcgagcccaagcgggcctgcccctcagtcgcggatccatcgacgtcagacgcggaaggagctccggtggactttgccgacaggtaccaaaacaaatgttctcgtcacgcgggcatgctccagatgctgtttccctgcaaaacgtgcgagagaatgaatcagaatttcaacatttgcttcacgcacggggtcagagactgctcagaatgtttccccggtgcatcagaatctcaaccggtcgtcagaaaaaaaacgtatcagaaactgtgtgccattcatcatctgctggggcgggcacccgagattgcttgctcggcctgcgatctggtcaacgtggacctggacgactgtgtttctgagcaataaatgacttaaaccaggtatggctgccgatggttatcttccagattggcttgaggacaacctctctgagggcattcgcgagtggtgggacctgaaacctggagccccgaaacccaaagccaaccagcaaaagcaggacgacggccggggtctggtgcttcctggctacaagtacctcggacccttcaacggactcgacaagggggagcccgtcaacgcggcggacgcagcggccctcgagcacgacaaggcctacgaccagcagctcaaagcgggtgacaatccgtacctgcggtataaccacgccgacgccgagtttcaggagcgtctgcaagaagatacgtcttttgggggcaacctcgggcgagcagtcttccaggccaagaagcgggttctcgaacctctcggtctggttgaggaaggcgctaagacggctcctggaaagaagagaccggtagagccatcacctcagcgttcccccgactcctccacgggcatcggcaagaaaggccaccagcccgcgagaaagagactgaactttgggcagactggcgactcggagtcagtccccgaccctcaaccaatcggagaaccaccagcaggcccctctggtctgggatctggtacaatggctgcaggcggtggcgctccaatggcagacaataacgaaggcgccgacggagtgggtagttcctcaggaaattggcattgcgattccacatggctgggcgacagagtcatcaccaccagcacccgaacctgggccctgcccacctacaacaaccatctctacaagcaaatctccaacgggacatcgggaggaagcactaacgacaacacctactttggctacagcaccccctgggggtattttgacttcaacagattccactgccacttctcaccacgtgactggcagcgactcatcaacaataactggggattccggcccaagagactcaacttcaagctcttcaacatccaggtcaaggaggtcacgcagaatgaaggcaccaagaccatcgccaataaccttaccagcacgattcaggtgtttacggactcggaataccagctcccgtacgtcctcggctctgcgcaccagggctgcctccctccgttcccggcggacgtcttcatgattcctcagtacgggtatctgaccctaaacaatggcagtcaggctgtgggccgttcctccttctactgcctggaatacttcccttctcaaatgctgaggacgggcaacaactttgaattcagctacaccttcgaggacgtgcctttccacagcagctacgcgcacagccagagcctggaccggctgatgaaccctctcatcgaccagtacctgtattacttatccagaactcagtccacaggaggaactcaaggtactcagcaattgttattttctcaagccgggcccgcaaacatgtcggctcaggccaagaactggctacctggaccgtgttaccgtcagcaacgagtttccacgacactgtcgcaaaacaacaacagcaattttgcttggaccggtgccaccaagtatcacctgaatggcagagactccctggttaatcccggcgttgccatggctacccacaaggacgacgaggagcgcttcttcccgtcaagcggagttctaatgtttggcaagcagggggctggaaaagacaatgtggactacagcagcgtgatgctcaccagcgaagaagaaattaaaactactaacccagtggctacagagcagtatggtgtggtggcagacaacctgcagcagaccaacggagctcccattgtgggaactgtcaacagccagggggccttacctggtatggtctggcaaaaccgggacgtgtacctgcagggccccatctgggccaaaattcctcacacggacggcaactttcatccttcgccgctgatgggaggctttggactgaaacacccgcctcctcagatcctggtgaaaaacactcctgttcctgcggatcctccgaccaccttcagccaggccaagctggcttcttttatcacgcagtacagcaccggacaggtcagcgtggaaatcgaatgggagctgcagaaagaaaacagcaagcgctggaacccagagattcagtatacttccaactactacaaatctacaaatgtggactttgctgtcaatactgagggtacttattcagagcctcgccccattggcactcgttatctcacccgtaatctgtaattgcttgttaatcaataaaccggttaattcgtttcagttgaactttggtctctgcgaagggcgaattc

SEQ ID NO: 4779 - protein, 738 aa, Adeno-associated virus
MAADGYLPDWLEDNLSEGIREWWDLKPGAPKPKANQQKQDDGRGLVLPGYKYLGPFNGLDKGEPVNAADAAALEHDKAYDQQLKAGDNPYLRYNHADAEFQERLQEDTSFGGNLGRAVFQAKKRVLEPLGLVEEGAKTAPGKKRPVEPSPQRSPDSSTGIGKKGHQPARKRLNFGQTGDSESVPDPQPIGEPPAGPSGLGSGTMAAGGGAPMADNNEGADGVGSSSGNWHCDSTWLGDRVITTSTRTWALPTYNNHLYKQISNGTSGGSTNDNTYFGYSTPWGYFDFNRFHCHFSPRDWQRLINNNWGFRPKRLNFKLFNIQVKEVTQNEGTKTIANNLTSTIQVFTDSEYQLPYVLGSAHQGCLPPFPADVFMIPQYGYLTLNNGSQAVGRSSFYCLEYFPSQMLRTGNNFEFSYTFEDVPFHSSYAHSQSLDRLMNPLIDQYLYYLSRTQSTGGTQGTQQLLFSQAGPANMSAQAKNWLPGPCYRQQRVSTTLSQNNNSNFAWTGATKYHLNGRDSLVNPGVAMATHKDDEERFFPSSGVLMFGKQGAGKDNVDYSSVMLTSEEEIKTTNPVATEQYGVVADNLQQTNGAPIVGTVNSQGALPGMVWQNRDVYLQGPIWAKIPHTDGNFHPSPLMGGFGLKHPPPQILVKNTPVPADPPTTFSQAKLASFITQYSTGQVSVEIEWELQKENSKRWNPEIQYTSNYYKSTNVDFAVNTEGTYSEPRPIGTRYLTRNL

SEQ ID NO: 4780 - DNA, 3122 bp, Adeno-associated virus
  source 1..3122: mol_type = genomic DNA
gaattcgccctttctacggctgcgtcaactggaccaatgagaactttcccttcaacgattgcgtcgacaagatggtgatctggtgggaggagggcaagatgacggccaaggtcgtggagtccgccaaggccattctcggcggcagcaaggtgcgtgtggaccaaaagtgcaagtcttccgcccagatcgatcccacccccgtgatcgtcacctccaacaccaacatgtgcgccgtgattgacgggaacagcgccaccttcgagcaccagcagccgttgcaggaccggatgttcaaatttgaactcacccgccgtctggagcatgactttggcaaggtgacgaagcaggaagtcaaagagttcttccgctgggcgcaggatcacgtgaccgaggtggcgcatgagttccacgtcagaaagggtggagccaacaagagacccgcccccgatgacgcggatataagcgagcccaagcgggcctgcccctcagtcgcggatccatcgacgtcagacgcggaaggagctccggtggactttgccgacaggtaccaaaacaaatgttctcgtcacgcgggcatgcttcagatgctgtttccctgcaagacatgcgagagaatgaatcagaatttcaacatttgcttcacgcacgggaccagagactgttcagaatgtttccccggcgtgtcagaatctcaaccggtcgtcagaaagaggacgtatcggaaactctgtgcgattcatcatctgctggggcgggctcccgagattgcttgctcggcctgcgatctggtcaacgtggacctggatgactgtgtttctgagcaataaatgacttaaaccaggtatggctgccgatggttatcttccagattggctcgaggacaacctctctgagggcattcgcgagtggtgggacttgaaacctggagccccgaaacccaaagccaaccagcaaaagcaggacgacggccggggtctggtgcttcctggctacaagtacctcggacccttcaacggactcgacaagggggagcccgtcaacgcggcggacgcagcggccctcgagcacgacaaagcctacgaccagcagctcaaagcgggtgacaatccgtacctgcggtataatcacgccgacgccgagtttcaggagcgtctgcaagaagatacgtcttttgggggcaacctcgggcgagcagtcttccaggccaagaagcgggttctcgaacctctcggtctggttgaggaaggcgctaagacggctcctggaaagaagagactggtagagcagtcgccacaagagccagactcctcctcgggcatcggcaagacaggccagcagcccgctaaaaagagactcaattttggtcagactggcgactcagagtcagtccccgacccacaacctctcggagaacctccagcagccccctcaggtctgggacctaatacaatggcttcaggcggtggcgctccaatggcagacaataacgaaggcgccgacggagtgggtaattcctcgggaaattggcattgcgattccacatggctgggggacagagtcatcaccaccagcacccgaacctgggccctgcccacctacaacaaccacctctacaagcaaatctccaacggcacctcgggaggaagcaccaacgacaacacctattttggctacagcaccccctgggggtattttgacttcaacagattccactgtcacttttcaccacgtgactggcaacgactcatcaacaacaattggggattccggcccaaaagactcaacttcaagctgttcaacatccaggtcaaggaagtcacgacgaacgaaggcaccaagaccatcgccaataatctcaccagcaccgtgcaggtctttacggactcggagtaccagttaccgtacgtgctaggatccgctcaccagggatgtctgcctccgttcccggcggacgtcttcacggttcctcagtacggctatttaactttaaacaatggaagccaagccctgggacgttcctccttctactgtctggagtatttcccatcgcagatgctgagaaccggcaacaactttcagttcagctacaccttcgaggacgtgcctttccacagcagctacgcgcacagccagagcctggacaggctgatgaatcccctcatcgaccagtacctgtactacctggtcagaacgcaaacgactggaactggagggacgcagactctggcattcagccaagcgggtcctagctcaatggccaaccaggctagaaattgggtgcccggaccttgctaccggcagcagcgcgtctccacgacaaccaaccagaacaacaacagcaactttgcctggacgggagctgccaagtttaagctgaacggccgagactctctaatgaatccgggcgtggcaatggcttcccacaaggatgacgacgaccgcttcttcccttcgagcggggtcctgatttttggcaagcaaggagccgggaacgatggagtggattacagccaagtgctgattacagatgaggaagaaatcaaggctaccaaccccgtggccacagaagaatatggagcagtggccatcaacaaccaggccgccaatacgcaggcgcagaccggactcgtgcacaaccagggggtgattcccggcatggtgtggcagaatagagacgtgtacctgcagggtcccatctgggccaaaattcctcacacggacggcaactttcacccgtctcccctgatgggcggctttggactgaagcacccgcctcctcaaattctcatcaagaacacaccggttccagcggacccgccgcttaccttcaaccaggccaagctgaactctttcatcacgcagtacagcaccggacaggtcagcgtggaaatcgagtgggagctgcagaaagaaaacagcaaacgctggaatccagagattcaatacacttccaactactacaaatctacaaatgtggactttgctgtcaacacggaaggagtttatagcgagcctcgccccattggcacccgttacctcacccgcaacctgtaattacatgttaatcaataaaccggttaattcgtttcagttgaactttggtctctgcgaagggcgaattc

SEQ ID NO: 4781 - protein, 736 aa, Adeno-associated virus
MAADGYLPDWLEDNLSEGIREWWDLKPGAPKPKANQQKQDDGRGLVLPGYKYLGPFNGLDKGEPVNAADAAALEHDKAYDQQLKAGDNPYLRYNHADAEFQERLQEDTSFGGNLGRAVFQAKKRVLEPLGLVEEGAKTAPGKKRLVEQSPQEPDSSSGIGKTGQQPAKKRLNFGQTGDSESVPDPQPLGEPPAAPSGLGPNTMASGGGAPMADNNEGADGVGNSSGNWHCDSTWLGDRVITTSTRTWALPTYNNHLYKQISNGTSGGSTNDNTYFGYSTPWGYFDFNRFHCHFSPRDWQRLINNNWGFRPKRLNFKLFNIQVKEVTTNEGTKTIANNLTSTVQVFTDSEYQLPYVLGSAHQGCLPPFPADVFTVPQYGYLTLNNGSQALGRSSFYCLEYFPSQMLRTGNNFQFSYTFEDVPFHSSYAHSQSLDRLMNPLIDQYLYYLVRTQTTGTGGTQTLAFSQAGPSSMANQARNWVPGPCYRQQRVSTTTNQNNNSNFAWTGAAKFKLNGRDSLMNPGVAMASHKDDDDRFFPSSGVLIFGKQGAGNDGVDYSQVLITDEEEIKATNPVATEEYGAVAINNQAANTQAQTGLVHNQGVIPGMVWQNRDVYLQGPIWAKIPHTDGNFHPSPLMGGFGLKHPPPQILIKNTPVPADPPLTFNQAKLNSFITQYSTGQVSVEIEWELQKENSKRWNPEIQYTSNYYKSTNVDFAVNTEGVYSEPRPIGTRYLTRNL

SEQ ID NO: 4782 - DNA, 3117 bp, Adeno-associated virus
  source 1..3117: mol_type = genomic DNA
gaattcgcccttggctgcgtcaactggaccaatgagaactttcccttcaacgattgcgtcgacaagatggtgatctggtgggaggagggcaagatgacggccaaggtcgtggagtccgccaaggccattctcggcggcagcaaggtgcgtgtggaccaaaagtgcaagtcttccgcccagatcgatcccacccccgtgatcgtcacctccaacaccaacatgtgcgccgtgattgacgggaacagcaccaccttcgagcaccagcagccgttgcaggaccggatgttcaaatttgaactcacccgccgtctggagcatgactttggcaaggtgacgaagcaggaagtcaaagagttcttccgctgggcgcaggatcacgtgaccgaggtggcgcatgagttccacgtcagaaagggtggagccaacaagagacccgcccccgatgacgcggatataagcgagcccaagcgggcctgcccctcagtcgcggatccatcgacgtcagacgcggaaggagctccggtggactttgccgacaggtaccaaaacaaatgttctcgtcacgcgggcatgcttcagatgctgtttccctgcaagacatgcgagagaatgaatcagaatttcaacatttgcttcacgcacgggaccagagactgttcagaatgtttccccggcgtgtcagaatctcaaccggtcgtcagaaagaggacgtatcggaaactctgtgcgattcatcatctgctggggcgggctcccgagattgcttgctcggcctgcgatctggtcaacgtggacctggatgactgtgtttctgagcaataaatgacttaaaccaggtatggctgccgatggttatcttccagattggctcgaggacaacctctctgagggcattcgcgagtggtgggacttgaaacctggagccccgaaacccaaagccaaccagcaaaagcaggacgacggccggggtctggtgcttcctggctacaagtacctcggacccttcaacggactcgacaagggggagcccgtcaacgcggcggacgcagcggccctcgagcacgacaaagcctacgaccagcagctcaaagcgggtgacaatccgtacctgcggtataatcacgccgacgccgagtttcaggagcgtctgcaagaagatacgtcttttgggggcaacctcgggcgagcagtcttccaggccaagaagcgggttctcgaacctctcggtctggttgaggaaggcgctaagacggctcctggaaagaagagaccggtagagcagtcgccacaagagccagactcctcctcgggcatcggcaagacaggccagcagcccgctaaaaagagactcaattttggtcagactggcgactcagagtcagtccccgacccacaacctctcggagaacctccagcagccccctcaggtctgggacctaatacaatggcttcaggcggtggcgctccaatggcagacaataacgaaggcgccgacggagtgggtaattcctcgggaaattggcattgcgattccacatggctgggggacagagtcatcaccaccagcacccgaacctgggccctgcccacctacaacaaccacctctacaagcaaatctccaacggcacctcgggaggaagcaccaacgacaacacctattttggctacagcaccccctgggggtattttgacttcaacagattccactgtcacttttcaccacgtgactggcaacgactcatcaacaacaattggggattccggcccaaaagactcaacttcaagctgttcaacatccaggtcaaggaagtcacgacgaacgaaggcaccaagaccatcgccaataatctcaccagcaccgtgcgggtctttacggactcggagtaccagttaccgtacgtgctaggatccgctcaccagggatgtctgcctccgttcccggcggacgtcttcatggttcctcagtacggctatttaactttaaacaatggaagccaagccctgggacgttcctccttctactgtctggagtatttcccatcgcagatgctgagaaccggcaacaactttcagttcagctacaccttcgaggacgtgcctttccacagcagctacgcgcacagccagagcctggacaggctgatgaatcccctcatcgaccagtacctgtactacctggtcagaacgcaaacgactggaactggagggacgcagactctggcattcagccaagcgggtcctagctcaatggccaaccaggctagaaattgggtgcccggaccttgctaccggcagcagcgcgtctccacgacaaccaaccagagcaacaacagcaactttgcctggacgggagctgccaagtttaagctgaacggccgagactctctaatgaatccgggcgtggcaatggcttcccacaaggatgacgacgaccgcttcttcccttcgagcggggtcctgatttttggcaagcaaggagccgggaacgatggagtggattacagccaagtgctgattacagatgaggaagaaatcaaggctaccaaccccgtggccacagaagaatatggagcagtggccatcaacaaccaggccgccaatacgcaggcgcagaccggactcgtgcacaaccagggggtgattcccggcatggtgtggcagaatagagacgtgtacctgcagggtcccatctgggccaaaattcctcacacggacggcaactttcacccgtctcccctgatgggcggctttggactgaagcacccgcctcctcaaattctcatcaagaacacaccggttccagcggacccgccgcttaccttcaaccaggccaagctgaactctttcatcacgcagtacagcaccggacaggtcagcgtggaaatcgagtgggagctgcagaaagaaaacagcaaacgctggaatccagagattcaatacacttccaactactacaaatctacaaatgtggactttgctgtcaacacggaaggagtttatagcgagcctcgccccattggcacccgttacctcacccgcaacctgtaattacatgttaatcaataaaccggttaattcgtttcagttgaactttggtctctgcgaagggcgaattc

SEQ ID NO: 4783 - protein, 736 aa, Adeno-associated virus
MAADGYLPDWLEDNLSEGIREWWDLKPGAPKPKANQQKQDDGRGLVLPGYKYLGPFNGLDKGEPVNAADAAALEHDKAYDQQLKAGDNPYLRYNHADAEFQERLQEDTSFGGNLGRAVFQAKKRVLEPLGLVEEGAKTAPGKKRPVEQSPQEPDSSSGIGKTGQQPAKKRLNFGQTGDSESVPDPQPLGEPPAAPSGLGPNTMASGGGAPMADNNEGADGVGNSSGNWHCDSTWLGDRVITTSTRTWALPTYNNHLYKQISNGTSGGSTNDNTYFGYSTPWGYFDFNRFHCHFSPRDWQRLINNNWGFRPKRLNFKLFNIQVKEVTTNEGTKTIANNLTSTVRVFTDSEYQLPYVLGSAHQGCLPPFPADVFMVPQYGYLTLNNGSQALGRSSFYCLEYFPSQMLRTGNNFQFSYTFEDVPFHSSYAHSQSLDRLMNPLIDQYLYYLVRTQTTGTGGTQTLAFSQAGPSSMANQARNWVPGPCYRQQRVSTTTNQSNNSNFAWTGAAKFKLNGRDSLMNPGVAMASHKDDDDRFFPSSGVLIFGKQGAGNDGVDYSQVLITDEEEIKATNPVATEEYGAVAINNQAANTQAQTGLVHNQGVIPGMVWQNRDVYLQGPIWAKIPHTDGNFHPSPLMGGFGLKHPPPQILIKNTPVPADPPLTFNQAKLNSFITQYSTGQVSVEIEWELQKENSKRWNPEIQYTSNYYKSTNVDFAVNTEGVYSEPRPIGTRYLTRNL

SEQ ID NO: 4784 - DNA, 3121 bp, Adeno-associated virus
  source 1..3121: mol_type = genomic DNA
gaattcgcccttctacggctgcgtcaactggaccaatgagaactttcccttcaacgattgcgtcgacaagatggtgatctggtgggaggagggcaagatgacggccaaggtcgtggagtccgccaaggccattctcggcggcagcaaggtgcgtgtggaccaaaagtgcaagtcttccgcccagatcgatcccacccccgtgatcgtcacctccaacaccaacatgtgcgccgtgattgacgggaacagcaccaccttcgagcaccagcagccgttgcaggaccggatgttcaaatttgaactcacccgccgtctggagcatgactttggcaaggtgacgaagcaggaagtcaaagagttcttccgctgggcgcaggatcacgtgaccgaggtggcgcatgagttccacgtcagaaagggtggcgccaacaagagacccgcccccgatgacgcggatataagcgagcccaagcgggcctgcccctcagtcgcggatccatcgacgtcagacgcggaaggagctccggtggactttgccgacaggtaccaaaacaaatgttctcgtcacgcgggcatgcttcagatgctgtttccctgcaagacatgcgagagaatgaatcagaatttcaacatttgcttcacgcacgggaccagagactgttcagaatgtttccccggcgtgtcagaatctcaaccggtcgtcagaaagaggacgtatcggaaactctgtgcgattcatcatctgctggggcgggctcccgagattgcttgctcggcctgcgatctggtcaacgtggacctggatgactgtgtttctgagcaataaatgacttaaaccaggtatggctgccgatggttatcttccagattggctcgaggacaacctctctgagggcattcgcgagtggtgggacttgaaacctggagccccgaaacccaaagccaaccagcaaaagcaggacgacggccggggtctggtgcttcctggctacaagtacctcggacccttcaacggactcgacaagggggagcccgtcaacgcggcggacgcagcggccctcgagcacgacaaagcctacgaccagcagctcaaagcgggtgacaatccgtacctgcggtataatcacgccgacgccgagtttcaggagcgtctgcaagaagatacgtcctttgggggcaacctcgggcgagcagtcttccaggccaagaagcgggttctcgaacctctcggtctggttgaggaaggcgctaagacggctcctggaaagaagagaccggtagagcagtcgccacaagagccagactcctcctcgggcatcggcaagacaggccagcagcccgctaaaaagagactcaattttggtcagactggcgactcagagtcagtccccgacccacaacctctcggagaacctccagcagccccctcaggtctgggacctaatacaatggcttcaggcggtggcgctccaatggcagacaataacgaaggcgccgacggagtgggtaattcctcgggaaattggcattgcgattccacatggctgggggacagagtcatcaccaccagcacccgaacctgggccctgcccacctacaacaaccacctctacaagcaaatctccaacggcacctcgggaggaagcaccaacgacaacacctattttggctacagcaccccctgggggtattttgacttcaacagattccactgtcacttttcaccacgtgactggcaacgactcatcaacaacaattggggattccggcccaaaagactcaacttcaagctgttcaacatccaggtcaaggaagtcacgacgaacgaaggcaccaagaccatcgccaataatctcaccagcaccgtgcaggtctttacggacttggagtaccagttaccgtacgtgctaggatccgctcaccagggatgtctgcctccgttcccggcggacgtcttcatggttcctcagtacggctatttaactttaaacaatggaagccaagccctgggacgttcctccttctactgtctggagtatttcccatcgcagatgccgagaaccggcaacaactttcagttcagctacaccttcgaggacgtgcctttccacagcagctacgcgcacagccagagcctggacaggctgatgaatcccctcatcgaccagtacctgtactacctggtcagaacgcaaacgactggaactggagggacgcagactctggcattcagccaagcgggtcctagctcaatggccaaccaggctagaaattgggtgcccggaccttgctaccggcagcagcgcgtctccacgacaaccaaccagaacaacaacagcaactttgcctggacgggagctgccaagtttaagctgaacggccgagactctctaatgaatccgggcgtggcaatggcttcccacaaggatgacgacgaccgcttcttcccttcgagcggggtcctgatttttggcaagcaaggagccgggaacgatggagtggattacagccaagtgctgattacagatgaggaagaaatcaaggctaccaaccccgtggccacagaagaatatggagcagtggccatcaacaaccaggccgccaatacgcaggcgcagaccggactcgtgcacaaccagggggtgattcccggcatggtgtggcagaatagagacgtgtacctgcagggtcccatctgggccaaaattcctcacacggacggcaactttcacccgtctcccctgatgggcggctttggactgaagcacccgcctcctcaaattctcatcaagaacacaccggttccagcggacccgccgcttaccttcaaccaggccaagctgaactctttcatcacgcagtacagcaccggacaggtcagcgtggaaatcgagtgggagctgcagaaagaaaacagcaaacgctggaatccagagattcaatacacttccaactactacaaatctacaaatgtggactttgctgtcaacacggaaggagtttatagcgagcctcgccccattggcacccgttacctcacccgcaacctgtaattacatgttaatcaataaaccggttaattcgtttcagttgaactttggtctctgcgaagggcgaattc

SEQ ID NO: 4785 - protein, 736 aa, Adeno-associated virus
MAADGYLPDWLEDNLSEGIREWWDLKPGAPKPKANQQKQDDGRGLVLPGYKYLGPFNGLDKGEPVNAADAAALEHDKAYDQQLKAGDNPYLRYNHADAEFQERLQEDTSFGGNLGRAVFQAKKRVLEPLGLVEEGAKTAPGKKRPVEQSPQEPDSSSGIGKTGQQPAKKRLNFGQTGDSESVPDPQPLGEPPAAPSGLGPNTMASGGGAPMADNNEGADGVGNSSGNWHCDSTWLGDRVITTSTRTWALPTYNNHLYKQISNGTSGGSTNDNTYFGYSTPWGYFDFNRFHCHFSPRDWQRLINNNWGFRPKRLNFKLFNIQVKEVTTNEGTKTIANNLTSTVQVFTDLEYQLPYVLGSAHQGCLPPFPADVFMVPQYGYLTLNNGSQALGRSSFYCLEYFPSQMPRTGNNFQFSYTFEDVPFHSSYAHSQSLDRLMNPLIDQYLYYLVRTQTTGTGGTQTLAFSQAGPSSMANQARNWVPGPCYRQQRVSTTTNQNNNSNFAWTGAAKFKLNGRDSLMNPGVAMASHKDDDDRFFPSSGVLIFGKQGAGNDGVDYSQVLITDEEEIKATNPVATEEYGAVAINNQAANTQAQTGLVHNQGVIPGMVWQNRDVYLQGPIWAKIPHTDGNFHPSPLMGGFGLKHPPPQILIKNTPVPADPPLTFNQAKLNSFITQYSTGQVSVEIEWELQKENSKRWNPEIQYTSNYYKSTNVDFAVNTEGVYSEPRPIGTRYLTRNL

SEQ ID NO: 4786 - DNA, 3122 bp, Adeno-associated virus
  source 1..3122: mol_type = genomic DNA
gaattcgccctttctacggctgcgtcaactggaccaatgagaactttcccttcaacgattgcgtcgacaagatggtgatctggtgggaggagggcaagatgacggccaaggtcgtggagtccgccaaggccattctcggcggcagcaaggtgcgtgtggaccaaaagtgcaagtcttccgcccagatcgatcccacccccgtgatcgtcacctccaacaccaacatgtgcgccgtgattgacgggaacagcaccaccttcgagcaccagcagccgttgcaggaccggatgttcaaatttgaactcacccgccgtctggagcatgactttggcaaggtgacgaagcaggaagtcaaagggttcttccgctgggcgcaggatcacgtgaccgaggtggcgcatgagttccacgtgcgagcccaagcgggcctgcccctcagtcgcggatccatcgacgtcagaccagaaagggtggagccaacaagagacccgcccccgatgacgcggatataagcggaaggagctccggtggactttgccgacaggtaccaaaacaaatgttctcgtcacgcgggcatgcttcagatgctgtttccctgcaagacatgcgagagaatgaatcagaatttcaacatttgcttcacgcacgggaccagagactgttcagaatgtttccccggcgtgtcagaatctcaaccggtcgtcagaaagaggacgtatcggaaactctgtgcgattcatcatctgctggggcgggctcccgagattgcttgctcggcctgcgatctggtcaacgtggacctggatgactgtgtttctgagcaataaatgacttaaaccaggtatggctgccgatggttatcttccagattggctcgaggacaacctctctgagggcattcgcgagtggtgggacttgaaacctggagccccgaaacccaaagccaaccagcaaaagcaggacgacggccggggtctggtgcttcctggctacaagtacctcggacccttcaacggactcgacaagggggagcccgtcaacgcggcggacgcagcggccctcgagcacgacaaagcctacgaccagcagctcaaagcgggtgacaatccgtacctgcggtataatcacgccgacgccgagtttcaggagcgtctgcaagaagatacgtcttttgggggcaacctcgggcgagcagtcttccaggccaagaagcgggttctcgaacctctcggtctggttgaggaaggcgctaagacggctcctggaaagaagagaccggtagagcagtcgccacaagagccagactcctcctcgggcatcggcaagacaggccagcagcccgctaaaaagagactcaattttggtcagactggcgactcagagtcagtccccgacccacaacctctcggagaacctccagcagccccctcaggtctgggacctaatacaatggcttcaggcggtggcgctccaatggcagacaataacgaaggcgccgacggagtgggtaattcctcgggaaattggcattgcgattccacatggctgggggacagagtcatcaccaccagcacccgaacctgggccctgcccacctacaacaaccacctctacaagcaaatctccaacggcacctcgggaggaagcaccaacgacaacacctattttggctacagcaccccctgggggtattttgacttcaacagattccactgtcacttttcaccacgtgactggcaacgactcatcaacaacaattggggattccggcccaaaagactcaacttcaagctgttcaacatccaggtcaaggaagtcacgacgaacgaaggcaccaagaccatcgccaataatctcaccagcaccgtgcaggtctttacggactcggagtaccagttaccgtacgtgctaggatccgctcaccagggatgtctgcctccgttcccggcggacgtcttcatggttcctcagtacggctatttaactttaaacaatggaagccaagccctgggacgttcctccttctactgtctggagtatttcccatcgcagatgctgagaaccggcaacaactttcagttcagctacaccttcgaggacgtgcctttccacagcagctacgcgcacagccagagcctggacaggctgatgaatcccctcatcgaccagtacctgtactacctggtcagaacgcaaacgactggaactggagggacgcagactctggcattcagccaagcgggtcctagctcaatggccaaccaggctagaaattgggtgcccggaccttgctaccggcagcagcgcgtctccacgacaaccaaccagaacaacaacagcaactttgcctggacgggagctgccaagtttaagctgaacggccgagactctctaatgaatccgggcgtggcaatggcttcccacaaggatgacgacgaccgcttcttcccttcgagcggggtcctgatttttggcaagcaaggagccgggaacgatggagtggattacagccaagtgctgattacagatgaggaagaaatcaaggctaccaaccccgtggccacagaagaatatggagcagtggccatcaacaaccaggccgccaatacgcaggcgcagaccggactcgtgcacaaccagggggtgattcccggcatggtgtggcagaatagagacgtgtacctgcagggtcccatctgggccaaaattcctcacacggacggcaactttcacccgtctcccctgatgggcggctttggactgaagcacccgcctcctcaaattctcatcaagaacacaccggttccagcggacccgccgcttaccttcaaccaggccaagctgaactctttcatcacgcagtacagcaccggacaggtcagcgtggaaatcgagtgggagctgcagaaagaaaacagcaaacgctggaatccagagattcaatacacttccaactactacaaatctacaaatgtggactttgctgtcaacacggagggggtttatagcgagcctcgccccattggcacccgttacctcacccgcaacctgtaattacatgttaatcaataaaccggttaattcgtttcagttgaactttggtctctgcgaagggcgaattc

SEQ ID NO: 4787 - protein, 736 aa, Adeno-associated virus
MAADGYLPDWLEDNLSEGIREWWDLKPGAPKPKANQQKQDDGRGLVLPGYKYLGPFNGLDKGEPVNAADAAALEHDKAYDQQLKAGDNPYLRYNHADAEFQERLQEDTSFGGNLGRAVFQAKKRVLEPLGLVEEGAKTAPGKKRPVEQSPQEPDSSSGIGKTGQQPAKKRLNFGQTGDSESVPDPQPLGEPPAAPSGLGPNTMASGGGAPMADNNEGADGVGNSSGNWHCDSTWLGDRVITTSTRTWALPTYNNHLYKQISNGTSGGSTNDNTYFGYSTPWGYFDFNRFHCHFSPRDWQRLINNNWGFRPKRLNFKLFNIQVKEVTTNEGTKTIANNLTSTVQVFTDSEYQLPYVLGSAHQGCLPPFPADVFMVPQYGYLTLNNGSQALGRSSFYCLEYFPSQMLRTGNNFQFSYTFEDVPFHSSYAHSQSLDRLMNPLIDQYLYYLVRTQTTGTGGTQTLAFSQAGPSSMANQARNWVPGPCYRQQRVSTTTNQNNNSNFAWTGAAKFKLNGRDSLMNPGVAMASHKDDDDRFFPSSGVLIFGKQGAGNDGVDYSQVLITDEEEIKATNPVATEEYGAVAINNQAANTQAQTGLVHNQGVIPGMVWQNRDVYLQGPIWAKIPHTDGNFHPSPLMGGFGLKHPPPQILIKNTPVPADPPLTFNQAKLNSFITQYSTGQVSVEIEWELQKENSKRWNPEIQYTSNYYKSTNVDFAVNTEGVYSEPRPIGTRYLTRNL

SEQ ID NO: 4788 - DNA, 2370 bp, Adeno-associated virus
  source 1..2370: mol_type = genomic DNA
gaattcgccctttctacggctgcgtcaactggaccaatgagaactttcccttcaacgattgcgtcgacaagatggtgatctggtgggaggagggcaagatgacggccaaggtcgtggagtccgccaaggccattctcggcggcagcaaggtgcgcgtggaccaaaagtgcaagtcgtccgcccagatcgaccccacccccgtgatcgtcacctccaacaccaacatgtgcgccgtgattgacgggaacagcaccaccttcgagcaccagcagccgttgcaggaccggatgttcaagttcgaactcacccgccgtctggagcacgactttggcaaggtgaccaagcaggaagtcaaagagttcttccgctgggcgcaggatcacgtgaccgaggtggcgcatgagttctacgtcagaaagggcggagccagcaaaagacccgcccccgatgacgcggatataagcgagcccaagcgggcctgcccctcagtcgcggatccatcgacgtcagacgcggaaggagctccggtggactttgccgacaggtaccaaaacaaatgttctcgtcacgcgggcatgcttcagacgctgtttccctgcaaaacgtgcgagagaatgaatcagaatttcaacatttgcttcacgcacggggtcagagactgctcagaatgtttccccggtgcatcagaatctcaaccggtcgtcagaaaaaaaacgtatcagaaactgtgtgccattcatcatctgctggggcgggcacccgagattgcttgctcggcctgcgatctggtcaacgtggacctggacgactgtgtttctgagcaataaatgacttaaaccaggtatggctgccgatggttatcttccagattggcttgaggacaacctctctgagggcattcgcgagtggtgggacctgaaacctggagccccgaaacccaaagccaaccagcaaaagcaggacgacggccggggtctggtgcttcctggctacaagtacctcggacccttcaacggactcgacaagggggagcccgtcaacgcggcggacgcagcggccctcgagcacgacaaggcctacgaccagcagctcaaagcgggtgacaatccgtacctgcggtataaccacgccgacgccgagtttcaggagcgtctgcaagaagatacgtcttttgggggcaacctcgggcgagcagtcttccaggccaagaagcgggttctcgaacctctcggtctggttgaggaaggcgctaagacggctcctggaaagaagagaccggtagagccatcacctcagcgttcccccgactcctccacgggcatcggcaagaaaggccaccagcccgcgagaaagagactgaactttgggcagactggcgactcggagtcagtccccgaccctcaaccaatcggagaaccaccagcaggcccctctggtctgggatctggtacaatggctgcaggcggtggcgctccaatggcagacaataacgaaggcgccgacggagtgggtagttcctcaggaaattggcattgcgattccacatggctgggcgacagagtcatcaccaccagcacccgaacctgggccctgcccacctacaacaaccatctctacaagcaaatctccaacgggacatcgggaggaagcactaacgacaacacctactttggctacagcaccccctgggggtattttgacttcaacagattccactgccacttctcaccacgtgactggcagcgactcatcaacaataactggggattccggcccaagagactcaacttcaagctcttcaacatccaggtcaaggaggtcacgcagaatgaaggcaccaagaccatcgccaataaccttaccagcacgattcaggtgtttacggactcggaataccagctcccgtacgtcctcggctctgcgcaccagggctgcctccctccgttcccggcggacgtcttcatgattcctcagtacgggtatctgaccctaaacaatggcagtcaggctgtgggccgttcctccttctactgcctggaatacttcccttctcaaatgctgaggacgggcaacaactttgaattcagctacaccttcgaggacgtgcctttccacagcagctacgcgcacagccagagcctggaccggctgatgaaccctctcatcgaccagtacctgtattacttatccagaactcagtccacaggaggaactcaaggtactcagcaattgttattttctcaagccgggcccgcaaacatgtyggctcaggccaagaactggctacctggaccgtgttaccgtcagcaacgagtttccacgacactgtcgcaaaacaacaacagcaattttgctggaccggtgccacca

SEQ ID NO: 4789 - protein, 738 aa, Adeno-associated virus; identical to SEQ ID NO: 4779

SEQ ID NO: 4790 - DNA, 2205 bp, Adeno-associated virus
  source 1..2205: mol_type = genomic DNA
atgactgacggttaccttccagattggctagaggacaacctctctgaaggcgttcgagagtggtgggcgctgcaacctggagcccctaaacccaaggcaaatcaacaacatcaggacaacgctcggggtcttgtgcttccgggttacaaatacctcggacccggcaacggactcgacaagggggaacccgtcaacgcagcggacgcggcagccctcgagcacgacaaggcctacgaccagcagctcaaggccggtgacaacccctacctcaagtacaaccacgccgacgcggagttccagcagcggcttcagggcgacacatcgtttgggggcaacctcggcagagcagtcttccaggccaaaaagagggttcttgaacctcttggtctggttgagcaagcgggtgagacggctcctggaaagaagagaccgttgattgaatccccccagcagcccgactcctccacgggtatcggcaaaaaaggcaagcagccggctaaaaagaagctcgttttcgaagacgaaactggagcaggcgacggaccccctgagggatcaacttccggagccatgtctgatgacagtgagatgcgtgcagcagctggcggagctgcagtcgagggcggacaaggtgccgatggagtgggtaatgcctcgggtgattggcattgcgattccacctggtctgagggccacgtcacgaccaccagcaccagaacctgggtcttgcccacctacaacaaccacctctacaagcgactcggagagagcctgcagtccaacacctacaacggattctccaccccctggggatactttgacttcaaccgcttccactgccacttctcaccacgtgactggcagcgactcatcaacaacaactggggcatgcgacccaaagccatgcgggtcaaaatcttcaacatccaggtcaaggaggtcacgacgtcgaacggcgagacaacggtggctaataaccttaccagcacggttcagatctttgcggactcgtcgtacgaactgccgtacgtgatggatgcgggtcaagagggcagcctgcctccttttcccaacgacgtctttatggtgccccagtacggctactgtggactggtgaccggcaacacttcgcagcaacagactgacagaaatgccttctactgcctggagtactttccttcgcagatgctgcggactggcaacaactttgaaattacgtacagttttgagaaggtgcctttccactcgatgtacgcgcacagccagagcctggaccggctgatgaaccctctcatcgaccagtacctgtggggactgcaatcgaccaccaccggaaccaccctgaatgccgggactgccaccaccaactttaccaagctgcggcctaccaacttttccaactttaaaaagaactggctgcccgggccttcaatcaagcagcagggcttctcaaagactgccaatcaaaactacaagatccctgccaccgggtcagacagtctcatcaaatacgagacgcacagcactctggacggaagatggagtgccctgacccccggacctccaatggccacggctggacctgcggacagcaagttcagcaacagccagctcatctttgcggggcctaaacagaacggcaacacggccaccgtacccgggactctgatcttcacctctgaggaggagctggcagccaccaacgccaccgatacggacatgtggggcaacctacctggcggtgaccagagcaacagcaacctgccgaccgtggacagactgacagccttgggagccgtgcctggaatggtctggcaaaacagagacatttactaccagggtcccatttgggccaagattcctcataccgatggacactttcacccctcaccgctgattggtgggtttgggctgaaacacccgcctcctcaaatttttatcaagaacaccccggtacctgcgaatcctgcaacgaccttcagctctactccggtaaactccttcattactcagtacagcactggccaggtgtcggtgcagattgactgggagatccagaaggagcggtccaaacgctggaaccccgaggtccagtttacctccaactacggacagcaaaactctctgttgtgggctcccgatgcggctgggaaatacactgagcctagggctatcggtacccgctacctcacccaccacctgtaa

SEQ ID NO: 4791 - protein, 734 aa, Adeno-associated virus
MTDGYLPDWLEDNLSEGVREWWALQPGAPKPKANQQHQDNARGLVLPGYKYLGPGNGLDKGEPVNAADAAALEHDKAYDQQLKAGDNPYLKYNHADAEFQQRLQGDTSFGGNLGRAVFQAKKRVLEPLGLVEQAGETAPGKKRPLIESPQQPDSSTGIGKKGKQPAKKKLVFEDETGAGDGPPEGSTSGAMSDDSEMRAAAGGAAVEGGQGADGVGNASGDWHCDSTWSEGHVTTTSTRTWVLPTYNNHLYKRLGESLQSNTYNGFSTPWGYFDFNRFHCHFSPRDWQRLINNNWGMRPKAMRVKIFNIQVKEVTTSNGETTVANNLTSTVQIFADSSYELPYVMDAGQEGSLPPFPNDVFMVPQYGYCGLVTGNTSQQQTDRNAFYCLEYFPSQMLRTGNNFEITYSFEKVPFHSMYAHSQSLDRLMNPLIDQYLWGLQSTTTGTTLNAGTATTNFTKLRPTNFSNFKKNWLPGPSIKQQGFSKTANQNYKIPATGSDSLIKYETHSTLDGRWSALTPGPPMATAGPADSKFSNSQLIFAGPKQNGNTATVPGTLIFTSEEELAATNATDTDMWGNLPGGDQSNSNLPTVDRLTALGAVPGMVWQNRDIYYQGPIWAKIPHTDGHFHPSPLIGGFGLKHPPPQIFIKNTPVPANPATTFSSTPVNSFITQYSTGQVSVQIDWEIQKERSKRWNPEVQFTSNYGQQNSLLWAPDAAGKYTEPRAIGTRYLTHHL

SEQ ID NO: 4792 - DNA, 3128 bp, Adeno-associated virus
  source 1..3128: mol_type = genomic DNA
gaattcgccctttctacggctgcgtcaactggaccaatgagaactttcccttcaacgattgcgtcgacaagatgttgatctggtgggaggagggcaagatgacggccaaggtcgtggagtccgccaaggccattctcggcggcagcaaagtgcgcgtggaccaaaagtgcaagccgtccgcccagatcgaccccacccccgtgatcgtcacctccaacaccaacatgtgcgccgtgattgacgggaacagcaccaccttcgagcaccagcagccgttgcgggaccggatgttcaagtttgaactcacccgccgtctggagcacgactttggcaaggtgacaaagcaggaagtcagagagttcttccgctgggcgcaggatcacgtgaccgaggtggcgcacgagttctacgtcagaaagggtggagccaacaagagacccgcccccgatgacgcggataaaagcgagcccaagcgggcctgcccctcagtcgcggatccatcgacgtcagacgcggaaggagctccggtggactttgccgacaggtaccaaaacaaatgttctcgtcacgcgggcatgcttcagatgctgtttccctgcaaaacatgcgagagaatgaatcagaatttcaacatttgcttcacgcacgggaccagagactgttcagaatgtttccccggcgtgtcagaatctcaaccggtcgtcagaaaaaagacgtatcggaaactctgtgcgattcatcatctgctggggcgggcacccgagattgcttgctcggcctgcgatctggtcaacgtggacctagatgactgtgtttctgagcaataaatgacttaaaccaggtatggctgccgatggttatcttccagattggctcgaggacaacctctctgagggcattcgcgagtggtgggacttgaaacctggagccccgaaacccaaagccaaccagcaaaagcaggacgacggccggggtctggtgcttcctggctacaagtacctcggacccttcaacggactcgacaagggggagcccgtcaacgcggcggacgcagcggccctcgagcacgacaaggcctacgaccagcagctcaaagcgggtgacaatccgtacctgcggtataaccacgccgacgccgagtttcaggagcgtctgcaagaagatacgtcttttgggggcaacctcgggcgagcagtcttccaggccaagaagcgggttctcgaacctctcggtctggttgaggaaggcgctaagacggctcctggaaagaagagaccggtagagccatcaccccagcgttctccagactcctctacgggcatcggcaagaaaggccagcagcccgcgaaaaagagactcaactttgggcagactggcgactcagagtcagtgcccgaccctcaaccaatcggagaaccccccgcaggcccctctggtctgggatctggtacaatggctgcaggcggtggcgctccaatggcagacaataacgaaggcgccgacggagtgggtagttcctcaggaaattggcattgcgattccacatggctgggcgacagagtcatcaccaccagcacccgaacctgggccctccccacctacaacaaccacctctacaagcaaatctccaacgggacttcgggaggaagcaccaacgacaacacctacttcggctacagcaccccctgggggtattttgactttaacagattccactgccacttctcaccacgtgactggcagcgactcatcaacaacaactggggattccggcccaagagactcaacttcaagctcttcaacatccaggtcaaggaggtcacgcagaatgaaggcaccaagaccatcgccaataaccttaccagcacgattcaggtctttacggactcggaataccagctcccgtacgtcctcggctctgcgcaccagggctgcctgcctccgttcccggcggacgtcttcatgattcctcagtacgggtacctgactctgaacaatggcagtcaggccgtgggccgttcctccttctactgcctggagtactttccttctcaaatgctgagaacgggcaacaactttgagttcagctaccagtttgaggacgtgccttttcacagcagctacgcgcacagccaaagcctggaccggctgatgaaccccctcatcgaccagtacctgtactacctgtctcggactcagtccacgggaggtaccgcaggaactcagcagttgctattttctcaggccgggcctaataacatgtcggctcaggccaaaaactggctacccgggccctgctaccggcagcaacgcgtctccacgacactgtcgcaaaataacaacagcaactgtaaatcccggtgtcgctatggcaacccacaaggacgacgaagagcgattttgcctggaccggtgccaccaagtatcatctgaatggcagagactctctgttttccgtccagcggagtcttaatgtttgggaaacagggagctggaaaagacaacgtggactatagcagcgttatgctaaccagtgaggaagaaattaaaaccaccaacccagtggccacggaacagtacggcgtggtggccgataacctgcaacagcaaaacgccgctcctattgtaggggccgtcaacagtcaaggagccttacctggcatggtctggcagaaccgggacgtgtacctgcagggtcctatctgggccaagattcctcacacggacggaaactttcatccctcgccgctgatgggaggctttggactgaaacacccgcctcctcagatcctgattaagaatacacctgttcccgcggatcctccaactaccttcagtcaagctaagctggcgtcgttcatcacgcagtacagcaccggacaggtcagcgtggaaattgaatgggagctgcagaaagaaaacagcaaacgctggaacccagagattcaatacacttccaactactacaaatctacaaatgtggacttcgctgttaacacagatggcacttattctgagcctcgccccattggcacccgttacctcacccgtaatctgtaattgctcgttaatcaataaaccggttgattcgtttcagttgaactttggtctctgcgaagggcgaattc

SEQ ID NO: 4793 - protein, 738 aa, Adeno-associated virus
MAADGYLPDWLEDNLSEGIREWWDLKPGAPKPKANQQKQDDGRGLVLPGYKYLGPFNGLDKGEPVNAADAAALEHDKAYDQQLKAGDNPYLRYNHADAEFQERLQEDTSFGGNLGRAVFQAKKRVLEPLGLVEEGAKTAPGKKRPVEPSPQRSPDSSTGIGKKGQQPAKKRLNFGQTGDSESVPDPQPIGEPPAGPSGLGSGTMAAGGGAPMADNNEGADGVGSSSGNWHCDSTWLGDRVITTSTRTWALPTYNNHLYKQISNGTSGGSTNDNTYFGYSTPWGYFDFNRFHCHFSPRDWQRLINNNWGFRPKRLNFKLFNIQVKEVTQNEGTKTIANNLTSTIQVFTDSEYQLPYVLGSAHQGCLPPFPADVFMIPQYGYLTLNNGSQAVGRSSFYCLEYFPSQMLRTGNNFEFSYQFEDVPFHSSYAHSQSLDRLMNPLIDQYLYYLSRTQSTGGTAGTQQLLFSQAGPNNMSAQAKNWLPGPCYRQQRVSTTLSQNNNSNFAWTGATKYHLNGRDSLVNPGVAMATHKDDEERFFPSSGVLMFGKQGAGKDNVDYSSVMLTSEEEIKTTNPVATEQYGVVADNLQQQNAAPIVGAVNSQGALPGMVWQNRDVYLQGPIWAKIPHTDGNFHPSPLMGGFGLKHPPPQILIKNTPVPADPPTTFSQAKLASFITQYSTGQVSVEIEWELQKENSKRWNPEIQYTSNYYKSTNVDFAVNTDGTYSEPRPIGTRYLTRNL

SEQ ID NO: 4794 - DNA, 3129 bp, Adeno-associated virus
  source 1..3129: mol_type = genomic DNA
gaattcgccctttctacggctgcgtcaactggaccaatgagaactttcccttcaacgattgcgtcgacaagatggtgatctggtgggaggagggcaagatgacggccaaggtcgtggagtccgccaaggccattctcggcggcagcaaagtgcgcgtggaccaaaagtgcaagtcgtccgcccagatcgaccccacccccgtgatcgtcacctccaacaccaacatgtgcgccgtgattgacgggaacagcaccaccttcgagcaccagcagccgttgcaggaccggatgttcaagtttgaactcacccgccgtctggagcacgactttggcaaggtgacaaagcaggaagtcagagagttcttccgctgggcgcaggatcacgtgaccgaggtggcgcacgagttctacgtcagaaagggtggagccaacaagagacccgcccccgatgacgcggataaaagcgagcccaagcgggcctgcccctcagtcgcggatccatcgacgtcagacgcggaaggagctccggtggactttgccgacaggtaccaaaacaaatgttctcgtcacgcgggcatgcttcagatgctgtttccctgcaaaacatgcgagagaatgaatcagaatttcaacatttgcttcacgcacgggaccagagactgttcagaatgtttccccggcgtgtcagaatctcaaccggtcgtcagaaaaaagacgtatcggaaactctgtgcgattcatcatctgctgggggcgggcacccgagattgcttgctcggcctgcgatctggtcaacgtggacctagatgactgtgtttctgagcaataaatgacttaaaccaggtatggctgccgatggttatcttccagattggctcgaggacaacctctctgagggcattcgcgagtggtgggacttgaaacctggagccccgaaacccaaagccaaccagcaaaagcaggacgacggccggggtctggtgcttcctggctacaagtacctcggacccttcaacggactcgacaagggggagcccgtcaacgcggcggacgcagcggccctcgagcacgacaaggcctacgaccagcagctcaaagcgggtgacaatccgtacctgcggtataaccacgccgacgccgagtttcaggagcgtctgcaagaagatacgtcttttgggggcaacctcgggcgagcagtcttccaggccaagaagcgggttctcgaacctctcggtctggttgaggaaggcgctaagacggctcctggaaagaagagaccggtagagccatcaccccagcgttctccagactcctctacgggcatcggcaagaaaggccagcagcccgcgaaaaagagactcaactttgggcagactggcgactcagagtcagtgcccgaccctcaaccaatcggagaaccccccgcaggcccctctggtctgggatctggtacaatggctgcaggcggtggcgctccaatggcagacaataacgaaggcgccgacggagtgggtagttcctcaggaaattggcattgcgattccacatggctgggcgacagagtcatcaccaccagcacccgaacctgggccctccccacctacaacaaccacctctacaagcaaatctccaacgggacttcgggaggaagcaccaacgacaacacctacttcggctacagcaccccctgggggtattttgactttaacagattccactgccacttctcaccacgtgactggcagcgactcatcaacaacaactggggattccggcccaagagactcaacttcaagctcttcaacatccaggtcaaggaggtcacgcagaatgaaggcaccaagaccatcgccaataaccttaccagcacgattcaggtctttacggactcggaataccagctcccgtacgtcctcggctctgcgcaccagggctgcctgcctccgttcccggcggacgtcttcatgattcctcagtacgggtacctgactctgaacaatggcagtcaggccgtgggccgttcctccttctactgcctggagtactttccttctcaaatgctgagaacgggcaacaactttgagttcagctaccagtttgaggacgtgccttttcacagcagctacgcgcacagccaaagcctggaccggctgatgaaccccctcatcgaccagtacctgtactacctgtctcggactcagtccacgggaggtaccgcaggaactcagcagttgctattttctcaggccgggcctaataacatgtcggctcaggccaaaaactggctacccgggccctgctaccggcagcaacgcgtctccacgacactgtcgcaaaataacaacagcaactttgcctggaccggtgccaccaagtatcatctgaatggcagagactctctggtaaatcccggtgtcgctatggcaacccacaaggacgacgaagagcgattttttccgtccagcggagtcttaatgtttgggaaacagggagctggaaaagacaacgtggactatagcagcgttatgctaaccagtgaggaagaaattaaaaccaccaacccagtggccacagaacagtacggcgtggtggccgataacctgcaacagcaaaacgccgctcctattgtaggggccgtcaacagtcaaggagccttacctggcatggtctggcagaaccgggacgtgtacctgcagggtcctatctgggccaagattcctcacacggacggaaactttcatccctcgccgctgatgggaggctttggactgaaacacccgcctcctcagatcctgattaagaatacacctgttcccgcggatcctccaactaccttcagtcaagctaagctggcgtcgttcatcacgcagtacagcaccggacaggtcagcgtggaaattgaatgggagctgcagaaagaaaacagcaaacgctggaacccagagattcaatacacttccaactactacaaatctacaaatgtggactttgctgttaacacagatggcacttattctgagcctcgccccatcggcacccgttacctcacccgtaatctgtaattgcttgttaatcaataaaccggttgattcgtttcagttgaactttggtctctgcgaagggcgaattc

SEQ ID NO: 4795 - DNA, 3128 bp, Adeno-associated virus
  source 1..3128: mol_type = genomic DNA
gaattcgccctttctacggctgcgtcaactggaccaatgagaactttcccttcaacgattgcgtcgacaagatggtgatctggtgggaggagggcaagatgacggccaaggtcgtggagtccgccaaggccattctcggcggcagcaaagtgcgcgtggaccaaaagtgcaagtcgtccgcccagatcgaccccacccccgtgatcgtcacctccaacaccaacatgtgcgccgtgattgacgggaacagcaccaccttcgagcaccagcagccgttgcaggaccggatgttcaagtttgaactcacccgccgtctggagcacgactttggcaaggtgacaaagcaggaagtcagagagttcttccgctgggcgcaggatcacgtgaccgaggtggcgcacgagttctacgtcagaaagggtggagccaacaagagacccgcccccgatgacgcggataaaagcgagcccaagcgggcctgcccctcagtcgcggatccatcgacgtcagacgcggaaggagctccggtggactttgccgacaggtaccaaaacaaatgttctcgtcacgcgggcatgcttcagatgctgtttccctgcaaaacatgcgagagaatgaatcagaatttcaacatttgcttcacgcacgggaccagagactgttcagaatgtttccccggcgtgtcagaatctcaaccggttgtcagaaaaaagacgtatcggaaactctgtgcgattcatcatctgctggggcgggcacccgagattgcttgctcggcctgcgatctggtcaacgtggacctagatgactgtgtttctgagcaataaatgacttaaaccaggtatggctgccgatggttatcttccagattggctcgaggacaacctctctgagggcattcgcgagtggtgggacttgaaacctggagccccgaaacccaaagccaaccagcaaaagcaggacgacggccggggtctggtgcttcctggctacaagtacctcggacccttcaacggactcgacaagggggagcccgtcaacgcggcggacgcagcggccctcgagcacgacaaggcctacgaccagcagctcaaagcgggtgacaatccgtacctgcggtataaccacgccgacgccgagtttcaggagcgtctgcaagaagatacgtcttttgggggcaacctcgggcgagcagtcttccaggccaagaagcgggttctcgaacctctcggtctggttgaggaaggcgctaagacggctcctggaaagaagagaccggtagagccatcaccccagcgttctccagactcctctacgggcatcggcaagaaaggccagcagcccgcgaaaaagagactcaactttgggcagactggcgactcagagtcagtgcccgaccctcaaccaatcggagaaccccccgcaggcccctctggtctgggatctggtacaatggctgcaggcggtggcgctccaatggcagacaataacgaaggcgccgacggagtgggtagttcctcaggaaattggcattgcgattccacatggctgggcgacagagtcatcaccaccagcacccgaacctgggccctccccacctacaacaaccacctctacaagcaaatctccaacgggacttcgggaggaagcaccaacgacaacacctacttcggctacagcaccccctgggggtattttgactttaacagattccactgccacttctcaccacgtgactggcagcgactcatcaacaacaactggggattccggcccaagagacccaacttcaagctcttcaacatccaggtcaaggaggtcacgcagaatgaaggcaccaagaccatcgccaataaccttaccagcacgattcaggtctttacggactcggaataccagctcccgtacgtcctcggctctgcgcaccagggctgcctgcctccgttcccggcggacgtcttcatgattcctcagtacgggtacctgactctgaacaatggcagtcaggccgtgggccgttcctccttctactgcctggagtactttccttctcaaatgctgagaacgggcaacaactttgagttcagctaccagtttgaggacgtgccttttcacagcagctacgcgcacagccaaagcctggaccggctgatgaaccccctcatcgaccagtacctgtactacctgtctcggactcagtccacgggaggtaccgcaggaactcagcagttgctattttctcaggccgggcctaataacatgtcggctcaggccaaaaactggctacccgggccctgctaccggcagcaacgcgtctccacgacactgtcgcaaaataacaacagcaactttgcctggaccggtgccaccaagtatcatctgaatggcagagactctctggtaaatcccggtgtcgctatggcaacccacaaggacgacgaagagcgattttttccgtccagcggagtcttaatgtttgggaaacagggagctggaaaagacaacgtggactatagcagcgttatgctaaccagtgaggaagaaattaaaaccaccaacccagtggccacagaacagtacggcgtggtggccgataacctgcaacagcaaaacgccgctcctattgtaggggccgtcaacagtcaaggagccttacctggcatggtctggcagaaccgggacgtgtacctgcagggtcctatctgggccaagattcctcacacggacggaaactttcatccctcgccgctgatgggaggctttggactgaaacacccgcctcctcagatcctgattaagaatacacctgttcccgcggatcctccaactaccttcagtcaagctaagctggcgtcgttcatcacgcagtacagcaccggacaggtcagcgtggaaattgaatgggagctgcagaaagaaaacagcaaacgctggaacccagagattcaatacacttccaactactacaaatctacaaatgtggactttgctgttaacacagatggcacttattctgagcctcgccccattggcacccgttacctcacccgtaatctgtaattgcttgttaatcaataaaccggttgattcgtttcagttgaactttggtctctgcgaagggcgaattc

SEQ ID NO: 4796 - protein, 738 aa, Adeno-associated virus
MAADGYLPDWLEDNLSEGIREWWDLKPGAPKPKANQQKQDDGRGLVLPGYKYLGPFNGLDKGEPVNAADAAALEHDKAYDQQLKAGDNPYLRYNHADAEFQERLQEDTSFGGNLGRAVFQAKKRVLEPLGLVEEGAKTAPGKKRPVEPSPQRSPDSSTGIGKKGQQPAKKRLNFGQTGDSESVPDPQPIGEPPAGPSGLGSGTMAAGGGAPMADNNEGADGVGSSSGNWHCDSTWLGDRVITTSTRTWALPTYNNHLYKQISNGTSGGSTNDNTYFGYSTPWGYFDFNRFHCHFSPRDWQRLINNNWGFRPKRPNFKLFNIQVKEVTQNEGTKTIANNLTSTIQVFTDSEYQLPYVLGSAHQGCLPPFPADVFMIPQYGYLTLNNGSQAVGRSSFYCLEYFPSQMLRTGNNFEFSYQFEDVPFHSSYAHSQSLDRLMNPLIDQYLYYLSRTQSTGGTAGTQQLLFSQAGPNNMSAQAKNWLPGPCYRQQRVSTTLSQNNNSNFAWTGATKYHLNGRDSLVNPGVAMATHKDDEERFFPSSGVLMFGKQGAGKDNVDYSSVMLTSEEEIKTTNPVATEQYGVVADNLQQQNAAPIVGAVNSQGALPGMVWQNRDVYLQGPIWAKIPHTDGNFHPSPLMGGFGLKHPPPQILIKNTPVPADPPTTFSQAKLASFITQYSTGQVSVEIEWELQKENSKRWNPEIQYTSNYYKSTNVDFAVNTDGTYSEPRPIGTRYLTRNL

SEQ ID NO: 4797 - protein, 738 aa, Adeno-associated virus
MAADGYLPDWLEDNLSEGIREWWDLKPGAPKPKANQQKQDDGRGLVLPGYKYLGPFNGLDKGEPVNAADAAALEHDKAYDQQLKAGDNPYLRYNHADAEFQERLQEDTSFGGNLGRAVFQAKKRVLEPLGLVEEAAKTAPGKKRPVEPSPQRSPDSSTGIGKKGQQPAKKRLNFGQTGDSESVPDPQPIGEPPAGPSGLGSGTMAAGGGAPMADNNEGADGVGSSSGNWHCDSTWLGDRVITTSTRTWALPTYNNHLYKQISNGTSGGSTNDNTYFGYSTPWGYFDFNRFHCHFSPRDWQRLINNNWGFRPKRLSFKLFNIQVKEVTQNEGTKTIANNLTSTIQVFTDSEYQLPYVLGSAHQGCLPPFPADVFMIPQYGYLTLNNGSQAVGRSSFYCLEYFPSQMLRTGNNFEFSYTFEDVPFHSSYAHSQSLDRLMNPLIDQYLYYLSRTQSTGGTQGTQQLLFSQAGPANMSAQAKNWLPGPCYRQQRVSTTLSQNNNSNFAWTGATKYHLNGRDSLVNPGVAMATHKDDEERFFPSSGVLMFGKQGAGRDNVDYSSVMLTSEEEIKTTNPVATEQYGVVADNLQQTNTGPIVGNVNSQGALPGMVWQNRDVYLQGPIWAKIPHTDGNFHPSPLMGGFGLKHPPPQILIKNTPVPADPPTTFSQAKLASFITQYSTGQVSVEIEWELQKENSKRWNPEIQYTSNYYKSTNVDFAVNTEGTYSEPRPIGTRYLTRNL

SEQ ID NO: 4798 - protein, 720 aa, Adeno-associated virus
MSFVDHPPDWLEEVGEGLREFLGLEAGPPKPKPNQQHQDQARGLVLPGYNYLGPGNGLDRGEPVNRADEVAREHDISYNEQLEAGDNPYLKYNHADAEFQEKLADDTSFGGNLGKAVFQAKKRVLEPFGLVEEGAKTAPTGKRIDDHFPKRKKARTEEDSKPSTSSDAEAGPSGSQQLQIPAQPASSLGADTMSAGGGGPLGDNNQGADGVGNASGDWHCDSTWMGDRVVTKSTRTWVLPSYNNHQYREIKSGSVDGSNANAYFGYSTPWGYFDFNRFHSHWSPRDWQRLINNYWGFRPRSLRVKIFNIQVKEVTVQDSTTTIANNLTSTVQVFTDDDYQLPYVVGNGTEGCLPAFPPQVFTLPQYGYATLNRDNTENPTERSSFFCLEYFPSKMLRTGNNFEFTYNFEEVPFHSSFAPSQNLFKLANPLVDQYLYRFVSTNNTGGVQFNKNLAGRYANTYKNWFPGPMGRTQGWNLGSGVNRASVSAFATTNRMELEGASYQVPPQPNGMTNNLQGSNTYALENTMIFNSQPANPGTTATYLEGNMLITSESETQPVNRVAYNVGGQMATNNQSSTTAPATGTYNLQEIVPGSVWMERDVYLQGPIWAKIPETGAHFHPSPAMGGFGLKHPPPMMLIKNTPVPGNITSFSDVPVSSFITQYSTGQVTVEMEWELKKENSKRWNPEIQYTNNYNDPQFVDFAPDSTGEYRTTRPIGTRYL

SEQ ID NO: 4799 - protein, 736 aa, Adeno-associated virus
MAADGYLPDWLEDNLSEGIREWWDLKPGAPKPKANQQKQDDGRGLVLPGYKYLGPFNGLDKGEPVNAADAAALEHDKAYDQQLKAGDNPYLRYNHADAEFQERLQEDTSFGGNLGRAVFQAKKRVLEPFGLVEEGAKTAPGKKRPVEQSPQEPDSSSGIGKTGQQPAKKRLNFGQTGDSESVPDPQPLGEPPATPAAVGPTTMASGGGAPMADNNEGADGVGNASGNWHCDSTWLGDRVITTSTRTWALPTYNNHLYKQISSASTGASNDNHYFGYSTPWGYFDFNRFHCHFSPRDWQRLINNNWGFRPKRLNFKLFNIQVKEVTTNDGVTTIANNLTSTVQVFSDSEYQLPYVLGSAHQGCLPPFPADVFMIPQYGYLTLNNGSQAVGRSSFYCLEYFPSQMLRTGNNFTFSYTFEDVPFHSSYAHSQSLDRLMNPLIDQYLYYLNRTQNQSGSAQNKDLLFSRGSPAGMSVQPKNWLPGPCYRQQRVSKTKTDNNNSNFTWTGASKYNLNGRESIINPGTAMASHKDDKDKFFPMSGVMIFGKESAGASNTALDNVMITDEEEIKATNPVATERFGTVAVNLQSSSTDPATGDVHVMGALPGMVWQDRDVYLQGPIWAKIPHTDGHFHPSPLMGGFGLKHPPPQILIKNTPVPANPPAEFSATKFASFITQYSTGQVSVEIEWELQKENSKRWNPEVQYTSNYAKSANVDFTVDNNGLYTEPRPIGTRYLTRPL

SEQ ID NO: 4800 - protein, 736 aa, Adeno-associated virus
MAADGYLPDWLEDNLSEGIREWWDLKPGAPKPKANQQKQDDGRGLVLPGYKYLGPFNGLDKGEPVNAADAAALEHDKAYDQQLKAGDNPYLRYNHADAEFQERLQEDTSFGGNLGRAVFQAKKRVLEPFGLVEEGAKTAPGKKRPVEQSPQEPDSSSGIGKTGQQPAKKRLNFGQTGDSESVPDPQPLGEPPATPAAVGPTTMASGGGAPMADNNEGADGVGNASGNWHCDSTWLGDRVITTSTRTWALPTYNNHLYKQISSASTGASNDNHYFGYSTPWGYFDFNRFHCHFSPRDWQRLINNNWGFRPKRLNFKLFNIQVKEVTTNDGVTTIANNLTSTVQVFSDSEYQLPYVLGSAHQGCLPPFPADVFMIPQYGYLTLNNGSQAVGRSSFYCLEYFPSQMLRTGNNFTFSYTFEDVPFHSSYAHSQSLDRLMNPLIDQYLYYLNRTQNQSGSAQNKDLLFSRGSPAGMSVQPKNWLPGPCYRQQRVSKTKTDNNNSNFTWTGASKYNLNGRESIINPGTAMASHKDDEDKFFPMSGVMIFGKESAGASNTALDNVMITDEEEIKATNPVATERFGTVAVNLQSSSTDPATGDVHVMGALPGMVWQDRDVYLQGPIWAKIPHTDGHFHPSPLMGGFGLKHPPPQILIKNTPVPANPPAEFSATKFASFITQYSTGQVSVEIEWELQKENSKRWNPEVQYTSNYAKSANVDFTVDNNGLYTEPRPIGTRYLTRPL

SEQ ID NO: 4801 - protein, 736 aa, Adeno-associated virus
MAADGYLPDWLEDNLSEGIREWWDLKPGAPKPKANQQKQDDGRGLVLPGYKYLGPFNGLDKGEPVNAADAAALEHDKAYDQQLKAGDNPYLRYNHADAEFQERLQEDTSFGGNLGRAVFQAKKRVLEPLGLVEEGAKTAPGKKRPVEQSPQEPDSSSGIGKTGQQPAKKRLNFGQTGDSESVPDPQPLGEPPATPAAVGPTTMASGGGAPMADNNEGADGVGNASGNWHCDSTWLGDRVITTSTRTWALPTYNNHLYKQISSASTGASNDNHYFGYSTPWGYFDFNRFHCHFSPRDWQRLINNNWGFRPKRLNFKLFNIQVKEVTTNDGVTTIANNLTSTVQVFSDSEYQLPYVLGSAHQGCLPPFPADVFMIPQYGYLTLNNGSQAVGRSSFYCLEYFPSQMLRTGNNFTFSYTFEDVPFHSSYAHSQSLDRLMNPLIDQYLYYLNRTQNQSGSAQNKDLLFSRGSPAGMSVQPKNWLPGPCYRQQRVSKTKTDNNNSNFTWTGASKYNLNGRESIINPGTAMASHKDDEDKFFPMSGVMIFGKESAGASNTALDNVMITDEEEIKATNPVATERFGTVAVNLQSSSTDPATGDVHVMGALPGMVWQDRDVYLQGPIWAKIPHTDGHFHPSPLMGGFGLKHPPPQILIKNTPVPANPPAEFSATKFASFITQYSTGQVSVEIEWELQKENSKRWNPEVQYTSNYAKSANVDFTVDNNGLYTEPRPIGTRYLTRPL

SEQ ID NO: 4802 - protein, 736 aa, Adeno-associated virus
MAADGYLPDWLEDNLSEGIREWWDLKPGAPKPKANQQKQDDGRGLVLPGYKYLGPFNGLDKGEPVNAADAAALEHDKAYDQQLKAGDNPYLRYNHADAEFQERLQEDTSFGGNLGRAVFQAKKRVLEPLGLVEEGAKTAPGKKRPVEQSPQEPDSSSGIGKTGQQPAKKRLNFGQTGDSESVPDPQPLGEPPATPAAVGPTTMASGGGAPMADNNEGADGVGNASGNWHCDSTWLGDRVITTSTRTWALPTYNNHLYKQISSASTGASNDNHYFGYSTPWGYFDFNRFHCHFSPRDWQRLINNNWGFRPKRLNFKLFNIQVKEVTTNDGVTTIANNLTSTVQVFSDSEYQLPYVLGSAHQGCLPPFPADVFMIPQYGYLTLNNGSQAVGRSSFYCLEYFPSQMLRTGNNFTFSYTFEDVPFHSSYAHSQSLDRLMNPLIDQYLYYLNRTQNQSGSAQNKDLLFSRGSPAGMSVQPKNWLPGPCYRQQRVSKTKTDNNNSNFTWTGASKYNLNGRESIINPGTAMASHKDDKDKFFPMSGVMIFGKESAGASNTALDNVMITDEEEIKATNPVATERFGTVAVNLQSSSTDPATGDVHVMGALPGMVWQDRDVYLQGPIWAKIPHTDGHFHPSPLMGGFGLKHPPPQILIKNTPVPANPPAEFSATKFASFITQYSTGQVSVEIEWELQKENSKRWNPEVQYTSNYAKSANVDFTVDNNGLYTEPRPIGTRYLTRPL

SEQ ID NO: 4803 - protein, 728 aa, Adeno-associated virus
MAADGYLPDWLEGNLSEGIREWWDLKPGAPKPKANQQKQDDGRGLVLPGYRYLGPFNGLDKGEPVNEADAAALEHDKAYDKQLEQGDNPYLKYNHADAEFQERLQEDTSFGGNLGRAVFQAKKRVLEPLGLVEEGAKTAPGKKRPIESPDSSTGIGKNGQPPAKKKLNFGQTGDSESVPDPQPLGEPPAAPSGLGSGTMAAGGGAPMADNNEGADGVGNASGNWHCDSTWLGDRVITTSTRTWALPTYNNHLYKQISSQSGATNDNHFFGYSTPWGYFDFNRFHCHFSPRDWQRLINNNWGFRPRKLRFKLFNIQVKEVTTNDGVTTIANNLTSTIQVFSDSEYQLPYVLGSAHQGCLPPFPADVFMIPQYGYLTLNNGSQSVGRSSFYCLEYFPSQMLRTGDNFEFSYTFEEVPFHSSYAHSQSLDRLMNPLIDQYLYYLARTQSTTGSTRELQFHQAGPNTMAEQSKNWLPGPCYRQQRLSKNIDSNNNSNFAWTGATKYHLNGRNSLTNPGVAMATNKDDEDQFFPINGVLVFGKTGAANKTTLENVLMTSEEEIKTTNPVATEEYGVVSSNLQSSTAGPQTQTVNSQGALPGMVWQNRDVYLQGPIWAKIPHTDGNFHPSPLMGGFGLKHPPPQILIKNTPVPANPPEVFTPAKFASFITQYSTGQVSVEIEWELQKENSKRWNPEIQYTSNYAKSNNVEFAVNNEGVYTEPRPIGTRYLTRNL

SEQ ID NO: 4804 - DNA, 2211 bp, Adeno-associated virus
  source 1..2211: mol_type = genomic DNA
atggctgccgatggttatcttccagattggctcgaggacaaccttagtgaaggaattcgcgagtggtgggctttgaaacctggagcccctcaacccaaggcaaatcaacaacatcaagacaacgctcgaggtcttgtgcttccgggttacaaataccttggacccggcaacggactcgacaagggggagccggtcaacgcagcagacgcggcggccctcgagcacgacaaggcctacgaccagcagctcaaggccggagacaacccgtacctcaagtacaaccacgccgacgccgagttccaggagcggctcaaagaagatacgtcttttgggggcaacctcgggcgagcagtcttccaggccaaaaagaggcttcttgaacctcttggtctggttgaggaagcggctaagacggctcctggaaagaagaggcctgtagagcagtctcctcaggaaccggactcctccgcgggtattggcaaatcgggtgcacagcccgctaaaaagagactcaatttcggtcagactggcgacacagagtcagtcccagaccctcaaccaatcggagaacctcccgcagccccctcaggtgtgggatctcttacaatggcttcaggtggtggcgcaccagtggcagacaataacgaaggtgccgatggagtgggtagttcctcgggaaattggcattgcgattcccaatggctgggggacagagtcatcaccaccagcacccgaacctgggccctgcccacctacaacaatcacctctacaagcaaatctccaacagcacatctggaggatcttcaaatgacaacgcctacttcggctacagcaccccctgggggtattttgacttcaacagattccactgccacttctcaccacgtgactggcagcgactcatcaacaacaactggggattccggcctaagcgactcaacttcaagctcttcaacattcaggtcaaagaggttacggacaacaatggagtcaagaccatcgccaataaccttaccagcacggtccaggtcttcacggactcagactatcagctcccgtacgtgctcgggtcggctcacgagggctgcctcccgccgttcccagcggacgttttcatgattcctcagtacgggtatctgacgcttaatgatggaagccaggccgtgggtcgttcgtccttttactgcctggaatatttcccgtcgcaaatgctaagaacgggtaacaacttccagttcagctacgagtttgagaacgtacctttccatagcagctacgctcacagccaaagcctggaccgactaatgaatccactcatcgaccaatacttgtactatctctcaaagactattaacggttctggacagaatcaacaaacgctaaaattcagtgtggccggacccagcaacatggctgtccagggaagaaactacatacctggacccagctaccgacaacaacgtgtctcaaccactgtgactcaaaacaacaacagcgaatttgcttggcctggagcttcttcttgggctctcaatggacgtaatagcttgatgaatcctggacctgctatggccagccacaaagaaggagaggaccgtttctttcctttgtctggatctttaatttttggcaaacaaggaactggaagagacaacgtggatgcggacaaagtcatgataaccaacgaagaagaaattaaaactactaacccggtagcaacggagtcctatggacaagtggccacaaaccaccagagtgcccaagcacaggcgcagaccggctgggttcaaaaccaaggaatacttccgggtatggtttggcaggacagagatgtgtacctgcaaggacccatttgggccaaaattcctcacacggacggcaactttcacccttctccgctgatgggagggtttggaatgaagcacccgcctcctcagatcctcatcaaaaacacacctgtacctgcggatcctccaacggccttcaacaaggacaagctgaactctttcatcacccagtattctactggccaagtcagcgtggagatcgagtgggagctgcagaaggaaaacagcaagcgctggaacccggagatccagtacacttccaactattacaagtctaataatgttgaatttgctgttaatactgaaggtgtatatagtgaaccccgccccattggcaccagatacctgactcgtaatctgtaa

SEQ ID NO: 4805 - protein, 736 aa, Adeno-associated virus
MAADGYLPDWLEDNLSEGIREWWALKPGAPQPKANQQHQDNARGLVLPGYKYLGPGNGLDKGEPVNAADAAALEHDKAYDQQLKAGDNPYLKYNHADAEFQERLKEDTSFGGNLGRAVFQAKKRLLEPLGLVEEAAKTAPGKKRPVEQSPQEPDSSAGIGKSGAQPAKKRLNFGQTGDTESVPDPQPIGEPPAAPSGVGSLTMASGGGAPVADNNEGADGVGSSSGNWHCDSQWLGDRVITTSTRTWALPTYNNHLYKQISNSTSGGSSNDNAYFGYSTPWGYFDFNRFHCHFSPRDWQRLINNNWGFRPKRLNFKLFNIQVKEVTDNNGVKTIANNLTSTVQVFTDSDYQLPYVLGSAHEGCLPPFPADVFMIPQYGYLTLNDGSQAVGRSSFYCLEYFPSQMLRTGNNFQFSYEFENVPFHSSYAHSQSLDRLMNPLIDQYLYYLSKTINGSGQNQQTLKFSVAGPSNMAVQGRNYIPGPSYRQQRVSTTVTQNNNSEFAWPGASSWALNGRNSLMNPGPAMASHKEGEDRFFPLSGSLIFGKQGTGRDNVDADKVMITNEEEIKTTNPVATESYGQVATNHQSAQAQAQTGWVQNQGILPGMVWQDRDVYLQGPIWAKIPHTDGNFHPSPLMGGFGMKHPPPQILIKNTPVPADPPTAFNKDKLNSFITQYSTGQVSVEIEWELQKENSKRWNPEIQYTSNYYKSNNVEFAVNTEGVYSEPRPIGTRYLTRNL

SEQ ID NO: 4806 - DNA, 2460 bp, Adeno-associated virus
  source 1..2460: mol_type = genomic DNA
ggtaattcctccggaaattggcattgcgattccacatggctgggcgaccgagtcattaccaccagcacccggacttgggccctgcccacctacaacaaccacctctacaagcaaatctccagccaatcgggtgccaccaacgacaaccactacttcggctacagcaccccttgggggtattttgatttcaacagattccactgccatttctcaccacgtgactggcagcgactcatcaacaacaactggggattcatggctgccgatggttatcttccagattggctcgaggacactctctctgaaggaatcagacagtggtggaagctcaaacctggcccaccaccgccgaaacctaaccaacaacaccgggacgacagtaggggtcttgtgcttcctgggtacaagtacctcggacccttcaacggactcgacaaaggagagccggtcaacgaggcagacgccgcggccctcgagcacgacaaagcctacgaccaccagctcaagcaaggggacaacccgtacctcaaatacaaccacgcggacgctgaatttcaggagcgtcttcaagaagatacgtctttcgggggcaacctcgggcgagcagtcttccaggccaaaaagagggtactcgagcctcttggtctggttgaggaagctgttaagacggctcctggaaaaaagagacctatagagcagtctcctgcagaaccggactcttcctcgggcatcggcaaatcaggccagcagcccgctaagaaaagactcaattttggtcagactggcgacacagagtcagtcccagaccctcaaccaatcggagaaccccccgcagccccctctggtgtgggatctaatacaatggcttcaggcggtggggcaccaatggcagacaataacgaaggcgccgacggagtgggtaattcctcgggaaattggcattgcgattccacatggatgggcgacagagttatcaccaccagcacaagaacctgggccctccccacctacaataatcacctctacaagcaaatctccagcgaatcgggagccaccaacgacaaccactacttcggctacagcaccccctgggggtattttgactttaacagattccactgtcacttctcaccacgtgactggcagcgactcatcaacaacaactggggatttagacccaagaaactcaatttcaagctcttcaacatccaagtcaaggaggtcacgcagaatgatggaaccacgaccatcgccaataaccttaccagcacggtgcaggtcttcacagactctgagtaccagctgccctacgtcctcggttcggctcaccagggctgccttccgccgttcccagcagacgtcttcatgattcctcagtacggctacttgactctgaacaatggcagccaagcggtaggacgttcttcattctactgtctagagtattttccctctcagatgctgaggacgggaaacaacttcaccttcagctacacttttgaagacgtgcctttccacagcagctacgcgcacagccagagtctggatcggctgatgaatcctctcattgaccagtacctgtattacctgagcaaaactcagggtacaagtggaacaacgcagcaatcgagactgcagttcagccaagctgggcctagctccatggctcagcaggccaaaaactggctaccgggacccagctaccgacagcagcgaatgtctaagacggctaatgacaacaacaacagtgaatttgcttggactgcagccaccaaatattacctgaatggaagaaattctctggtcaatcccgggcccccaatggccagtcacaaggacgatgaggaaaagtatttccccatgcacggaaatctcatctttggaaaacaaggcacaggaactaccaatgtggacattgaatcagtgcttattacagacgaagaagaaatcagaacaactaatcctgtggctacagaacaatacggacaggttgccaccaaccatcagagtcagaacaccacagcttcctatggaagtgtggacagccagggaatcttacctggaatggtgtggcaggaccgcgatgtctatcttcaaggtcccatttgggccaaaactcctcacacggacggacactttcatccttctccgctcatgggaggctttggactgaaacaccctcctccccagatcctgatcaaaaacacacctgtgccagcgaatcccgcgaccactttcactcctggaaagtttgcttcgttcattacccagtattccaccggacaggtcagcgtggaaatagagtgggagctgcagaaagaaaacagcaaacgctggaacccagaaattcagtacacctccaactacaacaagtcggtgaatgtggagtttaccgtggacgcaaacggtgtttattctgaaccccgccctattggcactcgttaccttacccggaacttg

SEQ ID NO: 4807 - DNA, 3123 bp, Adeno-associated virus
  source 1..3123: mol_type = genomic DNA
gaattcgccctttctacggctgcgtcaactggaccaatgaaaactttcccttcaacgattgcgtcgacaagatggtgatctggtgggaggagggaaagatgaccgccaaggtcgtggaatctgccaaagccattctgggtggaggcaaggttcgtgtggaccagaaatgcaagtcttcggcccagatcgacccgactccggtgattgtcacctctaacaccaacatgtgcgccgtgattgacggaaactcgaccaccttcgagcaccagcagccgttgcaagaccggatgttcaaatttgaacttacccgccgtttggatcatgactttgggaaggtcaccaagcaggaagtcaaagactttttccggtgggctcaagatcacgtgactgaggtggagcatgagttctacgtcaaaaagggtggagccaagaaaaggcccgcccccgatgatgtatatataaatgagcccaagcgggcgcgcgagtcagttgcgcagccatcgacgtcagacgcggaagcttcgataaactacgcggacaggtaccaaaacaaatgttctcgtcacgtgggcatgaatctgatgctgtttccctgtcgacaatgcgaaagaatgaatcagaattcaaatatctgcttcacacacgggcaaaaagactgtttggaatgctttcccgtgtcagaatctcaacccgtttctgtcgtcagaaaaacgtatcagaaactttgttacattcatcatatcatgggaaaagtaccagacgcctgcactgcctgcgacctggtaaatgtggacttggatgactgtatttctgagcaataaatgacttaaatcaggtatggctgctgacggttatcttccagattggctcgaggacactctctctgaaggaatcagacagtggtggaagctcaaacctggcccaccaccgccgaaacctaaccaacaacaccgggacgacagtaggggtcttgtgcttcctgggtacaagtacctcggacccttcaacggactcgacaaaggagagccggtcaacgaggcagacgccgcggccctcgagcacgacaaagcctacgaccaccagctcaagcaaggggacaacccgtacctcaaatacaaccacgcggacgctgaatttcaggagcgtcttcaagaagatacgtctttcgggggcaacctcgggcgagcagtcttccaggccaaaaagagggtactcgagcctcttggtctggttgaggaagctgttaagacggctcctggaaaaaagagacctatagagcagtctcctgcagaaccggactcttcctcgggcatcggcaaatcaggccagcagcccgctaagaaaagactcaattttggtcagactggcgacacagagtcagtcccaggccctcaaccaatcggagaaccccccgcagccccctctggtgtgggatctaatacaatggcttcaggcggtggggcaccaatggcagacaataacgaaggcgccgacggagtgggtaattcctcgggaaattggcattgcgattccacatggatgggcgacagagttatcaccaccagcacaagaacctgggccctccccacctacaataatcacctctacaagcaaatctccagcgaatcgggagccaccaacgacaaccactacttcggctacagcaccccctgggggtattttgactttaacagattccactgtcacttctcaccacgtgactggcagcgactcatcaacaacaactggggatttagacccaagaaactcaatttcaagctcttcaacatccaagtcaaggaggtcacgcagaatgatggaaccacgaccatcgccaataaccttaccagcgcggtgcaggtcttcacagactctgagtaccagctgccctacgtcctcggttcggctcaccagggctgccttccgccgttcccagcagacgtcttcatgattcctcagtacggctacttgactctgaacaatggcagccaagcggtaggacgttcttcattctactgtctagagtattttccctctcagatgctgaggacgggaaacaacttcaccttcagctacacttttgaagacgtgcctttccacagcagctacgcgcacagccagagtctggatcggctgatgaatcctctcattgaccagtacctgtattacctgagcaaaactcagggtacaagtggaacaacgcagcaatcgagactgcagttcagccaagctgggcctagctccatggctcagcaggccaaaaactggctaccgggacccagctaccgacagcagcgaatgtctaagacggctaatgacaacaacaacagtgaatttgcttggactgcagccaccaaatattacctgaatggaagaaattctctggtcaatcccgggcccccagtggccagtcacaaggacgatgaggaaaagtatttccccatgcacggaaatctcatctttggaaaacaaggcacaggaactaccaatgtggacattgaatcagtgcttattacagacgaagaagaaatcagaacaactaatcctgtggctacagaacaatacggacaggttgccaccaaccatcagagtcagaacaccacagcttcctatggaagtgtggacagccagggaatcttacctggaatggtgtggcaggaccgcgatgtctatcttcaaggtcccatttgggccaaaactcctcacacggacggacactttcatccttctccgctcatgggaggctttggactgaaacaccctcctccccagatcctgatcaaaaacacacctgtgccagcgaatcccgcgaccactttcactcctggaaagtttgcttcgttcattacccagtattccacctgacaggtcagcgtggaaatagagtgggagctgcagaaagaaaacagcaaacgctggaacccagaaattcagtacacctccaactacaacaagtcggtgaatgtggagtttaccgtggacgcaaacggtgtttattctgaaccccgccctattggcactcgttaccttacccggaacttgtaatttcctgttaatgaataagccgatttatgcgtttcagttgaactttggtctctgcgaagggcgaattcgtttaaacct

SEQ ID NO: 4808 - protein, 735 aa, Adeno-associated virus
MAADGYLPDWLEDTLSEGIRQWWKLKPGPPPPKPNQQHRDDSRGLVLPGYKYLGPFNGLDKGEPVNEADAAALEHDKAYDHQLKQGDNPYLKYNHADAEFQERLQEDTSFGGNLGRAVFQAKKRVLEPLGLVEEAVKTAPGKKRPIEQSPAEPDSSSGIGKSGQQPAKKRLNFGQTGDTESVPGPQPIGEPPAAPSGVGSNTMASGGGAPMADNNEGADGVGNSSGNWHCDSTWMGDRVITTSTRTWALPTYNNHLYKQISSESGATNDNHYFGYSTPWGYFDFNRFHCHFSPRDWQRLINNNWGFRPKKLNFKLFNIQVKEVTQNDGTTTIANNLTSAVQVFTDSEYQLPYVLGSAHQGCLPPFPADVFMIPQYGYLTLNNGSQAVGRSSFYCLEYFPSQMLRTGNNFTFSYTFEDVPFHSSYAHSQSLDRLMNPLIDQYLYYLSKTQGTSGTTQQSRLQFSQAGPSSMAQQAKNWLPGPSYRQQRMSKTANDNNNSEFAWTAATKYYLNGRNSLVNPGPPVASHKDDEEKYFPMHGNLIFGKQGTGTTNVDIESVLITDEEEIRTTNPVATEQYGQVATNHQSQNTTASYGSVDSQGILPGMVWQDRDVYLQGPIWAKTPHTDGHFHPSPLMGGFGLKHPPPQILIKNTPVPANPATTFTPGKFASFITQYSTGQVSVEIEWELQKENSKRWNPEIQYTSNYNKSVNVEFTVDANGVYSEPRPIGTRYLTRNL

SEQ ID NO: 4809 - DNA, 3123 bp, Adeno-associated virus
  source 1..3123: mol_type = genomic DNA
gaattcgccctttctacggctgcgtcaactggaccaatgaaaactttcccttcaacgattgcgtcgacaagatggtgatctggtgggaggagggaaagatgaccgccaaggtcgtggaatctgccaaagccattctgggtggaagcaaggttcgtgtggaccagaaatgcaagtcttcggcccagatcgacccgactccggtgattgtcacctctaacaccaacatgtgcgccgtgattgacggaaactcgaccaccttcgagcaccagcagccgttgcaagaccggatgttcaaatttgaacttacccgccgtttggatcatgactttgggaaggtcaccaagcaggaagtcaaagactttttccggtgggctcaagatcacgtgactgaggtggagcatgagttctacgtcaaaaagggtggagccaagaaaaggcccgcccccgatgatgtatatataaatgagcccaagcgggcgcgcgagtcagttgcgcagccatcgacgtcagacgcggaagcttcgataaactacgcgggcaggtaccaaaacaaatgttctcgtcacgtgggcatgaatctgatgctgtttccctgtcgacaatgcgaaagaatgaatcagaattcaaatatctgcttcacacacgggcaaaaagactgtttggaatgctttcccgtgtcagaatctcaacccgtttctgtcgtcagaaaaacgtatcagaaactttgttacattcatcatatcatgggaaaagaaccagacgcctgcactgcctgcgacctggtaaatgtggacttggatgactgtatttctgagcaataaatgacttaaatcaggtatggctgctgacggttatcttccagattggctcgaggacactctctctgaaggaatcagacagtggtggaagctcaaacctggcccaccaccgccgaaacctaaccaacaacaccgggacgacagtaggggtcttgtgcttcctgggtacaagtacctcggacccttcaacggactcgacaaaggagagccggtcaacgaggcagacgccgcggccctcgagcacgacaaagcctacgaccaccagctcaagcaaggggacaacccgtacctcaaatacaaccacgcggacgctgaatttcaggagcgtcttcaagaagatacgtctttcgggggcaacctcgggcgagcagtcttccaggccaaaaagagggtactcgagcctcttggtctggttgaggaagctgttaagacggctcctggaaaaaagagacctatagagcagtctcctgcagaaccggactcttcctcgggcatcggcgaatcaggccagcagcccgctaagaaaagactcaattttggtcagactggcgacacagagtcagtcccagaccctcaaccaatcggagaaccccccgcagccccctctggtgtgggatctaatacaatggcttcaggcggtggggcaccaatggcagacgataacgaaggcgccgacggagtgggtaattcctcgggaaattggcattgcgattccacatggatgggcgacagagttatcaccaccagcacaagaacctgggccctccccacctacaataatcacctctacaagcaaatctccagcgaatcgggagccaccaacgacaaccactacttcggctacagcaccccctgggggtattttgactttaacagattccactgtcacttctcaccacgtgactggcagcgactcatcaacaacaactggggatttagacccaagaaactcaatttcaagctcttcaacatccaagtcaaggaggtcacgcagaatgatggaaccacgaccatcgccaataaccttaccagcacggtgcaggtcttcacagactctgagtaccagctgccctacgtcctcggttcggctcaccagggctgccttccgccgttcccagcagacgtcttcatgattcctcagtacggctacttgactctgaacaatggcagccaagcggtaggacgttcttcattctactgtctagagtattttccctctcagatgctgaggacgggaaacaacttcaccttcagctacacttttgaagacgtgcctttccacagcagctacgcgcacagccagagtctggatcggctgatgaatcctctcattgaccagtacctgtattacctgagcaaaactcagggtacaagtggaacaacgcagcaatcgagactgcagttcagccaagctgggcctagctccatggctcagcaggccaaaaactggctaccgggacccagctaccgacagcagcgaatgtctaagacggctaatgacaacaacaacagtgaatttgcttggactgcagccaccaaatattacctgaatggaagaaattctctggtcaatcccgggcccccaatggccagtcacaaggacgatgaggaaaagtatttccccatgcacggaaatctcatctttggaaaacaaggcacaggaactaccaatgtggacattgaatcagtgcttattacagacgaagaagaaatcagaacaactaatcctgtggctacagaacaatacggacaggttgccaccaaccatcagagtcaggacaccacagcttcctatggaagtgtggacagccagggaatcttacctggaatggtgtggcaggaccgcgatgtctatcttcaaggtcccatttgggccaaaactcctcacacggacggacactttcatccttctccgctcatgggaggctttggactgaaacaccctcctccccagatcctgatcaaaaacacacctgtgccagcgaatcccgcgaccactttcactcctggaaagtttgcttcgttcattacccagtattccaccggacaggtcagcgtggaaatagagtgggagctgcagaaagaaaacagcaaacgctggaacccagaaattcagtacacctccaactacaacaagtcggtgaatgtggagtttaccgtggacgcaaacggtgtttattctgaaccccgccctattggcactcgttaccttacccggaacttgtaatttcctgttaatgaataaaccgatttatgcgtttcagttgaactttggtctctgcgaagggcgaattcgcggccgcta

SEQ ID NO: 4810 - protein, 735 aa, Adeno-associated virus
MAADGYLPDWLEDTLSEGIRQWWKLKPGPPPPKPNQQHRDDSRGLVLPGYKYLGPFNGLDKGEPVNEADAAALEHDKAYDHQLKQGDNPYLKYNHADAEFQERLQEDTSFGGNLGRAVFQAKKRVLEPLGLVEEAVKTAPGKKRPIEQSPAEPDSSSGIGESGQQPAKKRLNFGQTGDTESVPDPQPIGEPPAAPSGVGSNTMASGGGAPMADDNEGADGVGNSSGNWHCDSTWMGDRVITTSTRTWALPTYNNHLYKQISSESGATNDNHYFGYSTPWGYFDFNRFHCHFSPRDWQRLINNNWGFRPKKLNFKLFNIQVKEVTQNDGTTTIANNLTSTVQVFTDSEYQLPYVLGSAHQGCLPPFPADVFMIPQYGYLTLNNGSQAVGRSSFYCLEYFPSQMLRTGNNFTFSYTFEDVPFHSSYAHSQSLDRLMNPLIDQYLYYLSKTQGTSGTTQQSRLQFSQAGPSSMAQQAKNWLPGPSYRQQRMSKTANDNNNSEFAWTAATKYYLNGRNSLVNPGPPMASHKDDEEKYFPMHGNLIFGKQGTGTTNVDIESVLITDEEEIRTTNPVATEQYGQVATNHQSQDTTASYGSVDSQGILPGMVWQDRDVYLQGPIWAKTPHTDGHFHPSPLMGGFGLKHPPPQILIKNTPVPANPATTFTPGKFASFITQYSTGQVSVEIEWELQKENSKRWNPEIQYTSNYNKSVNVEFTVDANGVYSEPRPIGTRYLTRNL

SEQ ID NO: 4811 - DNA, 3113 bp, Adeno-associated virus
  source 1..3113: mol_type = genomic DNA
gaattcgccctttctacggctgcgtcaactggaccaatgaaaactttcccttcaacgattgcgtcgacaagatggtgatctggtgggaggagggaaagatgaccgccaaggtcgtggaatctgccaaagccattctgggtggaagcaaggttcgtgtggaccagaaatgcaagtcttcggcccagatcgacccgactccggtgattgtcacctctaacaccaacatgtgcgccgtgattgacggaaactcgaccaccttcgagcaccagcagccgttgcaagaccggatgttcaaatttgaacttacccgccgtttggatcatgactttgggaaggtcaccaagcaggaagtcaaagactttttccggtgggctcaagatcacgtgactgaggtggagcatgagttctacgtcaaaaagggtggagccaagaaaaggcccgcccccgatgatgtatatataaatgagcccaagcgggcgcgcgagtcagttgcgcagccatcgacgtcagacgcggaagcttcgataaactacgcggacaggtaccaaaacaaatgttctcgtcacgtgggcatgaatctgatgctgtttccctgtcgacaatgcgaaagaatgaatcagaattcaaatatctgcttcacacacgggcaaaaagactgtttggaatgctttcccgtgtcagaatctcaacccgttcctgtcgtcagaaaaacgtatcagaaactttgttacattcatcatatcatgggaaaagtaccagacgcctgcactgcctgcgacctggtaaatgtggacttggatgactgtatttctgagcaataaatgacttaaatcaggtatggctgctgacggttatcttccagattggctcgaggacactctctctgaaggaatcagacagtggtggaagctcaaacctggcccaccaccgccgaaacctaaccaacaacaccgggacgacagtaggggtcttgtgcttcctgggtacaagtacctcggacccttcaacggactcgacaaaggagagccggtcaacgaggcagacgccgcggccctcgagcacgacaaagcctacgaccaccagctcaagcaaggggacaacccgtacctcaaatacaaccacgcggacgctgaatttcaggagcgtcttcaagaagatacgtctttcgggggcaacctcgggcgagcagtcttccaggccaaaaagagggtactcgagcctcttggtctggttgaggaagctgttaagacggctcctggaaaaaagagacctatagagcagtctcctgcagaaccggactcttcctcgggcatcggcaaatcaggccagcagcccgctaagaaaagactcaattttggtcagactggcgacacagagtcagtcccagaccctcaaccaatcggagaaccccccgcagccccctctggtgtgggatctaatacaatggcttcaggcggtggggcaccaatggcagacaataacgaaggcgccgacggagtgggtaattcctcgggaaattggcattgcgattccacatggatgggcgacagagttatcaccaccagcacaagaacctgggccctccccacctacaataatcacctctacaagcaaatctccagcgaatcgggagccaccaacgacaaccactacttcggctacagcaccccctgggggtattttgactttaacagattccactgtcacttctcaccacgtgactggcagcgactcatcaataacaactggggatttagacccaagaaactcaatttcaagctcttcaacatccaagtcaaggaggtcacgcagaatgatggaaccacgaccatcgccaataaccttaccagcacggtgcaggtcttcacagactctgagtaccagctgccctacgtcctcggttcggctcaccagggctgccttccgccgttcccagcagacgtcttcatgattcctcagtacggctacttgactctgaacaatggcagccaagcggtaggacgttcttcattctactgtctagagtattttccctctcagatgctgaggacgggaaacaacttcaccttcagctacacttttgaagacgtgcctttccacagcagctacgcgcacagccagagtctggatcggctgatgaatcctctcattgaccagtacctgtattacctgagcaaaactcagggtacaagtggaacaacgcagcaatcgagactgcagttcaaccaagctgggcctagctccatggctcagcaggccaaaaactggctaccgggacccagctaccgacagcagcgaatgtctaagacggctaatgacaacaacaacagtgaatttgcttggactgcagccaccaaatattacccgaatggaagaaattctctggtcaatcccgggcccccaatggccagtcacaaggacgatgaggaaaagtatttccccatgcacggaaatctcatctttggaaaacaaggcacaggaactaccaatgtggacattgaatcagtgcttattacagacgaagaagaaatcagaacgactaatcctgtggctacagaacaatacggacaggttgccaccaaccgtcagagtcagaacaccacagcttcctatggaagtgtggacagccagggaatcttacctggaatggtgtggcaggaccgcgatgtctatcttcaaggtcccatttgggccaaaactcctcacacggacggacactttcatccttctccgctcatgggaggctttggactgaaacaccctcctccccagatcctgatcaaaaacacacctgtgccagcgaatcccgcgaccactttcactcctggaaagtttgcttcgttcattacccagtattccaccggacaggtcagcgtggaaatagagtgggagctgcagaaagaaaacagcaaacgctggaacccggaaattcagtacacctccaactacaacaagtcggtgaatgtggagtttaccgtggacgcaaacggtgtttattctgaaccccgccctattggcactcgttaccttacccggaacttgtaatttcctgttaatgaataaaccgatttatgcgtttcagttgaactttggtctctgcgaagggcgaattc

SEQ ID NO: 4812 - protein, 735 aa, Adeno-associated virus
MAADGYLPDWLEDTLSEGIRQWWKLKPGPPPPKPNQQHRDDSRGLVLPGYKYLGPFNGLDKGEPVNEADAAALEHDKAYDHQLKQGDNPYLKYNHADAEFQERLQEDTSFGGNLGRAVFQAKKRVLEPLGLVEEAVKTAPGKKRPIEQSPAEPDSSSGIGKSGQQPAKKRLNFGQTGDTESVPDPQPIGEPPAAPSGVGSNTMASGGGAPMADNNEGADGVGNSSGNWHCDSTWMGDRVITTSTRTWALPTYNNHLYKQISSESGATNDNHYFGYSTPWGYFDFNRFHCHFSPRDWQRLINNNWGFRPKKLNFKLFNIQVKEVTQNDGTTTIANNLTSTVQVFTDSEYQLPYVLGSAHQGCLPPFPADVFMIPQYGYLTLNNGSQAVGRSSFYCLEYFPSQMLRTGNNFTFSYTFEDVPFHSSYAHSQSLDRLMNPLIDQYLYYLSKTQGTSGTTQQSRLQFNQAGPSSMAQQAKNWLPGPSYRQQRMSKTANDNNNSEFAWTAATKYYPNGRNSLVNPGPPMASHKDDEEKYFPMHGNLIFGKQGTGTTNVDIESVLITDEEEIRTTNPVATEQYGQVATNRQSQNTTASYGSVDSQGILPGMVWQDRDVYLQGPIWAKTPHTDGHFHPSPLMGGFGLKHPPPQILIKNTPVPANPATTFTPGKFASFITQYSTGQVSVEIEWELQKENSKRWNPEIQYTSNYNKSVNVEFTVDANGVYSEPRPIGTRYLTRNL

SEQ ID NO: 4813 - DNA, 3122 bp, Adeno-associated virus
  source 1..3122: mol_type = genomic DNA
agcggccgcgaattcgccctttctacggctgcgtcaactggaccaatgaaaactttcccttcaacgattgcgtcgacaagatggtgatctggtgggaggagggaaagatgaccgccaaggtcgtggaatctgccaaagccattctgggtggaagcaaggttcgtgtggaccagaaatgcaggtcttcggcccagatcgacccgactccggtgattgtcacctctaacaccaacatgtgcgccgtgattgacggaaactcgaccaccttcgagcaccagcagccgttgcaagaccggatgttcaaatttgaacttacccgccgtttggatcatgactttgggaaggtcaccaagcaggaagtcaaagactttttccggtgggctcaagatcacgtgactgaggtggagcatgagttctacgtcaaaaagggtggagccaagaaaaggcccgcccccgatgatgtatatataaatgagcccaagcgggcgcgcgagtcagttgcgcagccatcgacgtcagacgcggaagcttcgataaactacgcggacaggtaccaaaacaaatgttctcgtcacgtgggcatgaatctgatgctgtttccctgtcgacaatgcgaaagaatgaatcagaattcaaatatctgcttcacacacgggcaaaaagactgtttggaatgctttcccgtgtcagaatctcaacccgtttctgtcgtcagaaaaacgtatcagaaactttgttacattcatcatatcatgggaaaagtaccagacgcctgcactgcctgcgacctggtaaatgtggacttggatgactgtatttctgagcaataaatgacttaaatcaggtatggctgctgacggttatcttccagattggctcgaggacactctctctgaaggaatcagacagtggtggaagctcaaacctggcccaccaccgccgaaacctaaccaacaacaccgggacgacagtaggggtcttgtgcttcctgggtacaagtacctcggacccttcaacggactcgacaaaggagagccggtcaacgaggcagacgccgcggccctcgagcacgacaaagcctacgaccaccagctcaagcaaggggacaacccgtacctcaaatacaaccacgcggacgctgaatttcaggagcgtcttcaagaagatacgtctttcgggggcaacctcgggcgagcagtcttccaggccaaaaagagggtactcgagcctcttggtctggttgaggaagctgttaagacggctcctggaaaaaagagacctatagagcagtctcctgcagaaccggactcttcctcgggcatcggcaaatcaggccagcagcccgctaagaaaagactcaattttggtcagactggcgacacagagtcagtcccagaccctcaaccaatcggagaaccccccgcagccccctctggtgtgggatctaatacaatggcttcaggcggtggggcaccaatggcagacaataacgaaggcgccgacggagtgggtaattcctcgggaaattggcattgcgattccacatggatgggcgacagagttatcaccaccagcacaagaacctgggccctccccacctacaataatcgcctctacaagcaaatctccagcgaatcgggagccaccaacgacaaccactacttcggctacagcaccccctgggggtattttgactttaacagattccactgtcacttctcaccacgtgactggcagcgactcatcaacaacaactggggatttagacccaagaaactcaatttcaagctcttcaacatccaagtcaaggaggtcacgcagaatgatggaaccacgaccatcgccaataaccttaccagcacggtgcaggtcttcacagactctgagtaccagctgccctacgtcctcggttcggctcaccagggctgccttccgccgttcccagcagacgtcttcatgattcctcagtacggctacttgactctgaacaatggcagccaagcggtaggacgttcttcattctactgtctagagtattttccctctcagatgctgaggacgggaaacaacttcaccttcagctacacttttgaagacgtgcctttccacagcagctacgcgcacagccagagtctggatcggctgatgaatcctctcattgaccagtacctgtattacctgagcaaaactcagggtacaagtggaacaacgcagcaatcgagactgcagttcagccaagctgggcctagctccatggctcagcaggccaaaaactggctaccgggacccagctaccgacagcagcgaatgtctaagacggctaatgacaacaacaacagtgaatttgcttggactgcagccaccaaatattacctgaatggaagaaattctctggtcaatcccgggcccccaatggccagtcacaaggacgatgaggaaaagtatttccccatgcacggaaatctcatctttggaaaacaaggcacaggaactaccaatgtggacattgaatcagtgcttattacagacgaagaagaaatcagaacaactaatcctgtggctacagaacaatacggacaggttgccaccaaccatcagagtcagaacaccacagcttcctatggaagtgtggacagccagggaatcttacctggaatggtgtggcaggaccgcgatgtctatcttcaaggtcccatttgggccaaaactcctcacacggacggacactttcatccttctccgctcatgggaggctttggactgaaacaccctcctccccagatcctgatcaaaaacacacctgtgccagcgaatcccgcgaccactttcactcctggaaagtttgcttcgttcattacccagtattccaccggacaggtcagcgtggaaatagagtgggagctgcagaaagaaaacagcaaacgctggaacccagaaattcagtacacctccaactacaacaagtcggtgaatgtggagtttaccgtggacgcaaacggtgtttattctgaaccccgccctattggcactcgttaccttacccggaacttgtaatttcctgttaatgaataaaccgatttatgcgtttcagttgaactttggtctctgcgaagggcgaattc

SEQ ID NO: 4814 - protein, 735 aa, Adeno-associated virus
MAADGYLPDWLEDTLSEGIRQWWKLKPGPPPPKPNQQHRDDSRGLVLPGYKYLGPFNGLDKGEPVNEADAAALEHDKAYDHQLKQGDNPYLKYNHADAEFQERLQEDTSFGGNLGRAVFQAKKRVLEPLGLVEEAVKTAPGKKRPIEQSPAEPDSSSGIGKSGQQPAKKRLNFGQTGDTESVPDPQPIGEPPAAPSGVGSNTMASGGGAPMADNNEGADGVGNSSGNWHCDSTWMGDRVITTSTRTWALPTYNNRLYKQISSESGATNDNHYFGYSTPWGYFDFNRFHCHFSPRDWQRLINNNWGFRPKKLNFKLFNIQVKEVTQNDGTTTIANNLTSTVQVFTDSEYQLPYVLGSAHQGCLPPFPADVFMIPQYGYLTLNNGSQAVGRSSFYCLEYFPSQMLRTGNNFTFSYTFEDVPFHSSYAHSQSLDRLMNPLIDQYLYYLSKTQGTSGTTQQSRLQFSQAGPSSMAQQAKNWLPGPSYRQQRMSKTANDNNNSEFAWTAATKYYLNGRNSLVNPGPPMASHKDDEEKYFPMHGNLIFGKQGTGTTNVDIESVLITDEEEIRTTNPVATEQYGQVATNHQSQNTTASYGSVDSQGILPGMVWQDRDVYLQGPIWAKTPHTDGHFHPSPLMGGFGLKHPPPQILIKNTPVPANPATTFTPGKFASFITQYSTGQVSVEIEWELQKENSKRWNPEIQYTSNYNKSVNVEFTVDANGVYSEPRPIGTRYLTRNL

SEQ ID NO: 4815 - protein, 733 aa, Adeno-associated virus
MAADGYLPDWLEDNLSEGIREWWDLKPGAPKPKANQQKQDDGRGLVLPGYKYLGPFNGLDKGEPVNAADAAALEHDKAYDQQLKAGDNPYLRYNHADAEFQERLQEDTSFGGNLGRAVFQAKKRVLEPLGLVEEGAKTAPGKKRPLESPQEPDSSSGIGKKGKQPAKKRLNFEEDTGAGDGPPEGSDTSAMSSDIEMRAAPGGNAVDAGQGSDGVGNASGDWHCDSTWSEGKVTTTSTRTWVLPTYNNHLYLRLGTTSNSNTYNGFSTPWGYFDFNRFHCHFSPRDWQRLINNNWGLRPKAMRVKIFNIQVKEVTTSNGETTVANNLTSTVQIFADSSYELPYVMDAGQEGSLSPFPNDVFMVPQYGYCGIVTGENQNQTDRNAFYCLEYFPSQMLRTGNNFEMAYNFGKVPFHSMYAYSQSPDRLMNPLLDQYLWHLQSTTSGETLNQGNAATTFGKIRSGDFAFYRKNWLPGPCVKQQRLSKTASQNYKIPASGGNALLKYDTHYTLNNRWSNIAPGPPMATAGPSDGDFSNAQLIFPGPSVTGNTTTSANNLLFTSEEEIAATNPRDTDMFGQIADNNQNATTAPITGNVTAMGVLPGMVWQNRDIYYQGPIWAKIPHADGHFHPSPLIGGFGLKHPPPQIFIKNTPVPANPATTFTAARVDSFITQYSTGQVAVQIEWEIEKERSKRWNPEVQFTSNYGNQSSMLWAPDTTGKYTEPRVIGSRYLTNHL

SEQ ID NO: 4816 - protein, 733 aa, Adeno-associated virus
MAADGYLPDWLEDNLSEGIREWWDLKPGAPKLKANQQKQDDGRGLVLPGYKYLGPFHGLDKGEPVNAADAAALEHDKAYDQQLKAGDNPYLRYNHADAEFQERLQEDTSFGGNLGRAVFQAKKRVLEPLGLVEEGAKTAPGKKRPLESPQEPDSSSGIGKKGKQPAKKRLNFEEDTGAGDGPPEGSDTSAMSSDIEMRAAPGGNAVDAGQGSDGVGNASGDWHCDSTWSEGKVTTTSTRTWVLPTYNNHLYLRLGTTSNSNTYNGFSTPWGYFDFNRFHCHFSPRDWQRLINNNWGLRPKAMRVKIFNIQVKEVTTSNGETTVANNLTSTVQIFADSSYELPYVMDAGQEGSLPPFPNDVFMVPQYGYCGIVTGENQNQTDRNAFYCLEYFPSQMLRTGNNFEMAYNFEKVPFHSMYAHSQSLDRLMNPLLDQYLWHLQSTTSGETLNQGNAATTFGKIRSGDFAFYRKNWLPGPCVKQQRFSKTASQNYKIPASGGNALLKYDTHYTLNNRWSNIAPGPPMATAGPSDGDFSNAQLIFPGPSVTGNTTTSANNLLFTSEGEIAATNPRDTDMFGQIADNNQNATTAPITGNVTAMGVLPGMVWQNRDIYYQGPIWAKIPHADGHFHPSPLIGGFGLKHPPPQIFIKNTPVPANPATTFTAARVDSFITQYSTGQVAVQIEWEIEKERSKRRNPEVQFTSNYGNQSSMLWAPDTTGKYTEPRVIGSRYLTNHL

SEQ ID NO: 4817 - protein, 733 aa, Adeno-associated virus
MAADGYLPDWLEDNLSEGIREWWDLKPGAPKPKANQQKQDDGRGLVLPGYEYLGPFNGLDKGEPVNAADAAALEHDKAYDQQLKAGDNPYLRYNHADAEFQERLQEDTSFGGNLGRAVFQAKKRVLEPLGLVEEGAKTAPGKKRPLESPQEPDSSSGIGKKGKQPAKKRLNFEEDTGAGDGPPEGSDTSAMSSDIEMRAAPGGNAVDAGQGSDGVGNASGDWHCDSTWSEGKVTTTSTRTWVLPTYNNHLYLRLGTTSNSNTYNGFSTPWGYFDFNRFHCHFSPRDWQRLINNNWGLRPKAMRVKIFNIQVKEVTTSNGETTVANNLTSTVQIFADSSYELPYVMDAGQEGSLPPFPNDVFMVPQYGYCGIVTGENQNQTDRNAFYCLEYFPSQMLRTGNNFETAYNFEKVPFHSMYAHSQSLDGLMNPLLDQYLWHLQSTTSGETLNQGNAATTFGKIRSGDFAFYRKNWLPGPCVKQQRFSKTASQNYKIPASGGNALLKYDTHYTLNNRWSNIAPGPPMATAGPSDGDFSNAQLIFPGPSVTGNTTTSANNLLFTSEEEIAATNPRDTDMFGQIADNNQNATTAPITGNVTAMGVLPGMVWQNRDIYYQGPIWAKIPHADGHFHPSPLIGGFGLKHPPPQIFIKNTPVPAYPATTFTAARVDSFITQYSTGQVAVQIEWEIEKERSKRWNPEVQFTSNCGNQSSMLWAPDTTGKYTEPRVIGSRYLTNHL

SEQ ID NO: 4818 - protein, 735 aa, Adeno-associated virus
MAADGYLPDWLEDTLSEGIRQWWKLKPGPPPPKPNQQHRDDSRGLVLPGYKYLGPFNGLDKGEPVNEADAAALEHDKAYDHQLKQGDNPYLKYNHADAEFQERLQEDTSFGGNLGRAVFQAKKRVLEPLGLVEEAVKTAPGKKRPIEQSPAEPDSSSGIGKSGQQPAKKRLNFGQTGDTESVPDPQPIGEPPAAPSGVGSNTMASGGGAPMADNNEGADGVGNSSGNWHCDSTWMGDRVITTSTRTWALPTYNNHLYKQISSESGATNDNHYFGYSTPWGYFDFNRFHCHFSPRDWQRLINNNWGFRPKKLNFKLFNIQVKEVTQNDGTTTIANNLTSTVQVFTDSEYQLPYVLGSAHQGCLPPFPADVFMIPQYGYLTLNNGSQAVGRSSFYCLEYFPSQMLRTGNNFTFSYTFEDVPFHSSYAHSQSLDRLMNPLIDQYLYYLSKTQGTSGTTQQSRLQFSQAGPSSMAQQAKNWLPGPSYRQQRMSKTANDNNNSEFAWTAATKYYLNGRNSLVNPGPPMASHKDDEEKYFPMHGNLIFGKQGTGTTNVDIESVLITDEEEIRTTNPVATEQYGQVATNHQSQNTTASYGSVDSQGILPGMVWQDRDVYLQGPIWAKIPHTDGHFHPSPLMGGFGLKHPPPQILIKNTPVPANPATTFTPGKFASFITQYSTGQVSVEIEWELQKENSKRWNPEIQYTSNYNKSVNVEFTVDANGVYSEPRPIGTRYLTRNL

SEQ ID NO: 4819 - DNA, 3127 bp, Adeno-associated virus
  source 1..3127: mol_type = genomic DNA
gcggccgcgaattcgcccttcgcagagaccaaagttcaactgaaacgaatcaaccggtttattgattaacatgcaattacagattacgggtgaggtaacgagtgccaatagggcgaggctcagagtaaacaccctggctgtcaacggcaaagtccacaccagtctgcttttcaaagttggaggtgtactgaatctccgggtcccagcgcttgctgttttccttctgcagctcccactcgatttccacgctgacttgtccggtgctgtactgtgtgatgaacgaagcaaacttggcaggagtaaacacctccggaggattagcgggaacgggagtgttcttgatcaggatctgaggaggcggatgtttaagtccaaagccgcccatcaaaggagacgggtgaaagttgccatccgtgtgaggaatcttggcccagatgggaccctgcaggtacacgtcccggttctgccagaccatgccaggtaaggctccctggttgttgacaacttgtgtctgggctgcagtattagccgcttgtaagttgctgctgactatcccgtattcttccgtggctacaggattagtaggacgaatttcttcttcatttgtcattaacacattttccaatgtagttttgttagttgctccagtttttccaaaaatcaggactccgctggatgggaaaaagcggtcctcgtcgtccttgtgagttgccatggcgacgccgggattaaccaacgagtttctgccgttcaggtgatatttggtggcaccagtccaagcaaagttgctgttgttgttttgatccagcgttttggagaccctttgttgccggaagcagggtccaggtaaccaattcttggcttgttcggccatagttgaaggcccgccctggtaaaactgcagttcccgattgccagctgtgcctcctgggtcactctgtgttctggccaggtagtacaagtactggtcgatgaggggattcatcagccggtccaggctctggctgtgtgcgtagctgctgtggaaaggcacgtcctcgaagctgtagctgaactcaaagttgttgcccgttctcagcatctgagaggggaagtactccaggcagtagaaggaggaacgtcccacagactgactgccattgttgagagtcaggtagccgtactgaggaatcatgaagacgtccgccgggaacggaggcaggcagccctggtgcgcagagccgaggacgtacggcagctggtattccgagtccgagaatacctgaatcgtgctggtaaggttattagcgatggtcgtaacgccgtcattcgtcgtgacctccttgacctggatgttgaagagcttgaaccgcagcttcttgggccggaatccccagttgttgttgatgagtcgctgccagtcacgtggtgagaagtggcagtggaatctgttaaagtcaaaatacccccagggggtgctgtagccgaagtaggtgttgtcgttggtactacctgcagtttcactggagatttgctcgtagaggtggttgttgtaggtgggcagggcccaggttcgggtgctggtggtaatgactctgtcgcccagccatgtggaatcgcaatgccaatttcctgaggcattacccactccgtcggcaccttcgttattgtctgccattggtgcgccaccgcctgcagccactgtaccagatcccacactagagggcgctgctggaggttctccgagaggttgagggtcggggactgactctgagtcgccagtctgaccgaaattgagtctctttctggcgggctgctggcccttcttgccgatgcccgtggaggagtcgggggaacgctgaggtgacggctctaccggtctcttctttgcaggagccgtcttagcgccttcctcaaccagaccgagaggttcgagaacccgcttcttggcctggaagactgctcgcccgaggttgcccccaaatgacgtatcttcttgcagacgctcctgaaactcggcgtcggcgtggttataccgcaggtacgggttgtcacccgcattgagctgctggtcgtaggccttgtcgtgctcgagggccgctgcgtccgccgcgttgacgggctcccccttgtcgagtccgttgaagggtccgaggtacttgtagccaggaagcaccagaccccggccgttgtcctgcttttgctggttggctttgggtttcggggctccaggtttcaggtcccaccactcgcgaatgccctcagagaggttgtcctcgagccaatctggaagataaccatcggcagccatacctgatttaaatcatttattgttcaaagatgcagtcatccaaatccacattgaccagatcgcaggcagtgcaagcgtctggcacctttcccatgatatgatgaatgtagcacagtttctgatacgcctttttgacgacagaaacgggtttagattctgacacgggaaagcactctaaacagtctttctgtccgtgagtgaagcagatatttgaattctgattcattctctcgcattgtctgcagggaaacagcatcagattcatgcccacgtgacgagaacatttgttttggtacctgtctgcgtagttgatcgaagcttccgcgtctgacgtcgatggctgcgcaactgactcgcgcacccgtttgggctcacttatatctgcgtcactgggggcgggtcttttcttggctccaccctttttgacgtagaattcatgctccacctcaaccacgtaatcctttgcccaccggaaaaagtctttgacttcctgcttggtgaccttcccaaagtcatgatccagacggcgggtgagttcaaatttgaacatccggtcttgcaacggctgctggtgttcgaaggtcgttgagttcccgtcgatcacggcgcacatgttggtgttggagatgacgatcgcgggagtcgggtctatctgggccgaggacttgcatttctggtccacgcgcaccttgcttcctccgagaatggctttggccgactccacgaccttggcggtcatcttcccctcctcccaccagatcaccatcttgtcgacacagtcgttgaagggaaagttctcattggtccagttgacgcagccgtagaaagggcgaattc

SEQ ID NO: 4820 - DNA, 3106 bp, Adeno-associated virus
  source 1..3106: mol_type = genomic DNA
gcggccgcgaattcgcccttcgcagagaccaaagttcaactgaaacgaatcaaccggtttattgattaacaagtaattacaggttacgggtgaggtaacgggtgccaatggggcgaggctcagtataaaccccttcgttgttgacagcaaattccacattattagacttggcataatttgaggtgtactgaatctctggattccagcgtttgctgttttctttctgcagttcccactcgatctccacgctgacctggccggtgctgtactgcgtgataaatgaggcaaacttggcaggagtaaacacctctggaggattagcaggtaccggggtgtttttgatgagaatttgaggaggcgggtgtttgagtccaaatccgcccatcaggggagacgggtgaaagttgccgtccgtgtgaggaattttggcccagatgggaccctgcaggcacacgtcccggttctgccagaccatgccgggcagagccccctggctgttgacagtctgtgtctggggtccggccgtagacgattgcaggttgctggagaccacaccgtattcttctgtagccacgggattggtggttttgatctcctcctcgctggtcattagcacgttttccagcgttgtcttgttggcagcccccgttttgccaaaaaccagcactccgttgatgggaaagaactggtcctcgtcgtccttgttggtggccatggctacgcccgggttggttaatgaatttctaccattcagatggtatttagtggccccggtccaggcaaagttactgttgttgttgctgtctatgttttttgacagtctctgctgccgataacagggtccgggcagccagttctttgattgctcggccatggtgttgggcccagcctgatggaactgcagctcccttgtggaccccgtagtgctctgggtccgggccaggtagtacaggtactggtcgatgaggggattcatcagccggtctaggctctggctgtgcacatagctgctgtggaaaggcacttcctcaaaggtgtagctgaattcaaagttattgcccgttctcagcatctgagaaggaaagtactccaggcagtagaaggaggaacgtcccacagactgactgccgttgtttagagtcagatatccgtactgaggaatcatgaacacgtccgcagggaacggagggaggcagccctggtgcgcagagccgaggacgtacggcagttggtactccgagtccgagaagacctgaatcgtgctggtaaggttattagcgatggtcgtaacgccgtcgttcgtcgtgacctccttgacctggatgttgaacaacttgaaccgcagctttctgggccggaatccccagttgttgttgatgagtcgctgccagtcacgtggtgagaagtggcagtggaatctgttgaagtcaaaatagccccagggggtgctgtagctgaagaagtggttgtcgttggtagccccgctctgacttgatatctgcttgtagaggtggttgttgtaggtgggcagggcccaggtgcgggtgctggtggtgatgactctgtcgcccagccatgtggaatcgcaatgccaatttccggaggcattacccactccgtcggcgccttcgttattgtctgccattggtgcgccaccgcctgcagccattgtaccagatcccagacctgagggcgcggcgggaggttctccgagaggttgggggtcgggcactgactctgagtcgccagtctgcccaaagttgagcttctttttagcgggctgctggcctttcttgccgatgcccgtggaggagtcgggggattctatgggtctcttctttccaggagccgtcttagcgacttcctcaaccagaccgagaggttcgagaacccgcttcttggcctggaagactgctcgcccgaggttgcccccaaaagacgtatcttcttgaagacgctcctgaaactcggcgtcggcgtggttgtacttgaggtacgggttgtccccctgctcgagctgcttgtcgtaggccttgtcgtgctcgagggccgcggcgtctgcctcgttgaccggctctcccttgtcgagtccgttgaagggtctgaggtacttgtagccaggaagcaccagaccccggccgtcgtcctgcttttgctggttggctttgggtttcggggctccaggtttcaagtcccaccactcgcgaatgccctcagagaggttgtcctcgagccaatctggaagataaccatcggcagccatacctggtttaagtcatttattgctcagaaacacagtcatccaggtccacgttgaccagatcgcaggccgagcaagcaatctcgggagcccgccccagcagatgatgaatggcacagagtttccgatacgtcctctttctgacgaccggttgagattctgacacgccggggaaacattctgaacagtctctggtcccgtgcgtgaagcaaatgttgaaattctgattcactctctcgcatgtcttgcagggaaacagcatctgaagcatgcccgcgtgacgagaacatttgttttggtacctgtcggcaaagtccaccggagctccttccgcgtctgacgtcgatggattcgcgactgaggggcaggcccgcttgggctcgcttttatccgcgtcatcgggggcgggtctcttgttggccccaccctttctgacgtagaacccatgcgccacctcggtcacgtgatcctgcgcccagcggaagaaccttttgacttcctgctttgtcaccttgccaaagttatgctccagacggcgggtgggttcaaatttgaacatccggtcctgcaacggctgctggtgctcgaaggtggcgctgttcccgtcaatcacggcgcacatgttggtgttggaggtgacggtcacgggggtggggtcgatctgggcggacgacttgcacttttggtccacgcgcaccttgctgccgccgagaatggccttggcggactccacgaccttggccgtcatcttgccctcctcccaccagatcaccatcttgtcggcgcaatcgttgaagggaaagttctcattggtccagttgacgcagccgtagaaagggcgaattc

SEQ ID NO: 4821 - DNA, 3102 bp, Adeno-associated virus
  source 1..3102: mol_type = genomic DNA
gcggccgcgaattcgcccttcgcagagaccaaagttcaactgaaacgaatcaaccggtttattgattaacaagtaattacaggttacgggtgaggtaacgggtgccaatggggcgaggctcagtataaaccccttcgttgttgacagcaaattccacattattagacttggcataatttgaggtgtactgaatctctggattccagcgtttgctgttttctttctgcagttcccactcgatctccacgctgacctggccggtgctgtactgcgtgataaatgaggcaaacttggcaggagtaaacacctctggaggattagcaggtaccggggtgtttttgatgagaatttgaggaggcgggtgtttgagtccaaatccgcccatcaggggagacgggtgaaagttgccgtccgtgtgaggaatttcggcccagatgggaccctgcaggtacacgtcccggttctgccagaccatgccgggcagagccccctggctgttgacagtctgtgtccggggtccggccgtagacgattgcaggttgctggagaccacaccgtattcttctgtagccacgggattggtggttttgatctcctcctcgctggtcattagcacgttttccagcgttgtcttgttggcagcccccgttttgccaaaaaccagcactccgttgatgggaaggaactggtcctcgtcgtccttgttggtggccatggctacgcccgggttggttaatgaatttctaccattcagatggtatttagtggccccggtccaggcaaagttactgttgttgttgctgtctatgttttttgacagtctctgctgccgataacagggtccgggcagccagttctttgattgctcggccacggtgttgggcccagcctgatggaactgcagctcccttgtggaccccgtagtgctctgggtccgggccaggtagtacaggtactggtcgatgaggggattcatcagccggtccaggctctggctgtgcgcatagctgctgtggaaaggcacttcctcaaaggtgtagctgaattcaaagttattgcccgttctcagcatctgagaaggaaagtactccaggcagcagaaggaggaacgtcccacagactgactgccgttgtttagagtcagatatccgtactgaggaatcatgaacacgtccgcagggaacggagggaggcagccctggtgcgcagagccgaggacgtacggcagttggtactccgagtccgagaagacctgaatcgtgctggtaaggttattagcgatggtcgtaacgccgtcgttcgtcgtgacctccttgacctggatgttgaacaacttgaaccgcagctttctgggccggaatccccagttgttgttgatgagtcgctgccagtcacgtggtgagaagtggcagtggaatctgttgaagtcaaaatagccccagggggtgctgtagccgaagaagtggttgtcgttggtagccccgctctgacttgatatctgcttgtagaggtggttgttgtaggtgggcagggcccaggtgcgggtgctggtggtgatgactctgtcgcccagccatgtggaatcgcaatgccaatttccggaggcattacccactccgtcggcgccttcgttattgtctgccattggtgcgccaccgcctgcagccattgtaccagatcccagacctgagggcgcggcgggaggttctccgagaggttgggggtcgggcactgactctgagtcgccagtctgcccaaagttgagcttctttttagcgggctgctggcctttcttgccgatgcccgtggaggagtcgggggattctatgggtctcttctttccggaagccgtcttagcgccttcctcaaccagaccgagaggttcgagaacccgcttcttggcctggaagactgctcgcccgaggttgcccccaaaagacgtatcttcttgaagacgctcctgaaactcggcgtcggcgtggttgtacttgaggtacgggttgtccccctgctcgagctgcttgtcgtaggccttgtcgtgctcgagggccgcggcgtctgcctcgttgaccggctctcccttgtcgagtccgttgaagggtccgaggtacttgtagccaggaagcaccagaccccggccgtcgtcctgcttttgctggttggctttgggtttcggggctccaggtttcaagtcccaccactcgcgaatgccctcagagaggttgtcctcgagccaatctggaagataaccatcggcagccatacctggtttaagtcatttattgctcagaaacacagtcatccaggtccacgttgaccagatcgcaggccgagcaagcaatctcgggagcccgccccagcagatgatgaatggcacagagtttccgatacgtcctctttctgacgaccggttgagattctgacacgccggggaaacattctgaacagtctctggtcccgtgcgtgaagcaaatgttgaaattctgattcattctctcgcatgtcttgcagggaaacagcatctgaagcatgcccgcgtgacgagaacatttgttttggtacctgtcggcaaagtccaccggagctccttccgcgtctgacgtcgatggatccgcgactgaggggcaagcccgcttgggctcgcttttatccgcgtcatcgggggcgggtctcttgttggctccaccctttctgacgtagaactcatgcgccacctcggtcacgtgatcctgcgcccagcggaagaactctttgacttcctgctttgtcaccttgccaaagtcatgctccagacggcgggtgagttcaaatttgaacatccggtcttgtaacggctgctggtgctcgaaggtggtgctgttcccgtcaatcacggcgcacatgttggtgttggaagtgacgatcacgggggtgggatcgatctgggcggacgacttgcacttttggtccacgcgcaccttgctgccgccgagaatggccttggcggactccacgaccttggccgtcatcttgccctcctcccaccagatcaccatcttgtcgacgcaatcgttgaagggaaagttctcattggtccagttgacgcagccgaagggcgaattc

SEQ ID NO: 4822 - protein, 728 aa, Adeno-associated virus
MAADGYLPDWLEDNLSEGIREWWDLKPGAPKPKANQQKQDDGRGLVLPGYRYLGPFNGLDKGEPVNEADAAALEHDKAYDKQLEQGDNPYLKYNHADAEFQERLQEDTSFGGNLGRAVFQAKKRVLEPLGLVEEGAKTAPGKKRPIESPDSSTGIGKNGQPPAKKKLNFGQTGDSESVPDPQPLGEPPAAPSGLGSGTMAAGGGAPMADNNEGADGVGNASGNWHCDSTWLGDRVITTSTRTWALPTYNNHLYKQISSQSGATNDNHFFGYSTPWGYFDFNRFHCHFSPRDWQRLINNNWGFRPRKLRFKLFNIQVKEVTTNDGVTTIANNLTSTIQVFSDSEYQLPYVLGSAHQGCLPPFPADVFMIPQYGYLTLNNGSQSVGRSSFYCLEYFPSQMLRTGNNFEFSYTFEEVPFHSSYAHSQSLDRLMNPLIDQYLYYLARTQSTTGSTRELQFHQAGPNTMAEQSKNWLPGPCYRQQRLSKNIDSNNNSNFAWTGATKYHLNGRNSLTNPGVAMATNKDDEDQFFPINGVLVFGKTGAANKTTLENVLMTSEEEIKTTNPVATEEYGVVSSNLQSSTAGPQTQTVNSQGALPGMVWQNRDVYLQGPIWAKIPHTDGNFHPSPLMGGFGLKHPPPQILIKNTPVPANPPEVFTPAKFASFITQYSTGQVSVEIEWELQKENSKRWNPEIQYTSNYAKSNNVEFAVNNEGVYTEPRPIGTRYLTRNL

SEQ ID NO: 4823 - DNA, 2187 bp, Adeno-associated virus
  source 1..2187: mol_type = genomic DNA
atggctgccgatggttatcttccagattggctcgagggcaacctctctgagggcattcgcgagtggtgggacttgaaacctggagccccgaaacccaaagccaaccagcaaaagcaggacgacggccggggtctggtgcttcctggctacaggtacctcggacccttcaacggactcgacaagggagagccggtcaacgaggcagacgccgcggccctcgagcacgacaaggcctacgacaagcagctcgagcagggggacaacccgtacctcaagtacaaccacgccgacgccgagtttcaggagcgtcttcaagaagatacgtcttttgggggcaacctcgggcgagcagtcttccaggccaagaagcgggttctcgaacctctcggtctggttgaggaaggcgctaagacggctcctggaaagaagagacccatagaatcccccgactcctccacgggcatcggcaagaacggccagccgcccgctaaaaagaagctcaactttgggcagactggcgactcagagtcagtgcccgacccccaacctctcggagaacctcccgccgcgccctcaggtctgggatctggtacaatggctgcaggcggtggcgcaccaatggcagacaataacgaaggcgccgacggagtgggtaatgcctccggaaattggcattgcgattccacatggctgggcgacagagtcatcaccaccagcacccgcacctgggccctgcccacctacaacaaccacctctacaagcagatatcaagtcagagcggggctaccaacgacaaccacttcttcggctacagcaccccctggggctattttgacttcaacagattccactgccacttctcaccacgtgactggcagcgactcatcaacaacaactggggattccggcccagaaagctgcggttcaagttgttcaacatccaggtcaaggaggtcacgacgaacgacggcgttacgaccatcgctaataaccttaccagcacgattcaggtcttctcggactcggagtaccaactgccgtacgtcctcggctctgcgcaccagggctgcctccctccgttccctgcggacgtgttcatgattcctcagtacggatatctgactctaaacaacggcagtcagtctgtgggacgttcctccttctactgcctggagtactttccttctcagatgctgagaacgggcgataactttgaattcagctacacctttgaggaagtgcctttccacagcagctatgcgcacagccagagcctggaccggctgatgaatcccctcatcgaccagtacctgtactacctggcccggacccagagcactacggggtccacaagggagctgcagttccatcaggctgggcccaacaccatggccgagcaatcaaagaactggctgcccggaccctgttatcggcagcagagactgtcaaaaaacatagacagcaacaacaacagtaactttgcctggaccggggccactaaataccatctgaatggtagaaattcattaaccaacccgggcgtagccatggccaccaacaaggacgacgaggaccagttctttcccatcaacggagtgctggtttttggcaaaacgggggctgccaacaagacaacgctggaaaacgtgctaatgaccagcgaggaggagatcaaaaccaccaatcccgtggctacagaagaatacggtgtggtctccagcaacctgcaatcgtctacggccggaccccagacacagactgtcaacagccagggggctctgcccggcatggtctggcagaaccgggacgtgtacctgcagggtcccatctgggccaaaattcctcacacggacggcaactttcacccgtctcccctgatgggcggatttggactcaaacacccgcctcctcaaattctcatcaaaaacaccccggtacctgctaatcctccagaggtgtttactcctgccaagtttgcctcatttatcacgcagtacagcaccggccaggtcagcgtggagatcgagtgggaactgcagaaagaaaacagcaaacgctggaatccagagattcagtacacctcaaattatgccaagtctaataatgtggaatttgctgtcaacaacgaaggggtttatactgagcctcgccccattggcacccgttacctcacccgtaacctgtaa

SEQ ID NO: 4824 - protein, 728 aa, Adeno-associated virus; identical to SEQ ID NO: 4803

SEQ ID NO: 4825 - DNA, 3106 bp, Adeno-associated virus
  source 1..3106: mol_type = genomic DNA
gcggccgcgaattcgcccttcgcagagaccaaagttcaactgaaacgaatcagccggtttattgattaacaagtaattacaggttacgggtgaggtaacgggtgccaatggggcgaggctcagtataaaccccttcgttgttgacagcaaattccacattattagacttggcataatttgaggtgtactgaatctctggattccagcgtttgctgttttctttctgcagttcccactcgatctccacgctgacctggccggtgctgtactgcgtgataaatgaggcaaacttggcaggagtaaacacctctggaggattagcaggtaccggggtgtttttgatgagaatttgaggaggcgggtgtttgagtccaaatccgcccatcaggggagacgggtgaaagttgccgtccgtgtgaggaattttggcccagatgggaccctgcaggtacacgtcccggttctgccagaccatgccgggcagagccccctggctgttgacagtctgtgtctggggtccggccgtagacgattgcaggttgctggagaccacaccgtattcttctgtagccacgggattggtggttttgatctcctcctcgctggtcattagcacgttttccagcgttgtcttgttggcagcccccgttttgccaaaaaccagcactccgttgatgggaaagaactggtcctcgtcgtccttgttggtggccatggctacgcccgggttggttaatgaatttctaccattcagatggtatttagtggccccggtccaggcaaagttactgttgttgttgctgtctatgttttttgacagtctctgctgccgataacagggtccgggcagccagttctttgattgctcggccatggtgttgggcccagcctgatggaactgcagctcccttgtggaccccgtagtgctctgggtccgggccaggtagtacaggtactggtcgatgaggggattcatcagccggtccaggctctggctgtgcgcatagctgctgtggaaaggcacttcctcaaaggtgtagctgaattcaaagttatcgcccgttctcagcatctgagaaggaaagtactccaggcagtagaaggaggaacgtcccacagactgactgccgttgtttagagtcagatatccgtactgaggaatcatgaacacgtccgcagggaacggagggaggcagccctggtgcgcagagccgaggacgtacggcagttggtactccgagtccgagaagacctgaatcgtgctggtaaggttattagcgatggtcgtaacgccgtcgttcgtcgtgacctccttgacctggatgttgaacaacttgaaccgcagctttctgggccggaatccccagttgttgttgatgagtcgctgccagtcacgtggtgagaagtggcagtggaatctgttgaagtcaaaatagccccagggggtgctgtagccgaagaagtggttgtcgttggtagccccgctctgacttgatatctgcttgtagaggtggttgttgtaggtgggcagggcccaggtgcgggtgctggtggtgatgactctgtcgcccagccatgtggaatcgcaatgccaatttccggaggcattacccactccgtcggcgccttcgttattgtctgccattggtgcgccaccgcctgcagccattgtaccagatcccagacctgagggcgcggcgggaggttctccgagaggttgggggtcgggcactgactctgagtcgccagtctgcccaaagttgagcttctttttagcgggcggctggccgttcttgccgatgcccgtggaggagtcgggggattctatgggtctcttctttccaggagccgtcttagcgccttcctcaaccagaccgagaggttcgagaacccgcttcttggcctggaagactgctcgcccgaggttgcccccaaaagacgtatcttcttgaagacgctcctgaaactcggcgtcggcgtggttgtacttgaggtacgggttgtccccctgctcgagctgcttgtcgtaggccttgtcgtgctcgagggccgcggcgtctgcctcgttgaccggctctcccttgtcgagtccgttgaagggtccgaggtacctgtagccaggaagcaccagaccccggccgtcgtcctgcttttgctggttggctttgggtttcggggctccaggtttcaagtcccaccactcgcgaatgccctcagagaggttgccctcgagccaatctggaagataaccatcggcagccatacctggtttaagtcatttattgctcagaaacacagtcatccaggtccacgttggccagatcgcaggccgagcaagcaatctcgggagcccgccccagcagatgatgaatggcacagagtttccgatacgtcctctttctgacgaccggttgagattctgacacgccggggaaacattctgaacagtctctggtcccgtgcgtgaagcaaatgttgaaattctgattcattctctcgcatgtcttgcaggggaacagcatctgaagcatgcccgcgtgacgagaacatttgttttggtacctgtcggcaaagtccaccggagctccttccgcgtctgacgtcgatggatccgcgactgaggggcaggcccgcttgggctcgcttttatccgcgtcatcgggggcgggtctcttgttggctccaccctttctgacgtagaactcatacgccacctcggtcacgtgatcctgcgcccagcggaagaactctttgacttcctgctttgtcaccttgccaaagtcatgctccagacggcgggtgagttcaaatttgaacatccggtcttgtaacggctgctggtgctcgaaggtggtgctgttcccgtcaatcacggcgcacatgttggtgttggaagtgacgatcacgggggtgggatcgatctgggcggacgacttgcacttttggtccacgcgcaccttgctgccgccgagaatggccttggcggactccacgaccttggccgtcatcctgccctcctcccaccagatcaccatcttgtcgacgcaatcgttgaagggaaagttctcattggtccagttgacgcagccgtagaaagggcgaattc

SEQ ID NO: 4826 - protein, 728 aa, Adeno-associated virus
MAADGYLPDWLEDNLSEGIREWWDLKPGAPKPKANQQKQDDGRGLVLPGYRYLGPFNGLDKGEPVNEADAAALEHDKAYDKQLEQGDNPYLKYNHADAEFQERLQEDTSFGGNLGRAVFQAKKRVLEPLGLVEEGAKTAPGKKRPIESPDSSTGIGKNGQPPAKKKLNFGQTGDSESVPDPQPLGEPPAAPSGLGSGTMAAGGGAPMADNNEGADGVGNASGNWHCDSTWLGDRVITTSTRTWALPTYNNHLYKQISSQSGATNDNHFFGYSTPWGYFDFNRFHCHFSPRDWQRLINNNWGFRPRKLRFKLFNIQVKEVTTNDGVTTIANNLTSTIQVFSDSEYQLPYVLGSAHQGCLPPFPADVFMIPQYGYLTLNNGSQSVGRSSFYCLEYFPSQMLRTGDNFEFSYTFEEVPFHSSYAHSQSLDRLMNPLIDQYLYYLARTQSTTGSTRELQFHQAGPNTMAEQSKNWLPGPCYRQQRLSKNIDSNNNSNFAWTGATKYHLNGRNSLTNPGVAMATNKDDEDQFFPINGVLVFGKTGAANKTTLENVLMTSEEEIKTTNPVATEEYGVVSSNLQSSTAGPQTQTVNSQGALPGMVWQNRDVYLQGPIWAKIPHTDGNFHPSPLMGGFGLKHPPPQILIKNTPVPANPPEVFTPAKFASFITQYSTGQVSVEIEWELQKENSKRWNPEIQYTSNYAKSNNVEFAVNNEGVYTEPRPIGTRYLTRNL

SEQ ID NO: 4827 - protein, 728 aa, Adeno-associated virus; identical to SEQ ID NO: 4822

SEQ ID NO: 4828 - protein, 728 aa, Adeno-associated virus
MAADGYLPDWLEDNLSEGIREWWDLKPGAPKPKANQQKQDDGRGLVLPGYKYLGPFNGLDKGEPVNEADAAALEHDKAYDKQLEQGDNPYLKYNHADAEFQERLQEDTSFGGNLGRAVFQAKKRVLEPLGLVEEGAKTAPGKKRPIESPDSSTGIGKNGQPPAKKKLNFGQTGDSESVPDPQPLGEPPAAPSGLGSGTMAAGGGAPMADNNEGADGVGNASGNWHCDSTWLGDRVITTSTRTWALPTYNNHLYKQISSQSGATNDNHFFGYSTPWGYFDFNRFHCHFSPRDWQRLINNNWGFRPRKLRFKLFNIQVKEVTTNDGVTTIANNLTSTIQVFSDSEYQLPYVLGSAHQGCLPPFPADVFMIPQYGYLTLNNGSQSVGRSSFYCLEYFPSQMLRTGNNFEFSYTFEEVPFHSSYAHSQSLDRLMNPLIDQYLYYLARTQSTTGSTRELQFHQAGPNTMAEQSKNWLPGPCYRQQRLSKNIDSNNNSNFAWTGATKYHLNGRNSLTNPGVAMATNKDDEDQFFPINGVLVFGKTGAANKTTLENVLMTSEEEIKTTNPVATEEYGVVSSNLQSSTAGPQTQTVNSQGALPGMVWQNRDVYLQGPIWAKIPHTDGNFHPSPLMGGFGLKHPPPQILIKNTPVPANPPEVFTPAKFASFITQYSTGQVSVEIEWELQKENSKRWNPEIQYTSNYAKSNNVEFAVNNEGVYTEPRPIGTRYLTRNL

SEQ ID NO: 4829 - protein, 728 aa, Adeno-associated virus
MAADGYLPDWLEDNLSEGIREWWDLKPGAPKPKANQQKQDDGRGLVLPGYKYLGPFNGLDKGEPVNEADAAALEHDKAYDKQLEQGDNPYLKYNHADAEFQERLQEDTSFGGNLGRAVFQAKKRVLEPLGLVEEGAKTAPGKKRPIESPDSSTGIGKKGQQPAKKKLNFGQTGDSESVPDPQPLGEPPAAPSGLGSGTMAAGGGAPMADNNEGADGVGNASGNWHCDSTWLGDRVITTSTRTWALPTYNNHLYKQISSQSGATNDNHFFGYSTPWGYFDFNRFHCHFSPRDWQRLINNNWGFRPRKLRFKLFNIQVKEVTTNDGVTTIANNLTSTIQVFSDSEYQLPYVLGSAHQGCLPPFPADVFMIPQYGYLTLNNGSQSVGRSSFYCLEYFPSQMLRTGNNFEFSYTFEEVPFHSSYAHSQSLDRLMNPLIDQYLYYLARTQSTTGSTRELQFHQAGPNTMAEQSKNWLPGPCYRQQRLSKNIDSNNNSNFAWTGATKYHLNGRNSLTNPGVAMATNKDDEDQFFPINGVLVFGKTGAANKTTLENVLMTSEEEIKTTNPVATEEYGVVSSNLQSSTAGPQTQTVNSQGALPGMVWQNRDVYLQGPIWAKIPHTDGNFHPSPLMGGFGLKHPPPQILIKNTPVPANPPEVFTPAKFASFITQYSTGQVSVEIEWELQKENSKRWNPEIQYTSNYAKSNNVEFAVNNEGVYTEPRPIGTRYLTRNL

SEQ ID NO: 4830 - DNA, 3098 bp, Adeno-associated virus
  source 1..3098: mol_type = genomic DNA
gaattcgcccttcgcagagaccaaagttcaactgaaacgaatcaaccggtttattgattaacaagtaattacaggttacgggtgaggtaacgggtgccaatggggcgaggctcagtataaaccccttcgttgttgacagcaaattccacattattagacttggcataatttgaggtgtactgaatctctggattccagcgtttgctgttttctttctgcagttcccactcgatctccacgctgacctggccggtgctgtactgcgtgataaatgaggcaaactaggcaggagtaaacacccctggaggattagcaggtaccggggtgtttttgatgagaatttgaggaggcgggtgtttgagtccaaatccgcccatcaggggagacgggtgaaagttgccgtccgtgtgaggaattttggcccagatgggaccctgcaggtacacgtcccggttctgccagaccatgccgggcagagccccctggctgttgacagtctgtgtctggggtccggccgtagacgattgcaggttgctggagaccacaccgtattcttctgtagccacgggattggtggttttgatctcctcctcgctggtcattagcacgttttccagcgttgtcttgttggcagcccccgttttgccaaaaaccagcactccgttgatgggaaagaactggccctcgtcgtccttgttggtggccatggctacgcccgggttggttaatgaatttctaccattcagatggtatttagtggccccggtccaggcaaagttactgttgttgttgctgtctatgttttttgacagtctctgctgccgataacagggtccgggcagccagttctttgattgctcggccatggtgttgggcccagcctgatggaactgcagctcccttgtggaccccgtagtgctctgggtccgggccaggtagtacaggtactggtcgatgaggggattcatcagccggtccaggctctggctgtgcgcatagctgctgtggaaaggcacttcctcaaaggtgtagctgaattcaaagttattgcccgttctcagcatctgagaaggaaagtactccaggcagtagaaggaggaacgtcccatagactgactgccgttgtttagagtcagatatccgtactgaggaatcatgaacacgtccgcagggaacggagggaggcagccctggtgcgcagagccgaggacgtacggcagttggtactccgagtccgagaagacctgaatcgtgctggtaaggttattagcgatggtcgtaacgccgtcgttcgtcgtgacctccttgacctggatgttgaacaacttgaaccgcagctttctgggccggaatccccagttgttgttgatgagtcgctgccagtcacgtggtgagaagtggcagtggaatctgttgaagtcaaaatagccccagggggtgctgtagccgaagaagtggttgtcgttggtagccccgctctgacttgatatctgcttgtagaggtggttgttgtaggtgggcagggcccaggtgcgggtgctggtggtgatgactctgtcgcccagccatgtggaatcgcaatgccaatttccggaggcattacccactccgtcggcgccttcgttattgtctgccattggtgcgccaccgcctgcagccattgtaccagatcccagacctgagggcgcggcgggaggttctccgagaggttgggggtcgggcactgactctgagtcgccagtctgcccaaagttgagcttctttttagcgggctgctggcctttcttgccgatgcccgtggaggagtcgggggattctatgggtctcttctttccaggagccgtcttagcgccttcctcaaccagaccgagaggttcgagaacccgcttcttggcctggaagactgctcgcccgaggttgcccccaaaagacgtatcttcttgaagacgctcctgaaactcagcgtcggcgtggttgtacttgaggtacgggttgtccccctgctcgagctgcttgtcgtaggccttgtcgtgctcgagggccgcggcgtctgcctcgttgaccggctctcccttgtcgagtccgttgaagggtccgaggtacttgtagccaggaagcaccagaccccggccgtcgtcctgcttttgctggttggctttgggtttcggggctccaggtttcaagtcccaccactcgcgaatgccctcagagaggttgtcctcgagccaatctggaagataaccatcggcagccatacctggtttaagtcatttattgctcagaaacacagtcatccaggtccacgttgaccagatcgcaggccgagcaagcaatctcgggagcccgccccagcagatgatgaatggcacagagtttccgatacgtcctctttctgacgaccggttgagattctgacacgccggggaaacattctgaacagtctctggtcccgtgcgtgaagcaaatgttgaaattctgattcattctctcgcatgtcttgcagggaaacagcatctgaagcatgcccgcgtgacgagaacatttgttttggtacctgtcggcaaagtccaccggagctccttccgcgtctgacgtcgatggatccgcgactgaggggcaggcccgcttgggctcgcttttatccgcgtcatcgggggcgggcctcttgttggctccaccctttctgacgtagaactcatgcgccacctcggtcacgtgatcctgcgcccagcggaagaactctttgacttcctgctttgtcaccttgccaaagtcctgctccagacggcgggtgagttcaaatttgaacatccggtcttgtaacggctgctggtgctcgaaggtggtgctgttcccgtcaatcacggcgcacatgttggtgttggaagtgacgatcacgggggtgggatcgatctgggcggacgacttgcacttttggtccacgcgcaccttgctgccgccgagaatggccttggcggactccacgaccttggccgtcatcttgccctcctcccaccagatcaccatcttgtcgacgcaatcgttgaagggaaagttctcattggtccagttgacgcagccgtagaaagggcgaattc

SEQ ID NO: 4831 - protein, 729 aa, Adeno-associated virus
MAADGYLPDWLEDNLSEGIREWWDLKPGAPKPKANQQKQDDGRGLVLPGYKYLGPFNGLDKGEPVNAADAAALEHDKAYDQQLKAGDNPYLRYNHADAEFQERLQEDTSFGGNLGRAVFQAKKRVLEPLGLVEEGAKTAPGKKRPIDSPDSSTGIGKKGQQPAKKKLNFGQTGDSESVPDPQPLGEPPAAPSSVGSGTMAAGGGAPMADNNEGADGVGNASGNWHCDSTWLGDRVITTSTRTWALPTYNNHLYKQISSSSSGATNDNHYFGYSTPWGYFDFNRFHCHFSPRDWQRLINNNWGFRPKKLRFKLFNIQVKEVTTNDGVTTIANNLTSTVQVFSDSEYQLPYVLGSAHQGCLPPFPADVFMIPQYGYLTLNNGSQSVGRSSFYCLEYFPSQMLRTGNNFEFSYSFEDVPFHSSYAHSQSLDRLMNPLIDQYLYYLARTQSTTGSTRELQFHQAGPNTMAEQSKNWLPGPCYRQQGLSKNLDFNNNSNFAWTAATKYHLNGRNSLTNPGIPMATNKDDEDQFFPINGVLVFGKTGAANKTTLENVLMTSEEEIKTTNPVATEEYGVVSSNLQPSTAGPQSQTINSQGALPGMVWQNRDVYLQGPIWAKIPHTDGNFHPSPLMGGFGLKHPPPQILIKNTPVPANPPEVFTPAKFASFITQYSTGQVSVEIEWELQKENSKRWNPEIQYTSNYAKSNNVEFAVNPDGVYTEPRPIGTRYLPRNL

SEQ ID NO: 4832 - protein, 1458 aa, Adeno-associated virus
MAADGYLPDWLEDNLSEGIREWWDLKPGAPKPKANQQKQDDGRGLVLPGYKYLGPFNGLDKGEPVNAADAAALEHDKAYDQQLKAGDNPYLRYNHADAEFQERLQEDTSFGGNLGRAVFQAKKRVLEPLGLVEEGAKTAPGKKRPIDSPDSSTGIGKKGQQPAKKKLNFGQTGDSESVPDPQPLGEPPAAPSSVGSGTMAAGGGAPTADNNEGADGVGNASGNWHCDSTWLGDRVITTSTRTWALPTYNNHLYKQISSSSSGATNDNHYFGYSTPWGYFDFNRFHCHFSPRDWQRLINNNWGFRPKKLRFKLFNIQVKEVTTNDGVTTIANNLTSTVQVFSDSEYQLPYVLGSAHQGCLPPFPADVFMIPQYGYLTLNNGSQSVGRSSFYCLEYFPSQMLRTGNNFEFSYSFEDVPFHSSYAHSQSLDRLMNPLIDQYLYYLARTQSTTGSTRELQFHQAGPNTMAEQSKNWLPGPCYRQQRLSKNLDFNNNSNFAWTAATKYHLNGRNSLTNPGIPMATNKDDEDQFFPINGVLVFGKTGAANKTTLENVLMTSEEEIKTTNPVATEEYGVVSSNLQSSTAGPQSQTINSQGALPGMVWQNRDVYLQGPIWAKIPHTDGNFHPSPLMGGFGLEHPPPQILIKNTPVPANPPEVFTPAKFASFITQYSTGQVSVEIEWELQKENSKRWNPEIQYTSNYAKSNNVEFAVNPDGVYTEPRPIGTRYLTRNLMAADGYLPDWLEDNLSEGIREWWDLKPGAPKPKANQQKQDDGRGLVLPGYKYLGPFNGLDKGEPVNAADAAALEHDKAYDQQLKAGDNPYLRYNHADAEFQERLQEDTSFGGNLGRAVFQAKKRVLEPLGLVEEGAKTAPGKKRPIGSPDSSTGIGKKGQQPAKKKLNFGQTGDSESVPDPQPLGEPPAAPSSVGSGTMAAGGGAPMADNNEGADGVGNASGNWHCDSTWLGDRVITTSTRTWALPTYNNHLYKQISSSSSGATNDNHYFGYSTPWGYFDFNRFHCHFSPRDWQRLINNNWGFRPKKLRFKLLNIQVKEVTTNDGVTTIANNLTSTVQVFSDSEYQLPYVLGSAHQGCLPPFPADVFMIPQYGYLTLDNGSQSVGRSSFYCLEYFPSQMLRTGNNFEFSYSFEDVPFHSSYAHSQSLDRLMNPLIDQYLYYLARTQSTTGSTRELQFHQAGPNTMAEQSKNWLPGPCYRQQRLSKNLDFNNNSNFAWTAATKYHLNGRNSLTNPGIPMATNKDDEDQFFPINGVLVFGKTGAANKTTLENVLMTSEEEIKTTNPVATEEYGVVSSNLQSSTAGPQSQTINSQGALPGMVWQNRDVYLQGPIWAKIPHTDGNFHPSPLMGGFGLKHPPPQILIKNTPVPANPPEVFTPAKFASFITQYSTGQVSVEIEWELQKENSKRWNPEIQYTSNYAKSNNVEFAVNPDGVYTEPRPIGTRYLTRNL

SEQ ID NO: 4833 - protein, 729 aa, Adeno-associated virus
MAADGYLPDWLEDNLSEGIREWWDLKPGAPKPKANQQKQDDGRGLVLPGYKYLGPFNGLDKGEPVNAADAAALEHDKAYDQQLKAGDNPYLRYNHADAEFQERLQEDTSFGGNLGRAVFQAKKRVLEPLGLVEEGAKTAPGKKRPIDSPDSSTGIGKKGQQPAKKKLNFGQTGDSESVPDPQPLGEPPAAPSSVGSGTMAAGGGAPTADNNEGADGVGNASGNWHCDSTWLGDRVITTSTRTWALPTYNNHLYKQISSSSSGATNDNHYFGYSTPWGYFDFNRFHCHFSPRDWQRLINNNWGFRPKKLRFKLFNIQVKEVTTNDGVTTIANNLTSTVQVFSDSEYQLPYVLGSAHQGCLPPFPADVFMIPQYGYLTLNNGSQSVGRSSFYCLEYFPSQMLRTGNNFEFSYSFEDVPFHSSYAHSQSLDRLMNPLIDQYLYYLARTQSTTGSTRELQFHQAGPNTMAEQSKNWLPGPCYRQQRLSKNLDFNNNSNFAWTAATKYHLNGRNSLTNPGIPMATNKDDEDQFFPINGVLVFGKTGAANKTTLENVLMTSEEEIKTTNPVATEEYGVVSSNLQSSTAGPQSQTINSQGALPGMVWQNRDVYLQGPIWAKIPHTDGNFHPSPLMGGFGLEHPPPQILIKNTPVPANPPEVFTPAKFASFITQYSTGQVSVEIEWELQKENSKRWNPEIQYTSNYAKSNNVEFAVNPDGVYTEPRPIGTRYLTRNL

SEQ ID NO: 4834 - DNA, 3075 bp, Adeno-associated virus
  source 1..3075: mol_type = genomic DNA
tgagaactttcctttcaacgattgcgtcggacaagatggtgatctggtgggaggaggggaagatgaccgccaaggtcgtggagtcggccaaagccattcttggaggaagcaaggtgcgtgtggaccagaaatgcaagtcctcggcccagatagacccgactcccgtgatcgtcacctccaacaccaacatgtgcgccgtgattgacgggaactcaacgaccttcgagcaccagcagccgttgcaagaccggatgttcaaatttgaacttacccgccgtctggatcatgactttggaaaggtcaccaagcaggaagtgaaagactttttccggtgggcaaaggatcacgtggttgaggtggagcatgaattctacgtcaaaaagggtggagctaagaaaagacccgcccccagtgacgcagatataagtgagcccaaacgggcgcgcgagtcagttgcgcagccatcaacgtcagacgcggaagcttcgatcaactacgcggacaggtaccaaaaacaaatgttctcgtcacgtgggcatgaatctgatgctgtttccctgcagacaatgcgagagaatgaatcagaattcaaatatctgcttcactcacggacagaaagactgtttagagtgctttcccgtgtcagaatctcaacccgtttctgtcgtcaaaaaggcgtatcagaaactgtgctacattcatcatatcatgggaaaggtgccagacgcttgcactgcctgcgatctggtcaatgtggatttggatgactgcatctctgaacaataaatgatttaaatcaggtatggctgccgatggttatcctccagattggctcgaggacactctctctgaagggataagacagtggtggaagctcaaacctggcccaccaccaccaaagcccgcagagcggcataaggacgacagcaggggtcttgtgcttcctgggtacaagtacctcggacccttcaacggactcgacaagggggagccggtcaacgaggcagacgccgcggccctcgagcacgacaaggcctacgaccggcagctcgacagcggagacaacccgtacctcaagtacaaccacgccgacgcagagtttcaggagcgccttaaagaagatacgtcttttgggggcaacctcggacgagcagtcttccaggcgaaaaagagggttcttgaacctctgggcctggttgaggaacctgttaagacggctccgggaaaaaagaggccggtagagcactctcctgtggagccagactcctcctcgggaaccggaaaagcgggccagcggcctgcaagaaaaagattaaattttggtcagactggagacgcagactccgtacctgacccccagcctctcggacagccaccagcagccccctctggtctgggatctactacaatggctacaggcagtggcgcaccaatggcagacaataacgagggtgccgatggagtgggtaattcctcaggaaattggcattgcgattcccaatggctgggcgacagagtcatcaccaccagcacccgaacctgggccctgcccacatacaacaaccacctctacaagcaaatctccagccaatcaggagccagcaacgacaaccactactttggctacagcaccccctgggggtattttgacttcaacagattccactgccacttttcaccacgtgactggcaaagactcatcaacaacaactggggattccggcccaaaagactcaacttcaagctctttaatattcaagtcaaagaggtcacgcagaatgacggtacgacgacgattgccaataaccttaccagcacggttcaggtgtttactgactcggagtaccagctcccgtacgtcctgggctcggcgcatcaaggatgcctcccgccgtttccagcggacgtcttcatggtcccacagtatggatacctcaccctgaacaacgggagtcaggcggtaggacgctcttccttttactgcctggagtactttccttctcagatgctgcgtactggaaacaactttcagttcagctacacttttgaagacgtgcctttccacagcagctacgctcacagccagagtctggatcggctgatgaatcctctgatcgaccagtacctgtattatctgaacaagacacaaacaaatagtggaactcttcagcagtctcggctactgtttagccaagctggaccaaccaacatgtctcttcaagctaaaaactggctgcctggaccttgctacagacagcagcgtctgtcaaaacaggcaaacgacaacaacaacagcaactttccctggactgcagctacaaagtatcatctaaatggccgggactcgttggttaatccaggaccagctatggccagtcacaaggatgacgaagaaaagtttttccccatgcatggaaccctgatatttggtaaacaaggaacaaatgccaacgacgcggatttggaaaatgtcatgattacagatgaagaagaaatcagggccaccaatcccgtggctacggagcagtacgggactgtgtcaaataatttgcaaaactcaaacactggtccaactactggaactgtcaatcgccaaggagcgttacctggtatggtgtggcaggatcgagacgtgtacctgcagggacccatttgggccaagattcctcacaccgatggacactttcatccttctccactgatgggaggttttggactcaaacacccgcctcctcagatcatgatcaaaaacactcccgttccagccaatcctcccacaaacttcagttctgccaagtttgcttctttcatcacacagtattccacgggacaggtcagcgtggagatcgagtgggagctgcagaaggagaacagcaaacgctggaatcccgaaattcagtacacttccaactacaacaagtctgttaatgtggactttactgtggacactaatggtgtgtattcagagcctcgccccattggcaccagatacctgactcgtaatctgtaattgcttgttaatcaataaaccgtttaattcgtttcagttgaactttggtctctgcgaagggcgaa

SEQ ID NO: 4835 - DNA, 3142 bp, Adeno-associated virus
  source 1..3142: mol_type = genomic DNA
aaaacgacgggccagtgattgtaatacgactcactatagggcgaaattgaaattagcggccgcgaattcgcctttcgcagagaccaaagttcaactgaaacgaattaaacggtttattgattaacaagcaattacagattacgagtcaggtatctggtgccaatggggcgaggctctgaatacacaccattagtgtccacagtaaagtccacattaacagacttgttgtagttggaagtgtactgaatttcgggattccagcgtttgctgttctccttctgcagctcccactcgatctccacgctgacctgtcccgtggaatactgtgtgatgaaagaagcaaacttggcagaactgaagtttgtgggaggattggctggaacgggagtgtttttgatcatgatctgaggaggcgggtgtttgagtccaaaacctcccatcagtggagaaggatgaaagtgtccatcggtgtgaggaatcttggcccaaatgggtccctgcaggtacacgtctcgatcctgccacaccataccaggtaacgctccttggtgattgacagttccagtagttggaccagtgtttgagttttgcaaattatttgacacagtcccgtactgctccgtagccacgggattggtggccctgatttcttcttcatctgtaatcatgacattttccaaatccgcgtcgttggcatttgttccttgtttaccaaatatcagggttccatgcatggggaaaaacttttcttcgtcatccttgtgactggccatagctggtcctggattaaccaacgagtcccggccatttagatgatactttgtagctgcagtccagggaaagttgctgttgttgttgtcgtttgcctgttttgacagacgctgctgtctgtagcaaggtccaggcagccagtttttagcttgaagagacatgttggttggtccagcttggctaaacagtagccgagactgctgaagagttccactatttgtttgtgtcttgttcagataatacaggtactggtcgatcagaggattcatcagccgatccagactctggctgtgagcgtagctgctgtggaaaggcacgtcttcaaaagtgtagctgaactgaaagttgtttccagtacgcagcatctgagaaggaaagtactccaggcagtaaaaggaagagcgtcctaccgcctgactcccgttgttcagggtgaggtatccatactgtgggaccatgaagacgtccgctggaaacggcgggaggcatccttgatgcgccgagcccaggacgtacgggagctggtactccgagtcagtaaacacctgaaccgtgctggtaaggttattggcaatcgtcgtcgtaccgtcattctgcgtgacctctttgacttgaatattaaagagcttgaagttgagtcttttgggccggaatccccggttgttgttgacgagtctttgccagtcacgtggtgaaaagtggcagtggaatctgttgaagtcaaaatacccccagggggtgctgtagccaaagtagtggttgtcgttgctggctcctgattggctggagatttgcttgtagaggtggttgttgtatgtgggcagggcccaggttcgggtgctggtggtgatgactctgtcgcccagccattgggaatcgcaatgccaatttcctgaggaattacccactccatcggcaccctcgttattgtctgccattggtgcgccactgcctgtagccattgtagtagatcccagaccagagggggctgctggtggctgtccgagaggctgggggtcaggtacggagtctgcgtctccagtctgaccaaaatttaatctttttcttgcaggctgctggcccgcttttccggttcccgaggaggagtctggctccacaggagagtgctctaccggcctcttttttcccggagccgtcttaacaggctcctcaaccaggcccagaggttcaagaaccctctttttcgcctggaagactgctcgtccgaggttgcccccaaaagacgtatcttctttaaggcgctcctgaaactctgcgtcggcgtggttgtacttgaggtacgggttgtctccgctgtcgagctgccggtcgtaggccttgtcgtgctcgagggccgcggcgtctgcctcgttgaccggctcccccttgtcgagtccgttgaagggtccgaggtacttgtacccaggaagcacaagacccctgctgtcgtccttatgccgctctgcgggctttggtggtggtgggccaggtttgagcttccaccactgtcttattccttcagagagagtgtcctcgagccaatctggaagataaccatcggcagccatacctgatttaaatcatttattgttcagagatgcagtcatccaaatccacattgaccagatcgcaggcagtgcaagcgtctggcacctttcccatgatatgatgaatgtagcacagtttctgatacgcctttttgacgacagaaacgggttgagattctgacacgggaaagcactctaaacagtctttctgtccgtgagtgaagcagatatttgaattctgattcattctctcgcattgtctgcagggaaacagcatcagattcatgcccacgtgacgagaacatttgttttggtacctgtccgcgtagttgatcgaagcttccgcgtctgacgtcgatggctgcgcaactgactcgcgcgcccgtttgggctcacttatatctgcgtcactgggggcgggtcttttcttagctccaccctttttgacgtagaattcatgctccacctcaaccacgtgatcctttgcccaccggaaaaagtctttcacttcctgcttggtgacctttccaaagtcatgatccagacggcgggtaagttcaaatttgaacatccggtcttgcaacggctgctggtgctcgaaggtcgttgagttcccgtcaatcacggcgcacatgttggtgttggaggtgacgatcacgggagtcgggtctatctgggccgaggacttgcatttctggtccacacgcaccttgcttcctccaagaatggctttggccgactccacgaccttggcggtcatcttcccctcctcccaccagatcaccatcttgtcgacgcaatggtaaaaggaaagttctcattgg

SEQ ID NO: 4836 - DNA, 2208 bp, Adeno-associated virus
  source 1..2208: mol_type = genomic DNA
atggctgccgatggttatcttccagattggctcgaggacactctctctgaaggaataagacagtggtggaagctcaaacctggcccaccaccaccaaagcccgcagagcggcataaggacgacagcaggggtcttgtgcttcctgggtacaagtacctcggacccttcaacggactcgacaagggggagccggtcaacgaggcagacgccgcggccctcgagcacgacaaggcctacgaccggcagctcgacagcggagacaacccgtacctcaagtacaaccacgccgacgcagagtttcaggagcgccttaaagaagatacgtcttttgggggcaacctcggacgagcagtcttccaggcgaaaaagagggttcttgaacctctgggcctggttgaggaacctgttaagacggctccgggaaaaaagaggccggtagagcactctcctgtggagccagactcctcctcgggaaccggaaaagcgggccagcagcctgcaagaaaaagattaaattttggtcagactggagacgcagactccgtacctgacccccagcctctcggacagccaccagcagccccctctggtctgggatctactacaatggctacaggcagtggcgcaccaatggcagacaataacgagggtgccgatggagtgggtaattcctcaggaaattggcattgcgattcccaatggctgggcgacagagtcatcaccaccagcacccgaacctgggccctgcccacatacaacaaccacctctacaagcaaatctccagccaatcaggagccagcaacgacaaccactactttggctacagcaccccctgggggtattttgacttcaacagattccactgccacttttcaccacgtgactggcaaagactcatcaacaacaactggggattccggcccaaaagactcaacttcaagctctttaatattcaagtcaaagaggtcacgcagaatggcggtacgacgacgattgccaataaccttaccagcacggttcaggtgtttactgactcggagtaccagctcccgtacgtcctgggctcggcgcatcaaggatgcctcccgccgtttccagcggacgtcttcatggtcccacagtatggatacctcaccctgaacaacgggagtcaggcggtaggacgctcttccttttactgcctggagtactttccttctcagatgctgcgtactggaaacaactttcagttcagctacacttttgaagacgtgcctttccacagcagctacgctcacagccagagtctggatcggctgatgaatcctctgatcgaccagtacctgtattatctgaacaagacacaaacaaatagtggaactcttcagcagtctcggctactgtttagccaagctggaccaaccaacatgtctcttcaagctaaaaactggctgcctggaccttgctacagacagcagcgtctgtcaaaacaggcaaacggcaacaacaacagcaactttccctggactgcagctacaaagtatcatctaaatggccgggactcgttggttaatccaggaccagctatggccagtcacaaggatgacgaagaaaagtttttccccatgcatggaaccctgatatttggtaaacaaggaacaaatgccaacgacgcggatttggaaaatgtcatgattacagatgaagaagaaatcagggccaccaatcccgtggctacggagcagtacgggactgtgtcaaataatttgcaaaactcaaacactggtccaactactggaactgtcaatcaccaaggagcgttacctggtatggtgtggcaggatcgagacgtgtacctgcagggacccatttgggccaagattcctcacaccgatggacactttcatccttctccactgacgggaggttttggactcaaacacccgcctcctcagatcatgatcaaaaacactcccgttccagccaatcctcccacaaacttcagttctgccaagtttgcttctttcatcacacagtattccacgggacaggtcagcgtggagatcgagtgggagctgcagaaggagaacagcaaacgctggaatcccgaaattcagtacacttccaactacaacaagtctgttaatgtggactttactgtggacactaatggtgtgtattcagagcctcgccccattggcaccagatacctgactcgtaatctgtaa

SEQ ID NO: 4837 - protein, 735 aa, Adeno-associated virus
MAADGYLPDWLEDTLSEGIRQWWKLKPGPPPPKPAERHKDDSRGLVLPGYKYLGPFNGLDKGEPVNEADAAALEHDKAYDRQLDSGDNPYLKYNHADAEFQERLKEDTSFGGNLGRAVFQAKKRVLEPLGLVEEPVKTAPGKKRPVEHSPVEPDSSSGTGKAGQQPARKRLNFGQTGDADSVPDPQPLGQPPAAPSGLGSTTMATGSGAPMADNNEGADGVGNSSGNWHCDSQWLGDRVITTSTRTWALPTYNNHLYKQISSQSGASNDNHYFGYSTPWGYFDFNRFHCHFSPRDWQRLINNNWGFRPKRLNFKLFNIQVKEVTQNGGTTTIANNLTSTVQVFTDSEYQLPYVLGSAHQGCLPPFPADVFMVPQYGYLTLNNGSQAVGRSSFYCLEYFPSQMLRTGNNFQFSYTFEDVPFHSSYAHSQSLDRLMNPLIDQYLYYLNKTQTNSGTLQQSRLLFSQAGPTNMSLQAKNWLPGPCYRQQRLSKQANGNNNSNFPWTAATKYHLNGRDSLVNPGPAMASHKDDEEKFFPMHGTLIFGKQGTNANDADLENVMITDEEEIRATNPVATEQYGTVSNNLQNSNTGPTTGTVNHQGALPGMVWQDRDVYLQGPIWAKIPHTDGHFHPSPLTGGFGLKHPPPQIMIKNTPVPANPPTNFSSAKFASFITQYSTGQVSVEIEWELQKENSKRWNPEIQYTSNYNKSVNVDFTVDTNGVYSEPRPIGTRYLTRNL

SEQ ID NO: 4838 - DNA, 2208 bp, Adeno-associated virus
  source 1..2208: mol_type = genomic DNA
atggctgccgatggttatcttccagattggctcgaggacactctctctgaaggaataagacagtggtggaagctcaaacctggcccaccaccaccaaagctcgcagagcggcatcaggacgacagcaggggtcttgtgcttcctgggtacaagtacctcggacccttcaacggactcgacaaaggagagccggtcaacgaggcagacgccgcggccctcgagcacgacaaggcctacgaccggcagctcgacagcggagacaacccgtacctcaagtacaaccacgccgacgcggagtttcaggagcgtcttaaagaagatacgtcttttgggggcaacctcggacgagcagtcttccaggcgaaaaagagggttcttgaacctctgggcctggttgaggaacctgttaagacggctccgggaaaaaagaggccggtagagcactctcctgtggagccagactcctcctcgggaaccggaaaggcgggccatcagcctgcgagaaagagattgaattttggtcagactggagacgcagactccgtacctgacccccagcctctcggacagccaccagcagcccccacaagtctgggatctactacaatggctacaggcagtggcgcaccaatggcagacaataacgagggtgccgatggagtgggtaattcctcaggaaattggcattgcgattcccaatggctgggcgacagagtcatcaccaccagcacccgaacctgggccctgcccacctacaacaaccacctctacaagcaaatctccagccaatcaggagcctcgaacgacaaccactactttggctacagcaccccctgggggtattttgacttcaacagattccactgtcacttctccccacgtgattggcaaagactcatcaacaacaactggggattccgacccaagagactcaacttcaagctctttaacattcaagtcaaagaggtcacgcagaatgacggtacgacgacgattgccaataaccttaccagcacggttcaggtgtttactgactcggagtaccagctcccgtacgtcctcggctcggcgcatcaaggatgcctcccgccgtttccagcggacgtcttcacggtcccacagtatggatacctcaccctgaacaacgggagtcaggcggtaggacgctcttccttttactgcctggagtactttccttctcagatgctgcgtactggaaacaaccttaccttcagctacacctttgaggacgttcctttccacagcagctacgctcacagccagagtttggaccggctgatgaatcctctgatcgaccagtatctatattatctgaacaggacacaatcaaatagtggaactcttcagcagtctaggctactgtttagccaagctggacccaccagcatgtctcttcaagctaaaaactggctgcctggaccttgctacagacagcagcgtctttcaaagcaggcaaacgacaacaacaacagcaactttccctggactgcggctacaaagtatcatctaaatggccgggactcgttggttaatccaggaccagctatggccagccacaaagacgatgaagaaaagtttttccccatgcatggaaccctgatatttggtaaacaaggaacaaatgctaacgacgcggatttggagcatgttatgattacagatgaagaagaaatcaggaccaccaatcctgtggctacagagcagtacggaaacgtgtcaaataatttgcaaaactcaaatactggtccaactacagaaaatgtcaatcaccagggagcgttacctggtatggtgtggcaggatcgagacgtgtacctgcagggacccatttgggccaagattcctcacaccgacggacactttcacccttctccactgatgggaggttttggactcaaacacccgcctcctcaaatcatgatcaaaaacactcccgttccagccaatcctcccacaaactacagttctgccaagtttgcttctttcatcacacagtattccacgggccaggtcagcgtggagattgagtgggagctgcggaaggagaacagcaaacgctggaaccccgagatccagtatacttccaactacaacaaatctgttaatgtggactttactgtggacactaatggtgtgtattcagagcctcgccccattggcaccagatacctgactcgtaatctgtaa

SEQ ID NO: 4839 - protein, 735 aa, Adeno-associated virus
MAADGYLPDWLEDTLSEGIRQWWKLKPGPPPPKLAERHQDDSRGLVLPGYKYLGPFNGLDKGEPVNEADAAALEHDKAYDRQLDSGDNPYLKYNHADAEFQERLKEDTSFGGNLGRAVFQAKKRVLEPLGLVEEPVKTAPGKKRPVEHSPVEPDSSSGTGKAGHQPARKRLNFGQTGDADSVPDPQPLGQPPAAPTSLGSTTMATGSGAPMADNNEGADGVGNSSGNWHCDSQWLGDRVITTSTRTWALPTYNNHLYKQISSQSGASNDNHYFGYSTPWGYFDFNRFHCHFSPRDWQRLINNNWGFRPKRLNFKLFNIQVKEVTQNDGTTTIANNLTSTVQVFTDSEYQLPYVLGSAHQGCLPPFPADVFTVPQYGYLTLNNGSQAVGRSSFYCLEYFPSQMLRTGNNLTFSYTFEDVPFHSSYAHSQSLDRLMNPLIDQYLYYLNRTQSNSGTLQQSRLLFSQAGPTSMSLQAKNWLPGPCYRQQRLSKQANDNNNSNFPWTAATKYHLNGRDSLVNPGPAMASHKDDEEKFFPMHGTLIFGKQGTNANDADLEHVMITDEEEIRTTNPVATEQYGNVSNNLQNSNTGPTTENVNHQGALPGMVWQDRDVYLQGPIWAKIPHTDGHFHPSPLMGGFGLKHPPPQIMIKNTPVPANPPTNYSSAKFASFITQYSTGQVSVEIEWELRKENSKRWNPEIQYTSNYNKSVNVDFTVDTNGVYSEPRPIGTRYLTRNL

SEQ ID NO: 4840 - DNA, 2208 bp, Adeno-associated virus
  source 1..2208: mol_type = genomic DNA
atggctgccgatggttatcttccagattggctcgaggacactctctctgaaggaataagacagtggtggaagctcaaacctggcccaccaccaccaaagcccgcagagcggcatcaggacgacagcaggggtcttgtgcttcctgggtacaagtacctcggacccttcaacggactcgacaaaggagagccggtcaacgaggcagacgccgcggccctcgagcacgacaaggcctacgaccggcagctcgacagcggagacaacccgtacctcaagtacaaccacgccgacgcggagtttcaggagcgtcttaaagaagatacgtcttttgggggcaacctcggacgagcagtcttccaggcgaaaaagagggttcttgaacctctgggcctggttgaggaacctgttaagacggctccgggaaaaaagaggccggtagagcactctcctgtggagccagactcctcctcgggaaccggaaaagcgggccatcagcctgcgagaaagagattgaattttggtcagactggagacgcagactccgtacctgacccccagcctctcggacagccaccagcagcccccacaagtttgggatctactacaatggctacaggcagtggcgcaccaatggcagacaataacgagggtgccgatggagtgggtaattcctcaggaaattggcattgcgattcccaatggctgggcgacagagtcatcaccaccagcacccgaacctgggccctgcccacctacaacaaccacctctacaagcaaatctccagccaatcaggagcctcgaacgacaaccactactttggctacagcaccccctgggggtattttgacttcaacagattccactgtcacttctccccacgtgattggcaaagactcatcaacaacaactggggattccgacccaagagactcaacttcaagctctttaacattcaagtcaaggaggtcacgcagaatgacggtacgacgacgattgccaataaccttaccagcacggttcaggtgtttactgactcggagtaccagctcccgtacgtcctcggctcggcgcatcaaggatgcctcccgccgtttccagcggacgtcttcatggtcccacagtatggatacctcaccctgaacaacgggagtcaggcggtaggacgctcttccttttactgcctggagtactttccttctcagatgctgcgtactggaaacaactttaccttcagctacacctttgaggacgttcctttccacagcagctacgctcacagccagagtttggaccggctgatgaatcctctgatcgaccagtatctatattatctgaacaggacacaatcaaatagtggaactcttcagcagtctaggctactgtttagccaagctggacccaccagcatgtctcttcaagctaaaaactggctgcctggaccttgctacagacagcagcgtctttcaaagcaggcaaacgacaacaacaacagcaactttccctggactgcggctacaaagtatcgtctaaatggccgggactcgttggttaatccaggaccagctatggccagccacaaagacgatgaagaaaagtttttccccatgcatggaaccctgatatttggtaaacaaggaacaaatgctaacgacgcggatttggagcatgttatgattacagatgaagaagaaatcaggaccaccaatcctgtggctacagagcagtacggaaacgtgtcaaataatttgcaaaactcaaatactggtccaactacagaaaatgtcaatcaccagggagcgttacctggtatggtgtggcaggatcgagacgtgtacctgcagggacccatttgggccaagattcctcacaccgacggacactttcacccttctccactgatgggaggttttggactcaaacacccgcctcctcaaatcatgatcaaaaacactcccgttccagccaatcctcccacaaacttcagttctgccaagtttgcttctttcatcacacagtattccacgggccaggtcagcgtggagattgagtgggagctgcagaaggagaacagcaaacgctggaaccccgagatccagtatacttccaactacaacaaatctgttaatgtggactttactgtggacactaatggtgtgtattcagagcctcgccccattggcaccagatacctgactcgtaatctgtaa

SEQ ID NO: 4841 - protein, 735 aa, Adeno-associated virus
MAADGYLPDWLEDTLSEGIRQWWKLKPGPPPPKPAERHQDDSRGLVLPGYKYLGPFNGLDKGEPVNEADAAALEHDKAYDRQLDSGDNPYLKYNHADAEFQERLKEDTSFGGNLGRAVFQAKKRVLEPLGLVEEPVKTAPGKKRPVEHSPVEPDSSSGTGKAGHQPARKRLNFGQTGDADSVPDPQPLGQPPAAPTSLGSTTMATGSGAPMADNNEGADGVGNSSGNWHCDSQWLGDRVITTSTRTWALPTYNNHLYKQISSQSGASNDNHYFGYSTPWGYFDFNRFHCHFSPRDWQRLINNNWGFRPKRLNFKLFNIQVKEVTQNDGTTTIANNLTSTVQVFTDSEYQLPYVLGSAHQGCLPPFPADVFMVPQYGYLTLNNGSQAVGRSSFYCLEYFPSQMLRTGNNFTFSYTFEDVPFHSSYAHSQSLDRLMNPLIDQYLYYLNRTQSNSGTLQQSRLLFSQAGPTSMSLQAKNWLPGPCYRQQRLSKQANDNNNSNFPWTAATKYRLNGRDSLVNPGPAMASHKDDEEKFFPMHGTLIFGKQGTNANDADLEHVMITDEEEIRTTNPVATEQYGNVSNNLQNSNTGPTTENVNHQGALPGMVWQDRDVYLQGPIWAKIPHTDGHFHPSPLMGGFGLKHPPPQIMIKNTPVPANPPTNFSSAKFASFITQYSTGQVSVEIEWELQKENSKRWNPEIQYTSNYNKSVNVDFTVDTNGVYSEPRPIGTRYLTRNL

SEQ ID NO: 4842 - DNA, 2208 bp, Adeno-associated virus
  source 1..2208: mol_type = genomic DNA
atggctgccgatggttatcttccagattggctcgaggacactctctctgaaggaataagacagtggtggaagctcaaacctggcccaccaccaccaaagcccgcagagcggcatcaggacgacagcaggggtcttgtgcttcctgggtacaagtacctcggacccttcaacggactcgacaaaggagagccggtcaacgaggcagacgccgcggccctcgagcacgacaaggcctacgaccggcagctcgacagcggagacaacccgtacctcaagtacaaccacgccgacgcggagtttcaggagcgtcttaaagaagatacgtcttttgggggcaacctcggacgagcagtcttccaggcgaaaaagagggttcttgaacctctgggcctggttgaggaacctgttaagacggctccgggaaaaaagaggccggtagagcactctcctgtggagccagactcctcctcgggaaccggaaaagcgggccatcagcctgcgagaaagagattgaattttggtcagactggagacgcagactccgtacctgacccccagcctctcggacagccaccagcagcccccacaagtttgggatctactacaatggctacaggcagtggcgcaccaatggcagacaataacgagggtgccgatggagtgggtaattcctcaggaaattggcattgcgattcccaatggctgggcgacagagtcatcaccaccagcacccgaacctgggccctgcccacctacaacaaccacctctacaagcaaatctccagccaatcaggagcctcgaacgacaaccactactttggctacagcaccccctgggggtattttgacttcaacagattccactgtcacttctccccacgtgattggcaaagactcatcaacaacaactggggattccgacccaagagactcaacttcaagctctttaacattcaagtcaaagaggtcacgcagaatgacggtacgacgacgattgccaataaccttaccagcacggttcaggtgtttactgactcggagtaccagctcccgtacgtcctcggctcggcgcatcaaggatgcctcccgccgtttccagcggacgtcttcatggtcccacagtatggatacctcaccctgaacaacgggagtcaggcggtaggacgcccttccttttactgcctggagtactttccttctcagatgctgcgtactggaaacaactttaccttcagctacacctttgaggacgttcctttccacagcagctacgctcacagccagagtttggaccggctgatgaatcctctgatcgaccagtatctatattatctgaacaggacacaatcaaatagtggaactcttcagcagtctaggctactgtttagccaagctggacccaccagcatgtctcttcaagctaaaaactggctgcctggaccttgctacagacagcagcgtctttcaaagcaggcaaacgacaacaacaacagcaactttccctggactgcggctacaaagtatcatctaaatggccgggactcgttggttaatccaggaccagctatggccagccacaaagacgatgaagaaaagtttttccccatgcatgggaccctgatatttggtaaacaaggaacaaatgctaacgacgcggatttggagcatgttatgattacagatgaagaagaaatcaggaccaccaatcctgtggctacagagcagtacggaaacgtgtcaaataatttgcaaaactcaaatactggtccaactacagaaaatgtcaatcaccagggagcgttacctggtatggtgtggcaggatcgagacgtgtacctgcagggacccatttgggccaagattcctcacaccgacggacactttcacccttctccactgatgggaggttttggactcaaacacccgcctcctcaaatcatgatcaaaaacactcccgttccagccaatcctcccacaaacttcagttctgccaagtttgcttctttcatcacacagtattccacgggccaggtcagcgtggagattgagtgggagctgcagaaggagaacagcaaacgctggaaccccgagatccagtatacttccaactacaacaaatctgttaatgtggactttactgtggacactaatggtgtgtattcagagcctcgccccattggcaccagatacctgactcgtaatctgtaa

SEQ ID NO: 4843 - protein, 735 aa, Adeno-associated virus
MAADGYLPDWLEDTLSEGIRQWWKLKPGPPPPKPAERHQDDSRGLVLPGYKYLGPFNGLDKGEPVNEADAAALEHDKAYDRQLDSGDNPYLKYNHADAEFQERLKEDTSFGGNLGRAVFQAKKRVLEPLGLVEEPVKTAPGKKRPVEHSPVEPDSSSGTGKAGHQPARKRLNFGQTGDADSVPDPQPLGQPPAAPTSLGSTTMATGSGAPMADNNEGADGVGNSSGNWHCDSQWLGDRVITTSTRTWALPTYNNHLYKQISSQSGASNDNHYFGYSTPWGYFDFNRFHCHFSPRDWQRLINNNWGFRPKRLNFKLFNIQVKEVTQNDGTTTIANNLTSTVQVFTDSEYQLPYVLGSAHQGCLPPFPADVFMVPQYGYLTLNNGSQAVGRPSFYCLEYFPSQMLRTGNNFTFSYTFEDVPFHSSYAHSQSLDRLMNPLIDQYLYYLNRTQSNSGTLQQSRLLFSQAGPTSMSLQAKNWLPGPCYRQQRLSKQANDNNNSNFPWTAATKYHLNGRDSLVNPGPAMASHKDDEEKFFPMHGTLIFGKQGTNANDADLEHVMITDEEEIRTTNPVATEQYGNVSNNLQNSNTGPTTENVNHQGALPGMVWQDRDVYLQGPIWAKIPHTDGHFHPSPLMGGFGLKHPPPQIMIKNTPVPANPPTNFSSAKFASFITQYSTGQVSVEIEWELQKENSKRWNPEIQYTSNYNKSVNVDFTVDTNGVYSEPRPIGTRYLTRNL

SEQ ID NO: 4844 - DNA, 2208 bp, Adeno-associated virus
  source 1..2208: mol_type = genomic DNA
atggctgccgatggttatcttccagattggctcgaggacactctctctgaaggaataagacagtggtggaagctcaaacctggcccaccaccaccaaagcccgcagagcggcataaggacgacagcaggggtcttgtgcttcctgggtacaagtacctcggacccttcaacggactcgacaagggagagccggtcaacgaggcagacgccgcggccctcgagcacgacaaggcctacgaccggcagctcgacagcggagacaacccgtacctcaagtacaaccacgccgacgcggagtttcaggagcgccttaaagaagatacgtcttttgggggcaacctcggacgagcagtcttccaggcaaaaaagagggttcttgaacctctgggcctggttgaggagcctgttaaaacggctccgggaaaaaagaggccggtagagcactctcctgcggagccagactcctcctcgggaaccggaaaagcgggccagcagcctgcaagaaaaagattgaatttcggtcagactggagacgcagactccgtacctgacccccagcctctcggacagccaccagcagccccctctggtctgggaactaatacgatggcttcaggcagtggcgcaccaatggcagacaataacgagggcgccgacggagtgggtaattcctcgggaaattggcattgcgattccacatggatgggcgacagagtcatcaccaccagcacccgaacttgggccctgcccacctacaacaaccatctctacaagcaaatctccagccaatcaggagccagcaacgacaaccactactttggctacagcaccccttgggggtattttgacttcaacagattccactgccacttttcaccacgtgactggcaaagactcatcaacaacaactggggattccggcccaagagactcaacttcaagctctttaacattcaagtcaaagaggtcacgcagaatgacggtacgacgacgattgccaataaccttaccagcacggttcaggtgtttactgactcggagtaccagctcccgtacgtcctcggctcggcgcatcaaggatgcctcccgccgttcccagcagacgtcttcatggtgccacagtatggatacctcaccctgaacaacgggagtcaggcagtaggacgctcttcattttactgcctggagtactttccttctcagatgctgcgtaccggaaacaactttaccttcagctacacctttgaggacgttcctttccacagcagctacgctcacagccagagtttggaccgtctcatgaatcctctcatcgaccagtacctgtattacttgagcagaacaaacactccaagcggaaccaccacgcagtccaggcttcagttttctcaggccggagcaagtgacattcgggaccagtctaggaactggcttcctggaccctgttaccgccagcagcgagtatcaaagacatctgcggataacaacaacagtgaatactcgtggactggagctaccaagtaccacctcaatggcagagactctctggtgaatccgggcccggccatggccagccacaaggacgatgaagaaaagttttttcctcagagcggggttctcatctttgggaagcaaggctcagagaaaacaaatgtggacattgaaaaggtcatgattacagacgaagaggaaatcaggaccaccaatcccgtggctacggagcagtatggttctgtatctaccaacctgcagggcggcaacacacaagcagctaccgcagatgtcaacacacaaggcgttcttccaggcatggtctggcaggacagagacgtgtacctgcaggggcccatctgggcaaagattccacacacggacggacattttcacccctctcccctcatgggcggattcggacttaaacaccctcctccacagattctcatcaagaacaccccggtacctgcgaatccttcgaccaccttcagtgcggcaaagtttgcttctttcatcacacagtattccacggggcaggtcagcgtggagatcgagtgggagctgcagaaggagaacagcaaacgctggaatcccgagatccagtacacttccaactacaacaaatctgttaatgtggactttactgttgacactaatggcgtgtattcagagcctcgccccattggcaccagatacctgactcgtaatctgtaa

SEQ ID NO: 4845 - protein, 735 aa, Adeno-associated virus
MAADGYLPDWLEDTLSEGIRQWWKLKPGPPPPKPAERHKDDSRGLVLPGYKYLGPFNGLDKGEPVNEADAAALEHDKAYDRQLDSGDNPYLKYNHADAEFQERLKEDTSFGGNLGRAVFQAKKRVLEPLGLVEEPVKTAPGKKRPVEHSPAEPDSSSGTGKAGQQPARKRLNFGQTGDADSVPDPQPLGQPPAAPSGLGTNTMASGSGAPMADNNEGADGVGNSSGNWHCDSTWMGDRVITTSTRTWALPTYNNHLYKQISSQSGASNDNHYFGYSTPWGYFDFNRFHCHFSPRDWQRLINNNWGFRPKRLNFKLFNIQVKEVTQNDGTTTIANNLTSTVQVFTDSEYQLPYVLGSAHQGCLPPFPADVFMVPQYGYLTLNNGSQAVGRSSFYCLEYFPSQMLRTGNNFTFSYTFEDVPFHSSYAHSQSLDRLMNPLIDQYLYYLSRTNTPSGTTTQSRLQFSQAGASDIRDQSRNWLPGPCYRQQRVSKTSADNNNSEYSWTGATKYHLNGRDSLVNPGPAMASHKDDEEKFFPQSGVLIFGKQGSEKTNVDIEKVMITDEEEIRTTNPVATEQYGSVSTNLQGGNTQAATADVNTQGVLPGMVWQDRDVYLQGPIWAKIPHTDGHFHPSPLMGGFGLKHPPPQILIKNTPVPANPSTTFSAAKFASFITQYSTGQVSVEIEWELQKENSKRWNPEIQYTSNYNKSVNVDFTVDTNGVYSEPRPIGTRYLTRNL

SEQ ID NO: 4846 - DNA, 3161 bp, Adeno-associated virus
  source 1..3161: mol_type = genomic DNA
gattgaatttagcggccgcgaattcgcccttgctgcgtcaactggaccaatgagaactttccattcaatgattgcgtcgacaagatggtgatctggtgggaggagggaaagatgaccgccaaggtcatggagtcggccaaagccattctcggaggaagcaaggtgcgcgtggaccagaaatgtaagtcctcggcccagatagacccgactcccgtgattgtcacctccaacaccaacatgtgcgccgtgattgacgggaactcaacgaccttcgagcaccagcagccgttgcaagaccggatgttcaaatttgaactcacccgccgtctggatcatgactttgggaaggtcaccaagcaggaagtcaaagactttttccggtgggcaaaggatcacgtggttgaggtggagcatgaattctacgtcaaaaagggtggagccaagaaaagacccgcccccagtgacgcagatataagtgagcccaaacgggcgcgcgggtcagttgcgcagccatcgacgtcagacgcggaagcttcgatcaactacgcggacaggtaccaaaacaaatgttctcgtcacgtgggcatgaatctgatgctgtttccctgcagacaatgcgagagaatgaatcaaaattcaaatatctgcttcactcacggacagaaggactgtttagagtgctttcccgtgtcagaatctcaacccgtttctgtcgtcaaaaaggcgtatcagaaactttgctacattcatcatatcatgggaaaggtgccagacgcttgcactgcctgcgatctggtcaatgtggatttggatgactgcatctctgaacaataaatgatttaaatcaggtatggctgccgatggttatcttccagattggctcaaggacactctctctgaaggaataagacagtggtggaagctcaaacctggcccaccaccaccaaagcccgcagagcggcataaggacgacagcgggggtcttgtgcttcctgggtacaagtacctcggacccttcaacggactcgacaagggagagccggtcaacgaggcagacgccgcggccctcgagtacgacaaggcctacgaccggcagctcgacagcggagacaacccgtacctcaagtacaaccacgccgacgcggagtttcaggagcgccttaaagaagatacgtcttttgggggcaacctcggacgagcagtcttccaggcgaaaaagagggttcttgaacctctgggcctggttgaggaacctgttaagacggctccgggaaaaaagaggccggtagagcactctcctgtggagccagactcctcctcgggaacaggaaaagcgggccagcagcctgcgagaaagagattgaattttggtcagactggagacgcagactccgtacctgacccccagcctctcggacagccaccagcagccccctctggtctgggaactaatacgatggctacaggcagtggcgcaccaatggcagacaataacgagggcgccgacggagtgggtaattcctcgggaagttggcattgcgattccacatggatgggcgacagagtcatcaccaccagcacccgaacctgggctctgcccacctacaacaaccatctgtacaagcagatctccagccaatcaggagccagcaacgacaaccactactttggctacagcaccccttgggggtattttgacttcaacagattccactgccacttttcaccacgtgactggcaaagactcatcaacaacaactggggattccggcccaagagactcaacttcaagctctttaacattcaagtcaaggaggtcacgcagaatgacggtacgacgacgattgccaataaccttaccagcacggttcaggtgtttactgactcggagtaccagctcccgtacgtccccggctcggcgcatcaaggatgcctcccgccgttcccagcagacgtcttcatggtgccacagtatggatacctcaccctgaacaacgggagtcaggcagtaggacgctcttcattttactgcctggagtactttccttctcagatgcttcgtaccggaaacaactttaccttcagctacacctttgaggatgttcctttccacagcagctacgctcacagccagagtttggaccgtctcatgaatcctctcatcgaccagtacctgtattacttgagcagaacaaacactccaagcggaaccaccacgcagtccaggcttcagttttctcaggccggagcaagtgacattcgggaccagtctaggaactggcttcctggaccctgttaccgccagcagcgagtatcaaagacagctgcggacaacaacaacagtgaatactcgtggactggagctaccaagtaccacctcaatggcagagactctctggtgaatccgggcccggccatggccagccacaaggacgatgaagaaaagttttttcctcaaagcggggttctcatctttgggaagcaaggctcagagaaaacaaatgtggacattgaaaaggtcatgattacagacgaagaggaaatcagaaccaccaatcccgtggccacggagcagtatggttctgtatctaccaacctccagagcggcaacacacaagcagctactgcagatgtcaacacacaaggcgttcttccaggcatggtctggcaggacagagacgtgcacctgcaggggcctatctgggcaaagattccacacacggacggacattttcacccctctcccctcatgggcggatttggacttaaacaccctcctccacagattctcatcaagaacaccccggtacctgcaaatccttcgaccaccttcagtgcggcaaagtttgcttccttcatcacacagtattccacagggcaggtcagcgtggagatcgagtgggagctgcagaaggagaacagcaaacgctggaaccccgagatccagtacacttccaactacaacaaatctgttaatgtggactttactgtggacactaatggtgtgtattcagagcctcgccccattggcaccagatacctgactcgtaatctgtaattgcttgttaatcaataaaccgtttaattcgtttcagttgaactttggtctctgcgaagggcgaattcgtttaaaccctgcaggactagtccctttagtgagg

SEQ ID NO: 4847 - DNA, 3162 bp, Adeno-associated virus
  source 1..3162: mol_type = genomic DNA
gaattgaatttagcggccgcgaattcgcccttcgcagagaccaaagttcaactgaaacgaattaaacggtttattgattaacaagcaattacagattacgagtcaggtatctggtgccaatggggcgaggctctgaatacacgccattagtgtccacagtaaagtccacattaacagacttgttgtagttggaagtgtactgaatttcgggattccagcgtttgctgttttccttctgcagctcccactcgatctccacgctgacctgtcccgtggagtactgtgtgatgaaggaagcaaactttgccgcactgaaggtggtcgaaggattcgcaggtaccggggtgttcttgatgagaatctgtggaggagggtgtttaagtccgaatccacccatgaggggagaggggtgaaaatgtccgtccgtgtgtggaatctttgcccagatgggcccctgaaggtacacatctctgtcctgccagaccatgcctggaagaacgccttgtgtgttgacatctgcggtagctgcttgtctgttgcctctctggaggttggtagatacagaaccgtactgctccgtagccacgggattggttgtcctgatttcctcttcgtctgtaatcatgaccttttcaatgtccacatttgttttctctgagccttgcttcccaaagatgagaaccccgctctgaggaaaaaacttttcttcattgtccttgtggcttgccatggccgggcccggattcaccagagagtctctgccattgaggtggtacttggtagctccagtccacgagtattcactgttgttgttatccgcagatgtctttgatactcgctgctggcggtaacagggtccaggaagccagttcctagactggtcccgaatgtcactcgctccggcctgagaaaactgaagccttgactgcgtggtggttccacttggagtgtttgttgtgctcaagtaatacaggtactggtcgatgagaggattcatgagacggtccagactctggctgtgagcgtagccgctgtggaaaggaacgtcctcaaaagtgtagctgaaggtaaagttgtttccggtacgcagcatctgagaaggaaagtactccaggcagtaaaatgaagagcgtcctactgcctgactcccgttgttcagggtgaggtatccatactgtggcaccatgaagacgtctgctgggaacggcgggaggcatccttgatgcgccgagccgaggacgtacgggagctggtactccgagtcagtaaacacctgaaccgtgctggtaaggttattggcaatcgtcgtcgtaccgtcattctgcgtgacctctttgacttgaatgttaaagagcttgaagttgagtctcttgggtcggaatccccagttgttgttgatgagtctttgccagtcacgtggtgaaaagtggcagtggaatctgttgaagtcaaaatacccccaaggggtgctgtagccaaagtagtgattgtcgttcgaggctcctgattggctggaaatttgtttgtagaggtggttgttgtaggtgggcagggcccaggttcgggtgctggtggtgatgactctgtcgcccatccatgtggaatcgcaatgccaatttcccgaggaattacccactccgtcggcgccctcgttattgtctgccattggtgcgccactgcctgtagccatcgtattagttcccagaccagagggggctgctggtggctgtccgagaggctgggggtcaggtactgagtctgcgtctccagtctgaccaaaattcaatctttttcttgcaggctgctggcccgcctttccggttcccgaggaggagtctggctccacaggagagtgctctaccggcctcttttttcctggagccgtcttgacaggttccccaaccaggcccagaggttcaagaaccctctttttcgcctggaagactgctcgtccgaggttgcccccaaaagacgtatcttctttaaggcgctcctgaaactccgcgtcggcgtggttgtacttgaggtacgggttgtctccgctgtcgagctgccggtcgtaggctttgtcgtgctcgagggccgcggcgtctgcctcgttgaccggctctcccttgtcgagtccgttgaagggtccgaggtacttgtacccaggaagcacaagacccctgctgtcgtccttatgccgctctgcgggctttggtggtggtgggccaggtttgagcttccaccactgtcttattccttcagagagagtgtcctcgagccaatctggaagataaccatcggcagccatacctgatttaaatcatttattgttcaaagatgcagtcatccaaatccacattgaccagatcgcaggcagtgcaagcgtctggcacctttcccatgatatgatgaatgtagcacagtttctgatacgcctttttgacgacagaaacgggttgagattctgacacgggaaagcactctaaacagtctttctgtccgtgagtgaagcagatatttgaattctgattcattctctcgcattgtctgcagggaaacagcatcagattcatgcccacgtgacgagaacatttgttttggtacctgtctgcgtagttgatcgaagcttccgcgtctgacgtcgatggctgcgcaactgactcgcgcacccgtttgggctcacttatatctgcgtcactgggggcgggtcttttcttggctccaccctttttgacgtagaattcatgctccacctcaaccacgtgatcctttgcccaccggaaaaagtctttgacttcctgcttggtgaccttcccaaagtcatgatccagacggcgggtgagttcaaatttgaacatccggtcttgcaacggctgctggtgttcgaaggtcgttgagttcccgtcaatcacggcgcacatgttggtgttggaggtgacgatcacgggagtcgggtctatctgggccgaggacttgcatttctggtccacgcgcaccttgcttcctccgagaatggctttggccgactccacgaccttggcggtcatcttcccctcctcccaccagatcaccatcttgtcgacacagtcgttgaagggaaagttctcattggtccagttgacgcagcaagggcgaattcgtttaaacctgcaggactagtccctttagtgaggg

SEQ ID NO: 4848 - DNA, 3164 bp, Adeno-associated virus
  source 1..3164: mol_type = genomic DNA
gcgaattgaatttagcggccgcgaattcgcccttcgcagagaccaaagttcaactgaaacgaattaaacggtttattgattaacaagcaattacaaattacgagtcaggtatctggtgccaatggggcgaggctctgaatacacgccattagtgtccacagtaaagtccacattaacagacttgttgtagttggaagtgtactgaatttcgggattccagcgtttgctgttttccttctgcagctcccactcgatctccacgctgacctgtcccgtggagtactgtgtgatgaaggaagcaaactttgccgcactgaaggtggtcgaaggattcgcaggtaccggggtgttcttgatgagaatctgtggaggagggtgtttaggtccgaatccacccatgaggggagaggggtgaaaatgtccgtccgtgtgtggaatctttgcccagatgggcccctgaaggtacacatctctgtcctgccagaccatgcctggaagaacgccttgtgtgttgacatctgcggtagctgcttgtctgttgcctctctggaggttggtagatacagaaccatactgctccgtagccacgggattggttgtcctgatttcctcttcgtctgtaatcatgaccttttcaatgtccacatttgttttctctgagccttgcttcccaaagatgagaaccccgctctgaggaaaaaacttttcttcattgtccttgtggcttgccatggccgggcccggattcaccagagagtctctgccattgaggtggtacttggtagctccagtccacgagtattcactgttgttgttatccgcagatgtctttgatactcgctgctggcggtaacagggtccaggaagccagttcctagactggtcccgaatgtcactcgctccggcctgagaaaactgaagccttgactgcgtggtggttccacttggagtgtttgttgtgctcaagtaatacaggtactggtcgatgagaggattcatgagacggtccagactctggctgtgagcgtagctgctgtggaaaggaacgtcctcaaaagtgtagctgaaggtaaagttgtttccggtacgcagcatctgagaaggaaagtactccgggcagtaaaatgaagagcgtcctactgcctgactcccgttgctcagggtgaggtatccatactgtggcaccatgaagacgtctgctgggaacggcgggaggcatccttgatgcgccgagccgaggacgtacgggagctggtactccgagtcagtaaacacctgaaccgtgctggtaaggttattggcaatcgtcgtcgtaccgtcattctgcgtgacctctttgacttgaatgttaaagagcttgaagttgagtctcttgggtcggaatccccagttgttgttgatgagtctttgccagtcacgtggtgaaaagtggcagtggaatctgttgaagtcaaaatacccccaaggggtgctgtagccaaagtagtgattgtcgttcgaggctcctgattggctggaaatttgtctgtagaggtggttgttgtaggtgggcagggcccaggttcgggtgctggtggtgatgactctgtcgcccatccatgtggaatcgcaatgccgatttcccgaggaattacccactccgtcggcgccctcgttattgtctgccattggtgcgccactgcctgtagccatcgtattagttcccagaccagagggggctgctggtggctgtccgagaggctgggggtcaggtactgagtctgcgtctccagtctgaccaaaattcaatctttttcttgcaggctgctggcccgcctttccggttcccgaggaggagtctggctccacaggagagtgctctaccggcctcttttttcccggagccgtcttaacaggttccccaaccaggcccagaggttcaagaaccctctttttcgcctggaagactgctcgtccgaggttgcccccaaaagacgtatcttctttaaggcgctcctgaaactccgcgtcggcgtggttgtacttgaggtacgggttgtctccgctgtcgagctgccggtcgtaggctttgtcgtgctcgagggccgcggcgtctgcctcgttgaccggctctcccttgtcgagtccgttgaagggtccgaggtacttgtacccaggaagcacaagacccctgctgtcgtccttatgccgctctgcgggctttggtggtggtgggccaggtttgagcttccaccactgtcttattccttcagagagagtgtcctcgagccaatctggaagataaccatcggcagccatacctgatttaaatcatttattgttcaaagatgcagtcatccaaatccacattgaccagatcgcaggcagtgcaagcgtctggcacctttcccatgatatgatgaatgtagcacagtttctgatacgcctttttgacgacagaaacgggttgagattctgacacgggaaagcactctaaacagtctttctgtccgtgagtgaagcagatatttgaattctgattcattctctcgcattgtctgcagggaaacagcatcagattcatgcccacgtgacgagaacatttgttttggtacctgtctgcgtagttgatcgaagcttccgcgtctgacgtcgatggctgcgcaactgactcgcgcacccgtttgggcccacttatatctgcgtcactgggggcgggtcttttcttggctccaccctttttgacgtagaattcatgctccacctcaaccacgtgatcctttgcccaccggaaaaagtctttgacttcctgcttggtgaccttcccaaagtcatgatccagacggcgggtgagttcaaatttgaacatccggtcttgcaacggctgctggtgttcgaaggtcgttgagttcccgtcaatcacggcgcacatgttggtgttggaggtgacgatcacgggagtcgggtctatctgggccgaggacttgcatttctggtccacgcgcaccttgcttcctccgagaatggctttggccgactccacgaccttggcggtcatcttcccctcctcccaccagatcaccatcttgtcgacacagtcgttgaagggaaagttctcattggtccagttgacgcagcaagggcgaattcgtttaaacctgcaggactagtccctttagtgaggg

SEQ ID NO: 4849 - DNA, 3163 bp, Adeno-associated virus
  source 1..3163: mol_type = genomic DNA
accctcactaaagggactagtcctgcaggtttaaacgaattcgcccttgctgcgtcaactggagcaatgagaactttcccttcaacgactgtgtcgacaagatggtgatttggtgggaggaggggaagatgaccgccaaggtcgtggagtcggccaaagccattctcggaggaagcaaggtgcgcgtggaccagaaatgcaagtcctcggcccagatagatccgactcccgtgatcgtcacctccaacaccaacatgtgcgccgtgattgacgggaactcaacgaccttcgaacaccagcagccgttgcaagaccggatgttcaaatttgaactcacccgccgtctggatcatgactttgggaaggtcaccaagcaggaagtcaaagactttttccggtgggcaaaggatcacgtggttgaggtggagcatggattctacgtcaaaaagggtggagccaagaaaagacccgcccctagtgacgcagatataagtgagcccaaacgggtgcgcgagtcagttgcgcagccatcgacgtcggacgcggaagcttcgatcaactacgcggacaggtaccaaaacaaatgttctcgtcacgtgggcatgaatctgatgctgtttccctgcagacaatgcgagagaatgaatcaaaattcaaatatctgcttcactcacggacagaaagactgtttagagtgctttcccgtgtcagaatctcaacctgtttctgtcgtcaaaaaggcgtatcagaaactgcgctacattcatcatatcatgggaaaggtgccagacgcttgcactgcctgcgatctggtcaatgtggatttggatgactgcatctctgaacaataaatgatttaaatcaggtatggctgccgatggttatcttccagattggctcgaggacactctctctgaaggaataagacagtggtggaagctcaaacctggcccaccaccaccaaagcccgcagagcggcataaggacgacagcaggggtcttgtgcttcctgggtacaagtacctcggacccttcaacggactcgacaagggagagccggtcaacgaggcagacgccgcggccctcgagcacgacaaggcctacgaccggcagctcgacagcggagacaacccgtacctcaagtacaaccacgccgacgcggagtttcaggagcgtcttaaagaagatacgtcttttgggggcaacctcggacgagcagtcttccaggcgaaaaagagggttcttgaacctctgggcctggttgaggaacctgttaagacggctccgggaaaaaagaggccggtagagcactctcctgcggagccagactcctcctcgggaaccggaaaagcgggccagcagcctgcaagaaaaagactgaatttcggtcagactggagacgcagactccgtacctgacccccagcctctcggacagccaccagcagcccccacaagtttgggatctactacaatggctacaggcagtggcgcaccaatggcagacaataacgagggtgccgatggagtgggtaattcctcaggaaattggcattgcgattcccaatggctgggcgacagagtcatcaccaccagcacccgaacctgggccctgcccacctacaacaaccacctttacaagcaaatctccagccaatcaggagcctcaaacgacaaccactactttggctacagcaccccctgggggtattttgacttcaacagattccactgccacttttcaccacgtgactggcaaagactcatcaacaacaactggggattccgacccaagagactcaacttcaagctctttaacattcaagtcaaagaggtcacgcagaatgacggtacgacgacgattgccaataaccttaccagcacggttcaggtgtttactgactcggagtaccagctcccgtacgtcctcggctcggcgcatcaaggatgcctcccgccgtttccagcggacgtcttcatggtcccacagtatggatacctcaccctgaacaacgggagtcaggcggtaggacgctcttccttttactgcctggagtgctttccttctcagatgctgcgtactggaaacaactttcagttcagctacacttttgaagacgtgcctttccacagcagctacgctcacagccagagtttggatcggctgatgaatcctctgatcgaccagtacctgtattatctaaacagaacacaaacagctagtggaactcagcagtctcggctactgtttagccaagctggacccacaagcatgtctcttcaagctaaaaactggctgcctggaccgtgttatcgccagcagcgtttgtcaaagcaggcaaacgacaacaacaacagcaactttccctggactggagctaccaagtaccacctcaatggcagagactctttggtgaacccgggcccggccatggccagccacaaggacgatgaagaaaagtttttccccatgcatggaaccctaatatttggtaaagaaggaacaaatgctaccaacgcggaattggaaaatgtcatgattacagatgaagaggaaatcaggaccaccaatcccgtggctacagagcagtacggatatgtgtcaaataatttgcaaaactcaaatactgctgcaagtactgaaactgtgaatcaccaaggagcattacctggtatggtgtggcaggatcgagacgtgtacctgcagggacccatttgggccaagattcctcacaccgatggacactttcatccttctccactgatgggaggttttggactcaaacacccgcctcctcagattatgatcaaaaacactcccgttccagccaatcctcccacaaacttcagttctgccaagtttgcttccttcatcacacagtattccacgggacaggtcagcgtggagatcgagtgggagctgcagaaggagaacagcaaacgctggaatcccgaaattcagtacacttccaactacaacaaatctgttaatgtggactttactgtggacactaatggtgtgtattcagagcctcgccccattggcaccagatacctgactcgtaatctgtaattgcttgttaatcaataaaccgtttaattcgtttcagttgaactttggtctctgcgaagggcgaattcgcggccgctaaattcaattcgcc

SEQ ID NO: 4850 - protein, 735 aa, Adeno-associated virus
MAADGYLPDWLEDTLSEGIRQWWKLKPGPPPPKPAERHKDDSRGLVLPGYKYLGPFNGLYKGEPVDEADAAALEHDKAYDRQLDSGDNPYLKYNHADAEFQERLKEDTSFGGNLGRAVFQAKKRVLEPLGLVGEPVKTAPGKKRPVEHSPVEPDSSSGTGKAGNQPARKRLNFGQTGDADSVPDPQPLGQPPAAPSGLGSTTMATGSGAPVADNNEGADGVGNSSGNWHCDSQWLGDRVITTSTRTWALPTYNNHLYKQISSQSGASNDNHYFGYSTPWGYFDFNRFHCHFSPRDRQRLINNNWGFRPKRLNFKLFNIQVKEVTQNDGTTTIANNLTSTVQVFTDSGYQLPYVLGLAHQGCLPPFPADVFMVPQYGYLTLNNGSQAVGRSSFYCLEYFPSQMLRTGNNFQFSYTFEDVPFHSSYAHSQSLDRLMNPLIDQYLYYLNKTQSNSGTLQQSRLLFSQAGPTSMSLQAKNWLPGPCYRQQRLSKQANDNNNSNFPWTAATKYHLNGRDSLVNPGPAMASHKDDEEKFFPMHGTLIFGKQGTNANDADLDNVMITDEEEIRTTNPVATEQYGYVSNNLQNSNTGPTTGTVNHQGALPGMVWQDRDVYLQGPIWAKIPHTDGHFHPSPLMGGFGLKHPPPQIMIKNTPVPANPPTNFSSAKFASFITQYSTGQVSVEIEWELQKEDSKRWNPEIQYTSNYNKPVNVDFTVDTNGVYSEPRPIGTRYLTRNL

SEQ ID NO: 4851 - DNA, 2208 bp, Adeno-associated virus
  source 1..2208: mol_type = genomic DNA
atggctgccgatggttatcttccagattggctcgaggacactctctctgaaggaataagacagtggtggaagctcaaacctggcccaccaccaccaaagcccgcagagcggcataaggacgacagcaggggtcttgtgcttcctgggtacaagtacctcggacccttcaacggactctacaagggagagccggtcgacgaggcagacgccgcggccctcgagcacgacaaggcctacgaccggcagctcgacagcggagacaacccgtacctcaagtacaaccacgccgacgcggagtttcaggagcgccttaaagaagatacgtcttttgggggcaacctcggacgagcagtcttccaggccaaaaagagggttcttgaacctctgggcttggttggggagcctgttaaaacggctccgggaaaaaagaggccggtagagcactctcctgtggagccagactcctcctcgggaaccggaaaagcgggcaaccagcctgcaagaaaaagattgaattttggtcagactggagacgcagactccgtacctgacccccagcctctcggacagccaccagcagccccctctggtctgggatctactacaatggctacaggcagtggcgcaccagtggcagacaataacgagggtgccgatggagtgggtaattcctcaggaaattggcattgcgattcccaatggctgggcgacagagtcatcaccaccagcacccgaacctgggctctgcccacctacaataaccacctctacaagcaaatctccagccaatcaggagcctcaaacgacaaccactactttggctacagcaccccctgggggtattttgacttcaacagattccactgccacttttcaccacgtgaccggcaaagactcatcaacaacaactggggattccgaccaaaaagactcaacttcaagctctttaacattcaagtcaaagaggtcacgcagaatgacggtacgacgacgattgccaataaccttaccagcacggttcaggtgtttactgactcggggtaccagctcccgtacgtcctcggcttggcgcatcaaggatgcctcccgccgttcccagcagacgtcttcatggtgccacagtatggatacctcaccctgaacaacgggagtcaggcggtaggacgctcttccttttactgcctggagtactttccttctcagatgctgcgtactggaaacaactttcagttcagctacacctttgaagacgttcctttccacagcagctacgctcacagccagagtctggatcggctgatgaatcctctgatcgaccagtacctgtattatctgaacaagacacaatcaaatagtggaactcttcagcagtctcggctactgtttagccaagctggacccaccagcatgtctcttcaagctaaaaactggctgcctggaccttgctacagacagcagcgtctgtcaaagcaggcaaacgacaacaacaacagcaactttccctggactgcggctacaaagtatcatctaaatggccgggactcgttggttaatccaggaccagctatggccagccacaaagacgatgaagaaaagtttttccccatgcatggaaccctgatatttggtaaacaaggaacaaatgctaacgacgcggatttggacaatgtcatgattacagatgaagaagaaatccgcaccaccaatcccgtggctacggagcagtacggatatgtgtcaaataatttgcaaaactcaaatactggtccaactactggaactgtcaatcaccaaggagcgttacctggtatggtgtggcaggatcgagacgtgtacctgcagggacccatttgggccaagattcctcacaccgatggacactttcatccttctccacttatgggaggttttggactcaaacacccacctcctcagatcatgattaaaaacactcccgttccagccaatcctcccacaaacttcagttctgccaagtttgcttctttcatcacacagtattccacgggacaagtcagcgtggagatcgagtgggagctgcagaaggaggacagcaaacgctggaaccccgagatccagtacacttccaactataacaaacctgttaatgtggactttactgtggacactaatggtgtgtattcagagcctcgccccattggcaccagatacctgactcgtaatctgtaa

SEQ ID NO: 4852 - DNA, 3161 bp, Adeno-associated virus
  source 1..3161: mol_type = genomic DNA
cgaattgatttagcggccgcgaattcgcccttcgcagagaccaaagttcaactgaaacgaattaaacggtttattgattaacaagcaattacagattacgagtcaggtatctggtgccaatggggcgaggctctgaatacacaccattagtgtccacagtaaagtccacattaacagatttgttgtagttggaagtgtactggatctcgggattccagcgtttgctgttctccttctgtagctcccactcgatctccacgctgacccgccccgtggaatactgtgtgatgaaggaagcaaactttgccgcactgaaggtggtcgaaggattcgcaggtaccggggtgtttttgatgagaatctgtggaggagggtgtttaagtccgaatccgcccatgaggggagaggggtgaaaatgtccgtccgtgtgcggaatctttgcccagataggcccctgcaggtacacgtctctgtcctgccagaccatgcctggaagaacgccttgtgtgttgacatctgcagtagatgcttgtgtgttgccgctctggaggttggtagatacagaaccatactgctccgtggccacgggattggtggttctgatttcctcttcgtctgtaatcatgaccttttcaatgtccacatttgttttctctgatccttgttttccaaagatgagaaccccgctctgaggaaaaaacttttcttcatcgtccttgtggctggccattgccgggcccggattcaccagagagtctctgccattgaggtggtacttggtagctccaatccacgagtattcactgttgttgttgtccgcagatgtctttgatactcgctgctggcggtaacagggtccaggaagccagttcctagactgatcccgaatgtcactcgctccggcctgagaaaactgaagcctggactgcgtggtggttccgcttggagtgtttgttctgctcaagtaatacaggtactggtcgatgagaggattcatgagacggtccaaactctggctgtgagcgtagctgctgtggaaaggaacatcctcaaaggtgtagctgaaggtaaagttgtttccggtacgcagcatctgagaagggaagtactccaggcagtaaaatgaagagcgtcctactgcctgactcccgttgttcagggtgaggtatccatactgtggcaccatgaagacgtctgctgggaacggcgggaggcatccttgatgcgccgagccgaggacgtacgggagctggtactccgagtcagtaaacacctgaaccgtgctggtaaggttattggcaatcgtcgtcgtaccatcattctgcgtgacctctctgacttgaatgttaaagagcttgaagttgagtctcttgggccggaatccccagttgttgttgatgagtctttgccagtcacgtggtgaaaagtggcagtggaatctgttgaagtcaaaatacccccaaggggtgctgtagccaaagtagtggttgtcgttgctggctcctgattggctggaaatctgcttgtacagatggttgttgtaggtgggcagagcccaggttcgggtgctggtggtgatgactctgtcgcccatccatgtggaatcgcaatgccaatttcccgaggaattacccactccgtcggcgccatcgttattgtctgccattggtgcgccactgcctgtagccatcgtattagttcccagaccagagggggctgctggtggctgtccgagaggctgggggtcaggtacggagtctgcgtctccagtctgaccgaaattcaatctctttcttgcaggctggttgcccgcttttccggttcccgaggaggagtctggctccacaggagagtgctctaccggcctcttttttcccggagccgtcttaacaggctcctcaaccaggcccagaggttcaagaaccctcttttttgcctggaagactgctcgtccgaggttgcccccaaaagacgtatcttctttaaggcgctcctgaaactccgcgtcggcgtggtcgtacttgaggtacgggttgtctccgctgtcgagctgccggtcgtaggccttgtcgtgctcgagggccgcggcgtctgcctcgttgaccggctctcccttgtcgagtccgttgaagggtccgaggtacttgtacccaggaagcacaagacccctgctgtcgtccttatgccgctctgcgggctttggtggtggtgggccaggtttgagcttccaccactgtcttattccttcagagagagtgtcctcgagccaatctggaagataaccatcggcagccatacctgatttaaatcatttattgttcagagatgcagtcatccaaatccacattgaccagatcgcaggcagtgcaagcgtctggcacctttcccatgatatgatgaatgtagcaaagtttctgatacgcctttttgacgacagaaacgggttgagattctgacacgggaaagcactctaaacagtctttctgtccgtgagtgaagcagatatttgaattctgattcattctctcgcattgtctgcagggaaacagcatcagattcatgcccacgtgacgagaacatttgttttggtacctgtccgcgtagttgatcgaagcttccgcgtctgacgtcgatggctgcgcaactgactcgcgcgcccgtttgggctcacttatatctgcgtcactgggggcgggtcttttcttggctccaccctttttgacgtagaattcatgctccacctcaaccacgtgatcctttgcccaccggaaaaagtctttcacttcctgcttggtgaccttcccaaagtcatgatccagacggcgggttagttcaaatttgaacatccggtcttgcaacggctgctggtgttcgaaggtcgttgagttcccgtcaatcacggcgcacatgttggtgttggaggtggcgatcacgggagtcgggtctatctgggccgaggacttgcacttttggtccacgcgcaccttgcttcctccgagaatggcttcggccgattccacgaccttggcggtcatctttccctcctcccaccagatcaccatcttgtcgacacagtcgttgaagggaaagttctcattggtccagttgacgcagcaagggcgaattcgtttaaacctgcaggaactagtcccttagtgagg

SEQ ID NO: 4853 - protein, 735 aa, Adeno-associated virus
MAADGYLPDWLEDTLSEGIRQWWKLKPGPPPPKPAERHKDDSRGLVLPGYKYLGPFNGLYKGEPVNEADAAALEHDKAYDRQLDSGDNPYLKYNHAGAEFQERLKEDTSFGGNLGRAVFQAKKRVLEPLGLVEEPVKTAPGKKRPVEHSPVEPDSSSGTGKAGNQPARKRLNFGQTGDADSVPDPQPLGQPPAAPSGLGSTTMATGSGAPVADNNEGADGVGNSSGNWHCDSQWLGDRVITTSTRTWALPTYNNHLYKQISSQSGASNDNHYFGYSTPWGYFDFNRFHCHFSPRDWQRLINNNWGFRPKRLNFKLFNIQVKEVTQNDGTTTIANNLTSTVQVFTDSEYQLPYVLGSAHQGCLPPFPADVFMVPQYGYLTLNNGSQAVGRSSFYCLEYFPSQMLRTGNNFQFSYTFEDVPFHSSYAHSQSLDRLMNPLIDQYLYYLNKTQSNSGTLQQSRLLFSQAGPTSMSLQAKNWLPGPCYRQQRLSKQANDNNNSNFPWTAATKYHLNGRDSLVNPGPAMASHKDDEEKFFPMHGTLIFGKQGTNANDADLDNVMITDEEEIRTTNPVATEQYGYVSNNLQDSNTGPTTGTVNHQGALPGMVWQDRDVYLQGPIWAKIPHTDGHFHPSPLMGGFGLKHPPPQIMIKNTPVPANPPTNFSSAKFASFITQYSTGQVSVEIEWELQKENSKRWNPEIQYTSNYNKSVNVDFTVDTNGVYSEPRPIGTRYLTRNL

SEQ ID NO: 4854 - DNA, 2208 bp, Adeno-associated virus
  source 1..2208: mol_type = genomic DNA
atggctgccgatggttatcttccagattggctcgaggacactctctctgaaggaataagacagtggtggaagctcaaacctggcccaccaccgccaaagcccgcagagcggcataaggacgacagcaggggtcttgtgcttcctgggtacaagtacctcggacccttcaacggactctacaagggagagccggtcaacgaggcagacgccgcggccctcgagcacgacaaggcctacgaccggcagctcgacagcggagacaacccgtacctcaagtacaaccacgccggcgcggagtttcaggagcgccttaaagaagatacgtcttttgggggcaacctcggacgagcagtcttccaggccaaaaagagggttcttgaacctctgggcttggttgaggagcctgttaaaacggctccgggaaaaaagaggccggtagagcactctcctgtggagccagactcctcctcgggaaccggaaaagcgggcaaccagcctgcaagaaaaagattgaattttggtcagactggagacgcagactccgtacctgacccccagcctctcggacagccaccagcagccccctctggtctgggatctactacaatggctacaggcagtggcgcaccagtggcagacaataacgagggtgccgatggagtgggtaattcctcaggaaattggcattgcgattcccaatggctgggcgacagagtcatcaccaccagcacccgaacctgggctctgcccacctacaacaaccacctctacaagcaaatctccagccaatcaggagcctcaaacgacaaccactactttggctacagcaccccctgggggtattttgacttcaacagattccactgccacttttcaccacgtgactggcaaagactcatcaacaacaactggggattccgaccaaagagactcaacttcaagctctttaacattcaagtcaaagaggtcacgcagaatgacggtacgacgacgattgccaataaccttaccagcacggttcaggtgtttactgactcggagtaccagctcccgtacgtcctcggctcggcgcatcaaggatgcctcccgccgttcccagcagacgtcttcatggtgccacagtatggatacctcaccctgaacaacgggagtcaggcggtaggacgctcttccttttactgcctggagtactttccttctcagatgctgcgtactggaaacaactttcagttcagctacacctttgaagacgttcctttccacagcagctacgctcacagccagagtctggatcggctgatgaatcctctgatcgaccagtacctgtattatctgaacaagacacaatcaaatagtggaacccttcagcagtctcggctactgtttagccaagctggacccaccagcatgtctcttcaagctaaaaactggctgcctggaccttgctacagacagcagcgtctgtcaaagcaggcaaacgacaacaacaacagcaactttccctggactgcggctacaaagtatcatctaaatggccgggactcgttggttaatccaggaccagctatggccagccacaaagacgatgaagaaaagtttttccccatgcatggaaccctgatatttggtaaacaaggaacaaatgctaacgacgcggatttggacaatgtcatgattacagatgaagaagaaatccgcaccaccaatcccgtggctacggagcagtacggatatgtgtcaaataatttgcaagactcaaatactggtccaactactggaactgtcaatcaccaaggagcgttacctggtatggtgtggcaggatcgagacgtgtacctgcagggacccatttgggccaagattcctcacaccgatggacactttcatccttctccacttatgggaggttttggactcaaacacccacctcctcagatcatgattaaaaacactcccgttccagccaatcctcccacaaacttcagttctgccaagtttgcttctttcatcacacagtattccacgggacaagtcagcgtagagatcgagtgggagctgcagaaggagaacagcaaacgctggaaccccgagatccagtacacttccaactataacaaatctgttaatgtggactttactgtggacactaatggtgtgtattcagagcctcgccccattggcaccagatacctgactcgtaatctgtaa

SEQ ID NO: 4855 - protein, 738 aa, Adeno-associated virus
MAADGYLPDWLEDNLSEGIREWWDLKPGAPKPKANQQKQDDGRGLVLPGCKYLGPFNGLDKGEPVNAADAAALEHDKAYDQQLKAGDNPYLRYNHADAEFQERLQEDTSFGGNLGRAVFQAKKRVLEPLGLVEEGAKTAPGKKRPVEPSPQRSPDSSTGIGKTGQQPAKKRLNFGQTGDSESVPDPQPIGEPPAGPSGLGSGTMAAGGGAPMADNNEGADGVGSSSGNWHCDSTWLGDRVITTSTRTWALPTYNNHLYKQISNGTSGGSTNDNTYFGYSTPWGYFDFNRFHCHFSPRDWQRLINNNWGFRPKRLNFKLFNIQVKEVTQNEGTKTIANNLTSTIQVFTDSEYQLPYVLGSAHQGCPPPFPADVFMIPQYGYLTLNNGSQAVGRSSFYCLEYFPSQMRRTGNNFEFSYQFEDVPFHSSYAHSQSLDRLMNPLIDQYLYYLSRTQSTGGTAGTQQLLFSQAGPNNMSAQAKNWLPGPCYRQQRVSTTLSQNNNSNFAWTGATKYHLNGRDSLVNPGVAMATHKDDEERFFPSSGVLMFGKQGAGKDNVDYSSVMLTSEEEIKTTNPVATEQYGVVADNLQQQNAAPIVGAVNSQGALPGMVWQNRDVYLQGPIWAKIPHTDGNFHPSPLMGGFGLKHPPPQILIKNTPVPADPPTTFSQAKLASFITQYSTGQVSVEIEWELQKENSKRWNPEIQYTSNYNKSVNVDFTVDTNGVYSEPRPIGTRYLTRNL

SEQ ID NO: 4856 - DNA, 2217 bp, Adeno-associated virus
  source 1..2217: mol_type = genomic DNA
atggctgccgatggttatcttccagattggctcgaggacaacctctctgagggcattcgcgagtggtgggacttgaaacctggagccccgaaacccaaagccaaccagcaaaagcaggacgacggccggggtctggtgcttcctggctgcaagtacctcggacccttcaacggactcgacaagggggagcccgtcaacgcggcggacgcagcggccctcgagcacgacaaggcctacgaccagcagctcaaagcgggtgacaatccgtacctgcggtataaccacgccgacgccgagtttcaggagcgtctgcaagaagatacgtcttttgggggcaacctcgggcgagcagtcttccaggccaagaagcgggttctcgaacctctcggtctggttgaggaaggcgctaagacggctcctggaaagaagagaccggtagagccatcaccccagcgttctccagactcctctacgggcatcggcaagacaggccagcagcccgcgaaaaagagactcaactttgggcagactggcgactcagagtcagtgcccgaccctcaaccaatcggagaaccccccgcaggcccctctggtctgggatctggtacaatggctgcaggcggtggcgctccaatggcagacaataacgaaggcgccgacggagtgggtagttcctcaggaaattggcattgcgattccacatggctgggcgacagagtcatcaccaccagcacccgaacctgggccctccccacctacaacaaccacctctacaagcaaatctccaacgggacatcgggaggaagcaccaacgacaacacctacttcggctacagcaccccctgggggtattttgactttaacagattccactgccacttctcaccacgtgactggcagcgactcatcaacaacaactggggattccggcccaagagactcaacttcaagctcttcaacatccaggtcaaggaggtcacgcagaatgaaggcaccaagaccatcgccaataaccttaccagcacgattcaggtctttacggactcggaataccagctcccgtacgtcctcggctctgcgcaccagggctgcccgcctccgttcccggcggacgtcttcatgattcctcagtacgggtacctgactctgaacaacggcagtcaggccgtgggccgttcctccttctactgcctggagtactttccttctcaaatgcggagaacgggcaacaactttgagttcagctaccagtttgaggacgtgccttttcacagcagctacgcgcatagccaaagcctggaccggctgatgaaccccctcatcgaccagtacctgtactacctgtctcggactcagtccacgggaggtaccgcaggaactcagcagttgctattttctcaggccgggcctaataacatgtcggctcaggccaaaaactggctacccgggccctgctaccggcagcaacgcgtctccacgacactgtcgcaaaataacaacagcaactttgcttggaccggtgccaccaagtatcatctgaatggcagagactctctggtaaatcccggtgtcgctatggcaacgcacaaggacgacgaagagcgattttttccatccagcggagtcttgatgtttgggaaacagggagctggaaaagacaacgtggactatagcagcgttatgctaaccagtgaggaagaaatcaaaaccaccaacccagtggccacagaacagtacggcgtggtggccgataacctgcaacagcaaaacgccgctcctattgtaggggccgtcaacagtcaaggagccttacctggcatggtctggcagaaccgggacgtgtacctgcagggtcctatctgggccaagattcctcacacggacggcaactttcatccttcgccgctgatgggaggctttggactgaaacacccgcctcctcagatcctgattaagaatacacctgttcccgcggatcctccaactaccttcagtcaagccaagctggcgtcgttcatcacgcagtacagcaccggacaggtcagcgtggaaattgaatgggagctgcagaaagagaacagcaagcgctggaacccagagattcagtatacttccaactataacaaatctgttaatgtggactttactgtggacactaatggtgtgtattcagagcctcgccccattggcaccagatacctgactcgtaatctgtaa

SEQ ID NO: 4857 - DNA, 3167 bp, Adeno-associated virus
  source 1..3167: mol_type = genomic DNA
attgaatttagcggccgcgaattcgcccttcgcagagaccaaagttcaactgaaacgaattaaacggtttattgattaacaagcaattacagattacgagtcaggtacctggtgccaatggggcgaggctctgaatacacaccattagtgtccacagtaaagtccacattaacagatttgttgtagttggaagtgtactgaatctcgggattccagcgtttgctgttctccttctgcagctcccactcgatctccacgctgacctgccccgtggagtactgtgtaatgaaggaagcaaactttgccgcactgaaggtagtcgaaggattcgcaggtaccggggtgttcttgatgagaatctgcgggggagggtgtttaagtccgaatccgcccatgaggggagaggggtgaaaatgtccgtccgtgtgtggaatctttgcccagatgggcccctgcaggtacacgtctctgtcctgccacaccatgcctggaagaacgccttgtgtgttgacatctgaggtagctgcttgtgtgttgccgctctggaggttggtagatacagaaccatactgctccgtagccacgggattggtggtcctgatttcctcttcgtctgtaatcatgaccttttcaatgtccacattagtttttcccgagtcttgttttccaaagatgagaaccccgctctgaggaaaaaacttttcttcatcgtccttgtggctggccatggccgggcccggattcaccagagagtctcttccattaaggtggtacttggtagctccagtccacgagtattcactgttgttgttatccgcagatgtctttgatactcgctgctggcggtaacagggtccaggaagccagttcctagactggtcccgaatgtcacttgctccggcctgagaaaactgaagccttgactgcgtggtggttccgcttggagtgtttgttctgctcaagtaatacaggtactggtcgatgagaggattcatgagacggtccaaactctggctgtgggcgtagctgctgtggaaaggaacgtcctcaaaggtgtagctgaaggtaaagttgtttccggtacgcagcatctgagaaggaaagtactccaggcagtaaaatgaagagcgtcctactgcctgactcccgttgttcagggtgaggtatccatactgtggcaccatgaagacgtctgctgggaacggcgggaggcatccttgatgcgccgagccgaggacgtacgggagctggtactccgagtcagtaaacacctgaaccgtgctggtaaggttattggcaatcgtcgtcgtaccgtcattctgcgtgacctccttgacttgaatgttaaagagcttgaagttgagtcttttgggccggaatccccaattgttgttgatgagtctttgccagtcacgtggcgaaaagtggcagtggaatctgttgaagtcaaaatacccccaaggggtgctgtagccaaagtagtggttgtcgtttgaggctcctgattggctggaaatctgcttgtagaggtggttgttgtaggtgggcagagcccaggtgcgggtgctggtggtgatgactctgtcgcccatccatgtggaatcgcaatgccaatttcccgaggaattacccactccgtcggcgccctcgttattgtctgccattggtgcgccactgcctgtagccatcgtattagttcccagaccagagggggctgctggtggctgtccgagaggctgggggtcaggtacggagtctgcgtctccagtctgaccgaaattcaatctctttcttgcaggctgctggcccgcttttccggttcccgaggaggagtctggctccgcaggagagtgctctaccggcctcttttttcccggagccgtcttaacaggttcctcaaccaggcccagaggttcaagaaccctctttttcgcctggaagactgctcgtccgaggttgcccccaaaagacgtatcttctttaagacgctcctggaactccgcgtcggcgtggttgtacttggggtacgggttgtctccgctgtcgagctgccggtcgtaggccttgtcgtgctcgagggccgcggcgtctgcctcgttgaccggctctcccttgtcgagtccgttgaagggtccaaggtacttgtacccaggaagcacaagacccctgctgtcgtccttatgccgctctgcgggctttggtggtggtgggccaggtttgagcttccaccactgtcttattccttcagagagagtgtcctcgagccaatctggaagataaccatcggcagccatacctgatttaaatcatttattgttcagagatgcagtcatccaaatccacattgaccagatcgcaagcagtgcaagcgtctggcacctttcccatgatatgatgaatgtagcacagtttctgatacgcctttttgacgacagaaacgggttgagattctgacacgggaaagcactctaaacagtctttctgtccgtgagtgaagcagatatttgaattctgattcattctctcgcattgtctgcagggaaacagcatcagattcatgcccacgtgacgagaacatttgttttggtacctgtccgcgtagttgattgaagcttccgcgtctgacgtcgatggctgcgcaactgactcgcgcgcccgtttgggctcacttatatctgcgtcactgggggcgggtctttttttggctccaccctttttgacgtagaattcatgctctacctcaaccacgtgatcctttgcccaccggaaaaagtctttgacttcctgcttggtgaccttcccaaagtcatgatccagacggcgggtgagttcaaatttgaacatccggtcttgcaacggctgctggtgttcgaaggtcgttgagttcccgtcaatcactgcgcacatgttggtgttggaggtgacaatcacgggagtcgggtctatctgggccgaggacttgcatttctggtccacgcgcaccttgcttcctccgagaatggctttggccgactccacgaccttggcggtcatcttcccctcctcccaccagatcaccatcttgtcgacgcaatcattgaaaggaaagttctcattggtccagttgacgcagccgtagaaagggcgaattcgtttaaacctgcaggactagtccctttagtgagggt

SEQ ID NO: 4858 - DNA, 3161 bp, Adeno-associated virus
  source 1..3161: mol_type = genomic DNA
aattgaatttagcggccgcgaattcgcccttcgcagagaccaaagttcaactgaaacgaattaaacggtttattgattaacaagcaattacagattacgagtcaggtatctggtgccaatggggcgaggctctgaatacacaccattagtgtccacagtaaagtccacattaacagatttgttgtagttggaagtgtactgaatctcgggattccagcgtttgctgttctccttctgcagctcccactcgatctccacgctgacctgccccgtggagtactgtgtaatgaaggaagcaaactttgccgcactgaaggtagtcgaaggattcgcaggtaccggggtgttcttgatgagaatctgcgggggagggtgtttaagtccgaatccgcccatgaggggagaggggtgaaaatgtccgtccgtgtgtggaatctttgcccagatgggcccctgcaggtacacgtctctgtcctgccacaccatgcctggaagaacgccttgtgtgttgacatctgaggtagctgcttgtgtgttgccgctctggaggttggtagatacagaaccatactgctccgtagccacgggattggtggtcctgatttcctcttcgtctgtaatcatgaccttttcaatgtccacattagtttttcccgagtcttgttttccaaagatgagaaccccgctctgaggaaaaaacttttcttcatcgtccttgtggctggccatggccgggcccggattcaccagagagtctcttccattaaggtggtacttggtagctccagtccacgagtattcactgttgttgttatccgcagatgtctttgatactcgctgctggcggtaacagggtccaggaagccagttcctagactggtcccgaatgtcacttgctccggcctgagaaaactgaagccttgactgcgtggtggttccgcttggagtgtttgttctgctcaagtaatacaggtactggtcgacgagaggattcatgagacggtccaaactctggctgtgggcgtagctgctgtggaaaggaacgtcctcaaaggtgtagctgaaggtaaagttgtttccggtacgcagcatctgagaaggaaagtactccaggcagtaaaatgaagagcgtcctactgcctgactcccgttgttcagggtgaggtatccatactgtggcaccatgaagacgtctgctgggaacggcgggaggcatccttgatgcgccgagccgaggacgtacgggagctggtactccgagtcagtaaacacctgaaccgtgctggtaaggttattggcaatcgtcgtcgtaccgtcattctgcgtgacctccttgacttgaatgttaaagagcttgaagttgagtcttttgggccgggatccccaattgttgttgatgagtctttgccagtcacgtggcgaaaagtggcagtggaatctgttgaagtcaaaatacccccaaggggtgctgtagccaaagtagtggttgtcgtttgaggctcctgattggctggaaatctgcctgtagaggtggttgttgtaggtgggcagagcccaggtgcgggtgctggtggtgatgactctgtcgcccatccatgtggaatcgcaatgccaatttcccgaggaattacccactccgtcggcgccctcgttattgtctgccattggtgcgccactgcctgtagccatcgtattagttcccagaccagagggggctgctggtggctgtccgagaggctgggggtcaggtacggagtctgcgtctccagtctgaccgaaattcaatctccttcttgcaggctgctggcccgcttttccggttcccgaggaggagtctggctccgcaagagagtgctctaccggcctcttttttcccggagccgtcttaacaggttcctcaaccaggcccagaggttcaagaaccctctttttcgcctggaagactgctcgtccgaggttgcccccaaaagacgtatcttctttaagacgctcctggaactccgcgtcggcgtggttgtacttgaggtacgggttgtctccgccgtcgagctgccggtcgtaggccttgtcgtgctcgagggccgcggcgtctgcctcgttgaccggctctcccttgtcgagtccgttgaagggtccaaggtacttgtacccaggaagcacaagacccctgctgtcgtccttatgccgctctgcgggctttggtggtggtgggccaggtttgagcttccaccactgtcttattccttcagagagagtgtcctcgagccaatctggaagataaccatcggcagccatacctgatttaaatcatttattgttcagagatgcagtcatccaaatccacattgaccagatcgcaagcagtgcaagcgtctggcacctttcccatgatatgatgaatgtagcacagtttctgatacgcctttttgacgacagaaacgggttgagattctgacacgggaaagcactctaaacagtctttctgtccgtgagtgaagcagatatttgaattctgattcattctctcgcattgtctgcagggaaacagcatcagattcatgcccacgtgacgagaacatttgttttggtacctgtccgcgtagttgattgaagcttccgcgtctgacgtcgatggctgcgcaactgactcgcgcgcccgtttgggctcacttatatctgcgtcactgggggcgggtctttttttggctccaccctttttgacgtagaattcatgctctacctcaaccacgtgatcctttgcccaccggaaaaagtctttgacttcctgcttggtgaccttcccaaagtcatgatccagacggcgggtgagttcaaatttgaacatccggtcttgcaacggctgctggtgttcgaaggtcgttgagttcccgtcaatcactgcgcacatgttggtgttggaggtgacaatcacgggagtcgggtctatctgggccgaggacttgcatttctggtccacgcgcaccttgcttcctccgagaatggctttggccgactccacgaccttggcggtcatcttcccctcctcccaccagatcaccatcttgtcgacgcaatcattgaaaggaaagttctcattggtccagttgacgcagcaagggcgaattcgtttaaacctgcaggactagtccctttagtgaggg

SEQ ID NO: 4859 - DNA, 3172 bp, Adeno-associated virus
  source 1..3172: mol_type = genomic DNA
gattgaatttagcggccgcgaattcgcccttgctgcgtcaactggaccaatgagaactttcccttcaacgattgcgtcgacaagatggtgatctggtgggaggagggcaagatgaccgccaaggtcgtggagtccgccaaggccattctgggtggaagcaaggtgcgcgtggaccaaaagtgcaagtcatcggcccagatcgaccccacgcccgtgatcgtcacctccaacaccaacatgtgcgccgtgatcgacgggaacagcaccaccttcgagcaccagcagcccctgcaggaccgcatgttcaagttcgagctcacccgccgtctggagcacgactttggcaaggtgaccaagcaggaagtcaaagagttcttccgctgggctcaggatcacgtgactgaggtggcgcatgagttctacgtcagaaagggcggagccaccaaaagacccgcccccagtgacgcggatataagcgagcccaagcgggcctgcccctcagttgcggagccatcgacgtcagacgcggaagcaccggtggactttgcggacaggtaccaaaacaaatgttctcgtcacgcgggcatgcttcagatgctgtttccctgcaagacatgcgagagaatgaatcagaatttcaacgtctgcttcacgcacggggtcagagactgctcagagtgcttccccggcgcgtcggaatctcaacccgtcgtcagaaaaaagacgtatcagaaactgtgcgcgattcatcatctgctggggcgggcacccgagattgcgtgttcggcctgcgatctcgtcaacgtggacttggatgactgtgtttctgagcaataaatgacttaaaccaggtatggctgctgacggttatcttccagattggctcgaggacaacctctctgagggcattcgcgagtggtgggacctgaaacctggagcccccaagcccaaggccaaccagcagaagcaggacgacggccggggtctggtgcttcctggctacaagtacctcggacccttcaacggactcgacaagggggagcccgtcaacgcggcggacgcagcggccctcgagcacgacaaggcctacgaccagcagctcaaagcgggtgacaatccgtacctgcggtataaccacgccgacgccgagtttcaggagcgtctgcaagaagatacgtcttttgggggcaacctcgggcgagcagtcttccaggccaagaagcgggttctcgaacctctcggtctggttgaggaagctgctaagacggctcctggaaagaagagaccggtagaaccgtcacctcagcgttcccccgactcctccgcgggcatcggcaagaaaggccagcagcccgctaaaaagagactgaactttggtcagactggcgactcagagtcagtccccgaccctcaaccaatcggagaaccaccagcaggcccctctggtctgggatctggtacaatggctgcaggcggtggcgctccaatggcagacaataacgaaggcgccgacggagtgggtagttcctcaggaaattggcattgcgattccacatggctgggcgacagagtcatcaccaccagcacccgaacctgggccctgcccacctacaacaaccacctctacaagcaaatatccaatgggacatcgggaggaagcaccaacgacaacacctacttcggctacagcaccccctgggggtattttgacttcaacagattccactgccacttctcaccacgtgactggcagcgactcatcaacaacaactggggattccggccaaaaagactcagcttcaagctcttcaacatccaggtcaaggaggtcacgcagaatgaaggcaccgagaccatcgccaataaccttaccagcacgattcaggtatttacggactcggaataccagctgccgtacgtcctcggctccgcgcaccagggctgcctgcctccgttcccggcggacgtcttcatgattccccagtacggctaccttacactgaacaatggaagtcaagccgtaggccgttcctccttctactgcctggaatattttccatctcaaatgctgcgaactggaaacaattttgaattcagctacaccttcgaggacgtgcctttccacagcagctgcgcacacagccagagctcggaccgactgatgaatcctctcatcgaccagtacctgtactacttatccagaactcggtccacaggaggaactcaaggtacccagcaattgttattttctcaagctgggcctgcaaacatgtcggctcaggctaagaactggctacctggaccttgctaccggcagcagcgagtctctacgacactgtcgcaaaacaacaacagcaactttgcttggactggtgccaccaaatatcacctgaacggaagagactctttggtaaatcccggtgtcgccatggcaacccacaaggacgacgaggaacgcttcttcccgtcgagtggagtcctgatgtttggaaaacagggtgctggaagagacaatgtggactacagcagcgttatgctaaccagcgaagaagaaattaaaaccactaaccctgtagccacagaacaatacggtgtggtggctgacaacttgcagcaaaccaatacagggcctattgtgggaaatgtcaacagccaaggagccttacctggcatggtctggcagaaccgagacgtgtacctgcagggtcccatctgggccaagattcctcacacggacggcaacttccacccttcaccgctaatgggaggatttggactgaagcacccacctcctcagatcctgatcaagaacacgccggtacctgcggatcctccaacaacgttcagccaggcgaaattggcttccttcattacgcagtacagcaccggacaggtcagcgtggaaatcgagtgggagctgcagaaggagaacagcaaacgctggaacccagagattcagtacacttcaaactactacaaatctacaaatgtggactttgctgtcaatacagagggaacttattctgagcctcgccccattggtactcgttacctcacccgtaatctgtaattgctggttaatcaataaaccgtttgattcgtttcagttgaactttggtctctgcgaagggcgaattcgtttaaacctgcaggactagtccctttagtgagg

SEQ ID NO: 4860 - DNA, 3172 bp, Adeno-associated virus
  source 1..3172: mol_type = genomic DNA
gattgaatttagcggccgcgaattcgcccttgctgcgtcaactggaccaatgagaactttcccttcaacgattgcgtcgacaagatggtgatctggtgggaggagggcaagatgaccgccaaggtcgtggagtccgccaaggccattctgggtggaagcaaggtgcgcgtggaccaaaagtgcaagtcatcggcccagatcgaccccacgcccgtgatcgtcacctccaacaccaacatgtgcgccgtgatcggcgggaacagcaccaccttcgagcaccagcagcccctgcaggaccgcatgttcaagttcgagctcacccgccgtctggagcacgactttggcaaggtgaccaagcaggaagtcaaagagttcttccgctgggctcaggatcacgtgactgaggtggcgcatgagttctacgtcagaaagggcggagccaccaaaagacccgcccccagtgacgcggatataagcgagcccaagcgggcctgcccctcagttgcggagccatcgacgtcagacgcggaagcaccggtggactttgcggacaggtaccaaaacaaatgttctcgtcacgcgggcatgcttcagatgctgtttccctgcaagacatgcgagagaatgaatcagaatttcaacgtctgcttcacgcacggggtcagagactgctcagagtgcctccccggcgcgtcagaatctcaacccgtcgtcagaaaaaagacgtatcagaaactgtgcgcgattcatcatctgctggggcgggcacccgagattgcgtgttcggcctgcgatctcgtcaacgtggacttggatgactgtgtttctgagcaataaatgacttaaaccaggtatggctgctgacggttatcttccagattggctcgaggacaacctctctgagggcattcgcgagtggtgggacctgaaacctggagcccccaagcccaaggccaaccagcagaagcaggacgacggccggggtctggtgcttcttggctacaagtacctcggacccttcaacggactcgacaagggggagcccgtcaatgcggcggacgcagcggccctcgagcacgacaaggcctacgaccagcagctcaaagcgggtgacaatccgtacctgcggtataaccacgccgacgccgagtttcaggagcgtctgcaagaagatacgtcttttgggggcaacctcgggcgagcagtcttccaggccaagaagcgggttctcgaacctctcggtctggttgaggaagctgctaagacggctcctggaaagaagagaccggtagaaccgtcacctcagcgttcccccgactcctccacgggcatcggcaagaaaggccagcagcccgctaaaaagagactgaactttggtcagactggcgactcagagtcagtccccgaccctcaaccaatcggagaaccaccagcaggcccctctggtctgggatctggtacaatggctgcaggcggtggcgctccaatggcagacaataacgaaggcgccgacggagtgggtagttcctcaggaaattggcattgcgattccacatggctgggcgacagagtcatcaccaccagcacccgaacctgggccctgcccacctacaacaaccacctctacaagcaaatatccaatgggacatcgggaggaagcaccaacgacaacacctacttcggctacagcaccccctgggggtattttgacttcaacagattccactgccacttctcaccacgtgactggcagcgactcatcaacaacaactggggattccggccaaaaagactcagcttcaagctcttcaacatccaggtcaaggaggtcacgcagaatgaaggcaccaagaccatcgccaataaccttaccagcacgattcaggtatttacggactcggaataccagctgccgtacgtcctcggctccgcgcaccagggctgcctgcctccgttcccggcggacgtcttcatgattccccagtacggctaccttacactgaacaatggaagtcaagccgtaggccgttcctccttctactgcctggaatattttccatctcaaatgctgcgaactggaaacaattttgaattcagctacaccttcgaggacgtgcctttccacagcggctacgcacacagccagagcttggaccgactgatgaatcctctcatcgaccagtacctgtactacttatccagaactcagtccacaggaggaactcaaggtacccagcaattgttattttctcaagctgggcctgcaaacatgtcggctcaggctaagaactggctacctggaccttgctaccggcagcagcgagtctctacgacactgtcgcaaaacaacaacagcaactttgcttggactggtgccaccaaatatcacctgaacggaagagactctttggtaaatcccggtgtcgccatggcaacccacaaggacgacgaggaacgcttcttcccgtcgagtggagtcctgatgtttggaaaacagggtgctggaagagacaatgtggactacagcagcgttatgctaaccagcgaagaagaaattaaaaccactaaccctgtagccacagaacaatacggtgtggtggctgacaacttgcagcaaaccaatacagggcctattgtgggaaatgtcaacagccaaggagccttacctggcatggtctggcagaaccgagacgtgtacctgcagggtcccatctgggccaagattcctcacacggacggcaacttccacccttcaccgctaatgggaggatttggactgaagcacccacctcctcagatcctgatcaagaacacgccggtacctgcggatcctccaacgacgttcagccaggcgaaattggcttccttcattacgcagtacagcaccggacaggtcagcgtggaaatcgagtgggagctgcagaaggagaacagcaaacgctggaacccagagattcagtacacttcaaactactacaaatctacaaatgtggactttgctgtcaatacagagggaacttattctgagcctcgccccattggtactcgttacctcacccgtaatctgtaattgctggttaatcaataaaccgtttgattcgtttcagttgaactttggtctctgcgaagggcgaattcgtttaaacctgcaggactagtccctttagtgagg

SEQ ID NO: 4861 - DNA, 2208 bp, Adeno-associated virus
  source 1..2208: mol_type = genomic DNA
atggctgccgatggttatcttccagattggctcgaggacactctctctgaaggaataagacagtggtggaagctcaaacctggcccaccaccaccaaagcccgcagagcggcataaggacgacagcaggggtcttgtgcttcctgggtacaagtacctcggacccttcaacggactcgacaagggagagccggtcaacgaggcagacgccgcggccctcgagcacgacaaggcctacgaccggcagctcgaaagcggagacaacccgtacctcaagtacaaccacgccgacgcggagtttcaggagcgtcttaaagaagatacgtcttttgggggcaacctcggacgagcagtcttccaggcgaaaaagagggttcttgaacctctgggcctggttgaggagcctgttaaaacggctccgggaaaaaagaggccggtagagcactctcctgtggagccagactcctcctcgggaaccggaaaagcgggccagcagcctgcgagaaaaagattgaattttggtcagactggagacgcagactccgtacctgacccccagcctctcggacagccaccagcagccccctctggtctgggatctactacaatggcttcaggcagtggcgcaccagtggcagacaataacgagggtgccgatggagtgggtaattcctcaggaaattggcattgcgattcccaatggctgggcgacagagtcatcaccaccagcacccgaacctgggccctgcccacctacaacaaccacctctacaagcaaatctccagccaatcaggagcctcaaacgacaaccactactttggctacagcaccccctgggggtattttgacttcaacagattccactgccacttttcaccacgtgactggcaaagactcatcaacaacagctggggattccgacccaaaagactcaacttcaagctctttaacattcaagtcaaagaggtcacgcagaatgacggtacgacgacgattgccaataaccttaccagcacggttcaagtgtttaccgactcggagtaccagctcccgtacgtcctcggctcggcgcatcaaggatgcctcccgccgttcccagcagacgtctttatggtcccacagtatggatacctcaccctgaacaacgggagtcaggcggtaggacgctcttccttttactgcctggagtactttccttctcagatgctgcgtactggaaacaactttcagttcagctacacctttgaagacgttcccttccacagcagctacgctcacagccagagtctggatcggctgctgaatcctctgatcgaccagtacctatattatctgaacaagacacaatcaaatagtggaactcttcagcagtctcggctactgtttagccaagctggacccaccagcatgtctcttcaagctaaaaactggctgcctggaccttgctacagacagcagcgtctgtcaaagcaggcaaacgacaacaacaacagcaactttccctggactgcggctacaaagtatcatctaaatggccgggactcgttggttaatccaggaccagctatggccagccacaaagacgatgaagaaaagtttttccccatgcatggaaccctgatatttggtaaacaaggaacaaatgctaacgacgcggatttggacaatgtcatgattacagatgaagaagaaatccgcaccaccaatcccgtggctacggagcagtacggatatgtgtcaaataatttgcaaaactcaaatactggtccaactactggaactgtcaatcaccaaggagcgttacctggtatggtgtggcaggatcgagacgtgtacctgcagggacccatttgggccaagattcctcacacggacgggcactttcatccttctccactaatgggaggttttgggctcaaacacccgcctcctcagatcatgatcaaaaacactcccgttccagccaatcctcctacaaacttcagttcttccaagtttgcttctttcatcacacagtattccacggggcaggtcagcgtggagatcgagtgggagctgcagaaggagaacagcaaacgctggaatcccgaaattcagtatacttccaactacaacaaatctgttaatgtggactttactgtggacactaatggtgtgtattcagagcctcgccccattggcaccagatacccgactcgtaatctgtaa

SEQ ID NO: 4862 - protein, 735 aa, Adeno-associated virus
MAADGYLPDWLEDTLSEGIRQWWKLKPGPPPPKPAERHKDDSRGLVLPGYKYLGPFNGLDKGEPVNEADAAALEHDKAYDRQLESGDNPYLKYNHADAEFQERLKEDTSFGGNLGRAVFQAKKRVLEPLGLVEEPVKTAPGKKRPVEHSPVEPDSSSGTGKAGQQPARKRLNFGQTGDADSVPDPQPLGQPPAAPSGLGSTTMASGSGAPVADNNEGADGVGNSSGNWHCDSQWLGDRVITTSTRTWALPTYNNHLYKQISSQSGASNDNHYFGYSTPWGYFDFNRFHCHFSPRDWQRLINNSWGFRPKRLNFKLFNIQVKEVTQNDGTTTIANNLTSTVQVFTDSEYQLPYVLGSAHQGCLPPFPADVFMVPQYGYLTLNNGSQAVGRSSFYCLEYFPSQMLRTGNNFQFSYTFEDVPFHSSYAHSQSLDRLLNPLIDQYLYYLNKTQSNSGTLQQSRLLFSQAGPTSMSLQAKNWLPGPCYRQQRLSKQANDNNNSNFPWTAATKYHLNGRDSLVNPGPAMASHKDDEEKFFPMHGTLIFGKQGTNANDADLDNVMITDEEEIRTTNPVATEQYGYVSNNLQNSNTGPTTGTVNHQGALPGMVWQDRDVYLQGPIWAKIPHTDGHFHPSPLMGGFGLKHPPPQIMIKNTPVPANPPTNFSSSKFASFITQYSTGQVSVEIEWELQKENSKRWNPEIQYTSNYNKSVNVDFTVDTNGVYSEPRPIGTRYPTRNL

SEQ ID NO: 4863 - DNA, 2208 bp, Adeno-associated virus
  source 1..2208: mol_type = genomic DNA
atggctgccgatggttatcttccagattggctcgaggacactctctctgaaggaataagacagtggtggaagctcaaacctggcccaccaccaccaaagcccgcagagcggcataaggacgacagcaggggtcttgtgcttcctgggtacaagtacctcggacccttcaacggactcgacaagggagagccggtcaacgaggcagacgccgcggccctcgagcacgacaaggcctacgaccggcagctcgacagcggagacaacccgtacctcaagtacaaccacgccgacgcggagtttcaggagcgtcttaaagaagatacgtcttttgggggcaacctcggacgagcagtcttccaggccaaaaagaggattcttgaacctctgggcctggttgaggaacctgttaagacggctccgggagaaaagaggccggtagagcactctcctgcggagccagactcctcctcgggaaccggaaaagcgggccagcagcctgcaagaaagagattgaattttggccagactggagacgcagactcagtacctgacccccagcctctcggacagccaccagcagccccctctggtctgggaactaatacgatggcttcaggcagtggcgcaccaatggcagacaataacgagggcgccgacggagtgggtaattcctcgggaaattggtattgcgattccacatggatgggcgacagagtcatcaccaccagcacccgcacctgggccctgcccacctacaacaaccatctgtacaagcaaatctccagccagtctggagccagcaacgacaaccactactttggctacagcaccccctgggggtattttgacttcaacagattccactgccacttctccccacgtgactggcaaagactcatcaacaacaactggggattccggcccaagagactcagcttcaagctctttaacattcaagtcaaagaggtcacgcagaatgacggtacgacgacgattgccaataaccttaccagcacggttcaggtgtttactgactcggagtaccagctcccgtacgtcctcggctcggcgcatcaaggatgcctcccgccgttcccagcagacgtcttcatggtgccacagtatggatacctcaccctgaacaacggcagtcaggcggtaggacgctcttccttttactgcctggagtactttccttctcagatgcttcgtaccggaaacaactttaccttcagctacacctttgaagacgttcctttccatagcagctacgctcacagccaaagtctggaccgtctcatgaatcctctcatcgaccagtacctgtattacttgagcagaacaaacactccaagcggaaccaccacgatgtccaggcttcagttttctcaggccggagcaagtgacattcgggaccagtctagaaactggcttcctggaccctgttaccgccagcagcgagtatcaaagacagctgcggacaacaacaacagtgattactcgtggactggagctaccaagtaccacctcaatggaagagactctctggtgaatccgggcccagctatggccagccacaaggacgatgaagaaaaatattttcctcagagcggggttctcatctttggaaaacaagactcgggaaaaactaatgtggacattgaaaaggttatgattacagacgaagaggaaatcaggaccaccaatcccgtggctacggagcagtatggttctgtatctaccaacctccagagcggcaacacacaagcagctacctcagatgtcaacacacaaggcgttcttccaggcatggtctggcaggacagagacgtgtacctgcaggggcccatctgggcaaagattccacacacggacggacattttcacccctctcccctcgtgggcggattcggacttaaacaccctcctccacaaattctcatcaagaacaccccggtacctgcgaatccttcgaccactttcagtgcggcaaagtttgcttccttcatcacacagtactccacggggcaggtcagcgtggagatcgagtgggagctgcagaaggagaacagcaaacgctggaatcccgaaattcagtacacttccaactacaacaaatctgttaatgtggactttactgtggacactaatggtgtgtattcagagcctcgccccattggcaccagatacctgactcgtaatctgtaa

SEQ ID NO: 4864 - protein, 735 aa, Adeno-associated virus
MAADGYLPDWLEDTLSEGIRQWWKLKPGPPPPKPAERHKDDSRGLVLPGYKYLGPFNGLDKGEPVNEADAAALEHDKAYDRQLDSGDNPYLKYNHADAEFQERLKEDTSFGGNLGRAVFQAKKRILEPLGLVEEPVKTAPGEKRPVEHSPAEPDSSSGTGKAGQQPARKRLNFGQTGDADSVPDPQPLGQPPAAPSGLGTNTMASGSGAPMADNNEGADGVGNSSGNWYCDSTWMGDRVITTSTRTWALPTYNNHLYKQISSQSGASNDNHYFGYSTPWGYFDFNRFHCHFSPRDWQRLINNNWGFRPKRLSFKLFNIQVKEVTQNDGTTTIANNLTSTVQVFTDSEYQLPYVLGSAHQGCLPPFPADVFMVPQYGYLTLNNGSQAVGRSSFYCLEYFPSQMLRTGNNFTFSYTFEDVPFHSSYAHSQSLDRLMNPLIDQYLYYLSRTNTPSGTTTMSRLQFSQAGASDIRDQSRNWLPGPCYRQQRVSKTAADNNNSDYSWTGATKYHLNGRDSLVNPGPAMASHKDDEEKYFPQSGVLIFGKQDSGKTNVDIEKVMITDEEEIRTTNPVATEQYGSVSTNLQSGNTQAATSDVNTQGVLPGMVWQDRDVYLQGPIWAKIPHTDGHFHPSPLVGGFGLKHPPPQILIKNTPVPANPSTTFSAAKFASFITQYSTGQVSVEIEWELQKENSKRWNPEIQYTSNYNKSVNVDFTVDTNGVYSEPRPIGTRYLTRNL

SEQ ID NO: 4865 - DNA, 2209 bp, Adeno-associated virus
  source 1..2209: mol_type = genomic DNA
atggctgccgatggttatcctccagattggctcgaggacactctctctgaagggataagacagtggtggaagctcaaacctggcccaccaccaccaaagcccgcagagcggcataaggacgacagcaggggtcttgtgcttcctgggtacaagtacctcggacccttcaacggactcgacaagggggagccggtcaacgaggcagacgccgcggccctcgagcacgacaaggcctacgaccggcagctcgacagcggagacaacccgtacctcaagtacaaccacgccgacgcagagtttcaggagcgccttaaagaagatacgtcttttgggggcaacctcggacgagcagtcttccaggcgaaaaagagggttcttgaacctctgggcctggttgaggaacctgttaagacggctccgggaaaaaagaggccggtagagcactctcctgtggagccagactcctcctcgggaaccggaaaagcgggccagcggcctgcaagaaaaagattaaattttggtcagactggagacgcagactccgtacctgacccccagcctctcggacagccaccagcagccccctctggtctgggatctactacaatggctacaggcagtggcgcaccaatggcagacaataacgagggtgccgatggagtgggtaattcctcaggaaattggcattgcgattcccaatggctgggcgacagagtcatcaccaccagcacccgaacctgggccctgcccacatacaacaaccacctctacaagcaaatctccagccaatcaggagccagcaacgacaaccactactttggctacagcaccccctgggggtattttgacttcaacagattccactgccacttttcaccacgtgactggcaaagactcatcaacaacaactggggattccggcccaaaagactcaacttcaagctctttaatattcaagtcaaagaggtcacgcagaatgacggtacgacgacgattgccaataaccttaccagcacggttcaggtgtttactgactcggagtaccagctcccgtacgtcctgggctcggcgcatcaaggatgcctcccgccgtttccagcggacgtcttcatggtcccacagtatggatacctcaccctgaacaacgggagtcaggcggtaggacgctcttccttttactgcctggagtactttccttctcagatgctgcgtactggaaacaactttcagttcagctacacttttgaagacgtgcctttccacagcagctacgctcacagccagagtctggatcggctgatgaatcctctgatcgaccagtacctgtattatctgaacaagacacaaacaaatagtggaactcttcagcagtctcggctactgtttagccaagctggaccaaccaacatgtctcttcaagctaaaaactggctgcctggaccttgctacagacagcagcgtctgtcaaaacaggcaaacgacaacaacaacagcaactttccctggactgcagctacaaagtatcatctaaatggccgggactcgttggttaatccaggaccagctatggccagtcacaaggatgacgaagaaaagtttttccccatgcatggaaccctgatatttggtaaacaaggaacaaatgccaacgacgcggatttggaaaatgtcatgattacagatgaagaagaaatcagggccaccaatcccgtggctacggagcagtacgggactgtgtcaaataatttgcaaaactcaaacactggtccaactactggaactgtcaatcgccaaggagcgttacctggtatggtgtggcaggatcgagacgtgtacctgcagggacccatttgggccaagattcctcacaccgatggacactttcatccttctccactgatgggaggttttggactcaaacacccgcctcctcagatcatgatcaaaaacactcccgttccagccaatcctcccacaaacttcagttctgccaagtttgcttctttcatcacacagtattccacgggacaggtcagcgtggagatcgagtgggagctgcagaaggagaacagcaaacgctggaatcccgaaattcagtacacttccaactacaacaagtctgttaatgtggactttactgtggacactaatggtgtgtattcagagcctcgccccattggcaccagatacctgactcgtaatctgtaat

SEQ ID NO: 4866 - protein, 735 aa, Adeno-associated virus
MAADGYPPDWLEDTLSEGIRQWWKLKPGPPPPKPAERHKDDSRGLVLPGYKYLGPFNGLDKGEPVNEADAAALEHDKAYDRQLDSGDNPYLKYNHADAEFQERLKEDTSFGGNLGRAVFQAKKRVLEPLGLVEEPVKTAPGKKRPVEHSPVEPDSSSGTGKAGQRPARKRLNFGQTGDADSVPDPQPLGQPPAAPSGLGSTTMATGSGAPMADNNEGADGVGNSSGNWHCDSQWLGDRVITTSTRTWALPTYNNHLYKQISSQSGASNDNHYFGYSTPWGYFDFNRFHCHFSPRDWQRLINNNWGFRPKRLNFKLFNIQVKEVTQNDGTTTIANNLTSTVQVFTDSEYQLPYVLGSAHQGCLPPFPADVFMVPQYGYLTLNNGSQAVGRSSFYCLEYFPSQMLRTGNNFQFSYTFEDVPFHSSYAHSQSLDRLMNPLIDQYLYYLNKTQTNSGTLQQSRLLFSQAGPTNMSLQAKNWLPGPCYRQQRLSKQANDNNNSNFPWTAATKYHLNGRDSLVNPGPAMASHKDDEEKFFPMHGTLIFGKQGTNANDADLENVMITDEEEIRATNPVATEQYGTVSNNLQNSNTGPTTGTVNRQGALPGMVWQDRDVYLQGPIWAKIPHTDGHFHPSPLMGGFGLKHPPPQIMIKNTPVPANPPTNFSSAKFASFITQYSTGQVSVEIEWELQKENSKRWNPEIQYTSNYNKSVNVDFTVDTNGVYSEPRPIGTRYLTRNL

SEQ ID NO: 4867 - DNA, 2208 bp, Adeno-associated virus
  source 1..2208: mol_type = genomic DNA
atggctgccgatggttatcttccagattggctcgaggacactctctctgaaggaataagacagtggtggaagctcaaacctggcccaccaccaccaaagcccgcagagcggcataaggacgacagcaggggtcttgtgcttcctgggtacaggtacctcggacccttcaacggactcgacaagggagagccggtcaacgaggcagacgccgcggccctcgagcacgacaaggcctacgaccggcagctcgacagcggagacaacccgtacctcaagtacaaccacgtcgacgcggagtttcaggagcgtcttaaagaagatacgtcttttgggggcaacctcggacgagcagtcttccaggccaaaaagaggattcttgaacctctgggcctggttgaggaacctgttaaggcggctccgggagaaaagaggccggtagagcactctcctgcggagccagactcctcctcgggaaccggaaaagcgggccagcagcctgcaagaaagagattgaattttggtcagactggagacgcagactcagtacctgacccccagcctctcggacagccaccagcagccccctctggtctgggaactaatacgatggcttcaggcagtggcgcaccaatggcagacaataacgagggcgccgacggagtgggtaattcctcgggaaattggcattgcgattccacatggatgggcgacagagtcatcaccaccagcacccgcacctgggccctgcccacctacaacaaccatctgtacaagcaaatctccagccagtctggagccagcaacgacaaccactactttggctacagcaccccctgggggcattttgacttcaacagattccactgccacttctccccacgtgactggcaaagactcatcaacaacaactggggattccggcccaagagactcagcttcaagctctttaacattcaagtcaaagaggtcacgcagaatgacggtacgacgacgattgccaataaccttaccagcacggttcaggtgtttactgactcggagtaccagctcccgtacgtcctcggctcggcgcatcaaggatgcctcccgccgttcccagcagacgtcttcatggtgccacagtatggatacctcaccctgaacaacggcagtcaggcggtaggacgctcttccttttactgcctggagtactttccttctcagatgcttcgtaccggaaacaactttaccttcagctacacctttgaagacgttcctttccatagcagctacgctcacagccaaagtctggaccgtctcatgaatcctctcatcgaccagtacctgtattacttgagcagaacaaacactccaagcggaaccaccacgatgtccaggcttcagttttctcaggccggagcaagtgacattcgggaccagtctagaaactggcttcctggaccctgttaccgccagcagcgagtatcaaagacagctgcggacaacaacaacagtgattactcgtggactggagctaccaagtaccacctcaatggaagagactctctggtgaatccgggcccagctatggccagccacaaggacgatgaagaaaaatattttcctcagagcggggttctcatctttggaaaacaagactcgggaaaaactaatgtggacattgaaaaggttatgattacagacgaagaggaaatcaggaccaccaatcccgtggctacggagcagtatggttctgtatctaccaacctccagagcggcaacacacaagcagctacctcagatgtcaacacacaaggcgttcttccaggcatggtctggcaggacagagacgtgtacctgcaggggcccatctgggcaaagattccacacacggacggacattttcacccctctccccccatgggcggattcggacttaaacaccctcctccacaaattctcatcaagaacaccccggtacctgcgaatccttcgaccactttcagtgcggcaaagtttgcttccttcatcacacagtactccacggggcaggtcagcgtggagatcgagtgggagctgcagaaggagaacagcaaacgctggaatcccgaaattcagtacacttccaactacaacaaatctgttaatgtggactttactgtggacactaatggtgtgtattcagagcctcgccccattggcgccagatacctgactcgtaatctgtaa

SEQ ID NO: 4868 - protein, 735 aa, Adeno-associated virus
MAADGYLPDWLEDTLSEGIRQWWKLKPGPPPPKPAERHKDDSRGLVLPGYRYLGPFNGLDKGEPVNEADAAALEHDKAYDRQLDSGDNPYLKYNHVDAEFQERLKEDTSFGGNLGRAVFQAKKRILEPLGLVEEPVKAAPGEKRPVEHSPAEPDSSSGTGKAGQQPARKRLNFGQTGDADSVPDPQPLGQPPAAPSGLGTNTMASGSGAPMADNNEGADGVGNSSGNWHCDSTWMGDRVITTSTRTWALPTYNNHLYKQISSQSGASNDNHYFGYSTPWGHFDFNRFHCHFSPRDWQRLINNNWGFRPKRLSFKLFNIQVKEVTQNDGTTTIANNLTSTVQVFTDSEYQLPYVLGSAHQGCLPPFPADVFMVPQYGYLTLNNGSQAVGRSSFYCLEYFPSQMLRTGNNFTFSYTFEDVPFHSSYAHSQSLDRLMNPLIDQYLYYLSRTNTPSGTTTMSRLQFSQAGASDIRDQSRNWLPGPCYRQQRVSKTAADNNNSDYSWTGATKYHLNGRDSLVNPGPAMASHKDDEEKYFPQSGVLIFGKQDSGKTNVDIEKVMITDEEEIRTTNPVATEQYGSVSTNLQSGNTQAATSDVNTQGVLPGMVWQDRDVYLQGPIWAKIPHTDGHFHPSPPMGGFGLKHPPPQILIKNTPVPANPSTTFSAAKFASFITQYSTGQVSVEIEWELQKENSKRWNPEIQYTSNYNKSVNVDFTVDTNGVYSEPRPIGARYLTRNL

SEQ ID NO: 4869 - DNA, 2208 bp, Adeno-associated virus
  source 1..2208: mol_type = genomic DNA
atggctgccgatggttatcttccagattggctcgaggacaccctctctgaaggaataagacagtggtggaagctcaaacctggcccaccaccaccaaagcccgcagagcggcataaggacgacagcaggggtcttgtgcttcctgggtacaagtacctcggacccttcaacggactcgacaagggagagccggtcaacgaggcagacgccgcggccctcgagcacgacaaggcctacgaccggcagctcgacagcggagataacccgtacctcaagtacaaccacgccgacgcggagtttcaggagcgccttaaagaggatacgtcttttgggggcaacctcggacgagcagtcttccaggccaaaaagaggattcttgaacctctgggcctggttgaggaacctgttaagacggctccgggaaaaaagaggccggtagagcactctcctgcggagccagactcctcctcgggaaccggaaaagcgggccagcagcctgcaagaaagagattgaattttggtcagactggagacgcagactcagtacctgacccccggcctctcggacagccaccagcagccccctctggtctgggaactaatacgatggcttcaggcagtggcgcaccaatggcagacaataacgagggcgccgacggagtgggtaattcctcgggaaattggcattgcgattccacatggatgggcgacagagtcatcaccaccagcacccgcacctgggccctgcccacctacaacaaccatctgtacaagcaaatctccagccagtctggagccagcaacgacaaccactactttggctacagcaccccctgggggtattttgacttcaacagattccactgccacttctccccacgtgactggcaaagactcatcaacaacaactggggattccggcccaagagactcagcttcaagctctttaacattcaagtcaaagaggtcacgcagaatgacggtacgacgacgattgccaataaccttaccagcacggttcaggtgtttactgactcggagtaccagctcccgtacgtcctcggctcggcgcatcaaggatgcctcccgccgttcccagcagacgtcttcatggtgccacagtatggatacctcaccctgaacaacggcagtcaggcggtaggacgctcttccttttactgcctggagtactttccttctcagatgcttcgtaccggaaacaactttaccttcagctacacctttgaagacgttcctttccatagcagctacgctcacagccaaagtctggaccgtctcatgaatcctctcatcgaccagtacctgtattacttgagcagaacaaacactccaagcggaaccaccacgatgtccaggcttcagttttctcaggccggagcaagtgacattcgggaccagtctagaaactggcttcctggaccctgttaccgccagcagcgagtatcaaagacagctgcggacaacaacaacagtgattactcgtggactggagctaccaagtaccacctcaatggaagagactctctggtgaatccgggcccagctatggccagccacaaggacgatgaagaaaaatattttcctcagagcggggttctcatctttggaaaacaagactcgggaaaaactaatgtggacattgaaaaggttatgattacagacgaagaggaaatcaggaccaccaatcccgtggctacggagcagtatggttctgtatctaccaacctccagagcggcaacacacaagcagctacctcagatgtcaacacacaaggcgttcttccaggcatggtctggcaggacagagacgtgtacctgcaggggcccatctgggcaaagattccacacacggacggacattttcacccctctcccctcatgggcggattcggacttaaacaccctcctccacaaattctcatcaagaacaccccggtacctgcgaatccttcgaccactttcagtgcggcaaagtttgcttccttcatcacacagtactccacggggcaggtcagcgtggagatcgagtgggagctgcagaaggagaacagcaaacgctggaatcccgaaattcagtacacttccaactacaacaaatctgttaatgtggactttactgtggacactaatggtgtgtattcagagcctcgccccattggcaccagatacctgactcgtaatctgtaa

SEQ ID NO: 4870 - protein, 735 aa, Adeno-associated virus
MAADGYLPDWLEDTLSEGIRQWWKLKPGPPPPKPAERHKDDSRGLVLPGYKYLGPFNGLDKGEPVNEADAAALEHDKAYDRQLDSGDNPYLKYNHADAEFQERLKEDTSFGGNLGRAVFQAKKRILEPLGLVEEPVKTAPGKKRPVEHSPAEPDSSSGTGKAGQQPARKRLNFGQTGDADSVPDPRPLGQPPAAPSGLGTNTMASGSGAPMADNNEGADGVGNSSGNWHCDSTWMGDRVITTSTRTWALPTYNNHLYKQISSQSGASNDNHYFGYSTPWGYFDFNRFHCHFSPRDWQRLINNNWGFRPKRLSFKLFNIQVKEVTQNDGTTTIANNLTSTVQVFTDSEYQLPYVLGSAHQGCLPPFPADVFMVPQYGYLTLNNGSQAVGRSSFYCLEYFPSQMLRTGNNFTFSYTFEDVPFHSSYAHSQSLDRLMNPLIDQYLYYLSRTNTPSGTTTMSRLQFSQAGASDIRDQSRNWLPGPCYRQQRVSKTAADNNNSDYSWTGATKYHLNGRDSLVNPGPAMASHKDDEEKYFPQSGVLIFGKQDSGKTNVDIEKVMITDEEEIRTTNPVATEQYGSVSTNLQSGNTQAATSDVNTQGVLPGMVWQDRDVYLQGPIWAKIPHTDGHFHPSPLMGGFGLKHPPPQILIKNTPVPANPSTTFSAAKFASFITQYSTGQVSVEIEWELQKENSKRWNPEIQYTSNYNKSVNVDFTVDTNGVYSEPRPIGTRYLTRNL

SEQ ID NO: 4871 - DNA, 2208 bp, Adeno-associated virus
  source 1..2208: mol_type = genomic DNA
atggctgccgatggttatcttccagattggctcgaggacactctctctgaaggaataagacagtggtggaagctcaaacctggcccaccaccaccaaagcccgcagagcggcataaggacgacagcaggggtcttgtgcttcctgggtacaagtacctcggacccttcaacggactcgacaagggagagccggtcaacgaggcagacgccgcggccctcgagcacgacaaggcctacgaccggcagctcgacagcggagacaacccgtacctcaagtacaaccacgccgacgcggagtttcaggagcgccttaaaggagatacgtcttttgggggcaacctcggacgagcagtcttccaggccaaaaagaggattcttgaacctctgggcctggttgaggaacctgttaagacggctccgggaaaaaagaggccggtagagcactctcctgcggagccagactcctcctcgggaaccggaaaagcgggccagcagcctgcaagaaagagattgaattttggtcagactggagacgcagactcagtacctgacccccagcctctcggacagccaccagcagccccctctggtctgggaactaatacgatggcttcaggcagtggcgcaccaatggcagacaataacgagggcgccgacggagtgggtaattcctcgggaaattggcattgcgattccacatggatgggcggcagagtcatcaccaccagcacccgcacctgggccctgcccacctacaacaaccatctgtacaagcaaatctccagccagtctggagccagcaacgacaaccactactttggctacagcaccccctgggggtattttgacttcaacagattccactgccacttctccccacgtgactggcaaagactcatcaacaacaactggggattccggcccaagagactcagcttcaagctctttaacattcaagtcaaagaggtcacgcagaatgacggtacgacgacgattgccaataaccttaccagcacggttcaggtgtttactgactcggagtaccagctcccgtacgtcctcggctcggcgcatcaaggatgcctcccgccgttcccagcagacgtcttcatggtgccacagtatggatacctcaccctgaacaacggcagtcaggcggtaggacgctcttccttttactgcctggagtactttccttctcagacgcttcgtaccggaaacaactttaccttcagctacacctttgaagacgttcctttccatagcagctacgctcacagccaaagtctggaccgtctcatgaatcctctcatcgaccagtacctgtattacttgagcagaacaaacactccaagcggaaccaccacgatgtccaggcttcagttttctcaggccggagcaagtgacattcgggaccagtctagaaactggcttcctggaccctgttaccgccagcagcgagtatcaaagacagctgcggacaacaacaacagtgattactcgtggactggagctaccaagtaccacctcaatggaagagactctctggtgaatccgggcccagctatggccagccacaaggacgatgaagaaaaatattttcctcagagcggggttctcatctttggaaaacaagactcgggaaaaactaatgtggacattgaaaaggttatgattacagacgaagaggaaatcaggaccaccaatcccgtggctacggagcagtatggttctgtatctaccaacctccagagcggcaacacacaagcagctacctcagatgtcaacacacaaggcgttcttccaggcatggtctggcaggacagagacgtgtacctgcaggggcccatctgggcaaagattccacacacggacggacattttcacccctctcccctcatgggcggattcggacttaaacaccctcctccacaaattctcatcaagaacaccccggtacctgcgaatccttcgaccactttcagtgcggcaaagtttgcttccttcatcacacagtactccacggggcaggtcagcgtggagatcgagtgggagctgcagaaggagaacagcaaacgctggaatcccgaaattcagtacacttccaactacaacaaatctgttaatgtggactttactgtggacactaatggtgtgtattcagagcctcgccccattggcaccagatacctgactcgtaatctgtaa

SEQ ID NO: 4872 - protein, 735 aa, Adeno-associated virus
MAADGYLPDWLEDTLSEGIRQWWKLKPGPPPPKPAERHKDDSRGLVLPGYKYLGPFNGLDKGEPVNEADAAALEHDKAYDRQLDSGDNPYLKYNHADAEFQERLKGDTSFGGNLGRAVFQAKKRILEPLGLVEEPVKTAPGKKRPVEHSPAEPDSSSGTGKAGQQPARKRLNFGQTGDADSVPDPQPLGQPPAAPSGLGTNTMASGSGAPMADNNEGADGVGNSSGNWHCDSTWMGGRVITTSTRTWALPTYNNHLYKQISSQSGASNDNHYFGYSTPWGYFDFNRFHCHFSPRDWQRLINNNWGFRPKRLSFKLFNIQVKEVTQNDGTTTIANNLTSTVQVFTDSEYQLPYVLGSAHQGCLPPFPADVFMVPQYGYLTLNNGSQAVGRSSFYCLEYFPSQTLRTGNNFTFSYTFEDVPFHSSYAHSQSLDRLMNPLIDQYLYYLSRTNTPSGTTTMSRLQFSQAGASDIRDQSRNWLPGPCYRQQRVSKTAADNNNSDYSWTGATKYHLNGRDSLVNPGPAMASHKDDEEKYFPQSGVLIFGKQDSGKTNVDIEKVMITDEEEIRTTNPVATEQYGSVSTNLQSGNTQAATSDVNTQGVLPGMVWQDRDVYLQGPIWAKIPHTDGHFHPSPLMGGFGLKHPPPQILIKNTPVPANPSTTFSAAKFASFITQYSTGQVSVEIEWELQKENSKRWNPEIQYTSNYNKSVNVDFTVDTNGVYSEPRPIGTRYLTRNL

SEQ ID NO: 4873 - DNA, 2208 bp, Adeno-associated virus
  source 1..2208: mol_type = genomic DNA
atggctgccgatggttatcttccagattggctcgaggacactctctctgaaggaataagacagtggtggaagctcaaacctggcccaccaccaccaaagcccgcagagcggcataaggacgacagcaggggtcttgtgcttcctgggtacaagtacctcggacccttcaacggactcgacaagggagagccggtcaacgaggcagacgccgcggccctcgagcacgacaaggcctacgaccggcagctcgacagcggagacaacccgtacctcaagtacaaccacgccgacgcggagtttcaggagcgtcttaaagaagatacgtcttttgggggcaacctcggacgagcagtcttccaggccaaaaagaggattcttgaacctctgggcctggttgaggaacctgttaagacggctccgggaaaaaagaggccggtagagcactctcctgcggagccagactcctcctcgggaaccggaaaagcgggccagcagcctgcaagaaagagattgaattttggtcagactggagacgcagactcagtacctgacccccagcctctcggacagccaccagcagccccctctggtctgggaactaatacgatggcttcaggcagtggcgcaccaatggcagacaataacgagggcgccgacggagtgggtaattcctcgggaaattggcattgcgattccacatggatgggcgacagagtcatcaccaccagcacccgcacctgggccctgcccacctgcaacaaccatctgtacaagcaaatctccagccagtctggagccagcaacgacaaccactactttggctacagcaccccctgggggtattttgacttcaacagattccactgccacttctccccacgtgactggcaaagactcatcaacaacaactggggattccggcccaagagactcagcttcaagctctttaacattcaagtcaaagaggtcacgcagaatgacggtacgacgacgattgccaataaccttaccagcacggttcaggtgtttactgactcggagtaccagctcccgtacgtcctcggctcggcgcatcaaggatgcctcccgccgttcccagcagacgtcttcatggtgccacagtatggatacctcaccctgaacaacggcagtcaggcggtaggacgctcttccttttactgcctggagtattttccttctcagatgcttcgtaccggaaacaactttaccttcagctacacctttgaagacgttcctttccatagcagctacgctcacagccaaagtctggaccgtctcatgaatcctctcatcgaccagtacctgtattacttgagcagaacaaacactccaagcggaaccaccacgatgtccaggcttcagttttctcaggccggagcaagtgacattcgggaccagtctagaaactggcttcctggaccctgttaccgccagcagcgagtatcaaagacagctgcggacaacaacaacagtgattactcgtggactggagctaccaagtaccacctcaatggaagagactctctggtgaatccgggcccagctatggccagccacaaggacgatgaagaaaaatattttcctcagagcggggttctcatctttggaaaacaagactcgggaaaaactaatgtggacattgaaaaggttatgattacagacgaagaggaaatcaggaccaccaatcccgtggctacggagcagtatggttctgtatctacctacctccagagcggcaacacacaagcagctacctcagatgtcaacacacaaggcgttcttccaggcatggtctggcaggacagagacgtgtacctgcgggggcccatctgggcaaagattccacacacggacggacattttcacccctctcccctcatgggcggatttggacttaaacaccctcctccacaaattctcatcaagaacaccccggtacctgcgaatccttcgaccactttcagtgcggcaaagtttgcttccttcatcacacagtactccacggggcaggtcagcgtggagatcgagtgggagctgcagaaggagaacagcaaacgctggaatcccgaaattcagtacacttccaactacaacaaatctgttaatgtggactttactgtggacactaatggtgtgtattcagagcctcgccccattggcaccagatacctgactcgtaatctgtaa

SEQ ID NO: 4874 - protein, 735 aa, Adeno-associated virus
MAADGYLPDWLEDTLSEGIRQWWKLKPGPPPPKPAERHKDDSRGLVLPGYKYLGPFNGLDKGEPVNEADAAALEHDKAYDRQLDSGDNPYLKYNHADAEFQERLKEDTSFGGNLGRAVFQAKKRILEPLGLVEEPVKTAPGKKRPVEHSPAEPDSSSGTGKAGQQPARKRLNFGQTGDADSVPDPQPLGQPPAAPSGLGTNTMASGSGAPMADNNEGADGVGNSSGNWHCDSTWMGDRVITTSTRTWALPTCNNHLYKQISSQSGASNDNHYFGYSTPWGYFDFNRFHCHFSPRDWQRLINNNWGFRPKRLSFKLFNIQVKEVTQNDGTTTIANNLTSTVQVFTDSEYQLPYVLGSAHQGCLPPFPADVFMVPQYGYLTLNNGSQAVGRSSFYCLEYFPSQMLRTGNNFTFSYTFEDVPFHSSYAHSQSLDRLMNPLIDQYLYYLSRTNTPSGTTTMSRLQFSQAGASDIRDQSRNWLPGPCYRQQRVSKTAADNNNSDYSWTGATKYHLNGRDSLVNPGPAMASHKDDEEKYFPQSGVLIFGKQDSGKTNVDIEKVMITDEEEIRTTNPVATEQYGSVSTYLQSGNTQAATSDVNTQGVLPGMVWQDRDVYLRGPIWAKIPHTDGHFHPSPLMGGFGLKHPPPQILIKNTPVPANPSTTFSAAKFASFITQYSTGQVSVEIEWELQKENSKRWNPEIQYTSNYNKSVNVDFTVDTNGVYSEPRPIGTRYLTRNL

SEQ ID NO: 4875 - DNA, 2208 bp, Adeno-associated virus; identical to SEQ ID NO: 4869
  source 1..2208: mol_type = genomic DNA

SEQ ID NO: 4876 - protein, 735 aa, Adeno-associated virus; identical to SEQ ID NO: 4870

SEQ ID NO: 4877 - DNA, 2208 bp, Adeno-associated virus
  source 1..2208: mol_type = genomic DNA
atggctgccgatggttatcttccagattggctcgaggacactctctctgaaggaataagacagtggtggaagctcaaacctggcccaccaccaccaaagcccgcagagcggcataaggacggcagcaggggtcttgtgcttcctgggtacaagtacctcggacccttcaacggactcgacaagggagagccggtcaacgaggcagacgccgcggccctcgagcacgacaaggcctacgaccggcagctcaacagcggagacaacccgtacctcaagtacaaccacgccgacgcggagtttcaggagcgccttaaagaagatacgtcttttgggggcaacctcggacgagcagtcttccaggcaaaaaagagggttcttgaacctctgggcctggttgaggagcctgttaaaacggctccgggaaaaaagagaccggtagagcactctcctgcggagccagactcctcctcgggaaccggaaaagcgggccagcagcctgcaagaaagagattgaattttggtcagactggagacgcagactccgtacctgacccccagcctctcggacagccaccagcagccccctctggtctgggatctactacaatggctacaggcagtggcgcaccaatggcagacaataacgagggtgccgatggagtgggtaattcctcaggaaattggcattgcgattcccaatggctgggcgacagagtcatcaccacaagcactcgaacctgggccctgcccacctacaacaaccacctctacaagcaaatctccagccaatcaggagcctcaaacgacaaccactattttggctacagcaccccttgggggtattttgacttcaacagattccactgccacttttcaccacgtgactggcaaagactcatcaacaacaactggggattccgacccaagagactcaacttcaagctctttaacattcaagtcaaagaggtcacgcagaatgacggtacgacgacgattgccaataaccttaccagcacggttcaggtgtttactgactcggagtaccagctcccgtacgtcctcggctcggcgcatcaaggatgcctcccgccgttcccagcggacgtcttcatggtcccacagtatggatacctcaccctgaacaacgggagtcaggcggtaggacgctctcccttttactgcctggagtactttccttctcagatgctgcgtactggaaacaactttcagttcagctacacttttgaagacgtgcctttccacagcagctacgctcacagccagagtctggatcggctgatgaatcctctgatcgaccagtacctgtattatctgaacaagacacaaacaaatagtggaactcttcagcagtctcggctactgtttagccaagctggacccaccaacatgtctcttcaagctaaaaactggctgcctggaccttgctacagacagcagcgtctgtcaaagcaggcaaacgacaacaacaacagcaactttccctggactgcagctacaaagtatcatctaaatggccgggactcgttggttaatccaggaccagctatggccagtcacaaggatgacgaagaaaagtttttccccatgcatggaaccctgatatttggtaaacaaggaacaaatgccaacgacgcggatttggaaaatgtcatgattacagatgaagaagaaatcaggaccaccaatcccgtggctacggagcagtacgggactgtgtcaaataatttgcaaaactcaaacactggtccaactactggaactgtcaatcaccaaggagcgttacctggtatggtgtggcaggatcgagatgtgtaccttcagggacccatttgggccaagattcctcacaccgatggacactttcatccttctccactgatgggaggttttggactcaaacacccgcctcctcagattatgatcaaaaacactcccgttccagccaatcctcctacaaacttcagttctgccaagtttgcttctttcatcacacagtattccacggggcaggtcagcgtggagatcgagtgggagctgcagaaggagaacagcaaacgctggaatcccgaaattcagtacacttccaactacaacaaatctgttaatgtggactttactgtggacaataatggcgtgtactcagagcctcgccccattggcaccagatacctgactcgtaatctgtaa

SEQ ID NO: 4878 - protein, 735 aa, Adeno-associated virus
MAADGYLPDWLEDTLSEGIRQWWKLKPGPPPPKPAERHKDGSRGLVLPGYKYLGPFNGLDKGEPVNEADAAALEHDKAYDRQLNSGDNPYLKYNHADAEFQERLKEDTSFGGNLGRAVFQAKKRVLEPLGLVEEPVKTAPGKKRPVEHSPAEPDSSSGTGKAGQQPARKRLNFGQTGDADSVPDPQPLGQPPAAPSGLGSTTMATGSGAPMADNNEGADGVGNSSGNWHCDSQWLGDRVITTSTRTWALPTYNNHLYKQISSQSGASNDNHYFGYSTPWGYFDFNRFHCHFSPRDWQRLINNNWGFRPKRLNFKLFNIQVKEVTQNDGTTTIANNLTSTVQVFTDSEYQLPYVLGSAHQGCLPPFPADVFMVPQYGYLTLNNGSQAVGRSPFYCLEYFPSQMLRTGNNFQFSYTFEDVPFHSSYAHSQSLDRLMNPLIDQYLYYLNKTQTNSGTLQQSRLLFSQAGPTNMSLQAKNWLPGPCYRQQRLSKQANDNNNSNFPWTAATKYHLNGRDSLVNPGPAMASHKDDEEKFFPMHGTLIFGKQGTNANDADLENVMITDEEEIRTTNPVATEQYGTVSNNLQNSNTGPTTGTVNHQGALPGMVWQDRDVYLQGPIWAKIPHTDGHFHPSPLMGGFGLKHPPPQIMIKNTPVPANPPTNFSSAKFASFITQYSTGQVSVEIEWELQKENSKRWNPEIQYTSNYNKSVNVDFTVDNNGVYSEPRPIGTRYLTRNL

SEQ ID NO: 4879 - DNA, 2208 bp, Adeno-associated virus
  source 1..2208: mol_type = genomic DNA
atggctgccgatggttatcttccagattggctcgaggacactctctctgaaggaataagacagtggtggaagctcaaacctggcccaccaccaccaaagcccgcagagcggcataaggacgacagcaggggtcttgtgcttcctgggtacaagtacctcggacccttcaacggactcgacaagggagagccggtcaacgaggcagacgccgcggccctcgagcacgacaaggcctacgaccggcagctcgacagcggagacaacccgtacctcaagtacaaccacgccgacgcggagtttcaggagcgtcttaaagaagatacgtcttttgggggcaacctcggacgagcagtcttccaggccaaaaagaggattcttgaacctctgggcctggttgaggaacctgttaagacggctccgggaaaaaagaggccggtagagcactctcctgcggagccagactcctcctcgggaaccggaaaagcgggccagcagcctgcaagaaagagattgaattttggtcagactggagacgcagactcagtacctgacccccagcctctcggacagccaccagcagccccctctggtctgggaactaatacgatggcttcaggcagtggcgcaccaatggcagacaataacgagggcgccgacggagtgggtaattcctcgggaaattggcattgcgattccacatggatgggcgacagagtcatcaccaccagcacccgcacctgggccctgcccacctacaacaaccatctgtacaagcaaatctccagccagtctggagccagcaacgacaaccactactttggctacagcaccccctgggggtattttgacttcaacagattccactgccacttctccccacgtgactggcaaagactcatcaacaacaactggggattccggcccaagagactcagcttcaagctctttaacattcaagtcaaagaggtcacgcagaatgacggtacgacgacgattgccaataaccttaccagcacggttcaggtgtttactgactcggagtaccagctcccgtacgtcctcggctcggcgcatcaaggatgcctcccgccgttcccagcagacgtcttcatggtgccacagtatggatacctcaccctgaacaacggcagtcaggcggtaggacgctcttccttttactgcctggagtactttccttctcagatgcttcgtaccggaaacaactttaccttcagctacacctttgaagacgttcctttccatagcagctacgctcacagccaaagtctggaccgtctcatgaatcctctcatcgaccagtacctgtattacttgagcagaacaaacactccaagcggaaccaccacgatgtccaggcttcagttttctcaggccggagcaagtgacattcgggaccagtctagaaactggcttcctggaccctgttaccgccagcagcgagtatcaaagacagctgcggacaacaacaacagtgattactcgtggactggagctaccaagtaccacctcaatggaagagactctctggtgaatccgggcccagctatggccagccacaaggacgatgaagaaaaatattttcctcagagcggggttctcatctttggaaaacaagactcgggaaaaactaatgtggacattgaaaaggttatgattacagacgaagaggaaatcaggaccaccaatcccgtggctacggagcagtatggttctgtatctaccaacctccagagcggcaacacacaagcagctacctcagatgtcaacacacaaggcgttcttccaggcatggtctggcaggacagagacgtgtacctgcaggggcccatctgggcaaagattccacacacggacggacattttcacccctctcccctcatgggcggattcggacttaaacaccctcctccacaaattctcatcaagaacaccccggtacctgcgaatccttcgaccactttcagtgcggcaaagtttgcttccttcatcacacagtactccacggggcaggtcagcgtggagatcgagtgggagctgcagaaggagaacagcaaacgctggaatcccgaaattcagtacacttccaactacaacaaatctgttaatgtggactttactgtggacactaatggtgtgtattcagagcctcgccccattggcaccagatacctgactcgtaatctgtaa

SEQ ID NO: 4880 - protein, 735 aa, Adeno-associated virus
MAADGYLPDWLEDTLSEGIRQWWKLKPGPPPPKPAERHKDDSRGLVLPGYKYLGPFNGLDKGEPVNEADAAALEHDKAYDRQLDSGDNPYLKYNHADAEFQERLKEDTSFGGNLGRAVFQAKKRILEPLGLVEEPVKTAPGKKRPVEHSPAEPDSSSGTGKAGQQPARKRLNFGQTGDADSVPDPQPLGQPPAAPSGLGTNTMASGSGAPMADNNEGADGVGNSSGNWHCDSTWMGDRVITTSTRTWALPTYNNHLYKQISSQSGASNDNHYFGYSTPWGYFDFNRFHCHFSPRDWQRLINNNWGFRPKRLSFKLFNIQVKEVTQNDGTTTIANNLTSTVQVFTDSEYQLPYVLGSAHQGCLPPFPADVFMVPQYGYLTLNNGSQAVGRSSFYCLEYFPSQMLRTGNNFTFSYTFEDVPFHSSYAHSQSLDRLMNPLIDQYLYYLSRTNTPSGTTTMSRLQFSQAGASDIRDQSRNWLPGPCYRQQRVSKTAADNNNSDYSWTGATKYHLNGRDSLVNPGPAMASHKDDEEKYFPQSGVLIFGKQDSGKTNVDIEKVMITDEEEIRTTNPVATEQYGSVSTNLQSGNTQAATSDVNTQGVLPGMVWQDRDVYLQGPIWAKIPHTDGHFHPSPLMGGFGLKHPPPQILIKNTPVPANPSTTFSAAKFASFITQYSTGQVSVEIEWELQKENSKRWNPEIQYTSNYNKSVNVDFTVDTNGVYSEPRPIGTRYLTRNL

SEQ ID NO: 4881 - DNA, 2208 bp, Adeno-associated virus
  source 1..2208: mol_type = genomic DNA
atggctgccgatggttatcttccagattggctcgaggacactctctctgaaggaataagacagtggtggaagctcaaacctggcccaccaccaccaaagcccgcagagcggcataaggacgacagcaggggtcttgtgcttcctgggtacaagtacctcggacccttcaacggactcgacaagggagagccggtcaacgaggcagacgccgcggccctcgagcacgacaaggcctacgaccggcagctcgacagcggagacaacccgtacctcaagtacaaccacgccgacgcggagtttcaggagcgtcttaaagaagatacgtcttttgggggcaacctcggacgagcagtcttccaggccaaaaagaggattcttgaacctctgggcctggttgaggaacctgttaagacggctccgggaaaaaagaggccggtagagcactctcctgcggagccagactcctcctcgggaaccggaaaagcgggccagcagcctgcaagaaagagattgaattttggtcagactggagacgcagactcagtacctgacccccagcctctcggacagccaccagcagccccctctggtctgggaactaatacgatggcttcaggcagtggcgcaccaatggcagacaataacgagggcgccgacggagtgggtaattcctcgggaaattggcattgcgattccacatggatgggcgacagagtcatcaccaccagcacccgcacctgggccctgcccacctacaacaaccatctgtacaagcaaatctccagccagtctggagccagcaacgacaaccactactttggctacagcaccccctgggggtatttcgacttcaacagattccactgccacttctccccacgtgactggcaaagactcatcaacaacaactggggattccggcccaagagactcagcttcaagctctttaacattcaagtcaaagaggtcacgcagaatgacggtacgacgacgattgccaataaccttaccagcacggttcaggtgtttactgactcggggtaccagctcccgtacgtcctcggctcggcgcatcaaggatgccttccgccgttcccagcagacgtcttcatggtgccacagtatggatacctcaccctgaacaacggcagtcaggcggtaggacgctcttccttttactgcctggagtactttccttctcagatgcttcgtaccggaaacaactttaccttcagctacacctttgaagacgttcctttccatagcagctacgctcacggccaaagtctggaccgtctcatgaatcctctcatcgaccagtacctgtattacttgagcagaacaaacactccaagcggaaccaccacgatgtccaggcttcagttttctcaggccggagcaagtgacgttcgggaccagtctagaaactggcttcctggaccctgttaccgccagcagcgagtatcaaagacagctgcggacaacaacaacagtgattactcgtggactggagctaccaagtaccacctcaatggaagagactctctggtgaatccgggcccagctatggccagccacaaggacgatgaagaaaaatattttcctcagagcggggttctcgtctttggaaaacaagactcgggaaaaactaatgtggacattgaaaaggttatgattacagacgaagaggaaatcaggaccaccaatcccgcggctacggagcagtatggttctgtatctaccaacctccagagcggcaacacacaagcagctacctcagatgtcaacacacaaggcgttcttccaggcatggtctggcaggacagagacgtgtacctgcaggggcccatctgggcaaagattccacacacggacggacattttcacccctctcccctcatgggcggattcggacttaaacaccctcctccacaaattctcatcaagaacaccccggtacctgcgaatccttcgaccactttcagtgcggcaaagtttgtttccttcatcacacagtactccacggggcaggtcagcgtggagatcgagtgggagctgcagaaggagaacagcaaacgctggaatcccgaaattcagtacacttccaactacaacaaatctgttaatgtggactttactgtggacactaatggtgtgtattcagagcctcgccccattggcaccagatacctgactcgtaatctgtaa

SEQ ID NO: 4882 - protein, 735 aa, Adeno-associated virus
MAADGYLPDWLEDTLSEGIRQWWKLKPGPPPPKPAERHKDDSRGLVLPGYKYLGPFNGLDKGEPVNEADAAALEHDKAYDRQLDSGDNPYLKYNHADAEFQERLKEDTSFGGNLGRAVFQAKKRILEPLGLVEEPVKTAPGKKRPVEHSPAEPDSSSGTGKAGQQPARKRLNFGQTGDADSVPDPQPLGQPPAAPSGLGTNTMASGSGAPMADNNEGADGVGNSSGNWHCDSTWMGDRVITTSTRTWALPTYNNHLYKQISSQSGASNDNHYFGYSTPWGYFDFNRFHCHFSPRDWQRLINNNWGFRPKRLSFKLFNIQVKEVTQNDGTTTIANNLTSTVQVFTDSGYQLPYVLGSAHQGCLPPFPADVFMVPQYGYLTLNNGSQAVGRSSFYCLEYFPSQMLRTGNNFTFSYTFEDVPFHSSYAHGQSLDRLMNPLIDQYLYYLSRTNTPSGTTTMSRLQFSQAGASDVRDQSRNWLPGPCYRQQRVSKTAADNNNSDYSWTGATKYHLNGRDSLVNPGPAMASHKDDEEKYFPQSGVLVFGKQDSGKTNVDIEKVMITDEEEIRTTNPAATEQYGSVSTNLQSGNTQAATSDVNTQGVLPGMVWQDRDVYLQGPIWAKIPHTDGHFHPSPLMGGFGLKHPPPQILIKNTPVPANPSTTFSAAKFVSFITQYSTGQVSVEIEWELQKENSKRWNPEIQYTSNYNKSVNVDFTVDTNGVYSEPRPIGTRYLTRNL

SEQ ID NO: 4883 - DNA, 2208 bp, Adeno-associated virus
  source 1..2208: mol_type = genomic DNA
atggctgccgatggttatcttccagattggctcgaggacactctctctgaaggaataagacagtggtggaaactcaaacctggcccaccaccaccaaagcccgcagagcggcataaggacgacagcaggggtcttgtgcttcctgggtacaagtacctcggacccttcaacggactcgacaagggagagccggtcaacgaggcagacgccgcggccctcgagcacgacaaggcctacgaccggcagctcgacagcggagacaacccgtacctcaagtacaaccacgccgacgcggagtttcaggagcgccttaaagaagatacgtcttttgggggcaacctcggacgagcagtcttccaggcaaaaaagagggttctggaacctctgagcctggttgaggagcctgttaagacggctccgggaaaaaagaggccggtagagcactctcccgcagagccagattcctcctccggaactggaaagtcgggcaaccagcctgcaagaaagagattgaatttcggtcagactggagactcagactccgtacctgacccccagcctctcggacagccaccagcagccccctctggtctgggaactaatacgatggctacaggcagtggcgcaccaatggcagacaataacgagggcgccgacggagtgggtaattcctcgggaaattggcattgcgattccacatggatgggcgacagagtcatcaccaccagcacccgaacctgggccctgcccacctacaacaaccatctgtacaagcaaatatccagccagtctggagccagcaacgacaatcactactttggctacagcaccccctgggggtattttgacttcaacagattccactgccacttttcaccacgtgactggcaaagactcatcaacaacaactggggattccgacccaagagactcaacttcaagctctttaacattcaagtcaaagaggtcacgcagaatgacggtacgacgacgattgccaataaccttaccagcacggttcaggtgtttactgactcggagtaccagctcccgtacgtcctcggctcggcgcatcaaggatgcctcccgccgttcccagcagacgtcttcatggtgccacagtatggatacctcaccctgaacaacgggagtcaggcagtaggacgctcttcattttactgcctagagtactttccttctcagatgctgcgtaccggaaacaactttaccttcagctacacctttgaggacgttcctttccacagcagctacgctcacagccagagtttggaccgtctcatgaatcctctcatcgaccagtacctgtattacttgagcagaacaaacactccaagcggaaccaccacgcagtccaggcttcagttttctcaggccggagcgagtgacattcaggaccagtctaggaactggcttcctggaccctgttaccgtcagcagcgagtatcaaagacatctgcggataacaacaacagtgaatactcgtggactggagctaccaagtaccacctcaatggcagagactctctggtgaatccgggcccggccatggccagccacaaagacgatgaagaaaagttttttcctcagagcggggttcttatctttgggaagcaaggctcagagaaaacaaatgtggatattgaaaaggtcatgattacagacgaagaggaaatcaggaccaccaatcccgtggctacggagcagtatggttctgtatctaccaacctccagagcggcaacacacaagcagctaccgcagatgtcaacacacaaggcgttcttccaggcatggtcgggcaagacagagacgtgtacctgcaggggcctacttgggcaaagattccacacacggacggacattttcacccctctcccctcatgggcggatttggacttaaacaccctcctccacagattctcatcaagaacaccccggtacctgcgaatccttcgaccaccttcagtgcggcaaagtttgcttccttcattacacagtactccacggggcaggtcagcgtggagatcgagtgggagctgcagaaggagaacagcaaacgctggaatcccgagatccagtacacttccaactacaacaagtctgttaatgtggactttactgtggacactaatggcgtgtattcagagcctcgccccattggcaccagatacctgactcgtaatctgtaa

SEQ ID NO: 4884 - protein, 735 aa, Adeno-associated virus
MAADGYLPDWLEDTLSEGIRQWWKLKPGPPPPKPAERHKDDSRGLVLPGYKYLGPFNGLDKGEPVNEADAAALEHDKAYDRQLDSGDNPYLKYNHADAEFQERLKEDTSFGGNLGRAVFQAKKRVLEPLSLVEEPVKTAPGKKRPVEHSPAEPDSSSGTGKSGNQPARKRLNFGQTGDSDSVPDPQPLGQPPAAPSGLGTNTMATGSGAPMADNNEGADGVGNSSGNWHCDSTWMGDRVITTSTRTWALPTYNNHLYKQISSQSGASNDNHYFGYSTPWGYFDFNRFHCHFSPRDWQRLINNNWGFRPKRLNFKLFNIQVKEVTQNDGTTTIANNLTSTVQVFTDSEYQLPYVLGSAHQGCLPPFPADVFMVPQYGYLTLNNGSQAVGRSSFYCLEYFPSQMLRTGNNFTFSYTFEDVPFHSSYAHSQSLDRLMNPLIDQYLYYLSRTNTPSGTTTQSRLQFSQAGASDIQDQSRNWLPGPCYRQQRVSKTSADNNNSEYSWTGATKYHLNGRDSLVNPGPAMASHKDDEEKFFPQSGVLIFGKQGSEKTNVDIEKVMITDEEEIRTTNPVATEQYGSVSTNLQSGNTQAATADVNTQGVLPGMVGQDRDVYLQGPTWAKIPHTDGHFHPSPLMGGFGLKHPPPQILIKNTPVPANPSTTFSAAKFASFITQYSTGQVSVEIEWELQKENSKRWNPEIQYTSNYNKSVNVDFTVDTNGVYSEPRPIGTRYLTRNL

SEQ ID NO: 4885 - DNA, 2208 bp, Adeno-associated virus
  source 1..2208: mol_type = genomic DNA
atggctgccgatggttatcttccagattggctcgaggacactctctctgaaggaataagacagtggtggaagctcaaacctggcccaccaccaccaaagcccgcagagcggcataaggacgacagcaggggtcttgtgcttcctgggtacaagtacctcggacccttcaacggactcgacaagggagagccggtcaacgaggcagacgccgcggccctcgagcacgacaaggcctacgaccggcagctcgacagcggagacaacccgtacctcaagtacaaccacgccgacgcagagtttcaggagcgccttaaagaagatacgtcttttgggggcaacctcggacgagcagtcttccaggcaaaaaagagggttctggaacctctgggcctggttgaggagcctgttaagacggctccgggaaaaaagaggccggtagagcactctcctgcagagccagattcctcctccggaactggaaagtcgggcaaccagcctgcaagaaagagattgaatttcggtcagactggagactcagactccgtacctgacccccagcctctcggacagccaccagcagccccctctggtctgggaactaatacgatggctacaggcagtggcgcaccaatggcagacaataacgagggcgccgacggagtgggtaattcctcgggaaattggcattgcgattccacatggatgggcgacagagtcatcaccaccagcacccgaacctgggccctgcccacctacaacaaccatctgtacaagcaaatatccagccagtctggagccagcaacgacaatcactactttggctacagcaccccctgggggtattttgacttcaacagattccactgccacttttcaccacgtgactggcaaagactcatcaacaacaactggggattccgacccaagagactcaacttcaagctctttaacattcaagtcaaagaggtcacgcagaatgacggtacgacgacgattgccaataaccttaccagcacggttcaggtgtttactgactcggagtaccagctcccgtacgtcctcggctcggcgcatcaaggatgcctcccgccgttcccagcagacgtcttcatggtgccacagtatggatacctcaccctgaacaacgggagtcaggcagtaggacgctcttcattttactgcctagggtactttccttctcagatgctgcgtaccggaaacaactttaccttcagctacacctttgaggacgttcctttccacagcagctacgctcacagccagagtttggaccgtctcatgaatcctctcatcgaccagtacctgtattacttgagcagaacaaacactccaagcggaaccaccacgcagtccaggcttcagttttctcaggccggagcgagtgacattcgggaccagtctaggaactggcttcctggaccctgttaccgtcagcagcgagtatcaaagacatctgcggataacaacaacagtgaatactcgtggactggagctaccaagtaccacctcaatggcagagactctctggtgaatccgggcccggccatggccagccacaaagacgatgaagaaaagttttttcctcagagcggggttcttatctttgggaagcaaggcccagagaaaacaaatgtggatattgaaaaggtcatgattacagacgaagaggaaatcaggaccaccaatcccgtggctacggagcagtatggttctgtatctaccaacctccagagcggcaacacacaagcagctaccgcagatgtcaacacacaaggcgttcttccaggcatggtctggcaagacagagacgtgtacctgcaggggcctatttgggcaaagattccacacacggacggacattttcacccctctcccctcatgggcggatttggacttaaacaccctcctccacagattctcatcaagaacaccccggtacctgcgaatccttcgaccaccttcagtgcggcaaagtttgcttccttcattacacagtactccacggggcaggtcagcgtggagatcgagtgggagctgcagaaggagaacagcaaacgctggaatcccgagatccagtacacttccaactacaacaagtctgttaatgtggactttactgtggacactaatggcgtgtattcagagcctcgccccattggcaccagatacctgactcgtaatctgtaa

SEQ ID NO: 4886 - protein, 735 aa, Adeno-associated virus
MAADGYLPDWLEDTLSEGIRQWWKLKPGPPPPKPAERHKDDSRGLVLPGYKYLGPFNGLDKGEPVNEADAAALEHDKAYDRQLDSGDNPYLKYNHADAEFQERLKEDTSFGGNLGRAVFQAKKRVLEPLGLVEEPVKTAPGKKRPVEHSPAEPDSSSGTGKSGNQPARKRLNFGQTGDSDSVPDPQPLGQPPAAPSGLGTNTMATGSGAPMADNNEGADGVGNSSGNWHCDSTWMGDRVITTSTRTWALPTYNNHLYKQISSQSGASNDNHYFGYSTPWGYFDFNRFHCHFSPRDWQRLINNNWGFRPKRLNFKLFNIQVKEVTQNDGTTTIANNLTSTVQVFTDSEYQLPYVLGSAHQGCLPPFPADVFMVPQYGYLTLNNGSQAVGRSSFYCLGYFPSQMLRTGNNFTFSYTFEDVPFHSSYAHSQSLDRLMNPLIDQYLYYLSRTNTPSGTTTQSRLQFSQAGASDIRDQSRNWLPGPCYRQQRVSKTSADNNNSEYSWTGATKYHLNGRDSLVNPGPAMASHKDDEEKFFPQSGVLIFGKQGPEKTNVDIEKVMITDEEEIRTTNPVATEQYGSVSTNLQSGNTQAATADVNTQGVLPGMVWQDRDVYLQGPIWAKIPHTDGHFHPSPLMGGFGLKHPPPQILIKNTPVPANPSTTFSAAKFASFITQYSTGQVSVEIEWELQKENSKRWNPEIQYTSNYNKSVNVDFTVDTNGVYSEPRPIGTRYLTRNL

SEQ ID NO: 4887 - protein, 735 aa, Adeno-associated virus
MAADGYLPDWLEDTLSEGIRQWWKLKPGPPPPKPAERHKDDSRGLVLPGYKYLGPFNGLDKGEPVNEADAAALEHDKAYDRQLDSGDNPYLKYNHADAEFQERLKEDTSFGGNLGRAVFQAKKRVLEPLGLVEEPVKTAPGKKRPVEHSPAEPDSSSGTGKSGNQPARKRLNFGQTGDSDSVPDPQPLGQPPAAPSGLGTNTMATGSGAPMADNNEGADGVGNSSGNWHCDSTWMGDRVITTSTRTWALPTYNNHLYKQISSQSGASNDNHYFGYSTPWGYFDFNRFHCHFSPRDWQRLINNNWGFRPKRLNFKLFNIQVKEVTQNDGTTTIANNLTSTVQVFTDSEYQLPYVLGSAHQGCLPPFPADVFMVPQYGYLTLNNGSQAVGRSSFYCLEYFPSQMLRTGNNFTFSYTFEDVPFHSSYAHSQSLDRLMNPLIDQYLYYLSRTNTPSGTTTQSRLQFSQAGASDIRDQSRNWLPGPCYRQQRVSKTSADNNNSEYSWTGATKYHLNGRDSLVNPGPAMASHKDDEEKFFPQSGVLIFGKQGPEKTNVDIEKVMITDEEEIRTTNPVATEQYGSVSTNLQSGNTQAATADVNTQGVLPGMVWQDRDVYLQGPIWAKIPHTDGHFHPSPLMGGFGLKHPPPQILIKNTPVPANPSTTFSAAKFASFITQYSTGQVSVEIEWELQKENSKRWNPEIQYTSNYNKSVNVDFTVDTNGVYSEPRPIGTRYLTRNL

SEQ ID NO: 4888 - protein, 735 aa, Adeno-associated virus; identical to SEQ ID NO: 4887

SEQ ID NO: 4889 - DNA, 2211 bp, Adeno-associated virus
  source 1..2211: mol_type = genomic DNA
atggctgccgatggttatcttccagattggctcgaggacactctctctgaaggaataagacagtggtggaagctcaaacctggcccaccaccaccaaagcccgcagagcggcataaggacgacagcaggggtcttgtgcttcctgggtacaagtacctcggacccttcaacggactcgacaagggggagccggtcaacgaggcagacgccgcggccctcgagcacgacaaggcctacgaccggcagctcgacagcggagacaacccgtacctcaagtacaaccacgccgacgcagagtttcaggagcgccttaaagaagatacgtcttttgggggcaacctcggacgagcagtcttccaggcgaaaaagagggttcttgaacctctgcggcctggtttgaggaaacctgttaagacggctccgggaaaaaagaggccggtagagcactctcctgtggagccagactcctcctcgggaaccggaaaagcgggccagcagcctgcaagaaaaagattaaattttggtcagactggagacgcagactccgtacctgacccccagcctctcggacagccaccagcagccccctctggtctgggatctactacaatggctacaggcagtggcgcaccaatggcagacaataacgagggtgccgatggagtgggtaattcctcaggaaattggcattgcgattcccaatggctggacgacagagtcatcgccaccagcacccgaacctgggccctgcccacatacaacaaccacctctacaagcaaatctccagccaatcaggagcctgcaacgacaaccactactttggctacagcaccccctgggggtattttgacttcaacagattccactgccacttttcaccacgtgactggcaaagactcatcaacagcaactggggattccggcccaaaagactcaacttcaagctctttaatattcaagtcaaagaggtcacgcagaatgacggtacgacgacgattgccaataaccttaccagcacggttcaggtgtttactgactcggagtaccagctcccgtacgtcccgggctcggcgcatcaaggatgcctcccgccgtttccagcggacgtcttcatggtcccacagtatggatacctcaccctgaacaacgggagtcaggcggtaggacgctcttccttttactgcctggagtactttccttctcagatgctgcgtactggaaacaactttcagttcagctacacttttgaagacgtgcctttccacagcagctacgctcactgccagagtctggatcggctgatgaatcctctgatcgaccagtacctgtattatctgaacaagacacaaacaaatagtggaactcttcagcagtctcggctactgtttagccaagctggaccaaccaacatgtctcttcaagctaaaaactggctgcctggaccttgctacagacagcagcgtctgtcaaaacaggcaaacgacaataacaactgcaactttccctggactgcagctacaaagtatcatctaaatggccgggactcgttggttaatccaggaccagctatggccagtcacaaggatgacgaagaaaagtttttccccatgcatggaaccctgatatttggtaaacaaggaacaaatgccaacgacgcggatttggaaaatgtcatgattacagatgaagaagaaatcaggcccaccaatcccgtggctacggagcagtacgggactgtgtcaaataatttgcaaaactcaaacactggtccaactacaggaactgtcaatcaccaaggagcgttacctggtatggtgtggcaggatcgagacgtgtacctgcagggacccatttgggccaagattcctcacaccgatggacactttcatccttctccactgatgggaggttttggactcaaacacccgcctcctcagatcatgatcaaaagcactcccgttccagccaatcctcccacaaacttcagttctgccaagtttgcttcttccatcacacagtattccacgggacaggtcagcgtggagatcgagtgggagctgcagaaggagaacagcaaacgctggaatcccgaaattcagtacacttccaactacaacaagtctgttaatgtggactttactgtggacactaatggtgtgtattcagagcctcgccccattggcaccagatacctgactcgtaatctgtaa

SEQ ID NO: 4890 - protein, 736 aa, Adeno-associated virus
MAADGYLPDWLEDTLSEGIRQWWKLKPGPPPPKPAERHKDDSRGLVLPGYKYLGPFNGLDKGEPVNEADAAALEHDKAYDRQLDSGDNPYLKYNHADAEFQERLKEDTSFGGNLGRAVFQAKKRVLEPLRPGLRKPVKTAPGKKRPVEHSPVEPDSSSGTGKAGQQPARKRLNFGQTGDADSVPDPQPLGQPPAAPSGLGSTTMATGSGAPMADNNEGADGVGNSSGNWHCDSQWLDDRVIATSTRTWALPTYNNHLYKQISSQSGACNDNHYFGYSTPWGYFDFNRFHCHFSPRDWQRLINSNWGFRPKRLNFKLFNIQVKEVTQNDGTTTIANNLTSTVQVFTDSEYQLPYVPGSAHQGCLPPFPADVFMVPQYGYLTLNNGSQAVGRSSFYCLEYFPSQMLRTGNNFQFSYTFEDVPFHSSYAHCQSLDRLMNPLIDQYLYYLNKTQTNSGTLQQSRLLFSQAGPTNMSLQAKNWLPGPCYRQQRLSKQANDNNNCNFPWTAATKYHLNGRDSLVNPGPAMASHKDDEEKFFPMHGTLIFGKQGTNANDADLENVMITDEEEIRPTNPVATEQYGTVSNNLQNSNTGPTTGTVNHQGALPGMVWQDRDVYLQGPIWAKIPHTDGHFHPSPLMGGFGLKHPPPQIMIKSTPVPANPPTNFSSAKFASSITQYSTGQVSVEIEWELQKENSKRWNPEIQYTSNYNKSVNVDFTVDTNGVYSEPRPIGTRYLTRNL

SEQ ID NO: 4891 - DNA, 2208 bp, Adeno-associated virus
  source 1..2208: mol_type = genomic DNA
atggctgccgatggttatcttccagattggctcgaggacactctctctgaaggaataagacagtggtggaagctcaaacctggcccaccaccaccaaagcccgcagagcggcataaggacgacagcaggggtcttgtgcttcctgggtacaagtacctcggacccttcaacggactcgacaagggagagccggtcaacgaggcagacgccgcggccctcgagcacgacaaggcctacgaccggcagctcgacagcggagacaacccgtacctcaagtacaaccacgccgacgcggagtttcaggagcgccttaaagaggatacgtcttttgggggcaacctcggacgagcagtcttccaggcaaaaaagagggttctggaacctctgggcctggttgaggagcctgttaagacggctccgggaaaaaagaggccggtagagcactctcctgcagagccagattcctcctccggaactggaaagtcgggcaaccagcctgcaagaaagagattgaatttcggtcagactggagactcagactccgtacctgacccccagcctctcggacagccaccagcagccccctctggtctgggaactaatacgatggctacaggcagtggcgcaccaatggcagacaataacgagggcgccgacggagtgggtaattcctcgggaaattggcattgcgattccacatggatgggcgacagagtcatcaccaccagcacccgaacctgggccctgcccacctacaacaaccatctgtacaagcaaatatccagccagtctggagccagcaacgacaatcactactttggctacagcaccccctgggggtattttgacttcaacagattccactgccacttttcaccacgtgactggcaaagactcatcaacaacaactggggattccgacccaagagactcaacttcaagctctttaacattcaagtcaaagaggtcacgcagaatgacggtacgacgacgattgccaataaccttaccagcacggttcaggtgtttactgactcggagtaccagctcccgtacgtcctcggctcggcgcatcaaggatgcctcccgccgttcccagcagacgtcttcatggtgccacagtatggatacctcaccctgaacaacgggagtcaggcagtaggacgctcttcattttactgcctagagtactttccttctcagatgctgcgtaccggaaacagctttaccttcagctacacctttgaggacgttcctttccacagcagctacgctcacagccagagtttggaccgtctcatgaatcctctcatcgaccagtacctgtattacttgagcagaacaaacactccaagcggaaccaccacgcagtccaggcttcagttttctcaggccggagcgagtgacattcgggaccagtctaggaactggcttcctggaccctgttaccgtcagcagcgagtatcaaagacatctgcggataacaacaacagtgaatactcgtggactggagctaccaagtaccacctcaatggcagagactctctggtgaatccgggcccggccatggccagccacaaagacgatgaagaaaagttctttcctcagagcggggttcttatctttgggaagcaaggctcagagaaaacaaatgtggatattgaaaaggtcatgattacagacgaagaggaaatcaggaccaccaatcccgtggctacggagcagtatggttctgtatctaccaacctccagagcggcaacacacaagcagctaccgcagatgtcaacacacaaggcgttcttccaggcatggtctggcaagacagagacgtgtacctgcaggggcctatttgggcaaagattccacacacggacggacattttcacccctctcccctcatgggcggatttggacttaaacaccctcctccacagattctcatcaagaacaccccggtacctgcgaatccttcgaccaccttcagtgcggcaaagtttgcttccttcattacacagtactccacggggcaggtcagcgtggagatcgagtgggagctgcagaaggagaacagcaaacgctggaatcccgagatccagtacacttccaactacaacaagtctgttaatgtggactttactgtggacactaatggcgtgtattcagagcctcgccccattggcaccagatacctgactcgtaatctgtaa

SEQ ID NO: 4892 - protein, 735 aa, Adeno-associated virus
MAADGYLPDWLEDTLSEGIRQWWKLKPGPPPPKPAERHKDDSRGLVLPGYKYLGPFNGLDKGEPVNEADAAALEHDKAYDRQLDSGDNPYLKYNHADAEFQERLKEDTSFGGNLGRAVFQAKKRVLEPLGLVEEPVKTAPGKKRPVEHSPAEPDSSSGTGKSGNQPARKRLNFGQTGDSDSVPDPQPLGQPPAAPSGLGTNTMATGSGAPMADNNEGADGVGNSSGNWHCDSTWMGDRVITTSTRTWALPTYNNHLYKQISSQSGASNDNHYFGYSTPWGYFDFNRFHCHFSPRDWQRLINNNWGFRPKRLNFKLFNIQVKEVTQNDGTTTIANNLTSTVQVFTDSEYQLPYVLGSAHQGCLPPFPADVFMVPQYGYLTLNNGSQAVGRSSFYCLEYFPSQMLRTGNSFTFSYTFEDVPFHSSYAHSQSLDRLMNPLIDQYLYYLSRTNTPSGTTTQSRLQFSQAGASDIRDQSRNWLPGPCYRQQRVSKTSADNNNSEYSWTGATKYHLNGRDSLVNPGPAMASHKDDEEKFFPQSGVLIFGKQGSEKTNVDIEKVMITDEEEIRTTNPVATEQYGSVSTNLQSGNTQAATADVNTQGVLPGMVWQDRDVYLQGPIWAKIPHTDGHFHPSPLMGGFGLKHPPPQILIKNTPVPANPSTTFSAAKFASFITQYSTGQVSVEIEWELQKENSKRWNPEIQYTSNYNKSVNVDFTVDTNGVYSEPRPIGTRYLTRNL

SEQ ID NO: 4893 - DNA, 2211 bp, Adeno-associated virus; identical to SEQ ID NO: 4804
  source 1..2211: mol_type = genomic DNA

SEQ ID NO: 4894 - protein, 736 aa, Adeno-associated virus
MAADGYLPDWLEDTLSEGIRQWWKLKPGPPPPKPAERHKDDSRGLVLPGYKYLGPGNGLDKGEPVNAADAAALEHDKAYDQQLKAGDNPYLKYNHADAEFQERLKEDTSFGGNLGRAVFQAKKRLLEPLGLVEEAAKTAPGKKRPVEQSPQEPDSSAGIGKSGSQPAKKKLNFGQTGDTESVPDPQPIGEPPAAPSGVGSLTMASGGGAPVADNNEGADGVGSSSGNWHCDSQWLGDRVITTSTRTWALPTYNNHLYKQISNSTSGGSSNDNAYFGYSTPWGYFDFNRFHCHFSPRDWQRLINNNWGFRPKRLNFKLFNIQVKEVTDNNGVKTIANNLTSTVQVFTDSDYQLPYVLGSAHEGCLPPFPADVFMIPQYGYLTLNDGGQAVGRSSFYCLEYFPSQMLRTGNNFQFSYEFENVPFHSSYAHSQSLDRLMNPLIDQYLYYLSKTINGSGQNQQTLKFSVAGPSNMAVQGRNYIPGPSYRQQRVSTTVTQNNNSEFAWPGASSWALNGRNSLMNPGPAMASHKEGEDRFFPLSGSLIFGKQGTGRDNVDADKVMITNEEEIKTTNPVATESYGQVATNHQSAQAQAQTGWVQNQGILPGMVWQDRDVYLQGPIWAKIPHTDGNFHPSPLMGGFGMKHPPPQILIKNTPVPADPPTAFNKDKLNSFITQYSTGQVSVEIEWELQKENSKRWNPEIQYTSNYYKSNNVEFAVSTEGVYSEPRPIGTRYLTRNL

SEQ ID NO: 4895 - DNA, 2211 bp, Adeno-associated virus
  source 1..2211: mol_type = genomic DNA
atggctgccgatggttatcttccagattggctcgaggacactctctctgaaggaataagacagtggtggaagctcaaacctggcccaccaccaccaaagcccgcagagcggcataaggacgacagcaggggtcttgtgcttcctgggtacaagtacctcggacccggcaacggactcgacaagggggagccggtcaacgcagcagacgcggcggccctcgagcacgacaaggcctacgaccagcagctcaaggccggagacaacccgtacctcaagtacaaccacgccgacgccgagttccaggagcggctcaaagaagatacgtcttttgggggcaacctcgggcgagcagtcttccaggccaaaaagaggcttcttgaacctcttggtctggttgaggaagcggctaagacggctcctggaaagaagaggcctgtagagcagtctcctcaggaaccggactcctccgcgggtattggcaaatcgggttcacagcccgctaaaaagaaactcaatttcggtcagactggcgacacagagtcagtccccgaccctcaaccaatcggagaacctcccgcagccccctcaggtgtgggatctcttacaatggcttcaggtggtggcgcaccagtggcagacaataacgaaggtgccgatggagtgggtagttcctcgggaaattggcattgcgattcccaatggctgggggacagagtcatcaccaccagcacccgaacctgggccctgcccacctacaacaatcacctctacaagcaaatctccaacagcacatctggaggatcttcaaatgacaacgcctacttcggctacagcaccccctgggggtattttgacttcaacagattccactgccacttctcaccacgtgactggcagcgactcatcaacaacaactggggattccggcctaagcgactcaacttcaagctcttcaacattcaggtcaaagaggttacggacaacaatggagtcaagaccatcgccaataaccttaccagcacggtccaggtcttcacggactcagactatcagctcccgtacgtgctcgggtcggctcacgagggctgcctcccgccgttcccagcggacgttttcatgattcctcagtacgggtatctgacgcttaatgatgggagccaggccgtgggtcgttcgtccttttactgcctggaatatttcccgtcgcaaatgctaagaacgggtaacaacttccagttcagctacgagtttgagaacgtacctttccatagcagctacgctcacagccaaagcctggaccgactaatgaatccactcatcgaccaatacttgtactatctctcaaagactattaacggttctggacagaatcaacaaacgctaaaattcagcgtggccggacccagcaacatggctgtccagggaagaaactacatacctggacccagctaccgacaacaacgtgtctcaaccactgtgactcaaaacaacaacagcgaatttgcttggcctggagcttcttcttgggctctcaatggacgtaatagcttgatgaatcctggacctgctatggccagccacaaagaaggagaggaccgtttctttcctttgtctggatctttaatttttggcaaacaaggaactggaagagacaacgtggatgcggacaaagtcatgataaccaacgaagaagaaattaaaactactaacccggtagcaacggagtcctatggacaagtggccacaaaccaccagagtgcccaagcacaggcgcagaccggctgggttcaaaaccaaggaatacttccgggtatggtttggcaggacagagatgtgtacctgcaaggacccatttgggccaaaattcctcacacggacggcaactttcacccttctccgctaatgggagggtttggaatgaagcacccgcctcctcagatcctcatcaaaaacacacctgtacctgcggatcctccaacggctttcaataaggacaagctgaactctttcatcacccagtattctactggccaagtcagcgtggagattgagtgggagctgcagaaggaaaacagcaagcgctggaacccggagatccagtacacttccaactattacaagtctaataatgttgaatttgctgttaatactgaaggtgtatatagtgaaccccgccccattggcaccagatacctgactcgtaatctgtaa

SEQ ID NO: 4896 - protein, 736 aa, Adeno-associated virus
MAADGYLPDWLEDTLSEGIRQWWKLKPGPPPPKPAERHKDDSRGLVLPGYKYLGPGNGLDKGEPVNAADAAALEHDKAYDQQLKAGDNPYLKYNHADAEFQERLKEDTSFGGNLGRAVFQAKKRLLEPLGLVEEAAKTAPGKKRPVEQSPQEPDSSAGIGKSGSQPAKKKLNFGQTGDTESVPDPQPIGEPPAAPSGVGSLTMASGGGAPVADNNEGADGVGSSSGNWHCDSQWLGDRVITTSTRTWALPTYNNHLYKQISNSTSGGSSNDNAYFGYSTPWGYFDFNRFHCHFSPRDWQRLINNNWGFRPKRLNFKLFNIQVKEVTDNNGVKTIANNLTSTVQVFTDSDYQLPYVLGSAHEGCLPPFPADVFMIPQYGYLTLNDGSQAVGRSSFYCLEYFPSQMLRTGNNFQFSYEFENVPFHSSYAHSQSLDRLMNPLIDQYLYYLSKTINGSGQNQQTLKFSVAGPSNMAVQGRNYIPGPSYRQQRVSTTVTQNNNSEFAWPGASSWALNGRNSLMNPGPAMASHKEGEDRFFPLSGSLIFGKQGTGRDNVDADKVMITNEEEIKTTNPVATESYGQVATNHQSAQAQAQTGWVQNQGILPGMVWQDRDVYLQGPIWAKIPHTDGNFHPSPLMGGFGMKHPPPQILIKNTPVPADPPTAFNKDKLNSFITQYSTGQVSVEIEWELQKENSKRWNPEIQYTSNYYKSNNVEFAVNTEGVYSEPRPIGTRYLTRNL

SEQ ID NO: 4897 - DNA, 2208 bp, Adeno-associated virus
  source 1..2208: mol_type = genomic DNA
atggctgccgatggttatcttccagattggctcgaggacactctctctgaaggaataagacagcggtggaagctcaaacctggcccaccaccaccagagcccgcagagcggcataaggacgacagcaggggtcttgtgcttcctgggtacaagtacctcggacccttcaacggactcgacaagggagagccggtcaacgaggcagacgccgcggccctcgagcacgacaaagcctacgaccggcagctcgacagcggagacaacccgtacctcaagtacaaccacgccgacgcggagtttcaggagcgccttaaagaagatacgtcttttgggggcaacctcggacgagcagtcttccaggcgaaaaagagggtacttgaacctctgggcctggttgaggaacctgttaagacggctccgggaaaaaagaggccggtagagcactctcctgtggagccagactcctcctcgggaaccggaaaggcgggccagcagcctgcaagaaaaagattgaattttggtcagactggagacgcagactcagtacctgacccccagcctctcggacagccaccagcagccccctctggtctgggaactaatacgatggctacaggcagtggcgcaccaatggcagacaataacgagggcgccgacggagtgggtaattcctcgggaaattggcattgcgattccacatggatgggcgacagagtcatcaccaccagcacccgaacctgggccctgcccacctacaacaaccacctctacaaacaaatttccagccaatcaggagcctcgaacgacaatcactactttggctacagcaccccttgggggtattttgacttcaacagattccactgccacttttcaccacgtgactggcaaagactcatcaacaacaactggggattccgacccaagagactcaacttcaagctctttaacattcaagtcaaagaggtcacgcagaatgacggtacgacgacgattgccaataaccttaccggcacggttcaggtgtttactgactcggagtaccagctcccgtacgtcctcggctcggcgcatcaaggatgcctcccgccgttcccagcagacgtcttcatggtgccacagtatggatacctcaccctgaacaacgggagtcaggcagtaggacgctcttcattttactgcctggagtactttccttctcagatgctgcgtaccggaaacaactttaccttcagctacacttttgaggacgttcctttccacagcagctacgctcacagccagagtctgggccgtctcatgaatcctctcatcgaccagtacctgtattacttgagcagaacaaacactccaagtggaaccaccacgcagtcaaggcttcagttttctcaggccggagcgagtgacattcgggaccagtctaggaactggcttcctggaccctgttaccgccagcagcgagtatcaaagacatctgcggataacaacaacagtgaatactcgtggactggagctaccaagtaccacctcaatggcagagactctctggtgaatccgggcccggccatggcaagccacaaggacgatgaagaaaagttttttcctcagagcggggttctcatctttgggaagcaaggctcagagaaaacaaatgtggacattgaaaaggtcatgattacagacgaagaggaaatcaggacaaccaatcccgtggctacggagcagtatggttctgtatctaccaacctccagagaggcaacagacaagcagctaccgcagatgtcaacacacaaggcgttcttccaggcatggtctggcaggacagagatgtgtaccttcaggggcccatctgggcaaagattccacacacggacggacattttcacccctctcccctcatgggtggattcggacttaaacaccctcctccacagattctcatcaagaacaccccggtacctgcgaatccttcgaccaccttcagtgcggcaaagtttgcttccttcatcacacagtactccacgggacaggtcagcgtggagatcgagtgggagctgcagaaggaaaacagcaaacgctggaatcccgaaattcagtacacttccaactacaacaagtctgttaatgtggactttactgtggacactaatggcgtgtattcagagcctcgccccattggcaccagatacctgactcgtaatctgtaa

SEQ ID NO: 4898 - protein, 735 aa, Adeno-associated virus
MAADGYLPDWLEDTLSEGIRQRWKLKPGPPPPEPAERHKDDSRGLVLPGYKYLGPFNGLDKGEPVNEADAAALEHDKAYDRQLDSGDNPYLKYNHADAEFQERLKEDTSFGGNLGRAVFQAKKRVLEPLGLVEEPVKTAPGKKRPVEHSPVEPDSSSGTGKAGQQPARKRLNFGQTGDADSVPDPQPLGQPPAAPSGLGTNTMATGSGAPMADNNEGADGVGNSSGNWHCDSTWMGDRVITTSTRTWALPTYNNHLYKQISSQSGASNDNHYFGYSTPWGYFDFNRFHCHFSPRDWQRLINNNWGFRPKRLNFKLFNIQVKEVTQNDGTTTIANNLTGTVQVFTDSEYQLPYVLGSAHQGCLPPFPADVFMVPQYGYLTLNNGSQAVGRSSFYCLEYFPSQMLRTGNNFTFSYTFEDVPFHSSYAHSQSLGRLMNPLIDQYLYYLSRTNTPSGTTTQSRLQFSQAGASDIRDQSRNWLPGPCYRQQRVSKTSADNNNSEYSWTGATKYHLNGRDSLVNPGPAMASHKDDEEKFFPQSGVLIFGKQGSEKTNVDIEKVMITDEEEIRTTNPVATEQYGSVSTNLQRGNRQAATADVNTQGVLPGMVWQDRDVYLQGPIWAKIPHTDGHFHPSPLMGGFGLKHPPPQILIKNTPVPANPSTTFSAAKFASFITQYSTGQVSVEIEWELQKENSKRWNPEIQYTSNYNKSVNVDFTVDTNGVYSEPRPIGTRYLTRNL

SEQ ID NO: 4899 - DNA, 2208 bp, Adeno-associated virus
  source 1..2208: mol_type = genomic DNA
atggctgccgatggttatcttccagattggctcgaggacactctctctgaaggaataagacagcggtggaagctcaaacctggcccaccaccaccagagcccgcagagcggcataaggacgacagcaggggtcttgtgcttcctgggtacaagtacctcggacccttcaacggactcgacaagggagagccggtcaacgaggcagacgccgcggccctcgagcacgacaaagcctacgaccggcagctcgacagcggagacaacccgtacctcaagtacaaccacgccgacgcggagtttcaggagcgccttaaagaagatacgtcctttgggggcaacctcggacgagcagtcttccaggcgaaaaagagggtacttgaacctctgggcctggttgaggaacctgttaagacggctccgggaaaaaagaggccggtagagcactctcctgtggagccagactcctcctcgggaaccggaaaggcgggccagcagcctgcaagaaaaagattgaattttggtcagactggagacgcagactcagtacctgacccccagcctctcggacagccaccagcagccccctctggtctgggaactaatacgatggctacaggcagtggcgcaccaatggcagacaataacgagggcgccgacggagtgggtaattcctcgggaaattggcattgcgattccacatggatgggcgacagagtcatcaccaccagcacccgaacctgggccctgcccacctacaacaaccacctctacaaacaaatttccagccaatcaggagcctcgaacgacaatcactactttggctacagcaccccttgggggtattttgacttcaacagattccactgccacttttcaccacgtgactggcaaagactcatcaacaacaactggggattccgacccaagagactcaacttcaagctctttaacattcaagtcaaagaggtcacgcagaatgacggtacgacgacgattgccaataaccttaccagcacggttcaggtgtttactgactcggagtaccagctcccgtacgtcctcggctcggcgcatcaaggatgcctcccgccgttcccagcagacgtcttcatggtgccacagtatggatacctcaccctgaacaacgagagtcaggcagtaggacgctcttcattttactgcctggagtactttccttctcagatgctgcgtaccggaaacaactttaccttcagctacacttttgaggacgttcctttccacagcagctacgctcacagccagagtctgggccgtctcatgaatcctctcatcgaccagtacctgtattacttgagcagaacaaacactccaagtggaaccaccacgcagtcaaggcttcagttttctcaggccggagcgagtgacattcgggaccagtctaggaactggcttcctggaccctgttaccgccagcagcgagtatcaaagacatctgcggataacaacaacagtgaatactcgtggactggagctaccaagtaccacctcaatggcagagactctctggtgaatccgggcccggccatggcaagccacaaggacgatgaagaaaagttttttcctcagagcggggttctcatctttgggaagcaaggctcagagaaaacaaatgtggacattgaaaaggtcatgattacagacgaagaggaaatcaggacaaccaatcccgtggctacggagcagtatggttctgtatctaccaacctccagagaggcaacagacaagcagctaccgcagatgtcaacacacaaggcgttcttccaggcatggtctggcaggacagagatgtgtaccttcaggggcccatctgggcaaagattccacacacggacggacattttcacccctctcccctcatgggtggattcggacttaaacaccctcctccacagattctcatcaagaacaccccggtacctgcgaatccttcgaccaccttcagtgcggcaaagtttgcttccttcatcacacagtactccacgggacaggtcagcgtggagatcgagtgggagctgcagaaggaaaacagcaaacgctggaatcccgaaattcagtacacttccaactacaacaagtctgttaatgtggactttactgtggacactaatggcgtgtattcagagcctcgccccattggcaccagatacctgactcgtaatctgtaa

SEQ ID NO: 4900 - protein, 735 aa, Adeno-associated virus
MAADGYLPDWLEDTLSEGIRQRWKLKPGPPPPEPAERHKDDSRGLVLPGYKYLGPFNGLDKGEPVNEADAAALEHDKAYDRQLDSGDNPYLKYNHADAEFQERLKEDTSFGGNLGRAVFQAKKRVLEPLGLVEEPVKTAPGKKRPVEHSPVEPDSSSGTGKAGQQPARKRLNFGQTGDADSVPDPQPLGQPPAAPSGLGTNTMATGSGAPMADNNEGADGVGNSSGNWHCDSTWMGDRVITTSTRTWALPTYNNHLYKQISSQSGASNDNHYFGYSTPWGYFDFNRFHCHFSPRDWQRLINNNWGFRPKRLNFKLFNIQVKEVTQNDGTTTIANNLTSTVQVFTDSEYQLPYVLGSAHQGCLPPFPADVFMVPQYGYLTLNNESQAVGRSSFYCLEYFPSQMLRTGNNFTFSYTFEDVPFHSSYAHSQSLGRLMNPLIDQYLYYLSRTNTPSGTTTQSRLQFSQAGASDIRDQSRNWLPGPCYRQQRVSKTSADNNNSEYSWTGATKYHLNGRDSLVNPGPAMASHKDDEEKFFPQSGVLIFGKQGSEKTNVDIEKVMITDEEEIRTTNPVATEQYGSVSTNLQRGNRQAATADVNTQGVLPGMVWQDRDVYLQGPIWAKIPHTDGHFHPSPLMGGFGLKHPPPQILIKNTPVPANPSTTFSAAKFASFITQYSTGQVSVEIEWELQKENSKRWNPEIQYTSNYNKSVNVDFTVDTNGVYSEPRPIGTRYLTRNL

SEQ ID NO: 4901 - DNA, 2208 bp, Adeno-associated virus
  source 1..2208: mol_type = genomic DNA
atggctgccgatggttatcttccagattggctcgaggacactctctctgaaggaataagacagcggtggaagctcaaacctggcccaccaccaccagagcccgcagagcggcataaggacgacagcaggggtcttgtgcttcctgggtacaagtacctcggacccttcaacggactcgacaagggagagccggtcaacgaggcagacgccgcggccctcgagcacgacaaagcctacgaccggcagctcgacagcggagacaacccgtacctcaagtacaaccacgccgacgcggagtttcaggagcgccttaaagaagatacgtcttttgggggcaacctcggacgagcagtcttccaggcgaaaaagagggtacttgaacctctgggcctggttgaggaacctgttaagacggctccgggaaaaaagaggccggtagagcactctcctgtggagccagactcctcctcgggaaccggaaaggcgggccagcagcctgcaagaaaaagattgaattttggtcagactggagacgcagactcagtacctgacccccagcctctcggacagccaccagcagccccctctggtctgggaactaatacgatggctacaggcagtggcgcaccaatggcagacaataacgagggcgccgacggagtgggtaattcctcgggaaattggcattgcgattccacatggatgggcgacagagtcatcaccaccagcacccgaacctgggccctgcccacctacaacaaccacctctacaaacaaatttccagccaatcaggagcctcgaacgacaatcactactttggctacagcaccccttgggggtattttgacttcaacagattccactgccacttttcaccacgtgactggcaaagactcatcaacaacaactggggattccgacccaagagactcaacttcaagctctttaacattcaagtcaaagaggtcacgcagaatgacggtacgacgacgattgccaataaccttaccagcacggttcaggtgtttactgactcggagtaccagctcccgtacgtcctcggctcggcgcatcaaggatgcctcccgccgttcccagcagacgtcttcatggtaccacagtatggatacctcaccctgaacaacgggagtcaggcagtaggacgctcttcattttactgcctggagtactttccttctcagatgctgcgtaccggaaacaactttaccttcagctacacttttgaggacgttcctttccacagcagctacgctcacagccagagtctgggccgtctcatgaatcctctcatcgaccagtacctgtattacttgagcagaacaaacactccaagtggaaccaccacgcagtcaaggcttcagttttctcaggccggagcgagtgacattcgggaccagtctaggaactggcttcctggaccctgttaccgccagcagcgagtatcaaagacatctgcggataacaacaacagtgaatactcgtggactggagctaccaagtaccacctcaatggcagagactctctggtgaatccgggcccggccatggcaagccacaaggacgatgaagaaaagttttttcctcagagcggggttctcatctttgggaagcaaggctcagagaaaacaaatgtggacattgaaaaggtcatgattacagacgaagaggaaatcaggacaaccaatcccgtggctacggagcagtatggttctgtatctaccaacctccagagaggcaacagacaagcagctaccgcagatgtcaacacacaaggcgttcttccaggcatggtctggcaggacagagatgtgtaccttcaggggcccatctgggcaaagattccacacacggacggacattttcacccctctcccctcatgggtggattcggacttaaacaccctcctccacagattctcatcaagaacaccccggtacctgcgaatccttcgaccaccttcagtgcggcaaagtttgcttccttcatcacacagtactccacgggacaggtcagcgtggagatcgagtgggagctgcagaaggaaaacagcaaacgctggaatcccgaaattcagtacacttccaactacaacaagtctgttaatgtggactttactgtggacactaatggcgtgtattcagagcctcgccccattggcaccagatacctgactcgtaatctgtaa

SEQ ID NO: 4902 - protein, 735 aa, Adeno-associated virus
MAADGYLPDWLEDTLSEGIRQRWKLKPGPPPPEPAERHKDDSRGLVLPGYKYLGPFNGLDKGEPVNEADAAALEHDKAYDRQLDSGDNPYLKYNHADAEFQERLKEDTSFGGNLGRAVFQAKKRVLEPLGLVEEPVKTAPGKKRPVEHSPVEPDSSSGTGKAGQQPARKRLNFGQTGDADSVPDPQPLGQPPAAPSGLGTNTMATGSGAPMADNNEGADGVGNSSGNWHCDSTWMGDRVITTSTRTWALPTYNNHLYKQISSQSGASNDNHYFGYSTPWGYFDFNRFHCHFSPRDWQRLINNNWGFRPKRLNFKLFNIQVKEVTQNDGTTTIANNLTSTVQVFTDSEYQLPYVLGSAHQGCLPPFPADVFMVPQYGYLTLNNGSQAVGRSSFYCLEYFPSQMLRTGNNFTFSYTFEDVPFHSSYAHSQSLGRLMNPLIDQYLYYLSRTNTPSGTTTQSRLQFSQAGASDIRDQSRNWLPGPCYRQQRVSKTSADNNNSEYSWTGATKYHLNGRDSLVNPGPAMASHKDDEEKFFPQSGVLIFGKQGSEKTNVDIEKVMITDEEEIRTTNPVATEQYGSVSTNLQRGNRQAATADVNTQGVLPGMVWQDRDVYLQGPIWAKIPHTDGHFHPSPLMGGFGLKHPPPQILIKNTPVPANPSTTFSAAKFASFITQYSTGQVSVEIEWELQKENSKRWNPEIQYTSNYNKSVNVDFTVDTNGVYSEPRPIGTRYLTRNL

SEQ ID NO: 4903 - DNA, 2208 bp, Adeno-associated virus
  source 1..2208: mol_type = genomic DNA
atggctgccgatggttatcttccagattggctcgaggacactctctctgaaggaataagacagcggtggaagctcaaacctggcccaccaccaccagagcccgcagagcggcataaggacgacagcaggggtcttgtgcttcctgggtacaagtacctcggacccttcaacggactcgacaagggagagccggtcaacgaggcagacgccgcggccctcgagcacgacaaagcctacgaccggcagctcgacagcggagacaacccgtacctcaagtacaaccacgccgacgcggagtttcaggagcgccttaaagaagatacgtcttttgggggcaacctcggacgagcagtcttccaggcgaaaaagagggtactcgaacctctgggcctggttgaggaacctgttaagacggctccgggaaaaaagaggccggtagagcactctcctgtggagccagactcctcctcgggaaccggaaaggcgggccagcagcctgcaagaaaaagattgaattttggtcagactggagacgcagactcagtacctgacccccagcctctcggacagccaccagcagccccctctggtctgggaactaatacgatggctacaggcagtggcgcaccaatggcagacaataacgagggcgccgacggagtgggtaattcctcgggaaattggcattgcgattccacatggatgggcgacagagtcatcaccaccagcacccgaacctgggccctgcccacctacaacaaccacctctacaaacaaatttccagccaatcaggagcctcgaacgacaatcactactttggctacagcaccccttgggggtattttgacttcaacagattccactgccacttttcaccacgtgactggcaaagactcatcaacaacaactggggattccgacccaagagactcaacttcaagctctttaacattcaagtcaaagaggtcacgcagaatgacggtacgacgacgattgccaataaccttaccagcacggttcaggtgtttactgactcggagtaccagctcccgtacgtcctcggctcggcgcatcaaggatgcctcccgccgttcccagcagacgtcttcatggtgccacagtatggatacctcaccctgaacaacgggagtcaggcagcaggacgctcttcattttactgcctggagtactttccttctcagatgctgcgtaccggaaacaactttaccttcagctacacttttgaggacgttcctttccacagcagctacgctcacagccagagtctgggccgtctcatgaatcctctcatcgaccagtacctgtattacttgagcagaacaaacactccaagtggaaccaccacgcagtcaaggcttcagttttctcaggccggagcgagtgacattcgggaccagtctaggaactggcttcctggaccctgttaccgccagcagcgagtatcaaagacatctgcggataacaacaacagtgaatactcgtggactggagctaccaagtaccacctcaatggcagagactctctggtgaatccgggcccggccatggcaagccacaaggacgatgaagaaaagttttttcctcagagcggggttctcatctttgggaagcaaggctcagagaaaacaaatgtggacattgaaaaggtcatgattacagacgaagaggaaatcaggacaaccaatcccgtggctacggagcagtatggttctgtatctaccaacctccagagaggcaacagacaagcagctaccgcagatgtcaacacacaaggcgttcttccaggcatggtctggcaggacagagatgtgtaccttcaggggcccatctgggcaaagattccacacacggacggacattttcacccctctcccctcatgggtggattcggacttaaacaccctcctccacagattctcatcaagaacaccccggtacctgcgaatccttcgaccaccttcagtgcggcaaagtttgcttccttcatcacacagtactccacgggacaggtcagcgtggagatcgagtgggagctgcagaaggaaaacagcaaacgctggaatcccgaaattcagtacacttccaactacaacaagtccgttaatgtggactttactgtggacactaatggcgtgtattcagagcctcgccccattggcaccagatacctgactcgtaatctgtaa

SEQ ID NO: 4904 - protein, 735 aa, Adeno-associated virus
MAADGYLPDWLEDTLSEGIRQRWKLKPGPPPPEPAERHKDDSRGLVLPGYKYLGPFNGLDKGEPVNEADAAALEHDKAYDRQLDSGDNPYLKYNHADAEFQERLKEDTSFGGNLGRAVFQAKKRVLEPLGLVEEPVKTAPGKKRPVEHSPVEPDSSSGTGKAGQQPARKRLNFGQTGDADSVPDPQPLGQPPAAPSGLGTNTMATGSGAPMADNNEGADGVGNSSGNWHCDSTWMGDRVITTSTRTWALPTYNNHLYKQISSQSGASNDNHYFGYSTPWGYFDFNRFHCHFSPRDWQRLINNNWGFRPKRLNFKLFNIQVKEVTQNDGTTTIANNLTSTVQVFTDSEYQLPYVLGSAHQGCLPPFPADVFMVPQYGYLTLNNGSQAAGRSSFYCLEYFPSQMLRTGNNFTFSYTFEDVPFHSSYAHSQSLGRLMNPLIDQYLYYLSRTNTPSGTTTQSRLQFSQAGASDIRDQSRNWLPGPCYRQQRVSKTSADNNNSEYSWTGATKYHLNGRDSLVNPGPAMASHKDDEEKFFPQSGVLIFGKQGSEKTNVDIEKVMITDEEEIRTTNPVATEQYGSVSTNLQRGNRQAATADVNTQGVLPGMVWQDRDVYLQGPIWAKIPHTDGHFHPSPLMGGFGLKHPPPQILIKNTPVPANPSTTFSAAKFASFITQYSTGQVSVEIEWELQKENSKRWNPEIQYTSNYNKSVNVDFTVDTNGVYSEPRPIGTRYLTRNL

SEQ ID NO: 4905 - protein, 738 aa, Adeno-associated virus; identical to SEQ ID NO: 4797

SEQ ID NO: 4906 - DNA, 2217 bp, Adeno-associated virus
  source 1..2217: mol_type = genomic DNA
atggctgctgacggttatcttccagattggctcgaggacaacctctctgagggcattcgcgagtggtgggacctgaaacctggagcccccaagcccaaggccaaccagcagaagcaggacgacggccggggtctggtgcttcctggctacaagtacctcggacccttcaacggactcgacaagggggagcccgtcaacgcggcggacgcagcggccctcgagcacgacaaggcctacgaccagcagctcaaagcgggtgacaatccgtacctgcggtataaccacgccgacgccgagtttcaggagcgtctgcaagaagatacgtcttttgggggcaacctcgggcgagcagtcttccaggccaagaagcgggttctcgaacctctcggtctggttgaggaagctgctaagacggctcctggaaagaagagaccggtagaaccgtcacctcagcgttcccccgactcctccacgggcatcggcaagaaaggccagcagcccgctaaaaagagactgaactttggtcagactggcgactcagagtcagtccccgaccctcaaccaatcggagaaccaccagcaggcccctctggtctgggatctggtacaatggctgcaggcggtggcgctccaatggcagacaataacgaaggcgccgacggagtgggtagttcctcaggaaattggcattgcgattccacatggctgggcgacagagtcatcaccaccagcacccgaacctgggccctgcccacctacaacaaccacctctacaagcaaatatccaatgggacatcgggaggaagcaccaacgacaacacctacttcggctacagcaccccctgggggtattttgacttcaacagattccactgccacttctcaccacgtgactggcagcgactcatcaacaacaactggggattccggccaaaaagactcagcttcaagctcttcaacatccaggtcaaggaggtcacgcagaatgaaggcaccaagaccatcgccaataaccttaccagcacgattcaggtatttacggactcggaataccagctgccgtacgtcctcggctccgcgcaccagggctgcctgcctccgttcccggcggacgtcttcatgattccccagtacggctaccttacactgaacaatggaagtcaagccgtaggccgttcctccttctactgcctggaatattttccatctcaaatgctgcgaactggaaacaattttgaattcagctacaccttcgaggacgtgcctttccacagcagctacgcacacagccagagcttggaccgactgatgaatcctctcatcgaccagtacctgtactacttatccagaactcagtccacaggaggaactcaaggtacccagcaattgttattttctcaagctgggcctgcaaacatgtcggctcaggctaagaactggctacctggaccttgctaccggcagcagcgagtctctacgacactgtcgcaaaacaacaacagcaactttgcttggactggtgccaccaaatatcacctgaacggaagagactctttggtaaatcccggtgtcgccatggcaacccacaaggacgacgaggaacgcttcttcccgtcgagtggagtcctgatgttcggaaaacagggtgctggaagagacaatgtggactacagcagcgttatgctaaccagcgaagaagaaattaaaaccactaaccccgtagccacagaacaatacggtgtggtggctgacaacttgcagcaaaccaatacagggcctattgtgggaaatgtcaacagccaaggagccttacctggcatggtctggcagaaccgagacgtgtacctgcagggtcccatctgggccaagattcctcacacggacggcaacttccacccttcaccgctaatgggaggatttggactgaagcacccacctcctcagatcctgatcaagaacacgccggtacctgcggatcctccaacaacgttcagccaggcgaaattggcttccttcattacgcagtacagcaccggacaggtcagcgtggaaatcgagtgggagctgcagaaggagaacagcaaacgctggaacccagagattcagtacacttcaaactactacaaatctacaaatgtggactttgctgtcaatacagagggaacttattctgagcctcgccccattggtactcgttacctcacccgtaatctgtaa

SEQ ID NO: 4907 - protein, 738 aa, Adeno-associated virus
MAADGYLPDWLEDNLSEGIREWWDLKPGAPKPKANQQKQDDGRGLVLPGYKYLGPFNGLDKGEPVNAADAAALEHDKAYDQQLKAGDNPYLRYNHADAEFQERLQEDTSFGGNLGRAVFQAKKRVLEPLGLVEEAAKTAPGKKRPVEPSPQRSPDSSTGIGKKGQQPAKKRLNFGQTGDSESVPDPQPIGEPPAGPSGLGSGTMAAGGGAPMADNNEGADGVGSSSGNWHCDSTWLGDRVITTSTRTWALPTYNNHLYKQISNGTSGGSTNDNTYFGYSTPWGYFDFNRFHCHFSPRDWQRLINNNWGFRPKRLSFKLFNIQVKEVTQNEGTKTIANNLTSTIQVFTDSEYQLPYVLGSAHQGCLPPFPADVFMIPQYGYLTLNNGSQAVGRSSFYCLEYFPSQMLRTGNNFEFSYTFEDVPFHSSYAHSQSLDRLMNPLIDQYLYYLSRTQSTGGTQGTQQLLFSQAGPANMSAQAKNWLPGPCYRQQRVSTTLSQNNNSNFAWTGATKYHLNGRDSLVNPGVAMATHKDDEERFFPSSGVLMFGKQGAGRDNVDYSSVMLTSEEEIKTTNPVATEQYGVVADNLQQTNTGPIVGNVNSQGALPGMVWQNRDVYLQGPIWAKIPHTDGNCHPSPLMGGFGLKHPPPQILIKNTPVPADPPTTFSQAKLASFITQYSTGQVSVEIEWELQKENSKRWNPEIQYTSNYYKSTNVDFAVNTEGTYSEPRPIGTRYLTRNL

SEQ ID NO: 4908 - protein, 738 aa, Adeno-associated virus
MAADGYLPDWLEDNLSEGIREWWDLKPGAPKPKANQQKQDDGRGLVLPGYKYLGPFNGLDKGEPVNAADAAALEHDKAYDQQLKAGDNPYLRYNHADAEFQERLQEDTSFGGNLGRAVFQAKKRVLEPLGLVEEGAKTAPGKKRPVEPSPQRSPDSSTGIGKKGQQPARKRLNFGRTGDSESVPDPQPIGEPPAAPSSVGSGTMAAGGGAPMADNNEGADGVGSSSGNWHCDSTWLGDRVITTSTRTWALPTYNNHLYKQISNGTSGGSTNDNTYFGYSTPWGYLDFNRFHCHFSPRDWQRLINNNWGFRPKRLSFKLFNIQVKEVTQNEGTKTIANNLASTIQVFTDSEYQPPYVLGSAHQGCLPPFPADVFMIPQYGYLTLNNGSQAVGRSSFYCLEYFPSQMLRTGNNFSFSYTFEDVPFHSSYAHSQSLDRLMNPLIDQYLYYLSRTQSTGGTAGTQQLLFSRAGPSNMSAQARNWLPGPCYRQQRVSTTLSQNNNSNFAWTGATKYHLNGRDSLVNPGVAMATNKDDEDRFFPSSGILMFGKQGAGKDNVDYSNVMLTSEEEIKTTNPVATEQYGVVADNLQQQNTAPTVGAVNSQGALPGMVWQNRDVYLQGPIWAKIPHTDGNFHPSPLMGGFGLKHPPPQILIKNTPVPADPPTAFNQAKLNSFIAQYSTGQVSVEIEWELQKENSKRWNPEIQYTSNYYKSTNADFAVNTEGVYSEPRPIGTRYLTRNL

SEQ ID NO: 4909 - DNA, 2217 bp, Adeno-associated virus
  source 1..2217: mol_type = genomic DNA
atggctgccgatggttatcttccagattggctcgaggacaacctctctgagggcattcgcgagtggtgggacctgaaacctggagccccgaaacccaaagccaaccagcaaaagcaggacgacggccggggtctggtgcttcctggctacaagtacctcggacccttcaacggactcgacaagggggagcccgtcaacgcggcggacgcagcggccctcgagcacgacaaggcctacgaccagcagctcaaagcgggtgacaatccgtacctgcggtataatcacgccgacgccgagtttcaggagcgtctgcaagaagatacgtcttttgggggcaacctcgggcgagcagtcttccaggccaagaagcgggttctcgaacctctcggtctggttgaggaaggcgctaagacggctcctggaaagaagagaccggtagagccgtcaccacagcgttcccccgactcctccacgggcatcggcaagaaaggccagcagcccgccagaaagagactcaatttcggtcggactggcgactcagagtcagtccccgaccctcaacctatcggagaacctccagcagcgccctctagtgtgggatctggtacaatggctgcaggcggtggcgcaccaatggcagacaataacgaaggtgccgacggagtgggtagttcctcgggaaattggcattgcgattccacatggctgggcgacagagttatcaccaccagcacccgaacctgggccctgcccacctacaacaaccacctctacaagcaaatctccaacgggacctcgggaggcagcaccaacgacaacacctactttggctacagcaccccctgggggtatcttgactttaacagattccactgccacttctcaccacgtgactggcagcgactcatcaacaacaactggggattccggcccaagagactcagcttcaagctcttcaacatccaggtcaaagaggtcacgcagaatgaaggcaccaagaccatcgccaataacctcgccagcaccatccaggtgtttacggactcggaataccagccgccgtacgtcctcggctctgcccaccagggctgcctgcctccgttcccggcggacgtcttcatgattcctcagtacggctacctgactctcaacaacggtagtcaggccgtgggacgttcctccttctactgcctggagtacttcccctctcagatgctgagaacgggcaacaacttttccttcagctacactttcgaggacgtgcctttccacagcagctacgcgcacagccagagtttggacaggctgatgaatcctctcatcgaccagtacctgtactacctgtcaagaacccagtctacgggaggcacagcgggaacccagcagttgctgttttctcgggccgggcctagcaacatgtcggctcaggccagaaactggctgcctggaccctgctacagacagcagcgcgtctccacgacactgtcgcaaaacaacaacagcaactttgcctggactggtgccaccaagtatcatctgaacggcagagactctctggtgaatccgggcgtcgccatggcaaccaacaaggacgacgaggaccgcttcttcccatccagcggcatcctcatgtttggcaagcagggagctggaaaagacaacgtggactatagcaacgtgatgctaaccagcgaggaagaaatcaagaccaccaaccccgtggccacagaacagtatggcgtggtggctgataacctacagcagcaaaacaccgctcctactgtgggggccgtcaacagccagggagccttacctggcatggtctggcagaaccgggacgtgtacctgcagggtcctatttgggccaagattcctcacacagatggcaactttcacccgtctcctttaatgggcggctttggacttaaacatccgcctcctcagatcctcatcaaaaacactcctgttcctgcggatcctccaacagcgttcaaccaggccaagctgaattctttcatcgcgcagtacagcaccggacaagtcagcgtggagatcgagtgggagctgcagaaggagaacagcaagcgctggaacccagagattcagtatacttccaactactacaaatctacaaatgcggactttgctgttaatactgagggtgtttactctgagcctcgccccattggcactcgttacctcacccgtaatctgtaa

SEQ ID NO: 4910 - DNA, 2208 bp, Adeno-associated virus
  source 1..2208: mol_type = genomic DNA
atggctgccgatggttatcttccagattggctcgaggacactctctctgaaggaataagacagtggtggaagctcaaacctggcccaccaccaccaaagcccgcagagcggcataaggacgacagcaggggtcttgtgcttcctgggtacaagtacctcggacccttcaacggactcgacaagggggagccggtcaacgaggcagacgccgcggccctcgagcacgacaaggcctacgaccggcagctcgacagcggagacaacccgtacctcaagtacaaccacgccgacgcagagtttcaggagcgccttaaagaagatacgtcttttgggggcaacctcggacgagcagtcttccaggcgaaaaagagggttcttgaacctctgggcctggttgaggagcctgttaagacggctccgggaaaaaagaggccggtagagcactctcctgtggagccagactcctcctcgggaaccggaaaagcgggccagcagcctgcaagaaaaagattaaattttggtcagactggagacgcagactccgtacctgacccccagcctctcggacagccaccagcagccccctctggtctgggatctactacaatggctacaggcagtggcgcaccaatggcagacaataacgagggtgccgatggagtgggtaattcctcaggaaattggcattgcgattcccaatggctgggcgacagagtcatcaccaccagcacccgaacctgggccctgcccacatacaacaaccacctctacaagcaaatctccagccaatcaggagccagcaacgacaaccactactttggctacagcaccccctgggggtattttgacttcaacagattccactgccacttttcaccacgtgactggcaaagactcgtcaacaacaaccggggattccggcccaaaagactcaacttcaagctctttaatattcaagtcaaagaggtcacgcagaatgacggtacgacgacgattgccaataaccttaccagcacggttcaggtgtttactgactcggagtaccagctcccgtacgtcctgggctcggcgcatcaaggatgcctcccgccgtttccagcggacgtcttcatggtcccacagtatggatacctcaccctgaacaacgggagtcaggcggtaggacgctcttccttttactgcctggagtactttccttctcagatgctgcgtactggaaacaactttcagttcagctacacttttgaagacgtgcctttccacagcagctacgctcacagccagagtctggatcggctgatgaatcctctgatcgaccagtacctgtattatctgaacaagacacaaacaaatagtggaactcttcagcagtctcggctactgtttagccaagctggaccaaccaacatgtctcttcaagctaaaaactggctgcctggaccttgctacagacagcagcgtctgtcaaaacaggcaaacgacaacaacaacagcaactttccctggactgcagctacaaagtatcatctaaatggccgggactcgttggttaatccaggaccagctatggccagtcacaaggatgacgaagaaaagtttttccccatgcatggaaccctgatatttggtaaacaaggaacaaatgccaacgacgcggatttggaaaatgtcatgattacagatgaagaagaaatcagggccaccaatcccgtggctacggagcagtacgggactgtgtcaaataatttgcaaaactcaaacactggtccaactactggaactgtcaatcaccaaggagcgttacctggtatggtgtggcaggatcgagacgtgtacctgcagggacccatttgggccaagattcctcacaccgatggacactttcatccttctccactgatgggaggttttggactcaaacacccgcctcctcagatcatgatcaaaaacactcccgttccagccaatcctcccacaaacttcagttctgccaagtttgcttctttcatcacacagtattccacgggacaggtcagcgtggagatcgagtgggagctgcagaaggagaacagcaaacgctggaatcccgaaattcagtacacttccaactacaacaagtctgttaatgtggactttactgtggacactaatggtgtgtattcagagcctcgccccattggcaccagatacctgactcgtaatctgtaa

SEQ ID NO: 4911 - protein, 735 aa, Adeno-associated virus
MAADGYLPDWLEDTLSEGIRQWWKLKPGPPPPKPAERHKDDSRGLVLPGYKYLGPFNGLDKGEPVNEADAAALEHDKAYDRQLDSGDNPYLKYNHADAEFQERLKEDTSFGGNLGRAVFQAKKRVLEPLGLVEEPVKTAPGKKRPVEHSPVEPDSSSGTGKAGQQPARKRLNFGQTGDADSVPDPQPLGQPPAAPSGLGSTTMATGSGAPMADNNEGADGVGNSSGNWHCDSQWLGDRVITTSTRTWALPTYNNHLYKQISSQSGASNDNHYFGYSTPWGYFDFNRFHCHFSPRDWQRLVNNNRGFRPKRLNFKLFNIQVKEVTQNDGTTTIANNLTSTVQVFTDSEYQLPYVLGSAHQGCLPPFPADVFMVPQYGYLTLNNGSQAVGRSSFYCLEYFPSQMLRTGNNFQFSYTFEDVPFHSSYAHSQSLDRLMNPLIDQYLYYLNKTQTNSGTLQQSRLLFSQAGPTNMSLQAKNWLPGPCYRQQRLSKQANDNNNSNFPWTAATKYHLNGRDSLVNPGPAMASHKDDEEKFFPMHGTLIFGKQGTNANDADLENVMITDEEEIRATNPVATEQYGTVSNNLQNSNTGPTTGTVNHQGALPGMVWQDRDVYLQGPIWAKIPHTDGHFHPSPLMGGFGLKHPPPQIMIKNTPVPANPPTNFSSAKFASFITQYSTGQVSVEIEWELQKENSKRWNPEIQYTSNYNKSVNVDFTVDTNGVYSEPRPIGTRYLTRNL

SEQ ID NO: 4912 - protein, 738 aa, Adeno-associated virus
MAADGYLPDWLEDNLSEGIREWWDLKPGAPKPKANQQKQDDGRGLVLPGYKYLGPFNGLDKGEPVNAADAAALEHDKAYDQQLKAGDNPYLRYNHADAEFQERLQEDTSFGGNLGRAVFQAKKRVLEPLGLVEEAAKTAPGKKRPVEPSPQRSPDSSTGIGKKGQQPAKKRLSFGQTGDSESVPDPQPIGEPPAGPSGLGSGTMAAGGGAPMADNNEGADGVGSSSGNWHCDSTWLGDRVITTSTRTWALPTYNNHLYKQISNGTSGGSTNDNTYFGYSTPWGYFDFNRFHCHFSPRDWQRLINNNWGFRPKRLSFKLFNIQVKEVTQNEGTKTIANNLTSTIQVFTDSEYQLPYVLGSAHQGCLPPFPADVFMIPQYGYLTLNNGSQAVGRSSFYCLEYFPSQMLRTGNNSEFSYTFEDVPFHSSYAHSQSLDRLMNPLIDQYLYYLSRTQSTGGTQGTQQLLFSQAGPANMSAQAKNWLPGPCYRQQRVSTTLSQNNNSNFAWTGATKYHLNGRDSLVNPGVAMATHKDDEERFFPSSGVLMFGKQGAGRDNVDYSSVMLTSEEEIKTTNPVATEQYGVVADNLQQTNTGPIVGNVNSQGALPGMVWQNRDVYLQGPIWAKIPHTDGNFHPSPLMGGFGLKHPPPQILIKNTPVPADPPTTFSQAKLASFITQYSTGQVSVEIEWELQKENSKRWNPEIQYTSNYYKSTNVDFAVNTEGTYSEPRPIGTRYLTRNL

SEQ ID NO: 4913 - DNA, 2217 bp, Adeno-associated virus
  source 1..2217: mol_type = genomic DNA
atggctgctgacggttatcttccagattggctcgaggacaacctctctgagggcattcgcgagtggtgggacctgaaacctggagcccccaagcccaaggccaaccagcagaagcaggacgacggccggggtctggtgcttcctggctacaagtacctcggacccttcaacggactcgacaagggggagcccgtcaacgcggcggacgcagcggccctcgagcacgacaaggcctacgaccagcagctcaaagcgggtgacaatccgtacctgcggtataaccacgccgacgccgagtttcaggagcgtctgcaagaagatacgtcttttgggggcaacctcgggcgagcagtcttccaggccaagaagcgggttctcgaacctctcggtctggttgaggaagctgctaagacggctcctggaaagaagagaccggtagaaccgtcacctcagcgttcccccgactcctccacgggcatcggcaagaaaggccagcagcccgctaaaaagagactgagctttggtcagactggcgactcagagtcagtccccgaccctcaaccaatcggagaaccaccagcaggcccctctggtctgggatctggtacaatggctgcaggcggtggcgctccaatggcagacaataacgaaggcgccgacggagtgggtagttcctcaggaaattggcattgcgattccacatggctgggcgacagagtcatcaccaccagcacccgaacctgggccctgcccacctacaacaaccacctctacaagcaaatatccaatgggacatcgggaggaagcaccaacgacaacacctacttcggctacagcaccccctgggggtattttgacttcaacagattccactgccacttctcaccacgtgactggcagcgactcatcaacaacaactggggattccggccaaaaagactcagcttcaagctcttcaacatccaggtcaaggaggtcacgcagaatgaaggcaccaagaccatcgccaataaccttaccagcacgattcaggtatttacggactcggaataccagctgccgtacgtcctcggctccgcgcaccagggctgcctgcctccgttcccggcggacgtcttcatgattccccagtacggctaccttacactgaacaatggaagtcaagccgtaggccgttcctccttctactgcctggaatattttccatctcaaatgctgcgaactggaaacaattctgaattcagctacaccttcgaggacgtgcctttccacagcagctacgcacacagccagagcttggaccgactgatgaatcctctcatcgaccagtacctgtactacttatccagaactcagtccacaggaggaactcaaggtacccagcaattgttattttctcaagctgggcctgcaaacatgtcggctcaggctaagaactggctacctggaccttgctaccggcagcagcgagtctctacgacactgtcgcaaaacaacaacagcaactttgcttggactggtgccaccaaatatcacctgaacggaagagactctttggtaaatcccggtgtcgccatggcaacccacaaggacgacgaggaacgcttcttcccgtcgagtggagtcctgatgtttggaaaacagggtgctggaagagacaatgtggactacagcagcgttatgctaaccagcgaagaagaaattaaaaccactaaccctgtagccacagaacaatacggtgtggtggctgacaacttgcagcaaaccaatacagggcctattgtgggaaatgtcaacagccaaggagccttacctggcatggtctggcagaaccgagacgtgtacctgcagggtcccatctgggccaagattcctcacacggacggcaacttccacccttcaccgctaatgggaggatttggactgaagcacccacctcctcagatcctgatcaagaacacgccggtacctgcggatcctccaacaacgttcagccaggcgaaattggcttccttcattacgcagtacagcaccggacaggtcagcgtggaaatcgagtgggagctgcagaaggagaacagcaaacgctggaacccagagattcagtacacttcaaactactacaaatctacaaatgtggactttgctgtcaatacagagggaacttattctgagcctcgccccattggtactcgttacctcacccgtaatctgtaa

SEQ ID NO: 4914 - protein, 738 aa, Adeno-associated virus
MAADGYLPDWLEDNLSEGIREWWDLKPGAPKPKANQQKQDDGRGLVLPGYKYLGPFNGLDKGEPVNAADAAALEHDKAYDQQLKAGDNPYLRYNHADAEFQERLQEDTSFGGNLGRAVFQAKKRVLEPLGPVEEAAKTAPGKKRPVEPPPQRSPDSSTGIGKKGQQPAKKRLNFGQTGDSESVPDPQPIGEPPAGPSGLGSGTMAAGGGAPMADNNEGADGVGSSSGNWHCDSTWLGDRVITTSTRTWALPTYNNHLYKQISNGTSGGSTNDNTYFGYSTPWGYFDFNRFHCHFSPRDWQRLINNNWGFRPKRLSFKLFNIQVKEVTQNEGTKTVANNLTSTIQVFTDSEYQLPYVLGSAHQGCLPPFPADVFMIPQYGYLTLNNGSQAVGRSSFYCLEYFPSQMLRTGNNFEFSYTFEDVPFHSSYAHSQSLDRLMNPLIDQYLYYLSRTQSTGGTQGTQQLLFSQAGPANMSAQAKNWLPGPCYRQQRVSTTLSQNNNSNFAWTGATKYHLNGRDSLVNPGVAMATHKDDEERFFPSSGVLMFGKQGAGRDNVDYSSVMLTSEEEIKTTNPVATEQYGVVADNLQQTNTGPIVGNVNSQGALPGMVWQNRDVYLQGPIWAKIPHTDGNFHPSPLMGGFGLKHPPPQILIKNTPVPADPPTTFSQAKLASFITQYSTGQVSVEIEWELQKENSKRWNPEIQYTSNYYKSTNVDFAVNTEGTYSEPRPIGTRYLTRNL

SEQ ID NO: 4915 - DNA, 2217 bp, Adeno-associated virus
  source 1..2217: mol_type = genomic DNA
atggctgctgacggttatcttccagattggctcgaggacaacctctctgagggcattcgcgagtggtgggacctgaaacctggagcccccaagcccaaggccaaccagcagaagcaggacgacggccggggtctggtgcttcctggctacaagtacctcggacccttcaacggactcgacaagggggagcccgtcaacgcggcggacgcagcggccctcgagcacgacaaggcctacgaccagcagctcaaagcgggtgacaatccgtacctgcggtataaccacgccgacgccgagtttcaggagcgtctacaagaagatacgtcttttgggggcaacctcgggcgagcagtcttccaggccaagaagcgggttctcgaacctctcggtccggttgaggaagctgctaagacggctcctggaaagaagagaccggtagaaccgccacctcagcgttcccccgactcctccacgggcatcggcaagaaaggccagcagcccgctaaaaagagactgaactttggtcagactggcgactcagagtcagtccccgaccctcaaccaatcggagaaccaccagcaggcccctctggtctgggatctggtacaatggctgcaggcggtggcgctccaatggcagacaataacgaaggcgccgacggagtgggtagttcctcaggaaattggcattgcgattccacatggctgggcgacagagtcatcaccaccagcacccgaacctgggccctgcccacctacaacaaccacctctacaagcaaatatccaatgggacatcgggaggaagcaccaacgacaacacctacttcggctacagcaccccctgggggtattttgacttcaacagattccactgccacttctcaccacgtgactggcagcgactcatcaacaacaactggggattccggccaaaaagactcagcttcaagctcttcaacatccaggtcaaggaggtcacgcagaatgaaggcaccaagaccgtcgccaataaccttaccagcacgattcaggtatttacggactcggaataccagctgccgtacgtcctcggctccgcgcaccagggctgcctgcctccgttcccggcggacgtcttcatgattccccagtacggctaccttacactgaacaatggaagtcaagccgtaggccgttcctccttctactgcctggaatattttccatctcaaatgctgcgaactggaaacaattttgaattcagctacaccttcgaggacgtgcctttccacagcagctacgcacacagccagagcttggaccgactgatgaatcctctcatcgaccagtacctgtactacttatccagaactcagtccacaggaggaactcaaggtacccagcaattgttattttctcaagctgggcctgcaaacatgtcggctcaggctaagaactggctacctggaccttgctaccggcagcagcgagtctctacgacactgtcgcaaaacaacaacagcaactttgcttggactggtgccaccaaatatcacctgaacggaagagactctttggtaaatcccggtgtcgccatggcaacccacaaggacgacgaggaacgcttcttcccgtcgagtggagtcctgatgtttggaaaacagggtgctggaagagacaatgtggactacagcagcgttatgctaaccagcgaagaagaaattaaaaccactaaccctgtagccacagaacaatacggtgtggtggctgacaacttgcagcaaaccaatacagggcctattgtgggaaatgtcaacagccaaggagccttacctggcatggtctggcagaaccgagacgtgtacctgcagggtcccatctgggccaagattcctcacacggacggcaacttccacccttcaccgctaatgggaggatttggactgaagcacccacctcctcagatcctgatcaagaacacgccggtacctgcggatcctccaacaacgttcagccaggcgaaattggcttccttcattacgcagtacagcaccggacaggtcagcgtggaaatcgagtgggagctgcagaaggagaacagcaaacgttggaacccagagattcagtacacttcaaactactacaaatctacaaatgtggactttgctgtcaatacagagggaacttattctgagcctcgccccattggtactcgttacctcacccgtaatctgtaa

SEQ ID NO: 4916 - protein, 738 aa, Adeno-associated virus
MAADGYLPDWLEDNLSEGIREWWDLKPGAPKPKANQQKQDDGRGLVLPGYKYLGPFNGLDKGEPVNAADAAALEHDKAYDQQLKAGDNPYLRYNHADAEFQERLQEDTSFGGNLGRAVFQAKKRVLEPLGLVEEAAKTAPGKKRPVEPSPQRSPDSSTGIGKKGQQPAKKRLNFGQTGDSESVPDPQPIGEPPAGPSGLGSGTMAAGGGAPMADNNEGADGVGSSSGNWHCDSTWLGDRVITTSTRTWALPTYNNHLYKQISNGTSGGSTNDNTYFGYSTPWGYFDFNRFHCHFSPRDWQRLINNNWGFRPKRLSFKLFNIQVKEVTQNEGTKTIANNLTSTIQVFTDSEYQLPYVLGSAHQGCLPPFPADVFMIPQYGYLTLNNGSQAVGRSSFYCLEYFPSQMLRTGNNFEFSYTFEDVPFHSSYAHSQSLDRLMNPLIDQYLYYLSRTQSTGGTQGTQQLLFSQAGPANMSAQAKNWLPGPCYRQQRVSTTLSQSNNSNFAWTGATKYHLNGRDSLVNPGVAMATHKDDEERFFPSSGVLMFGKQGAGRDNVDYSSVMLTSEEEIKTTNPVATEQYGVVADNLQQTNTGPIVGNVNSQGALPGMVWQNRDVYLQGPIWAKIPHTDGNFHPSPLMGGLGLKHPPPQILIKNTPVPADPPTTFSQAKLASFITQYSTGQVSVEIEWELQKENSKRWNPEIQYTSNYYKSTNVDFAVNTEGTYSEPRPIGTRYLTRNL

SEQ ID NO: 4917 - DNA, 2217 bp, Adeno-associated virus
  source 1..2217: mol_type = genomic DNA
atggctgctgacggttatcttccagattggctcgaggacaacctctctgagggcattcgcgagtggtgggacctgaaacctggagcccccaagcccaaggccaaccagcagaagcaggacgacggccggggtctggtgcttcctggctacaagtacctcggacccttcaacggactcgacaagggggagcccgtcaacgcggcggacgcagcggccctcgagcacgacaaggcctacgaccagcagctcaaagcgggtgacaatccgtacctgcggtataaccacgccgacgccgagtttcaggagcgtctgcaagaagatacgtcttttgggggcaacctcgggcgagcagtcttccaggccaagaagcgggttctcgaacctctcggtctggttgaggaagcggctaagacggctcctggaaagaagagaccggtagaaccgtcacctcagcgttcccccgactcctccacgggcatcggcaagaaaggccagcagcccgctaaaaagagactgaactttggtcagactggcgactcagagtcagtccccgaccctcaaccaatcggagaaccaccagcaggcccctctggtctgggatctggtacaatggctgcaggcggtggcgctccaatggcagacaataacgaaggcgccgacggagtgggtagttcctcaggaaattggcattgcgattccacatggctgggcgacagagtcatcaccaccagcacccgaacctgggccctgcccacctacaacaaccacctctacaagcaaatatccaatgggacatcgggaggaagcaccaacgacaacacctacttcggctacagcaccccctgggggtattttgacttcaacagattccactgccacttctcaccacgtgactggcagcgactcatcaacaacaactggggattccggccaaaaagactcagcttcaagctcttcaacatccaggtcaaggaggtcacgcagaatgaaggcaccaagaccatcgccaataaccttaccagcacgattcaggtatttacggactcggaataccagctgccgtacgtcctcggctccgcgcaccagggctgcctgcctccgttcccggcggacgtcttcatgattccccagtacggctaccttacactgaacaatggaagtcaagccgtaggccgttcctccttctactgcctggaatattttccatctcaaatgctgcgaactggaaacaattttgaattcagctacaccttcgaggacgtgcctttccacagcagctacgcacacagccagagcttggaccgactgatgaatcctctcatcgaccagtacctgtactacttatccagaactcagtccacaggaggaactcaaggtacccagcaattgttattttctcaagctgggcctgcaaacatgtcggctcaggctaagaactggctacctggaccttgctaccggcagcagcgagtctctacgacactgtcgcaaagcaacaacagcaactttgcttggactggtgccaccaaatatcacctgaacggaagagactctttggtaaatcccggtgtcgccatggcaacccacaaggacgacgaggaacgcttcttcccgtcgagtggagtcctgatgtttggaaaacagggtgctggaagagacaatgtggactacagcagcgttatgctaaccagcgaagaagaaattaaaaccactaaccctgtagccacagaacaatacggtgtggtggctgacaacttgcagcaaaccaatacagggcctattgtgggaaatgtcaacagccaaggagccttacctggcatggtctggcagaaccgagacgtgtacctgcagggtcccatctgggccaagattcctcacacggacggcaacttccacccttcaccgctaatgggaggacttggactgaagcacccacctcctcagatcctgatcaagaacacgccggtacctgcggatcctccaacaacgttcagccaggcgaaattggcttccttcattacgcagtacagcaccggacaggtcagcgtggaaatcgagtgggagctgcagaaggagaacagcaaacgctggaacccagagattcagtacacttcaaactactacaaatctacaaatgtggactttgctgtcaatacagagggaacttattctgagcctcgccccattggtactcgttacctcacccgtaatctgtaa

SEQ ID NO: 4918 - protein, 737 aa, Adeno-associated virus
MAADGYLPDWLEDNLSEGIREWWDLKPGAPKPKANQQKQDDGRGLVLPGYKYLGPFNGLDKGEPVNAADAAALEHDKAYDQQLKAGDNPYPRYNHADAEFQERLQEDTPFGGNLGRAVFQAKKRVLEPLGLVEEAAKTAPGKKRPVEPSPQRSPDSSTGIGKKGQQPAKKRLNFGQTGDSESVPDPQPIGEPPAGPSGLGSGTMAAGGGAPMADNNEGADGVGNASGNWHCDSTWLGDRVITTSTRTWALPTYNNHLYKQISSASTGASNDNHYFGYSTPWGYFDFNRFHCHFSPRDWQRLINNNWGFRPKRLNFKLFNIQVKEVTTNDGVTTIANNLTSTVQVFSDSEYQLPYVLGSAHQGCLPPFPADVFMIPQYGYLTLNNGSQAVGRSSFYCLEYFPSQMLRTGNNFTFSYTFEEVPLHSSYAHSQSLDRLMNPLIVQYLYYLNRTQNQSGSAQNKDLLFSRGSPAGMSVQPKNWLPGPCYRQQRVSKTKTDNNNSNFTWTGASKYNLNGRESIINPGTAMASHKDDEDKFFPMSGVMIFGKESAGASNTALDNVMITDEEEIKATNPVATERFGTVAVNFQSSSTDPATGDVHAMGALPGMVWQDRDVYLQGPIWAKIPHTDGHFHPSPLMGGFGLKNPPPQILIKNTPVPANPPAEFSATKFASFITQYSTGQVSVEIEWELQKENSKRWNPEVQYTSNYAKSASVDFTVDNNGLYTEPRPIGTRYLTRPL

SEQ ID NO: 4919 - protein, 737 aa, Adeno-associated virus
MAADGYLPDWLEDNLSEGIREWWDLKPGAPKPKANQQKQDDGRGLVLPGYKYLGPFNGLDKGEPVNAADAAALEHDKAYDQQLKAGDNPYPRYNHADAEFQERLQEDTSFGGNLGRAVFQAKKRVLEPLGLVEEAAKTAPGKKRPVEPSPQRSPDSSTGIGKKGQQPAKKRLNFGQTGDSESVPDPQPIGEPPAGPSGLGSGTMAAGGGAPMADNNEGADGVGNASGNWHCDSTWLGDRVITTSTRTWALPTYNNHLYKQISSASTGASNDNHYFGYSTPWGYFDFNRFHCHFSPRDWQRLINNNWGFRPKRLNFKLFNIQVKEVTTNDGVTTIANNLTSTVQVFSDSEYQLPYVLGSAHQGCLPPFPADVFMIPQYGYLTLNNGSQAVGRSSFYCLEYFPSQMLRTGNNFTFSYTFEEVPLHSSYAHSQSLDRLMNPLIDQYLYYLNRTQNQSGSAQNKDLLFSRGSPAGMSVQPKNWLPGPCYRQQRVSKTKTDNNNSNFTWTGASKYNLNGRESIINPGTAMASHKDDEDKFFPMSGVMIFGKESAGASNTALDNVMITDEEEIKATNPVATERFGTVAVNFQSSSTDPATGDVHAMGALPGMVWQDRDVYLQGPIWAKIPHTDGHFHPSPLMGGFGLKNPPPQILIKNTPVPANPPAEFSATKFASFITQYSTGQVSVEIEWELQKENSKRWNPEVQYTSNYAKSASVDFTVDNNGLYTEPRPIGTRYLTRPL

SEQ ID NO: 4920 - DNA, 2214 bp, Adeno-associated virus
  source 1..2214: mol_type = genomic DNA
atggctgctgacggttatcttccagattggctcgaggacaacctctctgagggcattcgcgagtggtgggacctgaaacctggagcccccaagcccaaggccaaccagcagaagcaggacgacggccggggtctggtgcttcctggctacaagtacctcggacccttcaacggactcgacaagggggagcccgtcaacgcggcggacgcagcggccctcgagcacgacaaggcctacgaccagcagctcaaagcgggtgacaatccgtacccgcggtataaccacgccgacgccgagtttcaggagcgtctgcaagaagatacgccttttgggggcaacctcgggcgagcagtcttccaggccaagaagcgggttctcgaacctctcggtctggttgaggaagctgctaagacggctcctggaaagaagagaccggtagaaccgtcacctcagcgttcccccgactcctccacgggcatcggcaagaaaggccagcagcccgctaaaaagagactgaactttggtcagactggcgactcagagtcagtccccgaccctcaaccaatcggagaaccaccagcaggcccctctggtctgggatctggtacaatggctgcaggcggtggcgctccaatggcagacaataacgaaggcgccgacggagtgggtaatgcctcaggaaattggcattgcgattccacatggctgggcgacagagtcatcaccaccagcacccgcacctgggccttgcccacctacaataaccacctctacaagcaaatctccagtgcttcaacgggggccagcaacgacaaccactacttcggctacagcaccccctgggggtattttgatttcaacagattccactgccacttttcaccacgtgactggcagcgactcatcaacaacaattggggattccggcccaagagactcaacttcaaactcttcaacatccaagtcaaggaggtcacgacgaatgatggcgtcacaaccatcgctaataaccttaccagcacggttcaagtcttctcggactcggagtaccagcttccgtacgtcctcggctctgcgcaccagggctgcctccctccgttcccggcggacgtgttcatgattccgcaatacggctacctgacgctcaacaatggcagccaagccgtgggacgttcatccttttactgcctggaatatttcccttctcagatgctgagaacgggcaacaactttaccttcagctacacctttgaggaagtgcctctccacagcagctacgcgcacagccagagcctggaccggctgatgaatcctctcatcgtccaatacctgtattacctgaacagaactcaaaatcagtccggaagtgcccaaaacaaggacttgctgttcagccgtgggtctccagctggcatgtctgttcagcccaaaaactggctacctggaccctgttatcggcagcagcgcgtttctaaaacaaaaacagacaacaacaacagcaattttacctggactggtgcttcaaaatataacctcaatgggcgtgaatccatcatcaaccctggcactgctatggcctcacacaaagacgacgaagacaagttctttcccatgagcggtgtcatgatttttggaaaagagagcgccggagcttcaaacactgcattggacaatgtcatgattacagacgaagaggaaattaaagccactaaccctgtggccaccgaaagatttgggaccgtggcagtcaatttccagagcagcagcacagaccctgcgaccggagatgtgcatgctatgggagcattacctggcatggtgtggcaagatagagacgtgtacctgcagggtcccatttgggccaaaattcctcacacagatggacactttcacccgtctcctcttatgggcggctttggactcaagaacccgcctcctcagatcctcatcaaaaacacgcctgttcctgcgaatcctccggcggagttttcagctacaaagtttgcttcattcatcacccaatactccacaggacaagtgagtgtggaaattgaatgggagctgcagaaagaaaacagcaagcgctggaatcccgaagtgcagtacacatccaattatgcaaaatctgccagcgttgattttactgtggacaacaatggactttatactgagcctcgccccattggcacccgttaccttacccgtcccctgtaa

SEQ ID NO: 4921 - protein, 736 aa, Adeno-associated virus
MAADGYLPDWLEDTLSEGIRQWWKLRPGPPPPKPAERHKDDSRGLVLPGYKYLGPFNGLDKGEPVNEADAAALEHDKAYDRQLDSGDNPYLKYNHADAEFQERLKEDTSFGGNLGRAVFQAKKRVLEPLGLVEEGAETAPGKKRPVEQSPQGPDSSSGIGKTGQQPAKKRLNFGQTGDSESVPDPQPLGEPPATPAAVGPTTMASGGGAPMADNNEGADGVGNASGNWHCDSTWLGDRVITTSTRTWALPTYNNHLYKQISSASTGASNDNHYFGYSTPWGYFDFNRFHCHFSPRDWQRLINNNWGFRPKRLNFKLFNIQVKEVTTNDGVTTIANNLTSTVQVFSDSEYQLPYVLGSAHQGCLPPFPADVFMIPQYGYLTLNNGSQAVGRSSFYCLEYFPSQMLRTGNNFTFSYTFEEVPFHSSYAHSQSLDRLMNPLIDQYLYYPNRTQNQSGSAQNKDLLFSRGSPAGMSVQPKNWLPGPCYRQQRVSKTKTDNNNSNFTWTGASKYNLNGRESIINPGTAMASHKDDEDKFFPMSGVMIFGKESAGASNTALDNVMITDEEEIKATNPVATERFGTVAVNFQSSSTDPATGDVHAMGALPGMVWQGRDVYLQGPIWAKIPHTDGHFHPSPLMGGFGLKNPPPQILIKNTPVPANPPAEFSATKFASFITQYSTGQVSVEIEWELQKENSKRWNPEVQYTSNYAKSANVDFTVDNNGLYTEPRPIGTRYLTRPL

SEQ ID NO: 4922 - DNA, 2211 bp, Adeno-associated virus
  source 1..2211: mol_type = genomic DNA
atggctgccgatggttatcttccagattggctcgaggacactctctctgaaggaataagacagtggtggaagctcagacctggcccaccaccaccaaagcccgcagagcggcataaggacgacagcaggggtcttgtgcttcctgggtacaagtacctcggacccttcaacggactcgacaagggagagccggtcaacgaggcagacgccgcggccctcgagcacgacaaagcctacgaccggcagctcgacagcggagacaacccgtacctcaagtacaaccacgccgacgcggagtttcaggagcgccttaaagaagatacgtcttttgggggcaacctcgggcgagcagtcttccaggccaagaagcgggttctcgaacctctcggtctggttgaggaaggcgctgagacggctcctggaaagaaacgtccggtagagcagtcgccacaagggccagactcctcctcgggcatcggcaagacaggccagcagcccgctaaaaagagactcaattttggtcagactggcgactcagagtcagtccccgatccacaacctctcggagaacctccagcaacccccgctgctgtgggacctactacaatggcttcaggcggtggcgcaccaatggcagacaataacgaaggcgccgacggagtgggtaatgcctcaggaaattggcattgcgattccacatggctgggcgacagagtcatcaccaccagcacccgcacctgggccttgcccacctacaataaccacctctacaagcaaatctccagtgcttcaacgggggccagcaacgacaaccactacttcggctacagcaccccctgggggtattttgatttcaacagattccactgccacttttcaccacgtgactggcagcgactcatcaacaacaattggggattccggcccaagagactcaacttcaaactcttcaacatccaagtcaaggaggtcacgacgaatgatggcgtcacaaccatcgctaataaccttaccagcacggttcaagtcttctcggactcggagtaccagcttccgtacgtcctcggctctgcgcaccagggctgcctccctccgttcccggcggacgtgttcatgattccgcaatacggctacctgacgctcaacaatggcagccaagccgtgggacgttcatccttttactgcctggaatatttcccttctcagatgctgagaacgggcaacaactttaccttcagctacacctttgaggaagtgcctttccacagcagctacgcgcacagccagagcctggaccggctgatgaatcctctcatcgaccaatacctgtattacccgaacagaactcaaaatcagtccggaagtgcccaaaacaaggacttgctgtttagccgtgggtctccagctggcatgtctgttcagcccaaaaactggctacctggaccctgttatcggcagcagcgcgtttctaaaacaaaaacagacaacaacaacagcaattttacctggactggtgcttcaaaatataacctcaatgggcgtgaatccatcatcaaccctggcactgctatggcctcacacaaagacgacgaagacaagttctttcccatgagcggtgtcatgatttttggaaaagagagcgccggagcttcaaacactgcattggacaatgtcatgattacagacgaagaggaaattaaagccactaaccctgtggccaccgaaagatttgggaccgtggcagtcaatttccagagcagcagcacagaccctgcgaccggagatgtgcatgctatgggagcattacctggcatggtgtggcaaggtagagacgtgtacctgcagggtcccatttgggccaaaattcctcacacagatggacactttcacccgtctcctcttatgggcggctttggactcaagaacccgcctcctcagatcctcatcaaaaacacgcctgttcctgcgaatcctccggcggagttttcagctacaaagtttgcttcattcatcacccaatactccacaggacaagtgagtgtggaaattgaatgggagctgcagaaagaaaacagcaagcgctggaatcccgaagtgcagtacacatccaattatgcaaaatctgccaacgttgattttactgtggacaacaatggactttatactgagcctcgccccattggcacccgttaccttacccgtcccctgtaa

SEQ ID NO: 4923 - protein, 736 aa, Adeno-associated virus
MAADGYLPDWLEDTLSEGIRQWWKLRPGPPPPKPAERHKDDSRGLVLPGYKYLGPFNGLDKGEPVNEADAAALEHDKAYDRQLDSGDNPYLKYNHADAEFQERLKEDTSFGGNLGRAVFQAKKRVLEPLGLVEEGAKTAPGKKRPVEQSPQGPDSSSGIGKTGQQPAKKRLNFGQTGDSESVPDPQPLGEPPATPAAVGPTTMASGGGAPMADNNEGADGVGNASGNWHCDSTWLGDRVITTSTRTWALPTYNNHLYKQISSASTGASNDNHYFGYSTPWGYFDFNRFHCHFSPRDWQRLINNNWGFRPKRLNFKLFNIQVKEVTTNDGVTTIANNLTSTVQVFSDSEYQLPYVLGSAHQGCLPPFPADVFMIPQYGYLTLNNGSQAVGRSSFYCLEYFPSQMLRTGNNFTFSYTFEEVPFHSSYAHSQSLDRLMNPLIDQYLYYPNRTQNQSGSAQNKDLLFSRGSPAGMSVQPKNWLPGPCYRQQRVSKTKTDNNNSNFTWTGASKYNLNGRESIINPGTAMASHKDDEDKFFPMSGVMIFGKESAGASNTALDNVMITDEEEIKATNPVATERFGTVAVNFQSSSTDPATGDVHAMGALPGMVWQGRDVYLQGPIWAKIPHTDGHFHPSPLMGGFGLKNPPPQILIKNTPVPANPPAEFSATKFASFITQYSTGQVSVEIEWELQKENSKRWNPEVQYTSNYAKSANVDFTVDNNGLYTEPRPIGTRYLTRPL

SEQ ID NO: 4924 - protein, 736 aa, Adeno-associated virus
MAADGYLPDWLEDTLSEGIRQWWKLRPGPPPPKPAERHKDDSRGLVLPGYKYLGPFNGLDKGEPVNEADAAALEHDKAYDRQLDSGDNPYLKYNHADAEFQERLKEDTSFGGNLGRAVFQAKKRVLEPLGLVEEGAKTAPGKKRPVEQSPQGPDSSSGIGKTGQQPAKKRLNFGQTGDSESVPDPQPLGEPPATPAAVGPTTMASGGGAPMADNNEGADGVGNASGNWHCDSTWLGDRVITTSTRTWALPTYNNHLYKQISSASTGASNDNHYFGYSTPWGYFDFNRFHCHFSPRDWQRLINNNWGFRPKRLNFKLFNIQVKEVTTNDGVTTIANNLTSTVQVFSDSEYQLPYVLGSAHQGCLPPFPADVFMIPQYGYLTLNNGSQAVGRSSFYCLEYFPSQMLRTGNNFTFSYTFEEVPFHSSYAHSQSLDRLMNPLIDQYLYYLNRTQNQSGSAQNKDLLFSRGSPAGMSVQPKNWLPGPCYRQQRVSKTKTDNNNSNFTWTGASKYNLNGRESIINPGTAMASHKDDEDKFFPMSGVMIFGKESAGASNTALDNVMITDEEEIKATNPVATERFGTVAVNFQSSSTDPATGDVHAMGALPGMVWQGRDVYLQGPIWAKIPHTDGHFHPSPLMGGFGLKNPPPQILIKNTPVPANPPAEFSATKFASFITQYSTGQVSVEIEWELQKENSKRWNPEVQYTSNYAKSANVDFTVDNNGLYTEPRPIGTRYLTRPL

SEQ ID NO: 4925 - protein, 736 aa, Adeno-associated virus
MAADGYLPDWLEDTLSEGIRQWWKLRPGPPPPKPAERHKDDSRGLVLPGYKYLGPFNGLDKGEPVNEADAAALEHDKAYDRQLDSGDNPYLKYNHADAEFQERLKEDTSFGGNLGRAVFQAKKRVLEPLGLVEEGAKTAPGKKRPVEQSPQGPDSSSGIGKTGQQPAKKRLNFGQTGDSESVPDPQPLGEPPATPAAVGPTTMASGGGAPMADNNEGADGVGNASGNWHCDSTWLGDRVITTSTRTWALPTYNNHLYKQISSASTGASNDNHYFGYSTPWGYFDFNRFHCHFSPRDWQRLINNNWGFRPKRLNFKLFNIQVKEVTTNDGVTTIANNLTSTVQVFSDSEYQLPYVLGSAHQGCLPPFPADVFMIPQYGYLTLNNGSQAVGRSSFYCLEYFPSQMLRTGNNFTFSYTFEEVPFHSSYAHSQSLDRLMNPLIDQYLYYLNRTQNQSGSAQNKDLLFSRGSPAGMSVQPKNWLPGPCYRQQRVSKTKTDNNNSNFTWTGASKYNLNGRESIINPGTAMASHKDDEDKFFPMSGVMIFGKESAGASNTALDNVMITDEEEIKATNPVATERFGTVAVNFQSSSTDPATGDVHAMGALPGMVWQDRDVYLQGPIWAKIPHTDGHFHPSPLMGGFGLKNPPPQILIKNTPVPANPPAEFSATKFASFITQYSTGQVSVEIEWELQKENSKRWNPEVQYTSNYAKSANVDFTVDNNGLYTEPRPIGTRYLTRPL

SEQ ID NO: 4926 - DNA, 2208 bp, Adeno-associated virus
  source 1..2208: mol_type = genomic DNA
atggctgccgatggctatcttccagattggctcgaggacactctctctgaaggaataagacagtggtggaagctcaaacctggcccaccaccaccaaagcccgcagagcggcatagggacgacagcaggggtcttgtgcttcctgggtacaagtacctcggacccttcaacggactcgacaagggagagccggtcaacgaggcagacgccgcggccctcgagcacgacaaagcctacgaccggcagctcgacagcggagacaacccgtacctcaagtacaaccacgccgacgcggagtttcaggagcgccttaaagaagatacgtcttttgggggcaacctcggacgagcagtcttccaggcgaaaaagagggttcttgaacctctgggcctggttgaggaacctgttaagacggctccgggaaaaaagaggccggtagagcactctcctgtggagccagactcctcctcgggaaccggaaaggcgggccagcagcctgcaagaaaaagattgaattttggtcagactggagacgcagactcagtacctgacccccagcctctcggacagccaccagcagccccctctggtctgggaactaatacgatggctacaggcagtggcgcaccaatggcagacaataacgagggcgccgacggagtgggtaattcctcgggaaattggcattgcgattccacatggatgggcgacagagtcatcaccaccagcacccgaacctgggccctgcccacctacaacaaccacctctacaaacaaatttccagccaatcaggagcctcgaacgacaatcactactttggctacagcaccccttgggggtattttgacttcaacagattccactgccacttttcaccacgtgactggcaaagactcatcaacaacaactggggattccgacccaagagactcaacttcaagctctttaacattcaagtcaaagaggtcacgcagaatgacggtacgacgacgattgccaataaccttaccagcacggttcaggtgtttactgactcggggtaccagctcccgtacgtcctcggctcggcgcatcaaggatgcctcccgccgttcccagcagacgtcttcatggtgccacagtatggataccccaccctgaacaacgggagtcaggcagtaggacgctcttcattttactgcctggagtactttccttctcagatgctgcgtaccggaaacaactttaccttcagctacacttttgaggacgttcctttccacagcagctacgctcacagccagagtctggaccgtctcatgaatcctctcatcgaccagtacctgtattacttgagcacaacaaacactccaagtggaaccaccacgcagtcaaggcttcagttttctcaggccggagcgagtgacattcgggaccagtctaggaactggcttcctggaccctgttaccgccagcagcgagtatcaaagacatctgcggataacaacaacagtgaatactcgtggactggagctaccaagtaccacctcaatggcagagactctctggtgaatccgggcccggccgtggcaagccacaaggacgatgaagaaaagttttttcctcagagcggggttctcatctttgggaagcaaggctcagagaaaacaaatgtggacattgaaaaggtcatgattacagacgaagaggaaatcaggacaaccaatcccgtggctacggagcagtatggttctgtatctaccaacctccagagaggcaacagacaagcagctaccgcagatgtcaacacacaaggcgttcttccaggcatggtctggcaggacagagatgtgtaccttcaggggcccatctgggcaaagattccacacacggacggacattttcacccctctcccctcatgggtggattcggacttaaacaccctcctccacagattctcatcaagaacaccccggtacctgcgaatccttcgaccaccttcagtgcggcaaagtttgcttccttcatcacacagtactccacgggacaggtcagcgtggagatcgagtgggagctgcagaaggaaaacagcaaacgctggaatcccgaaattcagtacacttccaactacaacaagtctgttaatgtggactttactgtggacactaatggcgtgtattcagagcctcgccccattggcaccagatacctgactcgtaatctgtaa

SEQ ID NO: 4927 - protein, 735 aa, Adeno-associated virus
MAADGYLPDWLEDTLSEGIRQWWKLKPGPPPPKPAERHRDDSRGLVLPGYKYLGPFNGLDKGEPVNEADAAALEHDKAYDRQLDSGDNPYLKYNHADAEFQERLKEDTSFGGNLGRAVFQAKKRVLEPLGLVEEPVKTAPGKKRPVEHSPVEPDSSSGTGKAGQQPARKRLNFGQTGDADSVPDPQPLGQPPAAPSGLGTNTMATGSGAPMADNNEGADGVGNSSGNWHCDSTWMGDRVITTSTRTWALPTYNNHLYKQISSQSGASNDNHYFGYSTPWGYFDFNRFHCHFSPRDWQRLINNNWGFRPKRLNFKLFNIQVKEVTQNDGTTTIANNLTSTVQVFTDSGYQLPYVLGSAHQGCLPPFPADVFMVPQYGYPTLNNGSQAVGRSSFYCLEYFPSQMLRTGNNFTFSYTFEDVPFHSSYAHSQSLDRLMNPLIDQYLYYLSTTNTPSGTTTQSRLQFSQAGASDIRDQSRNWLPGPCYRQQRVSKTSADNNNSEYSWTGATKYHLNGRDSLVNPGPAVASHKDDEEKFFPQSGVLIFGKQGSEKTNVDIEKVMITDEEEIRTTNPVATEQYGSVSTNLQRGNRQAATADVNTQGVLPGMVWQDRDVYLQGPIWAKIPHTDGHFHPSPLMGGFGLKHPPPQILIKNTPVPANPSTTFSAAKFASFITQYSTGQVSVEIEWELQKENSKRWNPEIQYTSNYNKSVNVDFTVDTNGVYSEPRPIGTRYLTRNL

SEQ ID NO: 4928 - DNA, 2211 bp, Adeno-associated virus
  source 1..2211: mol_type = genomic DNA
atggctgccgacggttatcttccagattggctcgaggacactctctctgaaggaataagacagtggtggaagctcaaacctggcccaccaccaccaaagcccgcagagcggcataaggacgacagcaggggtcttgtgcttcctgggtacaagtacctcggacccttcaacggactcgacaagggagagccggtcaacgaggcagacgccgcggccctcgagcacgacaaagcctacgaccggcagctcgacagcggagacaacccgtacctcaagtacaaccacgccgacgcggagtttcaggagcgccttaaagaagatacgtcttttgggggcaacctcgggcgggcagtcttccaggccaagaagcgggttctcgaacctctcggtctggttgaggaaggcgctaagacggctcctggaaagaaacgtccggtagagcagtcgccacaagagccagactccccctcgggcatcggcaagacaggccagcagcccgctaaaaagagactcaattttggtcagactggcgactcagagtcagtccccgatccacaacctctcggagaacctccagcaacccccgctgctgtgggacctactacaatggcttcaggcggtggcgcaccaatggcagacaataacgaaggcgccgacggagtgggtaatgcctcaggaaattggcactgcgattccacatggctgggcgacagagtcatcaccaccagcacccgcacctgggccttgcccacctacaataaccacctctacaagcaaatctccagtgcttcaacgggggccagcaacgacaaccactacttcggctacagcaccccctgggggtattttgatttcaacagattccactgccacttttcaccacgtgactggcagcgactcatcaacaacaattggggattccggcccaagagactcaacttcaaactcttcaacatccaagtcaaggaggtcacgacgaatgatggcgtcacaaccatcgctaataaccttaccagcacggttcaagtcttctcggactcggagtaccagcttccgtacgtcctcggctctgcgcaccagggccgcctccctccgttcccggcggacgtgttcatgattccgcaatacggctacctgacgctcaacaatggcagccaagccgtgggacgttcatcctcttactgcctggaatatttcccttctcagatgctgagaacgggcaacaactttaccttcagctacacctttgaggaagtgcctctccacagcagctgcgcgcacagccagagcctggaccggctgatgaatcctctcatcgaccaatacctgtattacctgaacagaactcaaaatcagtccggaagtgcccaaaacagggacttgctgttcagccgtgggtctccagctggcatgtctgttcagcccaaaaactggctacctggaccctgttatcggcagcagcgcgtttctaaaacaaaaacagacaacaacaacagcaattttacctggactggtgcttcaaaatataacctcaatgggcgtgaatccatcatcaaccctggcactgctatggcctcacacaaagacgacgaagacaagttctttcccatgagcggtgtcatgatttttggaaaagagagcgccggagcttcaaacactgcattggacaatgtcatgattacagacgaagaggaaattaaagccactaaccctgtggccaccgaaagatttgggaccgtggcagtcaatttccagagcagcagcacagaccctgcgaccggagatgtgcatgctatgggagcattacctggcatggtgtggcaagatagagacgtgtacctgcagggtcccatttgggccaaaattcctcacacagatggacactttcacccgtctcctcttatgggcggctttggactcaagaacccgcctcctcagatcctcatcaaaaacacgcctgttcctgcgaatcctccggcggagttttcagctacaaagtttgcttcattcatcacccaatactccgcaggacaagtgagtgtggaaattgaatgggagctgcagaaagaaaacagcaagcgctggaatcccgaagtgcagtacacatccaattatgcaaaatctgccaacgttgattttactgtggacaacaatggactttatactgagcctcgccccattggcacccgttaccttacccgtcccctgtaa

SEQ ID NO: 4929 - protein, 736 aa, Adeno-associated virus
MAADGYLPDWLEDTLSEGIRQWWKLKPGPPPPKPAERHKDDSRGLVLPGYKYLGPFNGLDKGEPVNEADAAALEHDKAYDRQLDSGDNPYLKYNHADAEFQERLKEDTSFGGNLGRAVFQAKKRVLEPLGLVEEGAKTAPGKKRPVEQSPQEPDSPSGIGKTGQQPAKKRLNFGQTGDSESVPDPQPLGEPPATPAAVGPTTMASGGGAPMADNNEGADGVGNASGNWHCDSTWLGDRVITTSTRTWALPTYNNHLYKQISSASTGASNDNHYFGYSTPWGYFDFNRFHCHFSPRDWQRLINNNWGFRPKRLNFKLFNIQVKEVTTNDGVTTIANNLTSTVQVFSDSEYQLPYVLGSAHQGRLPPFPADVFMIPQYGYLTLNNGSQAVGRSSSYCLEYFPSQMLRTGNNFTFSYTFEEVPLHSSCAHSQSLDRLMNPLIDQYLYYLNRTQNQSGSAQNRDLLFSRGSPAGMSVQPKNWLPGPCYRQQRVSKTKTDNNNSNFTWTGASKYNLNGRESIINPGTAMASHKDDEDKFFPMSGVMIFGKESAGASNTALDNVMITDEEEIKATNPVATERFGTVAVNFQSSSTDPATGDVHAMGALPGMVWQDRDVYLQGPIWAKIPHTDGHFHPSPLMGGFGLKNPPPQILIKNTPVPANPPAEFSATKFASFITQYSAGQVSVEIEWELQKENSKRWNPEVQYTSNYAKSANVDFTVDNNGLYTEPRPIGTRYLTRPL

SEQ ID NO: 4930 - protein, 736 aa, Adeno-associated virus
MAADGYLPDWLEDTLSEGIRQWWKLKPGPPPPKPAERHKDDSRGLVLPGYKYLGPFNGLDKGEPVNEADAAALEHDKAYDRQLDSGDNPYLKYNHADAEFQERLKEDTSFGGNLGRAVFQAKKRVLEPLGLVEEGAKTAPGKKRPVEQSPQEPDSSSGIGKTGQQPAKKRLNFGQTGDSESVPDPQPLGEPPATPAAVGPTTMASGGGAPMADNNEGADGVGNASGNWHCDSTWLGDRVITTSTRTWALPTYNNHLYKQISSASTGASNDNHYFGYSTPWGYFDFNRFHCHFSPRDWQRLINNNWGFRPKRLNFKLFNIQVKEVTTNDGVTTIANNLTSTVQVFSDSEYQLPYVLGSAHQGCLPPFPADVFMIPQYGYLTLNNGSQAVGRSSFYCLEYFPSQMLRTGNNFTFSYTFEEVPLHSSCAHSQSLDRLMNPLIDQYLYYLNRTQNQSGSAQNRDLLFSRGSPAGMSVQPKNWLPGPCYRQQRVSKTKTDNNNSNFTWTGASKYNLNGRESIINPGTAMASHKDDEDKFFPMSGVMIFGKESAGASNTALDNVMITDEEEIKATNPVATERFGTVAVNFQSSSTDPATGDVHAMGALPGMVWQDRDVYLQGPIWAKIPHTDGHFHPSPLMGGFGLKNPPPQILIKNTPVPANPPAEFSATKFASFITQYSTGQVSVEIEWELQKENSKRWNPEVQYTSNYAKSANVDFTVDNNGLYTEPRPIGTRYLTRPL

SEQ ID NO: 4931 - DNA, 2208 bp, Adeno-associated virus
  source 1..2208: mol_type = genomic DNA
atggctgccgatggctatcttccagattggctcgaggacactctctctgaaggaataagacagtggtggaagctcaaacctggcccaccaccaccaaagcccgcagagcggcatagggacgacagcaggggtcttgtgcttcctgggtacaagtacctcggacccttcaacggactcgacaagggagagccggtcaacgaggcagacgccgcggccctcgagcacgacaaagcctacgaccggcagctcgacagcggagacaacccgtacctcaagtacaaccacgccgacgcggagtttcaggagcgccttaaagaagatacgtcttttgggggcaacctcggacgagcagtcttccaggcgaaaaagagggttcttgaacctctgggcctggttggggaacctgttaagacggctccgggaaaaaagaggccggtagagcactctcctgtggagccagactcctcctcgggaaccggaaaggcgggccagcagcctgcaagaaaaagattgaattttggtcagactggagacgcagactcagtacctgacccccagcctctcggacagccaccagcagccccctctggtctgggaactaatacgatggctacaggcagtggcgcaccaatggcagacaataacgagggcgccgacggagtgggtaattcctcgggaaattggcattgcgattccacatggatgggcgacagagtcatcaccaccagcacccgaacctgggccctgcccacctacaacaaccacctctacaaacaaatttccagccaatcaggagcctcgaacgacagtcactactttggctacagcaccccttgggggtattttgacttcaacagattccactgccacttttcaccacgtgactggcaaagactcatcaacaacaactggggattccgacccaagagactcaacttcaagctctttaacattcaagtcaaagaggtcacgcagaatgacggtacgacgacgattgccaataaccttaccagcacggttcaggtgtttactgactcggagtaccagctcccgtacgtcctcggctcggcgcatcaaggatgcctcccgccgttcccagcagacgtcttcatggtgccacagtatggatacctcaccctgaacaacgggagtcaggcagtaggacgctcttcattttactgcctggagtactttccttctcagatgctgcgtaccggaaacaactttaccttcagctacacttttgaggacgttcctttccacagcagctacgctcacagccagagtctggaccgtctcatgaatcctctcatcgaccagtacctgtattacttgagcacaacaaacactccaagtggaaccaccacgcagtcaaggctccagttttctcaggccggagcgagtgacattcgggaccagtctaggaactggcttcctggaccctgttaccgccagcagcgagtatcaaagacatctgcggataacaacaacagtgaatactcgtggactggagctaccaagtaccacctcaatggcagagactctctggtgaatccgggcccggccatggcaagccacaaggacaatgaagaaaagttttttcctcagagcggggttctcatctttgggaagcaaggctcagagaaaacaaatgtggacattgaaaaggtcatgattacagacgaagaggaaatcaggacaaccaatcccgtggctacggagcagtatggttctgtatctaccaacctccagagaggcaacagacaagcagctaccgcagatgtcaacacacaaggcgttcttccaggcatggtctggcaggacagagatgtgtaccttcaggggcccatctgggcaaagattccacacacggacggacattttcacccctctcccctcatgggtggattcggacttaaacaccctcctccacagattctcatcaagaacaccccggtacctgcgaatccttcgaccaccttcagtgcggcaaagtttgcttccttcatcacacagtactccacgggacaggtcagcgtggagatcgagtgggagctgcagaaggaaaacagcaaacgctggaatcccgaaattcagtacacttccaactacaacaagtctgttaatgtggactttactgtggacactaatggcgtgtattcagagcctcgccccattggcaccagatacctgactcgtaatctgtaa

SEQ ID NO: 4932 - protein, 735 aa, Adeno-associated virus
MAADGYLPDWLEDTLSEGIRQWWKLKPGPPPPKPAERHRDDSRGLVLPGYKYLGPFNGLDKGEPVNEADAAALEHDKAYDRQLDSGDNPYLKYNHADAEFQERLKEDTSFGGNLGRAVFQAKKRVLEPLGLVGEPVKTAPGKKRPVEHSPVEPDSSSGTGKAGQQPARKRLNFGQTGDADSVPDPQPLGQPPAAPSGLGTNTMATGSGAPMADNNEGADGVGNSSGNWHCDSTWMGDRVITTSTRTWALPTYNNHLYKQISSQSGASNDSHYFGYSTPWGYFDFNRFHCHFSPRDWQRLINNNWGFRPKRLNFKLFNIQVKEVTQNDGTTTIANNLTSTVQVFTDSEYQLPYVLGSAHQGCLPPFPADVFMVPQYGYLTLNNGSQAVGRSSFYCLEYFPSQMLRTGNNFTFSYTFEDVPFHSSYAHSQSLDRLMNPLIDQYLYYLSTTNTPSGTTTQSRLQFSQAGASDIRDQSRNWLPGPCYRQQRVSKTSADNNNSEYSWTGATKYHLNGRDSLVNPGPAMASHKDNEEKFFPQSGVLIFGKQGSEKTNVDIEKVMITDEEEIRTTNPVATEQYGSVSTNLQRGNRQAATADVNTQGVLPGMVWQDRDVYLQGPIWAKIPHTDGHFHPSPLMGGFGLKHPPPQILIKNTPVPANPSTTFSAAKFASFITQYSTGQVSVEIEWELQKENSKRWNPEIQYTSNYNKSVNVDFTVDTNGVYSEPRPIGTRYLTRNL

SEQ ID NO: 4933 - protein, 737 aa, Adeno-associated virus
RMAADGYLPDWLEDNLSEGIREWWDLKPGAPKPKANQQKQDDGRGLVLPGYKYLGPFNGLDKGEPVNAADAAALEHDKAYDQQLKAGDNPYLRYNHADAEFQERLQEDTSFGGNLGRAVFQAKKRVLEPLGLVEEGAKTAPGKKRPVEQSPQEPDSSSGIGKTGQQPAKKRLNFGQTGDSESVPDPQPLGEPPATPAAVGPTTMASGGGAPMADNNEGADGVGNASGNWHCDSTWLGDRVITTSTRTWALPTYNNHLYKQISSTSTGASNDNHYFGYGTPWGYFDFNRFHCHFSPRDWQRLINNNWGFRPKRLNFKLFNIQVEEVTTNDGVTTIANNLTSTVQVFSDSEYQLPYVLGSAHQGCLPPFPADVFMIPQYGYLTLNNGSQAVGRSSFYCLEYFPSQMLRTGNNFTFSYTFEEVPFHSSYAHSQSLDRLMNPLIDQYLYYLNRTQNQSGSAQNKDLLFSRGSPAGMSVQPKNWLPGPCYRQQRVSKTKTDNNNSNFTWTGASKYNLNGRESIINPGTAVASHKDDEDKFFPMSGVMIFGKESAGASSTALDNVMITDEEEIKATNPVATERFGTVAVNFQSSSTDPATGDVHAMGALPGMVWQDRDVYLQGPIWAKIPHTDGHFHPSPLMGGFGLKNPPPQILIKNTPVPANPPAEFSATKFASFITQYSTGQVSVEIEWELQKENSKRWNPEVQYTSNYAKSANVDFTVDNNGLYTEPRPIGTRYLTRPL

SEQ ID NO: 4934 - protein, 736 aa, Adeno-associated virus
MAADGYLPDWLEDNLSEGIREWWDLKPGAPKPKANQQKQDDGRGLVLPGYKYLGPFNGLDKGEPVNAADAAALEHDKAYDQQLKAGDNPYLRYNHADAEFQERLQEDTSFGGNLGRAVFQAKKRVLEPLGLVEEGAKTAPGKKRPVEQSPQEPDSSSGIGKTGQQPAKKRLNFGQTGDSESVPDPQPLGEPPATPAAVGPTTMASGGGAPMADNNEGADGVGNASGNWHCDSTWLGDRVITTSTRTWALPTYNNHLYKQISSTSTGASNDNHYFGYGTPWGYFDFNRFHCHFSPRDWQRLINNNWGFRPKRLNFKLFNIQVEEVTTNDGVTTIANNLTSTVQVFSDSEYQLPYVLGSAHQGCLPPFPADVFMIPQYGYLTLNNGSQAVGRSSFYCLEYFPSQMLRTGNNFTFSYTFEEVPFHSSYAHSQSLDRLMNPLIDQYLYYLNRTQNQSGSAQNKDLLFSRGSPAGMSVQPKNWLPGPCYRQQRVSKTKTDNNNSNFTWTGASKYNLNGRESIINPGTAVASHKDDEDKFFPMSGVMIFGKESAGASSTALDNVMITDEEEIKATNPVATERFGTVAVNFQSSSTDPATGDVHAMGALPGMVWQDRDVYLQGPIWAKIPHTDGHFHPSPLMGGFGLKNPPPQILIKNTPVPANPPAEFSATKFASFITQYSTGQVSVEIEWELQKENSKRWNPEVQYTSNYAKSANVDFTVDNNGLYTEPRPIGTRYLTRPL

SEQ ID NO: 4935 - DNA, 2211 bp, Adeno-associated virus
  source 1..2211: mol_type = genomic DNA
atggctgccgatggttatcttccagattggctcgaggacaacctctctgagggcattcgcgagtggtgggacttgaaacctggagccccgaagcccaaagccaaccagcaaaagcaggacgacggccggggtctggtgcttcctggctacaagtacctcggacccttcaacggactcgacaagggggagcccgtcaacgcggcggacgcagcggccctcgagcacgacaaggcctacgaccagcagctcaaagcgggtgacaatccgtacctgcggtataaccacgccgacgccgagtttcaggagcgtctgcaagaagatacgtcttttgggggcaacctcgggcgagcagtcttccaggccaagaagcgggttctcgaacctctcggtctggttgaggaaggcgctaagacggctcctggaaagaaacgtccggtagagcagtcgccacaagagccagactcctcctcgggcatcggcaagacaggccagcagcccgctaaaaagagactcaattttggccagactggcgactcagagtcagtccccgatccacaacctctcggagaacctccagcaacccccgctgctgtgggacctactacaatggcttcaggcggtggcgcaccaatggcagacaataacgaaggcgccgacggagtgggtaatgcctcaggaaattggcattgcgattccacatggctgggcgacagagtcatcaccaccagcacccgcacctgggccttgcccacctacaataaccacctctacaagcaaatctccagtacttcaacgggggccagcaacgacaaccactacttcggctacggcaccccctgggggtattttgatttcaacagattccactgccacttttcaccacgtgactggcagcgactcatcaacaacaattggggattccggcccaagagactcaacttcaaactcttcaacatccaagtcgaggaggtcacgacgaatgatggcgtcacaaccatcgctaataaccttaccagcacggttcaagtcttctcggactcggagtaccagcttccgtacgtcctcggctctgcgcaccagggctgcctccctccgttcccggcggacgtgttcatgattccgcaatacggctacctgacgctcaacaatggcagccaagccgtgggacgttcatccttttactgcctggaatatttcccttctcagatgctgagaacgggcaacaactttaccttcagctacacctttgaggaagtgcctttccacagcagctacgcgcacagccagagcctggaccggctgatgaatcctctcatcgaccaatacctgtattacctgaacagaacacaaaatcagtccggaagtgcccaaaacaaggacttgctgtttagccgtgggtctccagctggcatgtctgttcagcccaaaaactggctacctggaccctgttatcggcagcagcgcgtttctaaaacaaaaacagacaacaacaacagcaattttacctggactggtgcttcaaaatataacctcaatgggcgtgaatccatcatcaaccctggcaccgctgtggcctcacacaaagacgacgaagacaagttctttcccatgagcggtgtcatgatttttggaaaagagagcgccggagcttcaagcactgcattggacaatgtcatgattacagacgaagaggaaattaaagccactaaccctgtggccaccgaaagatttgggaccgtggcagtcaatttccagagcagcagcacagaccctgcgaccggagatgtgcatgctatgggagcattacctggcatggtgtggcaagatagagacgtgtacctgcagggtcccatttgggccaaaattcctcacacagatggacactttcacccgtctcctcttatgggcggctttggactcaagaacccgcctcctcagatcctcatcaaaaacacgcctgttcctgcgaatcctccggcggagttttcagctacaaagtttgcttcattcatcacccaatactccacaggacaagtgagtgtggaaattgaatgggagctgcagaaagaaaacagcaagcgctggaatcccgaagtgcagtacacatccaattatgcaaaatctgccaacgttgattttactgtggacaacaatggactttatactgagcctcgccccattggcacccgttaccttacccgtcccctgtaa

SEQ ID NO: 4936 - protein, 737 aa, Adeno-associated virus
RMAADGYLPDWLEDNLSEGIREWWDLKPGAPKPKANQQKQDDGRGLVLPGYKYLGPFNGLDKGEPVNAADAAALEHDKAYDQQLKAGDNPYLRYNHADAEFQERLQEDTSFGGNLGRAVFQAKKRVLEPLGLVEEGAKTAPGKKRPVEQSPQEPDSSSGIGKTGQQPAKKRLNFGQTGDSESVPDPQPLGEPPATPAAVGPTTMASGGGAPMADNNEGADGVGNASGNWHCDSTWLGDRVITTSTRTWALPTYNNHLYKQISSTSTGASNDNHYFGYSTPWGYFDFNRFHCHFSPRDWQRLINNNWGFRPKRLNFKLFNIQVEEVTTNDGVTTIANNLTSTVQVFSDSEYQLPYVLGSAHQGCLPPFPADVFMIPQYGYLTLNNGSQAVGRSSFYCLEYFPSQMLRTGNNFTFSYTFEEVPFHSSYAHSQSLDRLMNPLIDQYLYYLNRTQNQSGSAQNKDLLFSRGSPAGMSVQPKNWLPGPCYRQQRVSKTKTDNNNSNFTWTGASKYNLNGRESIINPGTAVASHKDDEDKFFPMSGVMIFGKESAGASSTALDNVMITDEEEIKATNPVATERFGTVAVNFQSSSTDPATGDVHAMGALPGMVWQDRDVYLQGPIWAKIPHTDGHFHPSPLMGGFGLKNPPPQILIKNTPVPANPPAEFSATKFASFITQYSTGQVSVEIEWELQKENSKRWNPEVQYTSNYAKSANVDFTVDNNGLYTEPRPIGTRYLTRPL

SEQ ID NO: 4937 - protein, 737 aa, Adeno-associated virus
RMAADGYLPDWLEDNLSEGIREWWDLKPGAPKPKANQQKQDDGRGLVLPGYKYLGPFNGLDKGEPVNAADAAALEHDKAYDQQLKAGDNPYLRYNHADAEFQERLQEDTSFGGNLGRAVFQAKKRVLEPLGLVEEGAKTAPGKKRPVEQSPQEPDSSSGIGKTGQQPAKKRLNFGQTGDSESVPDPQPLGEPPATPAAVGPTTMASGGGAPMADNNEGADGVGNASGNWHCDSTWLGDRVITTSTRTWALPTYNNHLYKQISSTSTGASNDNHYFGYSTPWGYFDFNRFHCHFSPRDWQRLINNNWGFRPKRLNFKLFNIQVKEVTTNDGVTTIANNLTSTVQVFSDSEYQLPYVLGSAHQGCLPPFPADVFMIPQYGYLTLNNGSQAVGRSSFYCLEYFPSQMLRTGNNFTFSYTFEEVPFHSSYAHSQSLDRLMNPLIDQYLYYLNRTQNQSGSAQNKDLLFSRGSPAGMSVQPKNWLPGPCYRQQRVSKTKTDNNNSNFTWTGASKYNLNGRESIINPGTAVASHKDDEDKFFPMSGVMIFGKESAGASSTALDNVMITDEEEIKATNPVATERFGTVAVNFQSSSTDPATGDVHAMGALPGMVWQDRDVYLQGPIWAKIPHTDGHFHPSPLMGGFGLKNPPPQILIKNTPVPANPPAEFSATKFASFITQYSTGQVSVEIEWELQKENSKRWNPEVQYTSNYAKSANVDFTVDNNGLYTEPRPIGTRYLTRPL

SEQ ID NO: 4938 - protein, 737 aa, Adeno-associated virus
RMAADGYLPDWLEDNLSEGIREWWDLKPGAPKPKANQQKQDDGRGLVLPGYKYLGPFNGLDKGEPVNAADAAALEHDKAYDQQLKAGDNPYLRYNHADAEFQERLQEDTSFGGNLGRAVFQAKKRVLEPLGLVEEGAKTAPGKKRPVEQSPQEPDSSSGIGKTGQQPAKKRLNFGQTGDSESVPDPQPLGEPPATPAAVGPTTMASGGGAPMADNNEGADGVGNASGNWHCDSTWLGDRVITTSTRTWALPTYNNHLYKQISSTSTGASNDNHYFGYSTPWGYFDFNRFHCHFSPRDWQRLINNNWGFRPKRLNFKLFNIQVKEVTTNDGVTTIANNLTSTVQVFSDSEYQLPYVLGSAHQGCLPPFPADVFMIPQYGYLTLNNGSQAVGRSSFYCLEYFPSQMLRTGNNFTFSYTFEEVPFHSSYAHSQSLDRLMNPLIDQYLYYLNRTQNQSGSAQNKDLLFSRGSPAGMSVQPKNWLPGPCYRQQRVSKTKTDNNNSNFTWTGASKYNLNGRESIINPGTAVASHKDDEDKFFPMSGVMIFGKESAGANSTALDNVMITDEEEIKATNPVATERFGTVAVNFQSSSTDPATGDVHAMGALPGMVWQDRDVYLQGPIWAKIPHTDGHFHPSPLMGGFGLKNPPPQILIKNTPVPANPPAEFSATKFASFITQYSTGQVSVEIEWELQKENSKRWNPEVQYTSNYAKSANVDFTVDNNGLYTEPRPIGTRYLTRPL

SEQ ID NO: 4939 - DNA, 2208 bp, Adeno-associated virus
  source 1..2208: mol_type = genomic DNA
atggctgccgatggttatcttccagattggctcaaggacactctctctgaaggaataagacagtggtggaagctcaaacctggcccaccaccaccaaagcccgcagagcggcataaggacgacagcgggggtcttgtgcttcctgggtacaagtacctcggacccttcaacggactcgacaagggagagccggtcaacgaggcagacgccgcggccctcgagtacgacaaggcctacgaccggcagctcgacagcggagacaacccgtacctcaagtacaaccacgccgacgcggagtttcaggagcgccttaaagaagatacgtcttttgggggcaacctcggacgagcagtcttccaggcgaaaaagagggttcttgaacctctgggcctggttgaggaacctgttaagacggctccgggaaaaaagaggccggtagagcactctcctgtggagccagactcctcctcgggaacaggaaaagcgggccagcagcctgcgagaaagagattgaattttggtcagactggagacgcagactccgtacctgacccccagcctctcggacagccaccagcagccccctctggtctgggaactaatacgatggctacaggcagtggcgcaccaatggcagacaataacgagggcgccgacggagtgggtaattcctcgggaagttggcattgcgattccacatggatgggcgacagagtcatcaccaccagcacccgaacctgggctctgcccacctacaacaaccatctgtacaagcagatctccagccaatcaggagccagcaacgacaaccactactttggctacagcaccccttgggggtattttgacttcaacagattccactgccacttttcaccacgtgactggcaaagactcatcaacaacaactggggattccggcccaagagactcaacttcaagctctttaacattcaagtcaaggaggtcacgcagaatgacggtacgacgacgattgccaataaccttaccagcacggttcaggtgtttactgactcggagtaccagctcccgtacgtccccggctcggcgcatcaaggatgcctcccgccgttcccagcagacgtcttcatggtgccacagtatggatacctcaccctgaacaacgggagtcaggcagtaggacgctcttcattttactgcctggagtactttccttctcagatgcttcgtaccggaaacaactttaccttcagctacacctttgaggatgttcctttccacagcagctacgctcacagccagagtttggaccgtctcatgaatcctctcatcgaccagtacctgtattacttgagcagaacaaacactccaagcggaaccaccacgcagtccaggcttcagttttctcaggccggagcaagtgacattcgggaccagtctaggaactggcttcctggaccctgttaccgccagcagcgagtatcaaagacagctgcggacaacaacaacagtgaatactcgtggactggagctaccaagtaccacctcaatggcagagactctctggtgaatccgggcccggccatggccagccacaaggacgatgaagaaaagttttttcctcaaagcggggttctcatctttgggaagcaaggctcagagaaaacaaatgtggacattgaaaaggtcatgattacagacgaagaggaaatcagaaccaccaatcccgtggccacggagcagtatggttctgtatctaccaacctccagagcggcaacacacaagcagctactgcagatgtcaacacacaaggcgttcttccaggcatggtctggcaggacagagacgtgcacctgcaggggcctatctgggcaaagattccacacacggacggacattttcacccctctcccctcatgggcggatttggacttaaacaccctcctccacagattctcatcaagaacaccccggtacctgcaaatccttcgaccaccttcagtgcggcaaagtttgcttccttcatcacacagtattccacagggcaggtcagcgtggagatcgagtgggagctgcagaaggagaacagcaaacgctggaaccccgagatccagtacacttccaactacaacaaatctgttaatgtggactttactgtggacactaatggtgtgtattcagagcctcgccccattggcaccagatacctgactcgtaatctgtaa

SEQ ID NO: 4940 - protein, 735 aa, Adeno-associated virus
MAADGYLPDWLKDTLSEGIRQWWKLKPGPPPPKPAERHKDDSGGLVLPGYKYLGPFNGLDKGEPVNEADAAALEYDKAYDRQLDSGDNPYLKYNHADAEFQERLKEDTSFGGNLGRAVFQAKKRVLEPLGLVEEPVKTAPGKKRPVEHSPVEPDSSSGTGKAGQQPARKRLNFGQTGDADSVPDPQPLGQPPAAPSGLGTNTMATGSGAPMADNNEGADGVGNSSGSWHCDSTWMGDRVITTSTRTWALPTYNNHLYKQISSQSGASNDNHYFGYSTPWGYFDFNRFHCHFSPRDWQRLINNNWGFRPKRLNFKLFNIQVKEVTQNDGTTTIANNLTSTVQVFTDSEYQLPYVPGSAHQGCLPPFPADVFMVPQYGYLTLNNGSQAVGRSSFYCLEYFPSQMLRTGNNFTFSYTFEDVPFHSSYAHSQSLDRLMNPLIDQYLYYLSRTNTPSGTTTQSRLQFSQAGASDIRDQSRNWLPGPCYRQQRVSKTAADNNNSEYSWTGATKYHLNGRDSLVNPGPAMASHKDDEEKFFPQSGVLIFGKQGSEKTNVDIEKVMITDEEEIRTTNPVATEQYGSVSTNLQSGNTQAATADVNTQGVLPGMVWQDRDVHLQGPIWAKIPHTDGHFHPSPLMGGFGLKHPPPQILIKNTPVPANPSTTFSAAKFASFITQYSTGQVSVEIEWELQKENSKRWNPEIQYTSNYNKSVNVDFTVDTNGVYSEPRPIGTRYLTRNL

SEQ ID NO: 4941 - DNA, 2208 bp, Adeno-associated virus
  source 1..2208: mol_type = genomic DNA
atggctgccgatggttatcttccagattggctcgaggacactctctctgaaggaataagacagtggtggaagctcaaacctggcccaccaccaccaaagcccgcagagcggcataaggacgacagcaggggtcttgtgcttcctgggtacaagtacctcggacccttcaacggactcgacaagggggagccggtcaacgaggcagacgccgcggccctcgagcacgacaaggcctacgaccggcagctcgacagcggagacaacccgtacctcaagtacaaccacgccgacgcagagtttcaggagcgccttaaagaagatacgtcttttgggggcaacctcggacgagcagtcttccaggcgaaaaagagggttcttgaacctctgggcctggttgaggaacctgttaagacggctccgggaaaaaagaggccggtagagcactctcctgtggagccagactcctcctcgggaaccggaaaagcgggccagcagcctgcaagaaaaagattaaattttggtcagactggagacgcagactccgtacctgacccccagcctctcggacagccaccagcagccccctctggtctgggatctactacaatggctacaggcagtggcgcaccaatggcagacaataacgagggtgccgatggagtgggtaattcctcaggaaattggcattgcgattcccaatggctgggcgacagagtcatcaccaccagcacccgaacctgggccctgcccacatacaacaaccacctctacaagcaaatctccagccaatcaggagccagcaacgacaaccactactttggctacagcaccccctgggggtattttgacttcaacagattccactgccacttttcaccacgtgactggcaaagactcatcaacaacaactggggattccggcccaaaagactcaacttcaagctctttaatattcaagtcaaagaggtcacgcagaatgacggtacgacgacgattgccaataaccttaccagcacggttcaggtgtttactgactcggagtaccagctcccgtacgtcctgggctcggcgcatcaaggatgcctcccgccgtttccagcggacgtcttcatggtcccacagtatggatacctcaccctgaacaacgggagtcaggcggtaggacgctcttccttttactgcctggagtactttccttctcagatgctgcgtactggaaacaactttcagttcagctacacttttgaagacgtgcctttccacagcagctacgctcacagccagagtctggatcggctgatgaatcctctgatcgaccagtacctgtattatctgaacaagacacaaacaaatagtggaactcttcagcagtctcggctactgtttagccaagctggaccaaccaacatgtctcttcaagctaaaaactggctgcctggaccttgctacagacagcagcgtctgtcaaaacaggcaaacgacaacaacaacagcaactttccctggactgcagctacaaagtatcatctaaatggccgggactcgttggttaatccaggaccagctatggccagtcgcaaggatgacgaagaaaagtttttccccatgcatggaaccctgatatttggtaaacaaggaacaaatgccaacgacgcggatttggaaaatgtcatgattacagatgaagaagaaatcagggccaccaatcccgtggctacggagcagtacgggactgtgtcaaataatttgcaaaactcaaacactggtccaactactggaactgtcaatcaccaaggagcgttacctggtatggtgtggcaggatcgagacgtgtacctgcagggacccatttgggccaagattcctcacaccgatggacactttcatccttctccactgatgggaggttttggactcaaacacccgcctcctcagatcatgatcaaaaacactcccgttccagccaatcctcccacaaacttcagttctgccaagtttgcttctttcatcacacagtattccacgggacaggtcagcgtggagatcgagtgggagctgcagaaggagaacagcaaacgctggaatcccgaaattcagtacacttccaactacaacaagtctgttaatgtggactttactgtggacactaatggtgtgtattcagagcctcgccccattggcaccagatacctgactcgtaatctgtaa

SEQ ID NO: 4942 - protein, 735 aa, Adeno-associated virus
MAADGYLPDWLEDTLSEGIRQWWKLKPGPPPPKPAERHKDDSRGLVLPGYKYLGPFNGLDKGEPVNEADAAALEHDKAYDRQLDSGDNPYLKYNHADAEFQERLKEDTSFGGNLGRAVFQAKKRVLEPLGLVEEPVKTAPGKKRPVEHSPVEPDSSSGTGKAGQQPARKRLNFGQTGDADSVPDPQPLGQPPAAPSGLGSTTMATGSGAPMADNNEGADGVGNSSGNWHCDSQWLGDRVITTSTRTWALPTYNNHLYKQISSQSGASNDNHYFGYSTPWGYFDFNRFHCHFSPRDWQRLINNNWGFRPKRLNFKLFNIQVKEVTQNDGTTTIANNLTSTVQVFTDSEYQLPYVLGSAHQGCLPPFPADVFMVPQYGYLTLNNGSQAVGRSSFYCLEYFPSQMLRTGNNFQFSYTFEDVPFHSSYAHSQSLDRLMNPLIDQYLYYLNKTQTNSGTLQQSRLLFSQAGPTNMSLQAKNWLPGPCYRQQRLSKQANDNNNSNFPWTAATKYHLNGRDSLVNPGPAMASRKDDEEKFFPMHGTLIFGKQGTNANDADLENVMITDEEEIRATNPVATEQYGTVSNNLQNSNTGPTTGTVNHQGALPGMVWQDRDVYLQGPIWAKIPHTDGHFHPSPLMGGFGLKHPPPQIMIKNTPVPANPPTNFSSAKFASFITQYSTGQVSVEIEWELQKENSKRWNPEIQYTSNYNKSVNVDFTVDTNGVYSEPRPIGTRYLTRNL

SEQ ID NO: 4943 - DNA, 2208 bp, Adeno-associated virus
  source 1..2208: mol_type = genomic DNA
atggctgccgatggttatcttccagattggctcgaggacactctctctgaaggaataagacagtggtggaagctcaaacctggcccaccaccaccaaagcccgcagagcggcataaggacgacagcaggggtcttgtgcttcctgggtacaagtacctcggacccttcaacggactcgacaagggagagccggtcaacgaggcagacgccgcggccctcgagcacgacaaagcctacgaccggcagctcgacagcggagacaacccgtacctcaagtacaaccacgccgacgcggagtttcaggagcgccttaaagaagatacgtcttttgggggcaacctcggacgagcagtcttccaggcgaaaaagagggttcttgaacctctgggcctggttggggaacctgtcaagacggctccaggaaaaaagaggccggtagagcactctcctgtggagccagactcctcctcgggaaccggaaaggcgggccagcagcctgcaagaaaaagattgaattttggtcagactggagacgcagactcagtacctgacccccagcctctcggacagccaccagcagccccctctggtctgggaactaatacgatggctacaggcagtggcgcaccaatggcagacaataacgagggcgccgacggagtgggtaattcctcgggaaattggcattgcgattccacatggatgggcgacagagtcatcaccaccagcacccgaacctgggccctgcccacctacaacaaccacctctacaaacaaatttccagccaatcaggagcctcgaacgacaatcactactttggctacagcaccccttgggggtattttgacttcaacagattccactgccacttttcaccacgtgactggcaaagactcatcaacaacaactggggattccgacccaagagactcaacttcaagctctttaacattcaagtcaaagaggtcacgcagaatgacggtacgacgacgattgccaataaccttaccagcacggttcaggtgtttactgactcggagtaccagctcccgtacgtcctcggctcggcgcatcaaggatgcctcccgccgttcccagcagacgtcttcatggtgccacagtatggatacctcaccctgaacaacgggagtcaggcagtaggacgctcttcattttactgcctggagtactttccttctcagatgctgcgtaccggaaacaactttaccttcagctacacttttgaggacgttcctttccacagcggctacgctcacagccagagtctggaccgtctcatgaatcctctcatcgaccagtacctgtattacttgagcacaacaaacactccaagtggaaccaccacgcagtcaaggcttcagttttctcaggccggagcgagtgacattcgggaccagtctaggaactggcttcctggaccctgttaccgccagcagcgagtatcaaagacatctgcggataacaacaacagtgaatactcgtggactggagctaccaagtaccacctcaatggcagagactctctggtgaatccgggcccggccatggcaagccacaaggacaatgaagaaaagttttttcctcagagcggggttctcatctttgggaagcaaggctcagagaaaacaaatgtggacattgaaaaggtcatgattacagacgaagaggaaatcaggacaaccaatcccgtggctacggagcagtacggttctgtatctaccaacctccagagaggcaacagacaagcagctaccgcagatgtcaacacacaaggcgttcttccaggcatggtctggcaggacagagatgtgtaccttcaggggcccatctgggcaaagattccacacacggacggacattttcacccctctcccctcatgggtggattcggacttaaacaccctcctccacagattctcatcaagaacaccccggtacctgcgaatccttcgaccaccttcagtgcggcaaagtttgcttccttcatcacacagtactccacgggacaggtcagcgtggagatcgagtgggagctgcagaaggaaaacagcaaacgctggaatcccgaaattcagtacacttccaactacaacaagtctgttaatgtggactttactgtggacactaatggcgtgtattcagagcctcgccccattggcaccagatacctgactcgtaatctgtaa

SEQ ID NO: 4944 - protein, 735 aa, Adeno-associated virus
MAADGYLPDWLEDTLSEGIRQWWKLKPGPPPPKPAERHKDDSRGLVLPGYKYLGPFNGLDKGEPVNEADAAALEHDKAYDRQLDSGDNPYLKYNHADAEFQERLKEDTSFGGNLGRAVFQAKKRVLEPLGLVGEPVKTAPGKKRPVEHSPVEPDSSSGTGKAGQQPARKRLNFGQTGDADSVPDPQPLGQPPAAPSGLGTNTMATGSGAPMADNNEGADGVGNSSGNWHCDSTWMGDRVITTSTRTWALPTYNNHLYKQISSQSGASNDNHYFGYSTPWGYFDFNRFHCHFSPRDWQRLINNNWGFRPKRLNFKLFNIQVKEVTQNDGTTTIANNLTSTVQVFTDSEYQLPYVLGSAHQGCLPPFPADVFMVPQYGYLTLNNGSQAVGRSSFYCLEYFPSQMLRTGNNFTFSYTFEDVPFHSGYAHSQSLDRLMNPLIDQYLYYLSTTNTPSGTTTQSRLQFSQAGASDIRDQSRNWLPGPCYRQQRVSKTSADNNNSEYSWTGATKYHLNGRDSLVNPGPAMASHKDNEEKFFPQSGVLIFGKQGSEKTNVDIEKVMITDEEEIRTTNPVATEQYGSVSTNLQRGNRQAATADVNTQGVLPGMVWQDRDVYLQGPIWAKIPHTDGHFHPSPLMGGFGLKHPPPQILIKNTPVPANPSTTFSAAKFASFITQYSTGQVSVEIEWELQKENSKRWNPEIQYTSNYNKSVNVDFTVDTNGVYSEPRPIGTRYLTRNL

SEQ ID NO: 4945 - DNA, 2208 bp, Adeno-associated virus
  source 1..2208: mol_type = genomic DNA
atggctgccgatggttatcttccagattggctcgaggacactctctctgaaggaataagacagtggtggaagctcaaacctggcccaccaccaccaaagcccgcagagcggcataaggacgacagcaggggtcttgtgcttcctgggtacaagtacctcggacccttcaacggactcgacaagggagagccggtcaacgaggcagacgccgcggccctcgagcacgacaaagcctacgaccggcagctcgacagcggagacaacccgtacctcaagtacaaccacgccgacgcggagtttcaggagcgccttaaagaagatacgtcttttgggggcaacctcggacgagcagtcttccaggcgaaaaagagggttcttgaacctctgggcctggttggggaacctgttaagacggctccgggaaaaaagaggccggtagagcactctcctgtggagccagactcctcctcgggaaccggaaaggcgggccagcagcctgcaagaaaaagattgaattttggtcagactggagacgcagactcagtacctgacccccagcctctcggacagccaccagcagccccctctggtctgggaactaatacgatggctacaggcagtggcgcaccaatggcagacaataacgagggcgccgacggagtgggtaattcctcgggaaatcggcattgcgattccacatggatgggcgacagagtcatcaccaccagcacccgaacctgggccctgcccacctacaacaaccacctctacagacaaatttccagccaatcaggagcctcgaacgacaatcactactttggctacagcaccccttgggggtattttgacttcaacagattccactgccacttttcaccacgtgactggcaaagactcatcaacaacaactggggattccgacccaagagactcaacttcaagctctttaacattcaagtcaaagaggtcacgcagaatgacggtacgacgacgattgccaataaccttaccagcacggttcaggtgtttactgactcggagtaccagctcccgtacgtcctcggctcggcgcatcaaggatgcctcccgccgttcccagcagacgtcttcatggtgccacagtatggatacctcaccctgagcaacgggagtcaggcagtaggacgctcttcattttactgcccggagtactttccttctcagatgctgcgtaccggaaacaactttaccttcagctacacttttgaggacgttcctttccacagcagctacgctcacagccagagtctggaccgtctcatgaatcctctcatcgaccagtacctgtattacttgagcacaacaaacactccaagtggaaccaccacgcagtcaaggcttcagttttctcaggccggagcgagtgacattcgggaccagtctaggaactggcttcctggaccctgttaccgccagcagcgagtatcaaagacatctgcggataacaacaacagtgaatactcgtggactggagctaccaagtaccacctcaatggcagagactctctggtgaatccgggcccggccatggcaagccacaaggacaatgaagaaaagttttttcctcagagcggggttctcatctttgggaagcaaggctcagagaaaacaaatgtggacattgaaaaggtcatgattacagacgaagaggaaatcaggacaaccaatcccgtggctacggagcagtatggttctgtatctaccaacctccagagaggcaacagacaagcagctaccgcagatgtcaacacacaaggcgttcttccaggcatggtctggcaggacagagatgtgtaccttcaggggcccatctgggcaaagattccacacacggacggacattttcacccctctcccctcatgggtggattcggacctaaacaccctcctccacagattctcatcaagaacaccccggtacctgcgaatccttcgaccaccttcagtgcggcaaagtttgcttccttcatcacacagtactccacgggacaggtcagcgtggagatcgagtgggagctgcagaaggaaaacagcaaacgctggaatcccgaaattcagtacacttccaactacaacaagtctgttaatgtggactttactgtggacactaatggcgtgtattcagagcctcgccccattggcaccagatacctgactcgtaatttgtaa

SEQ ID NO: 4946 - protein, 735 aa, Adeno-associated virus
MAADGYLPDWLEDTLSEGIRQWWKLKPGPPPPKPAERHKDDSRGLVLPGYKYLGPFNGLDKGEPVNEADAAALEHDKAYDRQLDSGDNPYLKYNHADAEFQERLKEDTSFGGNLGRAVFQAKKRVLEPLGLVGEPVKTAPGKKRPVEHSPVEPDSSSGTGKAGQQPARKRLNFGQTGDADSVPDPQPLGQPPAAPSGLGTNTMATGSGAPMADNNEGADGVGNSSGNRHCDSTWMGDRVITTSTRTWALPTYNNHLYRQISSQSGASNDNHYFGYSTPWGYFDFNRFHCHFSPRDWQRLINNNWGFRPKRLNFKLFNIQVKEVTQNDGTTTIANNLTSTVQVFTDSEYQLPYVLGSAHQGCLPPFPADVFMVPQYGYLTLSNGSQAVGRSSFYCPEYFPSQMLRTGNNFTFSYTFEDVPFHSSYAHSQSLDRLMNPLIDQYLYYLSTTNTPSGTTTQSRLQFSQAGASDIRDQSRNWLPGPCYRQQRVSKTSADNNNSEYSWTGATKYHLNGRDSLVNPGPAMASHKDNEEKFFPQSGVLIFGKQGSEKTNVDIEKVMITDEEEIRTTNPVATEQYGSVSTNLQRGNRQAATADVNTQGVLPGMVWQDRDVYLQGPIWAKIPHTDGHFHPSPLMGGFGPKHPPPQILIKNTPVPANPSTTFSAAKFASFITQYSTGQVSVEIEWELQKENSKRWNPEIQYTSNYNKSVNVDFTVDTNGVYSEPRPIGTRYLTRNL

SEQ ID NO: 4947 - DNA, 2205 bp, Adeno-associated virus
  source 1..2205: mol_type = genomic DNA
atggctgccgatggttatcttccagattggctcgaggacactctctctgaaggaataagacagtggtggaagctcaaacctggcccaccaccaccaaagcccgcagagcggcataaggacgacagcaggggtcttgtgcttcctgggtacaagtacctcggacccttcaacggactcgacaagggagagccggtcaacgaggcagacgccgcggccctcgagcacgacaaggcctacgaccggcagctcgacagcggagacaacccgtacctcaagtacaaccacgccgacgcggagtttcaggagcgtcttaaagaagatacgtcttttgggggcaacctcggacgagcagtcttccaggcgaaaaagagggttcttgaacctctgggcctggttgaggaacctgttaagacggctccgggaaaaaagaggccggtagagcactctcctgcggagccagactcctcctcgggaaccggaaaagcgggccagcagcctgcaagaaaaagactgaatttcggtcagactggagacgcagactccgtacctgacccccagcctctcagacagccaccagcagcccccacaagtttgggatctactacaatggctacaggcagtggcgcaccaatggcagacaataacgagggtgccgatggagtgggtaattcctcaggaaattggcattgcgattcccaatggctgggcgacagagtcatcaccaccagcacccgaacctgggccctgcccacctacaacaaccacctttacaagcaaatctccagccaatcaggagcctcaaacgacaaccactactttggctacagcaccccctgggggtattttgacttcaacagattccactgccacttttcaccacgtgactggcaaagactcatcaacaacaactggggattccgacccaagagactcaacttcaagctctttaacattcaagtcaaagaggtcacgcagaatgacggtacgacgacgattgccaataaccttaccagcacggttcaggtgtttactgactcggagtaccagctcccgtacgtcctcggctcggcgcatcaaggatgcctcccgccgtttccagcggacgtcttcatggtcccacagtatggatacctcaccctgaacaacgggagtcaggcggtaggacgctcttccttttactgcctggagtactttccttctcagatgctgcgtactggaaacaactttcagttcagctacacttttgaagacgtgcctttccacagcagctacgctcacagccagagtttggatcggctgatgaatcctctgatcgaccagtacctgtattatctaaacagaacacaaacagctagtggaactcagcagtctcggctactgtttagccaagctggacccacaagcatgtctcttcaagctaaaaactggctgcctggaccgtgttatcgccagcagcgtttgtcaaagcaggcaaacgacaacaacaacagcaactttccctggactggagctaccaagtactacctcaatggcagagactctttggtgaacccgggcccggccatggccagccacaaggacgatgaagaaaagtttttccccatgcatggaaccctaatatttggtaaagaaggaacaaatgctaccaacgcggaattggaaaatgtcatgattacagatgaagaggaaatcaggaccaccaatcccgtggctacagagcagtacggatatgtgtcaaataatttgcaaaactcaaatactgctgcaagtactgaaactgtgaatcaccaaggagcattacctggtatggtgtggcaggatcgagacgtgtacctgcagggacccatttgggccaagattcctcacaccgatggacactttcatccttctccactgatgggaggttttggactcaaacacccgcctcctcagattatgatcaaaaacactcccgttccagccaatcctcccacaaacttcagttctgccaagtttgcttccttcatcacacagtattccacgggacaggtcagcgtggagatcgagtgggagctgcagaaggagaacagcaaacgctggaatcccgaaattcagtacacttccaactacaacaaatctgttaatgtggactttactgtggacactaatggtgtgtattcagagcctcgccccattggcaccagatacctgactcgtaatctgtaa

SEQ ID NO: 4948 - protein, 734 aa, Adeno-associated virus
MAADGYLPDWLEDTLSEGIRQWWKLKPGPPPPKPAERHKDDSRGLVLPGYKYLGPFNGLDKGEPVNEADAAALEHDKAYDRQLDSGDNPYLKYNHADAEFQERLKEDTSFGGNLGRAVFQAKKRVLEPLGLVEEPVKTAPGKKRPVEHSPAEPDSSSGTGKAGQQPARKRLNFGQTGDADSVPDPQPLRQPPAAPTSLGSTTMATGSGAPMADNNEGADGVGNSSGNWHCDSQWLGDRVITTSTRTWALPTYNNHLYKQISSQSGASNDNHYFGYSTPWGYFDFNRFHCHFSPRDWQRLINNNWGFRPKRLNFKLFNIQVKEVTQNDGTTTIANNLTSTVQVFTDSEYQLPYVLGSAHQGCLPPFPADVFMVPQYGYLTLNNGSQAVGRSSFYCLEYFPSQMLRTGNNFQFSYTFEDVPFHSSYAHSQSLDRLMNPLIDQYLYYLNRTQTASGTQQSRLLFSQAGPTSMSLQAKNWLPGPCYRQQRLSKQANDNNNSNFPWTGATKYYLNGRDSLVNPGPAMASHKDDEEKFFPMHGTLIFGKEGTNATNAELENVMITDEEEIRTTNPVATEQYGYVSNNLQNSNTAASTETVNHQGALPGMVWQDRDVYLQGPIWAKIPHTDGHFHPSPLMGGFGLKHPPPQIMIKNTPVPANPPTNFSSAKFASFITQYSTGQVSVEIEWELQKENSKRWNPEIQYTSNYNKSVNVDFTVDTNGVYSEPRPIGTRYLTRNL

SEQ ID NO: 4949 - DNA, 3160 bp, Adeno-associated virus
  source 1..3160: mol_type = genomic DNA
acccttcactaaagggactagtcctgcaggtttaaacgaattcgcccttgctgcgtcaactggaccaatgagaactttcccttcaacgactgtgtcgacaagatggtgatttggtgggaggaggggaagatgaccgccaaggtcgtggagtcggccaaagccattctcggaggaagcaaggtgcgcgtggaccagaaatgcaagtcctcggcccagatagatccgactcccgtgatcgtcacctccaacaccaacatgtgcgccgtgattgacgggaactcaacgaccttcgaacaccagcagccgttgcaagaccggatgttcaaatttgaactcacccgccgtctggatcatgactttgggaaggtcaccaagcgggaagtcaaagactttttccggtgggcaaaggatcacgtggttgaggtggagcatgaattctacgtcaaaaagggtggagccaagaaaagacccgcccctagtgacgcagatataagtgagcccaaacgggtgcgcgagtcagttgcgcagccatcgacgtcagacgcggaagcttcgatcaactacgcggacaggtaccaaaacaaatgttctcgtcacgtgggcatgaatctgatgctgtttccctgcagacaatgcgagagaatgaatcaaaattcaaatatctgcttcactcacggacagaaagactgtttagagtgctttcccgtgtcagaatctcaacctgtttctgtcgtcaaaaaggcgtatcagaaactgtgctacattcatcatatcatgggaaaggtgccagacgcttgcactgcctgcgatctggtcaatgtggatttggatgactgcatctctgaacaataaatgatttaaatcaggtatggctgccgatggttatcttccagattggctcgaggacactctctctgaaggaataagacagtggtggaagctcaaacctggcccaccaccaccaaagcccgcagagcggcataaggacgacagcaggggtcttgtgcttcctgggtacaagtacctcggacccttcaacggactcgacaagggagagccggtcaacgaggcagacgccgcggccctcgagcacgacaaggcctacgaccggcagctcgacagcggagacaacccgtacctcaagtacaaccacgccgacgcggagtttcaggagcgtcttaaagaagatacgtcttttgggggcaacctcggacgagcagtcttccaggcgaaaaagagggttcttgaacctctgggcctggttgaggaacctgttaagacggctccgggaaaaaagaggccggtagagcactctcctgcggagccagactcctcctcgggaaccggaaaagcgggccagcagcctgcaagaaaaagactgaatttcggtcagactggagacgcagactccgtacctgacccccagcctctcagacagccaccagcagcccccacaagtttgggatctactacaatggctacaggcagtggcgcaccaatggcagacaataacgagggtgccgatggagtgggtaattcctcaggaaattggcattgcgattcccaatggctgggcgacagagtcatcaccaccagcacccgaacctgggccctgcccacctacaacaaccacctttacaagcaaatctccagccaatcaggagcctcaaacgacaaccactactttggctacagcaccccctgggggtattttgacttcaacagattccactgccacttttcaccacgtgactggcaaagactcatcaacaacaactggggattccgacccaagagactcaacttcaagctctttaacattcaagtcaaagaggtcacgcagaatgacggtacgacgacgattgccaataaccttaccagcacggttcaggtgtttactgactcggagtaccagctcccgtacgtcctcggctcggcgcatcaaggatgcctcccgccgtttccagcggacgtcttcatggtcccacagtatggatacctcaccctgaacaacgggagtcaggcggtaggacgctcttccttttactgcctggagtactttccttctcagatgctgcgtactggaaacaactttcagttcagctacacttttgaagacgtgcctttccacagcagctacgctcacagccagagtttggatcggctgatgaatcctctgatcgaccagtacctgtattatctaaacagaacacaaacagctagtggaactcagcagtctcggctactgtttagccaagctggacccacaagcatgtctcttcaagctaaaaactggctgcctggaccgtgttatcgccagcagcgtttgtcaaagcaggcaaacgacaacaacaacagcaactttccctggactggagctaccaagtactacctcaatggcagagactctttggtgaacccgggcccggccatggccagccacaaggacgatgaagaaaagtttttccccatgcatggaaccctaatatttggtaaagaaggaacaaatgctaccaacgcggaattggaaaatgtcatgattacagatgaagaggaaatcaggaccaccaatcccgtggctacagagcagtacggatatgtgtcaaataatttgcaaaactcaaatactgctgcaagtactgaaactgtgaatcaccaaggagcattacctggtatggtgtggcaggatcgagacgtgtacctgcagggacccatttgggccaagattcctcacaccgatggacactttcatccttctccactgatgggaggttttggactcaaacacccgcctcctcagattatgatcaaaaacactcccgttccagccaatcctcccacaaacttcagttctgccaagtttgcttccttcatcacacagtattccacgggacaggtcagcgtggagatcgagtgggagctgcagaaggagaacagcaaacgctggaatcccgaaattcagtacacttccaactacaacaaatctgttaatgtggactttactgtggacactaatggtgtgtattcagagcctcgccccattggcaccagatacctgactcgtaatctgtaattgcttgttaatcaataaaccgtttaattcgtttcagttgaactttggtctctgcgaagggcgaattcgcggccgctaaatcaatcg

SEQ ID NO: 4950 - protein, 734 aa, Adeno-associated virus
MAADGYLPDWLEDTLSEGIRQWWKLKPGPPPPKPAERHKDDSRGLVLPGYKYLGPFNGLDKGEPVNEADAAALEHDKAYDRQLDSGDNPYLKYNHADAEFQERLKEDTSFGGNLGRAVFQAKKRVLEPLGLVEEPVKTAPGKKRPVEHSPAEPDSSSGTGKAGQQPARKRLNFGQTGDADSVPDPQPLGQPPAAPTSLGSTTMATGSGAPMADNNEGADGVGNSSGNWHCDSQWLGDRVITTSTRTWALPTYNNHLYKQISSQSGASNDNHYFGYSTPWGYFDFNRFHCRFSPRDWQRLINNNWGFRPKRLNFKLFNIQVKEVTQNDGTTTIANNLTSTVQVFTDSEYQLPYVLGSAHQGCLPPFPADVFMVPQYGYLTLNNGSQAVGRSSFYCLEYFPSQMLRTGNNFQFSYTFEDVPFHSSYAHSQGLDRLMNPLIDQYLYYLNRTQTASGTQQSRLLFSQAGPTSMSLQAKNWLPGPCYRQQRLSKQANDNNNSNFPWTGATKYHLNGGDSLVNPGPAMASHKDDEEKFFPMHGTLIFGKEGTNATNAELENVMITDEEEIRTTNPVATEQYGYVSNNLQNSNTAASTETVNHQGALPGMVWQDRDVYLRGPIWAKIPHADGHFHPSPLMGGFGLKHPPPQIMIKNTPVPANPPTNFSSAKFASFITQYSTGQVSVEIEWELQKENSKRWNPEIQYTSNYNKSVNVDFTVDTNGVYSEPRPIGTRYLTRNL

SEQ ID NO: 4951 - DNA, 3157 bp, Adeno-associated virus
  source 1..3157: mol_type = genomic DNA
ctcactaagggactagtcctgcaggtttaaacgaattcgcccttgctgcgtcaactggaccaatgagaactttcccttcaacgactgtgtcgacaagatggtgatttggtgggaggaggggaagatgaccgccaaggtcgtggagtcggccaaagccactctcggaggaagcaaggtgcgcgtggaccagaaacgcaagtcctcggcccagatagatccgactcccgtgatcgtcacctccaacaccaacatgtgcgccgtgattgacgggaactcaacgaccttcgaacaccagcagccgttgcaagaccgaatgttcaaatttgaactcacccgccgtctggatcatgacttcgggaaggtcaccaagcaggaagtcaaagactttttccggtgggcaaaggatcacgtggttgaggtggagcatgaattctacgtcaaaaagggtggagccaagaaaagacccgcccctagtgacgcagatataagtgagcccaaacgggtgcgcgagtcagttgcgcagccatcgacgtcagacgcggaagcttcgatcaactacgcggacaggtaccaaaacaaatgttctcgtcacgtgggcatgaatctgatgctgtttccctgcagacaatgcgagagaatgaatcaaaattcaaatatctgcttcactcacggacagaaagactgtttagagtgctttcccgtgtcagaatctcaacctgtttctgtcgtcaaaaaggcgtatcagaaactgtgctacattcatcatatcatgggaaaggtgccagacgcttgcactgcctgcgatctggtcaatgtggatttggatgactgcatctctgaacaataaatgatttaaatcaggtatggctgccgatggttatcttccagattggctcgaggacactctctctgaaggaataagacagtggtggaagctcaaacctggcccaccaccaccaaagcccgcagagcggcataaggacgacagcaggggtcttgtgcttcctgggtacaagtacctcggacccttcaacggactcgacaagggagagccggtcaacgaggcagacgccgcggctctcgagcacgacaaggcctacgaccggcagctcgacagcggagacaacccgtacctcaagtacaaccacgccgacgcggagtttcaggagcgtcttaaagaagatacgtcttttgggggcaacctcggacgagcagtcttccaggcgaaaaagagggttcttgaacctctgggcctggttgaggaacctgttaagacggctccgggaaaaaagaggccggtagagcactctcctgcggagccagactcctcctcgggaaccggaaaagcgggccagcagcctgcaagaaaaagactgaatttcggtcagactggagacgcagactccgtacctgacccccagcctctcggacagccaccagcagcccccacaagtttgggatctactacaatggctacaggcagtggcgcaccaatggcagacaataacgagggtgccgatggagtgggtaattcctcaggaaattggcattgcgattcccaatggctgggcgacagagtcatcaccaccagcacccgaacctgggccctgcccacctacaacaaccacctttacaagcaaatctccagccaatcaggagcctcaaacgacaaccactactttggctacagcaccccctgggggtattttgacttcaacagattccactgccgcttttcaccacgtgactggcaaagactcatcaacaacaactggggattccgacccaagagactcaacttcaagctctttaacattcaagtcaaagaggtcacgcagaatgacggtacgacgacgattgccaataaccttaccagcacggttcaggtgtttactgactcggagtaccagctcccgtacgtcctcggctcggcgcatcaaggatgcctcccgccgtttccagcggacgtcttcatggtcccacagtatggatacctcaccctgaacaacgggagtcaggcggtaggacgctcttccttttactgcctggagtactttccttctcagatgctgcgtactggaaacaactttcagttcagctacacttttgaagacgtgcctttccacagcagctacgctcacagccagggtttggatcggctgatgaatcctctgatcgaccagtacctgtattatctaaacagaacacaaacagctagtggaactcagcagtctcggctactgtttagccaagctggacccacaagcatgtctcttcaagctaaaaactggctgcctggaccgtgttatcgccagcagcgtttgtcaaagcaggcaaacgacaacaacaacagcaactttccctggactggagctaccaagtaccacctcaatggcggagactctttggtgaacccgggcccggccatggccagccacaaggacgatgaagaaaagtttttccccatgcatggaaccctaatatttggtaaagaaggaacaaatgctaccaacgcggaattggaaaatgtcatgattacagatgaagaggaaatcaggaccaccaatcccgtggctacagagcagtacggatatgtgtcaaataatttgcaaaactcaaatactgctgcaagtactgaaactgtgaatcaccaaggagcattacctggtatggtgtggcaggatcgagacgtgtacctgcggggacccatttgggccaagattcctcacgccgatggacactttcatccttctccactgatgggaggttttggactcaaacacccgcctcctcagattatgatcaaaaacactcccgttccagccaatcctcccacaaacttcagttctgccaagtttgcttccttcatcacacagtattccacgggacaggtcagcgtggagatcgagtgggagctgcagaaggagaacagcaaacgctggaatcccgaaattcagtacacttccaactacaacaaatctgttaatgtggactttactgtggacactaatggtgtgtattcagagcctcgccccattggcaccagatacctgactcgtaatctgtaattgcttgttaatcaataaaccgtttaattcgtttcagttgaactttggtctctgcgaagggcgaattcgcggccgctaaattcaattcg

SEQ ID NO: 4952 - protein, 734 aa, Adeno-associated virus
MAADGYLPDWLEDTLSEGIRQWWKLKPGPPPPKPAERHKDDSRGLVLPGYKYLGPFNGLDKGEPVNEADAAALEHDKAYDRQLDSGDNPYLKYNHADAEFQERLKEDTSFGGNLGRAVFQAKKRVLEPLGLVEEPVKTAPGKKRPVEHSPAEPDSSSGTGKAGQQPARKRLNFGQTGDADSVPDPQPLGQPPAAPTSLGSTTMATGSGAPMADNNEGADGVGNSSGNWHCDSQWLGDRVITTSTRTWALPTYNNHLYKQISSQSGASNDNHYFGYSTPWGYFDFNRFHCHFSPRDWQRLINNNWGFRPKRLNFKLFNIQVKEVTQNDGTTTIANNLTSTVQVFTDSEYQLPYVLGSAHQGCLPPFPADVFMVPQYGYLTLNNGSQAVGRSSFYCLECFPSQMLRTGNNFQFSYTFEDVPFHSSYAHSQSLDRLMNPLIDQYLYYLNRTQTASGTQQSRLLFSQAGPTSMSLQAKNWLPGPCYRQQRLSKQANDNNNSNFPWTGATKYHLNGRDSLVNPGPAMASHKDDEEKFFPMHGTLIFGKEGTNATNAELENVMITDEEEIRTTNPVATEQYGYVSNNLQNSNTAASTETVNHQGALPGMVWQDRDVYLQGPIWAKIPHTDGHFHPSPLMGGFGLKHPPPQIMIKNTPVPANPPTNFSSAKFASFITQYSTGQVSVEIEWELQKENSKRWNPEIQYTSNYNKSVNVDFTVDTNGVYSEPRPIGTRYLTRNL

SEQ ID NO: 4953 - DNA, 2208 bp, Adeno-associated virus
  source 1..2208: mol_type = genomic DNA
atggctgccgatggttatcttccagattggctcgaggacactctctctgaaggaataagacagtggtggaagctcaaacctggcccaccaccaccaaagcccgcagagcggcataaggacgacagcaggggtcttgtgcttcctggatacaagtacctcggacccttcaacggactcgacaagggagagccggtcaacgaggcagacgccgcggccctcgagcacgacaaggcctacgaccggcagctcgacagcggagacaacccgtacctcaagtacaaccacgccgacgcggagtttcaggagcgccttaaagaagatacgtcttttgggggcaacctcggacgagcagtcttccaggcgaaaaagagggttcttgaacctctgggcctggttgaggaacctgttaagacggctccgggaaaaaagaggccggtagagcactctcctgtggagccagactcctcctcgggaaccggaaaagcgggcaaccagcctgcaagaaaaagattgaatttcggtcagactggagacgcagactccgtacctgacccccagcctctcggacagccaccagcatccccctctggtctgggaactaatacgatggctacaggcagtggcgcaccaatggcagacaataacgagggcgccgacggagtgggtaattcctcgggaaattggcattgcgattccacatggatgggcgacagagtcgtcaccaccagcacccgcacctgggccctgcccacctacaacaaccacctctacaagcagatttccagccaatcaggagccagcaacgacaaccactactttggctacagcaccccttgggggtattttgacttcaacagattccactgccacttttcgccacgcgactggcagagactcatcaacaacaactggggattccggcccaaaagactcaacttcaagctgtttaacattcaagtcaaggaggtcacgcagaatgacggtacgacgacgattgccaataaccttaccagcacggttcaggtgtttactgacttggagtaccagctcccgtacgtcctcggctcggcgcatcaaggatgcctcccgccgttcccagcagacgtcttcatggtgccacagtatggatacctcaccctgaacaacgggagtcaggcggtaggacgctcttccttttactgcctggagtactttccttctcagatgcttcgcaccggaaacaactttaccttcagctacacttttgaagacgttcctttccacagcagctacgctcacagtcaaagtctggaccgtctcatgaatcctctcatcgaccagtacctgtattacttgagcagaacaaacactccaagcggaaccactacgcagtccaggcttcagttttctcaggccggagcgagtgacattcgggaccagtctaggaactggcttcctggaccctgttaccgccagcagcgagtatcaaagacagctgcggataacaacaacagtgaatactcgtggactggagctaccaagtaccacctcaatggcagagactctctggtgaatccgggcccggccatggccagccacaaggacgatgaagaaaagttttttcctcaaagcggggttctcatctttgggaagcaaggctcagagaaaacaaatgtggacattgaaaaggtcatgattacagacgaagaggaaatcaggaccaccaatcccgtggctacggagcagtatggttctgtatctaccaacctccagagcggcaacacacaagcagctacctcagatgtcaacacacaaggcgttcttccaggcatggtctggcaggacagagacgtgtacctgcaggggcccatctgggcaaaaattccacacacggacggacattttcacccctctcccctcatgggcggatttggacttaaacaccctcctccacagattctcattaagaataccccggtacctgcgaatccttcgaccaccttcagcgcggcaaagtttgcttccttcatcacacagtattccacggggcaggtcagcgtggagatcgagtgggagctgcagaaggagaacagcaaacgctggaatcccgaaattcagtacacttccaactacaacaaatctgttaatgtggactttactgtggacactaatggggtgtattcagagcctcgccctattggcaccagatacctgactcgtaatctgtaa

SEQ ID NO: 4954 - DNA, 3159 bp, Adeno-associated virus
  source 1..3159: mol_type = genomic DNA
gattgatttagcggccgcgaattcgcccttgctgcgtcaactggaccaatgagaactttcccttcaacgattgcgtcgacaagatggtgatctggtgggaggagggaaagatgaccgccaaggtcgtggagtcggccaaagccattctcggaggaagcaaggtgcgtgtggaccaaaagtgcaagtcttcggcccagatcgacccgactcccgtgatcgtcacctccaacaccaacatgtgcgccgtgattgatggaaactcaacgaccttcgagcaccagcagccgttgcaagaccggatgttcaaatttgaacttacccgccgtctggatcatgactttggaaaggtcaccaagcaggaagtgaaagactttttccggtgggcaaaggatcacgtggttgaggtggagcatgagttctacgtcaaaaagggtggagccaaaaaaagacccgcccccagtgacgcagatataagtgagcccaaacgggcgcgcgagtcagttgcgcagccatcgacgtcagacgcggaagcttcgatcaactacgcggacaggtaccaaaacaaatgttctcgtcacgtgggcatgaatctgatgctgtttccctgcagacaatgcgagagaatgaatcagaattcaaatatctgcttcactcacggacagaaagactgtccatagtgctttcccgtgtcagaatctcaacccgtttctgtcgtcaaaaaggcgtatcagaaactgtgctacattcatcacatcatgggaaaggtgccagacgcttgcactgcttgcgacctggtcaatgtggatttggatgactgcatctctgaacaataaatgatttaaatcaggtatggctgccgatggttatcttccagattggctcgaggacactctctctgaaggaataagacagtggtggaagctcaaacctggcccaccaccaccaaagcccgcagagcggcataaggacgacagcaggggtcttgtgcttcctggatacaagtacctcggacccttcaacggactcgacaagggagagccggtcaacgaggcagacgccgcggccctcgagcacgacaaggcctacgaccggcagctcgacagcggagacaacccgtacctcaagtacaaccacgccgacgcggagtttcaggagcgccttaaagaagatacgtcttttgggggcaacctcggacgagcagtcttccaggcgaaaaagagggttcttgaacctctgggcctggttgaggaacctgttaagacggctccgggaaaaaagaggccggtagagcactctcctgtggagccagactcctcctcgggaaccggaaaagcgggcaaccagcctgcaagaaaaagattgaatttcggtcagactggagacgcagactccgtacctgacccccagcctctcggacagccaccagcatccccctctggtctgggaactaatacgatggctacaggcagtggcgcaccaatggcagacaataacgagggcgccgacggagtgggtaattcctcgggaaattggcattgcgattccacatggatgggcgacagagtcgtcaccaccagcacccgcacctgggccctgcccacctacaacaaccacctctacaagcagatttccagccaatcaggagccagcaacgacaaccactactttggctacagcaccccttgggggtattttgacttcaacagattccactgccacttttcgccacgcgactggcagagactcatcaacaacaactggggattccggcccaaaagactcaacttcaagctgtttaacattcaagtcaaggaggtcacgcagaatgacggtacgacgacgattgccaataaccttaccagcacggttcaggtgtttactgacttggagtaccagctcccgtacgtcctcggctcggcgcatcaaggatgcctcccgccgttcccagcagacgtcttcatggtgccacagtatggatacctcaccctgaacaacgggagtcaggcggtaggacgctcttccttttactgcctggagtactttccttctcagatgcttcgcaccggaaacaactttaccttcagctacacttttgaagacgttcctttccacagcagctacgctcacagtcaaagtctggaccgtctcatgaatcctctcatcgaccagtacctgtattacttgagcagaacaaacactccaagcggaaccactacgcagtccaggcttcagttttctcaggccggagcgagtgacattcgggaccagtctaggaactggcttcctggaccctgttaccgccagcagcgagtatcaaagacagctgcggataacaacaacagtgaatactcgtggactggagctaccaagtaccacctcaatggcagagactctctggtgaatccgggcccggccatggccagccacaaggacgatgaagaaaagttttttcctcaaagcggggttctcatctttgggaagcaaggctcagagaaaacaaatgtggacattgaaaaggtcatgattacagacgaagaggaaatcaggaccaccaatcccgtggctacggagcagtatggttctgtatctaccaacctccagagcggcaacacacaagcagctacctcagatgtcaacacacaaggcgttcttccaggcatggtctggcaggacagagacgtgtacctgcaggggcccatctgggcaaaaattccacacacggacggacattttcacccctctcccctcatgggcggatttggacttaaacaccctcctccacagattctcattaagaataccccggtacctgcgaatccttcgaccaccttcagcgcggcaaagtttgcttccttcatcacacagtattccacggggcaggtcagcgtggagatcgagtgggagctgcagaaggagaacagcaaacgctggaatcccgaaattcagtacacttccaactacaacaaatctgttaatgtggactttactgtggacactaatggggtgtattcagagcctcgccctattggcaccagatacctgactcgtaatctgtaattgcttgttaatcaataaaccgtttaattcgtttcagttgaactttggtctctgcgaagggcgaattcgtttaaacctgcaggactagtccctttagtgagg

SEQ ID NO: 4955 - protein, 735 aa, Adeno-associated virus
MAADGYLPDWLEDTLSEGIRQWWKLKPGPPPPKPAERHKDDSRGLVLPGYKYLGPFNGLDKGEPVNEADAAALEHDKAYDRQLDSGDNPYLKYNHADAEFQERLKEDTSFGGNLGRAVFQAKKRVLEPLGLVEEPVKTAPGKKRPVEHSPVEPDSSSGTGKAGNQPARKRLNFGQTGDADSVPDPQPLGQPPASPSGLGTNTMATGSGAPMADNNEGADGVGNSSGNWHCDSTWMGDRVVTTSTRTWALPTYNNHLYKQISSQSGASNDNHYFGYSTPWGYFDFNRFHCHFSPRDWQRLINNNWGFRPKRLNFKLFNIQVKEVTQNDGTTTIANNLTSTVQVFTDLEYQLPYVLGSAHQGCLPPFPADVFMVPQYGYLTLNNGSQAVGRSSFYCLEYFPSQMLRTGNNFTFSYTFEDVPFHSSYAHSQSLDRLMNPLIDQYLYYLSRTNTPSGTTTQSRLQFSQAGASDIRDQSRNWLPGPCYRQQRVSKTAADNNNSEYSWTGATKYHLNGRDSLVNPGPAMASHKDDEEKFFPQSGVLIFGKQGSEKTNVDIEKVMITDEEEIRTTNPVATEQYGSVSTNLQSGNTQAATSDVNTQGVLPGMVWQDRDVYLQGPIWAKIPHTDGHFHPSPLMGGFGLKHPPPQILIKNTPVPANPSTTFSAAKFASFITQYSTGQVSVEIEWELQKENSKRWNPEIQYTSNYNKSVNVDFTVDTNGVYSEPRPIGTRYLTRNL

SEQ ID NO: 4956 - DNA, 2205 bp, Adeno-associated virus
  source 1..2205: mol_type = genomic DNA
atggctgccgatggttatcttccagattggctcgaggacactctctctgaaggaataagacagtggtggaagctcaaacctggcccaccaccaaagcccgcagagcggcataaggacgacagcaggggtcttgtgcttcctggatacaagtacctcggacccttcaacggactcgacaagggagagccggtcaacgaggcagacgccgcggccctcgagcacgacaaggcctacgaccggcagctcgacagcggagacaacccgtacctcaagtacaaccacgccgacgcggagtttcaggagcgccttaaagaagatacgtcttttgggggcaacctcggacgagcagtcttccaggcgaaaaagagggttcttgaacctctgggcctggttgaggaacctgttaagacggctccgggaaaaaagaggcccgtagagcactctcctgtggagccagactcctcctcgggaaccggaaaagcgggcaaccagcctgcaagaaaaagattgaatttcggtcagactggagacgcagactccgtacctgacccccagcctctcggacagccaccagcagccccctctggtctgggaactaatacgatggctacaggcagtggcgcaccaatggcagacaataacgagggcgccgacggagtgggtaattcctcgggagattggcattgcgattccacatggatgggcgacagagtcatcaccaccagcacccgcacctgggccctgcccacctacaacaaccacctctacaagcagatttccagccaatcaggagccagcaatgacaaccactactttggctacagcaccccttgggggtattttgacttcaacagattccactgccacttttcgccacgcgactggcagagactcatcaacaacaactggggattccggcccaaaagactcaacctcaagctgtttaacattcaagtcaaggaggtcacgcagaatgacggtacgacgacgattgccaataaccttaccagcacggttcaggtgtttactgacttggagtaccagctcccgtacgtcctcggctcggcgcatcaaggatgcctcccgccgttcccagcagacgtcttcatggtgccacagtatggatacctcaccctgaacaacgggagtcaggcggtaggacgctcttccttttactgcctggagtactttccttctcagatgcttcgtaccggaaacaactttaccttcagctacacttttgaagacgttcctttccacagcagctacgctcacagtcaaagtctggaccgtctcatgaatcctctcatcgaccagtacctgtattacttgagcagaacaaacactccaagcggaaccactacgcagtccaggcttcagttttctcaggccggagcgagtgacattcgggaccagtctaggaactggcttcctggaccctgttaccgccagcagcgagtatcaaagacagctgcggataacaacaacggtgaatactcgtggactggagctaccaagtaccacctcaatggcagagactctctggtgaatccgggcccggccatggccagccacaaggacgatgaagaaaagttttttcctcaaagcggggttctcatctttgggaagcaaggctcagagaaaacaaatgtggacattgaaaaggtcatgattacagacgaagaggaaatcaggaccaccaatcccgtggctacggagcagtatggttctgtatctaccaacctccagagcggcaacacacgagcagctacctcagatgtcaacacacaaggcgttcttccaggcatggtctggcaggacagagacgtgtacctgcaggggcccatctgggcaaaaattccacacacggacggacattttcacccctctcccctcatgggcggatttggacttaaacaccctcctccacagattctcattaagaataccccggtacctgcgaatccttcgaccaccttcagcgcggcaaagtttgcttccttcatcacacagtattccacggggcaggtcagcgtggagatcgagtgggagctgcagaaggagaacagcaaacgctggaatcccgaaattcagtacacttccaactacaacaaatctgttaatgtggactttactgtggacactaatggggtgtattcagagcctcgccctattggcaccagatacctgactcgtaatctgtaa

SEQ ID NO: 4957 - DNA, 3156 bp, Adeno-associated virus
  source 1..3156: mol_type = genomic DNA
cgattgaatttagcggccgcgaattcgcccttgctgcgtcaacggaccaatgagaactttcccttcaacgattgcgtcgacaagatggtgatctggtgggaggagggaaagatgaccgccaaggtcgtggagtcggccaaagccattctcggaggaagcaaggtgcgtgtggaccaaaagtgcaagtcttcggcccagatcgacccgactcccgtgatcgtcacctccaacaccaacatgtgcgccgtgattgatggaaactcaacgaccttcgagcaccagcagccgttgcaagaccggatgttcaaatttgaacttacccgccgtctggatcatgactttggaaaggtcaccaagcaggaagtgaaagactttttccggtgggcaaaggatcacgtggttgaggtggagcatgagttctacgtcaaaaagggtggagccaaaaaaagacccgcccccagtgacgcagatataagtgagcccaaacgggcgcgcgagtcagttgcgcagccatcgacgtcagacgcggaagcttcgatcaactacgcggacaggtaccaaaacaaatgttctcgtcacgtgggcatgaatctgatgctgtttccctgcagacaatgcgagcgaatgaatcagaattcaaatatctgcttcactcacggacagaaagactgtttagagtgctttcccgtgtcagaatctcaacccgtttctgtcgtcaaaaaggcgtatcagaaactgtgctacattcatcacatcatgggaaaggtgccagacgcttgcactgcttgcgacctggtcaatgtggatttggatgactgcatctctgaacaataaatgatttaaatcaggtatggctgccgatggttatcttccagattggctcgaggacactctctctgaaggaataagacagtggtggaagctcaaacctggcccaccaccaaagcccgcagagcggcataaggacgacagcaggggtcttgtgcttcctggatacaagtacctcggacccttcaacggactcgacaagggagagccggtcaacgaggcagacgccgcggccctcgagcacgacaaggcctacgaccggcagctcgacagcggagacaacccgtacctcaagtacaaccacgccgacgcggagtttcaggagcgccttaaagaagatacgtcttttgggggcaacctcggacgagcagtcttccaggcgaaaaagagggttcttgaacctctgggcctggttgaggaacctgttaagacggctccgggaaaaaagaggcccgtagagcactctcctgtggagccagactcctcctcgggaaccggaaaagcgggcaaccagcctgcaagaaaaagattgaatttcggtcagactggagacgcagactccgtacctgacccccagcctctcggacagccaccagcagccccctctggtctgggaactaatacgatggctacaggcagtggcgcaccaatggcagacaataacgagggcgccgacggagtgggtaattcctcgggagattggcattgcgattccacatggatgggcgacagagtcatcaccaccagcacccgcacctgggccctgcccacctacaacaaccacctctacaagcagatttccagccaatcaggagccagcaatgacaaccactactttggctacagcaccccttgggggtattttgacttcaacagattccactgccacttttcgccacgcgactggcagagactcatcaacaacaactggggattccggcccaaaagactcaacctcaagctgtttaacattcaagtcaaggaggtcacgcagaatgacggtacgacgacgattgccaataaccttaccagcacggttcaggtgtttactgacttggagtaccagctcccgtacgtcctcggctcggcgcatcaaggatgcctcccgccgttcccagcagacgtcttcatggtgccacagtatggatacctcaccctgaacaacgggagtcaggcggtaggacgctcttccttttactgcctggagtactttccttctcagatgcttcgtaccggaaacaactttaccttcagctacacttttgaagacgttcctttccacagcagctacgctcacagtcaaagtctggaccgtctcatgaatcctctcatcgaccagtacctgtattacttgagcagaacaaacactccaagcggaaccactacgcagtccaggcttcagttttctcaggccggagcgagtgacattcgggaccagtctaggaactggcttcctggaccctgttaccgccagcagcgagtatcaaagacagctgcggataacaacaacggtgaatactcgtggactggagctaccaagtaccacctcaatggcagagactctctggtgaatccgggcccggccatggccagccacaaggacgatgaagaaaagttttttcctcaaagcggggttctcatctttgggaagcaaggctcagagaaaacaaatgtggacattgaaaaggtcatgattacagacgaagaggaaatcaggaccaccaatcccgtggctacggagcagtatggttctgtatctaccaacctccagagcggcaacacacgagcagctacctcagatgtcaacacacaaggcgttcttccaggcatggtctggcaggacagagacgtgtacctgcaggggcccatctgggcaaaaattccacacacggacggacattttcacccctctcccctcatgggcggatttggacttaaacaccctcctccacagattctcattaagaataccccggtacctgcgaatccttcgaccaccttcagcgcggcaaagtttgcttccttcatcacacagtattccacggggcaggtcagcgtggagatcgagtgggagctgcagaaggagaacagcaaacgctggaatcccgaaattcagtacacttccaactacaacaaatctgttaatgtggactttactgtggacactaatggggtgtattcagagcctcgccctattggcaccagatacctgactcgtaatctgtaattgcttgttaatcaataaaccgtttaattcgtttcagttgaactttggtctctgcgaagggcgaattcgtttaaacctgcaggactagtccctttagtgag

SEQ ID NO: 4958 - protein, 734 aa, Adeno-associated virus
MAADGYLPDWLEDTLSEGIRQWWKLKPGPPPKPAERHKDDSRGLVLPGYKYLGPFNGLDKGEPVNEADAAALEHDKAYDRQLDSGDNPYLKYNHADAEFQERLKEDTSFGGNLGRAVFQAKKRVLEPLGLVEEPVKTAPGKKRPVEHSPVEPDSSSGTGKAGNQPARKRLNFGQTGDADSVPDPQPLGQPPAAPSGLGTNTMATGSGAPMADNNEGADGVGNSSGDWHCDSTWMGDRVITTSTRTWALPTYNNHLYKQISSQSGASNDNHYFGYSTPWGYFDFNRFHCHFSPRDWQRLINNNWGFRPKRLNLKLFNIQVKEVTQNDGTTTIANNLTSTVQVFTDLEYQLPYVLGSAHQGCLPPFPADVFMVPQYGYLTLNNGSQAVGRSSFYCLEYFPSQMLRTGNNFTFSYTFEDVPFHSSYAHSQSLDRLMNPLIDQYLYYLSRTNTPSGTTTQSRLQFSQAGASDIRDQSRNWLPGPCYRQQRVSKTAADNNNGEYSWTGATKYHLNGRDSLVNPGPAMASHKDDEEKFFPQSGVLIFGKQGSEKTNVDIEKVMITDEEEIRTTNPVATEQYGSVSTNLQSGNTRAATSDVNTQGVLPGMVWQDRDVYLQGPIWAKIPHTDGHFHPSPLMGGFGLKHPPPQILIKNTPVPANPSTTFSAAKFASFITQYSTGQVSVEIEWELQKENSKRWNPEIQYTSNYNKSVNVDFTVDTNGVYSEPRPIGTRYLTRNL

SEQ ID NO: 4959 - DNA, 2208 bp, Adeno-associated virus
  source 1..2208: mol_type = genomic DNA
atggctgccgatggttatcttccagattggctcgaggacactctctctgaaggaataagacagtggtggaagctcaaacctggcccaccaccaccaaagcccgcagagcggcataaggacgacagcaggggtcttgtgcttcctgggtacaagtacctcggacccttcaacggactcgacaagggagagccggtcaacgaggcagacgccgcggccctcgagcacgacaaggcctacgaccggcagctcgacagcggagacaacccgtacctcaagtacgaccacgccgacgcggagtttcaggagcgccttaaagaagatacgtcttttgggggcaacctcggacgagcagtcttccaggcaaaaaagagggttcttgaacctctgggcctggttgaggagcctgttaagacggctccgggaaaaaagaggccggtagagcactctcctgtggagccagactcctcctcgggaaccggaaaagcgggcaaccagcctgcaagaaagagattgaatttcggtcagactggagacgcagactccgtacctgacccccagcctctcggacagccaccagcagccccctctggtctgggaactaatacgatggctacaggcagtggcgcaccaatggcagacaataacgatggcgccgacggagtgggtaattcctcgggaaattggcattgcgattccacatggatgggcgacagagtcatcaccaccagcacccgaacctgggctctgcccacctacaacaaccatctgtacaagcagatttccagccaatcaggagccagcaacgacaaccactactttggctacagcaccccttgggggtattttgacttcaacagattccactgccacttttcaccacgtgactggcaaagactcatcaacaacaactggggattccggcccaagagactcaacttcaagctctttaacattcaagtcagagaggtcacgcagaatgatggtacgacgacgattgccaataaccttaccagcacggttcaggtgtttactgactcggagtaccagctcccgtacgtcctcggctcggcgcatcaaggatgcctcccgccgttcccagcagacgtcttcatggtgccacagtatggatacctcaccctgaacaacgggagtcaggcagtaggacgctcttcattttactgcctggagtacttcccttctcagatgctgcgtaccggaaacaactttaccttcagctacacctttgaggatgttcctttccacagcagctacgctcacagccagagtttggaccgtctcatgaatcctctcatcgaccagtacctgtattacttgagcagaacaaacactccaagcggaaccaccacgcagtccaggcttcagttttctcaggccggagcgagtgacattcgggatcagtctaggaactggcttcctggaccctgttaccgccagcagcgagtatcaaagacatctgcggacaacaacaacagtgaatactcgtggattggagctaccaagtaccacctcaatggcagagactctctggtgaatccgggcccggcaatggccagccacaaggacgatgaagaaaagttttttcctcagagcggggttctcatctttggaaaacaaggatcagagaaaacaaatgtggacattgaaaaggtcatgattacagacgaagaggaaatcagaaccaccaatcccgtggccacggagcagtatggttctgtatctaccaacctccagagcggcaacacacaagcatctactgcagatgtcaacacacaaggcgttcttccaggcatggtctggcaggacagagacgtgtacctgcaggggcctatctgggcaaagattccgcacacggacggacattttcacccctctcccctcatgggcggattcggacttaaacaccctcctccacagattctcatcaaaaacaccccggtacctgcgaatccttcgaccaccttcagtgcggcaaagtttgcttccttcatcacacagtattccacggggcgggtcagcgtggagatcgagtgggagctacagaaggagaacagcaaacgctggaatcccgagatccagtacacttccaactacaacaaatctgttaatgtggactttactgtggacactaatggtgtgtattcagagcctcgccccattggcaccagatacctgactcgtaatctgtaa

SEQ ID NO: 4960 - protein, 735 aa, Adeno-associated virus
MAADGYLPDWLEDTLSEGIRQWWKLKPGPPPPKPAERHKDDSRGLVLPGYKYLGPFNGLDKGEPVNEADAAALEHDKAYDRQLDSGDNPYLKYDHADAEFQERLKEDTSFGGNLGRAVFQAKKRVLEPLGLVEEPVKTAPGKKRPVEHSPVEPDSSSGTGKAGNQPARKRLNFGQTGDADSVPDPQPLGQPPAAPSGLGTNTMATGSGAPMADNNDGADGVGNSSGNWHCDSTWMGDRVITTSTRTWALPTYNNHLYKQISSQSGASNDNHYFGYSTPWGYFDFNRFHCHFSPRDWQRLINNNWGFRPKRLNFKLFNIQVREVTQNDGTTTIANNLTSTVQVFTDSEYQLPYVLGSAHQGCLPPFPADVFMVPQYGYLTLNNGSQAVGRSSFYCLEYFPSQMLRTGNNFTFSYTFEDVPFHSSYAHSQSLDRLMNPLIDQYLYYLSRTNTPSGTTTQSRLQFSQAGASDIRDQSRNWLPGPCYRQQRVSKTSADNNNSEYSWIGATKYHLNGRDSLVNPGPAMASHKDDEEKFFPQSGVLIFGKQGSEKTNVDIEKVMITDEEEIRTTNPVATEQYGSVSTNLQSGNTQASTADVNTQGVLPGMVWQDRDVYLQGPIWAKIPHTDGHFHPSPLMGGFGLKHPPPQILIKNTPVPANPSTTFSAAKFASFITQYSTGRVSVEIEWELQKENSKRWNPEIQYTSNYNKSVNVDFTVDTNGVYSEPRPIGTRYLTRNL

SEQ ID NO: 4961 - DNA, 2217 bp, Adeno-associated virus
  source 1..2217: mol_type = genomic DNA
atggctgccgatggttatcttccagattggctcgaggacaacctctctgagggcattcgcgagtggtgggacttgaaacctggagccccgaaacccaaagccaaccagcaaaagcaggacgacggccggggtctggtgcttcctggctacaagtacctcggacccttcaacggactcgacaagggggagcccgtcaacgcggcggacgcagcggccctcgagcacgacaaggcctacgaccagcagctcaaagcgggtgacaatccgtacctgcggtataaccacgccgacgccgagtttcaggagcgtctgcaagaagatacgtcttttgggggcaacctcgggcgagcagtcttccaggccaagaagcgggttctcgaacctctcggtctggttgaggaaggcgctaagacggctcctggaaagaagagaccggtagagccatcaccccagcgttctccagactcctctacgggcatcggcaagacaggccagcagcccgcgaaaaagagactcaactttgggcagactggcgactcagagtcagtgcccgaccctcaaccaatcggagaaccccccgcaggcccctctggtctgggatctggtacaatggctgcaggcggtggcgctccaatggcagacaataacgaaggcgccgacggagtgggtagttcctcaggaaattggcattgcgattccgcatggctgggcgacagagtcatcaccaccagcacccgaccctgggccctccccacctacaacaaccacctctacaagcaaatctccaacgggacatcgggaggaagcaccaacgacaacacctacttcggctacagcaccccctgggggtattttgactttaacagattccactgccacttctcaccacgtgactggcagcgactcatcaacaacaactggggattccggcccaagagactcaacttcaagctcttcaacatccaggtcaaggaggtcacgcagaatgaaggcaccaagaccatcgccaataaccttaccagcacgattcaggtctttacggactcggaataccagctcccgtacgtcctcggctctgcgcaccagggctgcccgcctccgttcccggcggacgtcttcatgattcctcagtacgggtacctgactctgaacaacggcagtcaggccgtgggccgttcctccttctactgcctggagtactttccttctcaaatgcggagaacgggcaacaactttgagttcagctaccagtttgaggacgtgccttttcacagcagctacgcgcatagccaaagcctggaccggctgatgaaccccctcatcgaccagtacctgtactacctgtctcggactcagtccacgggaggtaccgcaggaactcagcagttgctattttctcaggccgggcctaataacatgtcggctcaggccaaaaactggctacccgggccctgctaccggcagcaacgcgtctccacgacactgtcgcaaaataacaacagcaactttgcttggaccggtgccaccaagtatcatctgaatggcagagactctctggtaaatcccggtgtcgctatggcaacgcacaaggacgacgaagagcgattttttccatccagcggagtcttgatgtttgggaaacagggagctggaaaagacaacgtggactatagcagcgttatgctaaccagtgaggaagaaatcaaaaccaccaacccagtggccacagaacagtacggcgtggtggccgataacctgcaacagcaaaacgccgctcctattgtaggggccgtcaacagtcaaggagccttacctggcatggtctggcagaaccgggacgtgtacctgcagggtcctatctgggccaagattcctcacacggacggcaactttcatccttcgccgctgatgggaggctttggactgaaacacccgcctcctcagatcctgattaagaatacacctgttcccgcggatcctccaactaccttcagtcaagccaagctggcgtcgttcatcacgcagtacagcaccggacaggtcagcgtggaaattgaatgggagctgcagaaagagaacagcaagcgctggaacccagagattcagtatacttccaactactacaaatctacaaatgtggactttgctgtcaatactgagggtacttattcagagcctcgccccattggcacccgttacctcacccgtaacctgtaa

SEQ ID NO: 4962 - protein, 738 aa, Adeno-associated virus
MAADGYLPDWLEDNLSEGIREWWDLKPGAPKPKANQQKQDDGRGLVLPGYKYLGPFNGLDKGEPVNAADAAALEHDKAYDQQLKAGDNPYLRYNHADAEFQERLQEDTSFGGNLGRAVFQAKKRVLEPLGLVEEGAKTAPGKKRPVEPSPQRSPDSSTGIGKTGQQPAKKRLNFGQTGDSESVPDPQPIGEPPAGPSGLGSGTMAAGGGAPMADNNEGADGVGSSSGNWHCDSAWLGDRVITTSTRPWALPTYNNHLYKQISNGTSGGSTNDNTYFGYSTPWGYFDFNRFHCHFSPRDWQRLINNNWGFRPKRLNFKLFNIQVKEVTQNEGTKTIANNLTSTIQVFTDSEYQLPYVLGSAHQGCPPPFPADVFMIPQYGYLTLNNGSQAVGRSSFYCLEYFPSQMRRTGNNFEFSYQFEDVPFHSSYAHSQSLDRLMNPLIDQYLYYLSRTQSTGGTAGTQQLLFSQAGPNNMSAQAKNWLPGPCYRQQRVSTTLSQNNNSNFAWTGATKYHLNGRDSLVNPGVAMATHKDDEERFFPSSGVLMFGKQGAGKDNVDYSSVMLTSEEEIKTTNPVATEQYGVVADNLQQQNAAPIVGAVNSQGALPGMVWQNRDVYLQGPIWAKIPHTDGNFHPSPLMGGFGLKHPPPQILIKNTPVPADPPTTFSQAKLASFITQYSTGQVSVEIEWELQKENSKRWNPEIQYTSNYYKSTNVDFAVNTEGTYSEPRPIGTRYLTRNL

SEQ ID NO: 4963 - protein, 735 aa, Adeno-associated virus
MAADGYLPDWLEDTLSEGIRQWWKLKPGPPPPKPAERHKDDSRGLVLPGYKYLGPFNGLDKGEPVNEADAAALEHDKAYDRQLDSGDNPYLKYNHADAEFQERLKEDTSFGGNLGRAVFQAKKRVLEPLGLVEEPVKTAPGKKRPVEHSPVEPDSSSGTGKAGQQPARKRLNFGQTGDADSVPDPQPLGQPPAAPSGLGSTTMATGSGAPMADNNEGADGVGNSSGNWHCDSQWLGDRVITTSTRTWALPTYNNHLYKQISSQSGASNDNHYFGYSTPWGYFDFNRFHCHFSPRDWQRLINNNWGFRPKRLNFKLFNIQVKEVTQNDGTTTIANNLTSTVQVFTDSEYQLPYVLGSAHQGCLPPFPADVFMVPQYGYLTLNNGSQAVGRSSFYCLEYFPSQMLRTGNNFQFSYTFEDVPFHSSYAHSQSLDRLMNPLVDQYLYYLNKTQTNSGTLQQSRLLFSQAGPTNMSLQAKNWLPGPCYRQQRLSKQANDNNNSNFPWTAATKYHLNGRDSLVNPGPAMASHKDDEEKFFPMHGTLIFGKQGTNANDADLENVMITDEEEIRTTNPVATEQYGTVSNNLQNSNTGPTTGTVNHQGALPGMVWQDRDVYLQGPIWAKIPHTDGHFHPSPLMGGFGLKHPPPQIMIKNTPVPANPPTNFSSAKFASFITQYSTGQVSVEIEWELQKENSKRWNPEIQYTSNYNKSVNVDFTVDTNGVYSEPRPIGTRYLTRNL

SEQ ID NO: 4964 - DNA, 3158 bp, Adeno-associated virus
  source 1..3158: mol_type = genomic DNA
gattgaatttagcggccgcgaattcgcccttgctgcgtcaactggaccaatgagaactttcctttcaatgattgcgtcgacaagatggtgatctggtgggaggagggaaagatgaccgccaaggtcgtggagtcggccaaagccattctcggaggaagcaaggtgcgcgcggaccagaaatgcaagtcctcggcccagatagacccgactcccgtgattgtcacctccaacaccaacatgtgcgccgtgattgacgggaactcaacgaccttcgaacaccagcagccgttgcaagaccggatgttcaaatttgaactcacccgccgtctggatcatgactttgggaaggtcaccaagcaggaagtcaaagactttttccggtgggcaaaggatcacgtggttgaggtggagcatgaattctacgtcaaaaagggtggagctaagaaaagacccgcccccagtgacgcagatataagtgagcccaaacgggcgcgcgagtcagttgcgcagccatcgacgtcagacgcggaagcttcgatcaactacgcgggcaggtaccaaaacaaatgttctcgtcacgtgggcatgaatctgatgctgtttccctgcagacaatgcgagagaatgaatcagaattcaaatatctgcttcactcacggacagaaagactgtttagagtgctttcccgtgtcagaatctcaacccgtttctgtcgtcaaaaaggcgtatcagaaactttgctacattcatcatatcatgggaaaggtgccagacgcttgcactgcctgcgatctggtcaatgtggatttggatgactgcatctctgaacaataaatgatttaaatcaggtatggctgccgatggttatcttccagattggctcgaggacactctctctgaaggaataagacagtggtggaagctcaaacctggcccaccaccaccaaagcccgcagagcggcataaggacgacagcaggggtcttgtgcttcctgggtacaagtacctcggacccttcaacggactcgacaagggggagccggtcaacgaggcagacgccgcggccctcgagcacgacaaggcctacgaccggcagctcgacagcggagacaacccgtacctcaagtacaaccacgccgacgcggagtttcaggagcgccttaaagaagatacgtcttttgggggcaacctcggacgagcagtcttccaggcaaaaaagagggttcttgaacctctgggcctggttgaggaacctgttaaaacggctccgggaaaaaagaggccggtagagcactctcctgtggagccagactcctcctcgggaaccggaaaagcgggccagcagcctgcaagaaaaagattgaatttcggtcagactggagacgcagactccgtacctgacccccagcctctcggacagccaccagcagccccctctggtctgggatctactacaatggctacaggcagtggcgcaccaatggcagacaataacgagggtgccgatggagtgggtaattcctcgggaaattggcattgcgattcccaatggctgggcgacagagtcatcaccaccagcacccgcacctgggccctgcccacctacaacaaccacctctacaagcaaatctccagccaatcaggagcctcaaacgacaaccactactttggctacagcaccccctgggggtattttgacttcaacagattccactgccacttttcaccacgtgactggcaaagactcatcaacaacaactggggattccgacccaagagactcaacttcaagctctttaacattcaagtcaaagaggtcacgcagaatgacggtacgacgacgattgccaataaccttaccagcacggttcaggtgtttactgactcggagtaccagctcccgtacgtcctcggctcggcgcatcaaggatgcctcccgccgtttccagcggacgtcttcatggtcccacagtatggatacctcaccctgaacaacgggagtcaggcagtaggacgctcttcattttactgcctggagtactttccttctcagatgctgcgtaccggaaacaactttcaattcagctacacttttgaagacgtgcctttccacagcagctacgctcacagccagagtctggatcggctgatgaatcctctggtcgaccagtacctgtattatctgaacaagacacaaacaaatagtggaactcttcagcagtctcggctactgtttagccaagctggacccaccaacatgtctcttcaagctaaaaactggctgcctggaccttgctacagacagcagcgtctgtcaaagcaggcaaacgacaacaacaacagcaactttccctggactgcagctacaaagtatcatctaaatggccgggactcgttggttaatccaggaccagctatggccagtcacaaggatgacgaagaaaagtttttccccatgcatggaacccttatatttggtaaacaaggaacaaatgccaacgacgcggatttggaaaatgtcatgattacagatgaagaagaaatcaggaccaccaatcccgtggctacggagcagtacggaactgtatcaaataatttgcaaaactcaaacactggtccaactactggaactgtcaatcaccaaggagcgttacctggtatggtgtggcaggatcgagacgtgtacctgcagggacccatttgggccaagattcctcacaccgatggacactttcatccttctccactgatgggaggttttggactcaaacacccacctcctcaaatcatgatcaaaaacactcccgttccagccaatcctcccacaaacttcagttctgccaagtttgcttctttcatcacacagtattccacggggcaggtcagcgtggagatcgagtgggagctgcagaaggagaacagcaaacgctggaatcccgaaattcagtacacttccaactacaacaaatctgttaatgtggactttactgtggacactaatggtgtgtattcagagcctcgccccattggcaccagatacctgactcgtaatctgtaattgcttgttaatcaataaaccgtttaattcgtttcagttgaactttggtctctgcgaagggcgaattcgtttaaacctgcaggactagtccctttagtga

SEQ ID NO: 4965 - protein, 735 aa, Adeno-associated virus
MAADGYLPDWLEDTLSEGIRQWWKLKPGPPPPKPAERHKDDSRGLVLPGYKYLGPFNGLDKGEPVNEADAAALEHDKAYDRQLDSGDNPYLKYNHADAEFQERLKEDTSFGGNLGRAVFQAKKRVLEPLGLVEEPVKTAPGKKRPVEHPPVEPDSSSGTGKAGQQPARKRLNFGQTGDADSVPDPQPLGQPPAAPSGLGSTTMATGSGAPMADNNEGADGVGNSSGNWHCDSQWLGDRVITTSTRTWALPTYNNHLYKQISSQSGASNDNHYFGYSTPWGYFDFNRFHCHFSPRDWQRLINNNWGFRPKRLNFKLFNIQVKEVTQNDGTTTIANNLTSTVQVFTDSEYQLPYVLGSAHQGCLPPFPADVFMVPQYGYLTLNNGSQAVGRSSFYCLEYFPSQMLRTGNNFQFSYTFEDVPFHSSYAHSQSLDRLMNPLIDQYLYYLNKTQTNSGTLQQSRLLFSQAGPTNMSLQAKNRLPGPCYRQQRLSKQANDNNNSNFPWTAATKYHLNGRDSLVNPGPAMASHKDDEEKFFPMHGTLIFGKQGTNANDADLENVMITDEEEIRTTNPVATEQYGTVSNNLQNSNTGPTTGTVNHQGALPGMVWQDRDVYLQGPIWAKIPHTDGHFHPSPLVGGFGLKHPPPQIMIKNTPVPANPPTNFSSAKFASFITQYSTGQVSVEIEWELQKENSKRWNPEIQYTSNYNKSVNVDFTVDTNGVYSEPRPIGTRYLTRNL

SEQ ID NO: 4966 - DNA, 3159 bp, Adeno-associated virus
  source 1..3159: mol_type = genomic DNA
gattgaatttagcggccgcgaattcgcccttgctgcgtcaactggaccaatgagaactttcctttcaatgattgcgtcgacaagatggtgatctggtgggaggagggaaagatgaccgccaaggtcgtggagtcggccaaagccattctcggaggaagcaaggtgcgcgtggaccagaaatgcaagtcctcggcccagatagacccgactcccgtgattgtcacctccaacaccgacatgtgcgccgtgattgacgggaactcaacgaccttcgaacaccagcagccgttgcaagaccggatgttcaaatttgaactcacccgccgtctggatcatgactttgggaaggtcaccaagcaggaagtcaaagactttttccggtgggcaaaggatcacgtggttgaggtggagcatgaattctacgtcaaaaagggtggagctaagaaaagacccgcccccagtgacgcagatataagtgagcccaaacgggcgcgcgagtcagttgcgcagccatcgacgtcagacgcggaagcttcgatcaactacgcggacaggtaccaaaacaaatgttctcgtcacgtgggcatgaatctgatgctgtttccctgcagacaatgcgagagaatgaatcagaattcaaatatctgcttcactcacggacagaaagactgtttagagtgctttcccgtgtcagaatctcaacccgtttctgtcgtcaaaaaggcgtatcagaaactttgctacattcatcatatcatgggaaaggtgccagacgcttgcactgcctgcgatctggtcaatgtggatttggatgactgcatctctgaacaataaatgatttaaatcaggtatggctgccgatggttatcttccagattggctcgaggacactctctctgaaggaataagacagtggtggaagctcaaacctggcccaccaccaccaaagcccgcagagcggcataaggacgacagcaggggtcttgtgcttcctgggtacaagtacctcggacccttcaacggactcgacaagggggagccggtcaacgaggcagacgccgcggccctcgagcacgacaaggcctacgaccggcagctcgacagcggagacaacccgtacctcaagtacaaccacgccgacgcggagtttcaggagcgccttaaagaagatacgtcttttgggggcaacctcggacgagcagtcttccaggcaaaaaagagggttcttgaacctctgggcctggttgaggaacctgttaaaacggctccgggaaaaaagaggccggtagagcaccctcctgtggagccagactcctcctcgggaaccggaaaagcgggccagcagcctgcaagaaaaagattgaatttcggtcagactggagacgcagactccgtacctgacccccagcctctcggacagccaccagcagccccctctggtctgggatctactacaatggctacaggcagtggcgcaccaatggcagacaataacgagggtgccgatggagtgggtaattcctcgggaaattggcattgcgattcccaatggctgggcgacagagtcatcaccaccagcacccgcacctgggccctgcccacctacaacaaccacctctacaagcaaatctccagccaatcaggagcctcaaacgacaaccactactttggctacagcaccccctgggggtattttgacttcaacagattccactgccacttttcaccacgtgactggcaaagactcatcaacaacaactggggattccgacccaagagactcaacttcaagctctttaacattcaagtcaaagaggtcacgcagaatgacggtacgacgacgattgccaataaccttaccagcacggttcaggtgtttactgactcggagtaccagctcccgtacgtcctcggctcggcgcatcaaggatgcctcccgccgtttccagcggacgtcttcatggtcccacagtatggatacctcaccctgaacaacgggagtcaggcagtaggacgctcttcattttactgcctggagtactttccttctcagatgctgcgtaccggaaacaactttcagttcagctacacttttgaagacgtgcctttccacagcagctacgctcacagccagagtctggatcggctgatgaatcctctgatcgaccagtacctgtattatctgaacaagacacaaacaaatagtggaactcttcagcagtctcggctactgtttagccaagctggacccaccaacatgtctcttcaagctaaaaaccggctgcctggaccttgctacagacagcagcgtctgtcaaagcaggcaaacgacaacaacaacagcaactttccctggaccgcagctacaaagtatcatctaaatggccgggactcgttggttaatccaggaccagctatggccagtcacaaggatgacgaagaaaagtttttccccatgcatggaacccttatatttggtaaacaaggaacaaatgccaacgacgcggatttggaaaatgtcatgattacagatgaagaagaaatcaggaccaccaatcccgtggctacggagcagtacggaactgtatcaaataatttgcaaaactcaaacactggtccaactactggaactgtcaatcaccaaggagcgttacctggtatggtgtggcaggatcgagacgtgtacctgcagggacccatttgggccaagattcctcacaccgatggacactttcatccttctccactggtgggaggttttggactcaaacacccacctcctcaaatcatgatcaaaaacactcccgttccagccaatcctcccacaaacttcagttctgccaagtttgcttctttcatcacacagtattccacggggcaggtcagcgtggagatcgagtgggagctgcagaaggagaacagcaaacgctggaatcccgaaattcagtacacttccaactacaacaaatctgttaatgtggactttactgtggacactaatggtgtgtattcagagcctcgccccattggcaccagatacctgactcgtaatctgtaattgcttgttaatcaataaaccgtttaattcgtttcagttgaactttggtctctgcgaagggcgaattcgtttaaacctgcaggactagtccctttagtgag

SEQ ID NO: 4967 - DNA, 2208 bp, Adeno-associated virus
  source 1..2208: mol_type = genomic DNA
atggctgccgatggttatcttccagattggctcgaggacactctctctgaaggaataagacagtggtggaagctcaaacctggcccaccaccaccaaagcccgcagagcggcataaggacgacagcaggggtcttgtgcttcctgggtacaagtaccttggacccttcaacggactcgacaagggagagccggtcaacgaggcagacgccgcggccctcgagcacgacaaggcctacgaccggcagctcgacagcggagacaacccgtaccccaagtacaaccacgccgacgcggagttccaggagcgtcttaaagaagatacgtcttttgggggcaacctcggacgagcagtcttccaggcgaaaaagagggttcttgaacctctgggcctggttgaggaacctgttaagacggctccgggaaaaaagaggccggtagagcactctcctgcggagccagactcctcctcgggaaccggaaaagcgggccagcagcctgcaagaaagagattgaatttcggtcagactggagacgcagactccgtacctgacccccagcctctcggacagccaccagcagccccctctggtctgggaactaatacgatggctacaggcagtggcgcaccaatggcagacaataacgagggcgccgacggagtgggtaattcctcgggaaattggcattgcgattccacatggatgggcgacagagtcatcaccaccagcacccgcacctgggctctgcccacctacaacaaccacctctacaagcagatttccagccaatcaggagcctcaaacgacaaccactactttggctacagcaccccttgggggtattttgacttcaacagattccactgccacttttcgccacgtgactggcaaagactcatcaacaacaattggggattccggcccaaaagactcaacttcaagctctttaacattcaagtcaaggaggtcacgcagaatgacggtacgacgacgattgccaataaccttaccagcacggttcaggtgtttactgactcggagtaccagctcccgtacgtcctcggctcggcgcatcaaggatgcctcccgccgttcccagcagacgtcttcatggtgccacagtatggatacctcaccctgaacaacgggagtcaggcagtaggacgctcttcattttactgcctggagtactttccttctcagatgctgcgtaccggaaacaactttaccttcagctacacctttgaggacgttcctttccacagcagctacgcccacagccagagtttggaccgtctcatgaatcctctcatcgaccagtacctgtattacttgagcagaacaaacactccaagcggaaccaccacgcagtcaaggcttcagttttctcaggccggagcaagtgacattcgggaccagtctaggaactggcttcctggaccctgttaccgccagcagcgagtatcaaagacatctgcggataacaacaacagtgaatactcgtggactggagctaccaagtaccaccttaatggaagagactctctggtgaatccgggcccggccatggccagccacaaggacgatgaagaaaagttttttcctcagagcggggttctcatctttggaaaacaagactcgggaaaaactaatgtggacattgaaaaggtcatgattacagacgaagaggaaatcaggaccaccaatcccgtggctacggagcagtatggttctgtatctaccaacctccagagcggcaacacacaagcagctacctcagatgtcaacacacaaggcgttcttccaggcatggtgtggcaggacagagacgtgtacctgcaggggcccatctgggcaaagattccacacacggacggacattttcacccctctcccctcatgggcggattcggacttaaacaccctcccccgcagattctcatcaagaacaccccggtacctgcgaatccttcgactaccttcagtgcggcaaagtttgcttccttcattacacagtactccacggggcaggtcagcgtggagatcgagtgggagctgcagaaggagaacagcaaacgctggaatcccgagattcagtacacttccaactacaacaaatctgttaatgtggactttactgtggacactaatggtgtgtattcagagcctcgccccattggcaccaggtacctgactcgtaatctgtaa

SEQ ID NO: 4968 - protein, 735 aa, Adeno-associated virus
MAADGYLPDWLEDTLSEGIRQWWKLKPGPPPPKPAERHKDDSRGLVLPGYKYLGPFNGLDKGEPVNEADAAALEHDKAYDRQLDSGDNPYPKYNHADAEFQERLKEDTSFGGNLGRAVFQAKKRVLEPLGLVEEPVKTAPGKKRPVEHSPAEPDSSSGTGKAGQQPARKRLNFGQTGDADSVPDPQPLGQPPAAPSGLGTNTMATGSGAPMADNNEGADGVGNSSGNWHCDSTWMGDRVITTSTRTWALPTYNNHLYKQISSQSGASNDNHYFGYSTPWGYFDFNRFHCHFSPRDWQRLINNNWGFRPKRLNFKLFNIQVKEVTQNDGTTTIANNLTSTVQVFTDSEYQLPYVLGSAHQGCLPPFPADVFMVPQYGYLTLNNGSQAVGRSSFYCLEYFPSQMLRTGNNFTFSYTFEDVPFHSSYAHSQSLDRLMNPLIDQYLYYLSRTNTPSGTTTQSRLQFSQAGASDIRDQSRNWLPGPCYRQQRVSKTSADNNNSEYSWTGATKYHLNGRDSLVNPGPAMASHKDDEEKFFPQSGVLIFGKQDSGKTNVDIEKVMITDEEEIRTTNPVATEQYGSVSTNLQSGNTQAATSDVNTQGVLPGMVWQDRDVYLQGPIWAKIPHTDGHFHPSPLMGGFGLKHPPPQILIKNTPVPANPSTTFSAAKFASFITQYSTGQVSVEIEWELQKENSKRWNPEIQYTSNYNKSVNVDFTVDTNGVYSEPRPIGTRYLTRNL

SEQ ID NO: 4969 - DNA, 2208 bp, Adeno-associated virus
  source 1..2208: mol_type = genomic DNA
atggctgccgatggttatcttccagattggctcgaggacactctctctgaaggaataagacagtggtggaagctcaaacctggcccaccaccaccaaagcccgcagagcggcataaggacgacagcaggggtcttgtgcttcctgggtacaagtaccttggacccttcaacggactcgacaagggagagccggtcaacgaggcagacgccgcggccctcgagcacgacaaggcctacgaccggcagctcgacggcggagacaacccgtacctcaagtacaaccacgccgacgcggagttccaggagcgtcttaaagaagatacgtcttttgggggcaacctcggacgagcagtcttccaggcgaaaaagagggttcttgaacctctgggcctggttgaggaacctgttaagacggctccgggaaaaaagaggccggtagagcactctcttgcggagccagactcctcctcgggaaccggaaaagcgggccagcagcctgcaagaaggagattgaatttcggtcagactggagacgcagactccgtacctgacccccagcctctcggacagccaccagcagccccctctggtctgggaactaatacgatggctacaggcagtggcgcaccaatggcagacaataacgagggcgccgacggagtgggtaattcctcgggaaattggcattgcgattccacatggatgggcgacagagtcatcaccaccagcacccgcacctgggctctgcccacctacaacaaccacctctacaggcagatttccagccaatcaggagcctcaaacgacaaccactactttggctacagcaccccttgggggtattttgacttcaacagattccactgccacttttcgccacgtgactggcaaagactcatcaacaacaattggggatcccggcccaaaagactcaacttcaagctctttaacattcaagtcaaggaggtcacgcagaatgacggtacgacgacgattgccaataaccttaccagcacggttcaggtgtttactgactcggagtaccagctcccgtacgtcctcggctcggcgcatcaaggatgcctcccgccgttcccagcagacgtcttcatggtgccacagtatggatacctcaccctgaacaacgggagtcaggcagtaggacgctcttcattttactgcctggagtactttccttctcagatgctgcgtaccggaaacaactttaccttcagctacacctttgaggacgttcctttccacagcagctacgcccacagccagagtttggaccgtctcatgaatcctctcgtcgaccagtacctgtattacttgagcagaacaaacactccaagcggaaccaccacgcagtcaaggcttcagttttctcaggccggagcaagtgacattcgggaccagtctaggaactggcttcctggaccctgttaccgccagcagcgagtatcaaagacatctgcggataacaacaacagtgaatactcgtggactggagctaccaagtaccaccttaatggaagagactctctggtgaatccgggcccggccatggccagccacaaggacgatgaagaaaagttttttcctcagagcggggttctcatctttggaaaacaagactcgggaaaaactaatgtggacattgaaaaggtcatgattacagacgaagaggaaatcaggaccaccaatcccgtggctacggagcagtatggttctgtatctaccaacctccagagcggcaacacacaagcagctacctcagatgtcaacacacaaggcgttcttccaggcatggtgtggcaggacagagacgtgtacctgcaggggcccatctgggcaaagattccacacacggacggacattttcacccctctcccctcatgggcggattcggacttaaacaccctcccccgcagattctcatcaagaacaccccggtacctgcgaatccttcgactaccttcagtgcggcaaagtttgcttccttcattacacagtactccacggggcaggtcagcgtggagatcgagtgggagctgcagaaggagaacagcaaacgctggaatcccgagattcagtacacttccaactacaacaaatctgttaatgtggactttactgtggacactaatggtgtgtattcagagcctcgccccattggcaccagatacctgactcgtaatctgtaa

SEQ ID NO: 4970 - protein, 735 aa, Adeno-associated virus
MAADGYLPDWLEDTLSEGIRQWWKLKPGPPPPKPAERHKDDSRGLVLPGYKYLGPFNGLDKGEPVNEADAAALEHDKAYDRQLDGGDNPYLKYNHADAEFQERLKEDTSFGGNLGRAVFQAKKRVLEPLGLVEEPVKTAPGKKRPVEHSLAEPDSSSGTGKAGQQPARRRLNFGQTGDADSVPDPQPLGQPPAAPSGLGTNTMATGSGAPMADNNEGADGVGNSSGNWHCDSTWMGDRVITTSTRTWALPTYNNHLYRQISSQSGASNDNHYFGYSTPWGYFDFNRFHCHFSPRDWQRLINNNWGSRPKRLNFKLFNIQVKEVTQNDGTTTIANNLTSTVQVFTDSEYQLPYVLGSAHQGCLPPFPADVFMVPQYGYLTLNNGSQAVGRSSFYCLEYFPSQMLRTGNNFTFSYTFEDVPFHSSYAHSQSLDRLMNPLVDQYLYYLSRTNTPSGTTTQSRLQFSQAGASDIRDQSRNWLPGPCYRQQRVSKTSADNNNSEYSWTGATKYHLNGRDSLVNPGPAMASHKDDEEKFFPQSGVLIFGKQDSGKTNVDIEKVMITDEEEIRTTNPVATEQYGSVSTNLQSGNTQAATSDVNTQGVLPGMVWQDRDVYLQGPIWAKIPHTDGHFHPSPLMGGFGLKHPPPQILIKNTPVPANPSTTFSAAKFASFITQYSTGQVSVEIEWELQKENSKRWNPEIQYTSNYNKSVNVDFTVDTNGVYSEPRPIGTRYLTRNL

SEQ ID NO: 4971 - protein, 738 aa, Adeno-associated virus
MAADGYLPDWLEDNLSEGIREWWDLKPGAPKPKANQQKQDDGRGLVLPGYKYLGPFNGLDKGEPVNAADAAALEHDKAYDQQLKAGDNPYLRYNHADAEFQERLQEDTSFGGNLGRAVFQAKKRVLEPLGLVEEAAKTAPGKKRPVEPSPQRSPDSSAGIGKKGQQPAKKRLNFGQTGDSESVPDPQPIGEPPAGPSGLGSGTMAAGGGAPMADNNEGADGVGSSSGNWHCDSTWLGDRVITTSTRTWALPTYNNHLYKQISNGTSGGSTNDNTYFGYSTPWGYFDFNRFHCHFSPRDWQRLINNNWGFRPKRLSFKLFNIQVKEVTQNEGTETIANNLTSTIQVFTDSEYQLPYVLGSAHQGCLPPFPADVFMIPQYGYLTLNNGSQAVGRSSFYCLEYFPSQMLRTGNNFEFSYTFEDVPFHSSCAHSQSSDRLMNPLIDQYLYYLSRTRSTGGTQGTQQLLFSQAGPANMSAQAKNWLPGPCYRQQRVSTTLSQNNNSNFAWTGATKYHLNGRDSLVNPGVAMATHKDDEERFFPSSGVLMFGKQGAGRDNVDYSSVMLTSEEEIKTTNPVATEQYGVVADNLQQTNTGPIVGNVNSQGALPGMVWQNRDVYLQGPIWAKIPHTDGNFHPSPLMGGFGLKHPPPQILIKNTPVPADPPTTFSQAKLASFITQYSTGQVSVEIEWELQKENSKRWNPEIQYTSNYYKSTNVDFAVNTEGTYSEPRPIGTRYLTRNL

SEQ ID NO: 4972 - DNA, 2217 bp, Adeno-associated virus
  source 1..2217: mol_type = genomic DNA
atggctgctgacggttatcttccagattggctcgaggacaacctctctgagggcattcgcgagtggtgggacctgaaacctggagcccccaagcccaaggccaaccagcagaagcaggacgacggccggggtctggtgcttcttggctacaagtacctcggacccttcaacggactcgacaagggggagcccgtcaatgcggcggacgcagcggccctcgagcacgacaaggcctacgaccagcagctcaaagcgggtgacaatccgtacctgcggtataaccacgccgacgccgagtttcaggagcgtctgcaagaagatacgtcttttgggggcaacctcgggcgagcagtcttccaggccaagaagcgggttctcgaacctctcggtctggttgaggaagctgctaagacggctcctggaaagaagagaccggtagaaccgtcacctcagcgttcccccgactcctccacgggcatcggcaagaaaggccagcagcccgctaaaaagagactgaactttggtcagactggcgactcagagtcagtccccgaccctcaaccaatcggagaaccaccagcaggcccctctggtctgggatctggtacaatggctgcaggcggtggcgctccaatggcagacaataacgaaggcgccgacggagtgggtagttcctcaggaaattggcattgcgattccacatggctgggcgacagagtcatcaccaccagcacccgaacctgggccctgcccacctacaacaaccacctctacaagcaaatatccaatgggacatcgggaggaagcaccaacgacaacacctacttcggctacagcaccccctgggggtattttgacttcaacagattccactgccacttctcaccacgtgactggcagcgactcatcaacaacaactggggattccggccaaaaagactcagcttcaagctcttcaacatccaggtcaaggaggtcacgcagaatgaaggcaccaagaccatcgccaataaccttaccagcacgattcaggtatttacggactcggaataccagctgccgtacgtcctcggctccgcgcaccagggctgcctgcctccgttcccggcggacgtcttcatgattccccagtacggctaccttacactgaacaatggaagtcaagccgtaggccgttcctccttctactgcctggaatattttccatctcaaatgctgcgaactggaaacaattttgaattcagctacaccttcgaggacgtgcctttccacagcggctacgcacacagccagagcttggaccgactgatgaatcctctcatcgaccagtacctgtactacttatccagaactcagtccacaggaggaactcaaggtacccagcaattgttattttctcaagctgggcctgcaaacatgtcggctcaggctaagaactggctacctggaccttgctaccggcagcagcgagtctctacgacactgtcgcaaaacaacaacagcaactttgcttggactggtgccaccaaatatcacctgaacggaagagactctttggtaaatcccggtgtcgccatggcaacccacaaggacgacgaggaacgcttcttcccgtcgagtggagtcctgatgtttggaaaacagggtgctggaagagacaatgtggactacagcagcgttatgctaaccagcgaagaagaaattaaaaccactaaccctgtagccacagaacaatacggtgtggtggctgacaacttgcagcaaaccaatacagggcctattgtgggaaatgtcaacagccaaggagccttacctggcatggtctggcagaaccgagacgtgtacctgcagggtcccatctgggccaagattcctcacacggacggcaacttccacccttcaccgctaatgggaggatttggactgaagcacccacctcctcagatcctgatcaagaacacgccggtacctgcggatcctccaacgacgttcagccaggcgaaattggcttccttcattacgcagtacagcaccggacaggtcagcgtggaaatcgagtgggagctgcagaaggagaacagcaaacgctggaacccagagattcagtacacttcaaactactacaaatctacaaatgtggactttgctgtcaatacagagggaacttattctgagcctcgccccattggtactcgttacctcacccgtaatctgtaa

SEQ ID NO: 4973 - protein, 738 aa, Adeno-associated virus
MAADGYLPDWLEDNLSEGIREWWDLKPGAPKPKANQQKQDDGRGLVLLGYKYLGPFNGLDKGEPVNAADAAALEHDKAYDQQLKAGDNPYLRYNHADAEFQERLQEDTSFGGNLGRAVFQAKKRVLEPLGLVEEAAKTAPGKKRPVEPSPQRSPDSSTGIGKKGQQPAKKRLNFGQTGDSESVPDPQPIGEPPAGPSGLGSGTMAAGGGAPMADNNEGADGVGSSSGNWHCDSTWLGDRVITTSTRTWALPTYNNHLYKQISNGTSGGSTNDNTYFGYSTPWGYFDFNRFHCHFSPRDWQRLINNNWGFRPKRLSFKLFNIQVKEVTQNEGTKTIANNLTSTIQVFTDSEYQLPYVLGSAHQGCLPPFPADVFMIPQYGYLTLNNGSQAVGRSSFYCLEYFPSQMLRTGNNFEFSYTFEDVPFHSGYAHSQSLDRLMNPLIDQYLYYLSRTQSTGGTQGTQQLLFSQAGPANMSAQAKNWLPGPCYRQQRVSTTLSQNNNSNFAWTGATKYHLNGRDSLVNPGVAMATHKDDEERFFPSSGVLMFGKQGAGRDNVDYSSVMLTSEEEIKTTNPVATEQYGVVADNLQQTNTGPIVGNVNSQGALPGMVWQNRDVYLQGPIWAKIPHTDGNFHPSPLMGGFGLKHPPPQILIKNTPVPADPPTTFSQAKLASFITQYSTGQVSVEIEWELQKENSKRWNPEIQYTSNYYKSTNVDFAVNTEGTYSEPRPIGTRYLTRNL

SEQ ID NO: 4974 - protein, 735 aa, Adeno-associated virus
MAADGYLPDWLEDTLSEGIRQWWKLKPGPPPPKPAERHKDDSRGLVLPGYKYLGPFNGLDKGEPVNEADAAALEHDKAYDRQLDSGDNPYLKYNHADAEFQERLKEDTSFGGNLGRAVFQAKKRVLEPLGLVEPPVKTAPGKKRPVEHSPAEPDSSSGTGKAGQQPARKRLNFGQTGDADSVPDPQPLGQPPAAPSGLGSTTMATGSGAPMADNNEGADGVGNSSGNWHCDSQWLGDRVITTSTRTWALPTYNNHLYKQISSQSGASNDNHYFGYSTPWGYFDFNRFHCHFSPRDWQRLINNNWGFRPKRLNFKLFNIQVKEVTQNDGTTTIANNLTSTVQVFTDSEYQLPYVLGSAHQGCLPPFPADVFMVPQYGYLTLNNGSQAVGRSSFYCLEYFPSQMLRTGNNFQFSYTFEDVPFHSSYAHSQSLDRLMNPLIDQYLYYLNKTQSNSGTLQQSRLLFSQAGPTSMSLQAKNWLPGPCYRQQRLSKQANDNNNSNFPWTAATKYHLNGRDSLVNPGPAMASHKDDEEKFFPMHGTLIFGKQGTNANDADLDNVMITDEEEIRTTNPVATEQYGYVSNNLQNSNTGPTTGTVNHQGALPGMVWQDRDVYLQGPIWAKIPHTDGHFHPSPLMGGFGLKHPPPQIMIKNTPVPANPPTNFSSAKFASFITQYSTGQVSVEIEWELQKENSKRWNPEIQYTSNYNKSVNVDFTVDTNGVYSEPRPIGTRYLTRNL

SEQ ID NO: 4975 - protein, 735 aa, Adeno-associated virus
MAADGYLPDWLEDTLSEGIRQWWKLKPGPPPPKPAERHKDDSRGLVLPGYKYLGPFNGLDKGEPVNEADAAALEHDKAYDRQLDSGDNPYLKYNHADAEFQERLKEDTSFGGNLGRAVFQAKKRVLEPLGLVEGPVKTAPGKKRPVEHSPAEPDSSSGTGKAGQQPARKRLNFGQTGDADSVPDPQPLGQPPAAPSGLGSTTMATGSGAPMADNNEGADGVGNSSGNWHCDSQWLGDRVITTSTRTWALPTYNNHLYKQISSQSGASNDNHYFGYSTPWGYFDFNRFHCHFSPRDWQRLINNNWGFRPKRLNFKLFNIQVKEVTQNDGTTTIANNLTSTVQVFTDSEYQLPYVLGSAHQGCLPPFPADVFMVPQYGYLTLNNGSQAVGRSSFYCLEYFPSQMLRTGNNFQFSYTFEDVPFHSSYAHSQSLDRLMNPLIDQYLYYLNKTQSNSGTLQQSRLLFSQAGPTSMSLQAKNWLPGPCYRQQRLSKQANDNNNSNFPWTAATKYHLNGRDSLVNPGPAMASHKDDEEKFFPMHGTLIFGKQGTNANDADLDNVMITDEEEIRTTNPVATEQYGYVSNNLQNSNTGPTTGTVNHQGALPGMVWQDRDVYLQGPIWAKIPHTDGHFHPSPLMGGFGLKHPPPQIMIKNTPVPANPPTNFSSAKFASFITQYSTGQVSVEIEWELQKENSKRWNPEIQYTSNYNKSVNVDFTVDTNGVYSEPRPIGTRYLTRNL

SEQ ID NO: 4976 - DNA, 2208 bp, Adeno-associated virus
  source 1..2208: mol_type = genomic DNA
atggctgccgatggttatcttccagattggctcgaggacactctctctgaaggaataagacagtggtggaagctcaaacctggcccaccaccaccaaagcccgcagagcggcataaggacgacagcaggggtcttgtgcttcctgggtacaagtacctcggacccttcaacggactcgacaagggggagccggtcaacgaggcagacgccgcggccctcgagcacgacaaggcctacgaccggcagctcgacagcggagacaacccgtacctcaagtacaaccacgccgacgcggagtttcaggagcgtcttaaagaagatacgtcttttgggggcaacctcggacgagcagtcttccaggcgaaaaagagggttcttgaacctctgggcctggttgagggacctgttaagacggctccgggaaaaaagaggccggtagagcactctcctgcggagccagactcctcctcgggaaccggaaaagcgggccagcagcctgcaagaaaaagattgaattttggtcagactggagacgcagactccgtacctgacccccagcctctcggacagccaccagcagccccctctggtttgggatctactacaatggctacaggcagtggcgcaccaatggcagacaataacgagggtgccgatggagtgggtaattcctcaggaaattggcattgcgattcccaatggctgggcgacagagtcatcaccaccagcacccgaacctgggccctgcccacctacaacaaccacctctacaagcaaatctcaagccaatcaggagcctcaaacgacaaccactactttggctacagcaccccttgggggtattttgacttcaacagattccactgccacttttcaccacgtgactggcaaagactcatcaacaacaactggggattccgacccaagagactcaacttcaagctctttaacattcaagtcaaagaggtcacgcagaatgacggtacgacgacgattgccaataaccttaccagcacggttcaggtgtttactgactcggagtaccagctcccgtacgtcctcgggtcggcgcatcaaggatgcctcccgccgtttccagcggacgtcttcatggtcccacagtatggatacctcaccctgaacaacgggagtcaggcggtaggacgctcttccttttactgcctggagtactttccttctcagatgcttcgtactggaaacaactttcagttcagctacacctttgaagacgttcctttccacagcagctacgctcacagccagagtctggatcggctgatgaatcctctgatcgaccagtacctgtattatctgaacaaaacacaatcaaatagtggaactcttcagcagtctcggctactgtttagtcaagctggacccaccagcatgtctcttcaagctaaaaactggctacctggaccttgctacagacagcagcgtctgtcaaagcaggcaaacgacaacaacaacagcaactttccctggactgcggctacaaagtatcacctaaatggccgggactcgttggttaatccaggaccagctatggccagtcacaaagacgatgaagaaaagtttttccccatgcatggaaccctgatatttggtaaacaaggaacaaatgctaacgacgcggatttggacaatgtcatgattacagatgaagaagaaatccgcaccaccaatcccgtggctacggagcagtacggatatgtgtcaaataatttgcaaaactcaaatactggtccaactactggaactgtcaatcaccaaggagcgttacctggcatggtgtggcaggatcgagacgtgtacctgcagggacccatttgggccaagattcctcacaccgatggacactttcatccttctccactgatgggaggttttgggctcaaacacccgcctcctcagatcatgatcaaaaacactcccgttccagccaatcctcccacaaacttcagttctgccaagtttgcttctttcatcacacagtattccacggggcaggtcagcgtggagatcgagtgggagctgcagaaagagaacagcaaacgctggaatcccgaaattcagtacacttccaactacaacaaatctgttaatgtggactttactgtggacactaatggcgtgtattcagagcctcgccccattggcaccagatacctgactcgtaatctgtaa

SEQ ID NO: 4977 - DNA, 2211 bp, Adeno-associated virus
  source 1..2211: mol_type = genomic DNA
atggctgccgatggttatcttccagattggctcgaggacaacctctctgagggcattcgcgagtggtgggacttgaaacctggagccccgaagcccaaagccaaccagcaaaagcaggacgacggccggggtctggtgcttcctggctacaagtacctcggacccttcaacggactcgacaagggggagcccgtcaacgcggcggacgcagcggccctcgagcacgacaaggcctacgaccagcagctcaaagcgggtgacaatccgtacctgcggtataaccacgccgacgccgagtttcaggagcgtctgcaagaagatacgtcttttgggggcaacctcgggcgagcagtcttccaggccaagaagcgggttctcgaacctctcggtctggttgaggaaggcgctaagacggctcctggaaagaaacgtccggtagagcagtcgccacaagagccagactcctcctcgggcatcggcaagacaggccagcagcccgctaaaaagagactcaattttggtcagactggcgactcagagtcagtccccgatccacaacctctcggagaacctccagcaacccccgctgctgtgggacctactacaatggcttcaggcggtggcgcaccaatggcagacaataacgaaggcgccgacggagtgggtaatgcctcaggaaattggcattgcgattccacatggctgggcgacagagtcatcaccaccagcacccgcacctgggccttgcccacctacaataaccacctctacaagcaaatctccagtgcttcaacgggggccagcaacgacaaccactacttcggctacagcaccccctgggggtattttgatttcaacagattccactgccacttttcaccacgtgactggcagcgactcatcaacaacaattggggattccggcccaagagactcaacttcaaactcttcaacatccaagtcaaggaggtcacgacgaatgatggcgtcacaaccatcgctaataaccttaccagcacggttcaagtcttctcggactcggagtaccagcttccgtacgtcctcggctctgcgcaccagggctgcctccctccgttcccggcggacgtgttcatgattccgcaatacggctacctgacgctcaacaatggcagccaagccgtgggacgttcatccttttactgcctggaatatttcccttctcagatgctgagaacgggcaacaactttaccttcagctacacctttgaggaagtgcctttccacagcagctacgcgcacagccagagcctggaccggctgatgaatcctctcatcgaccaatacctgtattacctgaacagaactcaaaatcagtccggaagtgcccaaaacaaggacttgctgtttagccgtgggtctccagctggcatgtctgttcagcccaaaaactggctacctggaccctgttatcggcagcagcgcgtttctaaaacaaaaacagacaacaacaacagcaattttacctggactggtgcttcaaaatataacctcaatgggcgtgaatccatcatcaaccctggcactgctatggcctcacacaaagacgacgaagacaagttctttcccatgagcggtgtcatgatttttggaaaagagagcgccggagcttcaaacactgcattggacaatgtcatgattacagacgaagaggaaattaaagccactaaccctgtggccaccgaaagatttgggaccgtggcagtcaatttccagagcagcagcacagaccctgcgaccggagatgtgcatgctatgggagcattacctggcatggtgtggcaagatagagacgtgtacctgcagggtcccatttgggccaaaattcctcacacagatggacactttcacccgtctcctcttatgggcggctttggactcaagaacccgcctcctcagatcctcatcaaaaacacgcctgttcctgcgaatcctccggcggagttttcagctacaaagtttgcttcattcatcacccaatactccacaggacaagtgagtgtggaaattgaatgggagctgcagaaagaaaacagcaagcgctggaatcccgaagtgcagtacacatccaattatgcaaaatctgccaacgttgattttactgtggacaacaatggactttatactgagcctcgccccattggcacccgttaccttacccgtcccctgtaa

SEQ ID NO: 4978 - DNA, 2208 bp, Adeno-associated virus
  source 1..2208: mol_type = genomic DNA
atggctgccgatggttatcttccagattggctcgaggacactctctctgaaggaacaagacagtggtggaagctcaaacctggcccaccaccaccaaagcccgcagagcggcataaggacgacagcaggggtcttgtgcttcctgggtacaagtacctcggacccttcaacggactcgacaagggggagccggtcaacgaggcagacgccgcggccctcgagcacgacaaggcctacgaccggcagctcgacagcggagacaacccgtacctcaagtacaaccacgccgacgcggagtttcaggagcgtcttaaagaagatacgtcttttgggggcaacctcggacgagcagtcttccaggcgaaaaagagggttcttgaacctctgggcctggttgaggaacctgttaagacggctccgggaaaaaagaggccggtagagcactctcctgcggagccagactcctcctcgggaaccggaaaagcgggccagcagcctgcaagaaaaagattgaattttggtcagactggagacgcagactccgtacctgacccccagcctctcggacagccaccagcagccccctctggtttgggatctactacaatggctacaggcagtggcgcaccaatggcagacaataacgagggtgccgatggagtgggtaattcctcaggaaattggcattgcgattcccaatggctgggcgacagagtcatcaccaccagcacccgaacctgggccctgcccacctacaacaaccacctctacaagcaaatctcaagccaatcaggagcctcaaacgacaaccactactttggctacagcaccccttgggggtattttgacttcaacagattccactgccacttttcaccacgtgactggcaaagactcatcaacaacaactggggattccgacccaagagactcaacttcaagctctttaacattcaagtcaaagaggtcacgcagaatgacggtacgacgacgattgccaataaccttaccagcacggttcaggtgtttactgactcggagtaccagctcccgtacgtcctcgggtcggcgcatcaaggatgcctcccgccgtttccagcggacgtcttcatggtcccacagtatggatacctcaccctgaacaacgggagtcaggcggtaggacgctcttccttttactgcctggagtactttccttctcagatgcttcgtactggaaacaactttcagttcagctacacctttgaagacgttcctttccacagcagctacgctcacagccagagtctggatcggctgatgaatcctctgatcgaccagtacctgtattatctgaacaaaacacaatcaaatagtggaactcttcagcagtctcggctactgtttagtcaagctggacccaccagcatgtctcttcaagctaaaaactggctacctggaccttgctacagacagcagcgtctgtcaaagcaggcaaacgacaacaacaacagcaactttccctggactgcggctacaaagtaccacctaaatggccgggactcgttggttaatccaggaccagctatggccagtcacaaagacgatgaagaaaagtttttccccatgcatggaaccctgatatttggtaaacaaggaacaaatgctaacgacgcggatttggacaatgtcatgattacagatgaagaagaaatccgcaccaccaatcccgtggctacggagcagtacggatatgtgtcaaataatttgcaaaactcaaatactggtccaactactggaactgtcaatcaccaaggagcgttacctggcatggtgtggcaggatcgagacgtgtacctgcagggacccatttgggccaagattcctcacaccgatggacactttcatccttctccactgatgggaggttttgggctcaaacacccgcctcctcagatcatgatcaaaaacactcccgttccagccaatcctcccacaaacttcagttctgccaagtttgcttctttcatcacacagtattccacggggcaggtcagcgtggagatcgagtgggagctgcagaaagagaacagcaaacgctggaatcccgaaattcagtacacttccaactacaacaaatctgttaatgtggactttactgtggacactaatggcgtgtattcagagcctcgccccattggcaccagatacctgactcgtaatctgtaa

SEQ ID NO: 4979 - DNA, 2217 bp, Adeno-associated virus
  source 1..2217: mol_type = genomic DNA
atggctgctgacggttatcttccagattggctcgaggacaacctctctgagggcattcgcgagtggtgggacctgaaacctggagcccccaagcccaaggccaaccagcagaagcaggacgacggccggggtctggtgcttcctggctacaagtacctcggacccttcaacggactcgacaagggggagcccgtcaacgcggcggacgcagcggccctcgagcacgacaaggcctacgaccagcagctcaaagcgggtgacaatccgtacctgcggtataaccacgccgacgccgagtttcaggagcgtctgcaagaagatacgtcttttgggggcaacctcgggcgagcagtcttccaggccaagaagcgggttctcgaacctctcggtctggttgaggaagctgctaagacggctcctggaaagaagagaccggtagaaccgtcacctcagcgttcccccgactcctccacgggcatcggcaagaaaggccagcagcccgctaaaaagagactgaactttggtcagactggcgactcagagtcagtccccgaccctcaaccaatcggagaaccacctgcaggcccctctggtctgggatctggtacaatggctgcaggcggtggcgctccaatggcagacaataacgaaggcgccgacggagtgggtagttcctcaggaaattggcattgcgattccacatggctgggcgacagagtcatcaccaccagcacccgaacctgggccctgcccacctacaacaaccacctctacaagcaaatatccaatgggacatcgggagggagcaccaacgacaacacctacttcggctacagcaccccctgggggtattttgacttcaacagattccactgccacttctcaccacgtgactggcagcgactcatcaacaacaactggggattccggccaaaaagactcagcttcaagctcttcaacatccaggtcaaggaggtcacgcagaatgaaggcaccaagaccatcgccaataaccttaccagcacgattcaggtatttacggactcggaataccagctgccgtacgtcctcggctccgcgcaccagggctgcctgcctccgttcccggcggacgtcttcatgattccccagtacggctaccttacactgaacaatggaagtcaagccgtaggccgttcctccttctactgcctggaatattttccatctcaaatgctgcgaactggaaacaattttgaattcagctacaccttcgaggacgtgcctttccacagcagctacgcacacagccagagcttggaccgactgatgaatcctctcatcgaccagtacctgtactacttatccagaactcagtccacaggaggaactcaaggtacccagcaattgttattttctcaagctgggcctgcaaacatgtcggctcaggctaagaactggctacctggaccttgctaccggcagcagcgagtctctacgacactgtcgcaaaacaacaacagcaactttgcttggactggtgccaccaaatatcacctgaacggaagagactctttggtaaatcccggtgtcgccatggcaacccacaaggacgacgaggaacgcttcttcccgtcgagtggagtcctgatgtttggaaaacagggtgctggaagagacaatgtggactacagcagcgttatgctaaccagcgaagaagaaattaaaaccactaaccctgtagccacagaacaatacggtgtggtggctgacaacttgcagcaaaccaatacagggcctattgtgggaaatgtcaacagccaaggagccttacctggcatggtctggcagaaccgagacgtgtacctgcagggtcccatctgggccaagattcctcacacggacggcaactgccacccttcaccgctaatgggaggatttggactgaagcacccacctcctcagatcctgatcaagaacacgccggtacctgcggatcctccaacaacgttcagccaggcgaaattggcttccttcattacgcagtacagcaccggacaggtcagcgtggaaatcgagtgggagctgcagaaggagaacagcaaacgctggaacccagagattcagtacacttcaaactactacaaatctacaaatgtggactttgctgtcaatacagagggaacttattctgagcctcgccccattggtactcgttacctcacccgtaatctgtaa

SEQ ID NO: 4980 - protein, 735 aa, Adeno-associated virus
MAADGYLPDWLEDTLSEGTRQWWKLKPGPPPPKPAERHKDDSRGLVLPGYKYLGPFNGLDKGEPVNEADAAALEHDKAYDRQLDSGDNPYLKYNHADAEFQERLKEDTSFGGNLGRAVFQAKKRVLEPLGLVEEPVKTAPGKKRPVEHSPAEPDSSSGTGKAGQQPARKRLNFGQTGDADSVPDPQPLGQPPAAPSGLGSTTMATGSGAPMADNNEGADGVGNSSGNWHCDSQWLGDRVITTSTRTWALPTYNNHLYKQISSQSGASNDNHYFGYSTPWGYFDFNRFHCHFSPRDWQRLINNNWGFRPKRLNFKLFNIQVKEVTQNDGTTTIANNLTSTVQVFTDSEYQLPYVLGSAHQGCLPPFPADVFMVPQYGYLTLNNGSQAVGRSSFYCLEYFPSQMLRTGNNFQFSYTFEDVPFHSSYAHSQSLDRLMNPLIDQYLYYLNKTQSNSGTLQQSRLLFSQAGPTSMSLQAKNWLPGPCYRQQRLSKQANDNNNSNFPWTAATKYHLNGRDSLVNPGPAMASHKDDEEKFFPMHGTLIFGKQGTNANDADLDNVMITDEEEIRTTNPVATEQYGYVSNNLQNSNTGPTTGTVNHQGALPGMVWQDRDVYLQGPIWAKIPHTDGHFHPSPLMGGFGLKHPPPQIMIKNTPVPANPPTNFSSAKFASFITQYSTGQVSVEIEWELQKENSKRWNPEIQYTSNYNKSVNVDFTVDTNGVYSEPRPIGTRYLTRNL

SEQ ID NO: 4981 - DNA, 2208 bp, Adeno-associated virus
  source 1..2208: mol_type = genomic DNA
atggctgccgatggttatcttccagattggctcgaggacactctctctgaaggaataagacagtggtggaagctcaaacctggcccaccaccaccaaagcccgcagagcggcatcaggacaacagcaggggtcttgtgcttcctgggtacaagtacctcggaccctccaacggactcgacaaaggagagccggtcaacgaggcagacgccgcggccctcgagcacgacaaggcctacgaccggcagctcgacagcggagacaacccgtacctcaagtacaaccacgccgacgcggagtttcaggagcgtcttaaagaagatacgtcttttgggggcaacctcggacgagcagtcttccaggcgaaaaagagggttcttgaacctctgggcctggttgaggaacctgttaagacggctccgggaaaaaagaggccggtagagcactctcctgtggagccagactcctcctcgggaaccggaaaagcgggccatcagcctgcgagaaagagattgaattttggtcagactggagacgcagactccgtacctgacccccagcctctcggacagccaccagcagcccccacaagtttgggatctactacaatggctacaggcagtggcgcaccaatggcagacaataacgagggtgccgatggagtgggtaattcctcaggaaattggcattgcgattcccaatggctgggcgacagagtcatcaccaccagcacccgaacctgggccctgcccacctacaacaaccacctctacaagcaaatctccagccaatcaggagcctcgaacgacaaccactactttggctgcagcaccccctgggggtattttgacttcaacagattccactgtcacttctccccacgtgattggcaaagactcatcaacaacaactggggattccgacccaagagactcaacttcaagctctttaacattcaagtcaaagaggtcacgcagaatgacggtacgacgacgattgccaataaccttaccagcacggttcaggtgtttactgactcggagtacccgctcccgtacgtcctcggctcggcgcatcaaggatgcctcccgccgtttccagcggacgtcttcatggtcccacagtatggatacctcaccctgaacaacgggagtcaggcggtaggacgctcttccttttactgcctggagtactttccttctcagatgctgcgtaccggaaacaactttaccttcagctacacctttgaggacgttcctttccacagcagctacgctcacagccagagtttggaccggctgatgaatcctctgatcgaccagtatctatattatctgaacaggacacaatcaaatagtggaactcttcagcagtctaggctactgtttagccaagctggacccaccagcatgtctcttcaagctaaaaactggctgcctggaccttgctacagacagcagcgtctttcaaagcaggcaaacgacaacaacaacagcaactttccctggactgcggctacaaagtatcatctaaatggccgggactcgttggttaatccaggaccagctatggccagccacaaagacgatgaagaaaagtttttccccatgcatggaaccctgatatttggtaaacaaggaacaaatgctaacgacgcggatttggagcatgttatgattacagatgaagaagaaatcaggaccaccaatcctgtggctacagagcagtacggaaacgtgtcaaataatttgcaaaactcaaatactggtccaactacagaaaatgtcaatcaccagggagcgttacctggtatggtgtggcaggatcgagacgtgtacctgcagggacccatttgggccaagattcctcacaccgacggacactttcacccttctccactgatgggaggttttggactcaaacacccgcctcctcaaatcatgatcaaaaacactcccgttccagccaatcctcccacaaacttcagttctgccaagtttgcttctttcatcacacagtattccacgggccaggtcagcgtggagattgagtgggagctgcagaaggagaacagcaaacgctggaaccccgagatccagtatacttccaactacaacaaatctgttaatgtggactttactgtggacactaatggtgtgtattcagagccttgccccattggcaccagatacctgactcgtaatctgtaa

SEQ ID NO: 4982 - protein, 735 aa, Adeno-associated virus
MAADGYLPDWLEDTLSEGIRQWWKLKPGPPPPKPAERHQDNSRGLVLPGYKYLGPSNGLDKGEPVNEADAAALEHDKAYDRQLDSGDNPYLKYNHADAEFQERLKEDTSFGGNLGRAVFQAKKRVLEPLGLVEEPVKTAPGKKRPVEHSPVEPDSSSGTGKAGHQPARKRLNFGQTGDADSVPDPQPLGQPPAAPTSLGSTTMATGSGAPMADNNEGADGVGNSSGNWHCDSQWLGDRVITTSTRTWALPTYNNHLYKQISSQSGASNDNHYFGCSTPWGYFDFNRFHCHFSPRDWQRLINNNWGFRPKRLNFKLFNIQVKEVTQNDGTTTIANNLTSTVQVFTDSEYPLPYVLGSAHQGCLPPFPADVFMVPQYGYLTLNNGSQAVGRSSFYCLEYFPSQMLRTGNNFTFSYTFEDVPFHSSYAHSQSLDRLMNPLIDQYLYYLNRTQSNSGTLQQSRLLFSQAGPTSMSLQAKNWLPGPCYRQQRLSKQANDNNNSNFPWTAATKYHLNGRDSLVNPGPAMASHKDDEEKFFPMHGTLIFGKQGTNANDADLEHVMITDEEEIRTTNPVATEQYGNVSNNLQNSNTGPTTENVNHQGALPGMVWQDRDVYLQGPIWAKIPHTDGHFHPSPLMGGFGLKHPPPQIMIKNTPVPANPPTNFSSAKFASFITQYSTGQVSVEIEWELQKENSKRWNPEIQYTSNYNKSVNVDFTVDTNGVYSEPCPIGTRYLTRNL

SEQ ID NO: 4983 - DNA, 2196 bp, Adeno-associated virus
  source 1..2196: mol_type = genomic DNA
atggctgctgacggttatcttccagattggctcgaggacaacctctctgagggcattcgcgagtggtgggcgctgaaacctggagccccgcaacccaaagccaaccagcaaaagcaggacgacggccggggtctggtgcttcctggctacaagtacctcggacccttcaacggactcgacaagggggagcccgtcaacgaggcggacgccgcggccctcgagcacgacaaggcctacgaccagcagctcaaagcgggtgacaatccgtacctgcggtataatcacgccgacgccgagtttcaagagcgtctgcaagaagatacgtcctttgggggcaacctcgggcgagcagtcttccaggccaaaaagagggtactcgagcctctgggtctggttgaggaaggcgctaagacggctcctggaaagaagcggccagtagaaccggactccagctcgggcatcggcaagtcaggccagcagcccgcgaaaaagagactgaattttgggcagactggcgactcagagtcagtgcctgacccccaacctctctcagaaccacccgcaggtccctctggtctgggatctggtacaatggctgctggcggtggcgctccaatggcagacaataacgaaggcgccgacggagtgggtaatgtctcaggaaattggcattgcgattccacatggctgggcgaccgagtcatcaccaccagcactcggacctgggccctccccacctacaacaaccacctctacaagcaaatctccaacgggacctcgggaggcagcagcaacgacaacacctactttggctacagcaccccctgggggtattttgactttaacagattccactgccacttttcaccacgtgactggcagcgactcatcaacaacaactgggggttccggcccaagaagctcaacttcaagctcttcaacatccaggtcaaggaggtcacccagaatgaaggcaccaagaccatcgccaataacctcaccagcacggtgcaggtctttacggactcggagtaccagctcccgtacgtgctcggctctgcccaccagggctgcctgcctccgttcccggcggacgtgttcatgattccgcagtacgggtacctgacgctgaacaacgggagccaggccgtggggcgatcctccttctactgcctggagtactttccctcgcagatgctgagaacgggcaacaactttaccttcagctacaccttcgaggacgtgcccttccacagcagctacgcgcacagccagagcctggaccggctgatgaacccgctgattgaccagtacctgtactacctgtctcggactcagaccaacgggaccaatgccacgcagactctgttgtttgctcaggccgggcctcagaacatgtcggctcaggccaagaactggctgcctggtccttgctatcggcagcagcgcgtctctacgacagtgtcgcaaaacaacaacagcaactttacctggaccggggcgaccaagtaccacctgaacggccgagactccctggtgagccccggtgtcgccatggcaacgcacaaggacgacgaggagcgcttcttcccgagcagcggggtcctgatgtttggcaagcagggcgctggaaaggacaatgtcgagtacaccaacgtgatgctcaccagcgaggaggagatcaagaccaccaaccctgtggccacggagcagtacggcgtggtggctgacaatctgcagcagaccaactcagctcccattgtgggggcagtcaacagccagggggccttacccggtatggtctggcagaaccgggacgtgtacctgcagggtcccatctgggccaagatcccgcatacggacggcaactttcacccgtctcctctcatgggcggctttggactgaaacacccgcctccccagatcctgatcaaaaacacgccggtacctgcggatcccccggtgaactttacggacgctaagctggcgagtttcatcacgcagtacagcaccgggcaggtcagcgtggagattgagtgggagctgcagaaggagaacagcaagcgctggaatcccgagattcagtacacttccaattattataaatcagctaatgtggactttgccgtcaatgcagatggtgtatatagtgaaccccgccccattggcactcgttacctcacccgtaatctgtaa

SEQ ID NO: 4984 - protein, 731 aa, Adeno-associated virus
MAADGYLPDWLEDNLSEGIREWWALKPGAPQPKANQQKQDDGRGLVLPGYKYLGPFNGLDKGEPVNEADAAALEHDKAYDQQLKAGDNPYLRYNHADAEFQERLQEDTSFGGNLGRAVFQAKKRVLEPLGLVEEGAKTAPGKKRPVEPDSSSGIGKSGQQPAKKRLNFGQTGDSESVPDPQPLSEPPAGPSGLGSGTMAAGGGAPMADNNEGADGVGNVSGNWHCDSTWLGDRVITTSTRTWALPTYNNHLYKQISNGTSGGSSNDNTYFGYSTPWGYFDFNRFHCHFSPRDWQRLINNNWGFRPKKLNFKLFNIQVKEVTQNEGTKTIANNLTSTVQVFTDSEYQLPYVLGSAHQGCLPPFPADVFMIPQYGYLTLNNGSQAVGRSSFYCLEYFPSQMLRTGNNFTFSYTFEDVPFHSSYAHSQSLDRLMNPLIDQYLYYLSRTQTNGTNATQTLLFAQAGPQNMSAQAKNWLPGPCYRQQRVSTTVSQNNNSNFTWTGATKYHLNGRDSLVSPGVAMATHKDDEERFFPSSGVLMFGKQGAGKDNVEYTNVMLTSEEEIKTTNPVATEQYGVVADNLQQTNSAPIVGAVNSQGALPGMVWQNRDVYLQGPIWAKIPHTDGNFHPSPLMGGFGLKHPPPQILIKNTPVPADPPVNFTDAKLASFITQYSTGQVSVEIEWELQKENSKRWNPEIQYTSNYYKSANVDFAVNADGVYSEPRPIGTRYLTRNL

SEQ ID NO: 4985 - DNA, 2196 bp, Adeno-associated virus
  source 1..2196: mol_type = genomic DNA
atggctgctgacggttatcttccagattggctcgaggacaacctctctgagggcattcgcgagtggtgggcgctgaaacctggagccccgcaacccaaagccaaccagcaaaagcaggacgacggccggggtctggtgcttcctggctacaagtacctcggacccttcaacggactcgacaagggggagcccgtcaacgaggcggacgccgcggccctcgagcacgacaaggcctacgaccagcagctcaaagcgggtgacaatccgtacctgcggtataatcacgccgacgccgagtttcaagagcgtctgcaagaagatacgtcctttgggggcaacctcgggcgagcagtcttccaggccaaaaagagggtactcgagcctctgggtctggttgaggaaggcgctaagacggctcctggaaagaagcggccagtagaaccggactccagctcgggcatcggcaagtcaggccggcagcccgcgaaaaagagactgaattttgggcagactggcgactcagagtcagtgcctgacccccaacctctctcagaaccacccgcaggtccctctggtctgggatctggtacaatggctgcaggcggtggcgctccaatggcagacaataacgaaggcgccgacggagtgggtaatgcctcaggaaattggcattgcgattccacatggctgggcgaccgagtcatcaccaccagcactcggacctgggccctccccacctacaacaaccacctctacaagcaaatctccaacgggacctcgggaggcagcagcaacgacaacacctactttggctacagcaccccctgggggtattttgactttaacagattccactgccacttttcaccacgtgactggcagcgactcatcaacaacaactggggattccggcccaagaggctcaacttcaagctcttcaacatccaggtcaaggaggtcacccagaatgaaggcaccaagaccatcgccaataacctcaccagcacggtgcaggtctttacggactcgaagtaccagctcccgtacgtgctcggctctgcccaccagggctgcctgcctccgttcccggcggacgtgttcatgattccgcagtacgggtacctgacgctgaacaacgggagccaggccgtggggcgatcctccttctactgcctggagtactttccctcgcagatgctgagaacgggcaacaactttaccttcagctacaccttcgaggacgtgcccttccacagcagctacgcgcacagccagagcctggaccggctgatgaacccgctgattgaccagtacctgtactacctgtctcggactcagaccaacgggaccaatgccacgcagactctgttgtttgctcaggccgggcctcagaacatgtcggctcaggccaagaactggctgcctggtccttgctatcggcagcagcgcgtctctacgacagtgtcgcaaaacaacaacagcaactttacctggaccggggcgaccaagtaccacctgaacggccgagactccctggtgaaccccggtgtcgccatggcaacgcacaaggacgacgaggagcgcttcttcccgagcagcggggtcctgatgtttggcaagcagggcgctggaaaggacaatgtcgagtacaccaacgtgatgctcaccagcgaggaggagatcaagaccaccaaccctgtggccacggagcagtacggtgtggtggctgacaatctgcagcagaccaactcggctcccattgtgggggcagtcaacagccagggggccttacccggtatggtctggcagaaccgggacgtgtacctgcagggtcccatctgggccaagatcccgcatacggacggcaactttcacccgtctcctctcatgggcggctttggactgaaacacccgcctccccagatcctgatcaaaaacacgccggtacctgcggatcccccggtgaactttacggacgctaagctggcgagtttcatcacgcagtacagcaccgggcaggtcagcgtggagattgagtgggagctgcagaaggagaacagcaagcgctggaatcccgagattcagtacacttccaattattataaatcagctaatgtggactttgccgtcaatgcagatggtgtatatagtgaaccccgccccattggcactcgttacctcacccgtaatctgtaa

SEQ ID NO: 4986 - protein, 731 aa, Adeno-associated virus
MAADGYLPDWLEDNLSEGIREWWALKPGAPQPKANQQKQDDGRGLVLPGYKYLGPFNGLDKGEPVNEADAAALEHDKAYDQQLKAGDNPYLRYNHADAEFQERLQEDTSFGGNLGRAVFQAKKRVLEPLGLVEEGAKTAPGKKRPVEPDSSSGIGKSGRQPAKKRLNFGQTGDSESVPDPQPLSEPPAGPSGLGSGTMAAGGGAPMADNNEGADGVGNASGNWHCDSTWLGDRVITTSTRTWALPTYNNHLYKQISNGTSGGSSNDNTYFGYSTPWGYFDFNRFHCHFSPRDWQRLINNNWGFRPKRLNFKLFNIQVKEVTQNEGTKTIANNLTSTVQVFTDSKYQLPYVLGSAHQGCLPPFPADVFMIPQYGYLTLNNGSQAVGRSSFYCLEYFPSQMLRTGNNFTFSYTFEDVPFHSSYAHSQSLDRLMNPLIDQYLYYLSRTQTNGTNATQTLLFAQAGPQNMSAQAKNWLPGPCYRQQRVSTTVSQNNNSNFTWTGATKYHLNGRDSLVNPGVAMATHKDDEERFFPSSGVLMFGKQGAGKDNVEYTNVMLTSEEEIKTTNPVATEQYGVVADNLQQTNSAPIVGAVNSQGALPGMVWQNRDVYLQGPIWAKIPHTDGNFHPSPLMGGFGLKHPPPQILIKNTPVPADPPVNFTDAKLASFITQYSTGQVSVEIEWELQKENSKRWNPEIQYTSNYYKSANVDFAVNADGVYSEPRPIGTRYLTRNL

SEQ ID NO: 4987 - DNA, 2196 bp, Adeno-associated virus
  source 1..2196: mol_type = genomic DNA
atggctgctgacggttatcttccagattggctcgaggacaacctctctgagggcattcgcgagtggtgggcgctgaaacctggagccccgcaacccaaagccaaccagcaaaagcaggacgacggccggggtctggtgcttcctggctacaagtacctcggacccttcaacggactcgacaagggggagcccgtcaacgaggcggacgccgcggccctcgagcacgacaaggcctacgaccagcagctcaaagcgggtgacaatccgtacctgcggtataatcacgccgacgccgagtttcaagagcgtctgcaagaagatacgtcctttgggggcaacctcgggcgagcagtcttccaggccaaaaagagggtactcgagcctctgggtctggttgaggaaggcgctaagacggctcctggaaagaagcggccagtagaaccggactccagctcgggcatcggcaagtcaggccagcagcccgcgaaaaagagactgaattttgggccgactggcgactcagagtcagtgcctgacccccaacctctctcagaaccacctgcaggtccctctggtctgggatctggtacaatggctgcaggcggtggcgctccaatggcagacaataacgaaggcgccgacggagtgggtaatgtctcaggaaattggcattgcgattccacatggctgggcgaccgagtcatcaccaccagcactcggacctgggccctccccacctacaacaaccacctctacaagcaaatctccaacgggacctcgggaggcagcagcaacgacaacacctactttggctacagcaccccctgggggtattttgactttaacagattccactgccacttttcaccacgcgactggcagcgactcatcaacaacaactggggattccggcccaagaagctcaacttcaagctcttcaacatccaggtcaaggaggtcacccagaatgaaggcaccaagaccaccgccaataacctcaccagcacggtgcaggtctttacggactcggagtaccagctcccgtacgtgctcggctctgcccaccagggctgcctgcctccgttcccggcggacgtgttcatgattccgcagtacgggtacctgacgctgaacaacgggagccaggccgtggggcgatcctccttctactgcctggagtactttccctcgcagatgctgagaacgggcaacaactttaccttcagctacaccttcgaggacgtgcccttccacagcagctacgcgcacagccagagcctggaccggctgatgaacccgctgattgaccagtacctgtactacctgtctcggactcagaccaacgggaccaatgccacgcagactctgttgtttgctcaggccgggcctcagaacatgtcggctcaggccaagaactggctgcctggtccttgctatcggcagcagcgcgtctctacggcagtgtcgcaaaacaacaacagcaactttacctggaccggggcgaccaagtaccacctgaacggccgagactccctggtgaaccccggtgtcgccatggcaacgcacaaggacgacgaggagcgcttcttcccgagcagcggggtcctgatgtttggcaagcagggcgctggaaaggacaatgtcgagtacaccaacgtgatgctcaccagcgaggaggagatcaagaccaccaaccctgtggccacggagcagtacggtgtggtggctgacaatctgcagcagaccaactcggctcccattgtgggggcagtcaacagccagggggccttacccggtatggtctggcagaaccgggacgtgtacctgcagggtcccatctgggccaagatcccgcatacggacggcaactttcacccgtctcctctcatgggcggctttggactgaaacacccgcctccccagatcctgatcaaaaacacgccggtacctgcggatcccccggtgaactttacggacgctaagctggcgagtttcatcacgcagtacagcaccgggcaggtcagcgtggagattgagtgggagctgcagaaggagaacagcaagcgctggaatcccgagattcagtacacttccaattattataaatcagctaatgtggactttgccgtcaatgcagatggtgtatatagcgaaccccgccccattggcactcgttacctcacccgtaatctgtaa

SEQ ID NO: 4988 - protein, 731 aa, Adeno-associated virus
MAADGYLPDWLEDNLSEGIREWWALKPGAPQPKANQQKQDDGRGLVLPGYKYLGPFNGLDKGEPVNEADAAALEHDKAYDQQLKAGDNPYLRYNHADAEFQERLQEDTSFGGNLGRAVFQAKKRVLEPLGLVEEGAKTAPGKKRPVEPDSSSGIGKSGQQPAKKRLNFGPTGDSESVPDPQPLSEPPAGPSGLGSGTMAAGGGAPMADNNEGADGVGNVSGNWHCDSTWLGDRVITTSTRTWALPTYNNHLYKQISNGTSGGSSNDNTYFGYSTPWGYFDFNRFHCHFSPRDWQRLINNNWGFRPKKLNFKLFNIQVKEVTQNEGTKTTANNLTSTVQVFTDSEYQLPYVLGSAHQGCLPPFPADVFMIPQYGYLTLNNGSQAVGRSSFYCLEYFPSQMLRTGNNFTFSYTFEDVPFHSSYAHSQSLDRLMNPLIDQYLYYLSRTQTNGTNATQTLLFAQAGPQNMSAQAKNWLPGPCYRQQRVSTAVSQNNNSNFTWTGATKYHLNGRDSLVNPGVAMATHKDDEERFFPSSGVLMFGKQGAGKDNVEYTNVMLTSEEEIKTTNPVATEQYGVVADNLQQTNSAPIVGAVNSQGALPGMVWQNRDVYLQGPIWAKIPHTDGNFHPSPLMGGFGLKHPPPQILIKNTPVPADPPVNFTDAKLASFITQYSTGQVSVEIEWELQKENSKRWNPEIQYTSNYYKSANVDFAVNADGVYSEPRPIGTRYLTRNL

SEQ ID NO: 4989 - DNA, 4404 bp, Adeno-associated virus
  source 1..4404: mol_type = genomic DNA
atggctgccgatggttatcttccagattggctcgagggcaacctctctgagggcattcgcgagtggtgggacttgaaacctggagccccgaaacccaaagccaaccagcaaaagcaggacgacggccggggtctggtgcttcctggctacaggtacctcggacccttcaacggactcgacaagggagagccggtcaacgaggcagacgccgcggccctcgagcacgacaaggcctacgacaagcagctcgagcagggggacaacccgtacctcaagtacaaccacgccgacgccgagtttcaggagcgtcttcaagaagatacgtcttttgggggcaacctcgggcgagcagtcttccaggccaagaagcgggttctcgaacctctcggtctggttgaggaaggcgctaagacggctcctggaaagaagagacccatagaatcccccgactcctccacgggcatcggcaagaacggccagccgcccgctaaaaagaagctcaactttgggcagactggcgactcagagtcagtgcccgacccccaacctctcggagaacctcccgccgcgccctcaggtctgggatctggtacaatggctgcaggcggtggcgcaccaatggcagacaataacgaaggcgccgacggagtgggtaatgcctccggaaattggcattgcgattccacatggctgggcgacagagtcatcaccaccagcacccgcacctgggccctgcccacctacaacaaccacctctacaagcagatatcaagtcagagcggggctaccaacgacaaccacttcttcggctacagcaccccctggggctattttgacttcaacagattccactgccacttctcaccacgtgactggcagcgactcatcaacaacaactggggattccggcccagaaagctgcggttcaagttgttcaacatccaggtcaaggaggtcacgacgaacgacggcgttacgaccatcgctaataaccttaccagcacgattcaggtcttctcggactcggagtaccaactgccgtacgtcctcggctctgcgcaccagggctgcctccctccgttccctgcggacgtgttcatgattcctcagtacggatatctgactctaaacaacggcagtcagtctgtgggacgttcctccttctactgcctggagtactttccttctcagatgctgagaacgggcgataactttgaattcagctacacctttgaggaagtgcctttccacagcagctatgcgcacagccagagcctggaccggctgatgaatcccctcatcgaccagtacctgtactacctggcccggacccagagcactacggggtccacaagggagctgcagttccatcaggctgggcccaacaccatggccgagcaatcaaagaactggctgcccggaccctgttatcggcagcagagactgtcaaaaaacatagacagcaacaacaacagtaactttgcctggaccggggccactaaataccatctgaatggtagaaattcattaaccaacccgggcgtagccatggccaccaacaaggacgacgaggaccagttctttcccatcaacggagtgctggtttttggcaaaacgggggctgccaacaagacaacgctggaaaacgtgctaatgaccagcgaggaggagatcaaaaccaccaatcccgtggctacagaagaatacggtgtggtctccagcaacctgcaatcgtctacggccggaccccagacacagactgtcaacagccagggggctctgcccggcatggtctggcagaaccgggacgtgtacctgcagggtcccatctgggccaaaattcctcacacggacggcaactttcacccgtctcccctgatgggcggatttggactcaaacacccgcctcctcaaattctcatcaaaaacaccccggtacctgctaatcctccagaggtgtttactcctgccaagtttgcctcatttatcacgcagtacagcaccggccaggtcagcgtggagatcgagtgggaactgcagaaagaaaacagcaaacgctggaatccagagattcagtacacctcaaattatgccaagtctaataatgtggaatttgctgtcaacaacgaaggggtttatactgagcctcgccccattggcacccgttacctcacccgtaacctgtaaatggctgccgatggttatcttccagattggctcgaggacaacctctctgagggcattcgcgagtggtgggacttgaaacctggagccccgaaacccaaagccaaccagcaaaagcaggacgacggccggggtctggtgcttcctggctacaagtacctcggacccttcaacggactcgacaagggggagcccgtcaacgcggcggacgcagcggccctcgagcacgacaaggcctacgaccagcagctcaaagcgggtgacaatccgtacctgcggtataaccacgccgacgccgagtttcaggagcgtctgcaagaagatacgtcttttgggggcaacctcgggcgagcagtcttccaggccaagaagcgggttctcgaacctctcggtctggttgaggaaggcgctaagacggctcctggaaagaagagaccggtagagccatcaccccagcgttctccagactcctctacgggcatcggcaagaaaggccagcagcccgcgaaaaagagactcaactttgggcagactggcgactcagagtcagtgcccgaccctcaaccaatcggagaaccccccgcaggcccctctggtctgggatctggtacaatggctgcaggcggtggcgctccaatggcagacaataacgaaggcgccgacggagtgggtagttcctcaggaaattggcattgcgattccacatggctgggcgacagagtcatcaccaccagcacccgaacctgggccctccccacctacaacaaccacctctacaagcaaatctccaacgggacttcgggaggaagcaccaacgacaacacctacttcggctacagcaccccctgggggtattttgactttaacagattccactgccacttctcaccacgtgactggcagcgactcatcaacaacaactggggattccggcccaagagactcaacttcaagctcttcaacatccaggtcaaggaggtcacgcagaatgaaggcaccaagaccatcgccaataaccttaccagcacgattcaggtctttacggactcggaataccagctcccgtacgtcctcggctctgcgcaccagggctgcctgcctccgttcccggcggacgtcttcatgattcctcagtacgggtacctgactctgaacaatggcagtcaggccgtgggccgttcctccttctactgcctggagtactttccttctcaaatgctgagaacgggcaacaactttgagttcagctaccagtttgaggacgtgccttttcacagcagctacgcgcacagccaaagcctggaccggctgatgaaccccctcatcgaccagtacctgtactacctgtctcggactcagtccacgggaggtaccgcaggaactcagcagttgctattttctcaggccgggcctaataacatgtcggctcaggccaaaaactggctacccgggccctgctaccggcagcaacgcgtctccacgacactgtcgcaaaataacaacagcaactttgcctggaccggtgccaccaagtatcatctgaatggcagagactctctggtaaatcccggtgtcgctatggcaacccacaaggacgacgaagagcgattttttccgtccagcggagtcttaatgtttgggaaacagggagctggaaaagacaacgtggactatagcagcgttatgctaaccagtgaggaagaaattaaaaccaccaacccagtggccacagaacagtacggcgtggtggccgataacctgcaacagcaaaacgccgctcctattgtaggggccgtcaacagtcaaggagccttacctggcatggtctggcagaaccgggacgtgtacctgcagggtcctatctgggccaagattcctcacacggacggaaactttcatccctcgccgctgatgggaggctttggactgaaacacccgcctcctcagatcctgattaagaatacacctgttcccgcggatcctccaactaccttcagtcaagctaagctggcgtcgttcatcacgcagtacagcaccggacaggtcagcgtggaaattgaatgggagctgcagaaagaaaacagcaaacgctggaacccagagattcaatacacttccaactactacaaatctacaaatgtggactttgctgttaacacagatggcacttattctgagcctcgccccatcggcacccgttacctcacccgtaatctgtaa

SEQ ID NO: 4990 - protein, 738 aa, Adeno-associated virus; identical to SEQ ID NO: 4793

SEQ ID NO: 4991 - protein, 738 aa, Adeno-associated virus; identical to SEQ ID NO: 4793

SEQ ID NO: 4992 - DNA, 2501 bp, Adeno-associated virus
  source 1..2501: mol_type = genomic DNA
gaattcgcccttggctgcgtcaactggaccaatgagaactttcccttcaacgattgcgtcgacaagatggtgatctggtgggaggagggcaagatgacggccaaggtcgtggagtccgccaaggccattcatcatctgctggggcgggctcccgagattgcttgctcggcctgcgatctggtcaacgtggacctggatgactgtgtttctgagcaataaatgacttaaaccaggtatggctgccgatggttatcttccagattggctcgaggacaacctctctgagggcattcgcgagtggtgggacttgagacctggagccccgaaacccaaagccaaccagcaaaagcaggacgacggccggggtctggtgcttcctggctacaagtacctcggacccttcaacggactcgacaagggagagccggtcaacgaggcagacgccgcggccctcgagcacgacaaggcctacgacaagcagctcgagcagggggacaacccgtacctcaagtacaaccacgccgacgccgagtttcaggagcgtcttcaagaagatacgtcttttgggggcaacctcgggcgagcagtcttccaggccaagaagcgggttctcgaacctctcggtctggttgaggaaggcgctaagacggctcctggaaagaagagacccatagaatcccccgactcctccacgggcatcggcaagaaaggccagcagcccgctaaaaagagactcaactttgggcagactggcgactcagagtcagtgcccgaccctcaaccaatcggagaaccccccgcaggcccctctggtctgggatctggcacaatggctgcaggcggtggcgctccaatggcagacaataacgaaggcgccgacggagtgggtagttcctcaggaaattggcattgcgattccacatggctgggcgacagagtcatcaccaccagcacccgaacctgggccctccccacctacaacaaccacctctacaagcaaatctccaacgggacatcgggaggaagcaccaacgacaacacctacttcggctacagcaccccctgggggtattttgactttaacagattccactgccacttctcaccacgtgactggcagcgactcatcaacaacaactggggattccggcccaagagactcaacttcaagctcttcaacatccaggtcaaggaggtcacgcagaatgaaggcaccaagaccatcgccaataaccttaccagcacgattcaggtctttacggactcggaataccagctcccgtacgtcctcggctctgcgcaccagggctgcctgcctccgttcccggcggacgtcttcatgattcctcagtacgggtacctgactctgaacaacggcagtcaggccgtgggccgttcctccttctactgcctggagtactttccttctcaaatgctgagaacgggcaacaactttgagttcagctaccagtttgaggacgtgccttttcacagcagctatgcgcacagccaaagcctggaccggctgatgaaccccctcatcgaccagtacctgtactacctgtctcggactcagtccacgggaggtaccgcaggaactcagcagttgctattttctcaggccgggcctaataacatgtcggctcaggccaaaaactggctacccgggccctgctaccggcagcaacgcgtctccacgacagtgtcgcaaaataacaacagcaactttgcttggaccggtgccaccaagtatcatctgaatggcagagactctctggtaaatcccggtgtcgctatggcaacgcacaagggcgacgaagagcgattttttccatccagcggagtcttgatgtttgggaaacagggagctggaaaagacaacgtagactatagcagcgttatgctaaccagtgaggaagaaatcaaaaccaccaacccagtggccacagaacagtacggcgtggtggccgataacctgcaacagcaaaacgccgctcctattgtaggggccgtcaacagtcaaggagccttacctggcatggtctggcagaaccgggacgtgtacctgcagggtcctatctgggccaagattcctcacacggacggcaactttcatccttcgccgctgatgggaggctttggactgaaacacccgcctcctcagatcctgattaagaatacacctgttcccgcggatcctccaactaccttcagtcaagccaagctggcgtcgttcatcacgcagtacagcaccggacaggtcagcgtggaaattgaatgggagctgcagaaagagaacagcaagcgctggaacccagagattcagtatacttccaactactacaaatctacaaatgtggactttgctgtcaatactgagggtacttattcagagcctcgccccattggcacccgttacctcacccgtaacctgtaattgcctgttaatcaataaaccggttgattcgtttcagttgaactttggtctcaagggcgaattc

SEQ ID NO: 4993 - DNA, 2187 bp, Adeno-associated virus
  source 1..2187: mol_type = genomic DNA
atggctgccgatggttatcttccagattggctcgaggacaacctctctgagggcattcgcgagtggtgggacttgaaacctggagccccgaaacccaaagccaaccagcaaaagcaggacgacggccggggtctggtgcttcctggctacaagtacctcggacccttcaacggactcgacaagggagagccggtcaacgaggcagacgccgcggccctcgagcacgacaaggcctacgacaagcagctcgagcagggggacaacccgtacctcaagtacaaccacgccgacgccgagtttcaggagcgtcttcaagaagatacgtcttttgggggcaacctcgggcgagcagtcttccaggccaagaagcgggttctcgaacctctcggtctggttgaggaaggcgctaagacggctcctggaaagaagagacccatagaatcccccgactcctccacgggcatcggcaagaaaggccagcagcccgctaaaaagaagctcaactttgggcagactggcgactcagagtcagtgcccgacccccaacctctcggagaacctcccgccgcgccctcaggtctgggatctggtacaatggctgcaggcggtggcgcaccaatggcagacaataacgaaggcgccgacggagtgggtaatgcctccggaaattggcattgcgattccacatggctgggcgacagagtcatcaccaccagcacccgcacctgggccctgcccacctacaacaaccacctctacaagcagatatcaagtcagagcggggctaccaacgacaaccacttcttcggctacagcaccccctggggctattttgacttcaacagattccactgccacttctcaccacgtgactggcagcgactcatcaacaacaactggggattccggcccagaaagctgcggttcaagttgttcaacatccaggtcaaggaggtcacgacgaacgacggcgttacgaccatcgctaataaccttaccagcacgattcaggtcttctcggactcggagtaccaactgccgtacgtcctcggctctgcgcaccagggctgcctccctccgttccctgcggacgtgttcatgattcctcagtacggatatctgactctaaacaacggcagtcagtctgtgggacgttcctccttctactgcctggagtactttccttctcagatgctgagaacgggcaataactttgaattcagctacacctttgaggaagtgcctttccacagcagctatgcgcacagccagagcctggaccggctgatgaatcccctcatcgaccagtacctgtactacctggcccggacccagagcactacggggtccacaagggagctgcagttccatcaggctgggcccaacaccatggccgagcaatcaaagaactggctgcccggaccctgttatcggcagcagagactgtcaaaaaacatagacagcaacaacaacagtaactttgcctggaccggggccactaaataccatctgaatggtagaaattcattaaccaacccgggcgtagccatggccaccaacaaggacgacgaggaccagttctttcccatcaacggagtgctggtttttggcgaaacgggggctgccaacaagacaacgctggaaaacgtgctaatgaccagcgaggaggagatcaaaaccaccaatcccgtggctacagaagaatacggtgtggtctccagcaacctgcaatcgtctacggccggaccccagacacagactgtcaacagccagggggctctgcccggcatggtctggcagaaccgggacgtgtacctgcagggtcccatctgggccaaaattcctcacacggacggcaactttcacccgtctcccctgatgggcggatttggactcaaacacccgcctcctcaaattctcatcaaaaacaccccggtacctgctaatcctccagaggtgtttactcctgccaagtttgcctcatttatcacgcagtacagcaccggccaggtcagcgtggagatcgagtgggaactgcagaaagaaaacagcaaacgctggaatccagagattcagtacacctcaaattatgccaagtctaataatgtggaatttgctgtcaacaacgaaggggtttatactgagcctcgccccattggcacccgttacctcacccgtaacctgtaa

SEQ ID NO: 4994 - protein, 728 aa, Adeno-associated virus; identical to SEQ ID NO: 4765

SEQ ID NO: 4995 - protein, 728 aa, Adeno-associated virus; identical to SEQ ID NO: 4829

SEQ ID NO: 4996 - protein, 728 aa, Adeno-associated virus; identical to SEQ ID NO: 4829

SEQ ID NO: 4997 - DNA, 3113 bp, Adeno-associated virus
  source 1..3113: mol_type = genomic DNA
gaattcgccctttctacggctgcgtcaactggaccaatgagaactttcccttcaacgattgcgtcgacaagatggtgatctggtgggaggagggcaagatgacggccaaggtcgtggagtccgccaaggccattctcggcggcagcaaggtgcgcgtggaccaaaagtgcaagtcgtccgcccagatcgatcccacccccgtgatcgtcacttccaacaccaacatgtgcgccgtgattgacgggaacagcaccaccttcgagcaccagcagccgttacaagaccggatgttcaaatttgaactcacccgccgtctggagcatgactttggcaaggtgacaaagcaggaagtcaaagagttcttccgctgggcgcaggatcacgtgaccgaggtggcgcatgagttctacgtcagaaagggtggagccaacaagagacccgcccccgatgacgcggataaaagcgagcccaagcgggcctgcccctcagtcgcggatccatcgacgtcagacgcggaaggagctccggtggactttgccgacaggtaccaaaacaaatgttctcgtcacgcgggcatgcttcagatgctgcttccctgcaagacatgcgagagaatgaatcagaatttcagcatttgcttcacgcacgggaccagagactgttcagaatgtttccccggcgtgtcagaatctcaaccggtcgtcagaaagaggacgtatcggaaactctgtgccattcatcatctgctggggcgggctcccgagattgcttgctcggcctgcgatctggtcaacgtggacctggatgactgtgtttctgagcaataaatgacttaaaccaggtatggctgccgatggtcatcttccagattggctcgaggacaacctctctgagggcattcgcgagtggtgggacttgaaacctggagccccgaaacccaaagccaaccagcaaaagcaggacgacggccggggtctggtgcttcctggctacaagtacctcggacccttcaacggactcgacaagggggagcccgtcaacgcggcggacgcagcggccctcgagcacgacaaggcctacgaccagcagctcaaagcgggtgacaatccgtacctgcggtataaccacgccgacgccgagtttcaggagcgtcttcaagaagatacgtcttttgggggcaacctcgggcgagcagtcttccaggccaagaagcgggttctcgaacctctcggtctggttgaggaaggcgctaagacggctcctggaaagaagagacccatagaatcccccgactcctccacgggcatcggcaagaaaggccagcagcccgctaaaaagaagctcaactttgggcagactggcgactcagagtcagtgcccgaccctcaaccaatcggagaaccccccgcaggcccctctggtctgggatctggtacaatggctgcaggcggtggcgctccaatggcagacaataacgaaggcgccgacggagtgggtagttcctcaggaaattggcattgcgattccacatagctgggcgacagagtcatcaccaccagcacccgaacctgggccctccccacctacaacaaccacctctacaagcaaatctccaacgggacatcgggaggaagcaccaacgacaacacctacttcggctacagcaccccctgggggtattttgactttaacagattccactgccacttctcaccacgtgactggcagcgactcatcaacaacagctggggattccggcccaagagactcaacttcaagctcttcaacatccaggtcaaggaggtcacgcagaatgaaggcaccaagaccatcgccaataaccttaccagcacgattcaggtctttacggactcggaataccagctcccgtacgtcctcggctctgcgcaccagggctgcctgcctccgttcccggcggacgtcttcatgattcctcagtacgggtacctgactctgaacaacggcagtcaggccgtgggccgttcctccttctactgcctggagtactttccttctcaaatgctgagaacgggcaacaactttgagttcagctaccagtttgaggacgtgccttttcacagcagctacgcgcacagccaaagcctggaccggctgatgaaccccctcatcgaccagtacctgtactacctgtctcggactcagtccacgggaggtaccgcaggaactcagcagttgctattttctcaggccgggcctaataacatgtcggctcaggccaaaaactggctacccgggccctgctaccggcagcaacgcgtctccacgacactgtcgcaaaataacaacagcaactttgcttggaccggtgccaccaagtatcatctgaatggcagagactctctggtaaatcccggtgtcgctatggcaacgcacaaggacgacgaagagcgattttttccatccagcggagtcttgatgtttgggaaacagggagctggaaaagacaacgtggactatagcagcgttatgctaaccagtgaggaagaaatcaaaaccaccaacccagtggccacagaacagtacggcgtggtggccgataacctgcaacagcaaaacgccgctcctattgtaggggccgtcaacagtcaaggagccttacctggcatggtctggcagaaccgggacgtgtacctgcagggtcctatctgggccaagattcctcacacggacggcaactttcatccttcgccgctgatgggaggctttggactgaaacacccgcctcctcagatcctgattaagaatacacctgttcccgcggatcctccaactaccttcagtcaagccaagctggcgtcgttcatcacgcagtacagcaccggacaggtcagcgtggaaattgaatgggagctgcagaaagagaacagcaagcgctggaacccagagattcagtatacttccaactactacaaatctacaaatgtggactttgctgtcaatactgagggtacttattcagagcctcgccccattggcacccgttacctcacccgtaacctgtaattgcctgttaatcaataaaccggttaattcgtttcagttgaactttggtctctgcgaagggcgaattc

SEQ ID NO: 4998 - DNA, 3106 bp, Adeno-associated virus
  source 1..3106: mol_type = genomic DNA
gaattcgcccttctacggctgcgtcaactggaccaatgagaactttcccttcaacgattgcgtcgacaagatggtgatctggtgggaggagggcaagatgacggccaaggtcgtggagtccgccaaggccattctcggcggcagcaaggtgcgcgtggaccaaaagtgcaagtcgtccgcccagatcgaccccacccccgtgatcgtcacctccaacaccaacatgtgcgccgtgattgacgggaacagcaccaccttcgagcaccagcagccgttgcaggaccggatgttcaaatttgaactcacccgccgtctggagcatgactttggcaaggcgacaaagcaggaagtcaaagagttcttccgctgggcgcaggatcacgtgaccgaggtggcgcatgagttctacgtcagaaagggtggagccaacaagagacccgcccccgatgacgcggataaaagcgagcccaagcgggcccgcccctcagtcgcggatccatcgacgtcagacgcggaaggagctccggtggactttgccgacaggtaccaaaacaaatgttctcgtcacgcgggcatgcttcagatgctgtttccctgcaaaacatgcgagagaatgaatcagaatttcaacatttgcttcacgcacgggaccagagactgttcagaatgtttccccggcgtgtcagaatctcaaccggtcgtcagaaagaggacgtatcggaaactctgtgccattcatcatctgctggggcgggctcccgagattgcttgctcggcctgcgatctggtcaacgtggacctggatgactgtgtttctgagcaataaatgacttaaaccaggtatggctgccgatggttatcttccagattggctcgaggacaacctctctgagggcattcgcgagtggtgggacttgaaacctggagccccgaaacccaaagccaaccagcaaaagcaggacgacggccggggtctggtgcttcctggctacaagtacctcggacccttcaacggactcgacaagggagagccggtcaacgaggcagacgccgcggccctcgagcacgacaaggcctacgacaagcagctcgagcagggggacaacccgtacctcaagtacaaccacgccgacgccgagtttcaggagcgtcttcaagaagatacgtcttttgggggcaacctcgggcgagcagtcttccgggccaagaagcgggttctcgaacctctcggtctggttgaggaaggcgctaagacggctcctggaaagaagagacccatagaatcccccgactcctccacgggcatcggcaagaaaggccagcagcccgctaaaaagaagctcaactttgggcagactggcgactcagagtcagtgcccgacccccaacctctcggagaacctcccgccgcgccctcaggtctgggatctggtacaatggctgcaggcggtggcgcaccaatggcagacaataacgaaggcgccgacggagtgggtaatgcctccggaaattggcattgcgattccacatggctgggcgacagagtcatcaccaccagcacccgcacctgggccctgcccacctacaacaaccacctctacaagcagatatcaagtcagagcggggctaccaacgacaaccacttcttcggctacagcaccccctggggctattttgacttcaacagattccactgccacttctcaccacgtgactggcagcgactcatcaacaacaaccggggattccggcccagaaagctgcggttcaagttgttcaacatccaggtcaaggaggtcacgacgaacgacggcgttacgaccatcgctaataaccttaccagcacgattcaggtcttctcggactcggagtaccaactgccgtacgtcctcggctctgcgcaccagggctgcctccctccgttccctgcggacgtgttcatgattcctcagtacggatatctgactctaaacaacggcagtcagtctgtgggacgttcctccttctactgcctggagtactttccttctcagatgctgagaacgggcaataactttgaattcagctaccagtttgaggacgtgccctttcacagcagctacgcgcacagccaaagcctggaccggctgatgaaccccctcatcgaccagtacctgtactacctgtctcggactcagtccacgggaggtaccgcaggaactcagcagttgctattttctcaggccgggcctaataacatgtcggctcaggccaaaaactggctacccgggccctgctaccggcagcaacgcgtctccacgacactgtcgcaaaataacaacagcaactttgcttggaccggtgccaccaagtatcatctgaatggcagagactctctggtaaatcccggtgtcgctatggcaacgcacaaggacgacgaagagcgattttttccatccagcggagtcttgatgtttgggaaacagggagctggaaaagacaacgtggactatagcagcgttatgctaaccagtgaggaagaaatcaaaaccaccaacccagtggccacagaacagtacggcgtggtggccgataacctgcaacagcaaaacgccgctcctattgtaggggccgtcaacagtcaaggagccttacctggcatggcctggcagaaccgggacgtgtacctgcagggtcctatctgggccaagattcctcacacggacggcaactttcatccttcgccgctgatgggaggctttggactgaaacacccgcctcctcagatcctgattaagaatacacctgttcccgcggatcctccaactaccttcagtcaagccaagctggcgtcgttcatcacgcagtacagcaccggacaggtcagcgtggaaattgaatgggagctgcagaaagagaacagcaagcgctggaacccagagattcagtatacttccaactactacaaatctacaaatgtggactttgctgtcaatactgagggtacttattcagagcctcgccccattggcacccgttacctcacccgtaacctgtaattgcctgttaatcaataaaccggttaattcgtttcagttgaactttggtctctgcgaagggcgaattc

SEQ ID NO: 4999 - DNA, 3197 bp, Adeno-associated virus
  source 1..3197: mol_type = genomic DNA
gaattcgccctttctacggctgcgtcaactggaccaatgagaactttcccttcaacgattgcgtcgacaagatggtgatctggtgggaggagggcaagatgacggccaaggtcgtggagtccgccaaggccattctcggcggcagcaaggtgcgcgtggaccaaaagtgcaagtcgtccgcccagatcgaccccacccccgtgatcgtcacctccaacaccaacatgtgcgccgtgattgacgggaacagcaccaccttcgagcaccagcagccgttacaagaccggatgttcaaatttgaactcacccgccgtctggagcacgactttggcaaggtgacaaagcaggaagtcaaagagttcttccgctgggcgcaggatcacgtgaccgaggtggcgcatgagttctacgtcagaaagggtggagccaacaagagacccgcccccgatgacgcggataaaagcgagcccaagcgggcctgcccctcagtcgcggatccatcgacgtcagacgcggaaggagctccggtggactttgccgacaggtaccaaaacaaatgttctcgtcacgcgggcatgcttcagatgctgtttccctgcaagacatgcgagagaatgaatcagaatttcaacatttgcttcacgcacgggaccagagactgttcagaatgtttccccggcgtgtcagaatctcaaccggtcgtcagaaagaggacgtatcggaaactctgtgccattcatcatctgctggggcgggctcccgagattgcttgctcggcctgcgatctggtcaacgtggacctggatgactgtgtttctgagcaataaatgacttaaaccaggtatggctgccgatggttatcttccagattggctcgaggacaacctctctgagggcattcgcgagtggtgggacttgaaacctggagccccgaaacccaaagccaaccagcaaaagcaggacgacggccggggtctggtgcttcctggctacaagtacctcggacccttcaacggactcgacaagggagagccggtcaacgaggcagacgccgcggccctcgagcacgacaaggcctacgacaagcagctcgagcagggggacaacccgtacctcaagtacaaccacgccgacgccgagtttcaggagcgtcttcaagaagatacgtcttttgggggcaacctcgggcgagcagtcttccaggccaagaagcgggttctcgaacctctcggtctggttgaggaaggcgctaagacggctcctggaaagaagagaccggtagagccatcaccccagcgttctccagactcctctacgggcatcggcaagacaggccagcagcccgcgaaaaagagactcaactttgggcagactggcgactcagagtcagtgcccgaccctcaaccaatcggagaaccccccgcaggcccctctggtctgggatctggtacaatggctgcaggcggtggcgctccaatggcagacaataacgaaggcgccgacggagtgggtagttcctcaggaaattggcattgcgattccacatggctgggcgacagagtcatcaccaccagcacccgaacctgggccctccccacctacaacaaccacctctacaagcaaatctccaacgggacatcgggaggaagcaccaacgacaacacctacttcggctacagcaccccctgggggtattttgactttaacagattccactgccacttctcaccacgtgactggcagcgactcatcaacaacaactggggattccggcccaagagactcaacttcaagctcttcaacatccaggtcaaggaggtcacgcagaatgaaggcaccaagaccatcgccaataaccttaccagcacgattcaggtctttacggactcggaataccagctcccgtacgtcctcggctctgcgcaccagggctgcctgcctccgttcccggcggacgtcttcatgattcctcagtacgggtacctgactctgaacaacggcagtcaggccgtgggccgttcctccttctactgcctggagtactttccttctcaaatgctgagaacgggcaacaactttgagttcagctaccagtttgaggacgtgccttttcacagcagctacgcgcacagccaaagcctggaccggctgatgaaccccctcatcgaccagtacctgtactacctgtctcggactcagtccacgggaggtaccgcaggaactcagcagttgctattttctcaggccgggcctaataacatgtcggctcaggccaaaaactggctacccgggccctgctaccggcagcaacgcgtctccacgacactgtcgcaaaataacaacagcaactttgcttggaccggtgccaccaagtatcatctgaatggcagagactctctggtaaatcccggtgtcgctatggcaacgcacaaggacgacgaagagcgattttttccatccagcggagtcttgatgtttgggaaacagggagctggaaaagacaacgtggactatagcagcgttatgctaaccagtgaggaagaaatcaaaaccaccaacccagtggccacagaacagtacggcgtggtggccgataacctgcaacagcaaaacgccgctcctattgtaggggccgtcaacagtcaaggagccttacctggcatggtctggcagaaccgggacgtgtacctgcagggtcctatctgggccaagattcctcacacggacggcaactttcatccttcgccgctgatgggaggctttggactgaaacacccgcctcctcagatcctgattaagaatacacctgttcccgcggatcctccaactaccttcagtcaagccaagctggcgtcgttcatcacgcagtacagcaccggacaggtcagcgtggaaattgaatgggagctgcagaaagagaacagcaagcgctggaacccagagattcagtatacttccaactactacaaatctacaaatgtggactttgctgtcaatactgagggtacttattcagagcctcgccccattggcacccgttacctcacccgtaacctgtaattgcctgttaatcaataaaccggttaattcgtttcagttgaactttggtctctgcgaagggcgaattcgtttaaacctgcaggactagtccctttagtgagggttaattctgagcttggcgtaatcatgggtcatag

SEQ ID NO: 5000 - DNA, 3276 bp, Adeno-associated virus
  source 1..3276: mol_type = genomic DNA
gaattcgcccttcgcagagaccaaagttcaactgaaacgaattaaccggtttattgattaacaggcaattacaggttacgggtgaggtaacgggtgccaatggggcgaggctcagtataaaccccttcgttgttgacagcaaattccacattattagacttggcataatttgaggtgtactgaatctctggattccagcgtttgctgttttctttctgcagttcccactcgatctccacgctgacctggccggtgctgtactgcgtgataaatgaggcaaacttggcaggagtaaacacctctggaggattagcaggtaccggggtgtttttgatgagaatttgaggaggcgggtgtttgagtccaaatccgtccatcaggggagacgggtgaaagttgccgtccgtgtgaggaattttggcccagatgggaccctgcaggtacacgtcccggttctgccagaccatgccgggcagagccccctggctgttgacagtctgtgtctggggtccggccgtagacgattgcaggttgctggagaccacaccgtattcttctgtagccacgggattggtggttttgatctcctcctcgctggtcattagcacgttttccagcgttgtcttgttggcagcccccgttttgccaaaaaccagcactccgttgatgggaaagaactggtcctcgtcgtccttgttggtggccatggctacgcccgggttggttaatgaatttctaccattcagatggtatttagtggccccggtccaggcaaagttactgttgttgttgctgtctatgttttttgacagtctctgctgccgataacagggtccgggcagccagttctttgattgctcggccatggtgttgggcccagcctgatggaactgcagctcccttgtggaccccgtagtgctctgggtccgggccaggtagtacaggtactggtcgatgaggggattcatcagccggtccaggctctggctatgcgcatagctgctgtggaaaggcacttcctcaaaggtgtagctgaattcaaagttattgcccgttctcagcatctgagaaggaaagtactccaggcagtagaaggaggaacgtcccacagactgactgccgttgtttagagtcagatatccgtactgaggaatcatgaacacgtccgcagggaacggagggaggcagccctggtgcgcagagccgaggacgtacggcagttggtactccgagtccgagaagacctgaatcgtgctggtaaggttattagcgatggtcgtaacgccgtcgtccgtcgtgacctccttgacctggatgttgaacaacttgaaccgcagctttctgggccggaatccccagttgttgttgatgagtcgctgccagtcacgtggtgagaagtggcagtggaatctgttaaagtcaaaatacccccagggggtgctgtagccgaagtaggtgttgtcgttggtgcttcctcccgatgtcccgttggagatttgcttgtagaggtggttgttgtaggtggggagggcccaggttcgggtgctggtggtgatgactctgtcgcccagccatgtggaatcgcaatgccaatttcctgaggaactacccactccgtcggcgccttcgttattgtctgccattggagcgccaccgcctgcagccattgtaccagatcccagaccagaggggcctgcggggggttctccgattggttgagggtcgggcactgactctgagtcgccagtctgcccaaagttgagtctctttttcgcgggctgctggcctgtcttgccgatgcccgtagaggagtctggagaacgctggggtgatggctctaccggtctcttctttccaggagccgtcttagcgccttcctcaaccagaccgagaggttcgagaacccgcttcttggcctggaagactgctcgcccgaggttgcccccaaaagacgtatcttcttgaagacgctcctgaaactcggcgtcggcgtggttgtacttgaggtacgggttgtccccctgctcgagctgcttgtcgtaggccttgtcgtgctcgagggccgcggcgtctgcctcgttgaccggctctcccttgtcgagtccgttgaagggtccgaggtacttgtagccaggaagcaccagaccccggccgtcgtcctgcttttgctggttggctttgggtttcggggctccaggtttcaagtcccaccactcgcgaatgccctcagagaggttgtcctcgagccaatctggaagataaccatcggcagccatacctggtttaagtcatttattgctcagaaacacagtcatccaggtccacgttgaccagatcgcaggccgagcaagcaatctcgggagcccgccccagcagatgatgaatggcacagagtttccgatacgtcctctttctgacgaccggttgagattctgacacgccggggaaacattctgaacagtctctggtcccgtgcgtgaagcaaatgttgaaattctgattcattctctcgcatgtcttgcagggaaacagcatctgaagcatgcccgcgtgacgagaacacttgttttggtacctgtcggcaaagtccaccggagctccttccgcgtctgacgtcgatggatgcaaaatgtcgcaaaagcactcacgtgacagctaatacaggaccactcccctatgacgtgatttacgtcagcgctatgcccgcgtgacgagaacatttgttttggtacctgtcggcaaagtccaccggagctccttccgcgtctgacgtcgatggatccgcgactgaggggcaggcccgcttgggctcgcttttatccgcgtcatcgggggcgggtctcttgttggctccaccctttctgacgtagaactcatgcgccacctcggtcacgtgatcctgcgcccagcggaagaactctttgacttcctgctttgtcaccttgccaaagtcatgctccagacggcgggtgagttcaaatttgaacatccggtcctgcaacggctgctggtgctcgaaggtggtgctgttcccgtcaatcacggcgcacatgttggtgttggaagtgacgatcacgggggtgggatcgatctgggcggaagacttgcacttttggtccacgcgcaccttgctgccgccgagaatggccttggcggactccacgaccttggccgtcatcttgccctcctcccaccagatcaccatcttgtcgacgcaatcgttgaagggaaagttctcattggtccagttgacgcagccgtagaaagggcgaattc

SEQ ID NO: 5001 - protein, 738 aa, Adeno-associated virus; identical to SEQ ID NO: 4777

SEQ ID NO: 5002 - protein, 738 aa, Adeno-associated virus
MAADGYLPDWLEDNLSEGIREWWDLKPGAPKPKANQQKQDDGRGLVLPGYKYLGPFNGLDKGEPVNAADAAALEHDKAYDQQLKAGDNPYLRYNHADAEFQERLQEDTSFGGNLGRAVFQAKKRVLEPLGLVEEGAKTAPGKKRPVEPSPQRSPDSSTGIGKKGHQPARKRLNFGQTGDSESVPDPQPIGEPPAGPSGLGSGTMAAGGGAPMADNNEGADGVGSSSGNWHCDSTWLGDRVITTSTRTWALPTYNNHLYKQISNGTSGGSTNDNTYFGYSTPWGYFDFNRFHCHFSPRDWQRLINNNWGFRPKRLNFKLFNIQVKEVTQNEGTKTIANNLTSTIQVFTDSEYQLPYVPGSAHQGCLPPFPADVFMIPQYGYLTLNNGSQAVGRSSFYCLEYFPSQMLRTGNNFEFSYTFEDVPFHSSYAHSQSLDRLMNPLIDQYLYYLSRTQSTGGTQGTQQLLFSQAGPANMSAQAKNWLPGPCYRQQRVSTTLSQNNNSNFAWTGATKYHLNGRDSLVNPGVAMATHKDDEERFFPSSGVLMFGKQGAGKDNVDYSSVMLTSEEEIKTTNPVATEQYGVVADNLQQTNGAPIVGTVNSQGALPGMVWQNRDVYLQGPIWAKIPHTDGNFHPSPLMGGFGLKHPPPQILIKNTPVPADPPTTFSQAKLASFITQYSTGQVSVEIEWELQKENSKRWNPEIQYTSNYYKSTNVDFAVNTEGTYSEPRPIGTRYLTRNL

SEQ ID NO: 5003 - protein, 738 aa, Adeno-associated virus; identical to SEQ ID NO: 4775

SEQ ID NO: 5004 - DNA, 2489 bp, Adeno-associated virus
  source 1..2489: mol_type = genomic DNA
gaattcgccctttctacggctgcgtcaactggaccaatgagaactttcccttcaacgattgcgtcgacaagatggtgatctggtgggaggagggcaagatgacggccaaggtcgtgaagtccgccaaggccattcatcatctgctggggcgggctcccgagattgcttgctcggcctgcgatctggtcaacgtggacctggatgactgtgtttctgagcaataaatgacttaaaccaggtatggctgccgatggttatcttccagattggctcgaggacaacctctctgagggcattcgcgagtggtgggacttgaaacctggagccccgaaacccaaagccaaccagcaaaagcaggacgacggccggggtctggtgcttcctggctacaagtacctcggacccttcaacggactcgacaagggagagccggtcaacgaggcagacgccgcggccctcgagcacgacaaggcctacgacaagcagctcgagcagggggacaacccgtacctcaagtacaaccacgccgacgccgagtttcaggagcgtcttcaagaagatacgtcttttgggggcaacctcgggcgagcagtcttccaggccaagaagcgggttctcgaacctctcggtctggttgaggaaggcgctaagacggctcctggaaagaagagacccatagaatcccccgactcctccacgggcatcggcaggaaaggccagcagcccgctaaaaagaagctcaactttgggcagactggcgactcagagtcagtgcccgaccctcaaccaatcggagaaccccccgcaggcccctctggtctgggatctggtacaatggctgcaggcggtggcgctccaatggcagacaataacgaaggcgccgacggagtgggtaatgcctccggaaattggcattgcgattccacatggctgggcgacagagtcatcaccaccagcacccgcacctgggccctgcccacctacaacaaccacctctacaagcagatatcaagtcagagcggggctaccaacgacaaccacttcttcggctacagcaccccctggggctattttgacttcaacagattccactgccacttctcaccacgtgactggcagcgactcatcaacaacaactggggattccggcccagaaagctgcggttcaagttgttcaacatccaggtcaaggaggtcacgacgaacgacggcgttacgaccatcgccaataaccttaccagcacgattcaggtcttctcggactcggagtaccaactgccgtacgtcctcggctctgcgcaccagggctgcctccctccgttccctgcggacgtgttcatgattcctcagtacggatatctgactctaaacaacggcagtcagtctgtgggacgttcctccttctactgcctggagtactttccttctcagatgctgagaacgggcaataactttgaattcagctacacctttgaggaagtgcctttccacagcagctatgcgcacagccagagcctggaccggctgatgaatcccctcatcgaccagtacctgtactacctggcccggacccagagcactacggggtccacaagggagctgcagttccatcaggctgggcccaacaccatggccgagcaatcaaagaactggctgcccggaccctgttatcggcagcagagactgtcaaaaaacatagacagcaacaacaacagtaactttgcctggaccggggccactaaataccatctgaatggtagaaattcattaaccaacccgggcgtagccatggccaccaacaaggacgacgaggaccagttctttcccatcaacggagtgctggtttttggcaaaacgggggctgccaacaagacaacgctggaaaacgtgctaatgaccagcgaggaggagatcaaaaccaccaatcccgtggctacagaagaatacggtgtggtctccagcaacctgcaatcgtctacggccggaccccagacacagactgtcaacagccagggggctctgcccggcatggtctggcagaaccgggacgtgtacctgcagggtcccatctgggccaaaattcctcacacggacggcaactttcacccgtctcccctgatgggcggatttggactcaaacacccgcctcctcaaattctcatcaaaaacaccccggtacctgctaatcctccagaggtgtttactcctgccaagtttgcctcatttatcacgcagtacagcaccggccaggtcagcgtggagatcgagtgggaactgcagaaagaaaacagcaaacgctggaatccagagattcagtacacctcaaattatgccaagtctaataatgtggaatttgctgtcaacaacgaaggggtttatactgagcctcgccccattggcacccgttacctcacccgtaacctgtaattgcctgttaatcaataaaccggttaattcgtttcagttgaactttggtcaagggcgaattc

SEQ ID NO: 5005 - DNA, 3098 bp, Adeno-associated virus
  source 1..3098: mol_type = genomic DNA
gaattcgccctttctacggctgcgtcaactggaccaatgagaactttcccttcaacgattgcgtcgacaagatggtgatctggtgggaggagggcaagatgacggccaaggtcgtggagtccgccaaggccattctcggcggcagcaaggtgcgcgtggaccaaaagtgcaagtcttccgcccagatcgatcccacccccgtgatcgtcacttccaacaccaacatgtgcgccgtgattgacgggaacagcaccaccttcgagcaccagcagccgttacaagaccggatgttcaaatttgaactcacccgccgtctggagcacgactttggcaaggtgacaaagcaggaagtcaaagagttcttccgctgggcgcaggatcacgtgaccgaggtggcgcatgagttctacgtcagaaagggtggagccaacaagagacccgcccccgatgacgcggataaaagcgagcccaagcgggcctgcccctcagtcgcggatccatcgacgtcagacgcggaaggagctccggtggactttgccgacaggtaccaaaacaaatgttctcgtcacgcgggcatgcttcagatgctgtttccctgcaagacatgcgagagaatgaatcagaatttcaacatttgcttcacgcacgggaccggagactgttcagaatgtttccccggcgtgtcagaatctcaaccggtcgtcagaaagaggacgtatcggaaactctgtgccattcatcatctgctggggcgggctcccgagattgcttgctcggcctgcgatctggtcaacgtggacctggatgactgtgtttctgagcaataaatgacttaaaccaggtatggctgccgatggttatcttccagattggctcgaggacaacctctctgagggcattcgcgagtggtgggacttgaaacctggagccccgaaacccaaagccaaccagcaaaagcaggacgacggccggggtctggtgcttcctggctacaagtacctcggacccttcaacggactcgacaagggagagccggtcaacgcggcggacgcagcggccctcgagcacgacaaggcctacgaccagcagctcaaagcgggtgacaatccgtacctgcggtataaccacgccgacgccgagtttcaggagcgtcttcaagaagatacgtcttttgggggcaacctcgggcgagcagtcttccaggccaagaagcgggttctcgaacctctcggtctggttgaggaaggcgctaagacggctcctggaaagaagagacccatagaatcccccgactcctccacgggcatcggcaagaaaggccagcagcccgctaaaaagaagctcaactttgggcagactggcgactcagagtcagtgcccgaccctcaaccaatcggagaaccccccgcaggcccctctggtctgggatctggtacaatggctgcaggcggtggcgctccaatggcagacaataacgaaggcgccgacggagtgggtaatgcctccggaaattggcattgcgattccacatggctgggcgacagagtcatcaccaccagcacccgcacctgggccctgcccacctacaacaaccacctctacaagcagatatcaagtcagagcggggctaccaacgacaaccacttcttcggctacagcaccccctggggctattttgacttcaacagattccactgccacttctcaccacgtgactggcagcgactcatcaacaacaactggggattccggcccagaaagctgcggttcaagttgttcaacatccaggtcaaggaggtcacgacgaacgacggcgttacgaccatcgctaataaccttaccagcacgattcaggtcttctcggactcggagtaccaactgccgtacgtcctcggctctgcgcaccagggctgcctccctccgttccctgcggacgtgttcatgattcctcagtacggatatctgactctaaacaacggcagtcagtctgtgggacgttcctccttctactgcctggagtactttccttctcagatgctgagaacgggcaataactttgaattcagctacacctttgaggaagtgcctttccacagcagctatgcgcacagccagagcctggaccggctgatgaatcccctcatcgaccagtacctgtactacctggcccggacccagagcactacggggtccacaagggagctgcagttccatcaggctgggcccaacaccatggccgagcaatcaaagaactggctgcccggaccctgttatcggcggcagagactgtcaaaagacatagacagcaacaacaacagtaactttgcctggaccggggccactaaataccatctgaatggtagaaattcattaaccaacccgggcgtagccatggccaccaacaaggacgacgaggaccagttctttcccatcaacggagtgctggtttttggcaaaacgggggctgccaacaagacaacgctggaaaacgtgctaatgaccagcgaggaggagatcaaaaccaccaatcccgtggctacagaagaatacggtgtggtctccagcaacctgcaatcgtctacggccggaccccagacacagactgtcaacagccagggggctctgcccggcatggtctggcagaaccgggacgtgtacctgcagggtcccatctgggccaaaattcctcacacggacggcaactttcacccgtctcccctgatgggcggatttggactcaaacacccgcctcctcaaattctcatcaaaaacaccccggtacctgctaatcctccagaggtgtttactcctgccaagtttgcctcatttatcacgcagtacagcaccggccaggtcagcgtggagatcgagtgggaactgcagaaagagaacagcaaacgctggaatccagagattcagtacacctcaaattatgccaagtctaataatgtggaatttgctgtcaacaacgaaggggtttatactgagcctcgccccattggcacccgttacctcacccgtaacctgtaattacttgttaatcaataaaccggttgattcgtttcagttgaactttggtctctgcgaagggcgaattc

SEQ ID NO: 5006 - DNA, 2969 bp, Adeno-associated virus
  source 1..2969: mol_type = genomic DNA
gaattcgccctttctacggctgcgtcaactggaccaatgagaactttcccttcaacgattgcgtcgacaagatggtgatctggtgggaggagggcaagatgacggccaaggtcgtggagtccgccaaggccattctcggcggcagcaaggtgcgcgtggaccaaaagtgcaagtcgtccgcccagatcgaccccacccccgtgatcgtcacctccaacaccaacatgtgcgccgtgattgacgggaacagcaccaccttcgagcaccagcagccgttacaagaccggatgttcaaatttgaactcacccgccgtctggagcacgactttggcaaggtgacaaagcaggaagtcaaagagttcttccgctgggcgcaggatcacgtgaccgaggtggcgcatgagttctacgtcagaaagggtggagccaacaagagacccgcccccgatgacgcggataaaagcgagcccaagcgggcctgcccctcagtcgcggatccatcgacgtcagacgcggaaggagctccggtggactttgccgacaggtaccaaaacaaatgttctcgtcacgcgggcatgcttcagatgctgtttccctgcaagacatgcgagagaatgaatcagaatttcaacatttgcttcacgcacgggaccagagactgttcagaatgtttccccggcgtgtcagaatctcaaccggtcgtcagaaagaggacgtatcggaaactctgtgccattcatcatctgctggggcgggctcccgagattgcttgctcggcctgcgatctggtcaacgtggacctggatgactgtgtttctgagcaataaatgacttaaaccaggtatggctgccgatggttatcttccagattggctcgaggacaacctctctgagggcatccgcgagtggtgggacttgaaacctggagccccgaaacccaaagccaaccagcaaaagcaggacgacggccggggtctggtgcttcctggctacaagtacctcggacccttcaacggactcgacaagggagagccggtcaacgaggcagacgccgcggccctcgagcacgacaaggcctacgacaagcagctcgagcagggggacaacccgtacctcaagtacaaccacgccgacgccgagtttcaggagcgtcttcaagaagatacgtcttttgggggcaacctcgggcgagcagtcttccaggccaagaagcgggttctcgaacctctcggtctggttgaggaaggcgctaagacggctcctggaaagaagagaccggtagagccatcaccccagcgttctccagactcctctacgggcatcggcaagacaggccagcagcccgcgaaaaagagactcaactttgggcagactggcgactcagagtcagtgcccgaccctcaaccaatcggagaaccccccgcaggcccctctggtctgggatctggtacaatggctgcaggcggtggcgctccaatggcagacaataacgaaggcgccgacggagtgggtagttcctcaggaaattggcattgcgattccacatggctgggcgacagagtcatcaccaccagcacccgaacctgggccctccccacctacaacaaccacctctacaagcaaatctccaacgggacatcgggaggaagcaccaacgacaacacctacttcggctacagcaccccctgggggtattttgactttaacagattccactgccacttctcaccacgtgactggcagcgactcatcaacaacaactggggattccggcccaagagactcaacttcaagctcttcaacatccaggtcaaggaggtcacgcagaatgaaggcaccaagaccatcgccaataaccttaccagcacgattcaggtctttacggactcggaataccagctcccgtacgtcctcggctctgcgcaccagggctgcctgcctccgttcccggcggacgtcttcatgattcctcagtacgggtacctgactctgaacaacggcagtcaggccgtgggccgttcctccttctactgcctggagtactttccttctcaaatgctgagaacgggcaacaactttgagttcagctaccagtttgaggacgtgccttttcacagcagctacgcgcacagccaaagcctggaccggctgacgaaccccctcatcgaccagtacctgtactacctggcccggacccagagcactacggggtccacaagggggctgcagttccatcaggctgggcccaacaccatggccgagcaatcaaagaactggctgcccggaccctgttatcggcagcagagactgtcaaaaaacatagacagcaacaacaacagtaactttgcctggaccggggccactaaataccatctgaatggtagaaattcattaaccaacccgggcgtagccatggccaccaacaaggacgacgaggaccagttctttcccatcaacggagtgctggtttttggcaaaacgggggctgccaacaagacaacgctggaaaacgtgctaatgaccagcgaggaggagatcaaaaccaccaatcccgtggctacagaagaatacggtgtggtctccagcaacctgcaatcgtctacggccggaccccagacacagactgtcaacagccagggggctctgcccggcatggtctggcagaaccgggacgtgtacctgcagggtcccatctgggccaaaattcctcacacggacggcaactttcacccgtctcccctgatgggcggatttggactcaaacacccgcctcctcaaattctcatcaagtatacttccaactactacaaatctacaaatgtggactttgctgtcaatactgagggtacttattcagagcctcgccccattggcacccgttacctcacccgtaacctgtaattgcctgttaatcaataaaccggttaattcgtttcagttgaactttggtctctgcgaagggcgaattc

SEQ ID NO: 5007 - DNA, 3113 bp, Adeno-associated virus
  source 1..3113: mol_type = genomic DNA
gaattcgccctttctacggctgcgtcaactggaccaatgagaactttcccttcaacgattgcgtcgacaagatggtgatctggtgggaggagggcaagatgacggccaaggtcgtggagtccgccaaggccattctcggcggcagcaaggtgcgcgtggaccaaaagtgcaagtcgtccgcccagatcgatcccacccccgtgatcgtcacttccaacaccaacatgtgcgccgtgattgacgggaacagcaccaccttcgagcaccagcagccgttacaagaccggatgttcaaatttgaactcacccgccgtctggagcatgactttggcaaggtgacaaagcaggaagtcaaagagttcttccgctgggcgcaggatcacgtgaccgaggtggcgcatgagttctacgtcagaaagggtggagccaacaagagacccgcccccgatgacgcggataaaagcgagcccaagcgggcctgcccctcagtcgcggatccatcgacgtcagacgcggaaggagctccggtggactttgccgacaggtaccaaaacaaatgttctcgtcacgcgggcatgcttcagatgctgtttccctgcaagacatgcgagagaatgaatcagaatttcaacatttgcttcacgcacgggaccagagactgttcagaatgtttccccggcgtgtcagaatctcaaccggtcgtcagaaagaggacgtatcggaaactctgtgccattcatcatctgctggggcgggctcccgagattgcttgctcggcctgcgatctggtcaacgtggacctggatgactgtgtttctgagcaataaatgacttaaaccaggtatggctgccgatggttatcttccagattggctcgaggacaacctctctgagggcattcgcgagtggtgggacttgaaacctggagccccgaaacccaaagccaaccagcaaaagcaggacgacggccggggtctggtgcttcctggctacaagtacctcggacccttcaacggactcgacaagggggagcccgtcaacgcggcggacgcagcggccctcgagcacgacaaggcctacgaccagcagctcaaagcgggtgacaatccgtacctgcggtataaccacgccgacgccgagtttcaggagcgtcttcaagaagatacgtcttttgggggcaacctcgggcgagcagtcttccaggccaagaagcgggttctcgaacctctcggtctggttgaggaaggcgctaagacggctcctggaaagaagagacccatagaatcccccgactcctccacgggcatcggcaagaaaggccagcagcccgctaaaaagaagctcaactttgggcagactggcgactcagagtcagtgcccgaccctcaaccaatcggagaaccccccgcaggcccctctggtctgggatctggtacaatggctgcaggcggtggcgctccaatggcagacaataacgaaggcgccgacggagtgggtagttcctcaggaaattggcattgcgattccacatggctgggcgacagagtcatcaccaccagcacccgaacctgggccctccccacctacaacaaccacctctacaagcaaatctccaacgggacatcgggaggaagcaccaacgacaacacctacttcggctacagcaccccctgggggtattttgactttaacagattccactgccacttctcaccacgtgactggcagcgactcatcaacaacaactggggattccggcccaagagactcaacttcaagctcttcaacatccaggtcaaggaggtcacgcagaatgaaggcaccaagaccatcgccaataaccttaccagcacgattcaggtctttacggactcggaataccagctcccgtacgtcctcggctctgcgcaccagggctgcctgcctccgttcccggcggacgtcttcatgattcctcagtacgggtacctgactctgaacaacggcagtcaggccgtgggccgttcctccttctactgcctggagtactttccttctcaaatgctgagaacgggcaacaactttgagttcagctaccagtttgaggacgtgccttttcacagcagctatgcgcacagccaaagcctggaccggctgatgaaccccctcatcgaccagtacctgtactacctgtctcggactcagtccacgggaggtaccgcaggaactcagcagttgctattttctcaggccgggcctaataacatgtcggctcaggccaaaaactggctacccgggccctgctaccggcagcaacgcgtctccacgacagtgtcgcaaaataacaacagcaactttgcttggaccggtgccaccaagtatcatctgaatggcagagactctctggtaaatcccggtgtcgctatggcaacgcacaagggcgacgaagagcgattttttccatccagcggagtcttgatgtttgggaaacagggagctggaaaagacaacgtggactatagcagcgttatgctaaccagtgaggaagaaatcaaaaccaccaacccagtggccacagaacagtacggcgtggtggccgataacctgcaacagcaaaacgccgctcctattgtaggggccgtcaacagtcaaggagccttacctggcatggtctggcagaaccgggacgtgtacctgcagggtcctatctgggccaagattcctcacacggacggcaactttcatccttcgccgctgatgggaggctttggactgaaacacccgcctcctcagatcctgattaagaatacacctgttcccgcggatcctccaactaccttcagtcaagccaagctggcgtcgttcatcacgcagtacagcaccggacaggtcagcgtggaaattgaatgggagctgcagaaagagaacagcaagcgctggaacccagagattcagtatacttccaactactacaaatctacaaatgtggactttgctgtcaatactgagggtacttattcagagcctcgccccattggcacccgttacctcacccgtagcctgtaattgcctgttaatcaataaaccggttgattcgtttcagttgaactttggtctctgcgaagggcgaattc

SEQ ID NO: 5008 - DNA, 3128 bp, Adeno-associated virus
  source 1..3128: mol_type = genomic DNA
gaattcgccctttctacggctgcgtcaactggaccaatgagaactttcccttcaacgattgcgtcgacaagatggtgatctggtgggaggagggcaagatgacggccaaggtcgtggagtccgccaaggccattctcggcggcagcaaggtgcgcgtggaccaaaagtgcaagtcgtccgcccagatcgaccccacccccgtgatcgtcacctccaacaccaacatgtgcgccgtgattgacgggaacagcaccaccttcgagcaccagcagccgttgcaggaccggatgttcaaatttgaactcacccgccgtctggagcatgactttggcaaggtgacaaagcaggaagtcaaagagttcttccgctgggcgcaggatcacgtgaccgaggtggcgcatgagttctacgtcagaaagggtggagccaacaagagacccgcccccgatgacgcggataaaagcgagcccaagcgggcctgcccctcagtcgcggatccatcgacgtcagacgcggaaggagctccggtggactttgccgacaggtaccaaaacaaatgttctcgtcacgcgggcatgcttcagatgctgtttccctgcaagacatgcgagagaatgaatcagaatttcaacatttgcttcacgcgcgggaccagagactgttcagaatgtttcccgggcgtgtcagaatctcaaccggtcgtcagaaagaggacgtatcggaaactctgtgccattcatcatctgctggggcgggctcccgagattgcttgctcggcctgcgatctggtcaacgtggacctggatgactgtgtttctgagcaataaatgacttaaaccaggtatggctgccgatggttatcttccagattggctcgaggacaacctctctgagggcattcgcgagtggtgggacttgaaacctggagccccgaaacccaaagccaaccagcaaaagcaggacgacggccggggtctggtgcttcctggctacaagtacctcggacccttcaacggactcgacaagggggagcccgtcaacgcggcggacgcagcggccctcgagcacgacaaggcctacgaccagcagctcaaagcgggtgacaatccgtacctgcggtataaccacgccgacgccgagtttcaggagcgtctgcaagaagatacgtcttttgggggcaacctcgggcgagcagtcttccaggccaagaagcgggttctcgaacctctcggtctggttgaggaaggcgctaagacggctcctggaaagaagagaccggtagagccatcaccccagcgttctccagactcctctacgggcatcggcaagacaggccagcagcccgcgaaaaagagactcaactttgggcagactggcgactcagagtcagtgcccgaccctcaaccaatcggagaaccccccgcaggcccctctggtctgggatctggtacaatggctgcaggcggtggcgctccaatggcagacaataacgaaggcgccgacggagtgggtagttcctcaggaaattggcattgcgattccacatggctgggcgacagagtcatcaccaccagcacccgaacctgggccctccccacctacaacaaccacctctacaagcaaatctccaacgggacatcgggaggaagcaccaacgacaacacctacttcggctacagcaccccctgggggtattttgactttaacagattccactgccacttctcaccacgtgactggcagcgactcatcaacaacaactggggattccggcccaagagactcaacttcaagctcttcaacatccaggtcaaggaggtcacgcagaatgaaggcaccaagaccatcgccaataaccttaccagcacgattcaggtctttacggactcggaataccagctcccgtacgtcctcggctctgcgcaccagggctgcccgcctccgttcccggcggacgtcttcatgattcctcagtacgggtacctgactctgaacaacggcagtcaggccgtgggccgttcctccttctactgcctggagtactttccttctcaaatgcggagaacgggcaacaactttgagttcagctaccagtttgaggacgtgccttttcacagcagctacgcgcatagccaaagcctggaccggctgatgaaccccctcatcgaccagtacctgtactacctgtctcggactcagtccacgggaggtaccgcaggaactcagcagttgctattttctcaggccgggcctaataacatgtcggctcaggccaaaaactggctacccgggccctgctaccggcagcaacgcgtctccacgacactgtcgcaaaataacaacagcaactttgcttggaccggtgccaccaagtatcatctgaatggcagagactctctggtaaatcccggtgtcgctatggcaacgcacaaggacgacgaagagcgattttttccatccagcggagtcttgatgtttgggaaacagggagctggaaaagacaacgtggactatagcagcgttatgctaaccagtgaggaagaaatcaaaaccaccaacccagtggccacagaacagtacggcgtggtggccgataacctgcaacagcaaaacgccgctcctattgtaggggccgtcaacagtcaaggagccttacctggcatggtctggcagaaccgggacgtgtacctgcagggtcctatctgggccaagattcctcacacggacggcaactttcatccttcgccgctgatgggaggctttggactgaaacacccgcctcctcagatcctgattaagaatacacctgttcccgcggatcctccaactaccttcagtcaagccaagctggcgtcgttcatcacgcagtacagcaccggacaggtcagcgtggaaattgaatgggagctgcagaaagagaacagcaagcgctggaacccagagattcagtatacttccaactactacaaatctacaaatgtggactttgctgtcaatactgagggtacttattcagagcctcgccccattggcacccgttacctcacccgtaacctgtaattgcctgttaatcaataaaccggttaattcgtttcagttgaactttggtctctgcgaagggcgaattc

SEQ ID NO: 5009 - protein, 738 aa, Adeno-associated virus; identical to SEQ ID NO: 5002

SEQ ID NO: 5010 - DNA, 1933 bp, Adeno-associated virus
  variation 1302: note = a, c, t or g
  source 1..1933: mol_type = genomic DNA
caaggcctacgaccagcagctcaaagcgggtgacaatccgtacctgcggtataaccacgccgacgccgagtttcaggagcgtcttcaagaagatacgtcttttgggggcaacctcgggcgagcagtcttccaggccaaaaagcgggttctcgaacctcttggtctggttgagacgccagctaagacggcacctggaaagaagcgaccggtagactcgccagactccacctcgggcatcggcaagaaaggccagcagcccgcgaaaaagagactcaactttgggcagactggcgactcagagtcagtccccgaccctcaaccaatcggagaaccaccagcaggcccctctggtctgggatctggtacaatggctgcaggcggtggcgcaccaatggctgacaataacgagggcgccgacggagtgggtaatgcctcaggaaattggcattgcgattccacatggctgggcgacagagtcatcaccaccagcacccgaacctgggccctgcccacctacaacaaccacctctacaagcaaatctccagtcagtcagcagggagcaccaacgataacgtctatttcggctacagcaccccctgggggtattttgacttcaacagattccattgccacttctcaccacgtgactggcagcgacttatcaacaacaactggggattccggcccaagaagctcaacttcaagctcttcaacatccaggtcaaggaggtcacgacgaatgacggtgtcacaaccatcgctaataaccttaccagcacggttcaggtcttttcggactcggaatatcaactgccgtacgtcctcggctccgcgcaccagggctgcctgcctccgttcccggcagacgtgttcatgattccgcagtacggatacctgactctgaacaatggcagccaatcggtaggccgttcctccttctactgcctggagtactttccttctcagatgctgagaacgggcaacaacttcacctttagctacaccttcgaggacgtgcctttccacagcagctacgcgcacagccagagtctggaccggctgatgaatcccctcatcgaccagtacctgtactacttggccagaacacagagcaacgcaggaggtactgctggcaatcgggaactgcagttttatcagggcggacctaccaccatggccgaacaagcaaagaactggctgcccggaccttgcttccggcaacagagagtatccaagacgctggatcaaaataacaacagcaactttgcctggactggtgccacaaaataccatttaaatgnaagaaattcattggttaatcccggtgtcgccatggcaacccacaaggacgacgaggaacgcttcttcccttcgagcggagttctaatttttggcaaaactggagcagctaataaaactacattagaaaacgtgctcatgacaaatgaagaagaaattcgtcctaccaacccggtagctaccgaggaatacgggattgtaagcagcaacttgcaggcggctagcaccgcagcccagacacaagttgttaacaaccagggagccttacctggcatggtctggcagaaccgggacgtgtacctgcaaggtcccatttgggccaagattcctcacacggacggcaactttcacccgtctcctctaatgggtggctttggactgaaacacccgcctccccagatcctgatcaaaaacacaccggtacctgctaatcctccagaagtgtttactcctgccaagtttgcttccttcatcacgcagtacagcaccgggcaagtcagcgttgagatcgagtgggagctgcagaaagagaacagcaagcgctggaacccagagattcagtacacctccaactttgacaaacagactggagtggactttgctgttgacagccagggtgtttactctgagcct

SEQ ID NO: 5011 - DNA, 3105 bp, Adeno-associated virus
  source 1..3105: mol_type = genomic DNA
gaattcgcccttgctgcgtcaactggaccaatgagaactttcccttcaacgattgcgtcgacaagatggtgatctggtgggaggagggcaagatgaccgccaaggtcgtggagtccgccaaggccattctgggcggaagcaaggtgcgcgtggaccaaaagtgcaagtcatcggcccagatcgaccccacgcccgtgatcgtcacctccaacaccaacatgtgcgccgtgatcgacgggaacagcaccaccttcgagcaccagcagccgctgcaggaccgcatgttcaagttcgagctcacccgccgtctggagcacgactttggcaaggtgaccaagcaggaagtcaaagagttcttccgctgggctcaggatcacgtgactgaggtggcgcatgagttctacgtcagaaagggcggagccaccaaaagacccgcccccagtgacgcggatataagcgagcccaagcgggcctgcccctcagttgcggagccatcgacgtcagacgcggaagcaccggtggactttgcggacaggtaccaaaacaaatgttctcgtcacgcgggcatgcttcagatgctgtttccctgcaagacatgcgagagaatgaatcagaatttcaacgtctgcttcacgcacggggtcagagactgctcagagtgcttccccggcgcgtcagaatctcaacccgtcgtcagaaaaaagacgtatcagaaactgtgcgcgattcatcatctgctggggcgggcacccgagattgcgtgttcggcccgcgatctcgtcaacgtggacttggatgactgtgtttctgagcaataaatgacttaaaccaggtatggctgctgacggttatcttccagattggctcgaggacaacctctctgagggcattcgcgagtggtgggacctgaaacctggagcccccaagcccaaggccaaccagcagaagcaggacgacggccggggtctggtgcttcctggctacaagtacctcggacccttcaacggactcgacaagggggagcccgtcaacgcggcggacgcagcggccctcgagcacgacaaggcctacgaccagcagctcaaagcgggtgacaatccgtacctgcggtataaccacgccgacgccgagtttcaggagcgtctgcaagaagatacgtcttttgggggcaacctcgggcgagcagtcttccaggccaagaagagggtactcgaacctctgggcctggttgaagaaggtgctaagacggctcctggaaagaagagaccgttagagtcaccacaagagcccgactcctcctcaggaatcggcaaaaaaggcaaacaaccagccaaaaagagactcaactttgaagaggacactggagccggagacggaccccctgaaggatcagataccagcgccatgtcttcagacattgaaatgcgtgcagcaccgggcggaaatgctgtcgatgcgggacaaggttccgatggagtgggtaatgcctcgggtgattggcattgcgattccacctggtctgagggcaaggtcacaacaacctcgaccagaacctgggtcttgcccacctacaacaaccacttgtacctgcggctcggaacaacatcaaacagcaacacctacaacggattctccaccccctggggatactttgactttaacagattccactgtcacttctcaccacgtgactggcaaagactcatcaacaacaactggggactacgaccaaaagccatgcgcgttaaaatcttcaatatccaagttaaggaggtcacaacgtcgaacggcgagactacggtcgctaataaccttaccagcacggttcagatatttgcggactcgtcgtatgagctcccgtacgtgatggacgctggacaagagggaagtctgtctcctttccccaatgacgtcttcatggtgcctcaatatggctactgtggcattgtgactggcgaaaatcagaaccagacggacagaaatgctttctactgcctggagtattttccttcacaaatgctgagaactggcaataactttgaaatggcttacaactttgggaaggtgccgttccactcaatgtatgcttacagccagagcccggacagactgatgaatcccctcctggaccagtacctgtggcacttacagtcgaccacctctggagagactctgaatcaaggcaatgcagcaaccacatttggaaaaatcaggagtggagactttgccttttacagaaagaactggctgcctgggccttgtgttaaacagcagagactctcaaaaactgccagtcaaaattacaagattcctgccagcgggggcaacgctctgttaaagtatgacacccactataccttaaacaaccgctggagcaacatagcgcctggacctccaatggcaacagctggaccttcagatggggacttcagcaacgcccagctcatcttccctggaccatcagtcaccggaaacacaacaacctcagcaaacaatctgttgtttacatcagaagaagaaattgctgccaccaacccaagagacacggacatgtttggtcagattgctgacaataatcagaatgctacaactgctcccataaccggcaacgtgactgctatgggagtgcttcctggcatggtgtggcaaaacagagacatttactaccaagggccaatttgggccaagatcccacacgcggacggacattttcatccttcaccgctaattggcggttttggactgaaacatccgcctccccagatatttatcaaaaacacccccgtacctgccaatcctgcgacaaccttcactgcagccagagtggactctttcatcacacaatacagcaccggccaggtcgctgttcagattgaatgggaaatcgaaaaggaacgctccaaacgctggaatcctgaagtgcagtttacttcaaactatgggaaccagtcttctatgttgtgggctcccgatacaactgggaagtatacagagccgcgggttattggctctcgttatttgactaatcatttgtaactgcctagttaatcaataaaccgtgtgattcgtttcagttgaactttggtctctgcgaagggcgaattc

SEQ ID NO: 5012 - protein, 733 aa, Adeno-associated virus
MAADGYLPDWLEDNLSEGIREWWDLKPGAPKPKANQQKQDDGRGLVLPGYKYLGPFNGLDKGEPVNAADAAALEHDKAYDQQLKAGDNPYLRYNHADAEFQERLQEDTSFGGNLGRAVFQAKKRVLEPLGLVEEGAKTAPGKKRPLESPQEPDSSSGIGKKGKQPAKKRLNFEEDTGAGDGPPEGSDTSAMSSDIEMRAAPGGNAVDAGQGSDGVGNASGDWHCDSTWSEGKVTTTSTRTWVLPTYNNHLYLRLGTTSNSNTYNGFSTPWGYFDFNRFHCHFSPRDWQRLINNNWGLRPKAMRVKIFNIQVKEVTTSNGETTVANNLTSTVQIFADSSYELPYVMDAGQEGSLPPFPNDVFMVPQYGYCGIVTGENQNQTDRNAFYCLEYFPSQMLRTGNNFEMAYNFEKVPFHSMYAHSQSLDRLMNPLLDQYLWHLQSTTSGETLNQGNAATTFGKIRSGDFAFYRKNWLPGPCVKQQRFSKTASQNYKIPASGGNALLKYDTHYTLNNRWSNIAPGPPMATAGPSDGDFSNAQLIFPGPSVTGNTTTSANNLLFTSEEEIAATNPRDTDMFGQIADNNQNATTAPITGNVTAMGVLPGMVWQNRDIYYQGPIWAKIPHADGHFHPSPLIGGFGLKHPPPQIFIKNTPVPANPATTFTAARVDSFITQYSTGQVAVQIEWEIEKERSKRWNPEVQFTSNYGNQSSMLWAPDTTGKYTEPRVIGSRYLTNHL

SEQ ID NO: 5013 - DNA, 3105 bp, Adeno-associated virus
  source 1..3105: mol_type = genomic DNA
gaattcgcccttgctgcgtcaactggaccaatgagaactttcccttcaacgattgcgtcgacaagatggtgatctggtgggaggagggcaagatgaccgccaaggtcgtggagtccgccaaggccattctgggcggaagcaaggtgcgcgtggaccaaaagtgcaagtcatcggcccagatcgaccccacgcccgtgatcgtcacctccaacaccaacatgtgcgccgtgatcgacgggaacagcaccaccttcgagcaccagcagccgctgcaggaccgcatgttcaagttcgagctcacccgccgtctggagcacgactttggcaaggtgaccaagcaggaagtcaaagagttcttccgctgggctcaggatcacgtgactgaggtggcgcatgagttctacgtcagaaagggcggagccaccaaaagacccgcccccagtgacgcggatataagcgagcccaagcgggcctgcccctcagttgcggagccatcgacgtcagacgcggaagcaccggtggactttgcggacaggtaccaaaacaaatgttctcgtcacgcgggcatgcttcagatgctgtttccctgcaagacatgcgagagaatgaatcagaatttcaacgtctgcttcacgcacggggtcagagactgctcagagtgcttccccggcgcgtcagaatctcaacccgtcgtcagaaaaaagacgtatcagaaactgtgcgcgattcatcatctgctggggcgggcacccgagattgcgtgttcggcctgcgatctcgtcaacgtggacttggatgactgtgtttctgagcaataaatgacttaaaccaggtatggctgctgacggttatcttccagattggctcgaggacaacctctctgagggcattcgcgagtggtgggacctgaaacctggagcccccaagctcaaggccaaccagcagaagcaggacgacggccggggtctggtgcttcctggctacaagtacctcggacccttccacggactcgacaagggggagcccgtcaacgcggcggacgcagcggccctcgagcacgacaaggcctacgaccagcagctcaaagcgggtgacaatccgtacctgcggtataaccacgccgacgccgagtttcaggagcgtctgcaagaagatacgtcttttgggggcaacctcgggcgagcagtcttccaggccaagaagagggtactcgaaccactgggcctggttgaagaaggtgctaagacggctcctggaaagaagagaccgttagagtcaccacaagagcccgactcctcctcaggaatcggcaaaaaaggcaaacaaccagccaaaaagagactcaactttgaagaggacactggagccggagacggaccccctgaaggatcagataccagcgccatgtcttcagacattgaaatgcgtgcagcaccgggcggaaatgctgtcgatgcgggacaaggttccgatggagtgggtaatgcctcgggtgattggcattgcgattccacctggtctgagggcaaggtcacaacaacctcgaccagaacctgggtcttgcccacctacaacaaccacttgtacctgcggctcggaacaacatcaaacagcaacacctacaacggattctccaccccctggggatactttgactttaacagattccactgtcacttctcaccacgtgactggcaaagactcatcaacaacaactggggactacgaccaaaagccatgcgcgttaaaatcttcaatatccaagttaaggaggtcacaacgtcgaacggcgagactacggtcgctaataaccttaccagcacggttcagatatttgcggactcgtcgtatgagctcccgtacgtgatggacgctggacaagagggaagtctgcctcctttccccaatgacgtcttcatggtgcctcaatatggctactgtggcattgtgactggcgaaaatcagaaccagacggacagaaatgctttctactgcctggagtattttccttcacaaatgctgagaactggcaataactttgaaatggcttacaactttgagaaggtgccgttccactcaatgtatgctcacagccagagcctggacagactgatgaatcccctcctggaccagtacctgtggcacttacagtcgaccacctctggagagactctgaatcaaggcaatgcagcaaccacatttggaaaaatcaggagtggagactttgccttttacagaaagaactggctgcctgggccttgtgttaaacagcagagattctcaaaaactgccagtcaaaattacaagattcctgccagcgggggcaacgctctgttaaagtatgacacccactataccttaaacaaccgctggagcaacatagcgcctggacctccaatggcaacagctggaccttcagatggggacttcagcaacgcccagctcatcttccctggaccatcagtcaccggaaacacaacaacctcagcaaacaatctgttgtttacatcagaaggagaaattgctgccaccaacccaagagacacggacatgtttggtcagattgctgacaataatcagaatgctacaactgctcccataaccggcaacgtgactgctatgggagtgcttcctggcatggtgtggcaaaacagagacatttactaccaagggccaatttgggccaagatcccacacgcggacggacattttcatccttcaccgctaattggcggttttggactgaaacatccgcctccccagatatttatcaaaaacacccccgtacctgccaatcctgcgacaaccttcactgcagccagagtggactctttcatcacacaatacagcaccggccaggtcgctgttcagattgaatgggaaatcgaaaaggaacgctccaaacgccggaatcctgaagtgcagtttacttcaaactatgggaaccagtcttctatgttgtgggctcccgatacaactgggaagtatacagagccgcgggttattggctctcgttatttgactaatcatttgtaactgcctagttaatcaataaaccgtgtgattcgtttcagttgaactttggtctctgcgaagggcgaattc

SEQ ID NO: 5014 - DNA, 3105 bp, Adeno-associated virus
  source 1..3105: mol_type = genomic DNA
gaattcgcccttcgcagagaccaaagttcaactgaaacgaatcacacggtttattgattaactaggcagttacaaatgattagtcaaataacgagagccaataacccgcggctctgtatacttcccagttgtatcgggagcccacaacatagaagactggttcccacagtttgaagtaaactgcacttcaggattccagcgtttggagcgttccttttcgatttcccattcaatctgaacagcgacctggccggtgctgtattgtgtgatgaaagagtccactctggctgcagtgaaggttgtcgcaggataggcaggtacgggggtgtttttgataaatatctggggaggcggatgtttcagtccaaaaccgccaattagcggtgaaggatgaaaatgtccgtccgcgtgtgggatcttggcccaaattggcccttggtagtaaatgtctctgttttgccacaccatgccaggaagcactcccatagcagtcacgttgccggttatgggagcagttgtagcattctgattattgtcagcaatctgaccaaacatgtccgtgtctcttgggttggtggcagcaatttcttcttctgatgtaaacaacagattgtttgctgaggttgttgtgtttccggtgactgatggtccagggaagatgagctgggcgttgctgaagtccccatctgaaggtccagctgttgccattggaggtccaggcgctatgttgctccagcggttgtttaaggtatagtgggtgtcatactttaacagagcgttgcccccgctggcaggaatcttgtaattttgactggcagtttttgagaatctctgctgtttaacacaaggcccaggcagccagttctttctgtaaaaggcaaagtctccactcctgatttttccaaatgtggttgctgcattgccttgattcagagtctctccagaggtggtcgactgtaagtgccacaggtactggtccaggaggggattcatcagtccgtccaggctctggctgtgagcatacattgagtggaacggcaccttctcaaagttgtaagccgtttcaaagttattgccagttctcagcatttgtgaaggaaaatactccaggcagtagaaagcatttctgtccgtctggttctgattttcgccagtcacaatgccacagtagccatattgaggcaccatgaagacgtcattggggaaaggaggcagacttccctcttgtccagcgtccatcacgtacgggagctcatacgacgagtccgcaaatatctgaaccgtgctggtaaggttattagcgaccgtagtctcgccgttcgacgttgtgacctccttaacttggatattgaagattttaacgcgcatggcttttggtcgtagtccccagttgttgttgatgagtctttgccagtcacgtggtgagaagtgacagtggaatctgttaaagtcaaagtatccccagggggtggagaatccgttgtaggtgttgctgtttgatgttgttccgagccgcaggtacaagtggttgttgtaggtgggcaagacccaggttctggtcgaggttgttgtgaccttgccctcagaccaggtggaatcgcaatgccaatcacccgaggcattacccactccatcggaaccttgtcccgcatcgacagcatttccgcccggtgctgcacgcatttcaatgtctgaagacatggcgctggtatctgatccttcagggggtccgtctccggctccagtgtcctcttcaaagttgagtctctttttggctggttgtttgccttttttgccgattcctgaggaggagtcgggctcttgtggtgactctaacggtctcttctttccaggagccgtcttagcaccttcttcaaccaggcccagaggttcgagtaccctcttcttggcctggaagactgctcgcccgaggttgcccccaaaagacgtatcttcttgcagacgctcctgaaactcggcgtcggcgtggttataccgcaggtacggattgtcacccgctttgagctgctggtcgtaggccttgtcgtgctcgagggccgctgcgtccgccgcgttgacgggctcccccttgtcgagtccgttgaagggtccgaggtactcgtagccaggaagcaccagaccccggccgtcgtcctgcttctgctggttggccttgggcttgggggctccaggtttcaggtcccaccactcgcgaatgccctcagagaggttgtcctcgagccaatctggaagataaccgtcagcagccatacctggtttaagtcatttattgctcagaaacacagtcatccaagtccacgttgacgagatcgcaggccgaacacgcaatctcgggtgcccgccccagcagatgatgaatcgcgcacagtttctgatacgtcttttttctgacgacgggttgagattctgacgcgccggggaagcactctgagcagtctctgaccccgtgcgtgaagcagacgttgaaattctgattcattctctcgcatgtcttgcagggaaacagcatctgaagcatgcccgcgtgacgagaacatttgttttggtacctgtccgcaaggtccaccggtgcttccgcgtctgacgtcgatggctccgcaactgaggggcaggcccgcttgggctcgcttatatccgcgtcactgggggcgggtcttttggtggctccgccctttctgacgtagaactcatgcgccacctcagtcacgtgatcctgagcccagcggaagaactctttgacttcctgcttggtcaccttgccaaagtcgtgctccagacggcgggtgagctcgaacttgaacatgcggtcctgcagcggctgctggtgctcgaaggtggtgctgttcccgtcgatcacggcgcacatgttggtgttggaggtgacgatcacgggcgtggggtcgatctgggccgatgacttgcacttttggtccacgcgcaccttgcttccgcccagaatggccttggcggactccacgaccttggcggtcatcttgccctcctcccaccagatcaccatcttgtcgacgcaatcgttgaagggaaagttctcattggtccagttgacgcagcaagggcgaattc

SEQ ID NO: 5015 - DNA, 3094 bp, Adeno-associated virus
  source 1..3094: mol_type = genomic DNA
gaattcgcccttgctgcgtcaactggaccaagagaactttcccttcaacgattgcgtcgacaagatggtgatctggtgggaggagggcaagatgacggccaaggtcgtggagtccgccaaagccattctgggcggaagcaaggtgcgcgtcgaccaaaagtgcaagtcctcggcccagatcgatcccacccccgtgatcgtcacctccaacaccaacatgtgcgccgtgatcgacgggaacagcaccaccttcgagcaccagcagccgttgcaggaccggatgttcaaatttgaactcacccgccgtctggaacacgactttggcaaggtgaccaagcaggaagtcaaagagttcttccgctgggctagtgatcacgtgactgaggtgacgcatgagttctacgtcagaaagggcggagccagcaaaagacccgcccccgatgacgcggatataagcgagcccaagcgggcctgtccctcagtcacggacccatcgacgtcagacgcggaaggagctccggtggactttgccgacaggtaccaaaacaaatgttctcgtcacgcgggcatgcttcagatgctgtttccctgcaaaacgtgcgagagaatgaatcagaatttcaacatttgcttcacgcacggggtcagagactgtttagaatgtttccccggcgtgtcagaatctcaaccggtcgtcagaaaaaagacgtatcggaagctgtgtgcgattcatcatctgctggggcgggcacccgagattgcttgctcggcctgcgacctggtcaacgtggacctggacgactgtgtttctgagcaataaatgacttaaaccgggtatggctgccgatggttatcttccagattggctcgaggacaacctctctgagggcattcgcgagtggtgggacctgaaacctggagccccgaaacccaaagccaaccagcaaaagcaggacgacggccggggtctggtgcttcctggctacaagtacctcggacccttcaacggactcgacaagggggagcccgtcaacgcggcggacgcagcggccctcgagcacgacaaggcctacgaccagcagctcaaagcgggtgacaatccgtacctgcggtataaccacgccgacgccgagtttcaggagcgtctgcaagaagatacgtcatttgggggcaacctcgggcgagcagtcttccaggccaagaagcgggttctcgaacctctcggtctggttgaggaaggcgctaagacggctcctggaaagaagagacccatagactctccagactcctccacgggcatcggcaaaaaaggccagcagcccgctaaaaagaagctcaattttggtcagactggcgactcagagtcagtccccgaccctcaacctcttggagaacctccagcagcgccctctagtgtgggatctggtacaatggctgcaggcggtggcgcaccaatggcagacaataacgaaggtgccgacggagtgggtaatgcctcaggaaattggcattgcgattccacatggctgggcgacagagtcatcaccaccagcaccagaacctgggccctccccacctacaacaaccacctctacaagcaaatctccagcagcagctcaggagccaccaatgacaaccactacttcggctacagcaccccctgggggtattttgactttaacagattccactgccacttctcaccacgtgactggcagcgactcatcaacaacaactggggattccggcccaagaagctgcggttcaagctcttcaacatccaggtcaaggaggtcacaacgaatgacggcgtcacgaccatcgctaataaccttaccagcacggttcaggtcttctcggactcggaataccagctgccgtacgtcctcggctctgcgcaccagggctgcctgcctccgttcccggcggacgtcttcatgattcctcagtacggctacctgactctgaacaacggcagccaatcggtgggccgttcctccttctactgcctggaatatttcccctctcaaatgctgagaacgggcaacaactttgagttcagttacagcttcgaggacgtgcctttccacagcagctacgcgcacagccagagcctagaccggctgatgaaccctctcatcgaccagtacctgtactacctggcccggacccagagcaccacgggttccaccagggaactgcaatttcatcaagctgggcccaatactatggccgagcagtcaaagaactggctgcctggaccctgctataggcaacagggactgtcaaagaacttggactttaacaacaacagcaattttgcctggactgctgccactaaatatcatctgaatggcagaaactctttgaccaatcctggcattcccatggcaaccaacaaggatgatgaggaccagttctttcccatcaacggggtactggtttttggcaagacgggagctgccaacaaaactacgctggaaaacgttctgatgaccagcgaggaggagatcaagaccactaaccctgtggctacagaagaatacggtgtggtctccagcaacctgcagccgtctacagccgggcctcaatcacagactatcaacagccagggagcactgcctggcatggtctggcagaaccgggacgtgtatctgcagggtcccatctgggccaaaattcctcacacggatggcaactttcacccgtctcctctgatgggcggttttggactcaaacacccgcctccacagatcctgatcaaaaacacacctgtacctgctaatcctccggaggtgtttactcctgccaagtttgcctccttcatcacgcagtacagcaccggacaagtcagcgtggaaatcgagtgggagctgcagaaagaaaacagcaagcgctggaacccagaaattcagtatacttccaattatgccaagtctaataatgttgaatttgctgtgaaccctgatggtgtttatactgagcctcgccccattggcactcgttacctcccccgtaatctgtaattgcttgttaatcaataaaccggttgattcgtttcagttgaactttggtctctgcgaagggcgaattc

SEQ ID NO: 5016 - DNA, 3095 bp, Adeno-associated virus
  source 1..3095: mol_type = genomic DNA
gaattcgcccttcgcagagaccaaagttcaactgaaacgaatcaaccggtttattgattaacaagcaattacagattacgggtgaggtaacgagtgccaatggggcgaggctcagtataaacaccatcagggttcacagcaaattcaacattattagacttggcataattggaagtatactgaatttctgggttccagcgcttgctgttttctttctgcagctcccactcgatttccacgctgacttgtccggtgctgtactgcgtgatgaaggaggcaaacttggcaggagtaaacacctccggaggattagcaggtacaggtgtgtttttgatcaggatctgtggaggcgggtgtttgagtccaaaaccgcccatcagaggagacgggtgaaagttgccatccgtgtgaggaattttggcccagatgggaccctgcagatacacgtcccggttctgccagaccatgccaggcagtgctccctggctgttgatagtctgtgattgaggcccggctgtagacgactgcaggttgctggagaccacaccgtattcttctgtagccacagggttagtggtcttgatctcctcctcgctggtcatcagaacgttttccagcgtagttttgttggcagctcccgtcttgccaaaaaccagtaccccgttgatgggaaagaactggtcctcatcatccttgttggttgccatgggaatgccaggattggtcaaagagtttctgccattcagatgatatttagtggcagcagtccaggcaaaattgctgttgttgttaaagtccaagttctttgacagtctctgttgcctatagcagggtccaggcagccagttctttgactgctcggccatagtattgggcccagcttgatgaaattgcagttccctggtggaacccgtggtgctctgggtccgggccaggtagtacaggtactggtcgatgagagggttcatcagccggtctaggctctggctgtgcgcgtagctgctgtggaaaggcacgtcctcgaagctgtaactgaactcaaagttgttgcccgttctcagcatttgagaggggaaatattccaggcagtagaaggaggaacggcccaccgattggctgccgttgtccagagtcaggtagccgtactgaggaatcatgaagacgtccgccgggaacggaggcaggcagccctggtgcgcagagccgaggacgtacggcagctggtattccgagtccgagaagacctgaaccgtgctggtaaggttattagcgatggtcgtgacgccgtcattcgttgtgacctccttgacctggatgttgaggagcttgaaccgcagcttcttgggccggaatccccagttgttgttgatgagtcgctgccagtcacgtggtgagaagtggcagtggaatctgttaaagtcaaaatacccccagggggtgctgtagccgaagtagtggttgtcattggtggctcctgagctgctgctggagatttgcttgtagaggtggttgttgtaggtggggagggcccaggttctggtgctggtggtgatgactctgtcgcccagccatgtggaatcgcaatgccaatttcctgaggcattacccactccgtcggcaccttcgttattgtctgccattggtgcgccaccgcctgcagccattgtaccagatcccacactagagggcgctgctggaggttctccaagaggttgagggtcggggactgactctgagtcgccagtctgaccaaaattgagcttctttttagcgggctgctggccttttttgccgatgcccgtggaggagtctggagagcctatgggtctcttctttccaggagccgtcttagcgccttcctcaaccagaccgagaggttcgagaacccgcttcttggcctggaagactgctcgcccgaggttgcccccaaatgacgtatcttcttgcagacgctcctgaaactcggcgtcggcgtggttataccgcaggtacggattgtcacccgctttgagctgctggtcgtaggccttgtcgtgctcgagggccgctgcgtccgccgcgttgacgggctcccccttgtcgagtccgttgaagggtccgaggtacttgtagccaggaagcaccagaccccggccgtcgtcctgcttttgctggttggctttgggtttcggggctccaggtttcaggtcccaccactcgcgaatgccctcagagaggttgtcctcgagccaatctggaagataaccatcggcagccatacctggtttaagtcatttattgctcagaaacacagtcgtccaggtccacgttgaccaggtcgcaggccgagcaagcaatctcgggtgcccgccccagcagatgatgaatcgcacacagcttccgatacgtcttttttctgacgaccggttgagattctgacacgccggggaaacattctaaacagtctctgaccccgtgcgtgaagcaaatgttgaaattctgattcattctctcgcacgttttgcagggaaacagcacctgaagcatgcccgcgtgacgagaacatttgttttggtacctgtcggcaaagtccaccggagctccttccgcgtctgacgtcgatgggtccgtgactgagggacgggcccgcttgggctcgcttatatccgcgtcatcgggggcgggtcttttgctggctccgccctttctgacgtagaactcatgcgtcacctcagtcacgtgatcactagcccagcggaagaactctttgacttcctgctttgtcaccttgccaaagtcgtgttccagacggcgggtgagttcaaatttgaacatccggtcctgcaacggttgctggtgctcgaaggtggtgctgttcccgtcgatcacggcgcacatgttggtgttggaggtgacgatcacgggggtgggatcgatctgggcggacgacttgcacttttggtccacgcgcaccttgctgccgccgagaatggccttggcggactccacgaccttggccgtcatcttgccctcctcccaccagatcaccatcttgtcgacgcaatcgttgaagggaaagttctcattggtccagttgacgcagcaagggcgaattc

SEQ ID NO: 5017 - DNA, 3095 bp, Adeno-associated virus
  source 1..3095: mol_type = genomic DNA
gaattcgcccttcgcagagaccaaagttcaactgaaacgaatcaaccggtttattgattaacaagcaattacagattacgggtgaggtaacgagtgccaatggggcgaggctcagtataaacaccatcagggttcacagcaaattcaacattattagacttggcataattggaagtatactgaatttctgggttccagcgcttgctgttttctttctgcagctcccactcgatttccacgctgacttgtccggtgctgtactgcgtgatgaaggaggcaaacttggcaggagtaaacacctccggaggattagcaggtacaggtgtgtttttgatcaggatctgtggaggcgggtgttcgagtccaaaaccgcccatcagaggagacgggtgaaagttgccatccgtgtgaggaattttggcccagatgggaccctgcagatacacgtcccggttctgccagaccatgccaggcagtgctccctggctgttgatagtctgtgattgaggcccggctgtagacgactgcaggttgctggagaccacaccgtattcttctgtagccacagggttagtggtcttgatctcctcctcgctggtcatcagaacgttttccagcgtagttttgttggcagctcccgtcttgccaaaaaccagtaccccgttgatgggaaagaactggtcctcatcatccttgttggttgccatgggaatgccaggattggtcaaagagtttctgccattcagatgatatttagtggcagcagtccaggcaaaattgctgttgttgttaaagtccaagttctttgacagtctctgttgcctatagcagggtccaggcagccagttctttgactgctcggccatagtattgggcccagcttgatgaaattgcagttccctggtggaacccgtggtgctctgggtccgggccaggtagtacaggtactggtcgatgagagggttcatcagccggtctaggctctggctgtgcgcgtagctgctgtggaaaggcacgtcctcgaagctgtaactgaactcaaagttgttgcccgttctcagcatttgagaggggaaatattccaggcagtagaaggaggaacggcccaccgattggctgccgttgttcagagtcaggtagccgtactgaggaatcatgaagacgtccgccgggaacggaggcaggcagccctggtgcgcagagccgaggacgtacggcagctggtattccgagtccgagaagacctgaaccgtgctggtaaggttattagcgatggtcgtgacgccgtcattcgttgtgacctccttgacctggatgttgaagagcttgaaccgcagcttcttgggccggaatccccagttgttgttgatgagtcgctgccagtcacgtggtgagaagtggcagtggaatctgttaaagtcaaaatacccccagggggtgctgtagccgaagtagtggttgtcattggtggctcctgagctgctgctggagatttgcttgtagaggtggttgttgtaggtggggagggcccaggttctggtgctggtggtgatgactctgtcgcccagccatgtggaatcgcaatgccaatttcctgaggcattacccactccgtcggcaccttcgttattgtctgccgttggtgcgccaccgcctgcagccattgtaccagatcccacactagagggcgctgctggaggttctccaagaggttgagggtcggggactgactctgagtcgccagtctgaccaaaattgagcttctttttagcgggctgctggccttttttgccgatgcccgtggaggagtctggagagtctatgggtctcttctttccaggagccgtcttagcgccttcctcaaccagaccgagaggttcgagaacccgcttcttggcctggaagactgctcgcccgaggttgcccccaaatgacgtatcttcttgcaggcgctcctgaaactcggcgtcggcgtggttataccgcaggtacggattgtcacccgctttgagctgctggtcgtaggccttgtcgtgctcgagggccgctgcgtccgccgcgttgacgggctcccccttgtcgagtccgttgaagggtccgaggtacttgtagccaggaagcaccagaccccggccgtcgtcctgcttttgctggttggctttgggtttcggggctccaggtttcaggtcccaccactcgcgaatgccctcagagaggttgtcctcgagccaatctggaagataaccatcggcagccatacctggtttaagccatttattgctcagaaacacagtcgtccaggtccacgttgaccaggtcgcaggccgagcaggcaatctcgggtgcccgccccagcagatgatgaatcgcacacagcttccgatacgtcttttttctgacgaccggttgagattctgacacgccggggaaacattctaaacagtctctgaccccgtgcgtgaagcaaatgttgaaattctgattcattctctcgcacgttttgcagggaaacagcatctgaagcatgcccgcgtggcgagaacatttgttttggtacctgtcggcaaagtccaccggagctccttccgcgtctgacgtcgatgggtccgtgactgagggacaggcccgcttgggctcgcttatatccgcgtcatcgggggcgggtcttttgctggctccgccctttctgacgtagaactcatgcgtcacctcagtcacgtgatcactagcccagcggaagaactctttgacttcctgctttgtcaccttgccaaagtcgtgttccagacggcgggtgagttcaaatttgaacatccggtcctgcaacggctgctggtgctcgaaggtggtgctgttcccgtcgatcacggcgcgcatgttggtgttggaggtgacgatcacgggggtgggatcgatctgggcggacgacttgcacttttggtccacgcgcaccttgctgccgccgagaatggccttggcggactccacgaccttggccgtcatcttgccctcctcccaccagatcaccatcttgtcgacgcaatcgttgaagggaaagttctcattggtccagttgacgcagcaagggcgaattc

SEQ ID NO: 5018 - protein, 729 aa, Adeno-associated virus; identical to SEQ ID NO: 4833

SEQ ID NO: 5019 - protein, 729 aa, Adeno-associated virus
MAADGYLPDWLEDNLSEGIREWWDLKPGAPKPKANQQKQDDGRGLVLPGYKYLGPFNGLDKGEPVNAADAAALEHDKAYDQQLKAGDNPYLRYNHADAEFQERLQEDTSFGGNLGRAVFQAKKRVLEPLGLVEEGAKTAPGKKRPIDSPDSSTGIGKKGQQPAKKKLNFGQTGDSESVPDPQPLGEPPAAPSSVGSGTMAAGGGAPTADNNEGADGVGNASGNWHCDSTWLGDRVITTSTRTWALPTYNNHLYKQISSSSSGATNDNHYFGYSTPWGYFDFNRFHCHFSPRDWQRLINNNWGFRPKKLRFKLFNIQVKEVTTNDGVTTIANNLTSTVQVFSDSEYQLPYVLGSAHQGCLPPFPADVFMIPQYGYLTLNNGSQSVGRSSFYCLEYFPSQMLRTGNNFEFSYSFEDVPFHSSYAHSQSLDRLMNPLIDQYLYYLARTQSTTGSTRELQFHQAGPNTMAEQSKNWLPGPCYRQQRLSKNLDFNNNSNFAWTAATKYHLNGRNSLTNPGIPMATNKDDEDQFFPINGVLVFGKTGAANKTTLENVLMTSEEEIKTTNPVATEEYGVVSSNLQSSTAGPQSQTINSQGALPGMVWQNRDVYLQGPIWAKIPHTDGNFHPSPLMGGFGLKHPPPQILIKNTPVPANPPEVFTPAKFASFITQYSTGQVSVEIEWELQKENSKRWNPEIQYTSNYAKSNNVEFAVNPDGVYTEPRPIGTRYLTRNL

SEQ ID NO: 5020 - protein, 729 aa, Adeno-associated virus
MAADGYLPDWLEDNLSEGIREWWDLKPGAPKPKANQQKQDDGRGLVLPGYKYLGPFNGLDKGEPVNAADAAALEHDKAYDQQLKAGDNPYLRYNHADAEFQERLQEDTSFGGNLGRAVFQAKKRVLEPLGLVEEGAKTAPGKKRPIDSPDSSTGIGKKGQQPAKKKLNFGQTGDSESVPDPQPLGEPPAAPSSVGSGTMAAGGGAPMADNNEGADGVGNASGNWHCDSTWLGDRVITTSTRTWALPTYNNHLYKQISSSSSGATNDNHYFGYSTPWGYFDFNRFHCHFSPRDWQRLINNNWGFRPKKLRFKLFNIQVKEVTTNDGVTTIANNLTSTVQVFSDSEYQLPYVLGSAHQGCLPPFPADVFMIPQYGYLTLNNGSQSVGRSSFYCLEYFPSQMLRTGNNFEFSYSFEDVPFHSSYAHSQSLDRLMNPLIDQYLYYLARTQSTTGSTRELQFHQAGPNTMAEQSKNWLPGPCYRQQRLSKNLDFNNNSNFAWTAATKYHLNGRNSLTNPGIPMATNKDDEDQFFPINGVLVFGKTGAANKTTLENVLMTSEEEIKTTNPVATEEYGVVSSNLQSSTAGPQSQTINSQGALPGMVWQNRDVYLQGPIWAKIPHTDGNFHPSPLMGGFGLKHPPPQILIKNTPVPANPPEVFTPAKFASFITQYSTGQVSVEIEWELQKENSKRWNPEIQYTSNYAKSNNVEFAVNPDGVYTEPRPIGTRYLTRNL

SEQ ID NO: 5021 - DNA, 2217 bp, Adeno-associated virus
  source 1..2217: mol_type = genomic DNA
atggctgctgacggttatcttccagattggctcgaggacaacctctctgagggcattcgcgagtggtgggacctgaaacctggagcccccaagcccaaggccaaccagcagaagcaggacgacggccggggtctggtgcttcctggctacaagtacctcggacccttcaacggactcgacaagggggagcccgtcaacgcggcggacgcagcggccctcgagcacgacaaggcctacgaccagcagctcaaagcgggtgacaatccgtacctgcggtataaccacgccgacgccgagtttcaggagcgtctacaagaagatacgtcttttgggggcaacctcgggcgagcagtcttccaggccaagaagcgggttctcgaacctctcggtctggttgaggaagctgctaagacggctcctggaaagaagagaccggtagaaccgtcacctcagcgttcccccgactcctccacgggcatcggcaagaaaggccagcggcccgctaaaaagagactgaactttggtcagactggcgactcagagtcagtccccgaccctcaaccaatcggagaaccaccagcaggcccctctggtctgggatctggtacaatggctgcaggcggtggcgctccaatggcagacaataacgaaggcgccgacggagtgggtagttcctcaggaaattggcattgcgattccacatggctgggcgacagagtcatcaccaccagcacccgaacctgggccctgcccacctacaacaaccacctctacaagcaaatatccaatgggacatcgggaggaagcaccaacgacaacacctacttcggctacagcaccccctgggggtattttgacttcaacagattccactgccacttctcaccacgtgactggcagcgactcatcaacaacaactggggattccggccaaaaagactcagcttcaagcccttcaacatccaggtcaaggaggtcacgcagaatgaaggcaccaagaccatcgccaataaccttaccagcacgattcaggtatttacggactcggaataccagctgccgtacgtcctcggctccgcgcaccagggctgcctgcctccgttcccggcggacgtcttcatgattccccagtacggctaccttacactgaacaatggaagtcaagccgtaggccgttcctccttctactgcctggaatattttccatctcaaatgctgcgaactggaaacaattttgaattcagctacaccttcgaggacgtgcctttccacagcagctacgcacacagccagagcttggaccgactgatgaatcctctcatcgaccagtacctgcactacttatccagaactcagtccacaggaggaactcaaggtacccagcaattgttattttctcaagctgggcctgcaaacatgtcggctcaggctaagaactggctacctggaccttgctaccggcagcagcgagtctctacgacactgtcgcaaaacaacaacagcaactttgcttggactggtgccaccaaatatcacctgaacggaagagactctttggtaaatcccggtgtcgccatggcaacccacaaggacgacgaggaacgcttcttcccgtcgagtggagtcctgatgtttggaaaacagggtgctggaagagacaatgtggactacagcagcgttatgctaaccagcgaagaagaaattaaaaccactaaccctgtagccacagaacaatacggtgtggtggctgacaacttgcagcaaaccaatacagggcctattgtgggaaatgtcaacagccaaggagccttacctggcatggtctggcagaaccgagacgtgtacctgcagggtcccatctgggccaagattcctcacacggacggcaacttccacccttcaccgctaatgggaggatttggactgaagcacccacctcctcagatcctgatcaagaacacgccggtacctgcggatcctccaacaacgttcagccaggcgaaattggcttccttcattacgcagtacagcaccggacaggtcagcgtggaaatcgagtgggagctgcagaaggagaacagcaaacgctggaacccagagattcagtacacttcaaactactacaaatctacaaatgtggactttgctgtcaatacagagggaacttattctgagcctcgccccattggtactcgctacctcacccgtaatctgtaa

SEQ ID NO: 5022 - protein, 738 aa, Adeno-associated virus
MAADGYLPDWLEDNLSEGIREWWDLKPGAPKPKANQQKQDDGRGLVLPGYKYLGPFNGLDKGEPVNAADAAALEHDKAYDQQLKAGDNPYLRYNHADAEFQERLQEDTSFGGNLGRAVFQAKKRVLEPLGLVEEAAKTAPGKKRPVEPSPQRSPDSSTGIGKKGQRPAKKRLNFGQTGDSESVPDPQPIGEPPAGPSGLGSGTMAAGGGAPMADNNEGADGVGSSSGNWHCDSTWLGDRVITTSTRTWALPTYNNHLYKQISNGTSGGSTNDNTYFGYSTPWGYFDFNRFHCHFSPRDWQRLINNNWGFRPKRLSFKPFNIQVKEVTQNEGTKTIANNLTSTIQVFTDSEYQLPYVLGSAHQGCLPPFPADVFMIPQYGYLTLNNGSQAVGRSSFYCLEYFPSQMLRTGNNFEFSYTFEDVPFHSSYAHSQSLDRLMNPLIDQYLHYLSRTQSTGGTQGTQQLLFSQAGPANMSAQAKNWLPGPCYRQQRVSTTLSQNNNSNFAWTGATKYHLNGRDSLVNPGVAMATHKDDEERFFPSSGVLMFGKQGAGRDNVDYSSVMLTSEEEIKTTNPVATEQYGVVADNLQQTNTGPIVGNVNSQGALPGMVWQNRDVYLQGPIWAKIPHTDGNFHPSPLMGGFGLKHPPPQILIKNTPVPADPPTTFSQAKLASFITQYSTGQVSVEIEWELQKENSKRWNPEIQYTSNYYKSTNVDFAVNTEGTYSEPRPIGTRYLTRNL

SEQ ID NO: 5023 - DNA, 2217 bp, Adeno-associated virus
  source 1..2217: mol_type = genomic DNA
atggctgctgacggttatcttccagattggctcgaggacaacctctctgagggcattcgcgagtggtgggacctgaaacctggagcccccaagcccaaggccaaccagcagaagcaggacgacggccggggtctggtgcttcctggctacaagtacctcggacccttcaacggactcgacaagggggagcccgtcaacgcggcggacgcagcggccctcgagcacgacaaggcctacgaccagcagctcaaagcgggtgacaatccgtacctgcggtataaccacgccgacgccgagtttcaggagcgtctgcaagaagatacgtcttttgggggcaacctcgggcgagcagtcttccaggccaagaagcgggttctcgaacctctcggtctggttgaggaagctgctaagacggctcctggaaagaagagaccggtagaaccgtcacctcagcgttcccccgactcctccacgggcatcggcaagaaaggccagcagcccgctaaaaagagactgaactttggtcagactggcgactcagagtcagtccccgaccctcaaccaatcggagaaccaccagcaggcccctctggtctgggatctggtacaatggctgcaggcggtggcgctccaatggcagacaataacgaaggcgccgacggagtgggtagttcctcaggaaattggcattgcgattccacatggctgggcgacagagtcatcaccaccagcacccgaacctgggccctgcccacctacaacaaccacctctacaagcaaatatccaatgggacatcgggaggaagcaccaacgacaacacctacttcggctacagcaccccctgggggtattttgacttcaacagattccactgccacttctcaccacgtgactggcagcgactcatcaacaacaactggggattccggccaaaaagactcagcttcaagctcttcaacatccaggtcaaggaggtcacgcagaatgaaggcaccaagaccatcgccaataaccttaccagcacgattcaggtatttacggactcggaataccagctgccgtacgtcctcggctccgcgcaccagggctgcctgcctccgttcccggcggacgtcttcatgattccccagtacggctaccttacactgaacaatggaagtcaagccgtaggccgttcctccttctactgcctggaatattttccatctcaaatgctgcgaactggaaacaattttgaattcagctacaccttcgaggacgtgcctttccacagcagctacgcacacagccagagcttggaccgactgatgaatcctctcatcgaccagtacctgtactacttatccagaactcagtccacaggaggaactcaaggtacccagcaattgttattttctcaagctgggcctgcaaacatgtcggctcaggctaagaactggctacctggaccttgctaccggcagcagcgagtctctacgacactgtcgcaaaacaacaacagcaactttgcttggactggtgccaccaaatatcacctgaacggaagagactctttggtaaatcccggtgtcgccatggcaacccacaaggacgacgaggaacgcttcttcccgtcgagtggagtcctgatgtttggaaaacagggtgctggaagagacaatgtggactacagcagcgttatgctaaccagcgaagaagaaattaaaaccactaaccctgtagccacagaacaatacggtgtggtggctgataacttgcagcaaaccaatacggggcctattgtgggaaatgtcaacagccaaggagccttacctggcatggtctggcagaaccgagacgtgtacctgcagggtcccatctgggccaagattcctcacacggacggcaacttccacccttcaccgctaatgggaggatttggactgaagcacccacctcctcagatcctgatcaagaacacgccggtacctgcggatcctccaacaacgttcagccaggcgaaattggcttccttcattacgcagtacagcaccggacaggtcagcgtggaaatcgagtgggagctgcagaaggagaacagcaaacgctggaacccagagattcagtacacttcaaactactacaaatctacaaatgtggactttgctgtcaatacagagggaacttattctgagcctcgccccattggtactcgttacctcacccgtaatctgtaa

SEQ ID NO: 5024 - protein, 738 aa, Adeno-associated virus; identical to SEQ ID NO: 4797

SEQ ID NO: 5025 - protein, 738 aa, Adeno-associated virus
MAADGYLPDWLEDNLSEGIREWWDLKPGAPKPKANQQKQDDGRGLVLPGYKYLGPFNGLDKGEPVNAADAAALEHDKAYDQQLKAGDNPYLRYNHADAEFQERLQEDTSFGGNLGRAVFQAKKRVLEPLGLVEEAAKTAPGKKRPVEPSPQRSPDSSTGIGKKGQQPAKKRLNFGQTGDSESVPDPQPIGEPPAGPSGLGSGTMAAGGGAPMADNNEGADGVGSSSGNWHCDSTWLGDRVITTSTRTWALPTYNNHLYKQISNGTSGGSTNDNTYFGYSTPWGYFDFNRFHCHFSPRDWQRLINNNWGFRPKRLSFKLFNIQVKEVTQDEGTKTIANNLTSTIQVFTDSEYQLPYVLGSAHQGCLPPFPADVFMIPQYGYLTLNNGSQAVGRSSFYCLEYFPSQMLRTGNNFEFSYTFEDVPFHSSYAHSQSLDRLMNPLIDQYLYYLSRTQSTGGTQGTQQLLFSQAGPANMSARAKNWLPGPCYRQQRVSTTLSQNNNSNFAWTGATKYHLNGRDSLVNPGVAMATHKDDEERFFPSSGVLMFGKQGAGRDNVDYSSVMLTSEEEIKTTNPVATEQYGVVADNLQQANTGPIVGNVNSQGALPGMVWQNRDVYLQGPIWAKIPHTDGNFHPSPLMGGFGLKHPPPQILIKNTPVPADPPTTFSQAKLASFITQYSTGQVSVEIEWELQKENSKRWNPEIQYTSNYYKSTNVDFAVNSEGTYSEPRPIGTRYLTRNL

SEQ ID NO: 5026 - DNA, 2217 bp, Adeno-associated virus
  source 1..2217: mol_type = genomic DNA
atggctgctgacggttatcttccagattggctcgaggacaacctctctgagggcattcgcgagtggtgggacctgaaacctggagcccccaagcccaaggccaaccagcagaagcaggacgacggccggggtctggtgcttcctggctacaagtacctcggacccttcaacggactcgacaagggggagcccgtcaacgcggcggacgcagcggccctcgagcacgacaaggcctacgaccagcagctcaaagcgggtgacaatccgtacctgcggtataaccacgccgacgccgagtttcaggagcgtctgcaagaagatacgtcttttgggggcaacctcgggcgagcagtcttccaggccaagaagcgggttctcgaacctctcggtctggttgaggaagctgctaagacggctcctggaaagaagagaccggtagaaccgtcacctcagcgttcccccgactcctccacgggcatcggcaagaaaggccagcagcccgctaaaaagagactgaactttggtcagactggcgactcagagtcagtccccgaccctcaaccaatcggagaaccaccagcaggcccctctggtctgggatctggtacaatggctgcaggcggtggcgctccaatggcagacaataacgaaggcgccgacggagtgggtagttcctcaggaaattggcattgcgattccacatggctgggcgacagagtcatcaccaccagcacccgaacctgggccctgcccacctacaacaaccacctctacaagcaaatatccaatgggacatcgggaggaagcaccaacgacaacacctacttcggctacagcaccccctgggggtattttgacttcaacagattccactgccacttctcaccacgtgactggcagcgactcatcaacaacaactggggattccggccaaaaagactcagcttcaagctcttcaacatccaggtcaaggaggtcacgcaggatgaaggcaccaagaccatcgccaataaccttaccagcacgattcaggtatttacggactcggaataccagctgccgtacgtcctcggctccgcgcaccagggctgcctgcctccgttcccggcggacgtcttcatgattccccagtacggctaccttacactgaacaatggaagtcaagccgtaggccgttcctccttctactgcctggaatattttccatctcaaatgctgcgaactggaaacaattttgaattcagctacaccttcgaggacgtgcctttccacagcagctacgcacacagccagagcttggaccgactgatgaatcctctcatcgaccagtacctgtactacttatccagaactcagtccacaggaggaactcaaggtacccagcaattgttattttctcaagctgggcctgcaaacatgtcggctcgggctaagaactggctacctggaccttgctaccggcagcagcgagtctctacgacactgtcgcaaaacaacaacagcaactttgcttggactggtgccaccaaatatcacctgaacggaagagactctttggtaaatcccggtgttgctatggcaacgcataaggacgacgaggaacgtttctttccatcgagcggagtcctgatgtttggaaaacagggtgctggaagagacaatgtggactatagcagcgttatgctaaccagcgaggaagaaattaaaaccactaaccctgtagccacagaacaatacggtgtggtggctgacaacttgcagcaagccaatacagggcctattgtgggaaatgtcaacagccaaggagccttacctggcatggtctggcagaaccgagacgtgtacctgcagggtcccatctgggccaaaattcctcacacggacggcaattttcacccgtctcctctgatgggcggctttggactgaagcacccacctccccagatcctgatcaagaatacgccggtacctgcggatcctccaacgacgttcagccaggcaaaattggcttccttcatcacgcagtacagcaccggccaggtcagcgtggagatcgagtgggagctgcagaaggagaacagcaagcgatggaacccagaaattcagtacacttccaactactacaaatctacaaatgtggactttgctgtcaattctgagggtacatattcagagcctcgccccattggtactcgttatctgacacgtaatctgtaa

SEQ ID NO: 5027 - DNA, 2211 bp, Adeno-associated virus
  source 1..2211: mol_type = genomic DNA
atggctgccgatggttatcttccagattggctcgaggacaacctctctgagggcattcgcgagtggtgggacttgaaacctggagccccgaaacccaaagccaaccagcaaaagcaggacgacggccggggcctggtgcttcctggctacaagtacctcggacccttcaacggactcgacaagggggagcccgtcaacgcggcggacgcagcggccctcgagcacgacaaggcctacgaccagcagctcgaagcgggtgacaatccgtacctgcggtataaccacgccgacgccgagtttcaggagcgtctgcaagaagatacgtcttttgggggcaacctcgggcgagcagtcttccaggccaagaagcgggttctcgaacctctcggtctggttgaggaaggcgctaagacggctcctggaaagaagagaccagtagagcagtcaccccaagaaccagactcctcctcgggcatcggcaagaaaggccaacagcccgccagaaaaagactcaattttggccagactggcgactcagagtcagttccagaccctcaacctctcggagaacctccagcagcgccctctggtgtgggacctaatacaatggctgcaggcggtggcgcaccaatggcagacaataacgaaggcgccgacggagtgggtagttcctcgggaaattggcattgcgattccacatggctgggcgacagagtcatcaccaccagcacccgaacctgggccctgcccacctacaacaaccacctctacaagcaaatctccaacgggacatcgggaggagccaccaacgacaacacctacttcggctacagcaccccctgggggtattttgactttaacagattccactgccacttttcaccacgtgactggcagcgactcatcaacaacaactggggattccggcccaagagactcagcttcaagctcttcaacatccaggtcaaggaggtcacgcagaatgaaggcaccaagaccatcgccaataacctcaccagcaccatccaggtgtttacggactcggagtaccagctgccgtacgttctcggctctgcccaccagggctgcctgcctccgttcccggcggacgtgttcatgattccccagtacggctacctaacactcaacaacggtagtcaggccgtgggacgctcctccttctactgcctggaatactttccttcgcagatgctgagaaccggcaacaacttccagtttacttacaccttcgaggacgtgcctttccacagcagctacgcccacagccagagcttggaccggctgatgaatcctctgattgaccagtacctgtactacttgtctcggactcaaacaacaggaggcacggcaaatacgcagactctgggcttcagccaaggtgggcctaatacaatggccaatcaggcaaagaactggctgccaggaccctgttaccgccaacaacgcgtctcaacgacaaccgggcaaaacaacaatagcaactttgcctggactgctgggaccaaataccatctgaatggaagaaattcattggctaatcctggcatcgctatggcaacacacaaagacgacgaggagcgttttttcccagtaacgggatcctgtttttggcaacaaaatgctgccagagacaatgcggattacagcgatgtcatgctcaccagcgaggaagaaatcaaaaccactaaccctgtggctacagaggaatacggtatcgtggcagataacttgcagcagcaaaacacggctcctcaaattggaactgtcaacagccagggggccttacccggtatggtctggcagaaccgggacgtgtacctgcagggtcccatctgggccaagattcctcacacggacggcaacttccacccgtctccgctgatgggcggctttggcctgaaacatcctccgcctcagatcctgatcaagaacacgcctgtacctgcggatcctccgaccaccttcaaccagtcaaagctgaactctttcatcacgcaatacagcaccggacaggtcagcgtggaaattgaatgggagctacagaaggaaaacagcaagcgctggaaccccgagatccagtacacctccaactactacaaatctacaagtgtggactttgctgttaatacagaaggcgtgtactctgaaccccgccccattggcacccgttacctcacccgtaatctgtaa

SEQ ID NO: 5028 - protein, 736 aa, Adeno-associated virus
MAADGYLPDWLEDNLSEGIREWWDLKPGAPKPKANQQKQDDGRGLVLPGYKYLGPFNGLDKGEPVNAADAAALEHDKAYDQQLEAGDNPYLRYNHADAEFQERLQEDTSFGGNLGRAVFQAKKRVLEPLGLVEEGAKTAPGKKRPVEQSPQEPDSSSGIGKKGQQPARKRLNFGQTGDSESVPDPQPLGEPPAAPSGVGPNTMAAGGGAPMADNNEGADGVGSSSGNWHCDSTWLGDRVITTSTRTWALPTYNNHLYKQISNGTSGGATNDNTYFGYSTPWGYFDFNRFHCHFSPRDWQRLINNNWGFRPKRLSFKLFNIQVKEVTQNEGTKTIANNLTSTIQVFTDSEYQLPYVLGSAHQGCLPPFPADVFMIPQYGYLTLNNGSQAVGRSSFYCLEYFPSQMLRTGNNFQFTYTFEDVPFHSSYAHSQSLDRLMNPLIDQYLYYLSRTQTTGGTANTQTLGFSQGGPNTMANQAKNWLPGPCYRQQRVSTTTGQNNNSNFAWTAGTKYHLNGRNSLANPGIAMATHKDDEERFFPVTGSCFWQQNAARDNADYSDVMLTSEEEIKTTNPVATEEYGIVADNLQQQNTAPQIGTVNSQGALPGMVWQNRDVYLQGPIWAKIPHTDGNFHPSPLMGGFGLKHPPPQILIKNTPVPADPPTTFNQSKLNSFITQYSTGQVSVEIEWELQKENSKRWNPEIQYTSNYYKSTSVDFAVNTEGVYSEPRPIGTRYLTRNL

SEQ ID NO: 5029 - DNA, 2214 bp, Adeno-associated virus
  source 1..2214: mol_type = genomic DNA
atggctgctgacggttatcttccagattggctcgaggacaacctctctgagggcattcgcgagtggtgggacctgaaacctggagcccccaagcccaaggccaaccagcagaagcaggacgacggccggggtctggtgcttcctggctacaagtacctcggacccttcaacggactcgacaagggggagcccgtcagcgcggcggacgcagcggccctcgagcacgacaaggcctgcgaccagcggctcaaagcgggtgacaatccgtacctgcggtataaccacgccgacgccgagtttcaggagcgtctgcaagaagatacgtcttttgggggcaacctcgggcgagcagtcttccaggccaagaagcgggttctcgaacctctcggtctggttgaggaagctgctaagacggctcctggaaagaagggaccggtagaaccgtcacctcagcgttcccccgactcctccacgggcatcggcaagaaaggccagcagcccgctagaaagagactgaactttgggcagactggcgactcagagtcagtccccgaccctcaaccaatcggagaaccaccagcaggcccctctggtctgggatctggtacaatggctgcaggcggtggcgcaccaatggctgacaataacgagggcgccgacggagtgggtaatgcctcaggaaattggcattgcgattccacatggctgggcgacagagtcatcaccaccagcacccgaacctgggctttgcccacctacaacaatcacctctacaagcaaatctccagtcagtcagcaggtagcaccaacgacaacgtctacttcggctacagcaccccctgggggtattttgacttcaacagattccactgtcacttctcaccacgtgactggcagcggctcatcaacaacaactggggattccggcccaagaagctcaacttcaagctgttcaacatccaggtcaaggaggtcacaacgaatgacggcgtcacgaccatcgccaataaccttaccagcacggttcaggtcttttcggactcggaataccagctgccctacgtcctcggctccgcacaccagggctgcctgcctccgttcccggcggacgtcttcatgattccccagtacggctacctgactctgaacaatggcagccaatcggtgggtcgttcctctttctactgcctggaatatttcccttctcaaatgctgagaacgggcaacaacttcaccttcagctacaccttcgaggacgttcccttccacagcagctacgcacacagccagagcctggaccggctgatgaatcctcttatcgaccagtacctgtattacctggccagaacacagagcaacgcaggaggcacagctggcaatcgggaactgcagttttatcagggcgggcctaccaccatggccgaacaagccaaaaactggctgcctggaccttgcttccggcaacaaagagtctccaagacgctggatcaaaacaacaacagcaactttgcttggactggtgccaccaaataccatctaaatggaagaaattcattggttaatcccggtgtcgccatggcaacccacaaggacgacgaggaacgcttcttcccttcgagcggagtcctgatttttggaaaaactggagcagctaataagactacactggaaaatgtgttaatgacaaatgaagaggaaattcgtcctaccaacccggtagccaccgaggaatacgggactgttagcagcaacctgcaggcggctaacactgcagcccagacacaagttgtcaacaaccagggagccttacctggtatggtctggcagaaccgggacgtgtacctgcagggtcccatctgggccaagattcctcacacggacggcaactttcacccgtctccgctgatgggcggctttggactgaagcatccgcctcctcagatcctgatcaaaaacactcctgttcctgctaatcccccggaggtgtttacgcctgccaagtttgcttctttcatcacacagtacagcaccggccaggtcagcgtggagatcgagtgggagctgcagaaggagaacagcaagcgctggaacccagagattcagtatacctccaattttgacgaacagactggtgtggactttgccgttgacagccagggtgtttattctgagcctcgccccattggtactcgttacctcacccgtaatctgtaa

SEQ ID NO: 5030 - protein, 737 aa, Adeno-associated virus
MAADGYLPDWLEDNLSEGIREWWDLKPGAPKPKANQQKQDDGRGLVLPGYKYLGPFNGLDKGEPVSAADAAALEHDKACDQRLKAGDNPYLRYNHADAEFQERLQEDTSFGGNLGRAVFQAKKRVLEPLGLVEEAAKTAPGKKGPVEPSPQRSPDSSTGIGKKGQQPARKRLNFGQTGDSESVPDPQPIGEPPAGPSGLGSGTMAAGGGAPMADNNEGADGVGNASGNWHCDSTWLGDRVITTSTRTWALPTYNNHLYKQISSQSAGSTNDNVYFGYSTPWGYFDFNRFHCHFSPRDWQRLINNNWGFRPKKLNFKLFNIQVKEVTTNDGVTTIANNLTSTVQVFSDSEYQLPYVLGSAHQGCLPPFPADVFMIPQYGYLTLNNGSQSVGRSSFYCLEYFPSQMLRTGNNFTFSYTFEDVPFHSSYAHSQSLDRLMNPLIDQYLYYLARTQSNAGGTAGNRELQFYQGGPTTMAEQAKNWLPGPCFRQQRVSKTLDQNNNSNFAWTGATKYHLNGRNSLVNPGVAMATHKDDEERFFPSSGVLIFGKTGAANKTTLENVLMTNEEEIRPTNPVATEEYGTVSSNLQAANTAAQTQVVNNQGALPGMVWQNRDVYLQGPIWAKIPHTDGNFHPSPLMGGFGLKHPPPQILIKNTPVPANPPEVFTPAKFASFITQYSTGQVSVEIEWELQKENSKRWNPEIQYTSNFDEQTGVDFAVDSQGVYSEPRPIGTRYLTRNL

SEQ ID NO: 5031 - DNA, 2214 bp, Adeno-associated virus
  source 1..2214: mol_type = genomic DNA
atggctgccgatggttatcttccagattggctcgaggacaacctctctgagggcattcgcgagtggtgggacctgaaacctggagccccgaaacccaaagccaaccagcaaaagcaggacgacggccggggtctggtgcttcctggctacaagtacctcggacccttcaacggactcgacaagggggagcccgtcaacgcggcggacgcagcggccctcgagcacgacaaggcctacgaccagcagctcaaagcgggtgacaatccgtacctgcggtataaccacgccgacgccgagtttcaggagcgtctgcaagaagatacgtcttttgggggcaacctcgggcgagcagtcttccaggccaagaagcgggttctcgaacctctcggtctggttgaggaagctgctaagacggctcctggaaagaagagaccggtagaaccgtcacctcagcgttcccccgactcctccacgggcatcggcaagaaaggccagcagcccgctagaaagagactgaactttgggcagactggcgactcagagtcagtccccgaccctcaaccaatcggagaaccaccagcaggcccctctggtctgggatctggtacaatggctgcaggcggtggcgctccaatggcagacaataacgaaggcgccgacggagtgggtaatgcctcaggaaattggcattgcgattccacatggctgggcgacagagtcatcaccaccagcacccgaacctgggctttgcccacctacaacaaccacctctacaagcaaatctccagtcagtcagcaggtagcaccaacgacaacgtctacttcggctacagcaccccctgggggtattttgacttcaacagattccactgtcacttctcaccacgtgactggcagcggctcatcaacaacaactggggattccggcccaagaagctcaacttcaagctgttcaacatccaggtcaaggaggtcacaacgaatgacggcgtcacgaccatcgccaataaccttaccagcacggttcaggtcttttcggactcggaataccagctgccctacgtcctcggctccgcacaccagggctgcctgcctccgttcccggcggacgtcttcatgattcctcagtacggctacctgactctcaacaacggtagtcaggccgtgggacgttcctccttctactgcctggagtacttcccctctcagatgctgagaacgggcaacaacttttccttcagctacactttcgaggacgtgcctttccacagcagctacgcgcacagccagagtttggacaggctgatgaatcctctcatcgaccagtacctgtactacctgtcaagaacccagtctacgggaggcacagcgggaacccagcagttgctgttttctcaggccgggcctagcaacatgtcgactcaggccagaaactggctgcctggaccctgctacagacagcagcgcgtctccacgacactgtcgcaaaacaacaacagcaactttgcctggactggtgccaccaagtatcatctgaacggcagagactctctggtgaatccgggcgtcgccatggcaaccaacaaggacgacgaggaccgcttcttcccatccagcggcatcctcatgtttggcaagcagggagctggaaaagacaacgtggactatagcaacgtgatgctaaccagcgaggaagaaatcaagaccaccaaccccgtggccacagaacagtatggcgtggtggctgataacctacagcagcaaaacaccgctcctattgtgggggccgtcaacagccagggagccttacctggcatggtctggcagaaccgggacgtgtacctgcagggtcctatttgggccaagattcctcacacagatggcaactttcacccgtctcctttaatgggcggctttggacttaaacatccgcctcctcagatccttatcaaaaacactcctgttcctgcggatcctccaacagcgttcaaccaggccaagctgaattctttcatcacgcagtacagcaccggacaagtcagcgtggagatcgagtgggagctgcagaaggagaacagcaagcgctggaacccagagattcagtatacttccaactactacaaatctacaaatgtggactttgctgttaatactgagggtgcttactctgagcctcgccccattggcactcgttacctcacccgtaatctgtaa

SEQ ID NO: 5032 - protein, 737 aa, Adeno-associated virus
MAADGYLPDWLEDNLSEGIREWWDLKPGAPKPKANQQKQDDGRGLVLPGYKYLGPFNGLDKGEPVNAADAAALEHDKAYDQQLKAGDNPYLRYNHADAEFQERLQEDTSFGGNLGRAVFQAKKRVLEPLGLVEEAAKTAPGKKRPVEPSPQRSPDSSTGIGKKGQQPARKRLNFGQTGDSESVPDPQPIGEPPAGPSGLGSGTMAAGGGAPMADNNEGADGVGNASGNWHCDSTWLGDRVITTSTRTWALPTYNNHLYKQISSQSAGSTNDNVYFGYSTPWGYFDFNRFHCHFSPRDWQRLINNNWGFRPKKLNFKLFNIQVKEVTTNDGVTTIANNLTSTVQVFSDSEYQLPYVLGSAHQGCLPPFPADVFMIPQYGYLTLNNGSQAVGRSSFYCLEYFPSQMLRTGNNFSFSYTFEDVPFHSSYAHSQSLDRLMNPLIDQYLYYLSRTQSTGGTAGTQQLLFSQAGPSNMSTQARNWLPGPCYRQQRVSTTLSQNNNSNFAWTGATKYHLNGRDSLVNPGVAMATNKDDEDRFFPSSGILMFGKQGAGKDNVDYSNVMLTSEEEIKTTNPVATEQYGVVADNLQQQNTAPIVGAVNSQGALPGMVWQNRDVYLQGPIWAKIPHTDGNFHPSPLMGGFGLKHPPPQILIKNTPVPADPPTAFNQAKLNSFITQYSTGQVSVEIEWELQKENSKRWNPEIQYTSNYYKSTNVDFAVNTEGAYSEPRPIGTRYLTRNL

SEQ ID NO: 5033 - DNA, 2217 bp, Adeno-associated virus
  source 1..2217: mol_type = genomic DNA
atggctgccgatggttatcttccagattggctcgaggacaacctctctgagggcattcgcgagtggtgggacctgaaacctggagccccgaaacccaaagccaaccagcaaaagcaggacgacggccggggtctggtgcttcctggctacaagtacctcggacccttcaacggactcgacaagggggagcccgtcaacgcggcggacgcagcggccctcgagcacgacaaggcctacgaccagcagctcaaagcgggtgacaatccgtacctgcggtataatcacgccgacgccgagtttcaggagcgtctgcaagaagatacgtcttttgggggcaacctcgggcgagcagtcttccaggccaagaagcgggttctcgaacctctcggtctggttgaggaaggcgctaagacggctcctggaaagaagagaccggtagagccgtcaccacagcgttcccccgactcctccacgggcatcggcaagaaaggccagcagcccgccagaaagagactcaatttcggtcagactggcgactcagagtcagtccccgaccctcaacctatcggagaacctccagcagcgccctctagtgtgggatctggtacaatggctgcaggcggtggcgcaccaatggcagacaataacgaaggtgccgacggagtgggtagttcctcgggaaattggcattgcgattccacatggctgggcgacagagtcatcaccaccagcacccgaacctgggccctgcccacctacaacaaccacctctacaagcaaatctccaacgggacctcgggaggcagcaccaacgacaacacctactttggctacagcaccccctgggggtattttgactttaacagattccactgccacttctcaccacgtgactggcagcgactcatcaacaacaactggggattccggcccaagagactcagcttcaagctcttcaacatccaggtcaaagaggtcacgcagaatgaaggcaccaagaccatcgccaataacctcaccagcaccatccaggtgtttacggactcggaataccagctgccgtacgtcctcggctctgcccaccagggctgcctgcctccgttcccggcggacgtcttcatgattcctcagtacggctacctgactctcaacaacggtagtcaggccgtgggacgttcctccttctactgcctggagtacttcccctctcagatgctgagaacgggcaacaacttttccttcagctacactttcgaggacgtgcctttccacagcagctacgcgcacagccagagtttggacaggctgatgaatcctctcatcgaccagtacctgtactacctgtcaagaacccagtctacgggaggcacagcgggaacccagcagttgctgttttctcaggccgggcctagcaacatgtcggctcaggccagaaactggctgcctggaccctgctacagacagcagcgcgtctccacgacactgtcgcaaaacaacaacagcaactttgcctggactggtgccaccaagtatcatctgaacggcagagactctctggtgaatccgggcgtcgccatggcaaccaacaaggacgacgaggaccgcttcttcccatccagcggcatcctcatgtttggcaagcagggagctggaaaagacaacgtggactatagcaacgtgatgctaaccagcgaggaagaaatcaaggccaccaaccccgtggccacagaacagtatggcgtggtggctgataacctacagcagcaaaacaccgctcctattgtgggggccgtcaacagccagggagccttacctggcatggtctggcagaaccgggacgtgtacctgcagggtcctatttgggccaagattcctcacacagatggcaactttcacccgtctcctttaatgggcggctttggacttaaacatccgcctcctcagatcctcatcaaaaacactcctgttcctgcggatcctccaacagcgttcaaccaggccaagctgaattctttcatcacgcagtacagcaccggacaagtcagcgtggagatcgagtgggagctgcagaaggagaacagcaagcgctggaacccagagattcagtatacttccaactactacaaatctacaaatgtggactttgctgttaatactgagggtgtttactctgagcctcgccccattggcactcgttacctcacccgtaatctgtaa

SEQ ID NO: 5034 - protein, 738 aa, Adeno-associated virus
MAADGYLPDWLEDNLSEGIREWWDLKPGAPKPKANQQKQDDGRGLVLPGYKYLGPFNGLDKGEPVNAADAAALEHDKAYDQQLKAGDNPYLRYNHADAEFQERLQEDTSFGGNLGRAVFQAKKRVLEPLGLVEEGAKTAPGKKRPVEPSPQRSPDSSTGIGKKGQQPARKRLNFGQTGDSESVPDPQPIGEPPAAPSSVGSGTMAAGGGAPMADNNEGADGVGSSSGNWHCDSTWLGDRVITTSTRTWALPTYNNHLYKQISNGTSGGSTNDNTYFGYSTPWGYFDFNRFHCHFSPRDWQRLINNNWGFRPKRLSFKLFNIQVKEVTQNEGTKTIANNLTSTIQVFTDSEYQLPYVLGSAHQGCLPPFPADVFMIPQYGYLTLNNGSQAVGRSSFYCLEYFPSQMLRTGNNFSFSYTFEDVPFHSSYAHSQSLDRLMNPLIDQYLYYLSRTQSTGGTAGTQQLLFSQAGPSNMSAQARNWLPGPCYRQQRVSTTLSQNNNSNFAWTGATKYHLNGRDSLVNPGVAMATNKDDEDRFFPSSGILMFGKQGAGKDNVDYSNVMLTSEEEIKATNPVATEQYGVVADNLQQQNTAPIVGAVNSQGALPGMVWQNRDVYLQGPIWAKIPHTDGNFHPSPLMGGFGLKHPPPQILIKNTPVPADPPTAFNQAKLNSFITQYSTGQVSVEIEWELQKENSKRWNPEIQYTSNYYKSTNVDFAVNTEGVYSEPRPIGTRYLTRNL

SEQ ID NO: 5035 - DNA, 2217 bp, Adeno-associated virus
  source 1..2217: mol_type = genomic DNA
atggctgccgatggttatcttccagattggctcgaggacaacctctctgagggcattcgcgagtggtgggacctgaaacctggagccccgaaacccaaagccaaccagcaaaagcaggacgacggccggggtctggtgcttcctggctacaagcacctcggacccttcaacggactcgacaagggggagcccgtcaacgcggcggacgcagcggccctcgagcacgacaaggcctacgaccagcagctcaaagcgggtgacaatccgtacctgcggtataatcacgctgacgccgagtttcaggagcgtctgcaagaagatacgtcttttgggggcaacctcgggcgagcagtcttccaggccaagaagcgggttctcgaacctctcggtctggttgaggaaggcgctaagacggctcctggaaagaagagaccggtagagccgtcaccacagcgttcccccgactcctccacgggcatcggcaagaaaggccagcagcccgccagaaagagactcaatttcggtcagactggcgactcagagtcagtccccgaccctcaacctatcggagaacctccagcagcgccctctagtgtgggatctggtacaatggctgcaggcggtggcgcaccaatggcagacaataacgaaggtgccgacggagtgggtagttcctcgggaaattggcattgcgattccacatggctgggcgacagagtcatcaccaccagcacccgaacctgggccctgcccacctacaacaaccacctctacaagcaaatctccaacgggacctcgggaggcagcaccaacgacaacacctactttggctacagcaccccctgggggtattttgactttaacagattccactgccacttctcaccacgtgactggcagcgactcatcaacaacaactggggattccggcccaagagactcagcttcaagctcttcaacatccaggtcaaagaggtcacgcagaatgaaggcaccaagaccatcgccaataaccttaccagcacggttcaggtcttttcggactcggaataccagctgccctacgtcctcggctccgcacaccagggctgcctgcctccgttcccggcggacgtcttcatgattccccagtacggctacctgactctgaacaatggcagccaatcggtgggtcgttcctctttctactgcctggaatatttcccttctcaaatgctgagaacgggcaacaacttcaccttcagctacaccttcgaggacgttcccttccacagcagctacgcacacagccagagcctggaccggctgatgaatcctcttatcgaccagtacctgtattacctggccagaacacagagcaacgcaggaggcacagctggcaatcgggaactgcagttttatcagggcgggcctaccaccatggccgaacaagccaaaaactggctgcctggaccttgcttccggcaacaaagagtctccaagacgctggatcaaaacaacaacagcaactttgcttggactggtgccaccaaataccatctaaatggaagaaattcattggttaatcccggtgtcgccatggcaacccacaaggacgacgaggaacgcttcttcccttcgagcggagtcctgatttttggaaaaactggagcagctaataagactacactggaaaatgtgttaatgacaaatgaagaggaaattcgtcctaccaacccggtagccaccgaggaatacgggactgttagcagcaacctgcaggcggctaacactgcagcccagacacaagttgtcaacaaccagggagccttacctggtatggtctggcagaaccgggacgtgtacctgcagggtcccatctgggccaagattcctcacacggacggcaactttcacccgtctccgctgatgggcggctttggactgaagcatccgcctcctcagatcctgatcaaaaacactcctgttcctgctaatcccccggaggtgtttacgcctgccaagtttgcttctttcatcacacagtacagcaccggccaggtcagcgtggagatcgagtgggagctgcagaaggagaacagcaagcgctggaacccagagattcagtatacctccaattttgacaaacagactggtgtggactttgccgttgacagccagggtgtttattctgagcctcgccccattggtactcgttacctcacccgtaatctgtaa

SEQ ID NO: 5036 - protein, 738 aa, Adeno-associated virus
MAADGYLPDWLEDNLSEGIREWWDLKPGAPKPKANQQKQDDGRGLVLPGYKHLGPFNGLDKGEPVNAADAAALEHDKAYDQQLKAGDNPYLRYNHADAEFQERLQEDTSFGGNLGRAVFQAKKRVLEPLGLVEEGAKTAPGKKRPVEPSPQRSPDSSTGIGKKGQQPARKRLNFGQTGDSESVPDPQPIGEPPAAPSSVGSGTMAAGGGAPMADNNEGADGVGSSSGNWHCDSTWLGDRVITTSTRTWALPTYNNHLYKQISNGTSGGSTNDNTYFGYSTPWGYFDFNRFHCHFSPRDWQRLINNNWGFRPKRLSFKLFNIQVKEVTQNEGTKTIANNLTSTVQVFSDSEYQLPYVLGSAHQGCLPPFPADVFMIPQYGYLTLNNGSQSVGRSSFYCLEYFPSQMLRTGNNFTFSYTFEDVPFHSSYAHSQSLDRLMNPLIDQYLYYLARTQSNAGGTAGNRELQFYQGGPTTMAEQAKNWLPGPCFRQQRVSKTLDQNNNSNFAWTGATKYHLNGRNSLVNPGVAMATHKDDEERFFPSSGVLIFGKTGAANKTTLENVLMTNEEEIRPTNPVATEEYGTVSSNLQAANTAAQTQVVNNQGALPGMVWQNRDVYLQGPIWAKIPHTDGNFHPSPLMGGFGLKHPPPQILIKNTPVPANPPEVFTPAKFASFITQYSTGQVSVEIEWELQKENSKRWNPEIQYTSNFDKQTGVDFAVDSQGVYSEPRPIGTRYLTRNL

SEQ ID NO: 5037 - protein, 737 aa, Adeno-associated virus
MAADGYLPDWLEDNLSEGIREWWDLKPGAPKPKANQQKQDDGRGLVLPGYKYLGPFNGLDKGEPVNAADAAALEHDKAYDQQLKAGDNPYLRYNHADAEFQERLQEDTSFGGNLGRAVFQAKKRVLEPLGLVEEAAKTAPGKKRPVEPSPQRSPDSSTGIGKKGQQPARKRLNFGQTGDSESVPDPQPIGEPPAGPSGLGSGTMAAGGGAPMADNNKGADGVGNASGNWHCDSTWLGDRVITTSTRTWALPTYNNHLYKQISSQSAGSTNDNVYFGYSTPWGYFDFNRFHCHFSPRDWQRLINSNWGFRPKKLNFKLFNIQVKEVTTNDGVTTIANNLTSTVQVFSDSEYQLPYVLGSAHQGCLPPFPADVFMIPQYGYLTLNNGSQSVGRSSFYCLEYFPSQMLRTGNNFTFSYTFEDVPFHSSYAHSQSLDRLMNPLIDQYLYYLARTQSNAGGTAGNRELQFYQGGPTTMAEQAKNWLPGPCFRQQRVSKTLDQNNNSNFAWTGATKYHLNGRNSLVNPGVAMATHKDDEERFFPSSGVLIFGKTGAANKTTLENVLMTNEEEIRPTNPVATEEYGTVSSNLQAANTAAQTQVVNNQGALPGMVWQNRDVYLQGPIWAKIPHTDGNFHPSPLMGGFGLKHPPPQILIKNTPVPANPPEVFTPAKFASFITQYSTGQVSVEIEWELQKENSKRWNPEIQYTSNFDKQTGVDFAVDSQGVYSEPRPIGTRYLTRNL

SEQ ID NO: 5038 - DNA, 2214 bp, Adeno-associated virus
  source 1..2214: mol_type = genomic DNA
atggctgctgacggttatcttccagattggctcgaggacaacctctctgagggcattcgcgagtggtgggacctgaaacctggagcccccaagcccaaggccaaccagcagaagcaggacgacggccggggtctggtgcttcctggctacaagtacctcggacccttcaacggactcgacaagggggagcccgtcaacgcggcggacgcagcggccctcgagcacgacaaggcctacgaccagcagctcaaagcgggtgacaatccgtacctgcggtataaccacgccgacgccgagtttcaggagcgtctgcaagaagatacgtcttttgggggcaacctcgggcgagcagtcttccaggccaagaagcgggttctcgaacctctcggtctggttgaggaagctgctaagacggctcctggaaagaagagaccggtagaaccgtcacctcagcgttcccccgactcctccacgggcatcggcaagaaaggccagcagcccgctagaaagagactgaactttgggcagactggcgactcagagtcagtccccgaccctcaaccaatcggagaaccaccagcaggcccctctggtctgggatctggtacaatggctgcaggcggtggcgcaccaatggctgacaataacaagggcgccgacggagtgggtaatgcctcaggaaattggcattgcgattccacatggctgggcgacagagtcatcaccaccagcacccgaacctgggctttgcccacctacaacaaccacctctacaagcaaatctccagtcagtcagcaggtagcaccaacgacaacgtctacttcggctacagcaccccctgggggtattttgacttcaacagattccactgtcacttctcaccacgtgactggcagcggctcatcaacagcaactggggattccggcccaagaagctcaacttcaagctgttcaacatccaggtcaaggaggtcacaacgaatgacggcgtcacgaccatcgccaataaccttaccagcacggttcaggtcttttcggactcggaataccagctgccctacgtcctcggctccgcacaccagggctgcctgcctccgttcccggcggacgtcttcatgattccccagtacggctacctgactctgaacaatggcagccaatcggtgggtcgttcctctttctactgcctggaatatttcccttctcaaatgctgagaacgggcaacaacttcaccttcagctacaccttcgaggacgttcccttccacagcagctacgcacacagccagagcctggaccggctgatgaatcctcttatcgaccagtacctgtattacctggccagaacacagagcaacgcaggaggcacagctggcaatcgggaactgcagttttatcagggcgggcctaccaccatggccgaacaagccaaaaactggctgcctggaccttgcttccggcaacaaagagtctccaagacgctggatcaaaacaacaacagcaactttgcttggactggtgccaccaaataccatctaaatggaagaaattcattggttaatcccggtgtcgccatggcaacccacaaggacgacgaggaacgcttcttcccttcgagcggagtcctgatttttggaaaaactggagcagctaataagactacactggaaaatgtgttaatgacaaatgaagaggaaattcgtcctaccaacccggtagccaccgaggaatacgggactgttagcagcaacctgcaggcggctaacactgcagcccagacacaagttgtcaacaaccagggagccttacctggtatggtctggcagaaccgggacgtgtacctgcagggtcccatctgggccaagattcctcacacggacggcaactttcacccgtctccgctgatgggcggctttggactgaagcatccgcctcctcagatcctgatcaaaaacactcctgttcctgctaatcccccggaggtgtttacgcctgccaagtttgcttctttcatcacacagtacagcaccggccaggtcagcgtggagatcgagtgggagctgcagaaggagaacagcaagcgctggaacccagagattcagtatacctccaattttgacaaacagactggtgtggactttgccgttgacagccagggtgtttattctgagcctcgccccattggtactcgttacctcacccgtaatctgtaa

SEQ ID NO: 5039 - protein, 737 aa, Adeno-associated virus
MAADGYLPDWLEDNLSEGIREWWDLKPGAPKPKANQQKQDDGRGLVLPGYKYLGPFNGLDKGEPVNAADAAALEHDKAYDQQLKAGDNPYLRYNHADAEFQERLQEDTSFGGNLGRAVFQAKKRVLEPLGLVEEAAKTAPGKKRPVEPSPQRSPDSSTGIGKKGQQPARKRLNFGQTGDSESVPDPQPIGEPPAGPSGLGSGTMAAGGGAPMADNNEGADGVGNASGNWHCDSTWLGDRVITTSTRTWALPTYNNHLYKQISSQSAGSTNDNVYFGYSTPWGYFDFNRFHCHFSPRDWQRLINSNWGFRPKKLNFKLFNIQVKEVTTNDGVTTIANNLTSTVQVFSDSEYQLPYVLGSAHQGCLPPFPADVFMIPQYGYLTLNNGSQSVGRSSFYCLEYFPSQMLRTGNNFTFSYTFEDVPFHSSYAHSQSLDRLMNPLIDQYLYYLARTQSNAGGTAGNRELQFYQGGPTTMAEQAKNWLPGPCFRQQRVSKTLDQNNNSNFAWTGATKYHLNGRNSLVNPGVAMATHKDDEERFFPSSGVLIFGKTGAANKTTLENVLMTNEEEIRPTNPVATEEYGTVSSNLQAANTAAQTQVVNNQGALPGMVWQNRDVYLQGPIWAKIPHTDGNFHPSPLMGGFGLKHPPPQILIKNTPVPANPPEVFTPAKFASFITQYSTGQVSVEIEWELQKENSKRWNPEIQYTSNFDKQTGVDFAVDSQGVYSEPRPIGTRYLTRNL

SEQ ID NO: 5040 - protein, 737 aa, Adeno-associated virus
MAADGYLPDWLEDNLSEGIREWWDLKPGAPKPKANQQKQDDGRGLVLPGYKYLGPFNGLDKGEPVNAADAAALEHDKAYDQQLKAGDNPYLRYNHADAEFQERLQEDTSFGGNLGRAVFQAKKRVLEPLGLVEEAAKTAPGKKRPVEPSPQRSPDSSTGIGKKGQQPARKRLNFGQTGDSESVPDPQPIGEPPAGPSGLGSGTMAAGGGAPMADNNEGADGVGNASGNWHCDSTWLGDRVITTSTRTWALPTYNNHLYKQISSQSAGSTNDNVYFGYSTPWGYFDFNRFHCHFSPRDWQRLINNNWGFRPKKLNFKLFNIQVKEVTTNDGVTTIANNLTSTVQVFSDSEYQLPYVLGSAHQGCLPPFPADVFMIPQYGYLTLNNGSQSVGRSSFYCLEYFPSQMLRTGNNFTFSYTFEDVPFHSSYAHSQSLDRLMNPLIDQYLYYLARTQSNAGGTAGNRELQFYQGGPTTMAEQAKNWLPGPCFRQQRVSKTLDQNNNSNFAWTGATKYHLNGRNSLVNPGVAMATHKDDEERFFPSSGVLIFGKTGAANKTTLENVLMTNEEEIRPTNPVATEEYGTVSSNLQAANTAAQTQVVNNQGALPGMVWQNRDVYLQGPIWAKIPHTDGNFHPSPLMGGFGLKHPPPQILIKNTPVPANPPEVFTPAKFASFITQYSTGQVSVEIEWELQKENSKRWNPEIQYTSNFDKQTGVDFAVDSQGVYSEPRPIGTRYLTRNL

SEQ ID NO: 5041 - protein, 737 aa, Adeno-associated virus
MAADGYLPDWLEDNLSEGIREWWDLKPGAPKPKANQQKQDDGRGLVLPGYKYLGPFNGLDKGEPVNAADAAALEHDKAYDQQLKAGDNPYLRYNHADAEFQERLQEDTSFGGNLGRAVFQAKKRVLEPLGLVEEAAKTAPGKKRPVEPSPQRSPDSSTGIGKKGQQPARKRLNFGQTGDSESVPDPQPIGEPPAGPSGLGSGTMAAGGGAPMADNNKGADGVGNASGNWHCDSTWLGDRVITTSTRTWALPTYNNHLYKQISSQSAGSTNDNVYFGYSTPWGYFDFNRFHCHFSPRDWQRLINNNWGFRPKKLNFKLFNIQVKEVTTNDGVTTIANNLTSTVQVFSDSEYQLPYVLGSAHQGCLPPFPADVFMIPQYGYLTLNNGSQSVGRSSFYCLEYFPSQMLRTGNNFTFSYTFEDVPFHSSYAHSQSLDRLMNPLIDQYLYYLARTQSNAGGTAGNRELQFYQGGPTTMAEQAKNWLPGPCFRQQRVSKTLDQNNNSNFAWTGATKYHLNGRNSLVNPGVAMATHKDDEERFFPSSGVLIFGKTGAANKTTLENVLMTNEEEIRPTNPVATEEYGTVSSNLQAANTAAQTQVVNNQGALPGMVWQNRDVYLQGPIWAKIPHTDGNFHPSPLMGGFGLKHPPPQILIKNTPVPANPPEVFTPAKFASFITQYSTGQVSVEIEWELQKENSKRWNPEIQYTSNFDKQTGVDFAVDSQGVYSEPRPIGTRYLTRNL

SEQ ID NO: 5042 - DNA, 2217 bp, Adeno-associated virus
  source 1..2217: mol_type = genomic DNA
atggctgccgatggttatcttccagattggctcgaggacaacctctctgagggcattcgcgagtggtgggacctgaaacctggagccccgaaacccaaagccaaccagcaaaagcaggacgacggccggggtctggtgcttcctggctacaagtacctcggacccttcaacggactcgacaagggggagcccgtcaacgcggcggacgcagcggccctcgagcacgacaaggcctacgaccagcagctcaaagcgggtgacaatccgcacctgcggtataatcacgccgacgccgagtttcaggagcgtctgcaagaagatacgtcttttgggggcaacctcgggcgagcagtcttccaggccaagaagcgggttctcgaacctctcggtctggttgaggaaggcgctaagacggctcctggaaagaagagaccggtagagccgtcaccacagcgttcccccgactcctccacgggcatcggcaagaaaggccagcagcccgccagaaagagactcaatttcggtcagactggcgactcagagtcagtccccgaccctcaacttatcggagaacctccagcagcgccctctagtgtgggatctggtacaatggctgcaggcggtggcgcaccaatggcagacaataacgaaggtgccgacggagtgggtagttcctcgggaaattggcattgcgattccacatggctgggcgacagagtcatcaccaccagcacccgaacctgggccctgcccacctacaacaaccacctctacaagcaaatctccaacgggacctcgggaggcagcaccaacgacaacacctactttggctacagcaccccctgggggtattttgactttaacagattccactgccacttctcaccacgtgactggcagcgactcatcaacaacaactggggattccggcccaagagactcagcttcaagctcttcaacatccaggtcaaagaggtcacgcagaatgaaggcaccaagaccatcgccaataacctcaccagcaccatccaggtgtttacggactcggagtaccagctgccgtacgtcctcggctctgcccaccagggctgcctgcctccgttcccggcggacgtcttcatgattcctcagtacggcaacctgactctcaacaacggtagtcaggccgtgggacgttcctccttctactgcctggagtacttcccctctcagatgctgagaacgggcaacaacttttccttcagctacactttcgaggacgtgcctttccacagcagctacgcgcacagccagagtttggacaggctgatgaatcctctcatcgaccagtacctgtactacctgtcaagaacccagtctacgggaggcacagcgggaacccagcagttgctgttttctcaggccgggcctagcaacatgtcggctcaggccagaaactggctgcctggaccctgctacagacagcagcgcgtctccacgacactgtcgcaaaacaacaacagcaactttgcctggactggtgccaccaagtatcatctgaacggcagagactctctggtgaatccgggcgtcgccatggcaaccaacaaggacgacgaggaccgcttcttcccatccagcggcatcctcatgtttggcaagcagggagctggaaaagacaacatgggctatagcaacgtgatgctaaccagcgaggaagaaatcaagaccaccaaccccgtggccacagaacagtatggcgtggtggctgataacctacagcagcaaaacaccgctcctattgtgggggccgtcaacagccagggagccttacctggcatggtctggcagaaccgggacgtgtacctgcagggtcctatttgggccaagattcctcacacagatggcaactttcacccgtctcctttaatgggcggctttggacttaaacatccgcctcctcagatcctcatcaaaaacactcctgttcctgcggatcctccaacagcgttcaaccaggccaagctgaattctttcatcacgcagtacggcaccggacaagtcagcgtggagatcgagtgggagctgcagaaggagaacagcaagcgctggaacccagagattcagtatacttccaactactacaaatctacaaatgtggactttgctgttaatactgagggtgtttactctgagcctcgccccattggcactcgttacctcacccgtaatctgtaa

SEQ ID NO: 5043 - protein, 738 aa, Adeno-associated virus
MAADGYLPDWLEDNLSEGIREWWDLKPGAPKPKANQQKQDDGRGLVLPGYKYLGPFNGLDKGEPVNAADAAALEHDKAYDQQLKAGDNPHLRYNHADAEFQERLQEDTSFGGNLGRAVFQAKKRVLEPLGLVEEGAKTAPGKKRPVEPSPQRSPDSSTGIGKKGQQPARKRLNFGQTGDSESVPDPQLIGEPPAAPSSVGSGTMAAGGGAPMADNNEGADGVGSSSGNWHCDSTWLGDRVITTSTRTWALPTYNNHLYKQISNGTSGGSTNDNTYFGYSTPWGYFDFNRFHCHFSPRDWQRLINNNWGFRPKRLSFKLFNIQVKEVTQNEGTKTIANNLTSTIQVFTDSEYQLPYVLGSAHQGCLPPFPADVFMIPQYGNLTLNNGSQAVGRSSFYCLEYFPSQMLRTGNNFSFSYTFEDVPFHSSYAHSQSLDRLMNPLIDQYLYYLSRTQSTGGTAGTQQLLFSQAGPSNMSAQARNWLPGPCYRQQRVSTTLSQNNNSNFAWTGATKYHLNGRDSLVNPGVAMATNKDDEDRFFPSSGILMFGKQGAGKDNMGYSNVMLTSEEEIKTTNPVATEQYGVVADNLQQQNTAPIVGAVNSQGALPGMVWQNRDVYLQGPIWAKIPHTDGNFHPSPLMGGFGLKHPPPQILIKNTPVPADPPTAFNQAKLNSFITQYGTGQVSVEIEWELQKENSKRWNPEIQYTSNYYKSTNVDFAVNTEGVYSEPRPIGTRYLTRNL

SEQ ID NO: 5044 - DNA, 2217 bp, Adeno-associated virus
  source 1..2217: mol_type = genomic DNA
atggctgccgatggttatcttccagattggctcgaggacaacctctctgagggcattcgcgagtggtgggacctgaaacctggagccccgaaacccaaagccaaccagcaaaagcaggacgacggccggggtctggtgcttcctggctacaagtacctcggacccttcaacggactcgacaagggggagcccgtcaacgcggcggacgcagcggccctcgagcacgacaaggcctacgaccagcagctcaaagcgggtgacaatccgtacctgcggtataatcacgccgacgccgagtttcaggagcgtctgcaagaagatacgtcttttgggggcaacctcgggcgagcagtcttccaggccaagaagcgggttctcgaacctctcggtctggttgaggaaggcgctaagacggctcctggaaagaagagaccggtagagccgtcaccacagcgttcccccgactcctccacgggcatcggcaagaaaggccagcagcccgccggaaagagactcaatttcggtcagactggcgactcagagtcagtccccgaccctcaacctatcggagaacctccagcagcgccctctagtgtgggatctggtacaatggctgcaggcggtggcgcaccaatggcagacaataacgaaggtgccgacggagtgggtagttcctcgggaaattggcattgcgattccacatggctgggcgacagagtcatcaccaccagcacccgaacctgggccctgcccacctacaacaaccacctctacaagcaaatctccaacgggacctcgggaggcagcaccaacgacaacacctactttggctacagcaccccctgggggtattttgactttaacagattccactgccacttctcaccacgtgactggcagcgactcatcaacaacaactggggattccggcccaagagactcagcttcaagctcttcaacatccaggtcaaagaggtcacgcagaatgaaggcaccaagaccatcgccaataacctcaccagcaccatccaggtgtttacggactcggaataccagctgccgtacgtcctcggctctgcccaccagggctgcctgcctccgttcccggcggacgtcttcatgattcctcagtacggctacctgactctcaacaacggtagtcaggccgtgggacgttcctccttctactgcctggagtacttcccctctcagatgctgagaacgggcaacaacttttccttcagctacactttcgaggacgtgcctttccacagcagctacgcgcacagccagagtttggacaggctgatgaatcctctcgtcgaccagtacctgtactacctgtcaagaacccagtctacgggaggcacagcgggaacccagcagttgctgttttctcaggccgggcctagcaacatgtcggctcaggccagaaactggctgcctggaccctgctacagacagcagcgcgtctccacgacactgtcgcaaaacaacaacagcaactttgcctggactggtgccaccaagtatcatctgaacggcagagactctctggtgaatccgggcgtcgccatggcaaccaacaaggacgacgaggaccgcttcttcccatccagcggcatcctcatgtttggcaagcagggagctggaaaagacaacgtggactatagcaacgtgatgctaaccagcgaggaagaaatcaagaccaccaaccccgtggccacagaacagtatggcgtggtggctgataacctacagcagcaaaacaccgctcctattgtgggggccgtcaacagccagggagccttacctggcatggtctggcagaaccgggacgtgtacctgcagggtcctatttgggccaagattcctcacacagatggcaactttcacccgtctcctttaatgggcggctttggacttaaacatccgcctcctcagatcctcatcaaaaacactcctgttcctgcggatcctccaacagcgttcaaccaggccaagctgaattctttcatcacgcagtacagcaccggacaagtcagcgtggagatcgagtgggagctgcagaaggagaacagcaagcgctggagcccagagattcagtatacttccaactactacaaatctacaaatgtggactttgctgttaatactgagggtgtttactctgagcctcgccccattggcactcgttacctcacccgtaatctgtaa

SEQ ID NO: 5045 - protein, 738 aa, Adeno-associated virus
MAADGYLPDWLEDNLSEGIREWWDLKPGAPKPKANQQKQDDGRGLVLPGYKYLGPFNGLDKGEPVNAADAAALEHDKAYDQQLKAGDNPYLRYNHADAEFQERLQEDTSFGGNLGRAVFQAKKRVLEPLGLVEEGAKTAPGKKRPVEPSPQRSPDSSTGIGKKGQQPAGKRLNFGQTGDSESVPDPQPIGEPPAAPSSVGSGTMAAGGGAPMADNNEGADGVGSSSGNWHCDSTWLGDRVITTSTRTWALPTYNNHLYKQISNGTSGGSTNDNTYFGYSTPWGYFDFNRFHCHFSPRDWQRLINNNWGFRPKRLSFKLFNIQVKEVTQNEGTKTIANNLTSTIQVFTDSEYQLPYVLGSAHQGCLPPFPADVFMIPQYGYLTLNNGSQAVGRSSFYCLEYFPSQMLRTGNNFSFSYTFEDVPFHSSYAHSQSLDRLMNPLVDQYLYYLSRTQSTGGTAGTQQLLFSQAGPSNMSAQARNWLPGPCYRQQRVSTTLSQNNNSNFAWTGATKYHLNGRDSLVNPGVAMATNKDDEDRFFPSSGILMFGKQGAGKDNVDYSNVMLTSEEEIKTTNPVATEQYGVVADNLQQQNTAPIVGAVNSQGALPGMVWQNRDVYLQGPIWAKIPHTDGNFHPSPLMGGFGLKHPPPQILIKNTPVPADPPTAFNQAKLNSFITQYSTGQVSVEIEWELQKENSKRWSPEIQYTSNYYKSTNVDFAVNTEGVYSEPRPIGTRYLTRNL

SEQ ID NO: 5046 - DNA, 2217 bp, Adeno-associated virus
  source 1..2217: mol_type = genomic DNA
atggttgccgatggttatcttccagattggctcgaggacaacctctctgagggcattcgcgagtggtgggacctgaaacctggagccccgaaacccaaagccaaccagcaaaagcagggcgacggccggggtctggtgcttcctggctacaagtacctcggacccttcaacggactcgacaagggggagcccgtcaacgcggcggacgcagcggccctcgagcacgacaaggcctacgaccagcagcttaaagcgggtgacaatccgtacctgcggtataatcacgccgacgccgagcttcaggagcgtctgcaagaagatacgtcttttgggggcaacctcgggcgagcagtcttccaggccaagaagcgggttctcgaacctctcggtctggttgaggaaggcgctaagacggctcctggaaagaagagaccggtagagccgtcaccacagcgttcccccgactcctccacgggcatcggcaagaaaggccagcagcccgccagaaagagactcaatttcggtcagactggcgactcagagtcagtccccgaccctcaacctatcggagaacctccagcagcgccctctagtgtgggatctggtacaatggctgcaggcggtggcgcgccaatggcagacaataacgaaggtgccgacggagtgggtagttcctcgggaaattggcattgcgattccacatggctgggcgacagagtcatcaccaccagcacccgaacctgggccctgcccacctacaacaaccacctctacaagcaaatctccaacgggacctcgggaggcagcaccaacgacaacacctactttggctacagcaccccctgggggtattttgactttaacagattccactgccacttctcaccacgtgactggcagcgactcatcaacaacaactggggattccggcccaagagactcagcttcaagctcttcaacatccaggtcaaagaggtcacgcagaatgaaggcaccaagaccatcgccaataacctcaccagcaccatccaggtgtttacggactcggaataccagctgccgtacgtcctcggctctgcccaccagggctgccagcctccgttcccggcggacgtcttcatgattcctcagtacggctacctgactctcaacaacggtagtcaggccgtgggacgttcctccttctactgcctggagtacttcccctctcagatgctgagaacgggcaacaacttttccttcagctacactttcgaggacgtgcctttccacagcagctacgcgcacagccagagtttggacaggctgatgaatcctctcatcgaccagtacctgtactacctgtcaagaacccagtctacgggaggcacagcgggaacccagcagttgctgttttctcaggccgggcctagcaacatgtcggctcaggccagaaactggctgcctggaccctgctacagacagcagcgcgtctccacgacactgtcgcaaaacaacaacagcaactttgcctggactggtgccaccaagtatcatctgaacggcagagactctctggtgaatccgggcgtcgccatggcaaccaacaaggacgacgaggaccgcttcttcccatccagcggcatcctcatgtttggcaagcagggagctggaaaagacaacgtggactatagcaacgtgatgctaaccagcgaggaagaaatcaagaccaccaaccccgtggccacagaacagtatggcgtggtggctgataacctacagcagcaaaacaccgctcctattgtgggggccgtcaacagccagggagccttacctggcatggtctggcagaaccgggacgtgtacctgcagggtcctatttgggccaagattcctcacacagatggcaactttcacccgtctcctttaatgggcggctttggacttaaacatccgcctcctcagatcctcatcaaaaacactcctgttcctgcggatcctccaacagcgttcaaccaggccaagctgaattctttcatcacgcagtacagcaccggacaagtcagcgtggagatcgagtgggagccgcagaaggagaacagcaagcgctggaacccagagattcagtatacttccaactactacaaatctacaaatgtggactttgctgttaatactgagggtgtttactctgagcctcgccccattggcactcgttacctcacccgtaatctgtaa

SEQ ID NO: 5047 - protein, 738 aa, Adeno-associated virus
MVADGYLPDWLEDNLSEGIREWWDLKPGAPKPKANQQKQGDGRGLVLPGYKYLGPFNGLDKGEPVNAADAAALEHDKAYDQQLKAGDNPYLRYNHADAELQERLQEDTSFGGNLGRAVFQAKKRVLEPLGLVEEGAKTAPGKKRPVEPSPQRSPDSSTGIGKKGQQPARKRLNFGQTGDSESVPDPQPIGEPPAAPSSVGSGTMAAGGGAPMADNNEGADGVGSSSGNWHCDSTWLGDRVITTSTRTWALPTYNNHLYKQISNGTSGGSTNDNTYFGYSTPWGYFDFNRFHCHFSPRDWQRLINNNWGFRPKRLSFKLFNIQVKEVTQNEGTKTIANNLTSTIQVFTDSEYQLPYVLGSAHQGCQPPFPADVFMIPQYGYLTLNNGSQAVGRSSFYCLEYFPSQMLRTGNNFSFSYTFEDVPFHSSYAHSQSLDRLMNPLIDQYLYYLSRTQSTGGTAGTQQLLFSQAGPSNMSAQARNWLPGPCYRQQRVSTTLSQNNNSNFAWTGATKYHLNGRDSLVNPGVAMATNKDDEDRFFPSSGILMFGKQGAGKDNVDYSNVMLTSEEEIKTTNPVATEQYGVVADNLQQQNTAPIVGAVNSQGALPGMVWQNRDVYLQGPIWAKIPHTDGNFHPSPLMGGFGLKHPPPQILIKNTPVPADPPTAFNQAKLNSFITQYSTGQVSVEIEWEPQKENSKRWNPEIQYTSNYYKSTNVDFAVNTEGVYSEPRPIGTRYLTRNL

SEQ ID NO: 5048 - DNA, 2217 bp, Adeno-associated virus
  source 1..2217: mol_type = genomic DNA
atggctgccgatggttatcttccagattggctcgaggacaacctctctgagggcattcgcgagtggtgggacctgaaacctggagccccgaaacccaaagccaaccagcaaaagcaggacgacggccggggtctggtgcttcctggctacaagtacctcggacccttcaacggactcgacaagggggagcccgtcaacgcggcggacgcagcggccctcgagcacgacaaggcctacgaccagcagctcaaagcgggtgacaatccgtacctgcggtataatcacgccgacgccgagtttcaggagcgtctgcaagaagatacgtcttttgggggcaacctcgggcgagcagtcttccaggccaagaagcgggttctcgaacctctcggtctggttgaggaaggcgctaagacggctcctggaaagaagagaccggtagagccgtcaccacagcgttcccccgactcctccacgggcatcggcaagaaaggccagcagcccgccagaaagagactcaatttcggtcagactggcgactcagagtcagtccccgaccctcaacctatcggagaacctccagcagcgccctctagtgtgggatctggtacaatggctgcaggcggtggcgcaccaatggcagacaataacgaaggtgccgacggagtgggtagttcctcgggaaattggcattgcgattccacatggctgggcgacagagtcatcaccaccagcacccgaacctgggccctgcccacctacaacaaccacctctacaagcaaatctccaacgggacctcgggaggcagcaccaacgacaacacctactttggctacagcaccccctgggggtattttgactttaacagattccactgccacttctcaccacgtgactggcagcgactcatcaacaacaactggggattccggcccaagagactcagcttcaagctcttcaacatccaggtcaaagaggtcacgcagaatgaaggcaccaagaccatcgccaatagcctcaccagcaccatccaggtgtttacggactcggaataccagctgccgtacgtcctcggctctgcccaccagggctgcctgcctccgttcccggcggacgtcttcatgattcctcagtacggctacctgactcccaacaacggtagtcaggccgtgggacgttcctccttctactgcctggagtacttcccctctcagatgctgagaacgggcaacaacttttccttcagctacactttcgaggacgtgcctttccacagcagctacgcgcacagccagagtttggacaggctgatgaatcctctcatcgaccagtacctgtactacctgtcaagaacccagtctacgggaggcacagcgggaacccagcagttgctgtcttctcaggccgggcctagcaacatgtcggctcaggccagaaactggctgcctggaccctgctacagacagcagcgcgtctccacgacactgtcgcaaaacaacaacagcaactttgcctggactggtgccaccaagtatcatctgaacggcagagactctctggtgaatccgggcgtcgccatggcaaccaacaaggacgacgaggaccgcttcttcccatccagcggcatcctcatgtttggcaagcagggagctggaaaagacaacgtggactatagcaacgtgatgctaaccagcgaggaagaaatcaagaccaccaaccccgtggccacagaacagtatggcgtggtggctgataacctacagcagcaaaacaccgctcctattgtgggggccgtcaacagccagggagccttacctggcatggtctggcagaaccgggacgtgtacttgcagggtcctatttgggccaagattcctcacacagatggcaactttcacccgtctcctttaatgggcggctttggacttaaacatccgcctcctcagatcctcatcaaaaacactcctgttcctgcggatcctccaacagcgttcaaccaggccaagctgaattctttcatcacgcagtacagcaccggacaagtcagcgtggagatcgagtgggagctgcagaaggagaacagcaagcgctggaacccagagattcagtatacttccaactactacaaatctacaaatgtggactttgctgttaatactgagggtgtttactctgagcctcgccccattggcactcgttacctcacccgtaatctgtaa

SEQ ID NO: 5049 - protein, 738 aa, Adeno-associated virus
MAADGYLPDWLEDNLSEGIREWWDLKPGAPKPKANQQKQDDGRGLVLPGYKYLGPFNGLDKGEPVNAADAAALEHDKAYDQQLKAGDNPYLRYNHADAEFQERLQEDTSFGGNLGRAVFQAKKRVLEPLGLVEEGAKTAPGKKRPVEPSPQRSPDSSTGIGKKGQQPARKRLNFGQTGDSESVPDPQPIGEPPAAPSSVGSGTMAAGGGAPMADNNEGADGVGSSSGNWHCDSTWLGDRVITTSTRTWALPTYNNHLYKQISNGTSGGSTNDNTYFGYSTPWGYFDFNRFHCHFSPRDWQRLINNNWGFRPKRLSFKLFNIQVKEVTQNEGTKTIANSLTSTIQVFTDSEYQLPYVLGSAHQGCLPPFPADVFMIPQYGYLTPNNGSQAVGRSSFYCLEYFPSQMLRTGNNFSFSYTFEDVPFHSSYAHSQSLDRLMNPLIDQYLYYLSRTQSTGGTAGTQQLLSSQAGPSNMSAQARNWLPGPCYRQQRVSTTLSQNNNSNFAWTGATKYHLNGRDSLVNPGVAMATNKDDEDRFFPSSGILMFGKQGAGKDNVDYSNVMLTSEEEIKTTNPVATEQYGVVADNLQQQNTAPIVGAVNSQGALPGMVWQNRDVYLQGPIWAKIPHTDGNFHPSPLMGGFGLKHPPPQILIKNTPVPADPPTAFNQAKLNSFITQYSTGQVSVEIEWELQKENSKRWNPEIQYTSNYYKSTNVDFAVNTEGVYSEPRPIGTRYLTRNL

SEQ ID NO: 5050 - protein, 738 aa, Adeno-associated virus
MAADGYLPDWLEDNLSEGIREWWDLKPGAPKPKANQQKQDDGRGLVLPGYKYLGPFNGLDKGEPVNAADAAALEHDKAYDQQLKAGDNPYLRYNHADAEFQERLQEDTSFGGNLGRAVFQAKKRVLEPLGLVEEGAKTAPGKKRPVEPSPQRSPDSSTGIGKKGQQPARKRLNFGQTGDSESVPDPQPIGEPPAAPSSVGSGTMAAGGGAPMADNNEGADGVGSSSGNWHCDSTWLGDRVITTSTRTWALPTYNNHLYKQISNGTSGGSTNDNTYFGYSTPWGYFDFNRFHCHFSPRDWQRLINNNWGFRPKRLSFKLFNIQVKEVTQNEGTKTIANNLTSTIQVFTDSEYQLPYVLGSAHQGCLPPFPADVFMIPQYGYLTLNNGSQAVGRSSFYCLEYFPSQMLRTGNNFSFSYTFEDVPFHSSYVHSQSLDRLMNPLIDQYLYYLSRTQSTGGTAGTQQLLFSQAGPSNMSAQARNWLPGPCYRQQRVSTTLSQNNNSNFAWTGATKYHLNGRDSLVNSGVAMATNKDDEDRFFPSSGILMFGKQGAGKDNVDYSNVMLTSEEEIKTTNPVATEQYGVVADNLQQQNTAPIVGAVNSQGALPGMVWQNRDVYLQGPIWAKIPHTDGNFHPSPLMGGFGLKHPPPQILIKNTPVPADPPTAFNQAKLNSFITQYSTGQVSVEIEWELQKENSKRWNPEIQYTSNYYKSTNVDFAVNTEGVYSEPRPIGTRYPTRNL

SEQ ID NO: 5051 - DNA, 2217 bp, Adeno-associated virus
  source 1..2217: mol_type = genomic DNA
atggctgccgatggttatcttccagattggctcgaggacaacctctctgagggcattcgcgagtggtgggacctgaaacctggagccccgaaacccaaagccaaccagcaaaagcaggacgacggccggggtctggtgcttcctggctacaagtacctcggacccttcaacggactcgacaagggggagcccgtcaacgcggcggacgcagcggccctcgagcacgacaaggcctacgaccagcagctcaaagcgggtgacaatccgtacctgcggtataatcacgccgacgccgagtttcaggagcgtctgcaagaagatacgtcttttgggggcaacctcgggcgagcagtcttccaggccaagaagcgggttctcgaacctctcggtctggttgaggaaggcgctaagacggctcctggaaagaagagaccggtagagccgtcaccacagcgttcccccgactcctccacgggcatcggcaagaaaggccagcagcccgccagaaagagactcaatttcggtcagactggcgactcagagtcagtccccgaccctcaacctatcggagaacctccagcagcgccctctagtgtgggatctggtacaatggctgcaggcggtggcgcaccaatggcagacaataacgaaggtgccgacggagtgggtagttcctcgggaaattggcattgcgattccacatggctgggcgacagagtcatcaccaccagcacccgaacctgggccctgcccacctacaacaaccacctctacaagcaaatctccaacgggacctcgggaggcagcaccaacgacaacacctactttggctacagcaccccctgggggtattttgactttaacagattccactgccacttctcaccacgtgactggcagcgactcatcaacaacaactggggattccggcccaagagactcagcttcaagctcttcaacatccaggtcaaagaggtcacgcagaatgaaggcaccaagaccatcgccaataacctcaccagcaccatccaggtgtttacggactcggaataccagctgccgtacgtcctcggctctgcccaccagggctgcctgcctccgttcccggcggacgtcttcatgattcctcagtacggctacctgactctcaacaacggtagtcaggccgtgggacgttcctccttctactgcctggagtacttcccctctcagatgctgagaacgggcaacaacttttccttcagctacactttcgaggacgtgcctttccacagcagctacgtgcacagccagagtttggacaggctgatgaatcctctcatcgaccagtacctgtactacctgtcaagaacccagtctacgggaggcacagcgggaacccagcagttgctgttttctcaggccgggcctagcaacatgtcggctcaggccagaaactggctgcctggaccctgctacagacagcagcgcgtctccacgacactgtcgcaaaacaacaacagcaactttgcctggactggtgccaccaagtatcatctgaacggcagagactctctggtgaattcgggcgtcgccatggcaaccaacaaggacgacgaggaccgcttcttcccatccagcggcatcctcatgtttggcaagcagggagctggaaaagacaacgtggactatagcaacgtgatgctaaccagcgaggaagaaatcaagaccaccaaccccgtggccacagaacagtatggcgtggtggctgataacctacagcagcaaaacaccgctcctattgtgggggccgtcaacagccagggagccttacctggcatggtctggcagaaccgggacgtgtacctgcagggtcctatttgggccaagattcctcacacagatggcaactttcacccgtctcctttaatgggcggctttggacttaaacatccgcctcctcagatcctcatcaaaaacactcctgttcctgcggatcctccaacagcgttcaaccaggccaagctgaattctttcatcacgcagtacagcaccggacaagtcagcgtggagatcgagtgggagctgcagaaggagaacagcaagcgctggaacccagagattcagtatacttccaactactacaaatctacaaatgtggactttgctgttaatactgagggtgtttactctgagcctcgccccattggcactcgttaccccacccgtaatctgtaa

SEQ ID NO: 5052 - protein, 734 aa, Adeno-associated virus; identical to SEQ ID NO: 4948

SEQ ID NO: 5053 - DNA, 2214 bp, Adeno-associated virus
  source 1..2214: mol_type = genomic DNA
atggctgctgacggttatcttccagattggctcgaggacaacctctctgagggcattcgcgagtggtgggacctgaaacctggagccccgaaacccaaagccaaccagcagaagcaggacgacggccggggtctggtgcttcctggctacaagtacctcggacccttcaacggactcgacaagggggagcccgtcaacgcggcggacgcagcggccctcgagcacgacaaggcctacgaccagcagctcaaagcgggtgacaatccgtacctgcggtataaccacgccgacgccgagtttcaggagcgtctgcaagaagatacgtcttttgggggcaacctcgggcgagcagtcttccaggccaagaagcgggttctcgaacctctcggtctggttgaggaagctgctaagacggctcctggaaagaagagaccggtagaaccgtcacctcagcgttcccccgactcctccacgggcatcggcaagaaaggccagcagcccgctagaaagagactgaactttgggcagactggcgactcagagtcagtccccgaccctcaacctctcggagaaccaccagcaggcccctctggtctgggatctggtacaatggctgcaggcggtggcgctccaatggcagacaataacgaaggcgccgacggagtgggtaatgcctcaggaaattggcattgcgattccacatggctgggcgacagagtcatcaccaccagcacccgaacctgggctttgcccacctacaacaaccacctctacaagcaaatctccagtcagtcagcaggtagcaccaacgacaacgtctacttcggctacagcaccccctgggggtattttgacttcaacagattccactgtcacttctcaccacgtgactggcagcgactcatcaacaacaactggggattccggcccaagaagctcaacttcaagctcttcaacatccaagtcaaggaggtcacgacgaatgacggcgtcacgaccatcgctaataaccttaccagcacggttcaggtcttttcggactcggagtaccagctgccgtacgtcctcggctctgcccaccagggctgcctgcctccgttcccggcggacgtcttcatgattcctcagtacggctacctgactctgaacaatggcagccaatcggtgggacgttcatccttctactgcctggaatacttcccttctcaggtgctgagaacgggtaacaacttcaccttcagttacaccttcgaggacgtgcctttccacagcagctacgcgcacagccagagcctagaccggctgatgaatcccctcatcgaccagtacctgtattacctggctagaacacagagtaacccaggaggcacatctggcaatcgggaactgcagttttaccagggcgggccttccaccatggccgaacaagccaagaactggttacctggaccttgcttccggcaacaaagagtttccaaaacactggatcaaaacaacaacagcaactttgcttggactggtgccaccaaatatcacctgaacggcagaaactcattggtgaatcctggtgtcgccatggcaactcacaaggacgacgaggaccgctttttcccatccagcggagtcctgatttttggaaaaactggagcaaccaacaagactacattggaaaacgtgttaatgacaaatgaagaagaaattcgtcctactaatcctgtggccacagaagaatacgggatagtcagcagcaatttacaagcggccaatactgcagcccagacacaagttgtcaacaaccagggagccttacctggcatggtctggcagaaccgggacgtgtacctgcagggtcccatctgggccaaaattcctcacacagacggcaactttcacccgtctccgctgatgggcggctttggactgaagcatccgcctcctcagatcctgatcaaaaacactcctgttcctgctaatcccccggaggtgtttacgcctgccaagtttgcttctttcatcacacagtacagcaccggccaggtcagcgtggagatcgagtgggagctgcagaaggagaacagcaagcgctggaacccagagattcagtatacctccaattttgacaaacagactggtgtggactttgccgttgacagccagggtgtttattctgagcctcgccccattggtactcgttacctcacccgtaatctgtaa

SEQ ID NO: 5054 - protein, 737 aa, Adeno-associated virus
MAADGYLPDWLEDNLSEGIREWWDLKPGAPKPKANQQKQDDGRGLVLPGYKYLGPFNGLDKGEPVNAADAAALEHDKAYDQQLKAGDNPYLRYNHADAEFQERLQEDTSFGGNLGRAVFQAKKRVLEPLGLVEEAAKTAPGKKRPVEPSPQRSPDSSTGIGKKGQQPARKRLNFGQTGDSESVPDPQPLGEPPAGPSGLGSGTMAAGGGAPMADNNEGADGVGNASGNWHCDSTWLGDRVITTSTRTWALPTYNNHLYKQISSQSAGSTNDNVYFGYSTPWGYFDFNRFHCHFSPRDWQRLINNNWGFRPKKLNFKLFNIQVKEVTTNDGVTTIANNLTSTVQVFSDSEYQLPYVLGSAHQGCLPPFPADVFMIPQYGYLTLNNGSQSVGRSSFYCLEYFPSQVLRTGNNFTFSYTFEDVPFHSSYAHSQSLDRLMNPLIDQYLYYLARTQSNPGGTSGNRELQFYQGGPSTMAEQAKNWLPGPCFRQQRVSKTLDQNNNSNFAWTGATKYHLNGRNSLVNPGVAMATHKDDEDRFFPSSGVLIFGKTGATNKTTLENVLMTNEEEIRPTNPVATEEYGIVSSNLQAANTAAQTQVVNNQGALPGMVWQNRDVYLQGPIWAKIPHTDGNFHPSPLMGGFGLKHPPPQILIKNTPVPANPPEVFTPAKFASFITQYSTGQVSVEIEWELQKENSKRWNPEIQYTSNFDKQTGVDFAVDSQGVYSEPRPIGTRYLTRNL

SEQ ID NO: 5055 - DNA, 2214 bp, Adeno-associated virus
  source 1..2214: mol_type = genomic DNA
atggctgccgatggttatcttccagattggctcgaggacaacctctctgagggcattcgcgagtggtgggacctgaaacctggagccccgaaacccaaagccaaccagcaaaagcaggacgacggccggggtctggtgcttcctggctacaagtacctcggacccttcaacggactcgacaagggggagcccgtcaacgcggcggacgcagcggccctcgagcacgacaaggcctacgaccagcagctcaaagcgggtgacaatccgtacctgcggtataatcacgccgacgccgagtttcaggagcgtctgcaagaagatacgtcttttgggggcaacctcgggcgagcagtcttccaggccaagaagcgggttctcgaacctctcggtctggttgaggaaggcgctaagacggctcctggaaagaagagaccggtagagccgtcaccacagcgttcccccgactcctccacgggcatcggcaagaaaggccagcagcccgccagaaagagactcaatttcggtcagactggcgactcagagtcagtccccgaccctcaacctatcggagaacctccagcagcgccctctagtgtgggatctggtacaatggctgcaggcggtggcgcaccaatggcagacaataacgaaggtgccgacggagtgggtagttcctcgggaaattggcattgcgattccacacggctgggcgacagagtcatcaccaccagcacccggacctgggctttgcccacctacaacaaccacctctacaagcaaatctccagtcagtcagcaggtagcaccaacgacaacgtctacttcggctacagcaccccctgggggtattttgacttcaacagattccactgtcacttctcaccacgtgactggcagcggctcatcaacaacaactggggattccggcccaagaagctcaacttcaagctgttcaacatccaggtcaaggaggtcacaacgaatgacggcgtcacgaccatcgccaataaccttaccagcacggttcaggtcttttcggactcggaataccagctgccctacgtcctcggctccgcacaccagggctgcctgcctccgttcccggcggacgtcttcatgattccccagtacggctacctgactctgaacaatggcagccaatcggtgggtcgttcctctttctactgcctggaatatttcccttctcaaatgctgagaacgggcaacaacttcaccttcagctacaccttcgaggacgttcccttccacagcagctacgcacacagccagagcctggaccggctgatgaatcctcttatcgaccagtacctgtattacctggccagaacacagagcaacgcaggaggcacagctggcaatcgggaactgcagttttatcagggcgggcctaccaccatggccgaacaagccaaaaactggctgcctggaccttgcttccggcaacgaagagtctccaagacgctggatcaaaacaacaacagcaactttgcttggactggtgccaccaaataccatctaaatggaagaaattcattggttaatcccggtgtcgccatggcaacccacaaggacgacgaggaacgcttcttcccttcgagcggagtcctgatttttggaaaaactggagcagctaataagactacactggaaaatgtgttaatgacaaatgaagaggaaattcgtcctaccaacccggtagccaccgaggaatacgggactgttagcagcaacctgcaggcggctaacactgcagcccagacacaagttgtcaacaaccagggagccttacctggtatggtctggcagaaccgggacgtgtacctgcagggtcccatctgggccaagattcctcacacggacggcaactttcacccgtctccgctgatgggcggctttggactgaagcatccgcctcctcagatcctgatcaaaaacactcctgttcctgctaatcccccggaggtgtttacgcctgccaagtttgcttctttcatcacacagtacagcaccggccaggtcagcgtggagatcgagtgggagctgcagaaggagaacagcaagcgctggaacccagagattcagtatacctccaattttgacaaacagactggtgtggactttgccgttgacagccagggtgtttattctgagcctcgccccattggtactcgttacctcacccgtaatctgtaa

SEQ ID NO: 5056 - protein, 737 aa, Adeno-associated virus
MAADGYLPDWLEDNLSEGIREWWDLKPGAPKPKANQQKQDDGRGLVLPGYKYLGPFNGLDKGEPVNAADAAALEHDKAYDQQLKAGDNPYLRYNHADAEFQERLQEDTSFGGNLGRAVFQAKKRVLEPLGLVEEGAKTAPGKKRPVEPSPQRSPDSSTGIGKKGQQPARKRLNFGQTGDSESVPDPQPIGEPPAAPSSVGSGTMAAGGGAPMADNNEGADGVGSSSGNWHCDSTRLGDRVITTSTRTWALPTYNNHLYKQISSQSAGSTNDNVYFGYSTPWGYFDFNRFHCHFSPRDWQRLINNNWGFRPKKLNFKLFNIQVKEVTTNDGVTTIANNLTSTVQVFSDSEYQLPYVLGSAHQGCLPPFPADVFMIPQYGYLTLNNGSQSVGRSSFYCLEYFPSQMLRTGNNFTFSYTFEDVPFHSSYAHSQSLDRLMNPLIDQYLYYLARTQSNAGGTAGNRELQFYQGGPTTMAEQAKNWLPGPCFRQRRVSKTLDQNNNSNFAWTGATKYHLNGRNSLVNPGVAMATHKDDEERFFPSSGVLIFGKTGAANKTTLENVLMTNEEEIRPTNPVATEEYGTVSSNLQAANTAAQTQVVNNQGALPGMVWQNRDVYLQGPIWAKIPHTDGNFHPSPLMGGFGLKHPPPQILIKNTPVPANPPEVFTPAKFASFITQYSTGQVSVEIEWELQKENSKRWNPEIQYTSNFDKQTGVDFAVDSQGVYSEPRPIGTRYLTRNL

SEQ ID NO: 5057 - DNA, 2208 bp, Adeno-associated virus
  source 1..2208: mol_type = genomic DNA
atggctgccgatggttatcttccagattggctcgaggacactctctctgaaggaataagacagtggtggaagctcaaacctggcccaccaccaccaaagcccgcagagcggcataaggacgacagcaggggtcttgtgcttcctgggtacaagtacctcggacccttcaacggactcgacaagggggagccggtcaacgaggcagacgccgcggccctcgagcacgacaaggcctacgaccggcagctcgacagcggagacaacccgtacctcaagtacaaccacgccgacgcggagtttcaggagcgtcttaaagaagatacgtcttttgggggcaacctcggacgagcagtcttccaggcgaaaaagagggttcttgaacctctgggcctggttgaggaacctgttaagacggctccgggaaaaaagaggccggtagagcactctcctgcggagccagactcctcctcgggaaccggaaaagcgggccagcagcctgcaagaaaaagattgaattttggtcagactggagacgcagactccgtacctgacccccagcctctcggacagccaccagcagccccctctggtttgggatctactacaatggctacaggcagtggcgcaccaatggcagacaataacgagggtgccgatggagtgggtaattcttcaggaaattggcattgcgattcccaatggctgggcgacagagtcatcaccaccagcacccgaacctgggcccagcccacctacaacaaccacctctacaagcaaatctcaagccaatcaggagcctcaaacgacaaccactactttggctacagcaccccttgggggtattttgacttcaacagattccactgccacttttcaccacgtgactggcaaagactcatcaacaacaactggggattccgacccaagagactcaacttcaagctctttaacattcaagtcaaagaggtcacgcagaatgacggtacgacgacgattgccaataaccttaccagcacggttcaggtgtttactgactcggagtaccagctcccgtacgtcctcgggtcggcgcatcaaggatgcctcccgccgtttccagcggacgtcttcatggtcccacagtatggatacctcaccctgaacaacgggagtcaggcggtaggacgctcttccttttactgcctggagtactttccttctcagatgcttcgtactggaaacaactttcagttcagctacacctttgaagacgttcctttccacagcagctacgctcacagccagagtctggatcggctgatgaatcctctgatcgaccagtacctgtattatctgaacaaaacacaatcaaatagtggagctcttcagcagtctcggctactgtttagtcaagctggacccaccagcatgtctcttcaagctaaaaactggctacctggaccttgctacagacagcagcgtctgtcaaagcaggcaaacgacaacaacaacagcaactttccctggactgcggctacaaagtaccacctaaatggccgggactcgttggttaatccaggaccagctatggccagtcacaaagacgatgaagaaaagtttttccccatgcatggaaccctgatatttggtaaacaaggaacaaatgctaacgacgcggatttggacaatgtcatgattacagatgaagaagaaatccgcaccaccaatcccgtggctacggagcagtacggatatgtgtcaaataatttgcaaaactcaaatactggtccaactactggaactgtcaatcaccgaggagcgttacctggcatggtgtggcaggatcgagacgtgtacctgcagggacccatttgggccaagattcctcacaccgatggacactttcatccttctccactgatgggaggttttgggctcaaacacccgcctcctcagatcatgatcaaaaacactcccgttccagccaatcctcccacaaacttcagttctgccaagtttgcttctttcatcacacagtattccacggggcaggtcagcgtggagatcgagtgggagctgcagaaagagaacagcaaacgctggaatcccgaaattcagtacacttccaactacaacaaatctgttaatgtggactttactgtggacactaatggcgtgtattcagagcctcgccccattggcaccagatacctgactcgtaatctgtaa

SEQ ID NO: 5058 - protein, 735 aa, Adeno-associated virus
MAADGYLPDWLEDTLSEGIRQWWKLKPGPPPPKPAERHKDDSRGLVLPGYKYLGPFNGLDKGEPVNEADAAALEHDKAYDRQLDSGDNPYLKYNHADAEFQERLKEDTSFGGNLGRAVFQAKKRVLEPLGLVEEPVKTAPGKKRPVEHSPAEPDSSSGTGKAGQQPARKRLNFGQTGDADSVPDPQPLGQPPAAPSGLGSTTMATGSGAPMADNNEGADGVGNSSGNWHCDSQWLGDRVITTSTRTWAQPTYNNHLYKQISSQSGASNDNHYFGYSTPWGYFDFNRFHCHFSPRDWQRLINNNWGFRPKRLNFKLFNIQVKEVTQNDGTTTIANNLTSTVQVFTDSEYQLPYVLGSAHQGCLPPFPADVFMVPQYGYLTLNNGSQAVGRSSFYCLEYFPSQMLRTGNNFQFSYTFEDVPFHSSYAHSQSLDRLMNPLIDQYLYYLNKTQSNSGALQQSRLLFSQAGPTSMSLQAKNWLPGPCYRQQRLSKQANDNNNSNFPWTAATKYHLNGRDSLVNPGPAMASHKDDEEKFFPMHGTLIFGKQGTNANDADLDNVMITDEEEIRTTNPVATEQYGYVSNNLQNSNTGPTTGTVNHRGALPGMVWQDRDVYLQGPIWAKIPHTDGHFHPSPLMGGFGLKHPPPQIMIKNTPVPANPPTNFSSAKFASFITQYSTGQVSVEIEWELQKENSKRWNPEIQYTSNYNKSVNVDFTVDTNGVYSEPRPIGTRYLTRNL

SEQ ID NO: 5059 - DNA, 2217 bp, Adeno-associated virus
  source 1..2217: mol_type = genomic DNA
atggctgccgatggttatcttccagattggctcgaggacaacctctctgagggcattcgcgagtggtgggcgctgaaacctggagccccgaagcccaaagccaaccagcaaaagcaggacgacggccggggtctggtgcttcctggctacaagtacctcggacccttcaacggactcgacaagggggagcccgtcaacgcggcggacgcagcggccctcgagcacgacaaggcctacgaccagcagctgcaggcgggtgacaatccgtacctgcggtataatcacgccgacgccgagtttcaggagcgtctgcaagaagatacgtcttttgggggcaacctcgggcgagcagtcttccaggccaagaagcgggttctcgaacctctcggtctggttgaggaaggcgctaagacggctcctggaaagaagagaccggtagagccgtcaccacagcgttcccccgactcctccacgggcatcggcaagaaaggccagcagcccgccagaaagagactcaatttcggtcagactggcgactcagagtcagtccccgaccctcaacctatcggagaacctccagcagcgccctctagtgtgggatctggtacaatggctgcaggcggtggcgcgccaatggcagacaataacgaaggtgccgacggagtgggtagttcctcgggaaattggcattgcgattccacatggctgggcgacagagtcatcaccaccagcacccgaacctgggccctgcccacctacaacaaccacctctacaagcaaacctccaacgggacctcgggaggcagcaccaacgacaacacctactttggctacagcaccccctgggggtattttgactttaacagattccactgccacttctcaccacgtgactggcagcgactcatcaacaacaactggggattccggcccaagagactcagcttcaagctcttcaacatccaggtcaaagaggtcacgcagaatgaaggcaccaagaccatcgccaataacctcaccagcaccatccaggtgtttacggactcggaataccagctgccgtacgtcctcggctctgcccaccagggctgcctgcctccgttcccggcggacgtcttcatgattcctcagtacggctacctgactctcaacaacggtagtcaggccgtgggacgttcctccttctactgcctggagtacttcccctctcagatgctgagaacgggcaacaacttttccttcagctacactttcgaggacgtgcctttccacagcagctacgcgcacagccagagtttggacaggctgatgaatcctctcatcgaccagtacctgtactacctgtcaagaacccagtctacgggaggcacagcgggaacccagcagttgctgttttctcaggccgggcctagcaacatgtcggctcaggccagaaactggctgcctggaccctgctacagacagcagcgcgtctccacgacactgtcgcaaaacaacaacagcaactttgcctggactggtgccaccaagtatcatctgaacggcagagactctctggtgaatccgggcgtcgccatggcaaccaacaaggacgacgaggaccgcttcttcccatccagcggcatcctcatgtttggcaagcagggagctggaaaagacaacgtggactatagcaacgtgatgctaaccagcgaggaagaaatcaagaccaccaaccccgtggccacagaacagtatggcgtggtggctgataacctacagcagcaaaacaccgctcctattgtgggggccgtcaacagccagggagccttacctggcatggtctggcagaaccgggacgtgtacctgcagggtcctatttgggccaagattcctcacacagatggcaactttcacccgtctcctttaatgggcggctttggacttaaacatccgcctcctcagatcctcatcaaaaacactcctgttcctgcggatcctccaacagcgttcaaccaggccaagctgaattctttcatcacgcagtacagcaccggacaagtcagcgcggagatcgagtgggagctgcagaaggagaacagcaagcgctggaacccagagattcagtatacttccaactactacaaatctacaaatgtggactttgctgttaatactgagggtgtttactctgagcctcgccccattggcactcgttacctcacccgtaatctgtaa

SEQ ID NO: 5060 - protein, 738 aa, Adeno-associated virus
MAADGYLPDWLEDNLSEGIREWWALKPGAPKPKANQQKQDDGRGLVLPGYKYLGPFNGLDKGEPVNAADAAALEHDKAYDQQLQAGDNPYLRYNHADAEFQERLQEDTSFGGNLGRAVFQAKKRVLEPLGLVEEGAKTAPGKKRPVEPSPQRSPDSSTGIGKKGQQPARKRLNFGQTGDSESVPDPQPIGEPPAAPSSVGSGTMAAGGGAPMADNNEGADGVGSSSGNWHCDSTWLGDRVITTSTRTWALPTYNNHLYKQTSNGTSGGSTNDNTYFGYSTPWGYFDFNRFHCHFSPRDWQRLINNNWGFRPKRLSFKLFNIQVKEVTQNEGTKTIANNLTSTIQVFTDSEYQLPYVLGSAHQGCLPPFPADVFMIPQYGYLTLNNGSQAVGRSSFYCLEYFPSQMLRTGNNFSFSYTFEDVPFHSSYAHSQSLDRLMNPLIDQYLYYLSRTQSTGGTAGTQQLLFSQAGPSNMSAQARNWLPGPCYRQQRVSTTLSQNNNSNFAWTGATKYHLNGRDSLVNPGVAMATNKDDEDRFFPSSGILMFGKQGAGKDNVDYSNVMLTSEEEIKTTNPVATEQYGVVADNLQQQNTAPIVGAVNSQGALPGMVWQNRDVYLQGPIWAKIPHTDGNFHPSPLMGGFGLKHPPPQILIKNTPVPADPPTAFNQAKLNSFITQYSTGQVSAEIEWELQKENSKRWNPEIQYTSNYYKSTNVDFAVNTEGVYSEPRPIGTRYLTRNL

SEQ ID NO: 5061 - DNA, 2217 bp, Adeno-associated virus
  source 1..2217: mol_type = genomic DNA
atggctgctgacggttatcttccagattggctcgaggacaacctctctgagggcattcgcgagtggtgggacctgaaacctggagcccccaagcccaaggccaaccagcagaagcaggacgacggccggggtctggtgcttcctggctacaagtacctcggacccttcaacggactcgacaagggggagcccgtcaacgcggcggacgcagcggccctcgagcacgacaaggcctacgaccagcagctcaaagcgggtgacaatccgtacctgcggtataatcacgccgacgccgagtttcaggagcgtctgcaagaagatacgtcttttgggggcaacctcgggcgagcagtcttccaggccaagaagcgggttctcgaacctctcggtctggttgaggaagctgctaagacggctcctggaaagaagagaccggtagaaccgtcacctcagcgttcccccgactcctccacgggcatcggcaagaaaggccagcagcccgctagaaagagactgaactttgggcagactggcgactcagagtcagtccccgaccctcaaccaatcggagaacctccagcagcgccctctagtgtgggatctggtacaatggccgcaggcggtggcgcaccaatggcagacaataacgaaggtgccgacggagtgggtagttcctcgggaaattggcattgcgattccacatggctgggcgacagagtcatcaccaccagcacccgaacctgggccctgcccacctacaacaaccacctctacaagcaaatctccaacgggacctcgggaggcagcaccaacgacaacacctactttggctacagcaccccctgggggtattttgactttaacagattccactgccacttctcaccacgtgactggcagcgactcatcaacaacaactggggattccggcccaagagactcagcttcaagctcttcaacatccaggtcaaagaggtcacgcagaatgaaggcaccaagaccatcgccaataacctcaccagcaccatccaggtgtttacggactcggaataccagctgccgtacgtcctcggctctgcccaccagggctgcctgcctccgttcccggcggacgtcttcatgattcctcagtacggctacctgactctcaacaacggtagtcaggccgtgggacgttcctccttctactgcctggagtacttcccctctcagatgctgagaacgggcaacaacttttccttcagctacactttcgaggacgtgcctttccacagcagctacgcgcacagccagagtttggacaggctgatgaatcctctcatcgaccagtacctgtactacctgtcaagaacccagtctacgggaggcacagcgggaacccagcagctgctgttttctcaggccgggcctagcaacatgtcggctcaggccagaaactggctgcctggaccctgctacagacagcagcgcgtctccacgacactgtcgcaaaacaacaacagcaactttgcctggactggtgccaccaagtatcatctgaacggcagagactctctggtgaatccgggcgtcgccatggcaaccaacaaggacgacgaggaccgcttcttcccatccagcggcatcctcatgtttggcaagcagggagctggaaaagacaacgtggactatagcaacgtgatgctaaccagcgaggaagaaatcaagaccaccaaccccgtggccacagaacagtatggcgtggtggctgataacctacagcagcaaaacaccgctcctattgtgggggccgtcaacagccagggagccttacctggcatggtctggcagaaccgggacgtgtacctgcagggtcctatttgggccaagattcctcacacagatggcaactttcacccgtctcctttaatgggcggctttggacttaaacatccgcctcctcagatcctcatcaaaagcactcctgttcctgcggatcctccaacagcgttcaaccaggccaagctgaattctttcatcacgcagtacagcaccggacaagtcagcgtggagatcgagtgggagctgcagaaggagaacagcaagtgctggaacccagagattcagtatacttccaactactacaaatctacaaatgtggactttgctgttaatactgagggtgtttactctgagcctcgccccattggcactcgttacctcacccgtaatctgtaa

SEQ ID NO: 5062 - protein, 738 aa, Adeno-associated virus
MAADGYLPDWLEDNLSEGIREWWDLKPGAPKPKANQQKQDDGRGLVLPGYKYLGPFNGLDKGEPVNAADAAALEHDKAYDQQLKAGDNPYLRYNHADAEFQERLQEDTSFGGNLGRAVFQAKKRVLEPLGLVEEAAKTAPGKKRPVEPSPQRSPDSSTGIGKKGQQPARKRLNFGQTGDSESVPDPQPIGEPPAAPSSVGSGTMAAGGGAPMADNNEGADGVGSSSGNWHCDSTWLGDRVITTSTRTWALPTYNNHLYKQISNGTSGGSTNDNTYFGYSTPWGYFDFNRFHCHFSPRDWQRLINNNWGFRPKRLSFKLFNIQVKEVTQNEGTKTIANNLTSTIQVFTDSEYQLPYVLGSAHQGCLPPFPADVFMIPQYGYLTLNNGSQAVGRSSFYCLEYFPSQMLRTGNNFSFSYTFEDVPFHSSYAHSQSLDRLMNPLIDQYLYYLSRTQSTGGTAGTQQLLFSQAGPSNMSAQARNWLPGPCYRQQRVSTTLSQNNNSNFAWTGATKYHLNGRDSLVNPGVAMATNKDDEDRFFPSSGILMFGKQGAGKDNVDYSNVMLTSEEEIKTTNPVATEQYGVVADNLQQQNTAPIVGAVNSQGALPGMVWQNRDVYLQGPIWAKIPHTDGNFHPSPLMGGFGLKHPPPQILIKSTPVPADPPTAFNQAKLNSFITQYSTGQVSVEIEWELQKENSKCWNPEIQYTSNYYKSTNVDFAVNTEGVYSEPRPIGTRYLTRNL

SEQ ID NO: 5063 - protein, 738 aa, Adeno-associated virus
MAADGYLPDWLEDNLSEGIREWWDLKPGAPKPKANQQKQDDGRGLVLPGYKYLGPFNGLDKGEPVNAADAAALEHDKAYDQQLKAGDNPYLRYNHADAEFQERLQEDTSFGGNLGRAVFQAKKRVLEPLGLVEEAAKTAPGKKRPVEPSPQRSPDSSTGIGKKGQQPARKRLNFGQTGDSESVPDPQPIGEPPAAPSSVGSGTMAAGGGAPMADNNEGADGVGSSSGNWHCDSTWLGDRVITTSTRTWALPTYNNHLYKQISNGTSGGSTNDNTYFGYSTPWGYFDFNRFHCHFSPRDWQRLINNNWGFRPKRLSFKLFNIQVKEVTQNEGTKTIANNLTSTIQVFTDSEYQLPYVLGSAHQGCLPPFPADVFMIPQYGYLTLNNGSQAVGRSSFYCLEYFPSQMLRTGNNFSFSYTFEDVPFHSSYAHSQSLDRLMNPLIDQYLYYLSRTQSTGGTAGTQQLLFSQAGPSNMSAQARNWLPGPCYRQQRVSTTLSQNNNSNFAWTGATKYHLNGRDSLVNPGVAMATNKDDEDRFFPSSGILMFGKQGAGKDNVDYSNVMLTSEEEIKTTNPVATEQYGVVADNLQQQNTAPIVGAVNSQGALPGMVWQNRDVYLQGPIWAKIPHTDGNFHPSPLMGGFGLKHPPPQILIKSTPVPADPPTAFNQAKLNSFITQYSTGQVSVEIEWELQKENSKRWNPEIQYTSNYYKSTNVDFAVNTEGVYSEPRPIGTRYLTRNL

SEQ ID NO: 5064 - DNA, 2217 bp, Adeno-associated virus
  source 1..2217: mol_type = genomic DNA
atggctgctgacggttatcttccagattggctcgaggacaacctctctgagggcattcgcgagtggtgggacctgaaacctggagcccccaagcccaaggccaaccagcagaagcaggacgacggccggggtctggtgcttcctggctacaagtacctcggacccttcaacggactcgacaagggggagcccgtcaacgcggcggacgcagcggccctcgagcacgacaaggcctacgaccagcagctcaaagcgggtgacaatccgtacctgcggtataaccacgccgacgccgagtttcaggagcgtctgcaagaagatacgtcttttgggggcaacctcgggcgagcagtcttccaggccaagaagcgggttctcgaacctctcggtctggttgaggaagctgctaagacggctcctggaaagaagagaccggtagaaccgtcacctcagcgttcccccgactcctccacgggcatcggcaagaaaggccagcagcccgctagaaagagactgaactttgggcagactggcgactcagagtcagtccccgaccctcaaccaatcggagaaccaccagcaggcccctctggtctgggatctggtacaatggctgcaggcggtggcgcaccaatggctgacaataacgagggcgccgacggagtgggtaatgcctcaggaaattggcattgcgattccacatggctgggcgacagagtcatcaccaccagcacccgaacctgggctttgcccacctacaacaaccacctctacaagcaaatctccagtcagtcagcaggtagcaccaacgacaacgtctacttcggctacagcaccccctgggggtattttgacttcaacagattccactgtcacttctcaccacgtgactggcagcggctcatcaacaacaactggggattccggcccaagaagctcaacttcaagctgttcaacatccaggtcaaggaggtcacaacgaatgacggcgtcacgaccatcgccaataaccctaccagcacggttcaggtcttttcggactcggaataccagctgccctacgtcctcggctccgcacaccagggctgcctgcctccgttcccggcggacgtcttcatgattccccagtacggctacctgactctgaacaatggcagccaatcggtgggtcgttcctctttctactgcctggaatatttcccttctcaaatgctgagaacgggcaacaacttcaccttcagctacaccttcgaggacgttcccttccacagcagctacgcacacagccagagcctggaccggctgatgaatcctcttatcgaccagtacctgtattacctggccagaacacagagcaacgcaggaggcacagctggcaatcgggaactgcagttttatcagggcgggcctaccaccatggccgaacaagccaaaaactggctgcctggaccctgctacagacagcagcgcgtctccacgacactgtcgcaaaacaacaacagcaactttgcctggactggtgccaccaagtatcatctgaacggcagagactctctggtgaatccgggcgtcgccatggcaaccaacaaggacgacgaggaccgcttcttcccatccagcggcatcctcatgtttggcaagcagggagctggaaaagacaacgtggactatagcaacgtgatgctaaccagcgaggaagaaatcaagaccaccaaccccgtggccacagaacagtatggcgtggtggctgataacctacagcagcaaaacaccgctcctattgtgggggccgtcaacagccagggagccttacctggcatggtctggcagaaccgggacgtgtacctgcagggtcctatttgggccaagattcctcacacagatggcaactttcacccgtctcctttaatgggcggctttggacttaaacatccgcctcctcagatcctcatcaaaaacactcctgttcctgcggatcctccaacagcgttcaaccaggccaagctgaattctttcatcacgcagtacagcaccggacaagtcagcgtggagatcgagtgggagctgcagaaggagaacagcaagcgctggaacccagagattcagtatacttccaactactacaaatctacaaatgtggactttgctgttaatactgagggtgtttactctgagcctcgccccattggcactcgttacctcacccgtaatctgtaa

SEQ ID NO: 5065 - protein, 738 aa, Adeno-associated virus
MAADGYLPDWLEDNLSEGIREWWDLKPGAPKPKANQQKQDDGRGLVLPGYKYLGPFNGLDKGEPVNAADAAALEHDKAYDQQLKAGDNPYLRYNHADAEFQERLQEDTSFGGNLGRAVFQAKKRVLEPLGLVEEAAKTAPGKKRPVEPSPQRSPDSSTGIGKKGQQPARKRLNFGQTGDSESVPDPQPIGEPPAGPSGLGSGTMAAGGGAPMADNNEGADGVGNASGNWHCDSTWLGDRVITTSTRTWALPTYNNHLYKQISSQSAGSTNDNVYFGYSTPWGYFDFNRFHCHFSPRDWQRLINNNWGFRPKKLNFKLFNIQVKEVTTNDGVTTIANNPTSTVQVFSDSEYQLPYVLGSAHQGCLPPFPADVFMIPQYGYLTLNNGSQSVGRSSFYCLEYFPSQMLRTGNNFTFSYTFEDVPFHSSYAHSQSLDRLMNPLIDQYLYYLARTQSNAGGTAGNRELQFYQGGPTTMAEQAKNWLPGPCYRQQRVSTTLSQNNNSNFAWTGATKYHLNGRDSLVNPGVAMATNKDDEDRFFPSSGILMFGKQGAGKDNVDYSNVMLTSEEEIKTTNPVATEQYGVVADNLQQQNTAPIVGAVNSQGALPGMVWQNRDVYLQGPIWAKIPHTDGNFHPSPLMGGFGLKHPPPQILIKNTPVPADPPTAFNQAKLNSFITQYSTGQVSVEIEWELQKENSKRWNPEIQYTSNYYKSTNVDFAVNTEGVYSEPRPIGTRYLTRNL

SEQ ID NO: 5066 - DNA, 2208 bp, Adeno-associated virus
  source 1..2208: mol_type = genomic DNA
atggctgccgatggttatcttccagattggctcgaggacaacctctctgagggcattcacgagtggtgggacccgaaacctggagccccgaaacccaaagccaaccagcaaaagcaggacgacggccggggtctggtgcttcctggctacaagtacctcggacccttcaacggactcgacaagggggagcccgtcaacgcggcggacgcagcggccctcgagcacgacaaggcctacgaccagcagctcaaagcgggtgacaatccgtacctgcggtataatcacgccgacgccgagtttcaggagcgtctgcaagaagatacgtcttttgggggcaacctcgggcgagcagtcttccaggccaagaagcgggttctcgaacctctcggtctggttgaggaaggcgctaagacggctcctggaaagaagagaccggtagagccgtcaccacagcgttcccccgactcctccacgggcatcggcaagaaaggccagcagcccgccagaaagagactcaatttcggtcagactggcgactcagagtcagtccccgaccctcaacctatcggagaacctccagcagcgccctctagtgtgggatctggtacaatggctgcaggcggtggcgcaccaatggcagacaataacgaaggtgccgacggagtgggtagttcctcgggaaattggcattgcgattccacatggctgggcgacagagtcatcaccaccagcacccgaacctgggccctgcccacccacaacaaccacctctacaagcaaatctccaacgggacctcgggaggcagcaccaacgacaacgtctacttcggctacagcaccccctgggggtattttgacttcaacagattccactgtcacttctcaccacgtgaccggcagcgactcatcaacaacaactggggattccggcccaagagactcagcttcaagctcttcaacatccaggtcaaagaggtcacgcagaatgaaggcaccaagaccatcgccaataacctcaccagcaccatccaggtgtttacggactcggaataccagctgccgtacgtcctcggctctgcccaccagggctgcctgcctccgttcccggcggacgtcttcatgattcctcagtacggctacctgactctcaacaacggtagtcaggccgtgggacgttcctccttctactgcctggagtacttcccctctcagatgctgagaacgggcaacaacttttccttcagctacactttcgaggacgtgcctttccacagcagctacgcgcacagccagagtttggacaggctgatgaatcctctcatcgaccagtacctgtactacctgtcaagaacccagtctacggaaggcacagcgggaacccagcagttgctgttttctcaggccgggcctagcaacatgtcggctcaggccagaaactggctgcctggaccctgctacagacagcagcgcgtctccacgacactgtcgcaaaacaacaacagcaactttgcctggactggtgccaccaagtatcatctgaacggcagagactctctggtgaatccgggcgtcgccatggcaacccacaaggacgacgaggaacgcttcttcccttcgagcggagtcctgatttttggaaaaactggagcagctaataagactacactggaaaatgtgttaatgacaaatgaagaggaaattcgtcctaccaacccggtagccaccgaggaatacgggactgttagcagcaacctgcaggcggctaacactgcagcccagacacaagttgtcaacaaccagggagccttacctggtatggtctggcagaaccgggacgtgtacctgcagggtcccatctgggccaagattcctcacacggacggcaactttcacccgtctccgctgatgggcggctttggactgaagcatcctcagatcctgatcaaaaacactcctgttcctgctaatcccccggaggtgtttacgcctgccaagtttgcttctttcatcacacagtacagcaccggccaggtcagcgtggagatcgagtgggagctgcagaaggagaacagcaagcgctggaacccagagattcagtatacctccaattttgacaaacagactggtgtggactttgccgttgacagccagggtgtttattctgagcctcgccccattggtactcgttacctcacccgtaatctgtaa

SEQ ID NO: 5067 - protein, 735 aa, Adeno-associated virus
MAADGYLPDWLEDNLSEGIHEWWDPKPGAPKPKANQQKQDDGRGLVLPGYKYLGPFNGLDKGEPVNAADAAALEHDKAYDQQLKAGDNPYLRYNHADAEFQERLQEDTSFGGNLGRAVFQAKKRVLEPLGLVEEGAKTAPGKKRPVEPSPQRSPDSSTGIGKKGQQPARKRLNFGQTGDSESVPDPQPIGEPPAAPSSVGSGTMAAGGGAPMADNNEGADGVGSSSGNWHCDSTWLGDRVITTSTRTWALPTHNNHLYKQISNGTSGGSTNDNVYFGYSTPWGYFDFNRFHCHFSPRDRQRLINNNWGFRPKRLSFKLFNIQVKEVTQNEGTKTIANNLTSTIQVFTDSEYQLPYVLGSAHQGCLPPFPADVFMIPQYGYLTLNNGSQAVGRSSFYCLEYFPSQMLRTGNNFSFSYTFEDVPFHSSYAHSQSLDRLMNPLIDQYLYYLSRTQSTEGTAGTQQLLFSQAGPSNMSAQARNWLPGPCYRQQRVSTTLSQNNNSNFAWTGATKYHLNGRDSLVNPGVAMATHKDDEERFFPSSGVLIFGKTGAANKTTLENVLMTNEEEIRPTNPVATEEYGTVSSNLQAANTAAQTQVVNNQGALPGMVWQNRDVYLQGPIWAKIPHTDGNFHPSPLMGGFGLKHPQILIKNTPVPANPPEVFTPAKFASFITQYSTGQVSVEIEWELQKENSKRWNPEIQYTSNFDKQTGVDFAVDSQGVYSEPRPIGTRYLTRNL

SEQ ID NO: 5068 - protein, 738 aa, Adeno-associated virus
MAADGYLPDWLEDNLSEGIREWWDLKPGAPKPKANQQKQDDGRGLVLPGYKYLGPFNGLDKGEPVNAADAAALEHDKAYDQQLKAGDNPYLRYNHADAEFQERLQEDTSFGGNLGRAVFQAKKRVLEPLGLVEEGAKTAPGKKRPVEPSPQRSPDSSTGIGKKGQQPARKRLNFGQTGDSESVPDPQPIGEPPAAPSSVGSGTMAAGGGAPMADNNEGADGVGSSSGNWHCDSTWLGDRVITTSTRTWALPTYNNHLYKQISNGTSGGSTNDNTYFGYSTPWGYFDFNRFHCHFSPRDWQRPINNNWGFRPKRLSFKLFNIQVKEVTQNEGTKTIANNLTSTIQVFTDSEYQLPYVLGSAHQGCLPPFPADVFMIPQYGYLTLNNGSQAVGRSSFYCLEYFPSQMLRTGNNFSFSYPFEDVPFHSSYAHSQSLDRLMNPLIDQYLYYLSRTQSTGGTAGTQQLLFSQAGPSNMSAQARNWLPGPCYRQQRVSTTLSQNNNSNFAWTGATKYHLNGRDSLVNPGVAMATNKDDEDRFFPSSGILMFGKQGAGKDNVDYSNVMLTSEEEIKTTNPVATEQYGVVADNLQQQDTAPIVGAVNSQGALPGMVWQNRDVYLQGPIWAKIPHTDGNFHPSPLMGGFGLKHPPPQVLIKNTPVPADPPTAFNQAKLNSFITQYSTGQVSVEIEWELQKENSKRWNPEIQYTSNYYKSTNVDFAVNTEGVYSEPRPIGTRYLTRNL

SEQ ID NO: 5069 - DNA, 2217 bp, Adeno-associated virus
  source 1..2217: mol_type = genomic DNA
atggctgccgatggttatcttccagattggctcgaggacaacctctctgagggcattcgcgagtggtgggacctgaaacctggagccccgaaacccaaggccaaccagcaaaagcaggacgacggccggggtctggtgcttcctggctacaagtacctcggacccttcaacggactcgacaagggggagcccgtcaacgcggcggacgcagcggccctcgagcacgacaaggcctacgaccagcagctcaaagcgggtgacaatccgtacctgcggtataatcacgccgacgccgagtttcaggagcgtctgcaagaagatacgtcttttgggggcaacctcgggcgagcagtcttccaggccaagaagcgggttctcgaacctctcggtctggttgaggaaggcgctaagacggctcctggaaagaagagaccggtagagccgtcaccacagcgttcccccgactcctccacgggcatcggcaagaaaggccagcagcccgccagaaagagactcaatttcggtcagactggcgactcagagtcagtccccgaccctcaacctatcggagaacctccagcagcgccctctagtgtgggatctggtacaatggctgcaggcggtggcgcaccaatggcagacaataacgaaggtgccgacggagtgggtagttcctcgggaaattggcattgcgattccacatggctgggcgacagagtcatcaccaccagcacccgaacctgggccctgcccacctacaacaaccacctctacaagcaaatctccaacgggacctcgggaggcagcaccaacgacaacacctactttggctacagcaccccctgggggtattttgactttaacagattccactgccacttctcaccacgtgactggcagcgacccatcaacaacaactggggattccggcccaagagactcagcttcaagctcttcaacatccaggtcaaagaggtcacgcagaatgaaggcaccaagaccatcgccaataacctcaccagcaccatccaggtgtttacggactcggaataccagctgccgtacgtcctcggctctgcccaccagggctgcctgcctccgttcccggcggacgtcttcatgattcctcagtacggctacctgactctcaacaacggtagtcaggccgtgggacgttcctccttctactgcctggagtacttcccctctcagatgctgagaacgggcaacaacttttccttcagctaccctttcgaggacgtgcctttccacagcagctacgcgcacagccagagtttggacaggctgatgaatcctctcatcgaccagtacctgtactacctgtcaagaacccagtctacgggaggcacagcgggaacccagcagttgctgttttctcaggccgggcctagcaacatgtcggctcaggccagaaactggctgcctggaccctgctacagacagcagcgcgtctccacgacactgtcgcaaaacaacaacagcaactttgcctggactggtgccaccaagtatcatctgaacggcagagactctctggtgaatccgggcgtcgccatggcaaccaacaaggacgacgaggaccgcttcttcccatccagcggcatcctcatgtttggcaagcagggagctggaaaagacaacgtggactatagcaacgtgatgctaaccagcgaggaagaaatcaagaccaccaaccccgtggccacagaacagtatggcgtggtggctgataacctacagcagcaagacaccgctcctattgtgggggccgtcaacagccagggagccttacctggcatggtctggcagaaccgggacgtgtacctgcagggtcctatttgggccaagattcctcacacagatggcaactttcacccgtctcctttaatgggcggctttggacttaaacatccgcctcctcaggtcctcatcaaaaacactcctgttcctgcggatcctccaacagcgttcaaccaggccaagctgaattctttcatcacgcagtacagcaccggacaagtcagcgtggagatcgagtgggagctgcagaaggagaacagcaagcgctggaacccagagattcagtatacttccaactactacaaatctacaaatgtggactttgctgttaatactgagggtgtttactctgagcctcgccccattggcactcgttacctcacccgtaatctgtaa

SEQ ID NO: 5070 - DNA, 2214 bp, Adeno-associated virus
  source 1..2214: mol_type = genomic DNA
atggctgctgacggttatcttccagattggctcgaggacaacctctctgagggcattcgcgagtggtgggacctgaaacctggagcccccaagcccaaggccaaccagcagaagcaggacgacggccggggtctggtgcttcctggctacaagtacctcggacccttcaacggactcgacaagggggagcccgtcaacgcggcggacgcagcggccctcgagcacgacaaggcctacgaccagcagctcaaagcgggtgacaatccgtacctgcggtataaccacgccgacgccgagttccaggagcgtctgcaagaagatacgtcttttgggggcaacctcgggcgagcagtcttccaggccaagaagcgggttctcgaacctctcggtctggctgaggaagctgctaagacggctcctggaaagaagagaccggtagaaccgtcacctcagcgttcccccgactcctccacgggcatcggcaagaaaggccagcagcccgctagaaagagactgaactttgggcagactggcgactcagagtcagtccccgaccctcaaccaatcggagagccaccagcaggcccctctggtctgggatctggtacaatggctgcaggcggtggcgcaccaatggctgacaataacaagggcgccgacggagtgggtaatgcctcaggaaattggcattgcgattccacatggctgggcgacagagtcatcaccaccagcacccgaacctgggctttgcccacctacaacaaccacctctacaagcaaatctccagtcagtcagcaggtagcaccaacgacaacgtctacttcggctacagcaccccctgggggtattttgacttcaacagattccactgtcacttctcaccacgtgactggcagcggctcatcaacaacaactggggattccggcccaagaagctcaacttcaagctgttcaacatccaggtcaaggaggtcacaacgggtgacggcgtcacgaccatcgccaataaccttaccagcacggttcaggtcttttcggactcggaataccagctgccctacgtcctcggctccgcacaccagggctgcctgcctccgttcccggcggacgtcttcatgattccccagtacggctacctgactctgaacaatgacagccaatcggtgggtcgttcctctttctactgcctggaatatttcccttctcaaatgctgagaacgggcaacaacttcaccttcagctacaccttcgaggacgttcccttccacagcagctacgcacacagccagagcctggaccggctgatgaatcctcttatcgaccagtacctgtattacctggccagaacacagagcaacgcaggaggcacagctggcaatcgggaactgcagttttatcagggcgggcctaccaccatggccgaacaagccaaaaactggctgcctggaccttgcttccggcaacaaagagtctccaagacgctggatcaaaacaacaacagcaactttgcttggactggtgccaccaaataccatctaaatggaagaaattcattggttaatcccggtgtcgccatggcaacccacaaggacgacgaggaacgcttcttcccttcgagcggagtcctgatttttggaaaaactggagcagctaataagactacactggaaaatgtgttaatgacaaatgaagaggaaattcgtcctaccaacccggtagccaccgaggaatacgggactgttagcagcaacctgcaggcggctaacactgcagcccagacacaagttgtcaacaaccagggagccttacctggtatggtctggcagaaccgggacgtgtacctgcagggtcccatctgggccaagattcctcacacggacggcaactttcacccgtctccgctgatgggcggctttggactgaagcatccgcctcctcagatcctgatcaaaaacactcctgttcctgctaatcccccggaggtgtttacgcctgccaagtttgcttctttcatcacacagtacagcaccggccaggtcagcgtggagatcgagtgggagctgcagaaggagaacagcaagcgctggaacccagagattcagtatacctccaattttgacaaacagactggtgtggactttgccgttgacagccagggtgtttattctgagcctcgccccattggtactcgttacctcacccgtaatctgtaa

SEQ ID NO: 5071 - protein, 737 aa, Adeno-associated virus
MAADGYLPDWLEDNLSEGIREWWDLKPGAPKPKANQQKQDDGRGLVLPGYKYLGPFNGLDKGEPVNAADAAALEHDKAYDQQLKAGDNPYLRYNHADAEFQERLQEDTSFGGNLGRAVFQAKKRVLEPLGLAEEAAKTAPGKKRPVEPSPQRSPDSSTGIGKKGQQPARKRLNFGQTGDSESVPDPQPIGEPPAGPSGLGSGTMAAGGGAPMADNNKGADGVGNASGNWHCDSTWLGDRVITTSTRTWALPTYNNHLYKQISSQSAGSTNDNVYFGYSTPWGYFDFNRFHCHFSPRDWQRLINNNWGFRPKKLNFKLFNIQVKEVTTGDGVTTIANNLTSTVQVFSDSEYQLPYVLGSAHQGCLPPFPADVFMIPQYGYLTLNNDSQSVGRSSFYCLEYFPSQMLRTGNNFTFSYTFEDVPFHSSYAHSQSLDRLMNPLIDQYLYYLARTQSNAGGTAGNRELQFYQGGPTTMAEQAKNWLPGPCFRQQRVSKTLDQNNNSNFAWTGATKYHLNGRNSLVNPGVAMATHKDDEERFFPSSGVLIFGKTGAANKTTLENVLMTNEEEIRPTNPVATEEYGTVSSNLQAANTAAQTQVVNNQGALPGMVWQNRDVYLQGPIWAKIPHTDGNFHPSPLMGGFGLKHPPPQILIKNTPVPANPPEVFTPAKFASFITQYSTGQVSVEIEWELQKENSKRWNPEIQYTSNFDKQTGVDFAVDSQGVYSEPRPIGTRYLTRNL

SEQ ID NO: 5072 - DNA, 2217 bp, Adeno-associated virus
  source 1..2217: mol_type = genomic DNA
atggctgccgatggttatcttccagattggctcgaggacaacctctctgagggcattcgcgagtggtgggacctgaaacctggagccccgaaacccaaagccaaccagcaaaagcaggacgacggccggggtctggtgcttcctggctacaagtacctcggacccttcaacggactcgacaagggggagcccgtcaacgcggcggacgcagcggccctcgagcacgacaaggcctacgaccagcagctcaaagcgggtgacaatccgtacctgcggtataatcacgccgacgccgagtttcaggagcgtctgcaagaagatacgtcttttgggggcaacctcgggcgagcagtcttccaggccaagaagcgggttctcgaacctctcggtctggttgaggaaggcgctaagacggctcctggaaagaagagaccggtagagccgtcaccacagcgttcccccgactcctccacgggcatcggcaagaaaggccagcagcccgccagaaagagactcaatttcggtcagactggcgactcagagtcagtccccgaccctcaacctatcggagaacctccagcagcgccctctagtgtgggatctggtacaatggctgcaggcggtggcgcaccaatggcagacaataacgaaggtgccgacggagtgggtagttcctcgggaaattggcattgcgattccacatggctgggcgacagagtcatcaccaccagcacccgaacctgggccctgcccacctacaacaaccacctctacaagcaaatctccaacgggacctcgggaggcagcaccaacgacaacacctactttggctacagcaccccctgggggtattttgactttaacagattccactgccacttctcaccacgtgactggcagcgactcatcaacaacaactggggattccggcccaagagactcagcttcaagctcttcaacatccaggtcaaagaggtcacgcagaatgaaggcaccaagaccatcgccaataacctcaccagcaccatccaggtgtttacggactcggaataccagctgccgtacgtcctcggctctgcccaccagggctgcctgcctccgttcccggcggacgtcttcatgattcctcagtacggctacctgactctcaacaacggtagtcaggccgtgggacgttcctccttctactgcctggagtacttcccctctcagatgctgagaacgggcaacaacttttccttcagctacactttcgaggacgtgcctttccacagcagctacgcgcacagccagagtttggacaggctgatgaatcctctcatcgaccagtacctgtactacctgtcaagaacccagtctacgggaggcacagcgggaacccagcagttgctgttttctcaggccgggcctagcaacatgtcggctcaggccagaaactggctgcctggaccctgctacagacagcagcgcgtctccacgacactgtcgcaaaacaacaacagcaactttgcctggactggtgccaccaagtatcatctgaacggcagagactctctggtgaatccgggcgtcgccatggcaaccaacaaggacgacgaggaccgcttcttcccatccagcggcatcctcatgtttggcaagcagggagctggaaaagacaacgtggactatagcaacgtgatgctaaccagcgaggaagaaatcaagaccaccaaccccgtggccacagaacagtatggcgtggtggctgataacctacagcagcaaaacaccgctcctattgtgggggccgtcaacagccagggagccttacctggcatggtctggcagaaccgggacgtgtacctgcagggtcctatttgggccaagattcctcacacagatggcaactttcacccgtctcctttaatgggcggctttggacttaaacatccgcctcctcagatcctcatcaaaaacactcctgttcctgcggatcctccaacagcgttcaaccaggccaagctgaattctttcatcacgcagtacagcaccggacaagtcagcgtggagatcgtgtgggagctgcagaaggagaacagcaagcgcaggaacccagagattcagtatacttccaactactacaaatctacaaatgtggactttgctgttaatactgagggtgtttactctgagcctcgccccattggcactcgttacctcacccgtaatctgtaa

SEQ ID NO: 5073 - protein, 738 aa, Adeno-associated virus
MAADGYLPDWLEDNLSEGIREWWDLKPGAPKPKANQQKQDDGRGLVLPGYKYLGPFNGLDKGEPVNAADAAALEHDKAYDQQLKAGDNPYLRYNHADAEFQERLQEDTSFGGNLGRAVFQAKKRVLEPLGLVEEGAKTAPGKKRPVEPSPQRSPDSSTGIGKKGQQPARKRLNFGQTGDSESVPDPQPIGEPPAAPSSVGSGTMAAGGGAPMADNNEGADGVGSSSGNWHCDSTWLGDRVITTSTRTWALPTYNNHLYKQISNGTSGGSTNDNTYFGYSTPWGYFDFNRFHCHFSPRDWQRLINNNWGFRPKRLSFKLFNIQVKEVTQNEGTKTIANNLTSTIQVFTDSEYQLPYVLGSAHQGCLPPFPADVFMIPQYGYLTLNNGSQAVGRSSFYCLEYFPSQMLRTGNNFSFSYTFEDVPFHSSYAHSQSLDRLMNPLIDQYLYYLSRTQSTGGTAGTQQLLFSQAGPSNMSAQARNWLPGPCYRQQRVSTTLSQNNNSNFAWTGATKYHLNGRDSLVNPGVAMATNKDDEDRFFPSSGILMFGKQGAGKDNVDYSNVMLTSEEEIKTTNPVATEQYGVVADNLQQQNTAPIVGAVNSQGALPGMVWQNRDVYLQGPIWAKIPHTDGNFHPSPLMGGFGLKHPPPQILIKNTPVPADPPTAFNQAKLNSFITQYSTGQVSVEIVWELQKENSKRRNPEIQYTSNYYKSTNVDFAVNTEGVYSEPRPIGTRYLTRNL

SEQ ID NO: 5074 - protein, 738 aa, Adeno-associated virus
MAADGYLPDWLEDNLSEGIREWWDLKPGAPKPKANQQKQDDGRGLVLPGYKYLGPFNGLDKGEPVNAADAAALEHDKAYDQQLKAGDNPYLRYNHADAEFQERLQEDTSFGGNLGRAVFQAKKRVLEPLGLVEEGAKTAPGKKRPVEPSPQRSPDSSTGIGKKGQQPARKRLNFGQTGDSESVPDPQPIGEPPAAPSSVGSGTMAAGGGAPMADNNEGADGVGSSSGNWHCDSTWLGDRVITTSTRTWALPTYNNHLYKQISNGTSGGSTNDNTYFGYSTPWGYFDFNRFHCHFSPRDWQRLINNNWGFRPKRLSFKLFNIQVKEVTQNEGTKTIANNLTSTIQVFTDSEYQLPYVLGSAHQGCLPPFPADVFMIPQYGYLTLNNGSQAVGRSSFYCLEYFPSQMLRTGNNFSFSYTFEDVPFHSSYAHSQSLDRLMNPLIDQYLYYLSRTQSTGGTAGTQQLLFSQAGPSNMSAQARNWLPGPCYRQQRVSTTLSQNNNSNFAWTGATKYHLNGRDSLVNPGVAMATNKDDEDRFFPSSGILMFGKQGAGKDNVDYSNVMLTSEEEIKTTNPVATEQYGVVADNLQQQNTAPIVGAVNSQGALPGMVWQNRDVYLQGPIWAKIPHTDGNFHPSPLMGGFGLKHPPPQILIKNTPVPADPPTAFNQAKLNSFITQYSTGQVSVEIEWELQKENSKRWNPEIQYTSNYYKSTNVDFAVNTEGVYSEPRPIGTRYLTRNL

SEQ ID NO: 5075 - protein, 738 aa, Adeno-associated virus
MAADGYLPDWLEDNLSEGIREWWDLKPGAPKPKANQQKQDDGRGLVLPGYKYLGPFNGLDKGEPVNAADAAALEHDKAYDQQLKAGDNPYLRYNHADAEFQERLQEDTSFGGNLGRAVFQAKKRVLEPLGLVEEGAKTAPGKKRPVEPSPQRSPDSSTGIGKKGQQPARKRLNFGQTGDSESVPDPQPIGEPPAAPSSVGSGTMAAGGGAPMADNNEGADGVGSSSGNWHCDSTWLGDRVITTSTRTWALPTYNNHLYKQISNGTSGGSTNDNTYFGYSTPWGYFDFNRFHCHFSPRDWQRLINNNWGFRPKRLSFKLFNIQVKEVTQNEGTKTIANNLTSTIQVFTDSEYQLPYVLGSAHQGCLPPFPADVFMIPQYGYLTLNNGSQAVGRSSFYCLEYFPSQMLRTGNNFSFSYTFEDVPFHSSYAHSQSLDRLMNPLIDQYLYYLSRTQSTGGTAGTQQLLFSQAGPSNMSAQARNWLPGPCYRQQRVSTTLSQNNNSNFAWTGATKYHLNGRDSLVNPGVAMATNKDDEDRFFPSSGILMFGKQGAGKDNVDYSNVMLTSEEEIKTTNPVATEQYGVVADNLQQQNTAPIVGAVNSQGALPGMVWQNRDVYLQGPIWAKIPHTDGNFHPSPLMGGFGLKHPPPQILIKNTPVPADPPTAFNQAKLNSFITQYSTGQVSVEIVWELQKENSKRWNPEIQYTSNYYKSTNVDFAVNTEGVYSEPRPIGTRYLTRNL

SEQ ID NO: 5076 - protein, 738 aa, Adeno-associated virus; identical to SEQ ID NO: 5074

SEQ ID NO: 5077 - DNA, 2214 bp, Adeno-associated virus
  source 1..2214: mol_type = genomic DNA
atggctgctgacggttatcttccagattggctcgaggacaacctctctgagggcattcgcgagtggtgggacctgaaacctggagcccccaagcccaaggccaaccagcagaagcaggacgacggccggggtctggtgcttcctggctacaagtacctcggacccttcaacggactcgacaagggggagcccgtcaacgcggcggacgcagcggccctcgagcacgacaaggcctacgaccagcagctcaaagcgggtgacaatccgtacctgcggtataaccacgccgacgccgagtttcaggagcgtctgcaagaagatacgtcttttgggggcaacctcgggcgagcagtcttccaggccaagaagcgggttctcgaacctctcggtctggttgaggaagctgctaagacggctcctggaaagaagagaccggtagaaccgtcacctcagcgttcccccgactcctccacgggcatcggcaagaaaggccagcagcccgctagaaagagactgaactttgggcagactggcgactcagagtcagtccccgaccctcaaccaatcggagaaccaccagcaggcccctctggtctgggatctggtacaatggctgcaggcggtggcgctccaatggcagacaataacgaaggcgccgacggagtgggtaatgcctcaggaaattggcattgcgattccacatggctgggcgacagagtcatcaccaccagcacccgaacctgggctttgcccacctacaacaaccacctctacaagcaaatctccagtcagtcagcaggtagcaccaacgacaacgtctacttcggctacagcaccccctgggggtattttgacttcaacagattccactgtcacttctcaccacgtgactggcagcggctcatcaacaacaactggggattccggcccaagaagctcaacttcaagctgttcaacatccaggtcaaggaggtcacaacgaatgacggcgtcacgaccatcgccaataaccttaccagcacggttcaggtcttttcggactcggaataccagctgccctacgtcctcggctccgcacaccagggctgcctgcctccgttcccggcggacgtcttcatgattccccagtacggctacctgactctgaacaatggcagccaatcggtgggtcgttcctctttctactgcctggaatatttcccttctcaaatgctgagaacgggcaacaacttcaccttcagctacaccttcgaggacgttcccttccacagcagctacgcacacagccagagcctggaccggctgatgaatcctcttatcgaccagtacctgtattacctggccagaacacagagcaacgcaggaggcacagctggcaatcgggaactgcagttttatcagggcgggcctaccaccatggccgaacaagccaaaaactggctgcctagaccttgcttccggcaacaaagagtctccaagacgctggatcaaaacaacaacagcaactttgcttggactggtgccaccaaataccatctaaatggaagaaattcattggttaatcccggtgtcgccatggcaacccacaaggacgacgaggaacgcttcttcccttcgagcggagtcctgatttttggaaaaactggagcagctaataagactacactggaaaatgtgttaatgacaaatgaagaggaaattcgtcctaccaacccggtagccaccgaggaatacgggactgttagcagcaacctgcaggcggctaacactgcagcccagacacaagttgtcaacaaccagggagccttacctggtatggtctggcagaaccgggacgtgtacctgcagggtcccatctgggccaagattcctcacacggacggcaactttcacccgtctccgctgatgggcggctttggactgaagcatccgcctcctcagatcctgatcaaaaacactcctgttcctgctaatcccccggaggtgtttacgcctgccaagtttgcttctttcatcacacagtacagcaccggccaggtcagcgtggagatcgagtgggagctgcagaaggagaacagcaagcgctggaacccagagattcagtatacctccaattttgacaaacagactggtgtggactttgccgttgacagccagggtgtttattctgagcctcgccccattggtactcgttacctcacccgtaatctgtaa

SEQ ID NO: 5078 - protein, 737 aa, Adeno-associated virus
MAADGYLPDWLEDNLSEGIREWWDLKPGAPKPKANQQKQDDGRGLVLPGYKYLGPFNGLDKGEPVNAADAAALEHDKAYDQQLKAGDNPYLRYNHADAEFQERLQEDTSFGGNLGRAVFQAKKRVLEPLGLVEEAAKTAPGKKRPVEPSPQRSPDSSTGIGKKGQQPARKRLNFGQTGDSESVPDPQPIGEPPAGPSGLGSGTMAAGGGAPMADNNEGADGVGNASGNWHCDSTWLGDRVITTSTRTWALPTYNNHLYKQISSQSAGSTNDNVYFGYSTPWGYFDFNRFHCHFSPRDWQRLINNNWGFRPKKLNFKLFNIQVKEVTTNDGVTTIANNLTSTVQVFSDSEYQLPYVLGSAHQGCLPPFPADVFMIPQYGYLTLNNGSQSVGRSSFYCLEYFPSQMLRTGNNFTFSYTFEDVPFHSSYAHSQSLDRLMNPLIDQYLYYLARTQSNAGGTAGNRELQFYQGGPTTMAEQAKNWLPRPCFRQQRVSKTLDQNNNSNFAWTGATKYHLNGRNSLVNPGVAMATHKDDEERFFPSSGVLIFGKTGAANKTTLENVLMTNEEEIRPTNPVATEEYGTVSSNLQAANTAAQTQVVNNQGALPGMVWQNRDVYLQGPIWAKIPHTDGNFHPSPLMGGFGLKHPPPQILIKNTPVPANPPEVFTPAKFASFITQYSTGQVSVEIEWELQKENSKRWNPEIQYTSNFDKQTGVDFAVDSQGVYSEPRPIGTRYLTRNL

SEQ ID NO: 5079 - DNA, 2214 bp, Adeno-associated virus
  source 1..2214: mol_type = genomic DNA
atggctgctgacggttatcttccagattggctcgaggacaacctctctgagggcattcgcgagtggtgggacctgaaacctggagcccccaagcccaaggccaaccagcagaagcaggacgacggccggggtctggtgcttcctggctacaagtacctcggacccttcaacggactcgacaagggggagcccgtcaacgcggcggacgcagcggccctcgagcacgacaaggcctacgaccagcagctcaaagcgggtgacaatccgtacctgcggtataaccatgccgacgccgagtttcaggagcgtctgcaagaagatacgtcttttgggggcaacctcgggcgagcagtcctccaggccaagaagcgggttctcgaacctctcggtctggttgaggaagctgctaagacggctcctggaaagaagagaccggtagaaccgtcacctcagcgttcccccgactcctccacgggcatcggcaagaaaggccagcagcccgctagaaagagactgaactttgggcagactggcgactcagagtcagtccccgaccctcaaccaatcggagaaccaccagcaggcccctctggtctgggatctggtacaatggctgcaggcggtggcgctccaatggcagacaataacgaaggcgccgacggagtgggtaatgcctcaggaaattggcattgcgattccacatggctgggcgacagagtcatcaccaccagcacccgaacctgggctttgcccacctacaacaaccacctctacaagcaaatctccagtcagtcagcaggtagcaccaacgacaacgtctacttcggctacagcaccccctgggggtattttgacttcaacagattccactgtcacttctcaccacgtgactggcagcggctcatcaacaacaactggggattccggcccaagaagctcaacttcaagctgttcaacatccaggtcaaggaggtcacaacgaatgacggcgtcacgaccatcgccaataaccttaccagcacggttcaggtcttttcggactcggaataccagctgccctacgtcctcggctccgcacaccagggctgcctgcctccgttcccggcggacgtcttcatgattccccagtacggctacctgactctgaacaatggcagccaatcggtgggtcgttcctctttctactgcctggaatatttcccttctcaaatgctgagaacgggcaacaacttcaccttcagctacaccttcgaggacgttcccttccacagcagctacgcacacagccagagcctggaccggctgatgaatcctcttatcgaccagtacctgtattacctggccagaacacagagcaacgcaggaggcacagctggcaatcgggaactgcagttttatcagggcgggcctaccaccatggccgaacaagccaaaaactggctgcctggaccttgcttccggcaacaaagagtctccaagacgctggatcaaaacaacaacagcaactttgcttggactggtgccaccaaataccatctaaatggaagaaattcattggttaatcccggtgtcgccatggcaacccacaaggacgacgaggaacgcttcttcccttcgagcggagtcctgatttttggaaaaactggagcagctaataagactacactggaaaatgtgttaatgacaaatgaagaggaaattcgtcctaccaacccggtagccaccgaggaatacgggactgttagcagcaacctgcaggcggctaacactgcagcccagacacaagttgtcaacaaccagggagccttacctggtatggtctggcagaaccgggacgtgtacctgcagggtcccatctgggccaagattcctcacacggacggcaactttcacccgtctccgctgatgggcggctttggactgaagcatccgcctcctcagatcctgatcaaaaacactcctgttcctgctaatcccccggaggtgtttacgcctgccaagtttgcttctttcatcacacagtacagcaccggccaggtcagcgtggagatcgagtgggagctgcagaaggagaacagcaagcgctggaacccagagattcagtatacctccaattttgacaaacagactggtgtggactttgccgttgacagccagggtgtttattctgagcctcgccccattggtactcgttacctcacccgtaatctgtaa

SEQ ID NO: 5080 - protein, 737 aa, Adeno-associated virus; identical to SEQ ID NO: 5040

SEQ ID NO: 5081 - protein, 737 aa, Adeno-associated virus
MAADGYLPDWLEDNLSEGIREWWDLKPGAPKPKANQQKQDDGRGLVLPGYKYLGPFNGLDKGEPVNAADAAALEHDKAYDQQLKAGDNPYLRYNHADAEFQERLQEDTSFGGNLGRAVLQAKKRVLEPLGLVEEAAKTAPGKKRPVEPSPQRSPDSSTGIGKKGQQPARKRLNFGQTGDSESVPDPQPIGEPPAGPSGLGSGTMAAGGGAPMADNNEGADGVGNASGNWHCDSTWLGDRVITTSTRTWALPTYNNHLYKQISSQSAGSTNDNVYFGYSTPWGYFDFNRFHCHFSPRDWQRLINNNWGFRPKKLNFKLFNIQVKEVTTNDGVTTIANNLTSTVQVFSDSEYQLPYVLGSAHQGCLPPFPADVFMIPQYGYLTLNNGSQSVGRSSFYCLEYFPSQMLRTGNNFTFSYTFEDVPFHSSYAHSQSLDRLMNPLIDQYLYYLARTQSNAGGTAGNRELQFYQGGPTTMAEQAKNWLPGPCFRQQRVSKTLDQNNNSNFAWTGATKYHLNGRNSLVNPGVAMATHKDDEERFFPSSGVLIFGKTGAANKTTLENVLMTNEEEIRPTNPVATEEYGTVSSNLQAANTAAQTQVVNNQGALPGMVWQNRDVYLQGPIWAKIPHTDGNFHPSPLMGGFGLKHPPPQILIKNTPVPANPPEVFTPAKFASFITQYSTGQVSVEIEWELQKENSKRWNPEIQYTSNFDKQTGVDFAVDSQGVYSEPRPIGTRYLTRNL

SEQ ID NO: 5082 - DNA, 2217 bp, Adeno-associated virus
  source 1..2217: mol_type = genomic DNA
atggctgccgatggttatcttccagattggctcgaggacaacctctctgagggcattcgcgagtggtgggacctgaaacctggagccccgaaacccaaagccaaccagcaaaagcaggacgacggccggggtctggtgcttcctggctacaagtacctcggacccttcaacggactcgacaagggggagcccgtcaacgcggcggacgcagcggccctcgagcacgacaaggcctacgaccagcagctcaaagcgggtgacaatccgtacctgcggtataatcacgccgacgccgagtttcaggagcgtctgcaagaagatacgtcttttgggggcaacctcgggcgagcagtcttccaggccaagaagcgggttctcgaacctctcggtctggttgaggaaggcgctaagacggctcctggaaagaagagaccggtagagccgtcaccacagcgttcccccgactcctccacgggcatcggcaagaaaggccagcagcccgccagaaagagactcaatttcggtcagactggcgactcagagtcagtccccgaccctcaacctatcggagaacctccagcagcgccctctagtgtgggatctggtacaatggctgcaggcggtggcgcaccaatggcagacaataacgaaggtgccgacggagtgggtagttcctcgggaaattggcattgcgattccacatggctgggcgacagagtcatcaccaccagcacccgaacctgggccctgcccacctacaacaaccacctctacaagcaaatctccaacgggacctcgggaggcagcaccaacgacaacacctactttggctacagcaccccctgggggtattttgactttaacagattccactgccacttctcaccacgtgactggcagcgactcatcaacaacaactggggattccggcccaagagactcagcttcaagctcttcaacatccaggtcaaagaggtcacgcagaatgaaggcaccaagaccatcgccaataacctcaccagcaccatccaggtgtttacggactcggaataccagctgccgtacgtcctcggctctgcccaccagggctgcctgcctccgttcccggcggacgtcttcatgattcctcagtacggctacctgactctcaacaacggtagtcaggccgtgggacgttcctccttctactgcctggagtacttcccctctcagatgctgagaacgggcaacaacttttccttcagctacactttcgaggacgtgcctttccacagcagctacgcgcacagccagagtttggacaggctgatgaatcctctcatcgaccagtacctgtactacctgtcaagaacccagtctacgggaggcacagcgggaacccagcagttgctgttttctcaggccgggcctagcaacatgtcggctcaggccagaaactggctgcctggaccctgctacagacagcagcgcgtctccacgacactgtcgcaaaacaacaacagcaactttgcctggactggtgccaccaagtatcatctgaacggcagagactctctggtgaatccgggcgtcgccatggcaaccaacaaggacgacgaggaccgcttcttcccacccagcggcatcctcatgtttggcaagcagggagctggaaaagacaacgtggactatagcaacgtgatgctaaccagcgaggaagaaatcaagaccaccaaccccgtggccacagaacagtatggcgtggtggctgataacctacagcagcaaaacaccgctcctattgtgggggccgtcaacagccagggagccttacctggcatggtctggcagaaccgggacgtgtacctgcagggtcctatttgggccaagattcctcacacagatggcaactttcacccgtctcctttaatgggcggctttggacttaaacatccgcctcctcagatcctcatcaaaaacactcctgttcctgcggatcctccaacagcgttcaaccaggccaagctgaattctttcatcacgcagtacagcaccggacaagtcagcgtggtgatcgagtgggagctgcagaaggagaacagcaagcgctggaacccagagattcagtatacttccaactactacaaatctacaaatgtggactttgctgttaatactgagggtgtttactctgagcttcgccccattggcactcgttacctcacccgtaatctgtaa

SEQ ID NO: 5083 - protein, 738 aa, Adeno-associated virus
MAADGYLPDWLEDNLSEGIREWWDLKPGAPKPKANQQKQDDGRGLVLPGYKYLGPFNGLDKGEPVNAADAAALEHDKAYDQQLKAGDNPYLRYNHADAEFQERLQEDTSFGGNLGRAVFQAKKRVLEPLGLVEEGAKTAPGKKRPVEPSPQRSPDSSTGIGKKGQQPARKRLNFGQTGDSESVPDPQPIGEPPAAPSSVGSGTMAAGGGAPMADNNEGADGVGSSSGNWHCDSTWLGDRVITTSTRTWALPTYNNHLYKQISNGTSGGSTNDNTYFGYSTPWGYFDFNRFHCHFSPRDWQRLINNNWGFRPKRLSFKLFNIQVKEVTQNEGTKTIANNLTSTIQVFTDSEYQLPYVLGSAHQGCLPPFPADVFMIPQYGYLTLNNGSQAVGRSSFYCLEYFPSQMLRTGNNFSFSYTFEDVPFHSSYAHSQSLDRLMNPLIDQYLYYLSRTQSTGGTAGTQQLLFSQAGPSNMSAQARNWLPGPCYRQQRVSTTLSQNNNSNFAWTGATKYHLNGRDSLVNPGVAMATNKDDEDRFFPPSGILMFGKQGAGKDNVDYSNVMLTSEEEIKTTNPVATEQYGVVADNLQQQNTAPIVGAVNSQGALPGMVWQNRDVYLQGPIWAKIPHTDGNFHPSPLMGGFGLKHPPPQILIKNTPVPADPPTAFNQAKLNSFITQYSTGQVSVVIEWELQKENSKRWNPEIQYTSNYYKSTNVDFAVNTEGVYSELRPIGTRYLTRNL

SEQ ID NO: 5084 - DNA, 2214 bp, Adeno-associated virus
  source 1..2214: mol_type = genomic DNA
atggctgctgacggttatcttccagattggctcgaggacaacctctctgagggcattcgcgagtggtgggacctgaaacctggagcccccaagcccaaggccaaccagcagaagcaggacgacggccggggtctggtgcttcctggctacaagtacctcggacccttcaacggactcgacaagggggagcccgtcaacgcggcggacgcagcggccctcgagcacgacaaggcctacgaccagcagctcaaagcgggtgacaatccgtacctgcggtataaccacgccgacgccgagtttcaggagcgtctgcaagaagatacgtcttttgggggcaacctcgggcgagcagtcttccaggccaagaagcgggttctcgaacctctcggtctggttgaggaagctgctaagacggctcctggaaagaagagaccggtagaaccgtcacctcagcgttcccccgactcctccacgggcatcggcaagaaaggccagcagcccgctagaaagagactgaactttgggcagactggcgactcagagtcagtccccgaccctcaaccaatcggagaaccaccagcaggcccctctggtctgggatctggtacaatggctgcaggcggtggcgccccaatggcagacaataacgaaggcgccgacggagtgggtaatgcctcaggaaattggcattgcgattccacatggctgggcgacagagtcatcaccaccagcacccgaacctgggctttgcccacctacaacaaccacctctacaagcaaatctccagtcagtcagcaggtagcaccaacgacaacgtctacttcggctacagcaccccctgggggtattttgacttcaacagattccactgtcacttctcaccacgtgactggcagcggctcatcaacaacaactggggattccggcccaagaagctcaacttcaagctgttcaacatccaggtcaaggaggtcacaacgaatgacggcgtcacgaccatcgccaataaccttaccagcacggttcaggtcttttcggactcggaataccagctgccctacgtcctcggctccgcacaccagggctgcctgcctccgttcccggcggacgtcttcatgattccccagtacggctacctgactctgaacaatggcagccaatcggtgggtcgttcctctttctactgcctggaatatttcccttctcaaatgctgagaacgggcaacaacttcaccatcagctacaccttcgaggacgttcccttccacagcagctacgcacacagccagagcctggaccggctgatgaatcctcttatcgaccagtacctgtattacctggccagaacacagagcaacgcaggaggcacagctggcaatcaggaactgcagttttatcagggcgggcctaccaccatggccgaacaagccaaaaactggctgcctggaccttgcttccggcaacaaagagtctccaagacgctggatcaaaacaacaacagcaactttgcttggactggtgccaccaaataccatctaaatggaagaaattcattggttaatcccggtgtcgccatggcaacccacaaggacgacgaggaacgcttcttcccttcgagcggagtcctgatttttggaaaaactggagcagctaataagactacactggaaaatgtgttaatgacaaatgaagaggaaattcgtcctaccaacccggtagccaccgaggaatacgggactgttagcagcaacctgcaggcggctaacactgcagcccagacacaagttgtcaacaaccagggagccttacctggtatggtctggcagaaccgggacgtgtacctgcagggtcccatctgggccaagattcctcacacagatggcaactttcacccgtctcctttaatgggcggctttggacttaaacatccgcctcctcagatcctcatcaaaaacactcctgttcctgcggatcctccaacagcgttcaaccaggccaagctgaattctttcatcacgcagtacagcaccggacaagtcagcgtggagatcgagtgggagctgcagaaggagaacagcaagcgctggaacccagagattcagtatacttccaactactacaaatctacaaatgtggactttgctgttaatactgagggtgtttactctgagcctcgccccattggcactcgttacctcacccgtaatctgtaa

SEQ ID NO: 5085 - protein, 737 aa, Adeno-associated virus
MAADGYLPDWLEDNLSEGIREWWDLKPGAPKPKANQQKQDDGRGLVLPGYKYLGPFNGLDKGEPVNAADAAALEHDKAYDQQLKAGDNPYLRYNHADAEFQERLQEDTSFGGNLGRAVFQAKKRVLEPLGLVEEAAKTAPGKKRPVEPSPQRSPDSSTGIGKKGQQPARKRLNFGQTGDSESVPDPQPIGEPPAGPSGLGSGTMAAGGGAPMADNNEGADGVGNASGNWHCDSTWLGDRVITTSTRTWALPTYNNHLYKQISSQSAGSTNDNVYFGYSTPWGYFDFNRFHCHFSPRDWQRLINNNWGFRPKKLNFKLFNIQVKEVTTNDGVTTIANNLTSTVQVFSDSEYQLPYVLGSAHQGCLPPFPADVFMIPQYGYLTLNNGSQSVGRSSFYCLEYFPSQMLRTGNNFTISYTFEDVPFHSSYAHSQSLDRLMNPLIDQYLYYLARTQSNAGGTAGNQELQFYQGGPTTMAEQAKNWLPGPCFRQQRVSKTLDQNNNSNFAWTGATKYHLNGRNSLVNPGVAMATHKDDEERFFPSSGVLIFGKTGAANKTTLENVLMTNEEEIRPTNPVATEEYGTVSSNLQAANTAAQTQVVNNQGALPGMVWQNRDVYLQGPIWAKIPHTDGNFHPSPLMGGFGLKHPPPQILIKNTPVPADPPTAFNQAKLNSFITQYSTGQVSVEIEWELQKENSKRWNPEIQYTSNYYKSTNVDFAVNTEGVYSEPRPIGTRYLTRNL

SEQ ID NO: 5086 - DNA, 2217 bp, Adeno-associated virus
  source 1..2217: mol_type = genomic DNA
atggctgccgatggttatcttccagattggctcgaggacaacctctctgagggcattcgcgagtggtgggacctgaaacctggagccccgaaacccaaagccaaccagcaaaagcaggacgacggccggggtctggtgcttcctggctacaagtacctcggacccttcaacggactcgacaagggggagcccgtcaacgcggcggacgcagcggccctcgagcacgacaaggcctacgaccagcagctcaaagcgggtgacaatccgtacctgcggtataatcacgccgacgccgagtttcaggagcgtctgcaagaagatacgtcttttgggggcaacctcgggcgagcagtcttccaggccaagaagcgggttctcgaacctctcggtctggttgaggaaggcgctaagacggctcctggaaagaagagaccggtagagccgtcaccacagcgttcccccgactcctccacgggcatcggcaagaaaggccagcagcccgccagaaagagactcaatttcggtcagactggcgactcagagtcagtccccgaccctcaacctatcggagaacctccagcagcgccctctagtgtgggatctggtacaatggctgcaggcggtggcgcaccaatggcagacaataacgaaggtgccgacggagtgggtagttcctcgggaaattggcattgcgattccacatggctgggcgacagagtcatcaccaccagcacccgaacctgggccctgcccgcctacaacaaccacctctacaagcaaatctccaacgggacctcgggaggcagcaccaacgacaacacctactttggctacagcaccccctgggggtattttgactttaacagattccactgccacttctcaccacgtgactggcagcgactcatcaacaacaactggggattccggcccaagagactcagcttcaagctcttcaacatccaggtcaaagaggtcacgcagaatgaaggcaccaagaccatcgccaataacctcaccagcaccatccaggtgtttacggactcggaataccagctgccgtacgtcctcggctctgcccaccagggctgcctgcctccgttcccggcggatgtcttcatgattcctcagtacggctacctgactctcaacaacggtagtcaggccgtgggacgttcctccttctactgcctggagtacttcccctctcagatgctgagaacgggcaacaacttttccttcagctacactttcgaggacgtgcctttccacagcagctacgcgcacagccagagtttggacaggctgatgaatcctctcatcgaccagtacctgtactacctgtcaagaacccagtctacgggaggcacagcgggaacccagcagttgctgttttctcaggccgggcctagcaacatgtcggctcaggccagaaactggctgcctggaccctgctacagacagcagcgcgtctccacgacactgtcgcaaaacaacaacagcaactttgcctggactggtgccaccaagtatcatctgagcggcagagactctctggtgaatccgggcgtcgccatggcaaccaacaaggacgacgaggaccgcttcttcccatccagcggcatcctcatgtttggcaagcagggagctggaaaagacaacgtggactatagcaacgtgatgctaaccagcgaggaagaaatcaagaccaccaaccccgtggccacagaacagtatggcgtggtggctgataacctacagcagcaaaacaccgctcctattgtgggggccgtcaacagccagggagccttacctggcatggtctggcagaaccgggacgtgtacctgcagggtcctatttgggccaagattcctcacacagatggcaactttcacccgtctcctttaatgggcggctttggacttaaacatccgcctcctcagatcctcatcaaaaacactcctgttcctgcggatcctccaacagcgttcaaccaggccaagctgaattcttccatcacgcagtacagcaccggacaagtcagcgtggagatcgagtgggagctgcagaaggagaacagcaagcgctggaacccagagattcagtatacttccaactactacaaatctacaaatgtggactttgctgttaatactgagggtgtttactctgagcctcgccccattggcactcgttacctcacccgtaatttgtaa

SEQ ID NO: 5087 - protein, 738 aa, Adeno-associated virus
MAADGYLPDWLEDNLSEGIREWWDLKPGAPKPKANQQKQDDGRGLVLPGYKYLGPFNGLDKGEPVNAADAAALEHDKAYDQQLKAGDNPYLRYNHADAEFQERLQEDTSFGGNLGRAVFQAKKRVLEPLGLVEEGAKTAPGKKRPVEPSPQRSPDSSTGIGKKGQQPARKRLNFGQTGDSESVPDPQPIGEPPAAPSSVGSGTMAAGGGAPMADNNEGADGVGSSSGNWHCDSTWLGDRVITTSTRTWALPAYNNHLYKQISNGTSGGSTNDNTYFGYSTPWGYFDFNRFHCHFSPRDWQRLINNNWGFRPKRLSFKLFNIQVKEVTQNEGTKTIANNLTSTIQVFTDSEYQLPYVLGSAHQGCLPPFPADVFMIPQYGYLTLNNGSQAVGRSSFYCLEYFPSQMLRTGNNFSFSYTFEDVPFHSSYAHSQSLDRLMNPLIDQYLYYLSRTQSTGGTAGTQQLLFSQAGPSNMSAQARNWLPGPCYRQQRVSTTLSQNNNSNFAWTGATKYHLSGRDSLVNPGVAMATNKDDEDRFFPSSGILMFGKQGAGKDNVDYSNVMLTSEEEIKTTNPVATEQYGVVADNLQQQNTAPIVGAVNSQGALPGMVWQNRDVYLQGPIWAKIPHTDGNFHPSPLMGGFGLKHPPPQILIKNTPVPADPPTAFNQAKLNSSITQYSTGQVSVEIEWELQKENSKRWNPEIQYTSNYYKSTNVDFAVNTEGVYSEPRPIGTRYLTRNL

SEQ ID NO: 5088 - protein, 736 aa, Adeno-associated virus
MAADGYLPDWLEDNLSEGIREWWDLKPGAPKPKANQQKQDDGRGLVLPGYKYLGPFNGLDKGEPVNAADAAALEHDKAYDQQLKAGDNPYLRYNHADAEFQERLQEDTSFGGNLGRAVFQAKKRVLEPLGLVEEGAKTAPGKKRPVEQSPQEPDSSSGIGKTGQQPAKKRLNFGQTGDSESVPDPQPLGEPPATPAAVGPTTMASGGGAPMADNNEGADGVGNASGNWHCDSTWLGDRVITTSTRTWALPTYNNHLYKQISSASTGASNDNHYFGYSTPWGYFDFNRFHCHFSPRDWQRLINNNWGFRPKRLNFKLFNIQVKEVTTNDGVTTIANNLTSTVQVFSDSEYQLPYVLGSAHQGCLPPFPADVFMIPQYGYLTLNNGSQAVGRSSFYCLEYFPSQMLRTGNNFTFSYTFEEVPFHSSYAHSQSLDRLMNPLIDQYLYYLNRTQNQSGSAQNKDLLFSRGSPAGMSVQPKNWLPGPCYRQQRVSKTKTDNNNSNFTWTGASKYNLNGRESIINPGTAMASHKDDEDKFFPMSGVMIFGKESAGASNTALDNVMITDEEEIKATNPVATERFGTVAVNFQSSSTDPATGDVHAMGALPGMVWQDRDVYLQGPIWAKIPHTDGHFHPSPLMGGFGLKNPPPQILIKNTPVPANPPAEFSATKFASFITQYSTGQVSVEIEWELQKENSKRWNPEVQYTSNYAKSANVDFTVDNNGLYTEPRPIGTRYLTRPL

SEQ ID NO: 5089 - DNA, 2217 bp, Adeno-associated virus
  source 1..2217: mol_type = genomic DNA
atggctgctgacggttatcttccagattggctcgaggacaacctctctgagggcattcgcgagtggtgggacctgaaacctggagcccccaagcccaaggccaaccagcagaagcaggacgacggccggggtctggtgcttcctggctacaagtacctcggacccttcaacggactcgacaagggggagcccgtcaacgcggcggacgcagcggccctcgagcacgacaaggcctacgaccagcagctcaaagcgggtgacaatccgtacctgcggtataaccacgccgacgccgagtttcaggagcgtctgcaagaagatacgtcttttgggggcaacctcgggcgagcagtcttccaggccaagaagcgggttctcgaacctctcggtctggttgaggaagctgctaagacggctcctggaaagaagagaccggtagaaccgtcacctcagcgttcccccgactcctccacgggcatcggcaagaaaggccagcagcccgctaaaaagagactgaactttggtcagactggcgactcagagtcagtccccgaccctcaaccaatcggagaaccaccagcaggcccctctggtctgggatctggtacaatggctgcaggcggtggcgctccaatggcagacaataacgaaggcgccgacggagtgggtagttcctcaggaaattggcattgcgattccacatggctgggcgacagagtcatcaccaccagcacccgaacctgggccctgcccacctacaacaaccacctctacaagcaaatatccaatgggacatcgggaggaagcaccaacgacaacacctacttcggctacagcaccccctgggggtattttgacttcaacagattccactgccacttctcaccacgtgactggcagcgactcatcaacaacaactggggattccggccaaaaagactcagcttcaagctcttcaacatccaggtcaaggaggtcacgcagaatgaaggcaccaagaccatcgccaataaccttaccagcacgattcaggtatttacggactcggaataccagctgccgtacgtcctcggctccgcgcaccagggctgcctgcctccgttcccggcggacgtcttcatgattccccagtacggctaccttacactgaacaatggaagtcaagccgtaggccgttcctccttctactgcctggaatattttccatctcaaatgctgcgaactggaaacaattttgaattcagctacaccttcgaggacgtgcctttccacagcagctacgcacacagccagagcttggaccgactgatgaatcctctcatcgaccagtacctgtactacttatccagaactcagtccacaggaggaactcaaggtacccagcaattgttattttctcaagctgggcctgcaaacatgtcggctcaggctaagaactggctacctggaccttgctaccggcagcagcgagtctctacgacactgtcgcaaaacaacaacagcaactttgcttggactggtgccaccaaatatcacctgaacggaagagactctttggtaaatcccggtgtcgccatggcaacccacaaggacgacgaggaacgcttcttcccgtcgagtggagtcctgatgtttggaaaacagggtgctggaagagacaatgtggactacagcagcgttatgctaaccagcgaagaagaaattaaaaccactaaccctgtagccacagaacaatacggtgtggtggctgacaacttgcagcaaaccaatacagggcctattgtgggaaatgtcaacagccaaggagccttacctggcatggtctggcagaaccgagacgtgtacctgcagggtcccatctgggccaagattcctcacacggacggcaacttccacccttcaccgctaatgggaggatttggactgaagcacccacctcctcagatcctgatcaagaacacgccggtacctgcggatcctccaacaacgttcagccaggcgaaattggcttccttcattacgcagtacagcaccggacaggtcagcgtggaaatcgagtgggagctgcagaaggagaacagcaaacgctggaacccagagattcagtacacttcaaactactacaaatctacaaatgtggactttgctgtcaatacagagggaacttattctgagcctcgccccattggtactcgttacctcacccgtaatctgtaa

SEQ ID NO: 5090 - protein, 738 aa, Adeno-associated virus
MAADGYLPDWLEDNLSEGIREWWDLKPGAPKPKANQQKQDDGRGLVLPGYKYLGPFNGLDKGEPVNAADAAALEHDKAYDQQLKAGDNPYLRYNHADAEFQERLQEDTSFGGNLGRAVFQAKKRVLEPLGLVEEGAKTAPGKKRPVEPSPQRSPDSSTGIGKKGQQPARKRLNFGQTGDSESVPDPQPLGEPPAAPSSVGSGTMAAGGGAPMADNNEGADGVGSSSGNWHCDSTWLGDRVITTSTRTWALPTYNNHLYKQISNGTSGGSTNDNTYFGYSTPWGYFDFNRFHCHFSPRDWQRLINNNWGFRPKRLSFKLFNIQVKEVTQNEGTKTIANNLTSTIQVFTDSEYQLPYVLGSAHQGCLPPFPADVFMIPQYGYLTLNNGSQAVGRSSFYCLEYFPSQMLRTGNNFSFSYTFEDVPFHSSYAHSQSLDRLMNPLIDQYLYYLSRTQSTGGTAGTQQLLFSQAGPSNMSAQARNWLPGPCYRQQRVSTTLSQNNNSNFAWTGATKYHLNGRDSLVNPGVAMATNKDDEDRFFPSSGILMFGKQGAGKDNVDYSNVMLTSEEEIKTTNPVATEQYGVVADNLQRQNTAPIVGAVNSQGALPGMVWQNRDVYLQGPIWAKIPHTDGNFHPSPLMGGFGLKHPPPQILIKNTPVPADPPTAFNQAKLNSFITQYSTGQVSVEIEWELQKENSKRWNPEIQYTSNYYKSTNVDFAVNTEGVYSEPRPIGTRYLTRNL

SEQ ID NO: 5091 - protein, 736 aa, Adeno-associated virus
MAADGYLPDWLEDNLSEGIREWLNLKPGAPQPKANQQKQDNARGLVLPGYKYLGPFNGLDKGDPVNEADAAALEHDKAYGQQLKAGDNPYLKYNHADAEFQERLQKDTSFGGNLGKAVFQAKKRILEPLGLVETPAKTAPGKKRPVDPSPQRSPDSSSGIGKKSPHPARKRLNFGQTGEAESVPDPQPIGEPPSDPSSVGSGTMAAGGGAPMADNNEGADGVGNSSGNWHCDSTWLGDRVITTSTRTWALPTYNNHLYKQISSQSGATNDNHYFGYSTPWGYFDFNRFHCHFSPRDWQRLINNNWGFRPKRLSFKLFNIQVKEVTQNDGTTTIANNLTSTVQVFTDSEYQLPYVLGSAHQGCLPPFPADVFMIPQYGYLTLNNGSQAVGRSSFYCLEYFPSQMLRTGNNFQFSYTFEDVPFHSSYAHSQSLDRLMNPLIDQYLYYLSKTQGTNATVQGAKLQFSQAGPSNMRDQARNWLPGPCYRQQRVSKTANDNNNSEYAWTGATKYHLNGRDSLVNPGPAMASHKDDEEKFFPMNGTLVFGKNGAGNSNVDIENVMITDEEEIRTTNPVATEQYGVVSDNLQSSNTRPITGDVDSQGVLPGMVWQDRDVYLQGPIWAKIPHTDGHFHPSPLMGGFGLKHPPPQILIKNTPVPANPATTFTPGKFASFITQYSTGQVSVQIEWELQKENSKRWNPEIQYTSNYNKSVNVDFTVDTNGVYSEPRPIGTRYLTRNL

SEQ ID NO: 5092 - protein, 736 aa, Adeno-associated virus; identical to SEQ ID NO: 4787

SEQ ID NO: 5093 - protein, 736 aa, Adeno-associated virus
MAADGYLPDWLEDNLSEGIREWWDLKPGAPKPKANQQKQDDGRGLVLPGYKYLGPFNGLDKGEPVNAADAAALEHDKAYDQQLKAGDNPYLRYNHADAEFQERLQEDTSFGGNLGRAVFQAKKRVLEPLGLVEEGAKTAPGKKRPVEQSPQEPDSSSGIGKTGQQPAKKRLNFGQTGDSESVPDPQPLGEPPAAPSGLGPNTMASGGGAPMADNNEGADGVGNSSGNWHCDSTWLGDRVITTSTRTWALPTYNNHLYKQISNGTSGGSTNDNTYFGYSTPWGYFDFNRFHCHFSPRDWQRLINNNWGFRPKRLNFKLFNIQVKEVTTNEGTKTIANNLTSTVQVFTDSEYQLPYVLGSAHQGCLPPFPADVFMVPQYGYLTLNNGSQALGRSSFYCLEYFPSQMLRTGNNFQFSYTFEDVPFHSSYAHSQSLDRLMNPLIDQYLYYLVRTQTTGTGGTQTLAFSQAGPSSMANQARNWVPGPCYRQQRVSTTTNQNNNSNFAWTGAAKFKLNGRDSLMNPGVAMASHKDDEDRFFPSSGVLIFGKQGAGNDGVDYSQVLITDEEEIKATNPVATEEYGAVAINNQAANTQAQTGLVHNQGVIPGMVWQNRDVYLQGPIWAKIPHTDGNFHPSPLMGGFGLKHPPPQILIKNTPVPADPPLTFNQAKLNSFITQYSTGQVSVEIEWELQKENSKRWNPEIQYTSNYYKSTNVDFAVNTEGVYSEPRPIGTRYLTRNL

SEQ ID NO: 5094 - DNA, 2211 bp, Adeno-associated virus 1; identical to SEQ ID NO: 4977
  source 1..2211: mol_type = genomic DNA

SEQ ID NO: 5095 - protein, 736 aa, Adeno-associated virus 1; identical to SEQ ID NO: 5088

SEQ ID NO: 5096 - DNA, 4718 bp, Adeno-associated virus 1
  source 1..4718: mol_type = genomic DNA
ttgcccactccctctctgcgcgctcgctcgctcggtggggcctgcggaccaaaggtccgcagacggcagagctctgctctgccggccccaccgagcgagcgagcgcgcagagagggagtgggcaactccatcactaggggtaatcgcgaagcgcctcccacgctgccgcgtcagcgctgacgtaaattacgtcataggggagtggtcctgtattagctgtcacgtgagtgcttttgcgacattttgcgacaccacgtggccatttagggtatatatggccgagtgagcgagcaggatctccattttgaccgcgaaatttgaacgagcagcagccatgccgggcttctacgagatcgtgatcaaggtgccgagcgacctggacgagcacctgccgggcatttctgactcgtttgtgagctgggtggccgagaaggaatgggagctgcccccggattctgacatggatctgaatctgattgagcaggcacccctgaccgtggccgagaagctgcagcgcgacttcctggtccaatggcgccgcgtgagtaaggccccggaggccctcttctttgttcagttcgagaagggcgagtcctacttccacctccatattctggtggagaccacgggggtcaaatccatggtgctgggccgcttcctgagtcagattagggacaagctggtgcagaccatctaccgcgggatcgagccgaccctgcccaactggttcgcggtgaccaagacgcgtaatggcgccggaggggggaacaaggtggtggacgagtgctacatccccaactacctcctgcccaagactcagcccgagctgcagtgggcgtggactaacatggaggagtatataagcgcctgtttgaacctggccgagcgcaaacggctcgtggcgcagcacctgacccacgtcagccagacccaggagcagaacaaggagaatctgaaccccaattctgacgcgcctgtcatccggtcaaaaacctccgcgcgctacatggagctggtcgggtggctggtggaccggggcatcacctccgagaagcagtggatccaggaggaccaggcctcgtacatctccttcaacgccgcttccaactcgcggtcccagatcaaggccgctctggacaatgccggcaagatcatggcgctgaccaaatccgcgcccgactacctggtaggccccgctccgcccgcggacattaaaaccaaccgcatctaccgcatcctggagctgaacggctacgaacctgcctacgccggctccgtctttctcggctgggcccagaaaaggttcgggaagcgcaacaccatctggctgtttgggccggccaccacgggcaagaccaacatcgcggaagccatcgcccacgccgtgcccttctacggctgcgtcaactggaccaatgagaactttcccttcaatgattgcgtcgacaagatggtgatctggtgggaggagggcaagatgacggccaaggtcgtggagtccgccaaggccattctcggcggcagcaaggtgcgcgtggaccaaaagtgcaagtcgtccgcccagatcgaccccacccccgtgatcgtcacctccaacaccaacatgtgcgccgtgattgacgggaacagcaccaccttcgagcaccagcagccgttgcaggaccggatgttcaaatttgaactcacccgccgtctggagcatgactttggcaaggtgacaaagcaggaagtcaaagagttcttccgctgggcgcaggatcacgtgaccgaggtggcgcatgagttctacgtcagaaagggtggagccaacaaaagacccgcccccgatgacgcggataaaagcgagcccaagcgggcctgcccctcagtcgcggatccatcgacgtcagacgcggaaggagctccggtggactttgccgacaggtaccaaaacaaatgttctcgtcacgcgggcatgcttcagatgctgtttccctgcaagacatgcgagagaatgaatcagaatttcaacatttgcttcacgcacgggacgagagactgttcagagtgcttccccggcgtgtcagaatctcaaccggtcgtcagaaagaggacgtatcggaaactctgtgccattcatcatctgctggggcgggctcccgagattgcttgctcggcctgcgatctggtcaacgtggacctggatgactgtgtttctgagcaataaatgacttaaaccaggtatggctgccgatggttatcttccagattggctcgaggacaacctctctgagggcattcgcgagtggtgggacttgaaacctggagccccgaagcccaaagccaaccagcaaaagcaggacgacggccggggtctggtgcttcctggctacaagtacctcggacccttcaacggactcgacaagggggagcccgtcaacgcggcggacgcagcggccctcgagcacgacaaggcctacgaccagcagctcaaagcgggtgacaatccgtacctgcggtataaccacgccgacgccgagtttcaggagcgtctgcaagaagatacgtcttttgggggcaacctcgggcgagcagtcttccaggccaagaagcgggttctcgaacctctcggtctggttgaggaaggcgctaagacggctcctggaaagaaacgtccggtagagcagtcgccacaagagccagactcctcctcgggcatcggcaagacaggccagcagcccgctaaaaagagactcaattttggtcagactggcgactcagagtcagtccccgatccacaacctctcggagaacctccagcaacccccgctgctgtgggacctactacaatggcttcaggcggtggcgcaccaatggcagacaataacgaaggcgccgacggagtgggtaatgcctcaggaaattggcattgcgattccacatggctgggcgacagagtcatcaccaccagcacccgcacctgggccttgcccacctacaataaccacctctacaagcaaatctccagtgcttcaacgggggccagcaacgacaaccactacttcggctacagcaccccctgggggtattttgatttcaacagattccactgccacttttcaccacgtgactggcagcgactcatcaacaacaattggggattccggcccaagagactcaacttcaaactcttcaacatccaagtcaaggaggtcacgacgaatgatggcgtcacaaccatcgctaataaccttaccagcacggttcaagtcttctcggactcggagtaccagcttccgtacgtcctcggctctgcgcaccagggctgcctccctccgttcccggcggacgtgttcatgattccgcaatacggctacctgacgctcaacaatggcagccaagccgtgggacgttcatccttttactgcctggaatatttcccttctcagatgctgagaacgggcaacaactttaccttcagctacacctttgaggaagtgcctttccacagcagctacgcgcacagccagagcctggaccggctgatgaatcctctcatcgaccaatacctgtattacctgaacagaactcaaaatcagtccggaagtgcccaaaacaaggacttgctgtttagccgtgggtctccagctggcatgtctgttcagcccaaaaactggctacctggaccctgttatcggcagcagcgcgtttctaaaacaaaaacagacaacaacaacagcaattttacctggactggtgcttcaaaatataacctcaatgggcgtgaatccatcatcaaccctggcactgctatggcctcacacaaagacgacgaagacaagttctttcccatgagcggtgtcatgatttttggaaaagagagcgccggagcttcaaacactgcattggacaatgtcatgattacagacgaagaggaaattaaagccactaaccctgtggccaccgaaagatttgggaccgtggcagtcaatttccagagcagcagcacagaccctgcgaccggagatgtgcatgctatgggagcattacctggcatggtgtggcaagatagagacgtgtacctgcagggtcccatttgggccaaaattcctcacacagatggacactttcacccgtctcctcttatgggcggctttggactcaagaacccgcctcctcagatcctcatcaaaaacacgcctgttcctgcgaatcctccggcggagttttcagctacaaagtttgcttcattcatcacccaatactccacaggacaagtgagtgtggaaattgaatgggagctgcagaaagaaaacagcaagcgctggaatcccgaagtgcagtacacatccaattatgcaaaatctgccaacgttgattttactgtggacaacaatggactttatactgagcctcgccccattggcacccgttaccttacccgtcccctgtaattacgtgttaatcaataaaccggttgattcgtttcagttgaactttggtctcctgtccttcttatcttatcggttaccatggttatagcttacacattaactgcttggttgcgcttcgcgataaaagacttacgtcatcgggttacccctagtgatggagttgcccactccctctctgcgcgctcgctcgctcggtggggcctgcggaccaaaggtccgcagacggcagagctctgctctgccggccccaccgagcgagcgagcgcgcagagagggagtgggcaa

SEQ ID NO: 5097 - DNA, 255 bp, Adeno-associated virus 10
  source 1..255: mol_type = genomic DNA
ggtaattcctccggaaattggcattgcgattccacatggctgggcgacagagtcatcaccaccagcacccgaacctgggtcctgcccacctacaacaaccacatctacaagcaaatctccagcgagacaggagccaccaacgacaaccactacttcggctacagcaccccctgggggtattttgactttaacagattccactgccacttttcaccacgtgactggcagcgactcatcaacaacaactggggattc

SEQ ID NO: 5098 - protein, 738 aa, Adeno-associated virus 10
MAADGYLPDWLEDNLSEGIREWWDLKPGAPKPKANQQKQDDGRGLVLPGYKYLGPFNGLDKGEPVNAADAAALEHDKAYDQQLKAGDNPYLRYNHADAEFQERLQEDTSFGGNLGRAVFQAKKRVLEPLGLVEEAAKTAPGKKRPVEPSPQRSPDSSTGIGKKGQQPAKKRLNFGQTGESESVPDPQPIGEPPAGPSGLGSGTMAAGGGAPMADNNEGADGVGSSSGNWHCDSTWLGDRVITTSTRTWALPTYNNHLYKQISNGTSGGSTNDNTYFGYSTPWGYFDFNRFHCHFSPRDWQRLINNNWGFRPKRLSFKLFNIQVKEVTQNEGTKTIANNLTSTIQVFTDSEYQLPYVLGSAHQGCLPPFPADVFMIPQYGYLTLNNGSQAVGRSSFYCLEYFPSQMLRTGNNFEFSYTFEDVPFHSSYAHSQSLDRLMNPLIDQYLYYLSRTQSTGGTQGTQQLLFSQAGPANMSAQAKNWLPGPCYRQQRVSTTLSQNNNSNFAWTGATKYHLNGRDSLVNPGVAMATHKDDEERFFPSSGVLMFGKQGAGRDNVDYSSVMLTSEEEIKTTNPVATEQYGVVADNLQQANTGPIVGNVNSQGALPGMVWQNRDVYLQGPIWAKIPHTDGNFHPSPLMGGFGLKHPPPQILIKNTPVPADPPTTFSQAKLASFITQYSTGQVSVEIEWELQKENSKRWNPEIQYTSNYYKSTNVDFAVNTEGTYSEPRPIGTRYLTRNL

SEQ ID NO: 5099 - protein, 738 aa, Adeno-associated virus 10; identical to SEQ ID NO: 4793

SEQ ID NO: 5100 - DNA, 258 bp, Adeno-associated virus 11
  source 1..258: mol_type = genomic DNA
ggtaattcctccggaaattggcattgcgattccacatggctgggcgacagagtcatcaccaccagcacccgaacctgggccctgccaacctacaacaaccacctctacaaacaaatctccagcgcttcaacgggggccagcaacgacaaccactactttggctacagcaccccctgggggtattttgactttaacagattccactgccacttctcaccacgtgactggcagcgactcatcaacaacaactggggattc

SEQ ID NO: 5101 - DNA, 255 bp, Adeno-associated virus 12
  source 1..255: mol_type = genomic DNA
ggtaattcctccggaaattggcattgcgattccacatggctgggcgaccgagtcattaccaccagcacccggacttgggccctgcccacctacaacaaccacctctacaagcaaatctccagccaatcgggtgccaccaacgacaaccactacttcggctacagcaccccttgggggtattttgatttcaacagattccactgccatttctcaccacgtgactggcagcgactcatcaacaacaactggggattc

SEQ ID NO: 5102 - DNA, 2208 bp, Adeno-associated virus 2
  source 1..2208: mol_type = genomic DNA
atggctgccgatggttatcttccagattggctcgaggacactctctctgaaggaataagacagtggtggaagctcaaacctggcccaccaccaccaaagcccgcagagcggcataaggacgacagcaggggtcttgtgcttcctgggtacaagtacctcggacccttcaacggactcgacaagggagagccggtcaacgaggcagacgccgcggccctcgagcacgacaaagcctacgaccggcagctcgacagcggagacaacccgtacctcaagtacaaccacgccgacgcggagtttcaggagcgccttaaagaagatacgtcttttgggggcaacctcggacgagcagtcttccaggcgaaaaagagggttcttgaacctctgggcctggttgaggaacctgttaagacggctccgggaaaaaagaggccggtagagcactctcctgtggagccagactcctcctcgggaaccggaaaggcgggccagcagcctgcaagaaaaagattgaattttggtcagactggagacgcagactcagtacctgacccccagcctctcggacagccaccagcagccccctctggtctgggaactaatacgatggctacaggcagtggcgcaccaatggcagacaataacgagggcgccgacggagtgggtaattcctcgggaaattggcattgcgattccacatggatgggcgacagagtcatcaccaccagcacccgaacctgggccctgcccacctacaacaaccacctctacaaacaaatttccagccaatcaggagcctcgaacgacaatcactactttggctacagcaccccttgggggtattttgacttcaacagattccactgccacttttcaccacgtgactggcaaagactcatcaacaacaactggggattccgacccaagagactcaacttcaagctctttaacattcaagtcaaagaggtcacgcagaatgacggtacgacgacgattgccaataaccttaccagcacggttcaggtgtttactgactcggagtaccagctcccgtacgtcctcggctcggcgcatcaaggatgcctcccgccgttcccagcagacgtcttcatggtgccacagtatggatacctcaccctgaacaacgggagtcaggcagtaggacgctcttcattttactgcctggagtactttccttctcagatgctgcgtaccggaaacaactttaccttcagctacacttttgaggacgttcctttccacagcagctacgctcacagccagagtctggaccgtctcatgaatcctctcatcgaccagtacctgtattacttgagcagaacaaacactccaagtggaaccaccacgcagtcaaggcttcagttttctcaggccggagcgagtgacattcgggaccagtctaggaactggcttcctggaccctgttaccgccagcagcgagtatcaaagacatctgcggataacaacaacagtgaatactcgtggactggagctaccaagtaccacctcaatggcagagactctctggtgaatccgggcccggccatggcaagccacaaggacgatgaagaaaagttttttcctcagagcggggttctcatctttgggaagcaaggctcagagaaaacaaatgtggacattgaaaaggtcatgattacagacgaagaggaaatcaggacaaccaatcccgtggctacggagcagtatggttctgtatctaccaacctccagagaggcaacagacaagcagctaccgcagatgtcaacacacaaggcgttcttccaggcatggtctggcaggacagagatgtgtaccttcaggggcccatctgggcaaagattccacacacggacggacattttcacccctctcccctcatgggtggattcggacttaaacaccctcctccacagattctcatcaagaacaccccggtacctgcgaatccttcgaccaccttcagtgcggcaaagtttgcttccttcatcacacagtactccacgggacaggtcagcgtggagatcgagtgggagctgcagaaggaaaacagcaaacgctggaatcccgaaattcagtacacttccaactacaacaagtctgttaatgtggactttactgtggacactaatggcgtgtattcagagcctcgccccattggcaccagatacctgactcgtaatctgtaa

SEQ ID NO: 5103 - protein, 735 aa, Adeno-associated virus 2 [sequence omitted]

SEQ ID NO: 5104 - protein, 621 aa, Adeno-associated virus 2
MPGFYEIVIKVPSDLDGHLPGISDSFVNWVAEKEWELPPDSDMDLNLIEQAPLTVAEKLQRDFLTEWRRVSKAPEALFFVQFEKGESYFHMHVLVETTGVKSMVLGRFLSQIREKLIQRIYRGIEPTLPNWFAVTKTRNGAGGGNKVVDECYIPNYLLPKTQPELQWAWTNMEQYLSACLNLTERKRLVAQHLTHVSQTQEQNKENQNPNSDAPVIRSKTSARYMELVGWLVDKGITSEKQWIQEDQASYISFNAASNSRSQIKAALDNAGKIMSLTKTAPDYLVGQQPVEDISSNRIYKILELNGYDPQYAASVFLGWATKKFGKRNTIWLFGPATTGKTNIAEAIAHTVPFYGCVNWTNENFPFNDCVDKMVIWWEEGKMTAKVVESAKAILGGSKVRVDQKCKSSAQIDPTPVIVTSNTNMCAVIDGNSTTFEHQQPLQDRMFKFELTRRLDHDFGKVTKQEVKDFFRWAKDHVVEVEHEFYVKKGGAKKRPAPSDADISEPKRVRESVAQPSTSDAEASINYADRYQNKCSRHVGMNLMLFPCRQCERMNQNSNICFTHGQKDCLECFPVSESQPVSVVKKAYQKLCYIHHIMGKVPDACTACDLVNVDLDDCIFEQ

SEQ ID NO: 5105 - DNA, 4675 bp, Adeno-associated virus 2
  source 1..4675: mol_type = genomic DNA
ttggccactccctctctgcgcgctcgctcgctcactgaggccgggcgaccaaaggtcgcccgacgcccgggctttgcccgggcggcctcagtgagcgagcgagcgcgcagagagggagtggccaactccatcactaggggttcctggaggggtggagtcgtgacgtgaattacgtcatagggttagggaggtcctgtattagaggtcacgtgagtgttttgcgacattttgcgacaccatgtggtcacgctgggtatttaagcccgagtgagcacgcagggtctccattttgaagcgggaggtttgaacgcgcagccgccatgccggggttttacgagattgtgattaaggtccccagcgaccttgacgggcatctgcccggcatttctgacagctttgtgaactgggtggccgagaaggaatgggagttgccgccagattctgacatggatctgaatctgattgagcaggcacccctgaccgtggccgagaagctgcagcgcgactttctgacggaatggcgccgtgtgagtaaggccccggaggcccttttctttgtgcaatttgagaagggagagagctacttccacatgcacgtgctcgtggaaaccaccggggtgaaatccatggttttgggacgtttcctgagtcagattcgcgaaaaactgattcagagaatttaccgcgggatcgagccgactttgccaaactggttcgcggtcacaaagaccagaaatggcgccggaggcgggaacaaggtggtggatgagtgctacatccccaattacttgctccccaaaacccagcctgagctccagtgggcgtggactaatatggaacagtatttaagcgcctgtttgaatctcacggagcgtaaacggttggtggcgcagcatctgacgcacgtgtcgcagacgcaggagcagaacaaagagaatcagaatcccaattctgatgcgccggtgatcagatcaaaaacttcagccaggtacatggagctggtcgggtggctcgtggacaaggggattacctcggagaagcagtggatccaggaggaccaggcctcatacatctccttcaatgcggcctccaactcgcggtcccaaatcaaggctgccttggacaatgcgggaaagattatgagcctgactaaaaccgcccccgactacctggtgggccagcagcccgtggaggacatttccagcaatcggatttataaaattttggaactaaacgggtacgatccccaatatgcggcttccgtctttctgggatgggccacgaaaaagttcggcaagaggaacaccatctggctgtttgggcctgcaactaccgggaagaccaacatcgcggaggccatagcccacactgtgcccttctacgggtgcgtaaactggaccaatgagaactttcccttcaacgactgtgtcgacaagatggtgatctggtgggaggaggggaagatgaccgccaaggtcgtggagtcggccaaagccattctcggaggaagcaaggtgcgcgtggaccagaaatgcaagtcctcggcccagatagacccgactcccgtgatcgtcacctccaacaccaacatgtgcgccgtgattgacgggaactcaacgaccttcgaacaccagcagccgttgcaagaccggatgttcaaatttgaactcacccgccgtctggatcatgactttgggaaggtcaccaagcaggaagtcaaagactttttccggtgggcaaaggatcacgtggttgaggtggagcatgaattctacgtcaaaaagggtggagccaagaaaagacccgcccccagtgacgcagatataagtgagcccaaacgggtgcgcgagtcagttgcgcagccatcgacgtcagacgcggaagcttcgatcaactacgcagacaggtaccaaaacaaatgttctcgtcacgtgggcatgaatctgatgctgtttccctgcagacaatgcgagagaatgaatcagaattcaaatatctgcttcactcacggacagaaagactgtttagagtgctttcccgtgtcagaatctcaacccgtttctgtcgtcaaaaaggcgtatcagaaactgtgctacattcatcatatcatgggaaaggtgccagacgcttgcactgcctgcgatctggtcaatgtggatttggatgactgcatctttgaacaataaatgatttaaatcaggtatggctgccgatggttatcttccagattggctcgaggacactctctctgaaggaataagacagtggtggaagctcaaacctggcccaccaccaccaaagcccgcagagcggcataaggacgacagcaggggtcttgtgcttcctgggtacaagtacctcggacccttcaacggactcgacaagggagagccggtcaacgaggcagacgccgcggccctcgagcacgtacaaagcctacgaccggcagctcgacagcggagacaacccgtacctcaagtacaaccacgccgacgcggagtttcaggagcgccttaaagaagatacgtcttttgggggcaacctcggacgagcagtcttccaggcgaaaaagagggttcttgaacctctgggcctggttgaggaacctgttaagacggctccgggaaaaaagaggccggtagagcactctcctgtggagccagactcctcctcgggaaccggaaaggcgggccagcagcctgcaagaaaaagattgaattttggtcagactggagacgcagactcagtacctgacccccagcctctcggacagccaccagcagccccctctggtctgggaactaatacgatggctacaggcagtggcgcaccaatggcagacaataacgagggcgccgacggagtgggtaattcctccggaaattggcattgcgattccacatggatgggcgacagagtcatcaccaccagcacccgaacctgggccctgcccacctacaacaaccacctctacaaacaaatttccagccaatcaggagcctcgaacgacaatcactactttggctacagcaccccttgggggtattttgacttcaacagattccactgccacttttcaccacgtgactggcaaagactcatcaacaacaactggggattccgacccaagagactcaacttcaagctctttaacattcaagtcaaagaggtcacgcagaatgacggtacgacgacgattgccaataaccttaccagcacggttcaggtgtttactgactcggagtaccagctcccgtacgtcctcggctcggcgcatcaaggatgcctcccgccgttcccagcagacgtcttcatggtgccacagtatggatacctcaccctgaacaacgggagtcaggcagtaggacgctcttcattttactgcctggagtactttccttctcagatgctgcgtaccggaaacaactttaccttcagctacacttttgaggacgttcctttccacagcagctacgctcacagccagagtctggaccgtctcatgaatcctctcatcgaccagtacctgtattacttgagcagaacaaacactccaagtggaaccaccacgcagtcaaggcttcagttttctcaggccggagcgagtgacattcgggaccagtctaggaactggcttcctggaccctgttaccgccagcagcgagtatcaaagacatctgcggataacaacaacagtgaatactcgtggactggagctaccaagtaccacctcaatggcagagactctctggtgaatccggccatggcaagccacaaggacgatgaagaaaagttttttcctcagagcggggttctcatctttgggaagcaaggctcagagaaaacaaatgtgaacattgaaaaggtcatgattacagacgaagaggaaatcggaacaaccaatcccgtggctacggagcagtatggttctgtatctaccaacctccagagaggcaacagacaagcagctaccgcagatgtcaacacacaaggcgttcttccaggcatggtctggcaggacagagatgtgtaccttcaggggcccatctgggcaaagattccacacacggacggacattttcacccctctcccctcatgggtggattcggacttaaacaccctcctccacagattctcatcaagaacaccccggtacctgcgaatccttcgaccaccttcagtgcggcaaagtttgcttccttcatcacacagtactccacgggacacggtcagcgtggagatcgagtgggagctgcagaaggaaaacagcaaacgctggaatcccgaaattcagtacacttccaactacaacaagtctgttaatcgtggacttaccgtggatactaatggcgtgtattcagagcctcgccccattggcaccagatacctgactcgtaatctgtaattgcttgttaatcaataaaccgtttaattcgtttcagttgaactttggtctctgcgtatttctttcttatctagtttccatggctacgtagataagtagcatggcgggttaatcattaactacaaggaacccctagtgatggagttggccactccctctctgcgcgctcgctcgctcactgaggccgggcgaccaaaggtcgcccgacgcccgggctttgcccgggcggcctcagtgagcgagcgagcgcgcagagagggagtggccaa

SEQ ID NO: 5106 - DNA, 4679 bp, Adeno-associated virus 2
  source 1..4679: mol_type = genomic DNA
ttggccactccctctctgcgcgctcgctcgctcactgaggccgggcgaccaaaggtcgcccgacgcccgggctttgcccgggcggcctcagtgagcgagcgagcgcgcagagagggagtggccaactccatcactaggggttcctggaggggtggagtcgtgacgtgaattacgtcatagggttagggaggtcctgtattagaggtcacgtgagtgttttgcgacattttgcgacaccatgtggtcacgctgggtatttaagcccgagtgagcacgcagggtctccattttgaagcgggaggtttgaacgcgcagccgccatgccggggttttacgagattgtgattaaggtccccagcgaccttgacgggcatctgcccggcatttctgacagctttgtgaactgggtggccgagaaggaatgggagttgccgccagattctgacatggatctgaatctgattgagcaggcacccctgaccgtggccgagaagctgcagcgcgactttctgacggaatggcgccgtgtgagtaaggccccggaggcccttttctttgtgcaatttgagaagggagagagctacttccacatgcacgtgctcgtggaaaccaccggggtgaaatccatggttttgggacgtttcctgagtcagattcgcgaaaaactgattcagagaatttaccgcgggatcgagccgactttgccaaactggttcgcggtcacaaagaccagaaatggcgccggaggcgggaacaaggtggtggatgagtgctacatccccaattacttgctccccaaaacccagcctgagctccagtgggcgtggactaatatggaacagtatttaagcgcctgtttgaatctcacggagcgtaaacggttggtggcgcagcatctgacgcacgtgtcgcagacgcaggagcagaacaaagagaatcagaatcccaattctgatgcgccggtgatcagatcaaaaacttcagccaggtacatggagctggtcgggtggctcgtggacaaggggattacctcggagaagcagtggatccaggaggaccaggcctcatacatctccttcaatgcggcctccaactcgcggtcccaaatcaaggctgccttggacaatgcgggaaagattatgagcctgactaaaaccgcccccgactacctggtgggccagcagcccgtggaggacatttccagcaatcggatttataaaattttggaactaaacgggtacgatccccaatatgcggcttccgtctttctgggatgggccacgaaaaagttcggcaagaggaacaccatctggctgtttgggcctgcaactaccgggaagaccaacatcgcggaggccatagcccacactgtgcccttctacgggtgcgtaaactggaccaatgagaactttcccttcaacgactgtgtcgacaagatggtgatctggtgggaggaggggaagatgaccgccaaggtcgtggagtcggccaaagccattctcggaggaagcaaggtgcgcgtggaccagaaatgcaagtcctcggcccagatagacccgactcccgtgatcgtcacctccaacaccaacatgtgcgccgtgattgacgggaactcaacgaccttcgaacaccagcagccgttgcaagaccggatgttcaaatttgaactcacccgccgtctggatcatgactttgggaaggtcaccaagcaggaagtcaaagactttttccggtgggcaaaggatcacgtggttgaggtggagcatgaattctacgtcaaaaagggtggagccaagaaaagacccgcccccagtgacgcagatataagtgagcccaaacgggtgcgcgagtcagttgcgcagccatcgacgtcagacgcggaagcttcgatcaactacgcagacaggtaccaaaacaaatgttctcgtcacgtgggcatgaatctgatgctgtttccctgcagacaatgcgagagaatgaatcagaattcaaatatctgcttcactcacggacagaaagactgtttagagtgctttcccgtgtcagaatctcaacccgtttctgtcgtcaaaaaggcgtatcagaaactgtgctacattcatcatatcatgggaaaggtgccagacgcttgcactgcctgcgatctggtcaatgtggatttggatgactgcatctttgaacaataaatgatttaaatcaggtatggctgccgatggttatcttccagattggctcgaggacactctctctgaaggaataagacagtggtggaagctcaaacctggcccaccaccaccaaagcccgcagagcggcataaggacgacagcaggggtcttgtgcttcctgggtacaagtacctcggacccttcaacggactcgacaagggagagccggtcaacgaggcagacgccgcggccctcgagcacgacaaagcctacgaccggcagctcgacagcggagacaacccgtacctcaagtacaaccacgccgacgcggagtttcaggagcgccttaaagaagatacgtcttttgggggcaacctcggacgagcagtcttccaggcgaaaaagagggttcttgaacctctgggcctggttgaggaacctgttaagacggctccgggaaaaaagaggccggtagagcactctcctgtggagccagactcctcctcgggaaccggaaaggcgggccagcagcctgcaagaaaaagattgaattttggtcagactggagacgcagactcagtacctgacccccagcctctcggacagccaccagcagccccctctggtctgggaactaatacgatggctacaggcagtggcgcaccaatggcagacaataacgagggcgccgacggagtgggtaattcctccggaaattggcattgcgattccacatggatgggcgacagagtcatcaccaccagcacccgaacctgggccctgcccacctacaacaaccacctctacaaacaaatttccagccaatcaggagcctcgaacgacaatcactactttggctacagcaccccttgggggtattttgacttcaacagattccactgccacttttcaccacgtgactggcaaagactcatcaacaacaactggggattccgacccaagagactcaacttcaagctctttaacattcaagtcaaagaggtcacgcagaatgacggtacgacgacgattgccaataaccttaccagcacggttcaggtgtttactgactcggagtaccagctcccgtacgtcctcggctcggcgcatcaaggatgcctcccgccgttcccagcagacgtcttcatggtgccacagtatggatacctcaccctgaacaacgggagtcaggcagtaggacgctcttcattttactgcctggagtactttccttctcagatgctgcgtaccggaaacaactttaccttcagctacacttttgaggacgttcctttccacagcagctacgctcacagccagagtctggaccgtctcatgaatcctctcatcgaccagtacctgtattacttgagcagaacaaacactccaagtggaaccaccacgcagtcaaggcttcagttttctcaggccggagcgagtgacattcgggaccagtctaggaactggcttcctggaccctgttaccgccagcagcgagtatcaaagacatctgcggataacaacaacagtgaatactcgtggactggagctaccaagtaccacctcaatggcagagactctctggtgaatccgggcccggccatggcaagccacaaggacgatgaagaaaagttttttcctcagagcggggttctcatctttgggaagcaaggctcagagaaaacaaatgtggacattgaaaaggtcatgattacagacgaagaggaaatcaggacaaccaatcccgtggctacggagcagtatggttctgtatctaccaacctccagagaggcaacagacaagcagctaccgcagatgtcaacacacaaggcgttcttccaggcatggtctggcaggacagagatgtgtaccttcaggggcccatctgggcaaagattccacacacggacggacattttcacccctctcccctcatgggtggattcggacttaaacaccctcctccacagattctcatcaagaacaccccggtacctgcgaatccttcgaccaccttcagtgcggcaaagtttgcttccttcatcacacagtactccacgggacaggtcagcgtggagatcgagtgggagctgcagaaggaaaacagcaaacgctggaatcccgaaattcagtacacttccaactacaacaagtctgttaatgtggactttactgtggacactaatggcgtgtattcagagcctcgccccattggcaccagatacctgactcgtaatctgtaattgcttgttaatcaataaaccgtttaattcgtttcagttgaactttggtctctgcgtatttctttcttatctagtttccatggctacgtagataagtagcatggcgggttaatcattaactacaaggaacccctagtgatggagttggccactccctctctgcgcgctcgctcgctcactgaggccgggcgaccaaaggtcgcccgacgcccgggctttgcccgggcggcctcagtgagcgagcgagcgcgcagagagggagtggccaa

SEQ ID NO: 5107 - protein, 735 aa, Adeno-associated virus 2
MAADGYLPDWLEDTLSEGIRQWWKLKPGPPPPKPAERHKDDSRGLVLPGYKYLGPFNGLDKGEPVNEADAAALEHDKAYDRQLDSGDNPYLKYNHADAEFQERLKEDTSFGGNLGRAVFQAKKRVLEPLGLVEEPVKTAPGKKRPVEHSPVEPDSSSGTGKAGQQPARKRLNFGQTGDADSVPDPQPLGEPPATPAAVGPTTMASGGGAPMADNNEGADGVGNASGNWHCDSTWLGDRVITTSTRTWALPTYNNHLYKQISSASTGASNDNHYFGYSTPWGYFDFNRFHCHFSPRDWQRLINNNWGFRPKRLNFKLFNIQVKEVTQNDGTTTIANNLTSTVQVFTDSEYQLPYVLGSAHQGCLPPFPADVFMIPQYGYLTLNNGSQAVGRSSFYCLEYFPSQMLRTGNNFTFSYTFEDVPFHSSYAHSQSLDRLMNPLIDQYLYYLNRTQNQSGSAQDKALLFSRGSPAGMSVQPKNWLPGPCYRQQRVSKTKTDNNNSNFTWTGASKYNLNGRESIINPGTAMASHKDDKDKFFPMSGVMIFGKESAGASNTALDNVMITDEEEIKATNPVATERFGTVAVNFQSSSTDPATGDVHVMGALPGMVWQDRDVYLQGPIWAKIPHTDGHFHPSPLMGGFGLKHPPPQILIKNTPVPANPPAEFSATKFASFITQYSTGQVSVEIEWELQKENSKRWNPEVQYTSNYAKSANVDFTVDNNGLYTEPRPIGTRYLTRP

SEQ ID NO: 5108 - protein, 740 aa, Adeno-associated virus 2
MAADGYLPDWLEDTLSEGIRQWWKLKPGPPPPKPAERHKDDSRGLVLPGYKYLGPFNGLDKGEPVNAADAAALEHDKAYDRQLDSGDNPYLKYNHADAEFQERLKEDTSFGGNLGRAVFQAKKRVLEPLGLVEEPVKTAPGKKRPVEHSPVEPDSSSGTGKAGQQPARKRLNFGQTGDADSVPDPQPLGQPPAAPSGLGTNTMATGSGAPMADNNEGADGVGNSSGNWHCDSTWMGDRVITTSTRTWALPTYNNHLYKQISSQSGASNDNHYFGYSTPWGYFDFNRFHCHFSPRDWQRLINNNWGFRPKRLNFKLFNIQVKEVTQNDGTTTIANNLTSTVQVFTDSEYQLPYVLGSAHQGCLPPFPADVFMVPQYGYLTLNNGSQAVGRSSFYCLEYFPSQMLRTGNNFTFSYTFEDVPFHSSYAHSQSLDRLMNPLIDQYLYYLSRTNTPSGTTTQSGLQFSQAGASDIRDQSRNWLPGPCYRQQRVSKTSADNNNSEYSWTGATKYHLNGRDSLVNPGPAMASHKDDEEKFFPQSGVLIFGKQGSEKTNVDIEKVMITDEEEIRTTNPVATEQYGSVSTNLQRGNRQAATADVNTQGVLPGMVWQDRDVYLQGPIWAKIPHTDGHFHPSPLMGGFGLKHPPPQILIKNTPVPANPSTTFSAAKFASFITQYSTGQVSVEIEWELQKENSKRWNPEIQYTSNYNKSVNVDFTVDTNGVYSEPRPIGTRYLTRNLLLAAA

SEQ ID NO: 5109 - protein, 734 aa, Adeno-associated virus 2
MAADGYLPDWLEDTLSEGIRQWWKLKPGPPPPKPAERHKDDSRGLVLPGYKYLGPFNGLDKGEPVNEADAAALEHDKAYDRQLDSGDNPYLKYNHADAEFQERLKEDTSFGGNLGRAVFQAKKRVLEPLGLVEEPVKTAPGKKRPVEHSPVEPDSSSGTGKAGQQPARKRLNFGQTGDADSVPDPQPLGQPPAAPSGLGTNTMATGSGAPMADNNEGADGVGNSSGNWHCDSTWMGDRVITTSTRTWALPTYNNHLYKQISSQSGASNDNHYFGYSTPWGYFDFNRFHCHFSPRDWQRLINNNWGFRPKRLNFKLFNIQVKEVTQNDGTTTIANNLTSTVQVFTDSEYQLPYVLGSAHQGCLPPFPADVFMVPQYGYLTLNNGSQAVGRSSFYCLEYFPSQMLRTGNNFTFSYTFEDVPFHSSYAHSQSLDRLMNPLIDQYLYYLSRTNTPSGTTTQSGLQFSQAGASDIRDQSRNWLPGPCYRQQRVSKTSADNNNSEYSWTGATMYHLNGRDSLVNPGPAMASHKDDEEKFFPQSGVLIFGKQGSEKTNVDIEKVMITDEEEIRTTNPVATEQYGSVSTNLQRGNRQAATADVNTQGVLPGMVWQDRDVYLQGPIWAKIPHTDGHFHPSPLMGGFGLKHPPPQILIKNTPVPANPSTTFSAAKFASFITQYSTGQVSVEIEWELQKENSKRWNPEIQYTSNYNKSINVDFTVDTNGVYSEPRPIGTRYLTRN

SEQ ID NO: 5110 - protein, 734 aa, Adeno-associated virus 2
MAADGYLPDWLEDTLSEGIRQWWKLKPGPPPPKPAERHKDDSRGLVLPGYKYLGPFNGLDKGEPVNEADAAALEHDKAYDRQLDSGDNPYLKYNHADAEFQERLKEDTSFGGNLGRAVFQAKKRVLEPLGLVEEPVKTAPGKKRPVEHSPVEPDSSSGTGKAGQQPARKRLNFGQTGDADSVPDPQPLGQPPAAPSGLGTNTMATGSGAPMADNNEGADGVGNSSGNWHCDSTWMGDRVITTSTRTWALPTYNNHLYKQISSQSGASNDNHYFGYSTPWGYFDFNRFHCHFSPRDWQRLINNNWGFRPKRLNFKLFNIQVKEVTQNDGTTTIANNLTSTVQVFTDSEYQLPYVLGSAHQGCLPPFPADVFMVPQYGYLTLNNGSQAVGRSSFYCLEYFPSQMLRTGNNFTFSYTFEDVPFHSSYAHSQSLDRLMNPLIDQYLYYLSRTNTPSGTTTQSGLQFSQAGASDIRDQSRNWLPGPCYRQQRVSKTSADNNNSEYSWTGATKYHLNGRDSLVNPGPAMASHKDDEEKFFPQSGVLIFGKQGSEKTNVDIEKVMITDEEEIRTTNPVATEQYGSVSTNLQRGNRQAATADVNTQGVLPGMVWQDRDVYLQGPIWAKIPHTDGHFHPSPLMGGFGLKHPPPQILIKNTPVPANPSTTFSEAKFASFITQYSTGQVSVEIEWELQKENSKRWNPEIQYTSNYNKSVNVDFTVDTNGVYSEPRPIGTRYLTRN

SEQ ID NO: 5111 - protein, 739 aa, Adeno-associated virus 2
MAADGYLPDWLEDTLSEGIRQWWKLKPGPPPPKPAERHKDDSRGLVLPGYKYLGPFNGLDKGEPVNEADAAALEHDKAYDRQLDSGDNPYLKYNHADAEFQERLKEDTSFGGNLGRAVFQAKKRVLEPLGLVEEPVKTAPGKKRPVEHSPVEPDSSSGTGKAGQQPARKRLNFGQTGDADSVPDPQPLGQPPAAPSGLGTNTMATGSGAPMADNNEGADGVGNSSGNWHCDSTWMGDRVITTSTRTWALPTYNNHLYKQISSQSGASNDNHYFGYSTPWGYFDFNRFHCHFSPRDWQRLINNNWGFRPKRLNFKLFNIQVKEVTQNDGTTTIANNLTSTVQVFTDSEYQLPYVLGSAHQGCLPPFPADVFMVPQYGYLTLNNGSQAVGRSSFYCLEYFPSQMLRTGNNFTFSYTFEDVPFHSSYAHSQSLDRLMNPLIDQYLYYLSRTNTPSGTTTQSGLQFSQAGASDIRDQSRNWLPGPCYRQQRVSKTSADNNNSEYSWTGATKYHLNGRDSLVNPGPAMASHKDDEEKFFPQSGVLIFGKQGSEKTNVDIEKVMITDEEEIRTTNPVATEQYGSVSTNLQRGNRQAATADVNTQGVLPGMVWQDRDVYLQGPIWAKIPHTDGHFHPSPLMGGFGLKHPPPQILIKNTPVPANPSTTFSAAKFASFITQYSTGQVSVEIEWELQKENSKRWNPEIQYTSNYNKSVNVDFTVDTNGVYSEPRPIGTRYLTRNLLLAA

SEQ ID NO: 5112 - protein, 725 aa, Adeno-associated virus 2
MAADGYLPDWLEDTLSEGIRQWWKLKPGPPPPKPAERHKDDSRGLVLPGYKYLGPFNGLDKGEPVNEADAAALEHDKAYDRQLDSGDNPYLKYNHADAEFQERLKEDTSFGGNLGRAVFQAKKRVLEPLGLVEEPVKTAPGKKRPVEHSPVEPDSSSGTGKAGQQPARKRLNFGQTGDADSVPDPQPLGQPPAAPSGLGTNTMATGSGAPMADNNEGADGVGNSSGNWHCDSTWMGDRVITTSTRTWALPTYNNHLYKQISSQSGASNDNHYFGYSTPWGYFDFNRFHCHFSPRDWQRLINNNWGFRPKRLNFKLFNIQVKEVTQNDGTTTIANNLTSTVQVFTDSEYQLPYVLGSAHQGCLPPFPADVFMVPQYGYLTLNNGSQAVGRSSFYCLEYFPSQMLRTGNNFTFSYTFEDVPFHSSYAHSQSLDRLMNPLIDQYLYYLSRTNTPSGTTTQSGLQFSQAGASDIRDQSRNWLPGPCYRQQRVSKTSADNNNSEYSWTGATKYHLNGRDSLVNPGPAMASHKDDEEKFFPQSGVLIFGKQGSEKTNVDIEKVMITDEEEIRTTNPVATEQYGSVSTNLQRGNRQAATADVNTQGVLPGMVWQDRDVYLQGPIWAKIPHTDGHFHPSPLMGGFGLKHPPPQILIKNTPVPANPSTTFSAAKFASFITQYSTGQVSVEIEWELQKENSKRWNPEIQYTSNYNKSVNVDFTVDTNGVYSEPRP

SEQ ID NO: 5113 - protein, 707 aa, Adeno-associated virus 2
MAADGYLPDWLEDTLSEGIRQWWKLKPGPPPPKPAERHKDDSRGLVLPGYKYLGPFNGLDKGEPVNEADAAALEHDKAYDRQLDSGDNPYLKYNHADAEFQERLKEDTSFGGNLGRAVFQAKKRVLEPLGLVEEPVKTAPGKKRPVEHSPVEPDSSSGTGKAGQQPARKRLNFGQTGDADSVPDPQPLGQPPAAPSGLGTNTMATGSGAPMADNNEGADGVGNSSGNWHCDSTWMGDRVITTSTRTWALPTYNNHLYKQISSQSGASNDNHYFGYSTPWGYFDFNRFHCHFSPRDWQRLINNNWGFRPKRLNFKLFNIQVKEVTQNDGTTTIANNLTSTVQVFTDSEYQLPYVLGSAHQGCLPPFPADVFMVPQYGYLTLNNGSQAVGRSSFYCLEYFPSQMLRTGNNFTFSYTFEDVPFHSSYAHSQSLDRLMNPLIDQYLYYLSRTNTPSGTTTQSGLQFSQAGASDIRDQSRNWLPGPCYRQQRVSKTSADNNNSEYSWTGATKYHLNGRDSLVNPGPAMASHKDDEEKFFPQSGVLIFGKQGSEKTNVDIEKVMITDEEEIRTTNPVATEQYGSCIYQPPERQQTSSYRRCQHTRRSSRHGLAGQRCVPSGAHLGKDSTHGRTFSPLSPHGWIRTTPSSTDSHQEHPGTCESFDHLQCGKVCFLHHTVLHGTGQRGDRVRAAEGKQQTLESRNSVHFQLQQVC

SEQ ID NO: 5114 - protein, 739 aa, Adeno-associated virus 2; identical to SEQ ID NO: 5111

SEQ ID NO: 5115 - protein, 737 aa, Adeno-associated virus 2
MASDGYLPDWLEDNLSEGIREWWDLKPGAPKPKANQQKQDDGRGLVLPGYKYLGPFNGLDKGEPVNAADAAALEHDKAYDQQLKAGDNPYLRYNHADAEFQERLQEDTSFGGNLGRAVFQAKKRVLEPFGLVEEGAKTAPGKKRPVEQSPQEPDSSSGIGKTGQQPAKKRLNFGQTGDSESVPDPQPLGEPPATPAAVGPTTMASGGGAPMADNNEGADGVGNASGNWHCDSTWLGDRVITTSTRTWALPTYNNHLYKQISSASTGASNDNHYFGYSTPWGYFDFNRFHCHFSPRDWQRLINNNWGFRPKRLNFKLFNIQVKEVTTNDGTTTIANNLTSTVQVFTDSEYQLPYVLGSAHQGCLPPFPADVFMVPQYGYLTLNNGSQAVGRSSFYCLEYFPSQMLRTGNNFTFSYTFEDVPFHSSYAHSQSLDRLMNPLIDQYLYYLSRTNTPSGTTTQSGLQFSQAGASDIRDQSRNWLPGPCYRQQRVSKTSADNNNSEYSWTGATKYHLNGRDSLVNPGPAMASHKDDEEKFFPQSGVLIFGKQGSEKTNVDIEKVMITDEEEIRTTNPVATEQYGSVSTNLQRGNRQAATADVNTQGVLPGMVWQDRDVYLQGPIWAKIPHTDGHFHPSPLMGGFGLKHHPPQILIKNTPVPANPSTTFSAAKFASFITQYSTGQVSVEIEWELQKENSKRWNPEIQYTSNYNKSVNVDFTVDTNGVYSEPRPIGTRYLTRNLL

SEQ ID NO: 5116 - protein, 741 aa, Adeno-associated virus 2
MAADGYLPDWLEDTLSEGIREWWALKPGAPKPKANQQKQDDGRGLVLPGYKYLGPFNGLDKGEPVNEADAAALEHDKAYDQQLQAGDNPYLRYNHADAEFQERLQEDTSFGGNLGRAVFQAKKRVLEPLGLVEEPVKTAPGKKRPVEHSPVEPDSSSGTGKSGQQPARKRLNFGQTGDADSVPDPQPLGQPPAAPSGLGTNTMATGSGAPMADNNEGADGVGNSSGNWHCDSTWMGDRVITTSTRTWALPTYNNHLYKQISSQSGASNDNHYFGYSTPWGYFDFNRFHCHFSPRDWQRLINNNWGFRPKRLNFKLFNIQVKEVTQNDGTTTIANNLTSTVQVFTDSEYQLPYVLGSAHQGCLPPFPADVFMVPQYGYLTLNNGSQAVGRSSFYCLEYFPSQMLRTGNNFTFSYTFEDVPFHSSYAHSQSLDRLMNPLIDQYLYYLSRTNTPSGTTTQSGLQFSQAGASDIRDQSRNWLPGPCYRQQRVSKTSADNNNSEYSWTGATKYHLNGRDSLVNPGPAMASHKDDEEKFFPQSGVLIFGKQGSEKTNVDIEKVMITDEEEIRTTNPVATEQYGSVSTNLQRGNLANHNNTTNARQAATADVNTQGVLPGMVWQDRDVYLQGPIWAKIPHTDGHFHPSPLMGGFGLKHPPPQILIKNTPVPANPSTTFSAAKFASFITQYSTGQVSVEIEWELQKENSKRWNPEIQYTSNYNKSINVDFTVDTNGVYSEPRPIGTRYL

SEQ ID NO: 5117 - protein, 730 aa, Adeno-associated virus 2
MASDGYLPDWLEDNLSEGIREWWDLKPGAPKPKANQQKQDDGRGLVLPGYKYLGPFNGLDKGEPVNAADAAALEHDKAYDQQLKAGDNPYLRYNHADAEFQERLQEDTSFGGNLGRAVFQAKKRVLEPFGLVEEGAKTAPGKKRPVEQSPQEPDSSSGIGKTGQQPAKKRLNFGQTGDSESVPDPQPLGEPPATPAAVGPTTMASGGGAPMADNNEGADGVGNASGNWHCDSTWLGDRVITTSTRTWALPTYNNHLYKQISSASTGASNDNHYFGYSTPWGYFDFNRFHCHFSPRDWQRLINNNWGFRPKRLNFKLFNIQVKEVTTNDGVTTIANNLTSTVQVFSDSEYQLPYVLGSAHQGCLPPFPADVFMIPQYGYLTLNNGSQAVGRSSFYCLEYFPSQMLRTGNNFTFSYTFEDVPFHSSYAHSQSLDRLMNPLIDQYLYYLNRTQNQSGSAQNNDLLFSRGSPAGMSVQPKNWLPGPCYRQQRVSKTKTDNNNSNFTWTGASKYNLNGRESIINPGTAMASHKDDKDKFFPMSGVMIFGKESAGASNTALDNVMITDEEEIKATNPVATERFGTVAVNLQSSSTDPATGDVHVMGALPGMVWQDRDVYLQGPIWAKIPHTDGHFHPSPLMGGFGLKNPPPQILIKNTPVPANPPAEFSATKFASFITQYSTGQVSVEIEWELQKENSKRWNPEVQYTSNYAKSANVDFTVDNNGLYTEPRPIGTR

SEQ ID NO: 5118 - protein, 735 aa, Adeno-associated virus 2
  MOD_RES 239: note = Any amino acid
MASDGYLPDWLEDNLSEGIREWWDLKPGAPKPKANQQKQDDGRGLVLPGYKYLGPFNGLDKGEPVNAADAAALEHDKAYDQQLKAGDNPYLRYNHADAEFQERLQEDTSFGGNLGRAVFQAKKRVLEPFGLVEEGAKTAPGKKRPVEQSPQEPDSSSGIGKTGQQPAKKRLNFGQTGDSESVPDPQPLGEPPATPAAVGPTTMASGGGAPMADNNEGADGVGNASGNWHCDSTWLGDRXITTSTRTWALPTYNNHLYKQISSASTGASNDNHYFGYSTPWGYFDFNRFHCHFSPRDWQRLINNNWGFRPKRLNFKLFNIQVKEVTTNDGVTTIANNLTSTVQVFSDSEYQLPYVLGSAHQGCLPPFPADVFMIPQYGYLTLNNGSQAVGRSSFYCLEYFPSQMLRTGNNFTFSYTFEDVPFHSSYAHSQSLDRLMNPLIDQYLYYLNRTQNQSGSAQNNDLLFSRGSPAGMSVQPKNWLPGPCYRQQRVSKTKTDNNNSNFTWTGASKYNLNGRESIINPGTAMASHKDDKDKFFPMSGVMIFGKESAGASNTALDNVMITDEEEIKATNPVATERFGTVAVNLQSSSTDPATGDVHVMGALPGMVWQDRDVYLQGPIWAKIPHTDGHFHPSPLMGGFGLKNPPPQILIKNTPVPANPPAEFSATKFASFITQYSTGQVSVEIEWELQKENSKRWNPEVQYTSNYAKSANVDFTVDNNGLYTEPRPIGTRYLTRP

SEQ ID NO: 5119 - protein, 733 aa, Adeno-associated virus 2
MASDGYLPDWLEDNLSEGIREWWDLKPGAPKPKANQQKQDDGRGLVLPGYKYLGPFNGLDKGEPVNAADAAALEHDKAYDQQLKAGDNPYLRYNHADAEFQERLQEDTSFGGNLGRAVFLAKKRVLEPFGLVEEGAKTAPGKKRPVEQSPQEPDSSSGIGKTGQQPAKKRLNFGQTGDSESVPDPQPLGEPPATPAAVGPTTMASGGGAPMADNNEGADGVGNASGNWHCDSTWLGDRVITTSTRTWALPTYNNHLYKQISSASTGASNDNHYFGYSTPWGYFDFNRFHCHFSPRDWQRLINNNWGFRPKRLNFKLFNIQVKEVTTNDGVTTIANNLTSTVQVFSDSEYQLPYVLGSAHQGCLPPFPADVFMIPQYGYLTLNNGSQAVGRSSFYCLEYFPSQMLRTGNNFTFSYTFEDVPFHSSYAHSQSLDRLMNPLIDQYLYYLNRTQNQSGSAQNNDLLFSRGSPAGMSVQPKNWLPGPCYRQQRVSKTKTDNNNSNFTWTGASKYNLNGRESIINPGTAMASHKDDKDKFFPMSGVMIFGKESAGASNTALDNVMITDEEEIKATNPVATERFGTVAVNLQSSSTDPATGDVHVMGALPGMVWQDRDVYLQGPIWAKIPHTDGHFHPSPLMGGFGLKNPPPQILIKNTPVPANPPAEFSATKFASFITQYSTGQVSVEIEWELQKENSKRWNPEVQYTSNYAKSANVDFTVDNNGLYTEPRPIGTRYLT

SEQ ID NO: 5120 - protein, 734 aa, Adeno-associated virus 2
MAADGYLPDWLEDTLSEGIRQWWKLKPGPPPPKPAERHKDDSRGLVLPGCKYLGPFNGLDKGEPVNEADAAALEHDKAYDRQLDSGDNPYLKYNHADAEFQERLKEDTSFGGNLGRAVFQAKKRVLEPLGLVEEPVKTAPGKKRPVEHSPVEPDSSSGTGKAGQQPARKRLNFGQTGDADSVPDPQPLGQPPAAPSGLGTNTMATGSGAPMADNNEGADGVGNSSGNWHCDSTWMGDRVITTSTRTWALPTYNNHLYKQISSQSGASNDNHYFGYSTPWGYFDFNRFHCHFSPRDWQRLINNNWGFRPKRLNFKLFNIQVKEVTQNDGTTTIANNLTSTVQVFSDSEYQLPYVLGSAHQGCLPPFPADVFMIPQYGYLTLNNGSQAVGRSSFYCLEYFPSQMLRTGNNFTFNYTFEDVPFHSSYAHSQSLDRLMNPLIDQYLYYLNRTQNQSGSAQNNDLLFSRGSPAGMSVQPKNWLPGPCYRQQRVSKTKTDNNNSNFTWTGASKYNLNGRESIINPGTAMASHKDDKDKFFPMSGVMIFGKESAGASNTALDNVMITDEEEIKATNPVATERFGTVAVNLQSSSTDPATGDVHVMGALPGMVWQDRDVYLQGPIWAKIPHTDGHFHPSPLMGGFGLKNPPPQILIKNTPVPANPPAEFSATKFASFITQYSTGQVSVEIEWELQKENSKRWNPEVQYTSNYAKSANVDFTVDNNGLYTEPRPIGTRYLTRP

SEQ ID NO: 5121 - protein, 734 aa, Adeno-associated virus 2
MAADGYLPDWLEDTLSEGIRQWWKLKPGPPPPKPAERHKDDSRGLVLPGYKYLGPFNGLDKGEPVNEADAAALEHDKAYDRQLDSGDNPYLKYNHADAEFQERLKEDTSFGGNLGRAVFQAKKRVLEPLGLVEEPVKTAPGKKRPVEHSPVEPDSSSGTGKAGQQPARKRLNFGQTGDADSVPDPQPLGQPPAAPSGLGTNTMATGSGAPMADNNEGADGVGNSSGNWHCDSTWMGDRVITTSTRTWALSTYNNHLYKQISSQSGASNDNHYFGYSTPWGYFDFNRFHCHFSPRDWQRLINNNWGFRPKRLNFKLFNIQVKEVTQNDGTTTIANNLTSTVQVFTDSEYQLPYVLGSAHQGCLPPFPADVFMVPQYGYLTLNNGSQAVGRSSFYCLEYFPSQMLRTGNNFTFSYTFEDVPFHSSYAHSQSLDRLMNPLIDQYLYYLSRTNTPSGTTTQSRLQFSQAGASDIRDQSRNWLPGPCYRQQRVSKTSADNNNSEYSWTGATKYHLNGRDSLVNPGPAMASHKDDEEKFFPQSGVLIFGKQGSEKTNVDIEKVMITDEEEIRTTNPVATEQYGSVSTNLQRGNRQAATADVNTQGVLPGMVWQDRDVYLQGPIWAKIPHTDGHFHPSPLMGGFGLKHPPPQILIKNTPVPANPSTTFSAAKFASFITQYSTGQVSVEIEWELQKENSKRWNPEIQYTSNYNKSINVDFTVDTNGVYSEPRPIGTRYLTRN

SEQ ID NO: 5122 - protein, 738 aa, Adeno-associated virus 2
MAADGYLPDWLEDTLSEGIRQWWKLKPGPPPPKPAERHKDDSRGLVLPGYKYLGPFNGLDKGEPVNEADAAALEHDKAYDRQLDGGDNPYLKYNHADAEFQERLKEDTSFGGNLGRAVFQAKKRVLEPLGLVEEPVKTAPGKKRPVEHSPVEPDSSSGTGKAGQQPARKRLNFGQTGDADSVPDPQPLGQPPAAPSGLGTNTMATGSGAPMADNNEGADGVGNSSGNWHCDSTWMGDRVITTSTRTWALPTYNNHLYKQISSQSGASNDNHYFGYSTPWGYFDFNRFHCHFSPRDWQRLINNNWGFRPKRLNFKLFNIQVKEVTQNDGTTTIANNLTSTVQVFTDSEYQLPYVLGSAHQGCLPPFPADVFMVPQYGYLTLNNGSQAVGRSSFYCLEYFPSQMLRTGNNFTFSYTFEDVPFHSSYAHSQSLDRLMNPLIDQYLYYLSRTNTPSGTTTQSGLQFSQAGASDIRDQSRNWLPGPCYRQQRVSKTSADNNNSEYSWTGATKYHLNGRDSLVNPGPAMASHKDDEEKFFPQSGVLIFGKQGSEKTNVDIEKVMITDEEEIRTTNPVATEQYGSVSTNLQRGNRQAATADVNTQGVLPGMVWQDRDVYLQGPIWAKIPHTDGHFHPSPLMGGFGLKHPPPQILIKNTPVPANPSTTFSAAKFASFITQYSTGQVSVEIEWELQKENSKRWNPEIQYTSNYNKSVNVDFTVDTNGVYSEPRPIGTRYLTRNLLRP

SEQ ID NO: 5123 - protein, 736 aa, Adeno-associated virus 3; identical to SEQ ID NO: 4757

SEQ ID NO: 5124 - DNA, 4726 bp, Adeno-associated virus 3
  source 1..4726: mol_type = genomic DNA
ttggccactccctctatgcgcactcgctcgctcggtggggcctggcgaccaaaggtcgccagacggacgtgctttgcacgtccggccccaccgagcgagcgagtgcgcatagagggagtggccaactccatcactagaggtatggcagtgacgtaacgcgaagcgcgcgaagcgagaccacgcctaccagctgcgtcagcagtcaggtgacccttttgcgacagtttgcgacaccacgtggccgctgagggtatatattctcgagtgagcgaaccaggagctccattttgaccgcgaaatttgaacgagcagcagccatgccggggttctacgagattgtcctgaaggtcccgagtgacctggacgagcgcctgccgggcatttctaactcgtttgttaactgggtggccgagaaggaatgggacgtgccgccggattctgacatggatccgaatctgattgagcaggcacccctgaccgtggccgaaaagcttcagcgcgagttcctggtggagtggcgccgcgtgagtaaggccccggaggccctcttttttgtccagttcgaaaagggggagacctacttccacctgcacgtgctgattgagaccatcggggtcaaatccatggtggtcggccgctacgtgagccagattaaagagaagctggtgacccgcatctaccgcggggtcgagccgcagcttccgaactggttcgcggtgaccaaaacgcgaaatggcgccgggggcgggaacaaggtggtggacgactgctacatccccaactacctgctccccaagacccagcccgagctccagtgggcgtggactaacatggaccagtatttaagcgcctgtttgaatctcgcggagcgtaaacggctggtggcgcagcatctgacgcacgtgtcgcagacgcaggagcagaacaaagagaatcagaaccccaattctgacgcgccggtcatcaggtcaaaaacctcagccaggtacatggagctggtcgggtggctggtggaccgcgggatcacgtcagaaaagcaatggattcaggaggaccaggcctcgtacatctccttcaacgccgcctccaactcgcggtcccagatcaaggccgcgctggacaatgcctccaagatcatgagcctgacaaagacggctccggactacctggtgggcagcaacccgccggaggacattaccaaaaatcggatctaccaaatcctggagctgaacgggtacgatccgcagtacgcggcctccgtcttcctgggctgggcgcaaaagaagttcgggaagaggaacaccatctggctctttgggccggccacgacgggtaaaaccaacatcgcggaagccatcgcccacgccgtgcccttctacggctgcgtaaactggaccaatgagaactttcccttcaacgattgcgtcgacaagatggtgatctggtgggaggagggcaagatgacggccaaggtcgtggagagcgccaaggccattctgggcggaagcaaggtgcgcgtggaccaaaagtgcaagtcatcggcccagatcgaacccactcccgtgatcgtcacctccaacaccaacatgtgcgccgtgattgacgggaacagcaccaccttcgagcatcagcagccgctgcaggaccggatgtttgaatttgaacttacccgccgtttggaccatgactttgggaaggtcaccaaacaggaagtaaaggactttttccggtgggcttccgatcacgtgactgacgtggctcatgagttctacgtcagaaagggtggagctaagaaacgccccgcctccaatgacgcggatgtaagcgagccaaaacgggagtgcacgtcacttgcgcagccgacaacgtcagacgcggaagcaccggcggactacgcggacaggtaccaaaacaaatgttctcgtcacgtgggcatgaatctgatgctttttccctgtaaaacatgcgagagaatgaatcaaatttccaatgtctgttttacgcatggtcaaagagactgtggggaatgcttccctggaatgtcagaatctcaacccgtttctgtcgtcaaaaagaagacttatcagaaactgtgtccaattcatcatatcctgggaagggcacccgagattgcctgttcggcctgcgatttggccaatgtggacttggatgactgtgtttctgagcaataaatgacttaaaccaggtatggctgctgacggttatcttccagattggctcgaggacaacctttctgaaggcattcgtgagtggtgggctctgaaacctggagtccctcaacccaaagcgaaccaacaacaccaggacaaccgtcggggtcttgtgcttccgggttacaaatacctcggacccggtaacggactcgacaaaggagagccggtcaacgaggcggacgcggcagccctcgaacacgacaaagcttacgaccagcagctcaaggccggtgacaacccgtacctcaagtacaaccacgccgacgccgagtttcaggagcgtcttcaagaagatacgtcttttgggggcaaccttggcagagcagtcttccaggccaaaaagaggatccttgagcctcttggtctggttgaggaagcagctaaaacggctcctggaaagaagggggctgtagatcagtctcctcaggaaccggactcatcatctggtgttggcaaatcgggcaaacagcctgccagaaaaagactaaatttcggtcagactggagactcagagtcagtcccagaccctcaacctctcggagaaccaccagcagcccccacaagtttgggatctaatacaatggcttcaggcggtggcgcaccaatggcagacaataacgagggtgccgatggagtgggtaattcctcaggaaattggcattgcgattcccaatggctgggcgacagagtcatcaccaccagcaccagaacctgggccctgcccacttacaacaaccatctctacaagcaaatctccagccaatcaggagcttcaaacgacaaccactactttggctacagcaccccttgggggtattttgactttaacagattccactgccacttctcaccacgtgactggcagcgactcattaacaacaactggggattccggcccaagaaactcagcttcaagctcttcaacatccaagttagaggggtcacgcagaacgatggcacgacgactattgccaataaccttaccagcacggttcaagtgtttacggactcggagtatcagctcccgtacgtgctcgggtcggcgcaccaaggctgtctcccgccgtttccagcggacgtcttcatggtccctcagtatggatacctcaccctgaacaacggaagtcaagcggtgggacgctcatccttttactgcctggagtacttcccttcgcagatgctaaggactggaaataacttccaattcagctataccttcgaggatgtaccttttcacagcagctacgctcacagccagagtttggatcgcttgatgaatcctcttattgatcagtatctgtactacctgaacagaacgcaaggaacaacctctggaacaaccaaccaatcacggctgctttttagccaggctgggcctcagtctatgtctttgcaggccagaaattggctacctgggccctgctaccggcaacagagactttcaaagactgctaacgacaacaacaacagtaactttccttggacagcggccagcaaatatcatctcaatggccgcgactcgctggtgaatccaggaccagctatggccagtcacaaggacgatgaagaaaaatttttccctatgcacggcaatctaatatttggcaaagaagggacaacggcaagtaacgcagaattagataatgtaatgattacggatgaagaagagattcgtaccaccaatcctgtggcaacagagcagtatggaactgtggcaaataacttgcagagctcaaatacagctcccacgactggaactgtcaatcatcagggggccttacctggcatggtgtggcaagatcgtgacgtgtaccttcaaggacctatctgggcaaagattcctcacacggatggacactttcatccttctcctctgatgggaggctttggactgaaacatccgcctcctcaaatcatgatcaaaaatactccggtaccggcaaatcctccgacgactttcagcccggccaagtttgcttcatttatcactcagtactccactggacaggtcagcgtggaaattgagtgggagctacagaaagaaaacagcaaacgttggaatccagagattcagtacacttccaactacaacaagtctgttaatgtggactttactgtagacactaatggtgtttatagtgaacctcgccctattggaacccggtatctcacacgaaacttgtgaatcctggttaatcaataaaccgtttaattcgtttcagttgaactttggctcttgtgcacttctttatctttatcttgtttccatggctactgcgtagataagcagcggcctgcggcgcttgcgcttcgcggtttacaactgctggttaatatttaactctcgccatacctctagtgatggagttggccactccctctatgcgcactcgctcgctcggtggggcctggcgaccaaaggtcgccagacggacgtgctttgcacgtccggccccaccgagcgagcgagtgcgcatagagggagtggccaa

SEQ ID NO: 5125 - protein, 736 aa, Adeno-associated virus 3A; identical to SEQ ID NO: 4757

SEQ ID NO: 5126 - protein, 624 aa, Adeno-associated virus 3A
MPGFYEIVLKVPSDLDERLPGISNSFVNWVAEKEWDVPPDSDMDPNLIEQAPLTVAEKLQREFLVEWRRVSKAPEALFFVQFEKGETYFHLHVLIETIGVKSMVVGRYVSQIKEKLVTRIYRGVEPQLPNWFAVTKTRNGAGGGNKVVDDCYIPNYLLPKTQPELQWAWTNMDQYLSACLNLAERKRLVAQHLTHVSQTQEQNKENQNPNSDAPVIRSKTSARYMELVGWLVDRGITSEKQWIQEDQASYISFNAASNSRSQIKAALDNASKIMSLTKTAPDYLVGSNPPEDITKNRIYQILELNGYDPQYAASVFLGWAQKKFGKRNTIWLFGPATTGKTNIAEAIAHAVPFYGCVNWTNENFPFNDCVDKMVIWWEEGKMTAKVVESAKAILGGSKVRVDQKCKSSAQIEPTPVIVTSNTNMCAVIDGNSTTFEHQQPLQDRMFEFELTRRLDHDFGKVTKQEVKDFFRWASDHVTDVAHEFYVRKGGAKKRPASNDADVSEPKRECTSLAQPTTSDAEAPADYADRYQNKCSRHVGMNLMLFPCKTCERMNQISNVCFTHGQRDCGECFPGMSESQPVSVVKKKTYQKLCPIHHILGRAPEIACSACDLANVDLDDCVSEQ

SEQ ID NO: 5127 - protein, 736 aa, Adeno-associated virus 3B
MAADGYLPDWLEDNLSEGIREWWALKPGVPQPKANQQHQDNRRGLVLPGYKYLGPGNGLDKGEPVNEADAAALEHDKAYDQQLKAGDNPYLKYNHADAEFQERLQEDTSFGGNLGRAVFQAKKRILEPLGLVEEAAKTAPGKKRPVDQSPQEPDSSSGVGKSGKQPARKRLNFGQTGDSESVPDPQPLGEPPAAPTSLGSNTMASGGGAPMADNNEGADGVGNSSGNWHCDSQWLGDRVITTSTRTWALPTYNNHLYKQISSQSGASNDNHYFGYSTPWGYFDFNRFHCHFSPRDWQRLINNNWGFRPKKLSFKLFNIQVKEVTQNDGTTTIANNLTSTVQVFTDSEYQLPYVLGSAHQGCLPPFPADVFMVPQYGYLTLNNGSQAVGRSSFYCLEYFPSQMLRTGNNFQFSYTFEDVPFHSSYAHSQSLDRLMNPLIDQYLYYLNRTQGTTSGTTNQSRLLFSQAGPQSMSLQARNWLPGPCYRQQRLSKTANDNNNSNFPWTAASKYHLNGRDSLVNPGPAMASHKDDEEKFFPMHGNLIFGKEGTTASNAELDNVMITDEEEIRTTNPVATEQYGTVANNLQSSNTAPTTRTVNDQGALPGMVWQDRDVYLQGPIWAKIPHTDGHFHPSPLMGGFGLKHPPPQIMIKNTPVPANPPTTFSPAKFASFITQYSTGQVSVEIEWELQKENSKRWNPEIQYTSNYNKSVNVDFTVDTNGVYSEPRPIGTRYLTRNL

SEQ ID NO: 5128 - protein, 624 aa, Adeno-associated virus 3B
MPGFYEIVLKVPSDLDEHLPGISNSFVNWVAEKEWELPPDSDMDPNLIEQAPLTVAEKLQREFLVEWRRVSKAPEALFFVQFEKGETYFHLHVLIETIGVKSMVVGRYVSQIKEKLVTRIYRGVEPQLPNWFAVTKTRNGAGGGNKVVDDCYIPNYLLPKTQPELQWAWTNMDQYLSACLNLAERKRLVAQHLTHVSQTQEQNKENQNPNSDAPVIRSKTSARYMELVGWLVDRGITSEKQWIQEDQASYISFNAASNSRSQIKAALDNASKIMSLTKTAPDYLVGSNPPEDITKNRIYQILELNGYDPQYAASVFLGWAQKKFGKRNTIWLFGPATTGKTNIAEAIAHAVPFYGCVNWTNENFPFNDCVDKMVIWWEEGKMTAKVVESAKAILGGSKVRVDQKCKSSAQIEPTPVIVTSNTNMCAVIDGNSTTFEHQQPLQDRMFKFELTRRLDHDFGKVTKQEVKDFFRWASDHVTDVAHEFYVRKGGAKKRPASNDADVSEPKRQCTSLAQPTTSDAEAPADYADRYQNKCSRHVGMNLMLFPCKTCERMNQISNVCFTHGQRDCGECFPGMSESQPVSVVKKKTYQKLCPIHHILGRAPEIACSACDLANVDLDDCVSEQ

SEQ ID NO: 5129 - DNA, 4722 bp, Adeno-associated virus 3B
  source 1..4722: mol_type = genomic DNA
tggccactccctctatgcgcactcgctcgctcggtggggcctggcgaccaaaggtcgccagacggacgtgctttgcacgtccggccccaccgagcgagcgagtgcgcatagagggagtggccaactccatcactagaggtatggcagtgacgtaacgcgaagcgcgcgaagcgagaccacgcctaccagctgcgtcagcagtcaggtgacccttttgcgacagtttgcgacaccacgtggccgctgagggtatatattctcgagtgagcgaaccaggagctccattttgaccgcgaaatttgaacgagcagcagccatgccggggttctacgagattgtcctgaaggtcccgagtgacctggacgagcacctgccgggcatttctaactcgtttgttaactgggtggccgagaaggaatgggagctgccgccggattctgacatggatccgaatctgattgagcaggcacccctgaccgtggccgaaaagcttcagcgcgagttcctggtggagtggcgccgcgtgagtaaggccccggaggccctcttttttgtccagttcgaaaagggggagacctacttccacctgcacgtgctgattgagaccatcggggtcaaatccatggtggtcggccgctacgtgagccagattaaagagaagctggtgacccgcatctaccgcggggtcgagccgcagcttccgaactggttcgcggtgaccaaaacgcgaaatggcgccgggggcgggaacaaggtggtggacgactgctacatccccaactacctgctccccaagacccagcccgagctccagtgggcgtggactaacatggaccagtatttaagcgcctgtttgaatctcgcggagcgtaaacggctggtggcgcagcatctgacgcacgtgtcgcagacgcaggagcagaacaaagagaatcagaaccccaattctgacgcgccggtcatcaggtcaaaaacctcagccaggtacatggagctggtcgggtggctggtggaccgcgggatcacgtcagaaaagcaatggattcaggaggaccaggcctcgtacatctccttcaacgccgcctccaactcgcggtcccagatcaaggccgcgctggacaatgcctccaagatcatgagcctgacaaagacggctccggactacctggtgggcagcaacccgccggaggacattaccaaaaatcggatctaccaaatcctggagctgaacgggtacgatccgcagtacgcggcctccgtcttcctgggctgggcgcaaaagaagttcgggaagaggaacaccatctggctctttgggccggccacgacgggtaaaaccaacatcgcggaagccatcgcccacgccgtgcccttctacggctgcgtaaactggaccaatgagaactttcccttcaacgattgcgtcgacaagatggtgatctggtgggaggagggcaagatgacggccaaggtcgtggagagcgccaaggccattctgggcggaagcaaggtgcgcgtggaccaaaagtgcaagtcatcggcccagatcgaacccactcccgtgatcgtcacctccaacaccaacatgtgcgccgtgattgacgggaacagcaccaccttcgagcatcagcagccgctgcaggaccggatgtttaaatttgaacttacccgccgtttggaccatgactttgggaaggtcaccaaacaggaagtaaaggactttttccggtgggcttccgatcacgtgactgacgtggctcatgagttctacgtcagaaagggtggagctaagaaacgccccgcctccaatgacgcggatgtaagcgagccaaaacggcagtgcacgtcacttgcgcagccgacaacgtcagacgcggaagcaccggcggactacgcggacaggtaccaaaacaaatgttctcgtcacgtgggcatgaatctgatgctttttccctgtaaaacatgcgagagaatgaatcaaatttccaatgtctgttttacgcatggtcaaagagactgtggggaatgcttccctggaatgtcagaatctcaacccgtttctgtcgtcaaaaagaagacttatcagaaactgtgtccaattcatcatatcctgggaagggcacccgagattgcctgttcggcctgcgatttggccaatgtggacttggatgactgtgtttctgagcaataaatgacttaaaccaggtatggctgctgacggttatcttccagattggctcgaggacaacctttctgaaggcattcgtgagtggtgggctctgaaacctggagtccctcaacccaaagcgaaccaacaacaccaggacaaccgtcggggtcttgtgcttccgggttacaaatacctcggacccggtaacggactcgacaaaggagagccggtcaacgaggcggacgcggcagccctcgaacacgacaaagcttacgaccagcagctcaaggccggtgacaacccgtacctcaagtacaaccacgccgacgccgagtttcaggagcgtcttcaagaagatacgtcttttgggggcaaccttggcagagcagtcttccaggccaaaaagaggatccttgagcctcttggtctggttgaggaagcagctaaaacggctcctggaaagaagaggcctgtagatcagtctcctcaggaaccggactcatcatctggtgttggcaaatcgggcaaacagcctgccagaaaaagactaaatttcggtcagactggcgactcagagtcagtcccagaccctcaacctctcggagaaccaccagcagcccccacaagtttgggatctaatacaatggcttcaggcggtggcgcaccaatggcagacaataacgagggtgccgatggagtgggtaattcctcaggaaattggcattgcgattcccaatggctgggcgacagagtcatcaccaccagcaccagaacctgggccctgcccacttacaacaaccatctctacaagcaaatctccagccaatcaggagcttcaaacgacaaccactactttggctacagcaccccttgggggtattttgactttaacagattccactgccacttctcaccacgtgactggcagcgactcattaacaacaactggggattccggcccaagaaactcagcttcaagctcttcaacatccaagttaaagaggtcacgcagaacgatggcacgacgactattgccaataaccttaccagcacggttcaagtgtttacggactcggagtatcagctcccgtacgtgctcgggtcggcgcaccaaggctgtctcccgccgtttccagcggacgtcttcatggtccctcagtatggatacctcaccctgaacaacggaagtcaagcggtgggacgctcatccttttactgcctggagtacttcccttcgcagatgctaaggactggaaataacttccaattcagctataccttcgaggatgtaccttttcacagcagctacgctcacagccagagtttggatcgcttgatgaatcctcttattgatcagtatctgtactacctgaacagaacgcaaggaacaacctctggaacaaccaaccaatcacggctgctttttagccaggctgggcctcagtctatgtctttgcaggccagaaattggctacctgggccctgctaccggcaacagagactttcaaagactgctaacgacaacaacaacagtaactttccttggacagcggccagcaaatatcatctcaatggccgcgactcgctggtgaatccaggaccagctatggccagtcacaaggacgatgaagaaaaatttttccctatgcacggcaatctaatatttggcaaagaagggacaacggcaagtaacgcagaattagataatgtaatgattacggatgaagaagagattcgtaccaccaatcctgtggcaacagagcagtatggaactgtggcaaataacttgcagagctcaaatacagctcccacgactagaactgtcaatgatcagggggccttacctggcatggtgtggcaagatcgtgacgtgtaccttcaaggacctatctgggcaaagattcctcacacggatggacactttcatccttctcctctgatgggaggctttggactgaaacatccgcctcctcaaatcatgatcaaaaatactccggtaccggcaaatcctccgacgactttcagcccggccaagtttgcttcatttatcactcagtactccactggacaggtcagcgtggaaattgagtgggagctacagaaagaaaacagcaaacgttggaatccagagattcagtacacttccaactacaacaagtctgttaatgtggactttactgtagacactaatggtgtttatagtgaacctcgccctattggaacccggtatctcacacgaaacttgtaatcctggttaatcaataaaccgtttaattcgtttcagttgaactttggctcttgtgcacttcttatcttatcttgtttccatggctactgcgtagataagcagcggcctgcggcgcttgcgcttcgcggtttacaactgctggttaatatttaactctcgccatacctctagtgatggagttggccactccctctatgcgcactcgctcgctcggtggggccggacgtgcaaagcacgtccgtctggcgacctttggtcgccaggccccaccgagcgagcgagtgcgcatagagggagtggccaa

SEQ ID NO: 5130 - DNA, 1800 bp, Adeno-associated virus 4
  variation 342: note = a, c, t or g
  source 1..1800: mol_type = genomic DNA
acggctcctggaaagaagagaccgttgattgaatccccccagcagcccgactcctccacgggtatcggcaaaaaaggcaagcagccggctaaaaagaagctcgttttcgaagacgaaactggagcaggcgacggaccccctgagggatcaacttccggagccatgtctgatgacagtgagatgcgtgcagcagctggcggagctgcagtcgagggsggacaaggtgccgatggagtgggtaatgcctcgggtgattggcattgcgattccacctggtctgagggccacgtcacgaccaccagcaccagaacctgggtcttgcccacctacaacaaccacctntacaagcgactcggagagagcctgcagtccaacacctacaacggattctccaccccctggggatactttgacttcaaccgcttccactgccacttctcaccacgtgactggcagcgactcatcaacaacaactggggcatgcgacccaaagccatgcgggtcaaaatcttcaacatccaggtcaaggaggtcacgacgtcgaacggcgagacaacggtggctaataaccttaccagcacggttcagatctttgcggactcgtcgtacgaactgccgtacgtgatggatgcgggtcaagagggcagcctgcctccttttcccaacgacgtctttatggtgccccagtacggctactgtggactggtgaccggcaacacttcgcagcaacagactgacagaaatgccttctactgcctggagtactttccttcgcagatgctgcggactggcaacaactttgaaattacgtacagttttgagaaggtgcctttccactcgatgtacgcgcacagccagagcctggaccggctgatgaaccctctcatcgaccagtacctgtggggactgcaatcgaccaccaccggaaccaccctgaatgccgggactgccaccaccaactttaccaagctgcggcctaccaacttttccaactttaaaaagaactggctgcccgggccttcaatcaagcagcagggcttctcaaagactgccaatcaaaactacaagatccctgccaccgggtcagacagtctcatcaaatacgagacgcacagcactctggacggaagatggagtgccctgacccccggacctccaatggccacggctggacctgcggacagcaagttcagcaacagccagctcatctttgcggggcctaaacagaacggcaacacggccaccgtacccgggactctgatcttcacctctgaggaggagctggcagccaccaacgccaccgatacggacatgtggggcaacctacctggcggtgaccagagcaacagcaacctgccgaccgtggacagactgacagccttgggagccgtgcctggaatggtctggcaaaacagagacatttactaccagggtcccatttgggccaagattcctcataccgatggacactttcacccctcaccgctgattggtgggtttgggctgaaacacccgcctcctcaaatttttatcaagaacaccccggtacctgcgaatcctgcaacgaccttcagctctactccggtaaactccttcattactcagtacagcactggccaggtgtcggtgcagattgactgggagatccagaaggagcggtccaaacgctggaaccccgaggtccagtttacctccaactacggacagcaaaactctctgttgtgggctcccgatgcggctgggaaatacactgagcctagggctatcggtacccgctacctcacccaccacctgtaataa

SEQ ID NO: 5131 - DNA, 2208 bp, Adeno-associated virus 4
  source 1..2208: mol_type = genomic DNA
  variation 750: note = a, c, t or g
atgactgacggttaccttccagattggctagaggacaacctctctgaaggcgttcgagagtggtgggcgctgcaacctggagcccctaaacccaaggcaaatcaacaacatcaggacaacgctcggggtcttgtgcttccgggttacaaatacctcggacccggcaacggactcgacaagggggaacccgtcaacgcagcggacgcggcagccctcgagcacgacaaggcctacgaccagcagctcaaggccggtgacaacccctacctcaagtacaaccacgccgacgcggagttccagcagcggcttcagggcgacacatcgtttgggggcaacctcggcagagcagtcttccaggccaaaaagagggttcttgaacctcttggtctggttgagcaagcgggtgagacggctcctggaaagaagagaccgttgattgaatccccccagcagcccgactcctccacgggtatcggcaaaaaaggcaagcagccggctaaaaagaagctcgttttcgaagacgaaactggagcaggcgacggaccccctgagggatcaacttccggagccatgtctgatgacagtgagatgcgtgcagcagctggcggagctgcagtcgagggsggacaaggtgccgatggagtgggtaatgcctcgggtgattggcattgcgattccacctggtctgagggccacgtcacgaccaccagcaccagaacctgggtcttgcccacctacaacaaccacctntacaagcgactcggagagagcctgcagtccaacacctacaacggattctccaccccctggggatactttgacttcaaccgcttccactgccacttctcaccacgtgactggcagcgactcatcaacaacaactggggcatgcgacccaaagccatgcgggtcaaaatcttcaacatccaggtcaaggaggtcacgacgtcgaacggcgagacaacggtggctaataaccttaccagcacggttcagatctttgcggactcgtcgtacgaactgccgtacgtgatggatgcgggtcaagagggcagcctgcctccttttcccaacgacgtctttatggtgccccagtacggctactgtggactggtgaccggcaacacttcgcagcaacagactgacagaaatgccttctactgcctggagtactttccttcgcagatgctgcggactggcaacaactttgaaattacgtacagttttgagaaggtgcctttccactcgatgtacgcgcacagccagagcctggaccggctgatgaaccctctcatcgaccagtacctgtggggactgcaatcgaccaccaccggaaccaccctgaatgccgggactgccaccaccaactttaccaagctgcggcctaccaacttttccaactttaaaaagaactggctgcccgggccttcaatcaagcagcagggcttctcaaagactgccaatcaaaactacaagatccctgccaccgggtcagacagtctcatcaaatacgagacgcacagcactctggacggaagatggagtgccctgacccccggacctccaatggccacggctggacctgcggacagcaagttcagcaacagccagctcatctttgcggggcctaaacagaacggcaacacggccaccgtacccgggactctgatcttcacctctgaggaggagctggcagccaccaacgccaccgatacggacatgtggggcaacctacctggcggtgaccagagcaacagcaacctgccgaccgtggacagactgacagccttgggagccgtgcctggaatggtctggcaaaacagagacatttactaccagggtcccatttgggccaagattcctcataccgatggacactttcacccctcaccgctgattggtgggtttgggctgaaacacccgcctcctcaaatttttatcaagaacaccccggtacctgcgaatcctgcaacgaccttcagctctactccggtaaactccttcattactcagtacagcactggccaggtgtcggtgcagattgactgggagatccagaaggagcggtccaaacgctggaaccccgaggtccagtttacctccaactacggacagcaaaactctctgttgtgggctcccgatgcggctgggaaatacactgagcctagggctatcggtacccgctacctcacccaccacctgtaataa

SEQ ID NO: 5132 - DNA, 1872 bp, Adeno-associated virus 4
  source 1..1872: mol_type = genomic DNA
atgccggggttctacgagatcgtgctgaaggtgcccagcgacctggacgagcacctgcccggcatttctgactcttttgtgagctgggtggccgagaaggaatgggagctgccgccggattctgacatggacttgaatctgattgagcaggcacccctgaccgtggccgaaaagctgcaacgcgagttcctggtcgagtggcgccgcgtgagtaaggccccggaggccctcttctttgtccagttcgagaagggggacagctacttccacctgcacatcctggtggagaccgtgggcgtcaaatccatggtggtgggccgctacgtgagccagattaaagagaagctggtgacccgcatctaccgcggggtcgagccgcagcttccgaactggttcgcggtgaccaagacgcgtaatggcgccggaggcgggaacaaggtggtggacgactgctacatccccaactacctgctccccaagacccagcccgagctccagtgggcgtggactaacatggaccagtatataagcgcctgtttgaatctcgcggagcgtaaacggctggtggcgcagcatctgacgcacgtgtcgcagacgcaggagcagaacaaggaaaaccagaaccccaattctgacgcgccggtcatcaggtcaaaaacctccgccaggtacatggagctggtcgggtggctggtggaccgcgggatcacgtcagaaaagcaatggatccaggaggaccaggcgtcctacatctccttcaacgccgcctccaactcgcggtcacaaatcaaggccgcgctggacaatgcctccaaaatcatgagcctgacaaagacggctccggactacctggtgggccagaacccgccggaggacatttccagcaaccgcatctaccgaatcctcgagatgaacgggtacgatccgcagtacgcggcctccgtcttcctgggctgggcgcaaaagaagttcgggaagaggaacaccatctggctctttgggccggccacgacgggtaaaaccaacatcgcggaagccatcgcccacgccgtgcccttctacggctgcgtgaactggaccaatgagaactttccgttcaacgattgcgtcgacaagatggtgatctggtgggaggagggcaagatgacggccaaggtcgtagagagcgccaaggccatcctgggcggaagcaaggtgcgcgtggaccaaaagtgcaagtcatcggcccagatcgacccaactcccgtgatcgtcacctccaacaccaacatgtgcgcggtcatcgacggaaactcgaccaccttcgagcaccaacaaccactccaggaccggatgttcaagttcgagctcaccaagcgcctggagcacgactttggcaaggtcaccaagcaggaagtcaaagactttttccggtgggcgtcagatcacgtgaccgaggtgactcacgagttttacgtcagaaagggtggagctagaaagaggcccgcccccaatgacgcagatataagtgagcccaagcgggcctgtccgtcagttgcgcagccatcgacgtcagacgcggaagctccggtggactacgcggacaggtaccaaaacaaatgttctcgtcacgtgggtatgaatctgatgctttttccctgccggcaatgcgagagaatgaatcagaatgtggacatttgcttcacgcacggggtcatggactgtgccgagtgcttccccgtgtcagaatctcaacccgtgtctgtcgtcagaaagcggacgtatcagaaactgtgtccgattcatcacatcatggggagggcgcccgaggtggcctgctcggcctgcgaactggccaatgtggacttggatgactgtgacatggaacaataa

SEQ ID NO: 5133 - DNA, 1611 bp, Adeno-associated virus 4
  source 1..1611: mol_type = genomic DNA
atgccggggttctacgagatcgtgctgaaggtgcccagcgacctggacgagcacctgcccggcatttctgactcttttgtgagctgggtggccgagaaggaatgggagctgccgccggattctgacatggacttgaatctgattgagcaggcacccctgaccgtggccgaaaagctgcaacgcgagttcctggtcgagtggcgccgcgtgagtaaggccccggaggccctcttctttgtccagttcgagaagggggacagctacttccacctgcacatcctggtggagaccgtgggcgtcaaatccatggtggtgggccgctacgtgagccagattaaagagaagctggtgacccgcatctaccgcggggtcgagccgcagcttccgaactggttcgcggtgaccaagacgcgtaatggcgccggaggcgggaacaaggtggtggacgactgctacatccccaactacctgctccccaagacccagcccgagctccagtgggcgtggactaacatggaccagtatataagcgcctgtttgaatctcgcggagcgtaaacggctggtggcgcagcatctgacgcacgtgtcgcagacgcaggagcagaacaaggaaaaccagaaccccaattctgacgcgccggtcatcaggtcaaaaacctccgccaggtacatggagctggtcgggtggctggtggaccgcgggatcacgtcagaaaagcaatggatccaggaggaccaggcgtcctacatctccttcaacgccgcctccaactcgcggtcacaaatcaaggccgcgctggacaatgcctccaaaatcatgagcctgacaaagacggctccggactacctggtgggccagaacccgccggaggacatttccagcaaccgcatctaccgaatcctcgagatgaacgggtacgatccgcagtacgcggcctccgtcttcctgggctgggcgcaaaagaagttcgggaagaggaacaccatctggctctttgggccggccacgacgggtaaaaccaacatcgcggaagccatcgcccacgccgtgcccttctacggctgcgtgaactggaccaatgagaactttccgttcaacgattgcgtcgacaagatggtgatctggtgggaggagggcaagatgacggccaaggtcgtagagagcgccaaggccatcctgggcggaagcaaggtgcgcgtggaccaaaagtgcaagtcatcggcccagatcgacccaactcccgtgatcgtcacctccaacaccaacatgtgcgcggtcatcgacggaaactcgaccaccttcgagcaccaacaaccactccaggaccggatgttcaagttcgagctcaccaagcgcctggagcacgactttggcaaggtcaccaagcaggaagtcaaagactttttccggtgggcgtcagatcacgtgaccgaggtgactcacgagttttacgtcagaaagggtggagctagaaagaggcccgcccccaatgacgcagatataagtgagcccaagcgggcctgtccgtcagttgcgcagccatcgacgtcagacgcggaagctccggtggactacgcggacagattggctagaggacaacctctctga

SEQ ID NO: 5134 - DNA, 1872 bp, Adeno-associated virus 4; identical to SEQ ID NO: 5132
  source 1..1872: mol_type = genomic DNA

SEQ ID NO: 5135 - DNA, 1617 bp, Adeno-associated virus 4
  variation 162: note = a, c, t or g
  source 1..1617: mol_type = genomic DNA
atgcgtgcagcagctggcggagctgcagtcgagggsggacaaggtgccgatggagtgggtaatgcctcgggtgattggcattgcgattccacctggtctgagggccacgtcacgaccaccagcaccagaacctgggtcttgcccacctacaacaaccacctntacaagcgactcggagagagcctgcagtccaacacctacaacggattctccaccccctggggatactttgacttcaaccgcttccactgccacttctcaccacgtgactggcagcgactcatcaacaacaactggggcatgcgacccaaagccatgcgggtcaaaatcttcaacatccaggtcaaggaggtcacgacgtcgaacggcgagacaacggtggctaataaccttaccagcacggttcagatctttgcggactcgtcgtacgaactgccgtacgtgatggatgcgggtcaagagggcagcctgcctccttttcccaacgacgtctttatggtgccccagtacggctactgtggactggtgaccggcaacacttcgcagcaacagactgacagaaatgccttctactgcctggagtactttccttcgcagatgctgcggactggcaacaactttgaaattacgtacagttttgagaaggtgcctttccactcgatgtacgcgcacagccagagcctggaccggctgatgaaccctctcatcgaccagtacctgtggggactgcaatcgaccaccaccggaaccaccctgaatgccgggactgccaccaccaactttaccaagctgcggcctaccaacttttccaactttaaaaagaactggctgcccgggccttcaatcaagcagcagggcttctcaaagactgccaatcaaaactacaagatccctgccaccgggtcagacagtctcatcaaatacgagacgcacagcactctggacggaagatggagtgccctgacccccggacctccaatggccacggctggacctgcggacagcaagttcagcaacagccagctcatctttgcggggcctaaacagaacggcaacacggccaccgtacccgggactctgatcttcacctctgaggaggagctggcagccaccaacgccaccgatacggacatgtggggcaacctacctggcggtgaccagagcaacagcaacctgccgaccgtggacagactgacagccttgggagccgtgcctggaatggtctggcaaaacagagacatttactaccagggtcccatttgggccaagattcctcataccgatggacactttcacccctcaccgctgattggtgggtttgggctgaaacacccgcctcctcaaatttttatcaagaacaccccggtacctgcgaatcctgcaacgaccttcagctctactccggtaaactccttcattactcagtacagcactggccaggtgtcggtgcagattgactgggagatccagaaggagcggtccaaacgctggaaccccgaggtccagtttacctccaactacggacagcaaaactctctgttgtgggctcccgatgcggctgggaaatacactgagcctagggctatcggtacccgctacctcacccaccacctgtaa

SEQ ID NO: 5136 - DNA, 939 bp, Adeno-associated virus 4
  source 1..939: mol_type = genomic DNA
atggagctggtcgggtggctggtggaccgcgggatcacgtcagaaaagcaatggatccaggaggaccaggcgtcctacatctccttcaacgccgcctccaactcgcggtcacaaatcaaggccgcgctggacaatgcctccaaaatcatgagcctgacaaagacggctccggactacctggtgggccagaacccgccggaggacatttccagcaaccgcatctaccgaatcctcgagatgaacgggtacgatccgcagtacgcggcctccgtcttcctgggctgggcgcaaaagaagttcgggaagaggaacaccatctggctctttgggccggccacgacgggtaaaaccaacatcgcggaagccatcgcccacgccgtgcccttctacggctgcgtgaactggaccaatgagaactttccgttcaacgattgcgtcgacaagatggtgatctggtgggaggagggcaagatgacggccaaggtcgtagagagcgccaaggccatcctgggcggaagcaaggtgcgcgtggaccaaaagtgcaagtcatcggcccagatcgacccaactcccgtgatcgtcacctccaacaccaacatgtgcgcggtcatcgacggaaactcgaccaccttcgagcaccaacaaccactccaggaccggatgttcaagttcgagctcaccaagcgcctggagcacgactttggcaaggtcaccaagcaggaagtcaaagactttttccggtgggcgtcagatcacgtgaccgaggtgactcacgagttttacgtcagaaagggtggagctagaaagaggcccgcccccaatgacgcagatataagtgagcccaagcgggcctgtccgtcagttgcgcagccatcgacgtcagacgcggaagctccggtggactacgcggacagattggctagaggacaacctctctga

SEQ ID NO: 5137 - DNA, 1197 bp, Adeno-associated virus 4
  source 1..1197: mol_type = genomic DNA
atggagctggtcgggtggctggtggaccgcgggatcacgtcagaaaagcaatggatccaggaggaccaggcgtcctacatctccttcaacgccgcctccaactcgcggtcacaaatcaaggccgcgctggacaatgcctccaaaatcatgagcctgacaaagacggctccggactacctggtgggccagaacccgccggaggacatttccagcaaccgcatctaccgaatcctcgagatgaacgggtacgatccgcagtacgcggcctccgtcttcctgggctgggcgcaaaagaagttcgggaagaggaacaccatctggctctttgggccggccacgacgggtaaaaccaacatcgcggaagccatcgcccacgccgtgcccttctacggctgcgtgaactggaccaatgagaactttccgttcaacgattgcgtcgacaagatggtgatctggtgggaggagggcaagatgacggccaaggtcgtagagagcgccaaggccatcctgggcggaagcaaggtgcgcgtggaccaaaagtgcaagtcatcggcccagatcgacccaactcccgtgatcgtcacctccaacaccaacatgtgcgcggtcatcgacggaaactcgaccaccttcgagcaccaacaaccactccaggaccggatgttcaagttcgagctcaccaagcgcctggagcacgactttggcaaggtcaccaagcaggaagtcaaagactttttccggtgggcgtcagatcacgtgaccgaggtgactcacgagttttacgtcagaaagggtggagctagaaagaggcccgcccccaatgacgcagatataagtgagcccaagcgggcctgtccgtcagttgcgcagccatcgacgtcagacgcggaagctccggtggactacgcggacaggtaccaaaacaaatgttctcgtcacgtgggtatgaatctgatgctttttccctgccggcaatgcgagagaatgaatcagaatgtggacatttgcttcacgcacggggtcatggactgtgccgagtgcttccccgtgtcagaatctcaacccgtgtctgtcgtcagaaagcggacgtatcagaaactgtgtccgattcatcacatcatggggagggcgcccgaggtggcctgctcggcctgcgaactggccaatgtggacttggatgactgtgacatggaacaa

SEQ ID NO: 5138 - DNA, 245 bp, Adeno-associated virus 4
  source 1..245: mol_type = genomic DNA
ctccatcatctaggtttgcccactgacgtcaatgtgacgtcctagggttagggaggtccctgtattagcagtcacgtgagtgtcgtatttcgcggagcgtagcggagcgcataccaagctgccacgtcacagccacgtggtccgtttgcgacagtttgcgacaccatgtggtcaggagggtatataaccgcgagtgagccagcgaggagctccattttgcccgcgaattttgaacgagcagcagc

SEQ ID NO: 5139 - protein, 313 aa, Adeno-associated virus 4
  MOD_RES 313: note = Any amino acid
MELVGWLVDRGITSEKQWIQEDQASYISFNAASNSRSQIKAALDNASKIMSLTKTAPDYLVGQNPPEDISSNRIYRILEMNGYDPQYAASVFLGWAQKKFGKRNTIWLFGPATTGKTNIAEAIAHAVPFYGCVNWTNENFPFNDCVDKMVIWWEEGKMTAKVVESAKAILGGSKVRVDQKCKSSAQIDPTPVIVTSNTNMCAVIDGNSTTFEHQQPLQDRMFKFELTKRLEHDFGKVTKQEVKDFFRWASDHVTEVTHEFYVRKGGARKRPAPNDADISEPKRACPSVAQPSTSDAEAPVDYADRLARGQPLX

SEQ ID NO: 5140 - protein, 399 aa, Adeno-associated virus 4
MELVGWLVDRGITSEKQWIQEDQASYISFNAASNSRSQIKAALDNASKIMSLTKTAPDYLVGQNPPEDISSNRIYRILEMNGYDPQYAASVFLGWAQKKFGKRNTIWLFGPATTGKTNIAEAIAHAVPFYGCVNWTNENFPFNDCVDKMVIWWEEGKMTAKVVESAKAILGGSKVRVDQKCKSSAQIDPTPVIVTSNTNMCAVIDGNSTTFEHQQPLQDRMFKFELTKRLEHDFGKVTKQEVKDFFRWASDHVTEVTHEFYVRKGGARKRPAPNDADISEPKRACPSVAQPSTSDAEAPVDYADRYQNKCSRHVGMNLMLFPCRQCERMNQNVDICFTHGVMDCAECFPVSESQPVSVVRKRTYQKLCPIHHIMGRAPEVACSACELANVDLDDCDMEQ

SEQ ID NO: 5141 - protein, 623 aa, Adeno-associated virus 4
MPGFYEIVLKVPSDLDEHLPGISDSFVSWVAEKEWELPPDSDMDLNLIEQAPLTVAEKLQREFLVEWRRVSKAPEALFFVQFEKGDSYFHLHILVETVGVKSMVVGRYVSQIKEKLVTRIYRGVEPQLPNWFAVTKTRNGAGGGNKVVDDCYIPNYLLPKTQPELQWAWTNMDQYISACLNLAERKRLVAQHLTHVSQTQEQNKENQNPNSDAPVIRSKTSARYMELVGWLVDRGITSEKQWIQEDQASYISFNAASNSRSQIKAALDNASKIMSLTKTAPDYLVGQNPPEDISSNRIYRILEMNGYDPQYAASVFLGWAQKKFGKRNTIWLFGPATTGKTNIAEAIAHAVPFYGCVNWTNENFPFNDCVDKMVIWWEEGKMTAKVVESAKAILGGSKVRVDQKCKSSAQIDPTPVIVTSNTNMCAVIDGNSTTFEHQQPLQDRMFKFELTKRLEHDFGKVTKQEVKDFFRWASDHVTEVTHEFYVRKGGARKRPAPNDADISEPKRACPSVAQPSTSDAEAPVDYADRYQNKCSRHVGMNLMLFPCRQCERMNQNVDICFTHGVMDCAECFPVSESQPVSVVRKRTYQKLCPIHHIMGRAPEVACSACELANVDLDDCDMEQ

SEQ ID NO: 5142 - protein, 537 aa, Adeno-associated virus 4
  MOD_RES 537: note = Any amino acid
MPGFYEIVLKVPSDLDEHLPGISDSFVSWVAEKEWELPPDSDMDLNLIEQAPLTVAEKLQREFLVEWRRVSKAPEALFFVQFEKGDSYFHLHILVETVGVKSMVVGRYVSQIKEKLVTRIYRGVEPQLPNWFAVTKTRNGAGGGNKVVDDCYIPNYLLPKTQPELQWAWTNMDQYISACLNLAERKRLVAQHLTHVSQTQEQNKENQNPNSDAPVIRSKTSARYMELVGWLVDRGITSEKQWIQEDQASYISFNAASNSRSQIKAALDNASKIMSLTKTAPDYLVGQNPPEDISSNRIYRILEMNGYDPQYAASVFLGWAQKKFGKRNTIWLFGPATTGKTNIAEAIAHAVPFYGCVNWTNENFPFNDCVDKMVIWWEEGKMTAKVVESAKAILGGSKVRVDQKCKSSAQIDPTPVIVTSNTNMCAVIDGNSTTFEHQQPLQDRMFKFELTKRLEHDFGKVTKQEVKDFFRWASDHVTEVTHEFYVRKGGARKRPAPNDADISEPKRACPSVAQPSTSDAEAPVDYADRLARGQPLX

SEQ ID NO: 5143 - protein, 623 aa, Adeno-associated virus 4; identical to SEQ ID NO: 5141

SEQ ID NO: 5144 - protein, 544 aa, Adeno-associated virus 4
MSDDSEMRAAAGGAAVEGGQGADGVGNASGDWHCDSTWSEGHVTTTSTRTWVLPTYNNHLYKRLGESLQSNTYNGFSTPWGYFDFNRFHCHFSPRDWQRLINNNWGMRPKAMRVKIFNIQVKEVTTSNGETTVANNLTSTVQIFADSSYELPYVMDAGQEGSLPPFPNDVFMVPQYGYCGLVTGNTSQQQTDRNAFYCLEYFPSQMLRTGNNFEITYSFEKVPFHSMYAHSQSLDRLMNPLIDQYLWGLQSTTTGTTLNAGTATTNFTKLRPTNFSNFKKNWLPGPSIKQQGFSKTANQNYKIPATGSDSLIKYETHSTLDGRWSALTPGPPMATAGPADSKFSNSQLIFAGPKQNGNTATVPGTLIFTSEEELAATNATDTDMWGNLPGGDQSNSNLPTVDRLTALGAVPGMVWQNRDIYYQGPIWAKIPHTDGHFHPSPLIGGFGLKHPPPQIFIKNTPVPANPATTFSSTPVNSFITQYSTGQVSVQIDWEIQKERSKRWNPEVQFTSNYGQQNSLLWAPDAAGKYTEPRAIGTRYLTHHL

SEQ ID NO: 5145 - protein, 734 aa, Adeno-associated virus 4; identical to SEQ ID NO: 4791

SEQ ID NO: 5146 - protein, 598 aa, Adeno-associated virus 4
TAPGKKRPLIESPQQPDSSTGIGKKGKQPAKKKLVFEDETGAGDGPPEGSTSGAMSDDSEMRAAAGGAAVEGGQGADGVGNASGDWHCDSTWSEGHVTTTSTRTWVLPTYNNHLYKRLGESLQSNTYNGFSTPWGYFDFNRFHCHFSPRDWQRLINNNWGMRPKAMRVKIFNIQVKEVTTSNGETTVANNLTSTVQIFADSSYELPYVMDAGQEGSLPPFPNDVFMVPQYGYCGLVTGNTSQQQTDRNAFYCLEYFPSQMLRTGNNFEITYSFEKVPFHSMYAHSQSLDRLMNPLIDQYLWGLQSTTTGTTLNAGTATTNFTKLRPTNFSNFKKNWLPGPSIKQQGFSKTANQNYKIPATGSDSLIKYETHSTLDGRWSALTPGPPMATAGPADSKFSNSQLIFAGPKQNGNTATVPGTLIFTSEEELAATNATDTDMWGNLPGGDQSNSNLPTVDRLTALGAVPGMVWQNRDIYYQGPIWAKIPHTDGHFHPSPLIGGFGLKHPPPQIFIKNTPVPANPATTFSSTPVNSFITQYSTGQVSVQIDWEIQKERSKRWNPEVQFTSNYGQQNSLLWAPDAAGKYTEPRAIGTRYLTHHL

SEQ ID NO: 5147 - DNA, 129 bp, Adeno-associated virus 4
  source 1..129: mol_type = genomic DNA
ttggccactccctctatgcgcgctcgctcactcactcggccctgcggccagaggccggcagtctggagacctttggtgtccagggcagggccgagtgagtgagcgagcgcgcatagagggagtggccaa

SEQ ID NO: 5148 - DNA, 125 bp, Adeno-associated virus 4
  source 1..125: mol_type = genomic DNA
ttggccactccctctatgcgcgctcgctcactcactcggccctggagaccaaaggtctccagactgccggcctctggccggcagggccgagtgagtgagcgagcgcgcatagagggagtggccaa

SEQ ID NO: 5149 - DNA, 4768 bp, Adeno-associated virus 4
  variation 3009: note = a, c, t or g
  source 1..4768: mol_type = genomic DNA
ttggccactccctctatgcgcgctcgctcactcactcggccctggagaccaaaggtctccagactgccggcctctggccggcagggccgagtgagtgagcgagcgcgcatagagggagtggccaactccatcatctaggtttgcccactgacgtcaatgtgacgtcctagggttagggaggtccctgtattagcagtcacgtgagtgtcgtatttcgcggagcgtagcggagcgcataccaagctgccacgtcacagccacgtggtccgtttgcgacagtttgcgacaccatgtggtcaggagggtatataaccgcgagtgagccagcgaggagctccattttgcccgcgaattttgaacgagcagcagccatgccggggttctacgagatcgtgctgaaggtgcccagcgacctggacgagcacctgcccggcatttctgactcttttgtgagctgggtggccgagaaggaatgggagctgccgccggattctgacatggacttgaatctgattgagcaggcacccctgaccgtggccgaaaagctgcaacgcgagttcctggtcgagtggcgccgcgtgagtaaggccccggaggccctcttctttgtccagttcgagaagggggacagctacttccacctgcacatcctggtggagaccgtgggcgtcaaatccatggtggtgggccgctacgtgagccagattaaagagaagctggtgacccgcatctaccgcggggtcgagccgcagcttccgaactggttcgcggtgaccaagacgcgtaatggcgccggaggcgggaacaaggtggtggacgactgctacatccccaactacctgctccccaagacccagcccgagctccagtgggcgtggactaacatggaccagtatataagcgcctgtttgaatctcgcggagcgtaaacggctggtggcgcagcatctgacgcacgtgtcgcagacgcaggagcagaacaaggaaaaccagaaccccaattctgacgcgccggtcatcaggtcaaaaacctccgccaggtacatggagctggtcgggtggctggtggaccgcgggatcacgtcagaaaagcaatggatccaggaggaccaggcgtcctacatctccttcaacgccgcctccaactcgcggtcacaaatcaaggccgcgctggacaatgcctccaaaatcatgagcctgacaaagacggctccggactacctggtgggccagaacccgccggaggacatttccagcaaccgcatctaccgaatcctcgagatgaacgggtacgatccgcagtacgcggcctccgtcttcctgggctgggcgcaaaagaagttcgggaagaggaacaccatctggctctttgggccggccacgacgggtaaaaccaacatcgcggaagccatcgcccacgccgtgcccttctacggctgcgtgaactggaccaatgagaactttccgttcaacgattgcgtcgacaagatggtgatctggtgggaggagggcaagatgacggccaaggtcgtagagagcgccaaggccatcctgggcggaagcaaggtgcgcgtggaccaaaagtgcaagtcatcggcccagatcgacccaactcccgtgatcgtcacctccaacaccaacatgtgcgcggtcatcgacggaaactcgaccaccttcgagcaccaacaaccactccaggaccggatgttcaagttcgagctcaccaagcgcctggagcacgactttggcaaggtcaccaagcaggaagtcaaagactttttccggtgggcgtcagatcacgtgaccgaggtgactcacgagttttacgtcagaaagggtggagctagaaagaggcccgcccccaatgacgcagatataagtgagcccaagcgggcctgtccgtcagttgcgcagccatcgacgtcagacgcggaagctccggtggactacgcggacaggtaccaaaacaaatgttctcgtcacgtgggtatgaatctgatgctttttccctgccggcaatgcgagagaatgaatcagaatgtggacatttgcttcacgcacggggtcatggactgtgccgagtgcttccccgtgtcagaatctcaacccgtgtctgtcgtcagaaagcggacgtatcagaaactgtgtccgattcatcacatcatggggagggcgcccgaggtggcctgctcggcctgcgaactggccaatgtggacttggatgactgtgacatggaacaataaatgactcaaaccagatatgactgacggttaccttccagattggctagaggacaacctctctgaaggcgttcgagagtggtgggcgctgcaacctggagcccctaaacccaaggcaaatcaacaacatcaggacaacgctcggggtcttgtgcttccgggttacaaatacctcggacccggcaacggactcgacaagggggaacccgtcaacgcagcggacgcggcagccctcgagcacgacaaggcctacgaccagcagctcaaggccggtgacaacccctacctcaagtacaaccacgccgacgcggagttccagcagcggcttcagggcgacacaccgtttgggggcaacctcggcagagcagtcttccaggccaaaaagagggttcttgaacctcttggtctggttgagcaagcgggtgagacggctcctggaaagaagagaccgttgattgaatccccccagcagcccgactcctccacgggtatcggcaaaaaaggcaagcagccggctaaaaagaagctcgttttcgaagacgaaactggagcaggcgacggaccccctgagggatcaacttccggagccatgtctgatgacagtgagatgcgtgcagcagctggcggagctgcagtcgagggsggacaaggtgccgatggagtgggtaatgcctcgggtgattggcattgcgattccacctggtctgagggccacgtcacgaccaccagcaccagaacctgggtcttgcccacctacaacaaccacctntacaagcgactcggagagagcctgcagtccaacacctacaacggattctccaccccctggggatactttgacttcaaccgcttccactgccacttctcaccacgtgactggcagcgactcatcaacaacaactggggcatgcgacccaaagccatgcgggtcaaaatcttcaacatccaggtcaaggaggtcacgacgtcgaacggcgagacaacggtggctaataaccttaccagcacggttcagatctttgcggactcgtcgtacgaactgccgtacgtgatggatgcgggtcaagagggcagcctgcctccttttcccaacgacgtctttatggtgccccagtacggctactgtggactggtgaccggcaacacttcgcagcaacagactgacagaaatgccttctactgcctggagtactttccttcgcagatgctgcggactggcaacaactttgaaattacgtacagttttgagaaggtgcctttccactcgatgtacgcgcacagccagagcctggaccggctgatgaaccctctcatcgaccagtacctgtggggactgcaatcgaccaccaccggaaccaccctgaatgccgggactgccaccaccaactttaccaagctgcggcctaccaacttttccaactttaaaaagaactggctgcccgggccttcaatcaagcagcagggcttctcaaagactgccaatcaaaactacaagatccctgccaccgggtcagacagtctcatcaaatacgagacgcacagcactctggacggaagatggagtgccctgacccccggacctccaatggccacggctggacctgcggacagcaagttcagcaacagccagctcatctttgcggggcctaaacagaacggcaacacggccaccgtacccgggactctgatcttcacctctgaggaggagctggcagccaccaacgccaccgatacggacatgtggggcaacctacctggcggtgaccagagcaacagcaacctgccgaccgtggacagactgacagccttgggagccgtgcctggaatggtctggcaaaacagagacatttactaccagggtcccatttgggccaagattcctcataccgatggacactttcacccctcaccgctgattggtgggtttgggctgaaacacccgcctcctcaaatttttatcaagaacaccccggtacctgcgaatcctgcaacgaccttcagctctactccggtaaactccttcattactcagtacagcactggccaggtgtcggtgcagattgactgggagatccagaaggagcggtccaaacgctggaaccccgaggtccagtttacctccaactacggacagcaaaactctctgttgtgggctcccgatgcggctgggaaatacactgagcctagggctatcggtacccgctacctcacccaccacctgtaataacctgttaatcaataaaccggtttattcgtttcagttgaactttggtctccgtgtccttcttatcttatctcgtttccatggctactgcgtacataagcagcggcctgcggcgcttgcgcttcgcggtttacaactgccggttaatcagtaacttctggcaaaccatgatgatggagttggccactccctctatgcgcgctcgctcactcactcggccctggagaccaaaggtctccagactgccggcctctggccggcagggccgagtgagtgagcgagcgcgcatagagggagtggccaa

SEQ ID NO: 5150 - protein, 725 aa, Adeno-associated virus 5
MAADGYLPDWLEDTLSEGIRQWWKLKPGPPPPKPAERHKDDSRGLVLPGYKYLGPFNGLDKGEPVNEADAAALEHDKAYDRQLDSGDNPYLKYNHADAEFQERLKEDTSFGGNLGRAVFQAKKRVLEPFGLVEEGAKTAPTGKRIDDHFPKRKKARTEEDSKPSTSSDAEAGPSGSQQLQIPAQPASSLGADTMSAGGGGPLGDNNQGADGVGNASGDWHCDSTWMGDRVVTKSTRTWVLPSYNNHQYREIKSGSVDGSNANAYFGYSTPWGYFDFNRFHSHWSPRDWQRLINNYWGFRPRSLRVKIFNIQVKEVTVQDSTTTIANNLTSTVQVFTDDDYQLPYVVGNGTEGCLPAFPPQVFTLPQYGYATLNRDNTENPTERSSFFCLEYFPSKMLRTGNNFEFTYNFEEVPFHSSFAPSQNLFKLANPLVDQYLYRFVSTNNTGGVQFNKNLAGRYANTYKNWFPGPMGRTQGWNLGSGVNRASVSAFATTNRMELEGASYQVPPQPNGMTNNLQGSNTYALENTMIFNSQPANPGTTATYLEGNMLITSESETQPVNRVAYNVGGQMATNNQSSTTAPTTGTYNLQEIVPGSVWMERDVYLQGPIWAKIPETGAHFHPSPAMGGFGLKHPPPMMLIKNTPVPGNITSFSDVPVSSFITQYSTGQVTVEMEWELKKENSKRWNPEIQYTNNYNDPQFVDFAPDSTGEYRTTRPIGTRYLTRPL

SEQ ID NO: 5151 - protein, 724 aa, Adeno-associated virus 5
MSFVDHPPDWLEEVGEGLREFLGLEAGPPKPKPNQQHQDQARGLVLPGYNYLGPGNGLDRGEPVNRADEVAREHDISYNEQLEAGDNPYLKYNHADAEFQEKLADDTSFGGNLGKAVFQAKKRVLEPFGLVEEGAKTAPTGKRIDDHFPKRKKARTEEDSKPSTSSDAEAGPSGSQQLQIPAQPASSLGADTMSAGGGGPLGDNNQGADGVGNASGDWHCDSTWMGDRVVTKSTRTWVLPSYNNHQYREIKSGSVDGSNANAYFGYSTPWGYFDFNRFHSHWSPRDWQRLINNYWGFRPRSLRVKIFNIQVKEVTVQDSTTTIANNLTSTVQVFTDDDYQLPYVVGNGTEGCLPAFPPQVFTLPQYGYATLNRDNTENPTERSSFFCLEYFPSKMLRTGNNFEFTYNFEEVPFHSSFAPSQNLFKLANPLVDQYLYRFVSTNNTGGVQFNKNLAGRYANTYKNWFPGPMGRTQGWNLGSGVNRASVSAFATTNRMELEGASYQVPPQPNGMTNNLQGSNTYALENTMIFNSQPANPGTTATYLEGNMLITSESETQPVNRVAYNVGGQMATNNQSSTTAPATGTYNLQEIVPGSVWMERDVYLQGPIWAKIPETGAHFHPSPAMGGFGLKHPPPMMLIKNTPVPGNITSFSDVPVSSFITQYSTGQVTVEMEWELKKENSKRWNPEIQYTNNYNDPQFVDFAPDSTGEYRTTRPIGTRYLTRPL

SEQ ID NO: 5152 - DNA, 2175 bp, Adeno-associated virus 5
  source 1..2175: mol_type = genomic DNA
atgtcttttgttgatcaccctccagattggttggaagaagttggtgaaggtcttcgcgagtttttgggccttgaagcgggcccaccgaaaccaaaacccaatcagcagcatcaagatcaagcccgtggtcttgtgctgcctggttataactatctcggacccggaaacggtctcgatcgaggagagcctgtcaacagggcagacgaggtcgcgcgagagcacgacatctcgtacaacgagcagcttgaggcgggagacaacccctacctcaagtacaaccacgcggacgccgagtttcaggagaagctcgccgacgacacatccttcgggggaaacctcggaaaggcagtctttcaggccaagaaaagggttctcgaaccttttggcctggttgaagagggtgctaagacggcccctaccggaaagcggatagacgaccactttccaaaaagaaagaaggctcggaccgaagaggactccaagccttccacctcgtcagacgccgaagctggacccagcggatcccagcagctgcaaatcccagcccaaccagcctcaagtttgggagctgatacaatgtctgcgggaggtggcggcccattgggcgacaataaccaaggtgccgatggagtgggcaatgcctcgggagattggcattgcgattccacgtggatgggggacagagtcgtcaccaagtccacccgaacctgggtgctgcccagctacaacaaccaccagtaccgagagatcaaaagcggctccgtcgacggaagcaacgccaacgcctactttggatacagcaccccctgggggtactttgactttaaccgcttccacagccactggagcccccgagactggcaaagactcatcaacaactactggggcttcagaccccggtccctcagagtcaaaatcttcaacattcaagtcaaagaggtcacggtgcaggactccaccaccaccatcgccaacaacctcacctccaccgtccaagtgtttacggacgacgactaccagctgccctacgtcgtcggcaacgggaccgagggatgcctgccggccttccctccgcaggtctttacgctgccgcagtacggttacgcgacgctgaaccgcgacaacacagaaaatcccaccgagaggagcagcttcttctgcctagagtactttcccagcaagatgctgagaacgggcaacaactttgagtttacctacaactttgaggaggtgcccttccactccagcttcgctcccagtcagaacctgttcaagctggccaacccgctggtggaccagtacttgtaccgcttcgtgagcacaaataacactggcggagtccagttcaacaagaacctggccgggagatacgccaacacctacaaaaactggttcccggggcccatgggccgaacccagggctggaacctgggctccggggtcaaccgcgccagtgtcagcgccttcgccacgaccaataggatggagctcgagggcgcgagttaccaggtgcccccgcagccgaacggcatgaccaacaacctccagggcagcaacacctatgccctggagaacactatgatcttcaacagccagccggcgaacccgggcaccaccgccacgtacctcgagggcaacatgctcatcaccagcgagagcgagacgcagccggtgaaccgcgtggcgtacaacgtcggcgggcagatggccaccaacaaccagagctccaccactgcccccgcgaccggcacgtacaacctccaggaaatcgtgcccggcagcgtgtggatggagagggacgtgtacctccaaggacccatctgggccaagatcccagagacgggggcgcactttcacccctctccggccatgggcggattcggactcaaacacccaccgcccatgatgctcatcaagaacacgcctgtgcccggaaatatcaccagcttctcggacgtgcccgtcagcagcttcatcacccagtacagcaccgggcaggtcaccgtggagatggagtgggagctcaagaaggaaaactccaagaggtggaacccagagatccagtacacaaacaactacaacgacccccagtttgtggactttgccccggacagcaccggggaatacagaaccaccagacctatcggaacccgataccttacccgacccctttaa

SEQ ID NO: 5153 - DNA, 2208 bp, Adeno-associated virus 6
  source 1..2208: mol_type = genomic DNA
atggctgccgatggttatcttccagattggctcgaggacaacctctctgagggcattcgcgagtggtgggacttgaaacctggagccccgaaacccaaagccaaccagcaaaagcaggacgacggccggggtctggtgcttcctggctacaagtacctcggacccttcaacggactcgacaagggggagcccgtcaacgcggcggatgcagcggccctcgagcacgacaaggcctacgaccagcagctcaaagcgggtgacaatccgtacctgcggtataaccacgccgacgccgagtttcaggagcgtctgcaagaagatacgtcttttgggggcaacctcgggcgagcagtcttccaggccaagaagagggttctcgaaccttttggtctggttgaggaaggtgctaagacggctcctggaaagaaacgtccggtagagcagtcgccacaagagccagactcctcctcgggcattggcaagacaggccagcagcccgctaaaaagagactcaattttggtcagactggcgactcagagtcagtccccgacccacaacctctcggagaacctccagcaacccccgctgctgtgggacctactacaatggcttcaggcggtggcgcaccaatggcagacaataacgaaggcgccgacggagtgggtaatgcctcaggaaattggcattgcgattccacatggctgggcgacagagtcatcaccaccagcacccgaacatgggccttgcccacctataacaaccacctctacaagcaaatctccagtgcttcaacgggggccagcaacgacaaccactacttcggctacagcaccccctgggggtattttgatttcaacagattccactgccatttctcaccacgtgactggcagcgactcatcaacaacaattggggattccggcccaagagactcaacttcaagctcttcaacatccaagtcaaggaggtcacgacgaatgatggcgtcacgaccatcgctaataaccttaccagcacggttcaagtcttctcggactcggagtaccagttgccgtacgtcctcggctctgcgcaccagggctgcctccctccgttcccggcggacgtgttcatgattccgcagtacggctacctaacgctcaacaatggcagccaggcagtgggacggtcatccttttactgcctggaatatttcccatcgcagatgctgagaacgggcaataactttaccttcagctacaccttcgaggacgtgcctttccacagcagctacgcgcacagccagagcctggaccggctgatgaatcctctcatcgaccagtacctgtattacctgaacagaactcagaatcagtccggaagtgcccaaaacaaggacttgctgtttagccgggggtctccagctggcatgtctgttcagcccaaaaactggctacctggaccctgttaccggcagcagcgcgtttctaaaacaaaaacagacaacaacaacagcaactttacctggactggtgcttcaaaatataaccttaatgggcgtgaatctataatcaaccctggcactgctatggcctcacacaaagacgacaaagacaagttctttcccatgagcggtgtcatgatttttggaaaggagagcgccggagcttcaaacactgcattggacaatgtcatgatcacagacgaagaggaaatcaaagccactaaccccgtggccaccgaaagatttgggactgtggcagtcaatctccagagcagcagcacagaccctgcgaccggagatgtgcatgttatgggagccttacctggaatggtgtggcaagacagagacgtatacctgcagggtcctatttgggccaaaattcctcacacggatggacactttcacccgtctcctctcatgggcggctttggacttaagcacccgcctcctcagatcctcatcaaaaacacgcctgttcctgcgaatcctccggcagagttttcggctacaaagtttgcttcattcatcacccagtattccacaggacaagtgagcgtggagattgaatgggagctgcagaaagaaaacagcaaacgctggaatcccgaagtgcagtatacatctaactatgcaaaatctgccaacgttgatttcactgtggacaacaatggactttatactgagcctcgccccattggcacccgttacctcacccgtcccctg

SEQ ID NO: 5154 - protein, 736 aa, Adeno-associated virus 6; identical to SEQ ID NO: 4799

SEQ ID NO: 5155 - protein, 623 aa, Adeno-associated virus 6
MPGFYEIVIKVPSDLDEHLPGISDSFVNWVAEKEWELPPDSDMDLNLIEQAPLTVAEKLQRDFLVQWRRVSKAPEALFFVQFEKGESYFHLHILVETTGVKSMVLGRFLSQIRDKLVQTIYRGIEPTLPNWFAVTKTRNGAGGGNKVVDECYIPNYLLPKTQPELQWAWTNMEEYISACLNLAERKRLVAHDLTHVSQTQEQNKENLNPNSDAPVIRSKTSARYMELVGWLVDRGITSEKQWIQEDQASYISFNAASNSRSQIKAALDNAGKIMALTKSAPDYLVGPAPPADIKTNRIYRILELNGYDPAYAGSVFLGWAQKRFGKRNTIWLFGPATTGKTNIAEAIAHAVPFYGCVNWTNENFPFNDCVDKMVIWWEEGKMTAKVVESAKAILGGSKVRVDQKCKSSAQIDPTPVIVTSNTNMCAVIDGNSTTFEHQQPLQDRMFKFELTRRLEHDFGKVTKQEVKEFFRWAQDHVTEVAHEFYVRKGGANKRPAPDDADKSEPKRACPSVADPSTSDAEGAPVDFADRYQNKCSRHAGMLQMLFPCKTCERMNQNFNICFTHGTRDCSECFPGVSESQPVVRKRTYRKLCAIHHLLGRAPEIACSACDLVNVDLDDCVSEQ

SEQ ID NO: 5156 - DNA, 4683 bp, Adeno-associated virus 6
  source 1..4683: mol_type = genomic DNA
ttggccactccctctctgcgcgctcgctcgctcactgaggccgggcgaccaaaggtcgcccgacgcccgggctttgcccgggcggcctcagtgagcgagcgagcgcgcagagagggagtggccaactccatcactaggggttcctggaggggtggagtcgtgacgtgaattacgtcatagggttagggaggtcctgtattagaggtcacgtgagtgttttgcgacattttgcgacaccatgtggtcacgctgggtatttaagcccgagtgagcacgcagggtctccattttgaagcgggaggtttgaacgcgcagcgccatgccggggttttacgagattgtgattaaggtccccagcgaccttgacgagcatctgcccggcatttctgacagctttgtgaactgggtggccgagaaggaatgggagttgccgccagattctgacatggatctgaatctgattgagcaggcacccctgaccgtggccgagaagctgcagcgcgacttcctggtccagtggcgccgcgtgagtaaggccccggaggccctcttctttgttcagttcgagaagggcgagtcctacttccacctccatattctggtggagaccacgggggtcaaatccatggtgctgggccgcttcctgagtcagattagggacaagctggtgcagaccatctaccgcgggatcgagccgaccctgcccaactggttcgcggtgaccaagacgcgtaatggcgccggaggggggaacaaggtggtggacgagtgctacatccccaactacctcctgcccaagactcagcccgagctgcagtgggcgtggactaacatggaggagtatataagcgcgtgtttaaacctggccgagcgcaaacggctcgtggcgcacgacctgacccacgtcagccagacccaggagcagaacaaggagaatctgaaccccaattctgacgcgcctgtcatccggtcaaaaacctccgcacgctacatggagctggtcgggtggctggtggaccggggcatcacctccgagaagcagtggatccaggaggaccaggcctcgtacatctccttcaacgccgcctccaactcgcggtcccagatcaaggccgctctggacaatgccggcaagatcatggcgctgaccaaatccgcgcccgactacctggtaggccccgctccgcccgccgacattaaaaccaaccgcatttaccgcatcctggagctgaacggctacgaccctgcctacgccggctccgtctttctcggctgggcccagaaaaggttcggaaaacgcaacaccatctggctgtttgggccggccaccacgggcaagaccaacatcgcggaagccatcgcccacgccgtgcccttctacggctgcgtcaactggaccaatgagaactttcccttcaacgattgcgtcgacaagatggtgatctggtgggaggagggcaagatgacggccaaggtcgtggagtccgccaaggccattctcggcggcagcaaggtgcgcgtggaccaaaagtgcaagtcgtccgcccagatcgatcccacccccgtgatcgtcacctccaacaccaacatgtgcgccgtgattgacgggaacagcaccaccttcgagcaccagcagccgttgcaggaccggatgttcaaatttgaactcacccgccgtctggagcatgactttggcaaggtgacaaagcaggaagtcaaagagttcttccgctgggcgcaggatcacgtgaccgaggtggcgcatgagttctacgtcagaaagggtggagccaacaagagacccgcccccgatgacgcggataaaagcgagcccaagcgggcctgcccctcagtcgcggatccatcgacgtcagacgcggaaggagctccggtggactttgccgacaggtaccaaaacaaatgttctcgtcacgcgggcatgcttcagatgctgtttccctgcaaaacatgcgagagaatgaatcagaatttcaacatttgcttcacgcacgggaccagagactgttcagaatgtttccccggcgtgtcagaatctcaaccggtcgtcagaaagaggacgtatcggaaactctgtgccattcatcatctgctggggcgggctcccgagattgcttgctcggcctgcgatctggtcaacgtggatctggatgactgtgtttctgagcaataaatgacttaaaccaggtatggctgccgatggttatcttccagattggctcgaggacaacctctctgagggcattcgcgagtggtgggacttgaaacctggagccccgaaacccaaagccaaccagcaaaagcaggacgacggccggggtctggtgcttcctggctacaagtacctcggacccttcaacggactcgacaagggggagcccgtcaacgcggcggatgcagcggccctcgagcacgacaaggcctacgaccagcagctcaaagcgggtgacaatccgtacctgcggtataaccacgccgacgccgagtttcaggagcgtctgcaagaagatacgtcttttgggggcaacctcgggcgagcagtcttccaggccaagaagagggttctcgaaccttttggtctggttgaggaaggtgctaagacggctcctggaaagaaacgtccggtagagcagtcgccacaagagccagactcctcctcgggcattggcaagacaggccagcagcccgctaaaaagagactcaattttggtcagactggcgactcagagtcagtccccgacccacaacctctcggagaacctccagcaacccccgctgctgtgggacctactacaatggcttcaggcggtggcgcaccaatggcagacaataacgaaggcgccgacggagtgggtaatgcctcaggaaattggcattgcgattccacatggctgggcgacagagtcatcaccaccagcacccgaacatgggccttgcccacctataacaaccacctctacaagcaaatctccagtgcttcaacgggggccagcaacgacaaccactacttcggctacagcaccccctgggggtattttgatttcaacagattccactgccatttctcaccacgtgactggcagcgactcatcaacaacaattggggattccggcccaagagactcaacttcaagctcttcaacatccaagtcaaggaggtcacgacgaatgatggcgtcacgaccatcgctaataaccttaccagcacggttcaagtcttctcggactcggagtaccagttgccgtacgtcctcggctctgcgcaccagggctgcctccctccgttcccggcggacgtgttcatgattccgcagtacggctacctaacgctcaacaatggcagccaggcagtgggacggtcatccttttactgcctggaatatttcccatcgcagatgctgagaacgggcaataactttaccttcagctacaccttcgaggacgtgcctttccacagcagctacgcgcacagccagagcctggaccggctgatgaatcctctcatcgaccagtacctgtattacctgaacagaactcagaatcagtccggaagtgcccaaaacaaggacttgctgtttagccgggggtctccagctggcatgtctgttcagcccaaaaactggctacctggaccctgttaccggcagcagcgcgtttctaaaacaaaaacagacaacaacaacagcaactttacctggactggtgcttcaaaatataaccttaatgggcgtgaatctataatcaaccctggcactgctatggcctcacacaaagacgacaaagacaagttctttcccatgagcggtgtcatgatttttggaaaggagagcgccggagcttcaaacactgcattggacaatgtcatgatcacagacgaagaggaaatcaaagccactaaccccgtggccaccgaaagatttgggactgtggcagtcaatctccagagcagcagcacagaccctgcgaccggagatgtgcatgttatgggagccttacctggaatggtgtggcaagacagagacgtatacctgcagggtcctatttgggccaaaattcctcacacggatggacactttcacccgtctcctctcatgggcggctttggacttaagcacccgcctcctcagatcctcatcaaaaacacgcctgttcctgcgaatcctccggcagagttttcggctacaaagtttgcttcattcatcacccagtattccacaggacaagtgagcgtggagattgaatgggagctgcagaaagaaaacagcaaacgctggaatcccgaagtgcagtatacatctaactatgcaaaatctgccaacgttgatttcactgtggacaacaatggactttatactgagcctcgccccattggcacccgttacctcacccgtcccctgtaattgtgtgttaatcaataaaccggttaattcgtgtcagttgaactttggtctcatgtcgttattatcttatctggtcaccatagcaaccggttacacattaactgcttagttgcgcttcgcgaatacccctagtgatggagttgcccactccctctatgcgcgctcgctcgctcggtggggccggcagagcagagctctgccgtctgcggacctttggtccgcaggccccaccgagcgagcgagcgcgcatagagggagtgggcaa

SEQ ID NO: 5157 - DNA, 2211 bp, Adeno-associated virus 6
  source 1..2211: mol_type = genomic DNA
atggctgccgatggttatcttccagattggctcgaggacaacctctctgagggcattcgcgagtggtgggacttgaaacctggagccccgaaacccaaagccaaccagcaaaagcaggacgacggccggggtctggtgcttcctggctacaagtacctcggacccttcaacggactcgacaagggggagcccgtcaacgcggcggatgcagcggccctcgagcacgacaaggcctacgaccagcagctcaaagcgggtgacaatccgtacctgcggtataaccacgccgacgccgagtttcaggagcgtctgcaagaagatacgtcttttgggggcaacctcgggcgagcagtcttccaggccaagaagagggttctcgaaccttttggtctggttgaggaaggtgctaagacggctcctggaaagaaacgtccggtagagcagtcgccacaagagccagactcctcctcgggcattggcaagacaggccagcagcccgctaaaaagagactcaattttggtcagactggcgactcagagtcagtccccgacccacaacctctcggagaacctccagcaacccccgctgctgtgggacctactacaatggcttcaggcggtggcgcaccaatggcagacaataacgaaggcgccgacggagtgggtaatgcctcaggaaattggcattgcgattccacatggctgggcgacagagtcatcaccaccagcacccgaacatgggccttgcccacctataacaaccacctctacaagcaaatctccagtgcttcaacgggggccagcaacgacaaccactacttcggctacagcaccccctgggggtattttgatttcaacagattccactgccatttctcaccacgtgactggcagcgactcatcaacaacaattggggattccggcccaagagactcaacttcaagctcttcaacatccaagtcaaggaggtcacgacgaatgatggcgtcacgaccatcgctaataaccttaccagcacggttcaagtcttctcggactcggagtaccagttgccgtacgtcctcggctctgcgcaccagggctgcctccctccgttcccggcggacgtgttcatgattccgcagtacggctacctaacgctcaacaatggcagccaggcagtgggacggtcatccttttactgcctggaatatttcccatcgcagatgctgagaacgggcaataactttaccttcagctacaccttcgaggacgtgcctttccacagcagctacgcgcacagccagagcctggaccggctgatgaatcctctcatcgaccagtacctgtattacctgaacagaactcagaatcagtccggaagtgcccaaaacaaggacttgctgtttagccgggggtctccagctggcatgtctgttcagcccaaaaactggctacctggaccctgttaccggcagcagcgcgtttctaaaacaaaaacagacaacaacaacagcaactttacctggactggtgcttcaaaatataaccttaatgggcgtgaatctataatcaaccctggcactgctatggcctcacacaaagacgacaaagacaagttctttcccatgagcggtgtcatgatttttggaaaggagagcgccggagcttcaaacactgcattggacaatgtcatgatcacagacgaagaggaaatcaaagccactaaccccgtggccaccgaaagatttgggactgtggcagtcaatctccagagcagcagcacagaccctgcgaccggagatgtgcatgttatgggagccttacctggaatggtgtggcaagacagagacgtatacctgcagggtcctatttgggccaaaattcctcacacggatggacactttcacccgtctcctctcatgggcggctttggacttaagcacccgcctcctcagatcctcatcaaaaacacgcctgttcctgcgaatcctccggcagagttttcggctacaaagtttgcttcattcatcacccagtattccacaggacaagtgagcgtggagattgaatgggagctgcagaaagaaaacagcaaacgctggaatcccgaagtgcagtatacatctaactatgcaaaatctgccaacgttgatttcactgtggacaacaatggactttatactgagcctcgccccattggcacccgttacctcacccgtcccctgtaa

SEQ ID NO: 5158 - DNA, 2214 bp, Adeno-associated virus 7
  source 1..2214: mol_type = genomic DNA
atggctgccgatggttatcttccagattggctcgaggacaacctctctgagggcattcgcgagtggtgggacctgaaacctggagccccgaaacccaaagccaaccagcaaaagcaggacaacggccggggtctggtgcttcctggctacaagtacctcggacccttcaacggactcgacaagggggagcccgtcaacgcggcggacgcagcggccctcgagcacgacaaggcctacgaccagcagctcaaagcgggtgacaatccgtacctgcggtataaccacgccgacgccgagtttcaggagcgtctgcaagaagatacgtcatttgggggcaacctcgggcgagcagtcttccaggccaagaagcgggttctcgaacctctcggtctggttgaggaaggcgctaagacggctcctgcaaagaagagaccggtagagccgtcacctcagcgttcccccgactcctccacgggcatcggcaagaaaggccagcagcccgccagaaagagactcaatttcggtcagactggcgactcagagtcagtccccgaccctcaacctctcggagaacctccagcagcgccctctagtgtgggatctggtacagtggctgcaggcggtggcgcaccaatggcagacaataacgaaggtgccgacggagtgggtaatgcctcaggaaattggcattgcgattccacatggctgggcgacagagtcattaccaccagcacccgaacctgggccctgcccacctacaacaaccacctctacaagcaaatctccagtgaaactgcaggtagtaccaacgacaacacctacttcggctacagcaccccctgggggtattttgactttaacagattccactgccacttctcaccacgtgactggcagcgactcatcaacaacaactggggattccggcccaagaagctgcggttcaagctcttcaacatccaggtcaaggaggtcacgacgaatgacggcgttacgaccatcgctaataaccttaccagcacgattcaggtattctcggactcggaataccagctgccgtacgtcctcggctctgcgcaccagggctgcctgcctccgttcccggcggacgtcttcatgattcctcagtacggctacctgactctcaacaatggcagtcagtctgtgggacgttcctccttctactgcctggagtacttcccctctcagatgctgagaacgggcaacaactttgagttcagctacagcttcgaggacgtgcctttccacagcagctacgcacacagccagagcctggaccggctgatgaatcccctcatcgaccagtacttgtactacctggccagaacacagagtaacccaggaggcacagctggcaatcgggaactgcagttttaccagggcgggccttcaactatggccgaacaagccaagaattggttacctggaccttgcttccggcaacaaagagtctccaaaacgctggatcaaaacaacaacagcaactttgcttggactggtgccaccaaatatcacctgaacggcagaaactcgttggttaatcccggcgtcgccatggcaactcacaaggacgacgaggaccgctttttcccatccagcggagtcctgatttttggaaaaactggagcaactaacaaaactacattggaaaatgtgttaatgacaaatgaagaagaaattcgtcctactaatcctgtagccacggaagaatacgggatagtcagcagcaacttacaagcggctaatactgcagcccagacacaagttgtcaacaaccagggagccttacctggcatggtctggcagaaccgggacgtgtacctgcagggtcccatctgggccaagattcctcacacggatggcaactttcacccgtctcctttgatgggcggctttggacttaaacatccgcctcctcagatcctgatcaagaacactcccgttcccgctaatcctccggaggtgtttactcctgccaagtttgcttcgttcatcacacagtacagcaccggacaagtcagcgtggaaatcgagtgggagctgcagaaggaaaacagcaagcgctggaacccggagattcagtacacctccaactttgaaaagcagactggtgtggactttgccgttgacagccagggtgtttactctgagcctcgccctattggcactcgttacctcacccgtaatctgtaa

SEQ ID NO: 5159 - protein, 738 aa, Adeno-associated virus 7
MAADGYLPDWLEDNLSEGIREWWALKPGAPKPKANQQKQDDGRGLVLPGYKYLGPFNGLDKGEPVNAADAAALEHDKAYDQQLQAGDNPYLRYNHADAEFQERLQEDTSFGGNLGRAVFQAKKRVLEPLGLVEEGAKTAPGKKRPVEPSPQRSPDSSTGIGKKGQQPARKRLNFGQTGDSESVPDPQPLGEPPAAPSGVGPNTMAAGGGAPMADNNEGADGVGSSSGNWHCDSTWLGDRVITTSTRTWALPTYNNHLYKQISNGTSGGATNDNTYFGYSTPWGYFDFNRFHCHFSPRDWQRLINNNWGFRPKRLSFKLFNIQVKEVTQNEGTKTIANNLTSTIQVFTDSEYQLPYVLGSAHQGCLPPFPADVFMIPQYGYLTLNNGSQAVGRSSFYCLEYFPSQMLRTGNNFQFTYTFEDVPFHSSYAHSQSLDRLMNPLIDQYLYYLSRTQTTGGTANTQTLGFSQGGPNTMANQAKNWLPGPCYRQQRVSTTTGQNNNSNFAWTAGTKYHLNGRNSLANPGIAMATHKDDEERFFPSNGILIFGKQNAARDNADYSDVMLTSEEEIKTTNPVATEEYGIVADNLQQQNTAPQIGTVNSQGALPGMVWQNRDVYLQGPIWAKIPHTDGNFHPSPLMGGFGLKHPPPQILIKNTPVPADPPTTFNQSKLNSFITQYSTGQVSVEIEWELQKENSKRWNPEIQYTSNYYKSTSVDFAVNTEGVYSEPRPIGTRYLTRNL

SEQ ID NO: 5160 - protein, 737 aa, Adeno-associated virus 7
MAADGYLPDWLEDNLSEGIREWWDLKPGAPKPKANQQKQDNGRGLVLPGYKYLGPFNGLDKGEPVNAADAAALEHDKAYDQQLKAGDNPYLRYNHADAEFQERLQEDTSFGGNLGRAVFQAKKRVLEPLGLVEEGAKTAPAKKRPVEPSPQRSPDSSTGIGKKGQQPARKRLNFGQTGDSESVPDPQPLGEPPAAPSSVGSGTVAAGGGAPMADNNEGADGVGNASGNWHCDSTWLGDRVITTSTRTWALPTYNNHLYKQISSETAGSTNDNTYFGYSTPWGYFDFNRFHCHFSPRDWQRLINNNWGFRPKKLRFKLFNIQVKEVTTNDGVTTIANNLTSTIQVFSDSEYQLPYVLGSAHQGCLPPFPADVFMIPQYGYLTLNNGSQSVGRSSFYCLEYFPSQMLRTGNNFEFSYSFEDVPFHSSYAHSQSLDRLMNPLIDQYLYYLARTQSNPGGTAGNRELQFYQGGPSTMAEQAKNWLPGPCFRQQRVSKTLDQNNNSNFAWTGATKYHLNGRNSLVNPGVAMATHKDDEDRFFPSSGVLIFGKTGATNKTTLENVLMTNEEEIRPTNPVATEEYGIVSSNLQAANTAAQTQVVNNQGALPGMVWQNRDVYLQGPIWAKIPHTDGNFHPSPLMGGFGLKHPPPQILIKNTPVPANPPEVFTPAKFASFITQYSTGQVSVEIEWELQKENSKRWNPEIQYTSNFEKQTGVDFAVDSQGVYSEPRPIGTRYLTRNL

SEQ ID NO: 5161 - protein, 623 aa, Adeno-associated virus 7
MPGFYEIVIKVPSDLDEHLPGISDSFVNWVAEKEWELPPDSDMDLNLIEQAPLTVAEKLQRDFLVQWRRVSKAPEALFFVQFEKGESYFHLHVLVETTGVKSMVLGRFLSQIREKLVQTIYRGVEPTLPNWFAVTKTRNGAGGGNKVVDECYIPNYLLPKTQPELQWAWTNMEEYISACLNLAERKRLVAQHLTHVSQTQEQNKENLNPNSDAPVIRSKTSARYMELVGWLVDRGITSEKQWIQEDQASYISFNAASNSRSQIKAALDNAGKIMALTKSAPDYLVGPSLPADIKTNRIYRILELNGYDPAYAGSVFLGWAQKKFGKRNTIWLFGPATTGKTNIAEAIAHAVPFYGCVNWTNENFPFNDCVDKMVIWWEEGKMTAKVVESAKAILGGSKVRVDQKCKSSAQIDPTPVIVTSNTNMCAVIDGNSTTFEHQQPLQDRMFKFELTRRLEHDFGKVTKQEVKEFFRWASDHVTEVAHEFYVRKGGASKRPAPDDADISEPKRACPSVADPSTSDAEGAPVDFADRYQNKCSRHAGMIQMLFPCKTCERMNQNFNICFTHGVRDCLECFPGVSESQPVVRKKTYRKLCAIHHLLGRAPEIACSACDLVNVDLDDCVSEQ

SEQ ID NO: 5162 - DNA, 4721 bp, Adeno-associated virus 7
  source 1..4721: mol_type = genomic DNA
ttggccactccctctatgcgcgctcgctcgctcggtggggcctgcggaccaaaggtccgcagacggcagagctctgctctgccggccccaccgagcgagcgagcgcgcatagagggagtggccaactccatcactaggggtaccgcgaagcgcctcccacgctgccgcgtcagcgctgacgtaaatcacgtcataggggagtggtcctgtattagctgtcacgtgagtgcttttgcgacattttgcgacaccacgtggccatttgaggtatatatggccgagtgagcgagcaggatctccattttgaccgcgaaatttgaacgagcagcagccatgccgggtttctacgagatcgtgatcaaggtgccgagcgacctggacgagcacctgccgggcatttctgactcgtttgtgaactgggtggccgagaaggaatgggagctgcccccggattctgacatggatctgaatctgatcgagcaggcacccctgaccgtggccgagaagctgcagcgcgacttcctggtccaatggcgccgcgtgagtaaggccccggaggccctgttctttgttcagttcgagaagggcgagagctacttccaccttcacgttctggtggagaccacgggggtcaagtccatggtgctaggccgcttcctgagtcagattcgggagaagctggtccagaccatctaccgcggggtcgagcccacgctgcccaactggttcgcggtgaccaagacgcgtaatggcgccggcggggggaacaaggtggtggacgagtgctacatccccaactacctcctgcccaagacccagcccgagctgcagtgggcgtggactaacatggaggagtatataagcgcgtgtttgaacctggccgaacgcaaacggctcgtggcgcagcacctgacccacgtcagccagacgcaggagcagaacaaggagaatctgaaccccaattctgacgcgcccgtgatcaggtcaaaaacctccgcgcgctacatggagctggtcgggtggctggtggaccggggcatcacctccgagaagcagtggatccaggaggaccaggcctcgtacatctccttcaacgccgcctccaactcgcggtcccagatcaaggccgcgctggacaatgccggcaagatcatggcgctgaccaaatccgcgcccgactacctggtggggccctcgctgcccgcggacattaaaaccaaccgcatctaccgcatcctggagctgaacgggtacgatcctgcctacgccggctccgtctttctcggctgggcccagaaaaagttcgggaagcgcaacaccatctggctgtttgggcccgccaccaccggcaagaccaacattgcggaagccatcgcccacgccgtgcccttctacggctgcgtcaactggaccaatgagaactttcccttcaacgattgcgtcgacaagatggtgatctggtgggaggagggcaagatgacggccaaggtcgtggagtccgccaaggccattctcggcggcagcaaggtgcgcgtggaccaaaagtgcaagtcgtccgcccagatcgaccccacccccgtgatcgtcacctccaacaccaacatgtgcgccgtgattgacgggaacagcaccaccttcgagcaccagcagccgttgcaggaccggatgttcaaatttgaactcacccgccgtctggagcacgactttggcaaggtgacgaagcaggaagtcaaagagttcttccgctgggccagtgatcacgtgaccgaggtggcgcatgagttctacgtcagaaagggcggagccagcaaaagacccgcccccgatgacgcggatataagcgagcccaagcgggcctgcccctcagtcgcggatccatcgacgtcagacgcggaaggagctccggtggactttgccgacaggtaccaaaacaaatgttctcgtcacgcgggcatgattcagatgctgtttccctgcaaaacgtgcgagagaatgaatcagaatttcaacatttgcttcacacacggggtcagagactgtttagagtgtttccccggcgtgtcagaatctcaaccggtcgtcagaaaaaagacgtatcggaaactctgcgcgattcatcatctgctggggcgggcgcccgagattgcttgctcggcctgcgacctggtcaacgtggacctggacgactgcgtttctgagcaataaatgacttaaaccaggtatggctgccgatggttatcttccagattggctcgaggacaacctctctgagggcattcgcgagtggtgggacctgaaacctggagccccgaaacccaaagccaaccagcaaaagcaggacaacggccggggtctggtgcttcctggctacaagtacctcggacccttcaacggactcgacaagggggagcccgtcaacgcggcggacgcagcggccctcgagcacgacaaggcctacgaccagcagctcaaagcgggtgacaatccgtacctgcggtataaccacgccgacgccgagtttcaggagcgtctgcaagaagatacgtcatttgggggcaacctcgggcgagcagtcttccaggccaagaagcgggttctcgaacctctcggtctggttgaggaaggcgctaagacggctcctgcaaagaagagaccggtagagccgtcacctcagcgttcccccgactcctccacgggcatcggcaagaaaggccagcagcccgccagaaagagactcaatttcggtcagactggcgactcagagtcagtccccgaccctcaacctctcggagaacctccagcagcgccctctagtgtgggatctggtacagtggctgcaggcggtggcgcaccaatggcagacaataacgaaggtgccgacggagtgggtaatgcctcaggaaattggcattgcgattccacatggctgggcgacagagtcattaccaccagcacccgaacctgggccctgcccacctacaacaaccacctctacaagcaaatctccagtgaaactgcaggtagtaccaacgacaacacctacttcggctacagcaccccctgggggtattttgactttaacagattccactgccacttctcaccacgtgactggcagcgactcatcaacaacaactggggattccggcccaagaagctgcggttcaagctcttcaacatccaggtcaaggaggtcacgacgaatgacggcgttacgaccatcgctaataaccttaccagcacgattcaggtattctcggactcggaataccagctgccgtacgtcctcggctctgcgcaccagggctgcctgcctccgttcccggcggacgtcttcatgattcctcagtacggctacctgactctcaacaatggcagtcagtctgtgggacgttcctccttctactgcctggagtacttcccctctcagatgctgagaacgggcaacaactttgagttcagctacagcttcgaggacgtgcctttccacagcagctacgcacacagccagagcctggaccggctgatgaatcccctcatcgaccagtacttgtactacctggccagaacacagagtaacccaggaggcacagctggcaatcgggaactgcagttttaccagggcgggccttcaactatggccgaacaagccaagaattggttacctggaccttgcttccggcaacaaagagtctccaaaacgctggatcaaaacaacaacagcaactttgcttggactggtgccaccaaatatcacctgaacggcagaaactcgttggttaatcccggcgtcgccatggcaactcacaaggacgacgaggaccgctttttcccatccagcggagtcctgatttttggaaaaactggagcaactaacaaaactacattggaaaatgtgttaatgacaaatgaagaagaaattcgtcctactaatcctgtagccacggaagaatacgggatagtcagcagcaacttacaagcggctaatactgcagcccagacacaagttgtcaacaaccagggagccttacctggcatggtctggcagaaccgggacgtgtacctgcagggtcccatctgggccaagattcctcacacggatggcaactttcacccgtctcctttgatgggcggctttggacttaaacatccgcctcctcagatcctgatcaagaacactcccgttcccgctaatcctccggaggtgtttactcctgccaagtttgcttcgttcatcacacagtacagcaccggacaagtcagcgtggaaatcgagtgggagctgcagaaggaaaacagcaagcgctggaacccggagattcagtacacctccaactttgaaaagcagactggtgtggactttgccgttgacagccagggtgtttactctgagcctcgccctattggcactcgttacctcacccgtaatctgtaattgcatgttaatcaataaaccggttgattcgtttcagttgaactttggtctcctgtgcttcttatcttatcggtttccatagcaactggttacacattaactgcttgggtgcgcttcacgataagaacactgacgtcaccgcggtacccctagtgatggagttggccactccctctatgcgcgctcgctcgctcggtggggcctgcggaccaaaggtccgcagacggcagagctctgctctgccggccccaccgagcgagcgagcgcgcatagagggagtggccaa

SEQ ID NO: 5163 - DNA, 2214 bp, Adeno-associated virus 7; identical to SEQ ID NO: 5158
  source 1..2214: mol_type = genomic DNA

SEQ ID NO: 5164 - protein, 737 aa, Adeno-associated virus 7; identical to SEQ ID NO: 5160

SEQ ID NO: 5165 - DNA, 2217 bp, Adeno-associated virus 8
  source 1..2217: mol_type = genomic DNA
atggctgccgatggttatcttccagattggctcgaggacaacctctctgagggcattcgcgagtggtgggcgctgaaacctggagccccgaagcccaaagccaaccagcaaaagcaggacgacggccggggtctggtgcttcctggctacaagtacctcggacccttcaacggactcgacaagggggagcccgtcaacgcggcggacgcagcggccctcgagcacgacaaggcctacgaccagcagctgcaggcgggtgacaatccgtacctgcggtataaccacgccgacgccgagtttcaggagcgtctgcaagaagatacgtcttttgggggcaacctcgggcgagcagtcttccaggccaagaagcgggttctcgaacctctcggtctggttgaggaaggcgctaagacggctcctggaaagaagagaccggtagagccatcaccccagcgttctccagactcctctacgggcatcggcaagaaaggccaacagcccgccagaaaaagactcaattttggtcagactggcgactcagagtcagttccagaccctcaacctctcggagaacctccagcagcgccctctggtgtgggacctaatacaatggctgcaggcggtggcgcaccaatggcagacaataacgaaggcgccgacggagtgggtagttcctcgggaaattggcattgcgattccacatggctgggcgacagagtcatcaccaccagcacccgaacctgggccctgcccacctacaacaaccacctctacaagcaaatctccaacgggacatcgggaggagccaccaacgacaacacctacttcggctacagcaccccctgggggtattttgactttaacagattccactgccacttttcaccacgtgactggcagcgactcatcaacaacaactggggattccggcccaagagactcagcttcaagctcttcaacatccaggtcaaggaggtcacgcagaatgaaggcaccaagaccatcgccaataacctcaccagcaccatccaggtgtttacggactcggagtaccagctgccgtacgttctcggctctgcccaccagggctgcctgcctccgttcccggcggacgtgttcatgattccccagtacggctacctaacactcaacaacggtagtcaggccgtgggacgctcctccttctactgcctggaatactttccttcgcagatgctgagaaccggcaacaacttccagtttacttacaccttcgaggacgtgcctttccacagcagctacgcccacagccagagcttggaccggctgatgaatcctctgattgaccagtacctgtactacttgtctcggactcaaacaacaggaggcacggcaaatacgcagactctgggcttcagccaaggtgggcctaatacaatggccaatcaggcaaagaactggctgccaggaccctgttaccgccaacaacgcgtctcaacgacaaccgggcaaaacaacaatagcaactttgcctggactgctgggaccaaataccatctgaatggaagaaattcattggctaatcctggcatcgctatggcaacacacaaagacgacgaggagcgtttttttcccagtaacgggatcctgatttttggcaaacaaaatgctgccagagacaatgcggattacagcgatgtcatgctcaccagcgaggaagaaatcaaaaccactaaccctgtggctacagaggaatacggtatcgtggcagataacttgcagcagcaaaacacggctcctcaaattggaactgtcaacagccagggggccttacccggtatggtctggcagaaccgggacgtgtacctgcagggtcccatctgggccaagattcctcacacggacggcaacttccacccgtctccgctgatgggcggctttggcctgaaacatcctccgcctcagatcctgatcaagaacacgcctgtacctgcggatcctccgaccaccttcaaccagtcaaagctgaactctttcatcacgcaatacagcaccggacaggtcagcgtggaaattgaatgggagctgcagaaggaaaacagcaagcgctggaaccccgagatccagtacacctccaactactacaaatctacaagtgtggactttgctgttaatacagaaggcgtgtactctgaaccccgccccattggcacccgttacctcacccgtaatctgtaa

SEQ ID NO: 5166 - DNA, 2213 bp, Adeno-associated virus 8
  source 1..2213: mol_type = genomic DNA
atggctgccgatggttatcttccagattggctcgaggacaacctctctgagggcattcgcgagtggtgggcgctgaaacctggagccccgaagcccaaagccaaccagcaaaagcaggacgacggccggggtctggtgcttcctggctacaagtacctcggacccttcaacggactcgacaagggggagcccgtcaacgcggcggacgcagcggccctcgagcacgacaaggcctacgaccagcagctgcaggcgggtgacaatccgtacctgcggtataaccacgccgacgccgagtttcaggagcgtctgcaagaagatacgtcttttgggggcaacctcgggcgagcagtcttccaggccaagaagcgggttctcgaacctctcggtctggttgaggaaggcgctaagacggctcctggaaagaagagaccggtagagccatcaccccagcgttctccagactcctctacgggcatcggcaagaaaggccaacagcccgccagaaaaagactcaattttggtcagactggcgactcagagtcagttccagaccctcaacctctcggagaacctccagcagcgccctctggtgtgggacctaatacaatggctgcaggcggtggcgcaccaatggcagacaataacgaaggcgccgacggagtgggtagttcctcgggaaattggcattgcgattccacatggctgggcgacagagtcatcaccaccagcacccgaacctgggccctgcccacctacaacaaccacctctacaagcaaatctccaacgggacatcgggaggagccaccaacgacaacacctacttcggctacagcaccccctgggggtattttgactttaacagattccactgccacttttcaccacgtgactggcagcgactcatcaacaacaactggggattccggcccaagagactcagcttcaagctcttcaacatccaggtcaaggaggtcacgcagaatgaaggcaccaagaccatcgccaataacctcaccagcaccatccaggtgtttacggactcggagtaccagctgccgtacgttctcggctctgcccaccagggctgcctgcctccgttcccggcggacgtgttcatgattccccagtacggctacctaacactcaacaacggtagtcaggccgtgggacgctcctccttctactgcctggaatactttccttcgcagatgctgagaaccggcaacaacttccagtttacttacaccttcgaggacgtgcctttccacagcagctacgcccacagccagagcttggaccggctgatgaatcctctgattgaccagtacctgtactacttgtctcggactcaaacaacaggaggcacggcaaatacgcagactctgggcttcagccaaggtgggcctaatacaatggccaatcaggcaaagaactggctgccaggaccctgttaccgccaacaacgcgtctcaacgacaaccgggcaaaacaacaatagcaactttgcctggactgctgggaccaaataccatctgaatggaagaaattcattggctaatcctggcatcgctatggcaacacacaaagacgacgaggagcgtttttttcccagtaacgggatcctgatttttggcaaacaaaatgctgccagagacaatgcggattacagcgatgtcatgctcaccagcgaggaagaaatcaaaaccactaaccctgtggctacagaggaatacggtatcgtggcagataacttgcagcagcaaaacacggctcctcaaattggaactgtcaacagccagggggccttacccggtatggtctggcagaaccgggacgtgtacctgcagggtcccatctgggccaagattcctcacacggacggcaacttccacccgtctccgctgatgggcggctttggcctgaaacatcctccgcctcagatcctgatcaagaacacgcctgtacctgcggatcctccgaccaccttcaaccagtcaaagctgaactctttcatcacgcaatacagcaccggacaggtcagcgtggaaattgaatgggagctgcagaaggaaaacagcaagcgctggaaccccgagatccagtacacctccaactactacaaatctacaagtgtggactttgctgtaatacagaaggcgtgtactctgaaccccgccccattggcacccgttacctcacccgtaatctg

SEQ ID NO: 5167 - DNA, 4393 bp, Adeno-associated virus 8
  source 1..4393: mol_type = genomic DNA
cagagagggagtggccaactccatcactaggggtagcgcgaagcgcctcccacgctgccgcgtcagcgctgacgtaaattacgtcataggggagtggtcctgtattagctgtcacgtgagtgcttttgcggcattttgcgacaccacgtggccatttgaggtatatatggccgagtgagcgagcaggatctccattttgaccgcgaaatttgaacgagcagcagccatgccgggcttctacgagatcgtgatcaaggtgccgagcgacctggacgagcacctgccgggcatttctgactcgtttgtgaactgggtggccgagaaggaatgggagctgcccccggattctgacatggatcggaatctgatcgagcaggcacccctgaccgtggccgagaagctgcagcgcgacttcctggtccaatggcgccgcgtgagtaaggccccggaggccctcttctttgttcagttcgagaagggcgagagctactttcacctgcacgttctggtcgagaccacgggggtcaagtccatggtgctaggccgcttcctgagtcagattcgggaaaagcttggtccagaccatctacccgcggggtcgagccccaccttgcccaactggttcgcggtgaccaaagacgcggtaatggcgccggcgggggggaacaaggtggtggacgagtgctacatccccaactacctcctgcccaagactcagcccgagctgcagtgggcgtggactaacatggaggagtatataagcgcgtgcttgaacctggccgagcgcaaacggctcgtggcgcagcacctgacccacgtcagccagacgcaggagcagaacaaggagaatctgaaccccaattctgacgcgcccgtgatcaggtcaaaaacctccgcgcgctatatggagctggtcgggtggctggtggaccggggcatcacctccgagaagcagtggatccaggaggaccaggcctcgtacatctccttcaacgccgcctccaactcgcggtcccagatcaaggccgcgctggacaatgccggcaagatcatggcgctgaccaaatccgcgcccgactacctggtggggccctcgctgcccgcggacattacccagaaccgcatctaccgcatcctcgctctcaacggctacgaccctgcctacgccggctccgtctttctcggctgggctcagaaaaagttcgggaaacgcaacaccatctggctgtttggacccgccaccaccggcaagaccaacattgcggaagccatcgcccacgccgtgcccttctacggctgcgtcaactggaccaatgagaactttcccttcaatgattgcgtcgacaagatggtgatctggtgggaggagggcaagatgacggccaaggtcgtggagtccgccaaggccattctcggcggcagcaaggtgcgcgtggaccaaaagtgcaagtcgtccgcccagatcgaccccacccccgtgatcgtcacctccaacaccaacatgtgcgccgtgattgacgggaacagcaccaccttcgagcaccagcagcctctccaggaccggatgtttaagttcgaactcacccgccgtctggagcacgactttggcaaggtgacaaagcaggaagtcaaagagttcttccgctgggccagtgatcacgtgaccgaggtggcgcatgagttttacgtcagaaagggcggagccagcaaaagacccgcccccgatgacgcggataaaagcgagcccaagcgggcctgcccctcagtcgcggatccatcgacgtcagacgcggaaggagctccggtggactttgccgacaggtaccaaaacaaatgttctcgtcacgcgggcatgcttcagatgctgtttccctgcaaaacgtgcgagagaatgaatcagaatttcaacatttgcttcacacacggggtcagagactgctcagagtgtttccccggcgtgtcagaatctcaaccggtcgtcagaaagaggacgtatcggaaactctgtgcgattcatcatctgctggggcgggctcccgagattgcttgctcggcctgcgatctggtcaacgtggacctggatgactgtgtttctgagcaataaatgacttaaaccaggtatggctgccgatggttatcttccagattggctcgaggacaacctctctgagggcattcgcgagtggtgggcgctgaaacctggagccccgaagcccaaagccaaccagcaaaagcaggacgacggccggggtctggtgcttcctggctacaagtacctcggacccttcaacggactcgacaagggggagcccgtcaacgcggcggacgcagcggccctcgagcacgacaaggcctacgaccagcagctgcaggcgggtgacaatccgtacctgcggtataaccacgccgacgccgagtttcaggagcgtctgcaagaagatacgtcttttgggggcaacctcgggcgagcagtcttccaggccaagaagcgggttctcgaacctctcggtctggttgaggaaggcgctaagacggctcctggaaagaagagaccggtagagccatcaccccagcgttctccagactcctctacgggcatcggcaagaaaggccaacagcccgccagaaaaagactcaattttggtcagactggcgactcagagtcagttccagaccctcaacctctcggagaacctccagcagcgccctctggtgtgggacctaatacaatggctgcaggcggtggcgcaccaatggcagacaataacgaaggcgccgacggagtgggtagttcctcgggaaattggcattgcgattccacatggctgggcgacagagtcatcaccaccagcacccgaacctgggccctgcccacctacaacaaccacctctacaagcaaatctccaacgggacatcgggaggagccaccaacgacaacacctacttcggctacagcaccccctgggggtattttgactttaacagattccactgccacttttcaccacgtgactggcagcgactcatcaacaacaactggggattccggcccaagagactcagcttcaagctcttcaacatccaggtcaaggaggtcacgcagaatgaaggcaccaagaccatcgccaataacctcaccagcaccatccaggtgtttacggactcggagtaccagctgccgtacgttctcggctctgcccaccagggctgcctgcctccgttcccggcggacgtgttcatgattccccagtacggctacctaacactcaacaacggtagtcaggccgtgggacgctcctccttctactgcctggaatactttccttcgcagatgctgagaaccggcaacaacttccagtttacttacaccttcgaggacgtgcctttccacagcagctacgcccacagccagagcttggaccggctgatgaatcctctgattgaccagtacctgtactacttgtctcggactcaaacaacaggaggcacggcaaatacgcagactctgggcttcagccaaggtgggcctaatacaatggccaatcaggcaaagaactggctgccaggaccctgttaccgccaacaacgcgtctcaacgacaaccgggcaaaacaacaatagcaactttgcctggactgctgggaccaaataccatctgaatggaagaaattcattggctaatcctggcatcgctatggcaacacacaaagacgacgaggagcgtttttttcccagtaacgggatcctgatttttggcaaacaaaatgctgccagagacaatgcggattacagcgatgtcatgctcaccagcgaggaagaaatcaaaaccactaaccctgtggctacagaggaatacggtatcgtggcagataacttgcagcagcaaaacacggctcctcaaattggaactgtcaacagccagggggccttacccggtatggtctggcagaaccgggacgtgtacctgcagggtcccatctgggccaagattcctcacacggacggcaacttccacccgtctccgctgatgggcggctttggcctgaaacatcctccgcctcagatcctgatcaagaacacgcctgtacctgcggatcctccgaccaccttcaaccagtcaaagctgaactctttcatcacgcaatacagcaccggacaggtcagcgtggaaattgaatgggagctgcagaaggaaaacagcaagcgctggaaccccgagatccagtacacctccaactactacaaatctacaagtgtggactttgctgttaatacagaaggcgtgtactctgaaccccgccccattggcacccgttacctcacccgtaatctgtaattgcctgttaatcaataaaccggttgattcgtttcagttgaactttggtctctgcg

SEQ ID NO: 5168 - protein, 738 aa, Adeno-associated virus 8; identical to SEQ ID NO: 5159

SEQ ID NO: 5169 - protein, 737 aa, Adeno-associated virus 8
MAADGYLPDWLEDNLSEGIREWWALKPGAPKPKANQQKQDDGRGLVLPGYKYLGPFNGLDKGEPVNAADAAALEHDKAYDQQLQAGDNPYLRYNHADAEFQERLQEDTSFGGNLGRAVFQAKKRVLEPLGLVEEGAKTAPGKKRPVEPSPQRSPDSSTGIGKKGQQPARKRLNFGQTGDSESVPDPQPLGEPPAAPSGVGPNTMAAGGGAPMADNNEGADGVGSSSGNWHCDSTWLGDRVITTSTRTWALPTYNNHLYKQISNGTSGGATNDNTYFGYSTPWGYFDFNRFHCHFSPRDWQRLINNNWGFRPKRLSFKLFNIQVKEVTQNEGTKTIANNLTSTIQVFTDSEYQLPYVLGSAHQGCLPPFPADVFMIPQYGYLTLNNGSQAVGRSSFYCLEYFPSQMLRTGNNFQFTYTFEDVPFHSSYAHSQSLDRLMNPLIDQYLYYLSRTQTTGGTANTQTLGFSQGGPNTMANQAKNWLPGPCYRQQRVSTTTGQNNNSNFAWTAGTKYHLNGRNSLANPGIAMATHKDDEERFFPSNGILIFGKQNAARDNADYSDVMLTSEEEIKTTNPVATEEYGIVADNLQQQNTAPQIGTVNSQGALPGMVWQNRDVYLQGPIWAKIPHTDGNFHPSPLMGGFGLKHPPPQILIKNTPVPADPPTTFNQSKLNSFITQYSTGQVSVEIEWELQKENSKRWNPEIQYTSNYYKSTSVDFAVIQKACTLNPAPLAPVTSPVI

SEQ ID NO: 5170 - DNA, 2217 bp, Adeno-associated virus 8; identical to SEQ ID NO: 5165
  source 1..2217: mol_type = genomic DNA

SEQ ID NO: 5171 - DNA, 4385 bp, Adeno-associated virus 9
  source 1..4385: mol_type = genomic DNA
cagagagggagtggccaactccatcactaggggtaatcgcgaagcgcctcccacgctgccgcgtcagcgctgacgtagattacgtcataggggagtggtcctgtattagctgtcacgtgagtgcttttgcgacattttgcgacaccacatggccatttgaggtatatatggccgagtgagcgagcaggatctccattttgaccgcgaaatttgaacgagcagcagccatgccgggcttctacgagattgtgatcaaggtgccgagcgacctggacgagcacctgccgggcatttctgactcttttgtgaactgggtggccgagaaggaatgggagctgcccccggattctgacatggatcggaatctgatcgagcaggcacccctgaccgtggccgagaagctgcagcgcgacttcctggtccaatggcgccgcgtgagtaaggccccggaggccctcttctttgttcagttcgagaagggcgagagctactttcacctgcacgttctggtcgagaccacgggggtcaagtccatggtgctaggccgcttcctgagtcagattcgggagaagctggtccagaccatctaccgcgggatcgagccgaccctgcccaactggttcgcggtgaccaagacgcgtaatggcgccggcggggggaacaaggtggtggacgagtgctacatccccaactacctcctgcccaagactcagcccgagctgcagtgggcgtggactaacatggaggagtatataagcgcgtgcttgaacctggccgagcgcaaacggctcgtggcgcagcacctgacccacgtcagccagacgcaggagcagaacaaggagaatctgaaccccaattctgacgcgcccgtgatcaggtcaaaaacctccgcgcgctacatggagctggtcgggtggctggtggaccggggcatcacctccgagaagcagtggatccaggaggaccaggcctcgtacatctccttcaacgccgcctccaactcgcggtcccagatcaaggccgcgctggacaatgccggcaagatcatggcgctgaccaaatccgcgcccgactacctggtaggcccttcacttccggtggacattacgcagaaccgcatctaccgcatcctgcagctcaacggctacgaccctgcctacgccggctccgtctttctcggctgggcacaaaagaagttcgggaaacgcaacaccatctggctgtttgggccggccaccacgggaaagaccaacatcgcagaagccattgcccacgccgtgcccttctacggctgcgtcaactggaccaatgagaactttcccttcaacgattgcgtcgacaagatggtgatctggtgggaggagggcaagatgacggccaaggtcgtggagtccgccaaggccattctcggcggcagcaaggtgcgcgtggaccaaaagtgcaagtcgtccgcccagatcgaccccactcccgtgatcgtcacctccaacaccaacatgtgcgccgtgattgacgggaacagcaccaccttcgagcaccagcagcctctccaggaccggatgtttaagttcgaactcacccgccgtctggagcacgactttggcaaggtgacaaagcaggaagtcaaagagttcttccgctgggccagtgatcacgtgaccgaggtggcgcatgagttttacgtcagaaagggcggagccagcaaaagacccgcccccgatgacgcggataaaagcgagcccaagcgggcctgcccctcagtcgcggatccatcgacgtcagacgcggaaggagctccggtggactttgccgacaggtaccaaaacaaatgttctcgtcacgcgggcatgcttcagatgctgcttccctgcaaaacgtgcgagagaatgaatcagaatttcaacatttgcttcacacacggggtcagagactgctcagagtgtttccccggcgtgtcagaatctcaaccggtcgtcagaaagaggacgtatcggaaactctgtgcgattcatcatctgctggggcgggctcccgagattgcttgctcggcctgcgatctggtcaacgtggacctggatgactgtgtttctgagcaataaatgacttaaaccaggtatggctgccgatggttatcttccagattggctcgaggacaacctctctgagggcattcgcgagtggtgggcgctgaaacctggagccccgaagcccaaagccaaccagcaaaagcaggacgacggccggggtctggtgcttcctggctacaagtacctcggacccttcaacggactcgacaagggggagcccgtcaacgcggcggacgcagcggccctcgagcacggcaaggcctacgaccagcagctgcaggcgggtgacaatccgtacctgcggtataaccacgccgacgccgagtttcaggagcgtctgcaagaagatacgtcttttgggggcaacctcgggcgagcagtcttccaggccaagaagcgggttctcgaacctctcggtctggttgaggaaggcgctaagacggctcctggaaagaagagaccggtagagccatcaccccagcgttctccagactcctctacgggcatcggcaagaaaggccaacagcccgccagaaaaagactcaattttggtcagactggcgactcagagtcagttccagaccctcaacctctcggagaacctccagcagcgccctctggtgtgggacctaatacaatggctgcaggcggtggcgcaccaatggcagacaataacgaaggcgccgacggagtgggtaattcctcgggaaattggcattgcgattccacatggctgggggacagagtcatcaccaccagcacccgaacctgggcattgcccacctacaacaaccacctctacaagcaaatctccaatggaacatcgggaggaagcaccaacgacaacacctactttggctacagcaccccctgggggtattttgacttcaacagattccactgccacttctcaccacgtgactggcagcgactcatcaacaacaactggggattccggccaaagagactcaacttcaagctgttcaacatccaggtcaaggaggttacgacgaacgaaggcaccaagaccatcgccaataaccttaccagcaccgtccaggtctttacggactcggagtaccagctaccgtacgtcctaggctctgcccaccaaggatgcctgccaccgtttcctgcagacgtcttcatggttcctcagtacggctacctgacgctcaacaatggaagtcaagcgttaggacgttcttctttctactgtctggaatacttcccttctcagatgctgagaaccggcaacaactttcagttcagctacactttcgaggacgtgcctttccacagcagctacgcacacagccagagtctagatcgactgatgaaccccctcatcgaccagtacctatactacctggtcagaacacagacaactggaactgggggaactcaaactttggcattcagccaagcaggccctagctcaatggccaatcaggctagaaactgggtacccgggccttgctaccgtcagcagcgcgtctccacaaccaccaaccaaaataacaacagcaactttgcgtggacgggagctgctaaattcaagctgaacgggagagactcgctaatgaatcctggcgtggctatggcatcgcacaaagacgacgaggaccgcttctttccatcaagtggcgttctcatatttggcaagcaaggagccgggaacgatggagtcgactacagccaggtgctgattacagatgaggaagaaattaaagccaccaaccctgtagccacagaggaatacggagcagtggccatcaacaaccaggccgctaacacgcaggcgcaaactggacttgtgcataaccagggagttattcctggtatggtctggcagaaccgggacgtgtacctgcagggccctatttgggctaaaatacctcacacagatggcaactttcacccgtctcctctgatgggtggatttggactgaaacacccacctccacagattctaattaaaaatacaccagtgccggcagatcctcctcttaccttcaatcaagccaagctgaactctttcatcacgcagtacagcacgggacaagtcagcgtggaaatcgagtgggagctgcagaaagaaaacagcaagcgctggaatccagagatccagtatacttcaaactactacaaatctacaaatgtggactttgctgtcaataccaaaggtgtttactctgagcctcgccccattggtactcgttacctcacccgtaatttgtaattgcctgttaatcaataaaccggttaattcgtttcagttgaactttggtctctgcg

SEQ ID NO: 5172 - DNA, 4382 bp, Adeno-associated virus 9
  source 1..4382: mol_type = genomic DNA
cagagagggagtggccaactccatcactaggggtaatcgcgaagcgcctcccacgctgccgcgtcagcgctgacgtagattacgtcataggggagtggtcctgtattagctgtcacgtgagtgcttttgcgacattttgcgacaccacatggccatttgaggtatatatggccgagtgagcgagcaggatctccattttgaccgcgaaatttgaacgagcagcagccatgccgggcttctacgagattgtgatcaaggtgccgagcgacctggacgagcacctgccgggcatttctgactcttttgtgaactgggtggccgagaaggaatgggagctgcccccggattctgacatggatcggaatctgatcgagcaggcacccctgaccgtggccgagaagctgtagcgcgacttcctggtccaatggcgccgcgtgagtaaggccccggaggccctcttctttgttcagttcgagaagggcgagagctactttcacctgcacgttctggtcgagaccacgggggtcaagtccatggtgctaggccgcttcctgagtcagattcgggagaagctggtccagaccatctaccgcgggatcgagccgaccctgcccaactggttcgcggtgaccaagacgcgtaatggcgccggcggggggaacaaggtggtggacgagtgctacatccccaactacctcctgcccaagactcagcccgagctgcagtgggcgtggactaacatggaggagtatataagcgcgtgcttgaacctggccgagcgcaaacggctcgtggcgcagcacctgacccacgtcagccagacgcaggagcagaacaaggagaatctgaaccccaattctgacgcgcccgtgatcaggtcaaaaacctccgcgcgctacatggagctggtcgggtggctggtggaccggggcatcacctccgagaagcagtggatccaggaggaccaggcctcgtacatctccttcaacgccgcctccaactcgcggtcccagatcaaggccgcgctggacaatgccggcaagatcatggcgctgaccaaatccgcgcccgactacctggtaggcccttcacttccggtggacattacgcagaaccgcatctaccgcatcctgcagctcaacggctacgaccctgcctacgccggctccgtctttctcggctgggcacaaaagaagttcgggaaacgcaacaccatctggctgtttgggccggccaccacgggaaagaccaacatcgcagaagccattgcccacgccgtgcccttctacggctgcgtcaactggaccaatgagaactttcccttcaacgattgcgtcgacaagatggtgatctggtgggaggagggcaagatgacggccaaggtcgtggagtccgccaaggccattctcggcggcagcaaggtgcgcgtggaccaaaagtgcaagtcgtccgcccagatcgaccccactcccgtgatcgtcacctccaacaccaacatgtgcgccgtgattgacgggaacagcaccaccttcgagcaccagcagcctctccaggaccggatgtttaagttcgaactcacccgccgtctggagcacgactttggcaaggtgacaaagcaggaagtcaaagagttcttccgctgggccagtgatcacgtgaccgaggtggcgcatgagttttacgtcagaaagggcggagccagcaaaagacccgcccccgatgacgcggataaaagcgagcccaagcgggcctgcccctcagtcgcggatccatcgacgtcagacgcggaaggagctccggtggactttgccgacaggtaccaaaacaaatgttctcgtcacgcgggcatgcttcagatgctgcttccctgcaaaacgtgcgagagaatgaatcagaatttcaacatttgcttcacacacggggtcagagactgctcagagtgtttccccggcgtgtcagaatctcaaccggtcgtcagaaagaggacgtatcggaaactctgtgcgattcatcatctgctggggcgggctcccgagattgcttgctcggcctgcgatctggtcaacgtggacctggatgactgtgtttctgagcaataaatgacttaaaccaggtatggctgccgatggttatcttccagattggctcgaggacaacctctctgagggcattcgcgagtggtgggacctgaaacctggagccccgaaacccaaagccaaccagcaaaagcaggacgacggccggggtctggtgcttcctggctacaagtacctcggacccttcaacggactcgacaagggggagcccgtcaacgcggcggacgcagcggccctcgagcacgacaaggcctacgaccagcagctcaaagcgggtgacaatccgtacctgcggtataaccacgccgacgccgagtttcaggagcgtctgcaagaagatacgtcttttgggggcaacctcgggcgagcagtcttccaggccaagaagcgggttctcgaacctctcggtctggttgaggaaggcgctaagacggctcctggaaagaagagaccggtagagcagtcaccccaagaaccagactcatcctcgggcatcggcaaatcaggccagcagcccgctaaaaagagactcaattttggtcagactggcgactcagagtcagtccccgacccacaacctctcggagaacctccagaagccccctcaggtctgggacctaatacaatggcttcaggcggtggcgctccaatggcagacaataacgaaggcgccgacggagtgggtaattcctcgggaaattggcattgcgattccacatggctgggggacagagtcatcaccaccagcacccgaacctgggcattgcccacctacaacaaccacctctacaagcaaatctccaatggaacatcgggaggaagcaccaacgacaacacctactttggctacagcaccccctgggggtattttgacttcaacagattccactgccacttctcaccacgtgactggcagcgactcatcaacaacaactggggattccggccaaagagactcaacttcaagctgttcaacatccaggtcaaggaggttacgacgaacgaaggcaccaagaccatcgccaataaccttaccagcaccgtccaggtctttacggactcggagtaccagctaccgtacgtcctaggctctgcccaccaaggatgcctgccaccgtttcctgcagacgtcttcatggttcctcagtacggctacctgacgctcaacaatggaagtcaagcgttaggacgttcttctttctactgtctggaatacttcccttctcagatgctgagaaccggcaacaactttcagttcagctacactttcgaggacgtgcctttccacagcagctacgcacacagccagagtctagatcgactgatgaaccccctcatcgaccagtacctatactacctggtcagaacacagacaactggaactgggggaactcaaactttggcattcagccaagcaggccctagctcaatggccaatcaggctagaaactgggtacccgggccttgctaccgtcagcagcgcgtctccacaaccaccaaccaaaataacaacagcaactttgcgtggacgggagctgctaaattcaagctgaacgggagagactcgctaatgaatcctggcgtggctatggcatcgcacaaagacgacgaggaccgcttctttccatcaagtggcgttctcatatttggcaagcaaggagccgggaacgatggagtcgactacagccaggtgctgattacagatgaggaagaaattaaagccaccaaccctgtagccacagaggaatacggagcagtggccatcaacaaccaggccgctaacacgcaggcgcaaactggacttgtgcataaccagggagttattcctggtatggtctggcagaaccgggacgtgtacctgcagggccctatttgggctaaaatacctcacacagatggcaactttcacccgtctcctctgatgggtggatttggactgaaacacccacctccacagattctaattaaaaatacaccagtgccggcagatcctcctcttaccttcaatcaagccaagctgaactctttcatcacgcagtacagcacgggacaagtcagcgtggaaatcgagtgggagctgcagaaagaaaacagcaagcgctggaatccagagatccagtatacttcaaactactacaaatctacaaatgtggactttgctgtcaataccgaaggtgtttactctgagcctcgccccattggtactcgttacctcacccgtaatttgtaattgcctgttaatcaataaaccggttaattcgtttcagttgaactttggtctctgcg

SEQ ID NO: 5173 - protein, 736 aa, Adeno-associated virus 9; identical to SEQ ID NO: 4805

SEQ ID NO: 5174 - protein, 736 aa, Adeno-associated virus 9
MAADGYLPDWLEDNLSEGIREWWDLKPGAPKPKANQQKQDDGRGLVLPGYKYLGPFNGLDKGEPVNAADAAALEHDKAYDQQLKAGDNPYLRYNHADAEFQERLQEDTSFGGNLGRAVFQAKKRVLEPLGLVEEGAKTAPGKKRPVEQSPQEPDSSSGIGKSGQQPAKKRLNFGQTGDSESVPDPQPLGEPPEAPSGLGPNTMASGGGAPMADNNEGADGVGNSSGNWHCDSTWLGDRVITTSTRTWALPTYNNHLYKQISNGTSGGSTNDNTYFGYSTPWGYFDFNRFHCHFSPRDWQRLINNNWGFRPKRLNFKLFNIQVKEVTTNEGTKTIANNLTSTVQVFTDSEYQLPYVLGSAHQGCLPPFPADVFMVPQYGYLTLNNGSQALGRSSFYCLEYFPSQMLRTGNNFQFSYTFEDVPFHSSYAHSQSLDRLMNPLIDQYLYYLVRTQTTGTGGTQTLAFSQAGPSSMANQARNWVPGPCYRQQRVSTTTNQNNNSNFAWTGAAKFKLNGRDSLMNPGVAMASHKDDEDRFFPSSGVLIFGKQGAGNDGVDYSQVLITDEEEIKATNPVATEEYGAVAINNQAANTQAQTGLVHNQGVIPGMVWQNRDVYLQGPIWAKIPHTDGNFHPSPLMGGFGLKHPPPQILIKNTPVPADPPLTFNQAKLNSFITQYSTGQVSVEIEWELQKENSKRWNPEIQYTSNYYKSTNVDFAVNTEGVYSEPRPIGTRYLTRNL

SEQ ID NO: 5175 - protein, 623 aa, Adeno-associated virus 9
MPGFYEIVIKVPSDLDEHLPGISDSFVNWVAEKEWELPPDSDMDRNLIEQAPLTVAEKLQRDFLVQWRRVSKAPEALFFVQFEKGESYFHLHVLVETTGVKSMVLGRFLSQIREKLVQTIYRGIEPTLPNWFAVTKTRNGAGGGNKVVDECYIPNYLLPKTQPELQWAWTNMEEYISACLNLAERKRLVAQHLTHVSQTQEQNKENLNPNSDAPVIRSKTSARYMELVGWLVDRGITSEKQWIQEDQASYISFNAASNSRSQIKAALDNAGKIMALTKSAPDYLVGPSLPVDITQNRIYRILQLNGYDPAYAGSVFLGWAQKKFGKRNTIWLFGPATTGKTNIAEAIAHAVPFYGCVNWTNENFPFNDCVDKMVIWWEEGKMTAKVVESAKAILGGSKVRVDQKCKSSAQIDPTPVIVTSNTNMCAVIDGNSTTFEHQQPLQDRMFKFELTRRLEHDFGKVTKQEVKEFFRWASDHVTEVAHEFYVRKGGASKRPAPDDADKSEPKRACPSVADPSTSDAEGAPVDFADRYQNKCSRHAGMLQMLLPCKTCERMNQNFNICFTHGVRDCSECFPGVSESQPVVRKRTYRKLCAIHHLLGRAPEIACSACDLVNVDLDDCVSEQ

SEQ ID NO: 5176 - DNA, 1797 bp, synthetic construct
  misc_feature 1..1797: note = Description of Artificial Sequence: Synthetic polynucleotide
  source 1..1797: mol_type = other DNA
acggctccgaccggagacaagcggaaaggcgaagacgaacctcgtttgcccgacacttcttcacagactcccaagaaaaacaagaagcctcgcaaggaaagaccttccggcggggcagaagatccgggcgaaggcacctcttccaacgctggagcagcagcacccgcctctagtgtgggatcatctatcatggctgaaggaggtggcggcccagtgggcgatgcaggccagggtgccgatggagtgggcaattcctccggaaattggcattgcgattcccaatggctggaaaacggagtcgtcactcgaaccacccgaacctgggtcttgcccagctacaacaaccacctgtacaaacgaatccaaggacccagcggaggcgacaacaacaacaaattctttggattcagcaccccctggggatactttgactacaatcgattccactgccacttttccccgcgagactggcaacgactcatcaacaacaactggggcatccgtcccaaagcgatgcgctttagactctttaacatccaggttaaagaggtcacggtccaagacttcaacaccaccatcggcaacaacctcaccagtacggtccaggtctttgcggacaaggactaccaactgccgtacgtcctcggatcggctaccgaaggcaccttcccgccgttcccagcggatatctacacgatcccgcagtacgggtactgcacgctaaactacaacaacgaggcggtggatcgttcggccttctactgtctggactactttccctcagacatgctgcggacaggaaataactttgagtttacttacaccttcgaggacgttcctttccatagcatgtttgcccacaaccagacgctagaccggctgatgaatcccctcgtggatcagtacctctgggctttcagctccgtcagccaagcaggctcatctggacgagctcttcattactcgcgggcgactaaaaccaacatggcggctcaatataggaactggttacctgggcctttcttccgtgatcagcaaatctttacgggcgctagcaacatcactaaaaataacgtctttagcgtttgggaaaaaggcaagcaatgggaactcgacaatcggaccaacctaatgcagcccggtcctgcggcagcgaccacctttagcggagaacctgaccgtcaagccatgcaaaacacgctggcttttagcaggaccgtctacgatcaaacgaccgccacgaccgatcgtaaccagatactcatcaccaacgaagacgaaatcagacccaccaactcggtcggtatcgacgcgtggggagcagttcccaccaacaaccagtcgatcgtgacccccggcactcgcgcggccgtcaacaatcaaggggcgcttcccgggatggtgtggcaaaacagagacatttaccctacagggacccatttggccaaaattcccgacactgacaatcacttccatccgtccccgcttattgggcggtttggctgcaagcatccccctccccagattttcattaaaaacacacccgtccctgccaacccttcggaaacgttccagacggccaaagtggcctccttcatcaaccagtactcgaccggacagtgcaccgtcgaaatcttttgggaactcaagaaggaaacctccaagcgctggaaccccgaaatccagttcacctccaactttggcaacgcggccgacatccagtttgccgtctccgacacgggatcctattccgaacctcgtcccatcggtacccgttaccttaccaaacctctgtaa

SEQ ID NO: 5177 - DNA, 1989 bp, synthetic construct
  misc_feature 1..1989: note = Description of Artificial Sequence: Synthetic polynucleotide
  source 1..1989: mol_type = other DNA
atgaggtcgtactacgaggtcatcgttcagctgcccaacgacgtcgagagtcaggtacctggaatctccgattcgttcgtcaactggattacgtcgcgagaatggacgttgcctgaggacgccgattgggatttggaccaggtcgatcaagttcaactgacgctcggcgacaaaatccaacgggagattcgaactcattgggggacgatggccaaagaaccggactttcactattttatccaactggaacaaggtgaggtgttctttcatttacacgtcctgctggaaacgtgttccgtaaagccgatggtactcggaagatatatccgacatattcaacaaaaaattgtgagtaaagtctactgcgccacgagcctacgatggaaggatggatgcgtggtgaccaagaccaaaaatttcgggggcgcgaacaaggtccgggccgagtcgtatattcccgcctacctgatcccgaaacagcaaccggaagtgcagtgggcgtggactaacgtgcccgagtatataaaagcgtgcttgcaccgagaactgcgtgccagtctcgcgcgacttcacttcgaggaggcgggcgtctcgcaatccaaggaaaatctcgcgagaactgcagacggcgctcccgtgatgccgacccgcgtcagcaaacgctacatggagctcgtggattggctcgtggagaaggggatcaccaccgagaaggaatggctgctggaaaacagagaaagctttcggagctttcaggcctcgagcaactcggcgcgtcagatcaagacggccctgcaaggcgccattcaggagatgcttctgaccaagacggcggaggactacctcgtcggaaaggatcccgtctcggacgacgacatccgtcagaaccgcatctacaagattctggaactgaaccactacgacccagcgtacgtggggagtattttggtcgggtggtgccagaagaaatggggcaagcgaaacacgctgtggctgttcggacatgcgaccaccggcaagaccaacatcgcggaggctattgcccatgctgtgccgttctatggatgcgttaactggaccaacgagaactttccgttcaacgactgcgtcgaaaaaatgattatctggtgggaggagggcaaaatgaccgccaaagtggtggaaacagccaaggcgattctgggaggatctcgggtgagagtggaccaaaaatgcaaagcttcggttccgatcgaaccgacgccggtcattattaccagtaacaccaacatgtgttatgtcatcgacgggaacacgaccacgttcgagcataagcagccgttggaggacaggatgtttaagctcgaattgctgactcggttgcctgatgactttggtaaggtgaccaaacaggaggtgcgtcaattcttcaggtggtctcaggatcacctgacccctgtgatcccagaattcctagtgcggaaggcggagtctcgcaaaagacccgccccttccggggaaggctatataagcccgacaaagcggcccgcgctcgcagagcagcagcaggcgtcggagagcgcggacccggttcccaccaggtatcgtatcaaatgctcgaaacattgcggtatggataaaatgttgtttccttgccaaatttgtgaatcgatgaacagagatattaatatttgtgctattcataaaacgaccgactgtaaagagtgtttccccgactacggggataaagatgatgtagaactacccccctgtacagaacacaacgtgtctcgttgttatcaatgtcattcgggcgaattgtatcgcgtgacttcggactctgacgagaaacctgcccccgagagtgatgaaggcaccgagccatcctatgctccctgcacgattcaccacctgatgggcaagagtcacgggttagtcacttgcgcggcgtgtcggttgaaaaatagtacgttgcatgatgacttggatgacggtgatctcgaacaataa

SEQ ID NO: 5178 - DNA, 1626 bp, synthetic construct
  misc_feature 1..1626: note = Description of Artificial Sequence: Synthetic polynucleotide
  source 1..1626: mol_type = other DNA
atgaggtcgtactacgaggtcatcgttcagctgcccaacgacgtcgagagtcaggtacctggaatctccgattcgttcgtcaactggattacgtcgcgagaatggacgttgcctgaggacgccgattgggatttggaccaggtcgatcaagttcaactgacgctcggcgacaaaatccaacgggagattcgaactcattgggggacgatggccaaagaaccggactttcactattttatccaactggaacaaggtgaggtgttctttcatttacacgtcctgctggaaacgtgttccgtaaagccgatggtactcggaagatatatccgacatattcaacaaaaaattgtgagtaaagtctactgcgccacgagcctacgatggaaggatggatgcgtggtgaccaagaccaaaaatttcgggggcgcgaacaaggtccgggccgagtcgtatattcccgcctacctgatcccgaaacagcaaccggaagtgcagtgggcgtggactaacgtgcccgagtatataaaagcgtgcttgcaccgagaactgcgtgccagtctcgcgcgacttcacttcgaggaggcgggcgtctcgcaatccaaggaaaatctcgcgagaactgcagacggcgctcccgtgatgccgacccgcgtcagcaaacgctacatggagctcgtggattggctcgtggagaaggggatcaccaccgagaaggaatggctgctggaaaacagagaaagctttcggagctttcaggcctcgagcaactcggcgcgtcagatcaagacggccctgcaaggcgccattcaggagatgcttctgaccaagacggcggaggactacctcgtcggaaaggatcccgtctcggacgacgacatccgtcagaaccgcatctacaagattctggaactgaaccactacgacccagcgtacgtggggagtattttggtcgggtggtgccagaagaaatggggcaagcgaaacacgctgtggctgttcggacatgcgaccaccggcaagaccaacatcgcggaggctattgcccatgctgtgccgttctatggatgcgttaactggaccaacgagaactttccgttcaacgactgcgtcgaaaaaatgattatctggtgggaggagggcaaaatgaccgccaaagtggtggaaacagccaaggcgattctgggaggatctcgggtgagagtggaccaaaaatgcaaagcttcggttccgatcgaaccgacgccggtcattattaccagtaacaccaacatgtgttatgtcatcgacgggaacacgaccacgttcgagcataagcagccgttggaggacaggatgtttaagctcgaattgctgactcggttgcctgatgactttggtaaggtgaccaaacaggaggtgcgtcaattcttcaggtggtctcaggatcacctgacccctgtgatcccagaattcctagtgcggaaggcggagtctcgcaaaagacccgccccttccggggaaggctatataagcccgacaaagcggcccgcgctcgcagagcagcagcaggcgtcggagagcgcggacccggttcccaccagattggttggagcggttggtcaaaaagggagtgaatgctgcagctga

SEQ ID NO: 5179 - DNA, 1323 bp, synthetic construct
  misc_feature 1..1323: note = Description of Artificial Sequence: Synthetic polynucleotide
  source 1..1323: mol_type = other DNA
atggagctcgtggattggctcgtggagaaggggatcaccaccgagaaggaatggctgctggaaaacagagaaagctttcggagctttcaggcctcgagcaactcggcgcgtcagatcaagacggccctgcaaggcgccattcaggagatgcttctgaccaagacggcggaggactacctcgtcggaaaggatcccgtctcggacgacgacatccgtcagaaccgcatctacaagattctggaactgaaccactacgacccagcgtacgtggggagtattttggtcgggtggtgccagaagaaatggggcaagcgaaacacgctgtggctgttcggacatgcgaccaccggcaagaccaacatcgcggaggctattgcccatgctgtgccgttctatggatgcgttaactggaccaacgagaactttccgttcaacgactgcgtcgaaaaaatgattatctggtgggaggagggcaaaatgaccgccaaagtggtggaaacagccaaggcgattctgggaggatctcgggtgagagtggaccaaaaatgcaaagcttcggttccgatcgaaccgacgccggtcattattaccagtaacaccaacatgtgttatgtcatcgacgggaacacgaccacgttcgagcataagcagccgttggaggacaggatgtttaagctcgaattgctgactcggttgcctgatgactttggtaaggtgaccaaacaggaggtgcgtcaattcttcaggtggtctcaggatcacctgacccctgtgatcccagaattcctagtgcggaaggcggagtctcgcaaaagacccgccccttccggggaaggctatataagcccgacaaagcggcccgcgctcgcagagcagcagcaggcgtcggagagcgcggacccggttcccaccaggtatcgtatcaaatgctcgaaacattgcggtatggataaaatgttgtttccttgccaaatttgtgaatcgatgaacagagatattaatatttgtgctattcataaaacgaccgactgtaaagagtgtttccccgactacggggataaagatgatgtagaactacccccctgtacagaacacaacgtgtctcgttgttatcaatgtcattcgggcgaattgtatcgcgtgacttcggactctgacgagaaacctgcccccgagagtgatgaaggcaccgagccatcctatgctccctgcacgattcaccacctgatgggcaagagtcacgggttagtcacttgcgcggcgtgtcggttgaaaaatagtacgttgcatgatgacttggatgacggtgatctcgaacaataa

SEQ ID NO: 5180 - DNA, 960 bp, synthetic construct
  misc_feature 1..960: note = Description of Artificial Sequence: Synthetic polynucleotide
  source 1..960: mol_type = other DNA
atggagctcgtggattggctcgtggagaaggggatcaccaccgagaaggaatggctgctggaaaacagagaaagctttcggagctttcaggcctcgagcaactcggcgcgtcagatcaagacggccctgcaaggcgccattcaggagatgcttctgaccaagacggcggaggactacctcgtcggaaaggatcccgtctcggacgacgacatccgtcagaaccgcatctacaagattctggaactgaaccactacgacccagcgtacgtggggagtattttggtcgggtggtgccagaagaaatggggcaagcgaaacacgctgtggctgttcggacatgcgaccaccggcaagaccaacatcgcggaggctattgcccatgctgtgccgttctatggatgcgttaactggaccaacgagaactttccgttcaacgactgcgtcgaaaaaatgattatctggtgggaggagggcaaaatgaccgccaaagtggtggaaacagccaaggcgattctgggaggatctcgggtgagagtggaccaaaaatgcaaagcttcggttccgatcgaaccgacgccggtcattattaccagtaacaccaacatgtgttatgtcatcgacgggaacacgaccacgttcgagcataagcagccgttggaggacaggatgtttaagctcgaattgctgactcggttgcctgatgactttggtaaggtgaccaaacaggaggtgcgtcaattcttcaggtggtctcaggatcacctgacccctgtgatcccagaattcctagtgcggaaggcggagtctcgcaaaagacccgccccttccggggaaggctatataagcccgacaaagcggcccgcgctcgcagagcagcagcaggcgtcggagagcgcggacccggttcccaccagattggttggagcggttggtcaaaaagggagtgaatgctgcagctga

SEQ ID NO: 5181 - DNA, 1608 bp, synthetic construct
  misc_feature 1..1608: note = Description of Artificial Sequence: Synthetic polynucleotide
  source 1..1608: mol_type = other DNA
atggctgaaggaggtggcggcccagtgggcgatgcaggccagggtgccgatggagtgggcaattcctccggaaattggcattgcgattcccaatggctggaaaacggagtcgtcactcgaaccacccgaacctgggtcttgcccagctacaacaaccacctgtacaaacgaatccaaggacccagcggaggcgacaacaacaacaaattctttggattcagcaccccctggggatactttgactacaatcgattccactgccacttttccccgcgagactggcaacgactcatcaacaacaactggggcatccgtcccaaagcgatgcgctttagactctttaacatccaggttaaagaggtcacggtccaagacttcaacaccaccatcggcaacaacctcaccagtacggtccaggtctttgcggacaaggactaccaactgccgtacgtcctcggatcggctaccgaaggcaccttcccgccgttcccagcggatatctacacgatcccgcagtacgggtactgcacgctaaactacaacaacgaggcggtggatcgttcggccttctactgtctggactactttccctcagacatgctgcggacaggaaataactttgagtttacttacaccttcgaggacgttcctttccatagcatgtttgcccacaaccagacgctagaccggctgatgaatcccctcgtggatcagtacctctgggctttcagctccgtcagccaagcaggctcatctggacgagctcttcattactcgcgggcgactaaaaccaacatggcggctcaatataggaactggttacctgggcctttcttccgtgatcagcaaatctttacgggcgctagcaacatcactaaaaataacgtctttagcgtttgggaaaaaggcaagcaatgggaactcgacaatcggaccaacctaatgcagcccggtcctgcggcagcgaccacctttagcggagaacctgaccgtcaagccatgcaaaacacgctggcttttagcaggaccgtctacgatcaaacgaccgccacgaccgatcgtaaccagatactcatcaccaacgaagacgaaatcagacccaccaactcggtcggtatcgacgcgtggggagcagttcccaccaacaaccagtcgatcgtgacccccggcactcgcgcggccgtcaacaatcaaggggcgcttcccgggatggtgtggcaaaacagagacatttaccctacagggacccatttggccaaaattcccgacactgacaatcacttccatccgtccccgcttattgggcggtttggctgcaagcatccccctccccagattttcattaaaaacacacccgtccctgccaacccttcggaaacgttccagacggccaaagtggcctccttcatcaaccagtactcgaccggacagtgcaccgtcgaaatcttttgggaactcaagaaggaaacctccaagcgctggaaccccgaaatccagttcacctccaactttggcaacgcggccgacatccagtttgccgtctccgacacgggatcctattccgaacctcgtcccatcggtacccgttaccttaccaaacctctgtaa

SEQ ID NO: 5182 - DNA, 2232 bp, synthetic construct
  misc_feature 1..2232: note = Description of Artificial Sequence: Synthetic polynucleotide
  source 1..2232: mol_type = other DNA
atgtctctcatttctgatgcgattccagattggttggagcggttggtcaaaaagggagtgaatgctgcagctgatttctaccatttggaaagcggtcctcctcgtcctaaggcaaatcagcaaactcaagaatctcttgaaaaggacgattcgagaggtctcgtgttcccaggctacaattatctaggccctttcaacggtctagataaaggagaacccgtcaacgaggcagacgctgccgccttagaacacgacaaggcttacgacctcgaaatcaaggacgggcacaacccgtactttgagtacaacgaggccgacagacgtttccaggaacgtctcaaagacgatacctcctttggaggcaatttaggtaaagccatcttccaggccaaaaagagggttctcgaaccctttggtctggtggaagactcaaagacggctccgaccggagacaagcggaaaggcgaagacgaacctcgtttgcccgacacttcttcacagactcccaagaaaaacaagaagcctcgcaaggaaagaccttccggcggggcagaagatccgggcgaaggcacctcttccaacgctggagcagcagcacccgcctctagtgtgggatcatctatcatggctgaaggaggtggcggcccagtgggcgatgcaggccagggtgccgatggagtgggcaattcctccggaaattggcattgcgattcccaatggctggaaaacggagtcgtcactcgaaccacccgaacctgggtcttgcccagctacaacaaccacctgtacaaacgaatccaaggacccagcggaggcgacaacaacaacaaattctttggattcagcaccccctggggatactttgactacaatcgattccactgccacttttccccgcgagactggcaacgactcatcaacaacaactggggcatccgtcccaaagcgatgcgctttagactctttaacatccaggttaaagaggtcacggtccaagacttcaacaccaccatcggcaacaacctcaccagtacggtccaggtctttgcggacaaggactaccaactgccgtacgtcctcggatcggctaccgaaggcaccttcccgccgttcccagcggatatctacacgatcccgcagtacgggtactgcacgctaaactacaacaacgaggcggtggatcgttcggccttctactgtctggactactttccctcagacatgctgcggacaggaaataactttgagtttacttacaccttcgaggacgttcctttccatagcatgtttgcccacaaccagacgctagaccggctgatgaatcccctcgtggatcagtacctctgggctttcagctccgtcagccaagcaggctcatctggacgagctcttcattactcgcgggcgactaaaaccaacatggcggctcaatataggaactggttacctgggcctttcttccgtgatcagcaaatctttacgggcgctagcaacatcactaaaaataacgtctttagcgtttgggaaaaaggcaagcaatgggaactcgacaatcggaccaacctaatgcagcccggtcctgcggcagcgaccacctttagcggagaacctgaccgtcaagccatgcaaaacacgctggcttttagcaggaccgtctacgatcaaacgaccgccacgaccgatcgtaaccagatactcatcaccaacgaagacgaaatcagacccaccaactcggtcggtatcgacgcgtggggagcagttcccaccaacaaccagtcgatcgtgacccccggcactcgcgcggccgtcaacaatcaaggggcgcttcccgggatggtgtggcaaaacagagacatttaccctacagggacccatttggccaaaattcccgacactgacaatcacttccatccgtccccgcttattgggcggtttggctgcaagcatccccctccccagattttcattaaaaacacacccgtccctgccaacccttcggaaacgttccagacggccaaagtggcctccttcatcaaccagtactcgaccggacagtgcaccgtcgaaatcttttgggaactcaagaaggaaacctccaagcgctggaaccccgaaatccagttcacctccaactttggcaacgcggccgacatccagtttgccgtctccgacacgggatcctattccgaacctcgtcccatcggtacccgttaccttaccaaacctctgtaa

SEQ ID NO: 5183 - protein, 535 aa, synthetic construct
  REGION 1..535: note = Description of Artificial Sequence: Synthetic polypeptide
MAEGGGGPVGDAGQGADGVGNSSGNWHCDSQWLENGVVTRTTRTWVLPSYNNHLYKRIQGPSGGDNNNKFFGFSTPWGYFDYNRFHCHFSPRDWQRLINNNWGIRPKAMRFRLFNIQVKEVTVQDFNTTIGNNLTSTVQVFADKDYQLPYVLGSATEGTFPPFPADIYTIPQYGYCTLNYNNEAVDRSAFYCLDYFPSDMLRTGNNFEFTYTFEDVPFHSMFAHNQTLDRLMNPLVDQYLWAFSSVSQAGSSGRALHYSRATKTNMAAQYRNWLPGPFFRDQQIFTGASNITKNNVFSVWEKGKQWELDNRTNLMQPGPAAATTFSGEPDRQAMQNTLAFSRTVYDQTTATTDRNQILITNEDEIRPTNSVGIDAWGAVPTNNQSIVTPGTRAAVNNQGALPGMVWQNRDIYPTGTHLAKIPDTDNHFHPSPLIGRFGCKHPPPQIFIKNTPVPANPSETFQTAKVASFINQYSTGQCTVEIFWELKKETSKRWNPEIQFTSNFGNAADIQFAVSDTGSYSEPRPIGTRYLTKPL

SEQ ID NO: 5184 - protein, 440 aa, synthetic construct
  REGION 1..440: note = Description of Artificial Sequence: Synthetic polypeptide
MELVDWLVEKGITTEKEWLLENRESFRSFQASSNSARQIKTALQGAIQEMLLTKTAEDYLVGKDPVSDDDIRQNRIYKILELNHYDPAYVGSILVGWCQKKWGKRNTLWLFGHATTGKTNIAEAIAHAVPFYGCVNWTNENFPFNDCVEKMIIWWEEGKMTAKVVETAKAILGGSRVRVDQKCKASVPIEPTPVIITSNTNMCYVIDGNTTTFEHKQPLEDRMFKLELLTRLPDDFGKVTKQEVRQFFRWSQDHLTPVIPEFLVRKAESRKRPAPSGEGYISPTKRPALAEQQQASESADPVPTRYRIKCSKHCGMDKMLFPCQICESMNRDINICAIHKTTDCKECFPDYGDKDDVELPPCTEHNVSRCYQCHSGELYRVTSDSDEKPAPESDEGTEPSYAPCTIHHLMGKSHGLVTCAACRLKNSTLHDDLDDGDLEQ

SEQ ID NO: 5185 - protein, 319 aa, synthetic construct
  REGION 1..319: note = Description of Artificial Sequence: Synthetic polypeptide
MELVDWLVEKGITTEKEWLLENRESFRSFQASSNSARQIKTALQGAIQEMLLTKTAEDYLVGKDPVSDDDIRQNRIYKILELNHYDPAYVGSILVGWCQKKWGKRNTLWLFGHATTGKTNIAEAIAHAVPFYGCVNWTNENFPFNDCVEKMIIWWEEGKMTAKVVETAKAILGGSRVRVDQKCKASVPIEPTPVIITSNTNMCYVIDGNTTTFEHKQPLEDRMFKLELLTRLPDDFGKVTKQEVRQFFRWSQDHLTPVIPEFLVRKAESRKRPAPSGEGYISPTKRPALAEQQQASESADPVPTRLVGAVGQKGSECCS

SEQ ID NO: 5186 - protein, 662 aa, synthetic construct
  REGION 1..662: note = Description of Artificial Sequence: Synthetic polypeptide
MRSYYEVIVQLPNDVESQVPGISDSFVNWITSREWTLPEDADWDLDQVDQVQLTLGDKIQREIRTHWGTMAKEPDFHYFIQLEQGEVFFHLHVLLETCSVKPMVLGRYIRHIQQKIVSKVYCATSLRWKDGCVVTKTKNFGGANKVRAESYIPAYLIPKQQPEVQWAWTNVPEYIKACLHRELRASLARLHFEEAGVSQSKENLARTADGAPVMPTRVSKRYMELVDWLVEKGITTEKEWLLENRESFRSFQASSNSARQIKTALQGAIQEMLLTKTAEDYLVGKDPVSDDDIRQNRIYKILELNHYDPAYVGSILVGWCQKKWGKRNTLWLFGHATTGKTNIAEAIAHAVPFYGCVNWTNENFPFNDCVEKMIIWWEEGKMTAKVVETAKAILGGSRVRVDQKCKASVPIEPTPVIITSNTNMCYVIDGNTTTFEHKQPLEDRMFKLELLTRLPDDFGKVTKQEVRQFFRWSQDHLTPVIPEFLVRKAESRKRPAPSGEGYISPTKRPALAEQQQASESADPVPTRYRIKCSKHCGMDKMLFPCQICESMNRDINICAIHKTTDCKECFPDYGDKDDVELPPCTEHNVSRCYQCHSGELYRVTSDSDEKPAPESDEGTEPSYAPCTIHHLMGKSHGLVTCAACRLKNSTLHDDLDDGDLEQ

SEQ ID NO: 5187 - protein, 541 aa, synthetic construct
  REGION 1..541: note = Description of Artificial Sequence: Synthetic polypeptide
MRSYYEVIVQLPNDVESQVPGISDSFVNWITSREWTLPEDADWDLDQVDQVQLTLGDKIQREIRTHWGTMAKEPDFHYFIQLEQGEVFFHLHVLLETCSVKPMVLGRYIRHIQQKIVSKVYCATSLRWKDGCVVTKTKNFGGANKVRAESYIPAYLIPKQQPEVQWAWTNVPEYIKACLHRELRASLARLHFEEAGVSQSKENLARTADGAPVMPTRVSKRYMELVDWLVEKGITTEKEWLLENRESFRSFQASSNSARQIKTALQGAIQEMLLTKTAEDYLVGKDPVSDDDIRQNRIYKILELNHYDPAYVGSILVGWCQKKWGKRNTLWLFGHATTGKTNIAEAIAHAVPFYGCVNWTNENFPFNDCVEKMIIWWEEGKMTAKVVETAKAILGGSRVRVDQKCKASVPIEPTPVIITSNTNMCYVIDGNTTTFEHKQPLEDRMFKLELLTRLPDDFGKVTKQEVRQFFRWSQDHLTPVIPEFLVRKAESRKRPAPSGEGYISPTKRPALAEQQQASESADPVPTRLVGAVGQKGSECCS

SEQ ID NO: 5188 - protein, 743 aa, synthetic construct
  REGION 1..743: note = Description of Artificial Sequence: Synthetic polypeptide
MSLISDAIPDWLERLVKKGVNAAADFYHLESGPPRPKANQQTQESLEKDDSRGLVFPGYNYLGPFNGLDKGEPVNEADAAALEHDKAYDLEIKDGHNPYFEYNEADRRFQERLKDDTSFGGNLGKAIFQAKKRVLEPFGLVEDSKTAPTGDKRKGEDEPRLPDTSSQTPKKNKKPRKERPSGGAEDPGEGTSSNAGAAAPASSVGSSIMAEGGGGPVGDAGQGADGVGNSSGNWHCDSQWLENGVVTRTTRTWVLPSYNNHLYKRIQGPSGGDNNNKFFGFSTPWGYFDYNRFHCHFSPRDWQRLINNNWGIRPKAMRFRLFNIQVKEVTVQDFNTTIGNNLTSTVQVFADKDYQLPYVLGSATEGTFPPFPADIYTIPQYGYCTLNYNNEAVDRSAFYCLDYFPSDMLRTGNNFEFTYTFEDVPFHSMFAHNQTLDRLMNPLVDQYLWAFSSVSQAGSSGRALHYSRATKTNMAAQYRNWLPGPFFRDQQIFTGASNITKNNVFSVWEKGKQWELDNRTNLMQPGPAAATTFSGEPDRQAMQNTLAFSRTVYDQTTATTDRNQILITNEDEIRPTNSVGIDAWGAVPTNNQSIVTPGTRAAVNNQGALPGMVWQNRDIYPTGTHLAKIPDTDNHFHPSPLIGRFGCKHPPPQIFIKNTPVPANPSETFQTAKVASFINQYSTGQCTVEIFWELKKETSKRWNPEIQFTSNFGNAADIQFAVSDTGSYSEPRPIGTRYLTKPL

SEQ ID NO: 5189 - protein, 598 aa, synthetic construct
  REGION 1..598: note = Description of Artificial Sequence: Synthetic polypeptide
TAPTGDKRKGEDEPRLPDTSSQTPKKNKKPRKERPSGGAEDPGEGTSSNAGAAAPASSVGSSIMAEGGGGPVGDAGQGADGVGNSSGNWHCDSQWLENGVVTRTTRTWVLPSYNNHLYKRIQGPSGGDNNNKFFGFSTPWGYFDYNRFHCHFSPRDWQRLINNNWGIRPKAMRFRLFNIQVKEVTVQDFNTTIGNNLTSTVQVFADKDYQLPYVLGSATEGTFPPFPADIYTIPQYGYCTLNYNNEAVDRSAFYCLDYFPSDMLRTGNNFEFTYTFEDVPFHSMFAHNQTLDRLMNPLVDQYLWAFSSVSQAGSSGRALHYSRATKTNMAAQYRNWLPGPFFRDQQIFTGASNITKNNVFSVWEKGKQWELDNRTNLMQPGPAAATTFSGEPDRQAMQNTLAFSRTVYDQTTATTDRNQILITNEDEIRPTNSVGIDAWGAVPTNNQSIVTPGTRAAVNNQGALPGMVWQNRDIYPTGTHLAKIPDTDNHFHPSPLIGRFGCKHPPPQIFIKNTPVPANPSETFQTAKVASFINQYSTGQCTVEIFWELKKETSKRWNPEIQFTSNFGNAADIQFAVSDTGSYSEPRPIGTRYLTKPL

SEQ ID NO: 5190 - DNA, 4694 bp, synthetic construct
  misc_feature 1..4694: note = Description of Artificial Sequence: Synthetic polynucleotide
  source 1..4694: mol_type = other DNA
tggccagtttccaagacaggctcgctcgctcactcgggccggggccccaaaggggcccctagcgaccgcttcgcggtcgcggcccgagtgagcgagcgagcctgtcttggaaactggccagcactccggtgaggtaatgccgtcacgtggtcgggaatgggaacgggaaatctcgcgagaacgtaaacaaatataagacggcgccacacggcgctgcgtcatacgcgcgcgcgcaccggcgagatgaggtcgtactacgaggtcatcgttcagctgcccaacgacgtcgagagtcaggtacctggaatctccgattcgttcgtcaactggattacgtcgcgagaatggacgttgcctgaggacgccgattgggatttggaccaggtcgatcaagttcaactgacgctcggcgacaaaatccaacgggagattcgaactcattgggggacgatggccaaagaaccggactttcactattttatccaactggaacaaggtgaggtgttctttcatttacacgtcctgctggaaacgtgttccgtaaagccgatggtactcggaagatatatccgacatattcaacaaaaaattgtgagtaaagtctactgcgccacgagcctacgatggaaggatggatgcgtggtgaccaagaccaaaaatttcgggggcgcgaacaaggtccgggccgagtcgtatattcccgcctacctgatcccgaaacagcaaccggaagtgcagtgggcgtggactaacgtgcccgagtatataaaagcgtgcttgcaccgagaactgcgtgccagtctcgcgcgacttcacttcgaggaggcgggcgtctcgcaatccaaggaaaatctcgcgagaactgcagacggcgctcccgtgatgccgacccgcgtcagcaaacgctacatggagctcgtggattggctcgtggagaaggggatcaccaccgagaaggaatggctgctggaaaacagagaaagctttcggagctttcaggcctcgagcaactcggcgcgtcagatcaagacggccctgcaaggcgccattcaggagatgcttctgaccaagacggcggaggactacctcgtcggaaaggatcccgtctcggacgacgacatccgtcagaaccgcatctacaagattctggaactgaaccactacgacccagcgtacgtggggagtattttggtcgggtggtgccagaagaaatggggcaagcgaaacacgctgtggctgttcggacatgcgaccaccggcaagaccaacatcgcggaggctattgcccatgctgtgccgttctatggatgcgttaactggaccaacgagaactttccgttcaacgactgcgtcgaaaaaatgattatctggtgggaggagggcaaaatgaccgccaaagtggtggaaacagccaaggcgattctgggaggatctcgggtgagagtggaccaaaaatgcaaagcttcggttccgatcgaaccgacgccggtcattattaccagtaacaccaacatgtgttatgtcatcgacgggaacacgaccacgttcgagcataagcagccgttggaggacaggatgtttaagctcgaattgctgactcggttgcctgatgactttggtaaggtgaccaaacaggaggtgcgtcaattcttcaggtggtctcaggatcacctgacccctgtgatcccagaattcctagtgcggaaggcggagtctcgcaaaagacccgccccttccggggaaggctatataagcccgacaaagcggcccgcgctcgcagagcagcagcaggcgtcggagagcgcggacccggttcccaccaggtatcgtatcaaatgctcgaaacattgcggtatggataaaatgttgtttccttgccaaatttgtgaatcgatgaacagagatattaatatttgtgctattcataaaacgaccgactgtaaagagtgtttccccgactacggggataaagatgatgtagaactacccccctgtacagaacacaacgtgtctcgttgttatcaatgtcattcgggcgaattgtatcgcgtgacttcggactctgacgagaaacctgcccccgagagtgatgaaggcaccgagccatcctatgctccctgcacgattcaccacctgatgggcaagagtcacgggttagtcacttgcgcggcgtgtcggttgaaaaatagtacgttgcatgatgacttggatgacggtgatctcgaacaataaatgattgaaatgtagccatgtctctcatttctgatgcgattccagattggttggagcggttggtcaaaaagggagtgaatgctgcagctgatttctaccatttggaaagcggtcctcctcgtcctaaggcaaatcagcaaactcaagaatctcttgaaaaggacgattcgagaggtctcgtgttcccaggctacaattatctaggccctttcaacggtctagataaaggagaacccgtcaacgaggcagacgctgccgccttagaacacgacaaggcttacgacctcgaaatcaaggacgggcacaacccgtactttgagtacaacgaggccgacagacgtttccaggaacgtctcaaagacgatacctcctttggaggcaatttaggtaaagccatcttccaggccaaaaagagggttctcgaaccctttggtctggtggaagactcaaagacggctccgaccggagacaagcggaaaggcgaagacgaacctcgtttgcccgacacttcttcacagactcccaagaaaaacaagaagcctcgcaaggaaagaccttccggcggggcagaagatccgggcgaaggcacctcttccaacgctggagcagcagcacccgcctctagtgtgggatcatctatcatggctgaaggaggtggcggcccagtgggcgatgcaggccagggtgccgatggagtgggcaattcctccggaaattggcattgcgattcccaatggctggaaaacggagtcgtcactcgaaccacccgaacctgggtcttgcccagctacaacaaccacctgtacaaacgaatccaaggacccagcggaggcgacaacaacaacaaattctttggattcagcaccccctggggatactttgactacaatcgattccactgccacttttccccgcgagactggcaacgactcatcaacaacaactggggcatccgtcccaaagcgatgcgctttagactctttaacatccaggttaaagaggtcacggtccaagacttcaacaccaccatcggcaacaacctcaccagtacggtccaggtctttgcggacaaggactaccaactgccgtacgtcctcggatcggctaccgaaggcaccttcccgccgttcccagcggatatctacacgatcccgcagtacgggtactgcacgctaaactacaacaacgaggcggtggatcgttcggccttctactgtctggactactttccctcagacatgctgcggacaggaaataactttgagtttacttacaccttcgaggacgttcctttccatagcatgtttgcccacaaccagacgctagaccggctgatgaatcccctcgtggatcagtacctctgggctttcagctccgtcagccaagcaggctcatctggacgagctcttcattactcgcgggcgactaaaaccaacatggcggctcaatataggaactggttacctgggcctttcttccgtgatcagcaaatctttacgggcgctagcaacatcactaaaaataacgtctttagcgtttgggaaaaaggcaagcaatgggaactcgacaatcggaccaacctaatgcagcccggtcctgcggcagcgaccacctttagcggagaacctgaccgtcaagccatgcaaaacacgctggcttttagcaggaccgtctacgatcaaacgaccgccacgaccgatcgtaaccagatactcatcaccaacgaagacgaaatcagacccaccaactcggtcggtatcgacgcgtggggagcagttcccaccaacaaccagtcgatcgtgacccccggcactcgcgcggccgtcaacaatcaaggggcgcttcccgggatggtgtggcaaaacagagacatttaccctacagggacccatttggccaaaattcccgacactgacaatcacttccatccgtccccgcttattgggcggtttggctgcaagcatccccctccccagattttcattaaaaacacacccgtccctgccaacccttcggaaacgttccagacggccaaagtggcctccttcatcaaccagtactcgaccggacagtgcaccgtcgaaatcttttgggaactcaagaaggaaacctccaagcgctggaaccccgaaatccagttcacctccaactttggcaacgcggccgacatccagtttgccgtctccgacacgggatcctattccgaacctcgtcccatcggtacccgttaccttaccaaacctctgtaaattaaacccttcaataaaccgtttatgcgtaactgtatttccgtctcctgtcgttattcagtcacatgatgcggcattacctcaccggagtgctggccagtttccaagacaggctcgctcgctcactcgggccggggccccaaaggggcccctagcgaccgcttcgcggtcgcggcccgagtgagcgagcgagcctgtcttggaaactggcca

SEQ ID NO: 5191 - DNA, 2211 bp, synthetic construct
  misc_feature 1..2211: note = Description of Artificial Sequence: Synthetic polynucleotide
  source 1..2211: mol_type = other DNA
atggctgctgatggttatcttccagattggctcgaggacactctctctgaaggaataagacagtggtggaagctcaaacctggcccaccaccaccaaagcccgcagagcggcataaggacgacagcaggggtcttgtgcttcctgggtacaagtacctcggacccttcaacggactcgacaagggagagccggtcaacgaggcagacgcagcggccctcgagcacgacaaggcctacgaccagcagctcaaggccggtgacaacccctacctcaagtacaaccacgccgacgcggagttccagcagcggcttcagggcgacacatcgtttgggggcaacctcggcagagcagtcttccaggccaaaaagagggttcttgaacctcttggtctggttgagcaagcgggtgagacggctcctggaaagaagagaccgttgattgaatccccccagcagcccgactcctccacgggtatcggcaaaaaaggcaagcagccggctaaaaagagactcaattttggtcagactggcgactcagagtcagtccccgacccacaacctctcggagaacctccagcaacccccgctgctgtgggacctactacaatggcttcaggtggtggcgcaccaatggcagacaataacgaaggcgccgacggagtgggtaatgcctcaggaaattggcattgcgattccacatggctgggcgacagagtcatcaccaccagcacccgcacctgggccttgcccacctacaataaccacctctacaagcaaatctccagtgcttcaacgggggccagcaacgacaaccactacttcggctacagcaccccctgggggtattttgacttcaacagattccactgccacttttcaccacgtgactggcagcgactcatcaacaacaattggggattccggcccaagagactcaacttcaaactcttcaacatccaagtcaaggaggtcacgacgaatgatggcgtcacaaccatcgctaataaccttaccagcacggttcaagtcttctcggactcagactatcagctcccgtacgtgctcgggtcggctcacgagggctgcctcccgccgttcccagcagacgtcttcatggtgccacagtatggatacctcaccctgaacaacgggagtcaggcagtaggacgctcttcattttactgcctggagtactttccttctcagatgctgcgtaccggaaacaactttaccttcagctacacttttgaggacgttcctttccacagcagctacgctcacagccagagtctggaccgtctcatgaatcctctcatcgaccagtacctgtattacctgaacagaactcagaatcagtccggaagtgcccaaaacaaggacttgctgtttagccgggggtctccagctggcatgtctgttcagcccaaaaactggctacctggaccctgttatcggcagcagcgcgtttctaaaacaaaaacagacaacaacaacagcaactttacctggactggtgcttcaaaatataaccttaatgggcgtgaatctataatcaaccctggcactgctatggcctcacacaaagacgacaaagacaagttctttcccatgagcggtgtcatgatttttggaaaggagagcgccggagcttcaaacactgcattggacaatgtcatgatcacagacgaagaggaaatcaaagccactaaccccgtggccaccgaaagatttgggactgtggcagtcaatctccagagcagcagcacagaccctgcgaccggagatgtgcatgttatgggagccttacctggaatggtgtggcaagacagagacgtatacctgcagggtcccatttgggccaaaattcctcacacagatggacactttcacccgtctcctcttatgggcggctttggactcaagaacccgcctcctcagatcctcatcaaaaacacgcctgttcctgcgaatcctccggcggagttttcagctacaaagtttgcttcattcatcacccaatactccacaggacaagtgagtgtggaaattgaatgggagctgcagaaagaaaacagcaagcgctggaatcccgaagtgcagtacacatccaattatgcaaaatctgccaacgttgattttactgtggacaacaatggactttatactgagcctcgccccattggcacccgttacctcacccgtcccctgtaa

SEQ ID NO: 5192 - protein, 736 aa, synthetic construct
  REGION 1..736: note = Description of Artificial Sequence: Synthetic polypeptide
MAADGYLPDWLEDTLSEGIRQWWKLKPGPPPPKPAERHKDDSRGLVLPGYKYLGPFNGLDKGEPVNEADAAALEHDKAYDQQLKAGDNPYLKYNHADAEFQQRLQGDTSFGGNLGRAVFQAKKRVLEPLGLVEQAGETAPGKKRPLIESPQQPDSSTGIGKKGKQPAKKRLNFGQTGDSESVPDPQPLGEPPATPAAVGPTTMASGGGAPMADNNEGADGVGNASGNWHCDSTWLGDRVITTSTRTWALPTYNNHLYKQISSASTGASNDNHYFGYSTPWGYFDFNRFHCHFSPRDWQRLINNNWGFRPKRLNFKLFNIQVKEVTTNDGVTTIANNLTSTVQVFSDSDYQLPYVLGSAHEGCLPPFPADVFMVPQYGYLTLNNGSQAVGRSSFYCLEYFPSQMLRTGNNFTFSYTFEDVPFHSSYAHSQSLDRLMNPLIDQYLYYLNRTQNQSGSAQNKDLLFSRGSPAGMSVQPKNWLPGPCYRQQRVSKTKTDNNNSNFTWTGASKYNLNGRESIINPGTAMASHKDDKDKFFPMSGVMIFGKESAGASNTALDNVMITDEEEIKATNPVATERFGTVAVNLQSSSTDPATGDVHVMGALPGMVWQDRDVYLQGPIWAKIPHTDGHFHPSPLMGGFGLKNPPPQILIKNTPVPANPPAEFSATKFASFITQYSTGQVSVEIEWELQKENSKRWNPEVQYTSNYAKSANVDFTVDNNGLYTEPRPIGTRYLTRPL

SEQ ID NO: 5193 - DNA, 2211 bp, synthetic construct
  misc_feature 1..2211: note = Description of Artificial Sequence: Synthetic polynucleotide
  source 1..2211: mol_type = other DNA
atggcttccgatggttatcttccagattggctcgaggacaacctctctgagggcatccgcgagtggtgggacttgaaacctggagccccgaaacccaaagccaaccagcaaaagcaggacgacggccggggtctggtgcttcctggctacaagtacctcggacccttcaacggactcgacaagggggagcccgtcaacgcggcggatgcagcggccctcgagcacgacaaggcctacgaccagcagctcagagcgggtgacaatccgtacctgcggtataaccacgccgacgccgagtttcaggagcgtctgcaagaagatacgtcttttgggggcaacctcgggcgagcagtcttccaggccaagaagagggttctcgaaccttttggtctggttgaggaaggtgctaagacggctcctggaaagaaacgtccggtagagcagtcgccacaagagccagactcctcctcgggcattggcaagacaggccagcagcccgctaaaaagagactcaattttggtcagactggcgactcagagtcagtccccgacccacaacctctcggagaacctccagcaacccccgctgctgtgggacctactacaatggcttcaggcggtggcgcaccaatggcagacaataacgaaggcgccgacggagtgggtaatgcctcaggaaattggcattgcgattccacatggctgggcgacagagtcatcaccaccagcacccgaacatgggccttgcccacctataacaaccacctctacaagcaaatctccagtgcttcaacgggggccagcaacgacaaccactacttcggctacagcaccccctgggggtattttgatttcaacagattccactgccatttctcaccacgtgactggcagcgactcatcaacaacaattggggattccggcccaagagactcaacttcaaactcttcaacatccaagtcaaggaggtcacgacgaatgatggcgtcacaaccatcgctaataaccttaccagcacggttcaagtcttctcggactcggagtaccagcttccgtacgtcctcggctctgcgcaccagggctgcctccctccgttcccggcggacgtgttcatgattccgcagtacggctacctaacgctcaacaatggcagccaggcagtgggacggtcatccttttactgcctggaatatttcccatcgcagatgctgagaacgggcaataactttaccttcagctacaccttcgaggacgtgcctttccacagcagctacgcgcacagccagagcctggaccggctgatgaatcctctcatcgaccagtacctgtattacctgaacagaactcagaatcagtccggaagtgcccaaaacaaggacttgctgtttagccgggggtctccagctggcatgtctgttcagcccaaaaactggctacctggaccctgttaccggcagcagcgcgtttctaaaacaaaaacagacaacaacaacagcaactttacctggactggtgcttcaaaatataaccttaatgggcgtgaatctataatcaaccctggcactgctatggcctcacacaaagacgacaaagacaagttctttcccatgagcggtgtcatgatttttggaaaggagagcgccggagcttcaaacactgcattggacaatgtcatgatcacagacgaagaggaaatcaaagccactaaccccgtggccaccgaaagatttgggactgtggcagtcaatctccagagcagcagcacagaccctgcgaccggagatgtgcatgttatgggagccttacctggaatggtgtggcaagacagagacgtatacctgcagggtcccatttgggccaaaattcctcacacagatggacactttcacccgtctcctcttatgggcggctttggacttaagcacccgcctcctcagatcctcatcaaaaacacgcctgttcctgcgaatcctccggcagagttttcggctacaaagtttgcttcattcatcacccagtattctactggccaagtcagcgtggagattgaatgggagctgcagaaagaaaacagcaaacgctggaatcccgaagtgcagtatacatctaactatgcaaaatctgccaacgttgatttcactgtggacaacaatggactttatactgagcctcgtcccattggcacccgttacctcacccgtcccctgtaa

SEQ ID NO: 5194 - protein, 736 aa, synthetic construct
  REGION 1..736: note = Description of Artificial Sequence: Synthetic polypeptide
MASDGYLPDWLEDNLSEGIREWWDLKPGAPKPKANQQKQDDGRGLVLPGYKYLGPFNGLDKGEPVNAADAAALEHDKAYDQQLRAGDNPYLRYNHADAEFQERLQEDTSFGGNLGRAVFQAKKRVLEPFGLVEEGAKTAPGKKRPVEQSPQEPDSSSGIGKTGQQPAKKRLNFGQTGDSESVPDPQPLGEPPATPAAVGPTTMASGGGAPMADNNEGADGVGNASGNWHCDSTWLGDRVITTSTRTWALPTYNNHLYKQISSASTGASNDNHYFGYSTPWGYFDFNRFHCHFSPRDWQRLINNNWGFRPKRLNFKLFNIQVKEVTTNDGVTTIANNLTSTVQVFSDSEYQLPYVLGSAHQGCLPPFPADVFMIPQYGYLTLNNGSQAVGRSSFYCLEYFPSQMLRTGNNFTFSYTFEDVPFHSSYAHSQSLDRLMNPLIDQYLYYLNRTQNQSGSAQNKDLLFSRGSPAGMSVQPKNWLPGPCYRQQRVSKTKTDNNNSNFTWTGASKYNLNGRESIINPGTAMASHKDDKDKFFPMSGVMIFGKESAGASNTALDNVMITDEEEIKATNPVATERFGTVAVNLQSSSTDPATGDVHVMGALPGMVWQDRDVYLQGPIWAKIPHTDGHFHPSPLMGGFGLKHPPPQILIKNTPVPANPPAEFSATKFASFITQYSTGQVSVEIEWELQKENSKRWNPEVQYTSNYAKSANVDFTVDNNGLYTEPRPIGTRYLTRPL

SEQ ID NO: 5195 - DNA, 2211 bp, synthetic construct
  misc_feature 1..2211: note = Description of Artificial Sequence: Synthetic polynucleotide
  source 1..2211: mol_type = other DNA
atggctgctgatggttatcttccagattggctcgaggacactctctctgaaggaataagacagtggtggaagctcaaacctggcccaccaccaccaaagcccgcagagcggcataaggacgacagcaggggtcttgtgcttcctgggtacaagtacctcggacccttcaacggactcgacaagggagagccggtcaacgaggcagacgcagcggccctcgagcacgacaaggcctacgaccagcagctcaaggccggtgacaacccctacctcaagtacaaccacgccgacgcggagttccagcagcggcttcagggcgacacatcgtttgggggcaacctcggcagagcagtcttccaggccaaaaagagggttcttgaacctcttggtctggttgagcaagcgggtgagacggctcctggaaagaagagaccgttgattgaatccccccagcagcccgactcctccacgggtatcggcaaaaaaggcaagcagccggctaaaaagagactcaattttggtcagactggcgactcagagtcagtccccgacccacaacctctcggagaacctccagcaacccccgctgctgtgggacctactacaatggcttcaggtggtggcgcaccaatggcagacaataacgaaggcgccgacggagtgggtaatgcctcaggaaattggcattgcgattccacatggctgggcgacagagtcatcaccaccagcacccgcacctgggccttgcccacctacaataaccacctctacaagcaaatctccagtgcttcaacgggggccagcaacgacaaccactacttcggctacagcaccccctgggggtattttgacttcaacagattccactgccacttttcaccacgtgactggcagcgactcatcaacaacaattggggattccggcccaagagactcaacttcaaactcttcaacatccaagtcaaggaggtcacgacgaatgatggcgtcacaaccatcgctaataaccttaccagcacggttcaagtcttctcggactcagactatcagctcccgtacgtgctcgggtcggctcacgagggctgcctcccgccgttcccagcagacgtcttcatggtgccacagtatggatacctcaccctgaacaacgggagtcaggcagtaggacgctcttcattttactgcctggagtactttccttctcagatgctgcgtaccggaaacaactttaccttcagctacacttttgaggacgttcctttccacagcagctacgctcacagccagagtctggaccgtctcatgaatcctctcatcgaccagtacctgtattacctgaacagaactcagaatcagtccggaagtgcccaaaacaaggacttgctgtttagccgggggtctccaactggcatgtctgttcagcccaaaaactggctacctggaccctgttatcggcagcagcgcgtttctaaaacaaaaacagacaacaacaacagcaactttacctggactggtgcttcaaaatataaccttaatgggcgtgaatctataatcaaccctggcactgctatggcctcacacaaagacgacaaagacaagttctttcccatgagcggtgtcatgatttttggaaaggagagcgccggagcttcaaacactgcattggacaatgtcatgatcacagacgaagaggaaatcaaagccactaaccccgtggccactgaaagatttgggactgtggcagtcaatctccagagcagcagcacagaccctgcgaccggagatgtgcatgccatgggagccttacctggaatggtgtggcaagacagagacgtatacctgcagggtcctatttgggccaaaattcctcacacggatggacactttcacccgtctcctctcatgggcggctttggactcaagaacccgcctcctcagatcctcatcaaaaacacgcctgttcctgcgaatcctccggcggagttttcagctacaaagtttgcttcattcatcacccagtattccacaggacaagtgagcgtggagattgaatgggagctgcagaaagaaaacagcaaacgctggaatcccgaagtgcagtatacatctaactatgcaaaatctgccaacgttgatttcactgtggacaacaatggactttatactgagcctcgccccattggcacccgttacctcacccgtcccctgtaa

SEQ ID NO: 5196 - protein, 736 aa, synthetic construct
  REGION 1..736: note = Description of Artificial Sequence: Synthetic polypeptide
MAADGYLPDWLEDTLSEGIRQWWKLKPGPPPPKPAERHKDDSRGLVLPGYKYLGPFNGLDKGEPVNEADAAALEHDKAYDQQLKAGDNPYLKYNHADAEFQQRLQGDTSFGGNLGRAVFQAKKRVLEPLGLVEQAGETAPGKKRPLIESPQQPDSSTGIGKKGKQPAKKRLNFGQTGDSESVPDPQPLGEPPATPAAVGPTTMASGGGAPMADNNEGADGVGNASGNWHCDSTWLGDRVITTSTRTWALPTYNNHLYKQISSASTGASNDNHYFGYSTPWGYFDFNRFHCHFSPRDWQRLINNNWGFRPKRLNFKLFNIQVKEVTTNDGVTTIANNLTSTVQVFSDSDYQLPYVLGSAHEGCLPPFPADVFMVPQYGYLTLNNGSQAVGRSSFYCLEYFPSQMLRTGNNFTFSYTFEDVPFHSSYAHSQSLDRLMNPLIDQYLYYLNRTQNQSGSAQNKDLLFSRGSPTGMSVQPKNWLPGPCYRQQRVSKTKTDNNNSNFTWTGASKYNLNGRESIINPGTAMASHKDDKDKFFPMSGVMIFGKESAGASNTALDNVMITDEEEIKATNPVATERFGTVAVNLQSSSTDPATGDVHAMGALPGMVWQDRDVYLQGPIWAKIPHTDGHFHPSPLMGGFGLKNPPPQILIKNTPVPANPPAEFSATKFASFITQYSTGQVSVEIEWELQKENSKRWNPEVQYTSNYAKSANVDFTVDNNGLYTEPRPIGTRYLTRPL

SEQ ID NO: 5197 - DNA, 2211 bp, synthetic construct
  misc_feature 1..2211: note = Description of Artificial Sequence: Synthetic polynucleotide
  source 1..2211: mol_type = other DNA
atggctgccgatggttatcttccagattggctcgaggacaacctctctgagggcattcgcgagtggtgggcgctgaaacctggagccccgaagcccaaagccaaccagcaaaagcaggacgacggccggggtctggtgcttcctggctacaagtacctcggacccttcaacggactcgacaagggggagcccgtcaacgcggcggatgcagcggccctcgagcacgacaaggcctacgaccagcagctcaaagcgggtgacaatccgtacctgcggtataaccacgccgacgccgagtttcaggagcgtctgcaagaagatacgtcttttgggggcaacctcgggcgagcagtcttccaggccaagaagcgggttctcgaacctctcggtctggttgaggaaggcgctaagacggctcctggaaagaaacgtccggtagagcaatcgccacaagagccagactcctcctcgggcatcggcaagacaggccagcagcccgctaaaaagagactcaattttggtcagactggcgactcagagtcagtccccgacccacaacctctcggagaacctccagcaacccccgctgctgtgggacctactacaatggcttcaggcggtggcgcaccaatggcagacaataacgaaggcgccgacggagtgggtaatgcctcaggaaattggcattgcgattccacatggctgggcgacagagtcatcaccaccagcacccgaacatgggccttgcccacctataacaaccacctctacaagcaaatctccagtgcttcgacgggggccagcaacgacaaccactacttcggctacagcaccccctgggggtattttgactttaacagattccactgccacttttcaccacgtgactggcagcgactcatcaacaacaactggggattccggcccaagagactcagcttcaagctcttcaacatccaggtcaaggaggtcacgacgaatgatggcgtcacaaccatcgctaataaccttaccagcacggttcaagtcttctcggactcggagtaccagcttccgtacgtcctcggctctgcgcaccagggctgcctccctccgttcccggcggacgtgttcatgattccgcaatacggctacctgacgctcaacaatggcagccaagccgtgggacgttcatccttttactgcctggaatatttcccttctcagatgctgagaacgggcaacaactttaccttcagctacacctttgaggaagtgcctttccacagcagctacgcgcacagccagagcctggaccggctgatgaatcctctcatcgatcaatacctgtattacctgaacagaactcaaaatcagtccggaagtgcccaaaacaaggacttgctgtttagccgtgggtctccagctggcatgtctgttcagcccaaaaactggctacctggaccctgttatcggcagcagcgcgtttctaaaacaaaaacagacaacaacaacagcaattttacctggactggtgcttcaaaatataacctcaatgggcgtgaatccatcatcaaccctggcactgctatggcctcacataaagacgacgaagacaagttctttcccatgagcggtgtcatgatttttggaaaagagagcgccggagcttcaaacactgcattggacaatgtcatgattacagacgaagaggaaattaaagccactaaccctgtggccaccgaaagatttgggaccgtggcagtcaatttccagagcagcagcacagaccctgcgaccggagatgtgcatgctatgggagcattacctggcatggtgtggcaagatagagacgtgtacctgcagggtcccatttgggccaaaattcctcacacagatggacactttcacccgtctcctcttatgggcggctttggactcaagaacccgcctcctcagatcctcatcaaaaacacgcctgttcctgcgaatcctccggcggagttttcagctacaaagtttgcttcattcatcacccaatactccacaggacaagtgagcgtggagattgaatgggagctgcagaaagaaaacagcaaacgctggaatcccgaagtgcagtatacatctaactatgcaaaatctgccaacattgatttcactgtggacaacaatggactttatactgagcctcgccccattggcacccgttacctcacccgtccccagtaa

SEQ ID NO: 5198 - protein, 736 aa, synthetic construct
  REGION 1..736: note = Description of Artificial Sequence: Synthetic polypeptide
MAADGYLPDWLEDNLSEGIREWWALKPGAPKPKANQQKQDDGRGLVLPGYKYLGPFNGLDKGEPVNAADAAALEHDKAYDQQLKAGDNPYLRYNHADAEFQERLQEDTSFGGNLGRAVFQAKKRVLEPLGLVEEGAKTAPGKKRPVEQSPQEPDSSSGIGKTGQQPAKKRLNFGQTGDSESVPDPQPLGEPPATPAAVGPTTMASGGGAPMADNNEGADGVGNASGNWHCDSTWLGDRVITTSTRTWALPTYNNHLYKQISSASTGASNDNHYFGYSTPWGYFDFNRFHCHFSPRDWQRLINNNWGFRPKRLSFKLFNIQVKEVTTNDGVTTIANNLTSTVQVFSDSEYQLPYVLGSAHQGCLPPFPADVFMIPQYGYLTLNNGSQAVGRSSFYCLEYFPSQMLRTGNNFTFSYTFEEVPFHSSYAHSQSLDRLMNPLIDQYLYYLNRTQNQSGSAQNKDLLFSRGSPAGMSVQPKNWLPGPCYRQQRVSKTKTDNNNSNFTWTGASKYNLNGRESIINPGTAMASHKDDEDKFFPMSGVMIFGKESAGASNTALDNVMITDEEEIKATNPVATERFGTVAVNFQSSSTDPATGDVHAMGALPGMVWQDRDVYLQGPIWAKIPHTDGHFHPSPLMGGFGLKNPPPQILIKNTPVPANPPAEFSATKFASFITQYSTGQVSVEIEWELQKENSKRWNPEVQYTSNYAKSANIDFTVDNNGLYTEPRPIGTRYLTRPQ

SEQ ID NO: 5199 - DNA, 2211 bp, synthetic construct
  misc_feature 1..2211: note = Description of Artificial Sequence: Synthetic polynucleotide
  source 1..2211: mol_type = other DNA
atggctgccgatggttatcttccagattggctcgaggacaacctctctgagggcattcgcgagtggtgggacttgaaacctggagccccgaaacccaaagccaaccagcaaaagcaggacgacggccggggtctggtgcttcctggctacaagtacctcggacccttcaacggactcgacaagggggagcccgtcaacgcggcggatgcagcggccctcgagcacgacaaggcctacgaccagcagctcaaagcgggtgacaatccgtaccttcggtataaccacgccgacgccgagtttcaggagcgtctgcaagaagatacgtcttttgggggcaacctcgggcgagcagtcttccaggccaaaaagagggttctcgaacctctcggtctggttgaggaagcggctaagacggctcctggaaagaaacgtccggtagagcagtcgccacaagagccagactcctcctcgggcattggcaagacaggccagcagcccgctaaaaagagactcaattttggtcagactggcgactcagagtcagtccccgacccacaacctctcggagaacctcccgcagccccctcaggtgtgggatctcttacaatggcttcaggtggtggcgcaccaatggcagacaataacgaaggcgccgacggagtgggtaatgcctcaggaaattggcattgcgattccacatggctgggcgacagagtcatcaccaccagcacccgcacctgggccttgcccacctacaataaccacctctacaagcaaatctccagtgcttcaacgggggccagcaacgacaaccactacttcggctacagcaccccctgggggtattttgacttcaacagattccactgccacttttcaccacgtgactggcaaagactcatcaacaacaattggggattccggcccaagagactcaacttcaagctcttcaacatccaagtcaaggaggtcacgacgaatgatggcgtcacgaccatcgctaataaccttaccagcacggttcaagtcttctcggactcggagtaccagttgccgtacgtcctcggctctgcgcaccagggctgcctccctccgttcccggcggacgtgttcatgattccgcagtacggctacctaacgctcaacaatggcagccaggcagtgggacggtcatccttttactgcctggaatatttcccatcgcagatgctgagaacgggcaacaactttaccttcagctacacctttgaggaagtgcctttccacagcagctacgcgcacagccagagcctggaccggctgatgaatcctctcatcgaccagtacctgtattacctgaacagaactcaaaatcagtccggaagtgcccaaaacaaggacttgctgtttagccgtgggtctccagctggcatgtctgttcagcccaaaaactggctacctggaccctgttaccggcagcagtgcgtttctaaaacaaaaacagacaacaacaacagcaactttacctggactggtgcttcaaaatataaccttaatgggcgtgaatctataatcaaccctggcactgctatggcctcacacaaagacgacaaagacaagttctttcccatgagcggtgtcatgatttttggaaaggagagcgccggagcttcaaacactgcattggacaatgtcatgatcacagacgaagaggaaatcaaagccactaaccccgtggccaccgaaagatttgggactgtggcagtcaatctccagagcagcagcacagaccctgcgaccggagatgtgcatgttatgggagccttacctggaatggtgtggcaagacagagacgtatacctgcagggtcctatttgggccaaaattcctcacacagatggacactttcacccgtctcctcttatgggcggctttggactcaagaacccgcctcctcagatcctcatcaaaaacacgcctgttcctgcgaatcctccggcggagttttcagctacaaagtttgcttcattcatcacccaatactccacaggacaagtgagcgtggagattgaatgggagctgcagaaagaaaacagcaagcgctggaatcccgaagtgcagtacacatccaattatgcaaaatctgccaacgttgatttcactgtggacaacaatggactttatactgagcctcgccccattggcacccgttacctcacccgtcccctgtaa

SEQ ID NO: 5200 - protein, 736 aa, synthetic construct
  REGION 1..736: note = Description of Artificial Sequence: Synthetic polypeptide
MAADGYLPDWLEDNLSEGIREWWDLKPGAPKPKANQQKQDDGRGLVLPGYKYLGPFNGLDKGEPVNAADAAALEHDKAYDQQLKAGDNPYLRYNHADAEFQERLQEDTSFGGNLGRAVFQAKKRVLEPLGLVEEAAKTAPGKKRPVEQSPQEPDSSSGIGKTGQQPAKKRLNFGQTGDSESVPDPQPLGEPPAAPSGVGSLTMASGGGAPMADNNEGADGVGNASGNWHCDSTWLGDRVITTSTRTWALPTYNNHLYKQISSASTGASNDNHYFGYSTPWGYFDFNRFHCHFSPRDWQRLINNNWGFRPKRLNFKLFNIQVKEVTTNDGVTTIANNLTSTVQVFSDSEYQLPYVLGSAHQGCLPPFPADVFMIPQYGYLTLNNGSQAVGRSSFYCLEYFPSQMLRTGNNFTFSYTFEEVPFHSSYAHSQSLDRLMNPLIDQYLYYLNRTQNQSGSAQNKDLLFSRGSPAGMSVQPKNWLPGPCYRQQCVSKTKTDNNNSNFTWTGASKYNLNGRESIINPGTAMASHKDDKDKFFPMSGVMIFGKESAGASNTALDNVMITDEEEIKATNPVATERFGTVAVNLQSSSTDPATGDVHVMGALPGMVWQDRDVYLQGPIWAKIPHTDGHFHPSPLMGGFGLKNPPPQILIKNTPVPANPPAEFSATKFASFITQYSTGQVSVEIEWELQKENSKRWNPEVQYTSNYAKSANVDFTVDNNGLYTEPRPIGTRYLTRPL

SEQ ID NO: 5201 - DNA, 2211 bp, synthetic construct
  misc_feature 1..2211: note = Description of Artificial Sequence: Synthetic polynucleotide
  source 1..2211: mol_type = other DNA
atggctgccgatggttatcttccagattggctcgaggacaacctctctgagggcattcgcgaatggtgggacttgaaacctggagccccgaaacccaaagtcaaccagcaaaagcaggacaacgctcggggtcttgtgcttccgggttacaaatacctcggacccttcaacggactcgacaagggggagcccgtcaacgcggcggacgcagcggccctcgagcacgacaaggcctacgaccagcagctcaaagcgggtgacaatccgtaccttcggtataaccacgccgacgccgagtttcaggagcgtctgcaagaagatacgtcttttgggggcaaccttggacgagcagtcttccaggccaagaagagggttctcgaaccttttggtctggttgaggaaggtgctaagacggctcctggaaagaaacgtccggtagagcagtcgccacaagagccagactcctcctcgggcattggcaagacaggccagcagcccgctaaaaagagactcaattttggtcagactggcgactcagagtcagtccccgacccacaacctctcggagaacctccagcaacccccgctgctgtgggacctactacaatggcttcaggcggtggcgcaccaatggcagacaataacgaaggcgccgacggagtgggtaatgcctcaggaaattggcattgcgattccacatggctgggcgacagagtcatcaccaccagcacccgcacctgggccttgcccacctacaataaccacctctacaagcaaatctccagtgcttcaacgggggccagcaacgacaaccactacttcggctacagcaccccctgggggtattttgacttcaacagattccactgccacttttcaccacgtgactggcaaagactcatcaacaacaattggggattccggcccaagagactcaacttcaagctcttcaacatccaagtcaaggaggtcacgacgaatgatggcgtcacgaccatcgctaataaccttaccagcacggttcaagtcttctcggactcggagtaccagttgccgtacgtcctcggctctgcgcaccagggctgcctccctccgttcccggcggacgtgttcatgattccgcaatacggctacctgacgctcaacaatggcagccaggcagtgggacggtcatccttttactgcctggaatatttcccatcgcagatgctgagaacgggcaataactttaccttcagctacacttttgaggacgttcctttccacagcagctacgctcacagccagagcctggaccggctgatgaatcctctcatcgaccagtacctgtattacctgaacagaactcagaatcagtccggaagtgcccaaaacaaggacttgctgtttagccgtgggtctccaactggcatgtctgttcagcccaaaaactggctacctggaccctgttatcggcagcagcgcgtttctaaaacaaaaacagacaacaacaacagcaactttacctggactggtgcttcaaaatataaccttaatgggcgtgaatctataatcaaccctggcactgctatggcctcacacaaagacgacgaagacaagttctttcccatgagcggtgtcatgatttttggaaaggagagcgccggagcttcaaacactgcattggacaatgtcatgatcacagacgaagaggaaatcaaagccactaaccccgtggccactgaaagatttgggactgtggcagtcaatctccagagcagcagcacagaccctgcgaccggagatgtgcatgccatgggagccttacctggaatggtgtggcaagacagagacgtatacctgcagggtcctatttgggccaaaattcctcacacggatggacactttcacccgtctcctctcatgggcggctttggacttaagcacccgcctcctcagatcctcatcaaaaacacgcctgttcctgcgaatcctccggcagagttttcggctacaaagtttgcttcattcatcacccagtattccacaggacaagtgagcgtggagattgaatgggagctgcagaaagaaaacagcaaacgctggaatcccgaagtgcagtatacatctaactatgcaaaatctgccaacgttgatttcactgtggacaacaatggactttatactgagcctcgccccattggcacccgttacctcacccgtcccctgtaa

SEQ ID NO: 5202 - protein, 736 aa, synthetic construct
  REGION 1..736: note = Description of Artificial Sequence: Synthetic polypeptide
MAADGYLPDWLEDNLSEGIREWWDLKPGAPKPKVNQQKQDNARGLVLPGYKYLGPFNGLDKGEPVNAADAAALEHDKAYDQQLKAGDNPYLRYNHADAEFQERLQEDTSFGGNLGRAVFQAKKRVLEPFGLVEEGAKTAPGKKRPVEQSPQEPDSSSGIGKTGQQPAKKRLNFGQTGDSESVPDPQPLGEPPATPAAVGPTTMASGGGAPMADNNEGADGVGNASGNWHCDSTWLGDRVITTSTRTWALPTYNNHLYKQISSASTGASNDNHYFGYSTPWGYFDFNRFHCHFSPRDWQRLINNNWGFRPKRLNFKLFNIQVKEVTTNDGVTTIANNLTSTVQVFSDSEYQLPYVLGSAHQGCLPPFPADVFMIPQYGYLTLNNGSQAVGRSSFYCLEYFPSQMLRTGNNFTFSYTFEDVPFHSSYAHSQSLDRLMNPLIDQYLYYLNRTQNQSGSAQNKDLLFSRGSPTGMSVQPKNWLPGPCYRQQRVSKTKTDNNNSNFTWTGASKYNLNGRESIINPGTAMASHKDDEDKFFPMSGVMIFGKESAGASNTALDNVMITDEEEIKATNPVATERFGTVAVNLQSSSTDPATGDVHAMGALPGMVWQDRDVYLQGPIWAKIPHTDGHFHPSPLMGGFGLKHPPPQILIKNTPVPANPPAEFSATKFASFITQYSTGQVSVEIEWELQKENSKRWNPEVQYTSNYAKSANVDFTVDNNGLYTEPRPIGTRYLTRPL

SEQ ID NO: 5203 - DNA, 2208 bp, synthetic construct
  variation 1..2208: note = a, c, t or g
  variation 955: note = a, c, t or g
  variation 971..972: note = a, c, t or g
  variation 981: note = a, c, t or g
  variation 986: note = a, c, t or g
  variation 1235: note = a, c, t or g
  variation 1694..1696: note = a, c, t or g
  variation 1698: note = a, c, t or g
  variation 1763..1765: note = a, c, t or g
  variation 2204: note = a, c, t or g
  source 1..2208: mol_type = other DNA
  variation 1778: note = a, c, t or g
atggctgccgatggttatcttccagattggctcgaggacaacctctctgagggcattcgcgaatggtgggacttgaaacctggagccccgaaacccaaagtcaaccagcaaaagcaggacaacgctcggggtcttgtgcttccgggttacaaatacctcggacccttcaacggactcgacaagggggagcccgtcaacgcggcggacgcagcggccctcgagcacgacaaggcctacgaccagcagctcaaagcgggtgacaatccgtaccttcggtataaccacgccgacgccgagtttcaggagcgtctgcaagaagatacgtcttttgggggcaaccttggacgagcagtcttccaggccaagaagagggttctcgaaccttttggtctggttgaggaaggtgctaagacggctcctggaaagaaacgtccggtagagcagtcgccacaagagccagactcctcctcgggcattggcaagacaggccagcagcccgctaaaaagagactcaattttggtcagactggcgactcagagtcagtccccgacccacaacctctcggagaacctccagcaacccccgctgctgtgggacctactacaatggcttcaggcggtggcgcaccaatggcagacaataacgaaggcgccgacggagtgggtaatgcctcaggaaattggcattgcgattccacatggctgggcgacagagtcatcaccaccagcacccgaacatgggccttgcccacctataacaaccacctctacaagcaaatctccagtgcttcaacgggggccagcaacgacaaccactacttcggctacagcaccccctgggggtattttgatttcaacagattccactgccacttttcaccacgtgactggcagcgactcatcaataacaattggggattccggcccaagagactcaacttcaaactcttcaacntccaagtcaaggaggnnacgacgaangatgncgtcacaaccatcgctaataaccttaccagcacggttcaagtcttctcggactcggagtaccagcttccgtacgtcctcggctctgcgcaccagggctgcctccctccgttcccggcggacgtgttcatgattccgcaatacggctacctgacgctcaacaatggcagccaggcagtgggacggtcatccttttactgcctggaatatttcccatcgcagatgctgagaacgggcaataactttacctncagctacacttttgaggacgttcctttccacagcagctacgctcacagccagagcctggaccggctgatgaatcctctcatcgaccagtacctgtattacctgaacagaactcagaatcagtccggaagtgcccaaaacaaggacttgctgtttagccgtgggtctccaactggcatgtctgttcagcccaaaaactggctacctggaccctgttatcggcagcagcgcgtttctaaaacaaaaacagacaacaacaacagcaactttacctggactggtgcttcaaaatataaccttaatgggcgtgaatctataatcaaccctggcactgctatggcctcacacaaagacgacgaagacaagttctttcccatgagcggtgtcatgatttttggaaaggagagcgccggagcttcaaacactgcattggacaatgtcatgatcacagacgaagagannncnaagccactaaccccgtggccactgaaagatttgggactgtggcagtcaatctccaagcagcacannnaccctgcgaccgnagatgtgcatgccatgggagccttacctggaatggtgtggcaagacagagacgtatacctgcagggtcctatttgggccaaaattcctcacacggatggacactttcacccgtctcctctcatgggcggctttggacttaagcacccgcctcctcagatcctcatcaaaaacacgcctgttcctgcgaatcctccggcagagttttcggctacaaagtttgcttcattcatcacccagtattccacaggacaagtgagcgtggagattgaatgggagctgcagaaagaaaacagcaaacgctggaatcccgaagtgcagtatacatctaactatgcaaaatctgccaacgttgatttcactgtggacaacaatggactttatactgagcctcgccccattggcacccgttacctcacccgtccccngtaa

SEQ ID NO: 5204 - protein, 723 aa, synthetic construct
  REGION 1..723: note = Description of Artificial Sequence: Synthetic polypeptide
MAADGYLPDWLEDNLSEGIREWWDLKPGAPKPKVNQQKQDNARGLVLPGYKYLGPFNGLDKGEPVNAADAAALEHDKAYDQQLKAGDNPYLRYNHADAEFQERLQEDTSFGGNLGRAVFQAKKRVLEPFGLVEEGAKTAPGKKRPVEQSPQEPDSSSGIGKTGQQPAKKRLNFGQTGDSESVPDPQPLGEPPATPAAVGPTTMASGGGAPMADNNEGADGVGNASGNWHCDSTWLGDRVITTSTRTWALPTYNNHLYKQISSASTGASNDNHYFGYSTPWGYFDFNRFHCHFSPRDWQRLINNNWGFRPKRLNFKLFNQVKETTDVTTIANNLTSTVQVFSDSEYQLPYVLGSAHQGCLPPFPADVFMIPQYGYLTLNNGSQAVGRSSFYCLEYFPSQMLRTGNNFTSYTFEDVPFHSSYAHSQSLDRLMNPLIDQYLYYLNRTQNQSGSAQNKDLLFSRGSPTGMSVQPKNWLPGPCYRQQRVSKTKTDNNNSNFTWTGASKYNLNGRESIINPGTAMASHKDDEDKFFPMSGVMIFGKESAGASNTALDNVMITDEEATNPVATERFGTVAVNLQSSPATDVHAMGALPGMVWQDRDVYLQGPIWAKIPHTDGHFHPSPLMGGFGLKHPPPQILIKNTPVPANPPAEFSATKFASFITQYSTGQVSVEIEWELQKENSKRWNPEVQYTSNYAKSANVDFTVDNNGLYTEPRPIGTRYLTRP

SEQ ID NO: 5205 - DNA, 2208 bp, synthetic construct
  misc_feature 1..2208: note = Description of Artificial Sequence: Synthetic polynucleotide
  source 1..2208: mol_type = other DNA
atggctgccgatggttatcttccagattggctcgaggacactctctctgaaggaataagacagtggtggaagctcaaacctggcccaccaccaccaaagcccgcagagcggcataaggacgacagcaggggtcttgtgcttcctgggtacaagtacctcggacccttcaacggactcgacaagggagagccggtcaacgaggcagacgccgcggccctcgagcacgacaaagcctatgaccggcagctcgacagcggagacaacccgtacctcaagtacaaccacgccgacgcggagtttcaggagcgccttaaagaagatacgtcttttgggggcaacctcggacgagcagtcttccaggcgaaaaagagggttcttgaacctctgggcctggttgaggaacctgttaagacggctccgggaaaaaagaggccggtagagcactctcctgtggagccagactcctcctcgggaaccggaaaggcgggtcagcagcctgcaagaaaaagattgaattttggtcagactggagacgcagactcagtacctgacccccagcctctcggacagccaccagcagccccctctggtctgggaactaatacgatggctacaggcagtggcgcaccaatggcagacaataacgagggcgccgacggagtgggtaattcctcgggaaattggcattgcgattccacatggatgggcgacagagtcatcaccaccagcacccgaacctgggccctgcccacctacaacaaccacctctacaaacaaatttccagccaatcaggagcctcgaacgacaatcactactttggctacagcaccccttgggggtattttgacttcaacagattccactgccacttttcaccacgtgactggcaaagactcatcaacaacaactggggattccgacccaagagactcaagttcaagctctttaacattcaagtcaaagaggtcacgcagaatgacggtacgacgacgattgccaataaccttaccagcacggttcaggtgtttactgactcggagtaccagctcccgtacgtcctcggctcggcgcatcaaggatgcctcccgccgttcccagcagacgtcttcatggtgccacagtatggatacctcaccctgaacaacgggagtcaggcagtaggacgctcttcattttactgcctggagtactttccttctcagatgctgcgtaccggtaacaactttaccttcagctacacttttgaggacgttcctttccacagcagctacgctcacagccagagtctggaccgtctcatgaatcctctcatcgaccagtacctgtattacttgagcagaacagacgctccaagtggaaccaccacgcagtcaaggcttcagttttctcaggccggagcgagtgacattcgggaccagtctaggaactggcttcctggaccctgttaccgccagcagcgagtatcaaagacatctgcggataacaacaacagtgaatactcgtggactggagctaccaagtaccacctcaatggcagagactctctggtgaatccgggcccggccatggcaagccacaaggacgatgaagaaaagttttttcctcagagcggggttctcatctttgggaagcaaggctcagagaaaacaagtgtggacattgaaaaggtcatgattacagacgaagaggaaatcaggacaaccaatcccgtggctacggagcagtatggttctgtatctaccaacctccagagaggcaacagacaagcagctaccgcagatgtcaacacacaaggcgttcttccaggcatggtctggcaggacagagatgtgtaccttcaggggcccatctgggcaaagattccacacacggacggacattttcacccctctcccctcatgggtggattcggacttaaacaccctcctccacagattctcatcaagaacaccccggtacctgcgaatccttcgaccaccttcagtgcggcaaagtttgcttccttcatcacacagtactccacgggacaggtcagcgtggagatcgagtgggagctgcagaaggaaaacagcaaacgctggaatcccgaagttcagtacacttccaactacaacaagtctgttaatgtggactttactgtggacactaatggcgtgtattcagagcctcgccccattggcaccagatacctgactcgtaatctgtaa

SEQ ID NO: 5206 - protein, 735 aa, synthetic construct
  REGION 1..735: note = Description of Artificial Sequence: Synthetic polypeptide
MAADGYLPDWLEDTLSEGIRQWWKLKPGPPPPKPAERHKDDSRGLVLPGYKYLGPFNGLDKGEPVNEADAAALEHDKAYDRQLDSGDNPYLKYNHADAEFQERLKEDTSFGGNLGRAVFQAKKRVLEPLGLVEEPVKTAPGKKRPVEHSPVEPDSSSGTGKAGQQPARKRLNFGQTGDADSVPDPQPLGQPPAAPSGLGTNTMATGSGAPMADNNEGADGVGNSSGNWHCDSTWMGDRVITTSTRTWALPTYNNHLYKQISSQSGASNDNHYFGYSTPWGYFDFNRFHCHFSPRDWQRLINNNWGFRPKRLKFKLFNIQVKEVTQNDGTTTIANNLTSTVQVFTDSEYQLPYVLGSAHQGCLPPFPADVFMVPQYGYLTLNNGSQAVGRSSFYCLEYFPSQMLRTGNNFTFSYTFEDVPFHSSYAHSQSLDRLMNPLIDQYLYYLSRTDAPSGTTTQSRLQFSQAGASDIRDQSRNWLPGPCYRQQRVSKTSADNNNSEYSWTGATKYHLNGRDSLVNPGPAMASHKDDEEKFFPQSGVLIFGKQGSEKTSVDIEKVMITDEEEIRTTNPVATEQYGSVSTNLQRGNRQAATADVNTQGVLPGMVWQDRDVYLQGPIWAKIPHTDGHFHPSPLMGGFGLKHPPPQILIKNTPVPANPSTTFSAAKFASFITQYSTGQVSVEIEWELQKENSKRWNPEVQYTSNYNKSVNVDFTVDTNGVYSEPRPIGTRYLTRNL

SEQ ID NO: 5207 - DNA, 2208 bp, synthetic construct
  misc_feature 1..2208: note = Description of Artificial Sequence: Synthetic polynucleotide
  source 1..2208: mol_type = other DNA
atggctgccgatggttatcttccagattggctcgaggacactctctctgaaggaataagacagtggtggaagctcaaacctggcccaccaccaccaaagcccgcagagcggcataaggacgacagcaggggtcttgtgcttcctgggtacaagtacctcggacccttcaacggactcgacaagggagagccggtcaacgaggcagacgccgcggccctcgagcacgacaaagcctatgaccggcagctcgacagcggagacaacccgtacctcaagtacaaccacgccgacgcggagtttcaggagcgccttaaagaagatacgtcttttgggggcaacctcggacgagcagtcttccaggcgaaaaagagggttcttgaacctctgggcctggttgaggaacctgttaagacggctccgggaaaaaagaggccggtagagcactctcctgtggagccagactcctcctcgggaaccggaaaggcgggccagcagcctgcaagaaaaagattgaattttggtcagactggagacgcaaactcagtacctgacccccagcctctcggacagccaccagcagccccctctggtctgggaactaatacgatggctacaggcagtggcgcaccaatggcagacaataacgagggcgccgacggagtgggtaattcctcgggaaattggcattgcgattccacatggatgggcgacagagtcatcaccaccagcacccgaacctgggccctgcccacctacaacaaccacctctacaaacaaatttccagccaatcaggagcctcgaacgacaatcactactttggctacagcaccccttgggggtattttgacttcaacagattccactgccacttttcaccacgtgactggcaaagactcatcaacaacaactggggattccgacccaagagactcaagttcaagctctttaacattcaagtcaaagaggtcacgcagaatgacggtacgacgacgattgccaataaccttaccagcacggttcaggtgtttactgactcggagtaccagctcccgtacgtcctcggctcggcgcatcaaggatgcctcccgccgttcccagcagacgtcttcatggtgccacagtatggatacctcaccctgaacaacgggagtcgggcagtaggacgctcttcattttactgcctggagtactttccttctcagatgctgcgtaccggtaacaactttaccttcagctacacttttgaggacgttcctttccacagcagctacgctcacagccagagtctggaccgtctcatgaatcctctcatcgaccagtacctgtattacttgagcagaacagacactccaagtggaaccaccacgcagtcaaggcttcagttttctcaggccggagcgagtgacattcgggaccagtctaggaactggcttcctggaccctgttaccgccagcagcgagtatcaaagacatctgcggataacaacaacagtgaatactcgtggactggagctaccaagtaccacctcaatggcagagactctctggtgaatccgggcccggccatggcaagccacaaggacgatgaagaaaagttttttcctcagagcggggttctcatctttgggaagcaaggctcagagaaaacaagtgtggacattgaaaaggtcatgattacagacgaagaggaaatcaggacgaccaatcccgtggctacggagcagtatggttctgtatctaccaacctccagagaggcaacagacaagcagctaccgcagatgtcaacacacaaggcgttcttccaggcatggtctggcaggacagagatgtgtaccttcaggggcccatctgggcaaagattccacacacggacggacattttcacccctctcccctcatgggtggattcggacttaaacaccctcctccacagattctcatcaagaacaccccggtacctgcgaatccttcgaccaccttcagtgcggcaaagtttgcttccttcatcacacagtactccacgggacaggtcagcgtggagatcgagtgggagctgcagaaggaaaacagcaaacgctggaatcccgaagttcagtacacttccaactacaacaagtctgttaatgtggactttactgtggacactaatggcgtgtatacagagcctcgccccattggcaccagatacctgactcgtaatctgtaa

SEQ ID NO: 5208 - protein, 735 aa, synthetic construct
  REGION 1..735: note = Description of Artificial Sequence: Synthetic polypeptide
MAADGYLPDWLEDTLSEGIRQWWKLKPGPPPPKPAERHKDDSRGLVLPGYKYLGPFNGLDKGEPVNEADAAALEHDKAYDRQLDSGDNPYLKYNHADAEFQERLKEDTSFGGNLGRAVFQAKKRVLEPLGLVEEPVKTAPGKKRPVEHSPVEPDSSSGTGKAGQQPARKRLNFGQTGDANSVPDPQPLGQPPAAPSGLGTNTMATGSGAPMADNNEGADGVGNSSGNWHCDSTWMGDRVITTSTRTWALPTYNNHLYKQISSQSGASNDNHYFGYSTPWGYFDFNRFHCHFSPRDWQRLINNNWGFRPKRLKFKLFNIQVKEVTQNDGTTTIANNLTSTVQVFTDSEYQLPYVLGSAHQGCLPPFPADVFMVPQYGYLTLNNGSRAVGRSSFYCLEYFPSQMLRTGNNFTFSYTFEDVPFHSSYAHSQSLDRLMNPLIDQYLYYLSRTDTPSGTTTQSRLQFSQAGASDIRDQSRNWLPGPCYRQQRVSKTSADNNNSEYSWTGATKYHLNGRDSLVNPGPAMASHKDDEEKFFPQSGVLIFGKQGSEKTSVDIEKVMITDEEEIRTTNPVATEQYGSVSTNLQRGNRQAATADVNTQGVLPGMVWQDRDVYLQGPIWAKIPHTDGHFHPSPLMGGFGLKHPPPQILIKNTPVPANPSTTFSAAKFASFITQYSTGQVSVEIEWELQKENSKRWNPEVQYTSNYNKSVNVDFTVDTNGVYTEPRPIGTRYLTRNL

SEQ ID NO: 5209 - DNA, 2211 bp, synthetic construct
  misc_feature 1..2211: note = Description of Artificial Sequence: Synthetic polynucleotide
  source 1..2211: mol_type = other DNA
atggctgccgatggttatcttccagattggctcgaggacactctctctgaaggaataagacagtggtggaagctcaaacctggcccaccaccaccaaagcccgcagagcggcataaggacgacagcaggggtcttgtgcttcctgggtacaagtacctcggacccttcaacggactcgacaagggagagccggtcaacgaggcagacgccgcggccctcgagcacgacaaggcctacgaccagcagctcaaagcgggtgacaatccgtacctgcggtataaccacgccgacgccgagtttcaggagcgtctgcaagaagatacgtcttttgggggcaacctcgggcgagcagtcttccaggccaagaagcgggttctcgaacctctcggtctggttgaggaaggcgctaagacggctcctggaaagaaacgtccggtagagcagtcgccacaagagccagactcctcctcgggcatcggcaagacaggccagcagcccgctaaaaagagactcaattttggtcagactggcgactcagagtcagtccccgacccacaacctctcggagaacctccagcaacccccgctgctgtgggacctactacaatggcttcaggcggtggcgcaccaatggcagacaataacgaaggcgccgacggagtgggtaatgcctcaggaaattggcattgcgattccacatggctgggcgacagagtcatcaccaccagcacccgaacatgggccttgcccacctataacaaccacctctacaagcaaatctccagtgcttcgacgggggccagcaacgacaaccactacttcggctacagcaccccctgggggtattttgactttaacagattccactgccacttttcaccacgtgactggcagcgactcatcaacaataactggggattccggcccaagagactcagcttcaagctcttcaacatccaggtcaaggaggtcacgacgaatgatggcgtcacaaccatcgctaataaccttaccagcacggttcaagtcttctcggactcggagtaccagcttccgtacgtcctcggctctgcgcaccagggctgcctccctccgttcccggcggacgtgttcatgattccgcaatacggctacctgacgctcaacaatggcagccaagccgtgggacgttcatccttttactgcctggaatatttcccttctcagatgctgagaacgggcaacaactttaccttcagctacacctttgaggaagtgcctttccacagcagctacgcgcacagccagagcctggaccggctgatgaatcctctcatcgatcaatacctgtattacctgaacagaactcaaaatcagtccggaagtgcccaaaacaaggacttgctgtttagccgtgggtctccagctggcatgtctgttcagcccaaaaactggctacctggaccctgttatcggcagcagcgcgtttctaaaacaaaaacagacaacaacaacagcaattttacctggactggtgcttcaaaatataacctcaatgggcgtgaatccatcatcaaccctggcactgctatggcctcacacaaagacgacgaagacaagttctttcccatgagcggtgtcatgatttttggaaaagagagcgccggagcttcaaacactgcattggacaatgtcatgattacggacgaagaggaaattaaagccactaaccctgtggccaccgaaagatttgggaccgtggcagtcaatttccagagcagcagcacagaccctgcgaccggagatgtgcatgctatgggagcattacctggcatggtgtggcaagatagagacgtgtacctgcagggtcccatttgggccaaaattcctcacacagatggacactttcacccgtctcctcttatgggcggctttggactcaagaacccgcctcctcagatcctcatcaaaaacacgcctgttcctgcgaatcctccggcggagttttcagctacaaagtttgcttcattcatcactcaatactccacaggacaagtgagcgtggaaattgaatgggagctgcagaaagaaaacagcaaacgctggaatcccgaagtgcagtatacatctaactatgcaaaatctgccaacgttgatttcactgtggacaacaatggactttatactgagcctcgccccattggcacccgttacctcacccgtcccctgtaa

SEQ ID NO: 5210 - protein, 736 aa, synthetic construct
  REGION 1..736: note = Description of Artificial Sequence: Synthetic polypeptide
MAADGYLPDWLEDTLSEGIRQWWKLKPGPPPPKPAERHKDDSRGLVLPGYKYLGPFNGLDKGEPVNEADAAALEHDKAYDQQLKAGDNPYLRYNHADAEFQERLQEDTSFGGNLGRAVFQAKKRVLEPLGLVEEGAKTAPGKKRPVEQSPQEPDSSSGIGKTGQQPAKKRLNFGQTGDSESVPDPQPLGEPPATPAAVGPTTMASGGGAPMADNNEGADGVGNASGNWHCDSTWLGDRVITTSTRTWALPTYNNHLYKQISSASTGASNDNHYFGYSTPWGYFDFNRFHCHFSPRDWQRLINNNWGFRPKRLSFKLFNIQVKEVTTNDGVTTIANNLTSTVQVFSDSEYQLPYVLGSAHQGCLPPFPADVFMIPQYGYLTLNNGSQAVGRSSFYCLEYFPSQMLRTGNNFTFSYTFEEVPFHSSYAHSQSLDRLMNPLIDQYLYYLNRTQNQSGSAQNKDLLFSRGSPAGMSVQPKNWLPGPCYRQQRVSKTKTDNNNSNFTWTGASKYNLNGRESIINPGTAMASHKDDEDKFFPMSGVMIFGKESAGASNTALDNVMITDEEEIKATNPVATERFGTVAVNFQSSSTDPATGDVHAMGALPGMVWQDRDVYLQGPIWAKIPHTDGHFHPSPLMGGFGLKNPPPQILIKNTPVPANPPAEFSATKFASFITQYSTGQVSVEIEWELQKENSKRWNPEVQYTSNYAKSANVDFTVDNNGLYTEPRPIGTRYLTRPL

SEQ ID NO: 5211 - protein, 735 aa, synthetic construct
  REGION 1..735: note = Description of Artificial Sequence: Synthetic polypeptide
MAADGYLPDWLEDTLSEGIRQWWKLKPGPPPPKPAERHKDDSRGLVLPGYKYLGPFNGLDKGEPVNEADAAALEHDKAYDRQLDSGDNPYLKYNHADAEFQERLKEDTSFGGNLGRAVFQAKKRVLEPLGLVEEPVKTAPGKKRPVEHSPVEPDSSSGTGKAGQQPARKRLNFGQTGDADSVPDPQPLGQPPAAPSGLGTNTMATGSGAPMADNNEGADGVGNSSGNWHCDSTWMGDRVITTSTRTWALPTYNNHLYKQISSQSGASNDNHYFGYSTPWGYFDFNRFHCHFSPRDWQRLINNNWGFRPKRLKFKLFNIQVKEVTQNDGTTTIANNLTSTVQVFTDSEYQLPYVLGSAHQGCLPPFPADVFMVPQYGYLTLNNGSQAVGRSSFYCLEYFPSQMLRTGNNFTFSYTFEDVPFHSSYAHSQSLDRLMNPLIDQYLYYLSRTDTPSGTTTQSRLQFSQAGASDIRNQSRNWLPGPCYRQQRVSKTSADNNNSEYSWTGATKYHLNGRDSLVNPGPAMASHKDDEEKFFPQSGVLIFGKQGSEKTSVDIEKVMITDEEEIRTTNPVATEQYGSVSTNLQRGNRQAATADVNTQGVLPGMVWQDRDVYLQGPIWAKIPHTDGHFHPSPLMGGFGLKHPPPQILIKNTPVPANPSTTFSAAKFASFITQYSTGQVSVEIEWELQKENSKRWNPEVQYTSNYNKSVNVDFTVDTNGVYSEPRPIGTRYLTRNQ

SEQ ID NO: 5212 - DNA, 2208 bp, synthetic construct
  misc_feature 1..2208: note = Description of Artificial Sequence: Synthetic polynucleotide
  source 1..2208: mol_type = other DNA
atggctgccgatggttatcttccagattggctcgaggacactctctctgaaggaataagacagtggtggaagctcaaacctggcccaccaccaccaaagcccgcagagcggcataaggacgacagcaggggtcttgtgcttcctgggtacaagtacctcggacccttcaacggactcgacaagggagagccggtcaacgaggcagacgccgcggccctcgagcacgacaaagcctatgaccggcagctcgacagcggagacaacccgtacctcaagtacaaccacgccgacgcggagtttcaggaacgccttaaagaagatacgtcttttgggggcaacctcggacgagcagtcttccaggcgaaaaagagggttcttgaacctctgggcctggttgaggaacctgttaagacggctccgggaaaaaagaggccggtagagcactctcctgtggagccagactcctcctcgggaaccggaaaggcgggccagcagcctgcaagaaaaagattgaattttggtcagactggagacgcagactcagtacctgacccccagcctctcggacagccaccagcagccccctctggtctgggaactaatacgatggctacaggcagtggcgcaccaatggcagacaataacgagggcgccgacggagtgggtaattcctcgggaaattggcattgcgattccacatggatgggcgacagagtcatcaccaccagcacccgaacctgggccctgcccacctacaacaaccacctctacaaacaaatttccagccaatcaggagcctcgaacgacaatcactactttggctacagcaccccttgggggtattttgacttcaacagattccactgccacttttcaccacgtgactggcaaagactcatcaacaacaactggggattccgacccaagagactcaagttcaagctctttaacattcaagtcaaagaggtcacgcagaatgacggtacgacgacgattgccaataaccttaccagcacggttcaggtgtttactgactcggagtaccagctcccgtacgtcctcggctcggcgcatcaaggatgcctcccgccgttcccagcagacgtcttcatggtgccacagtatggatacctcaccctgaacaacgggagtcaggcagtaggacgctcttcattttactgcctggagtactttccttctcagatgctgcgtaccggtaacaactttaccttcagctacacttttgaggacgttcctttccacagcagctacgctcacagccagagtctggaccgtctcatgaatcctctcatcgaccagtacctgtattacttgagcagaacagacactccaagtggaaccaccacgcagtcaaggcttcagttttctcaggccggagcgagtgacattcggaaccagtctaggaactggcttcctggaccctgttaccgccagcagcgagtatcaaagacatctgcggataacaacaacagtgaatactcgtggactggagctaccaagtaccacctcaatggcagagactctctggtgaatccgggcccggccatggcaagccacaaggacgatgaagaaaagttttttcctcagagcggggttctcatctttgggaagcaaggctcagagaaaacaagtgtggacattgaaaaggtcatgattacagacgaagaggaaatcaggacaaccaatcccgtggctacggagcagtatggttctgtatctaccaacctccagagaggcaacagacaagcagctaccgcagatgtcaacacacaaggcgttcttccaggcatggtctggcaggacagagatgtgtaccttcaggggcccatctgggcaaagattccacacacggacggacattttcacccctctcccctcatgggtggattcggacttaaacaccctcctccacagattctcatcaagaacaccccggtacctgcgaatccttcgaccaccttcagtgcggcaaagtttgcttccttcatcacacagtactccacgggacaggtcagcgtggagatcgagtgggagctgcagaaggaaaacagcaaacgctggaatcccgaagttcagtacacttccaactacaacaagtctgttaatgtggactttactgtggacactaatggcgtgtattcagagcctcgccccattggcaccagatacctgactcgtaatcagtaa

SEQ ID NO: 5213 - DNA, 2208 bp, synthetic construct
  misc_feature 1..2208: note = Description of Artificial Sequence: Synthetic polynucleotide
  source 1..2208: mol_type = other DNA
atggctgccgatggttatcttccagattggctcgaggacactctctctgaaggaataagacagtggtggaagctcaaacctggcccaccaccaccaaagcccgcagagcggcataaggacgacagcaggggtcttgtgcttcctgggtacaagtacctcggacccttcaacggactcgacaagggagagccggtcaacgaggcagacgccgcggccctcgagcacgacaaagcctatgaccggcagctcgacagcggagacaacccgtacctcaagtacaaccacgccgacgcggagtttcaggagcgccttaaagaagatacgtcttttgggggcaacctcggacgagcagtcttccaggcgaaaaagagggttcttgaacctctgggcctggttgaggaacctgttaagacggctccgggaaaaaagaggccggtagagcactctcctgtggagccagactcctcctcgggaaccggaaaggcgggccagcagcctgcaagaaaaagattgaattttggtcagactggagacgcagactcagtacctgatccccagcctctcggacagccaccagcagccccctctggtctgggaactaatacgatggctacaggcagtggcgcaccaatggcagacaataacgagggcgccgacggagtgggtaattcctcgggaaattggcattgcgattccacatggatgggcgacagagtcatcaccaccagcacccgaacctgggccctgcccacctacaacaaccacctctacaaacaaatttccagccaatcaggagcctcgaacgacaatcactactttggctacagcaccccttgggggtattttgacttcaacagattccactgccacttttcaccacgtgactggcaaagactcatcaacaacaactggggattccgacccaagagactcaagttcaagctctttaacattcaagtcaaagaggtcacgcagaatgacggtacgacgacgattgccaataaccttaccagcacggttcaggtgtttactgactcggagtaccagctcccgtatgtcctcggctcggcgcatcaaggatgcctcccgccgttcccagcagacgtcttcatggtgccacagtatggatacctcaccctgaacaacgggagtcaggcagtaggacgctcttcattttactgcctggagtactttccttctcagatgctgcgtaccggtaacaactttaccttcagctacacttttgaggacgttcctttccacagcagctacgctcacagccagagtctggaccgtctcatgaatcctctcatcgaccagtacctgtattacttgagcagaacagacactccaagtggaaccaccacgcagtcaaggcttcagttttctcaggccggagcgagtgacattcgggaccagtctaggaactggcttcctggaccctgttaccgccagcagcgagtatcaaagacatctgcggataacaacaacagtgaatactcgtggactggagctaccaagtaccacctcaatggcagagactctctggtgaatccgggcccggccatggcaagccacaaggacgatgaagaaaagttttttcctcagagcggggttctcatctttgggaagcaaggctcagagaaaacaagtgtggacattgaaaaggtcatgattacagacgaagaggaaatcaggacaaccaatcccgtggctacggagcagtatggttctgtatctaccaacctccagagaggcaacagacaagcagctaccgcagatgtcaacacacaaggcgttcttccaggcatggtctggcaggacagagatgtgtaccttcaggggcccatctgggcaaagattccacacacggacggacattttcacccctctcccctcatgggtggattcggacttaaacaccctcctccacagattctcatcaagaacaccccggtacctgcgaatccttcgaccaccttcagtgcggcaaagtttgcttccttcatcacacagtactccacgggacaggtcagcgtggagatcgagtgggagctgcagaaggaaaacagcaaacgctggaatcccgaagttcagtacacttccaactacaacaagtctgttaatgtggactttactgtggacactaatggcgtgtattcagagcctcgccccattggcaccagatacctgactcgtaatctgtaa

SEQ ID NO: 5214 - protein, 735 aa, synthetic construct
  REGION 1..735: note = Description of Artificial Sequence: Synthetic polypeptide
MAADGYLPDWLEDTLSEGIRQWWKLKPGPPPPKPAERHKDDSRGLVLPGYKYLGPFNGLDKGEPVNEADAAALEHDKAYDRQLDSGDNPYLKYNHADAEFQERLKEDTSFGGNLGRAVFQAKKRVLEPLGLVEEPVKTAPGKKRPVEHSPVEPDSSSGTGKAGQQPARKRLNFGQTGDADSVPDPQPLGQPPAAPSGLGTNTMATGSGAPMADNNEGADGVGNSSGNWHCDSTWMGDRVITTSTRTWALPTYNNHLYKQISSQSGASNDNHYFGYSTPWGYFDFNRFHCHFSPRDWQRLINNNWGFRPKRLKFKLFNIQVKEVTQNDGTTTIANNLTSTVQVFTDSEYQLPYVLGSAHQGCLPPFPADVFMVPQYGYLTLNNGSQAVGRSSFYCLEYFPSQMLRTGNNFTFSYTFEDVPFHSSYAHSQSLDRLMNPLIDQYLYYLSRTDTPSGTTTQSRLQFSQAGASDIRDQSRNWLPGPCYRQQRVSKTSADNNNSEYSWTGATKYHLNGRDSLVNPGPAMASHKDDEEKFFPQSGVLIFGKQGSEKTSVDIEKVMITDEEEIRTTNPVATEQYGSVSTNLQRGNRQAATADVNTQGVLPGMVWQDRDVYLQGPIWAKIPHTDGHFHPSPLMGGFGLKHPPPQILIKNTPVPANPSTTFSAAKFASFITQYSTGQVSVEIEWELQKENSKRWNPEVQYTSNYNKSVNVDFTVDTNGVYSEPRPIGTRYLTRNL

SEQ ID NO: 5215 - DNA, 2172 bp, synthetic construct
  misc_feature 1..2172: note = Description of Artificial Sequence: Synthetic polynucleotide
  source 1..2172: mol_type = other DNA
atgtcttttgttgatcaccctccagattggttggaagaagttggtgaaggtcttcgcgagtttttgggccttgaagcgggcccaccgaaaccaaaacccaatcagcagcatcaagatcaagcccgtggtcttgtgctgcctggttataactatctcggacccggaaacggtctcgatcgaggagagcctgtcaacagggcagacgaggtcgcgcgagagcacgacatctcgtacaacgagcagcttgaggcgggagacaacccctacctcaagtacaaccacgcggacgccgagtttcaggagaagctcgccgacgacacatccttcgggggaaacctcggaaaggcagtctttcaggccaagaaaagggttctcgaaccttttggcctggttgaagagggtgctaagacggcccctaccggaaagcggatagacgaccactttccaaaaagaaagaaggctcggaccgaagaggactccaagccttccacctcgtcagacgccgaagctggacccagcggatcccagcagctgcaaatcccagcccaaccagcctcaagtttgggagctgatacaatgtctgcgggaggtggcggcccattgggcgacaataaccaaggtgccgatggagtgggcaatgcctcgggagattggcattgcgattccacgtggatgggggacagagtcgtcaccaagtccacccgaacctgggtgctgcccagctacaacaaccaccagtaccgagagatcaaaagcggctccgtcgacggaagcaacgccaacgcctactttggatacagcaccccctgggggtactttgactttaaccgcttccacagccactggagcccccgagactggcaaagactcatcaacaactactggggcttcagaccccggtccctcagagtcaaaatcttcaacattcaagtcaaagaggtcacggtgcaggactccaccaccaccatcgccaacaacctcacctccaccgtccaagtgtttacggacgacgactaccagctgccctacgtcgtcggcaacgggaccgagggatgcctgccggccttccctccgcaggtctttacgctgccgcagtacggttacgcgacgctgaaccgcgacaacacagaaaatcccaccgagaggagcagcttcttctgcctagagtactttcccagcaagatgctgagaacgggcaacaactttgagtttacctacaactttgaggaggtgcccttccactccagcttcgctcccagtcagaacctgttcaagctggccaacccgctggtggaccagtacttgtaccgcttcgtgagcacaaataacactggcggagtccagttcaacaagaacctggccgggagatacgccaacacctacaaaaactggttcccggggcccatgggccgaacccagggctggaacctgggctccggggtcaaccgcgccagtgtcagcgccttcgccacgaccaataggatggagctcgagggcgcgagttaccaggtgcccccgcagccgaacggcatgaccaacaacctccagggcagcaacacctatgccctggagaacactatgatcttcaacagccagccggcgaacccgggcaccaccgccacgtacctcgagggcaacatgctcatcaccagcgagagcgagacgcagccggtgaaccgcgtggcgtacaacgtcggcgggcagatggccaccaacaaccagagctccaccactgcccccgcgaccggcacgtacaacctccaggaaatcgtgcccggcagcgtgtggatggagagggacgtgtacctccaaggacccatctgggccaagatcccagagacgggggcgcactttcacccctctccggccatgggcggattcggactcaaacacccaccgcccatgatgctcatcaagaacacgcctgtgcccggaaatatcaccagcttctcggacgtgcccgtcagcagcttcatcacccagtacagcaccgggcaggtcaccgtggagatggagtgggagctcaagaaggaaaactccaagaggtggaacccagagatccagtacacaaacaactacaacgacccccagtttgtggactttgccccggacagcaccggggaatacagaaccaccagacctatcggaacccgataccttacccgacccctt

SEQ ID NO: 5216 - DNA, 2214 bp, synthetic construct
  misc_feature 1..2214: note = Description of Artificial Sequence: Synthetic polynucleotide
  source 1..2214: mol_type = other DNA
atggctgccgatggttatcttccagattggctcgaggacaacctctctgagggcattcgcgagtggtgggcgctgaaacctggagccccgaagcccaaagccaaccagcaaaagcaggacgacggccggggtctggtgcttcctggctacaagtacctcggacccttcaacggactcgacaagggggagcccgtcaacgcggcggacgcagcggccctcgagcacgacaaggcctacgaccagcagctgcaggcgggtgacaatccgtacctgcggtataaccacgccgacgccgagtttcaggagcgtctgcaagaagatacgtcttttgggggcaacctcgggcgagcagtcttccaggccaagaagcgggttctcgaacctctcggtctggttgaggaaggcgctaagacggctcctggaaagaagagaccggtagagccatcaccccagcgttctccagactcctctacgggcatcggcaagaaaggccaacagcccgccagaaaaagactcaattttggtcagactggcgactcagagtcagttccagaccctcaacctctcggagaacctccagcagcgccctctggtgtgggacctaatacaatggctgcaggcggtggcgcaccaatggcagacaataacgaaggcgccgacggagtgggtagttcctcgggaaattggcattgcgattccacatggctgggcgacagagtcatcaccaccagcacccgaacctgggccctgcccacctacaacaaccacctctacaagcaaatctccaacgggacatcgggaggagccaccaacgacaacacctacttcggctacagcaccccctgggggtattttgactttaacagattccactgccacttttcaccacgtgactggcagcgactcatcaacaacaactggggattccggcccaagagactcagcttcaagctcttcaacatccaggtcaaggaggtcacgcagaatgaaggcaccaagaccatcgccaataacctcaccagcaccatccaggtgtttacggactcggagtaccagctgccgtacgttctcggctctgcccaccagggctgcctgcctccgttcccggcggacgtgttcatgattccccagtacggctacctaacactcaacaacggtagtcaggccgtgggacgctcctccttctactgcctggaatactttccttcgcagatgctgagaaccggcaacaacttccagtttacttacaccttcgaggacgtgcctttccacagcagctacgcccacagccagagcttggaccggctgatgaatcctctgattgaccagtacctgtactacttgtctcggactcaaacaacaggaggcacggcaaatacgcagactctgggcttcagccaaggtgggcctaatacaatggccaatcaggcaaagaactggctgccaggaccctgttaccgccaacaacgcgtctcaacgacaaccgggcaaaacaacaatagcaactttgcctggactgctgggaccaaataccatctgaatggaagaaattcattggctaatcctggcatcgctatggcaacacacaaagacgacgaggagcgtttttttcccagtaacgggatcctgatttttggcaaacaaaatgctgccagagacaatgcggattacagcgatgtcatgctcaccagcgaggaagaaatcaaaaccactaaccctgtggctacagaggaatacggtatcgtggcagataacttgcctgagcggacggcgatgagtcttccgggaactgtcaacagccagggggccttacccggtatggtctggcagaaccgggacgtgtacctgcagggtcccatctgggccaagattcctcacacggacggcaacttccacccgtctccgctgatgggcggctttggcctgaaacatcctccgcctcagatcctgatcaagaacacgcctgtacctgcggatcctccgaccaccttcaaccagtcaaagctgaactctttcatcacgcaatacagcaccggacaggtcagcgtggaaattgaatgggagctgcagaaggaaaacagcaagcgctggaaccccgagatccagtacacctccaactactacaaatctacaagtgtggactttgctgttaatacagaaggcgtgtactctgaaccccgccccattggcacccgttacctcacccgtaatctg

SEQ ID NO: 5217 - protein, 738 aa, synthetic construct
  REGION 1..738: note = Description of Artificial Sequence: Synthetic polypeptide
MAADGYLPDWLEDNLSEGIREWWALKPGAPKPKANQQKQDDGRGLVLPGYKYLGPFNGLDKGEPVNAADAAALEHDKAYDQQLQAGDNPYLRYNHADAEFQERLQEDTSFGGNLGRAVFQAKKRVLEPLGLVEEGAKTAPGKKRPVEPSPQRSPDSSTGIGKKGQQPARKRLNFGQTGDSESVPDPQPLGEPPAAPSGVGPNTMAAGGGAPMADNNEGADGVGSSSGNWHCDSTWLGDRVITTSTRTWALPTYNNHLYKQISNGTSGGATNDNTYFGYSTPWGYFDFNRFHCHFSPRDWQRLINNNWGFRPKRLSFKLFNIQVKEVTQNEGTKTIANNLTSTIQVFTDSEYQLPYVLGSAHQGCLPPFPADVFMIPQYGYLTLNNGSQAVGRSSFYCLEYFPSQMLRTGNNFQFTYTFEDVPFHSSYAHSQSLDRLMNPLIDQYLYYLSRTQTTGGTANTQTLGFSQGGPNTMANQAKNWLPGPCYRQQRVSTTTGQNNNSNFAWTAGTKYHLNGRNSLANPGIAMATHKDDEERFFPSNGILIFGKQNAARDNADYSDVMLTSEEEIKTTNPVATEEYGIVADNLPERTAMSLPGTVNSQGALPGMVWQNRDVYLQGPIWAKIPHTDGNFHPSPLMGGFGLKHPPPQILIKNTPVPADPPTTFNQSKLNSFITQYSTGQVSVEIEWELQKENSKRWNPEIQYTSNYYKSTSVDFAVNTEGVYSEPRPIGTRYLTRNL

SEQ ID NO: 5218 - DNA, 2214 bp, synthetic construct
  misc_feature 1..2214: note = Description of Artificial Sequence: Synthetic polynucleotide
  source 1..2214: mol_type = other DNA
atggctgccgatggttatcttccagattggctcgaggacaacctctctgagggcattcgcgagtggtgggcgctgaaacctggagccccgaagcccaaagccaaccagcaaaagcaggacgacggccggggtctggtgcttcctggctacaagtacctcggacccttcaacggactcgacaagggggagcccgtcaacgcggcggacgcagcggccctcgagcacgacaaggcctacgaccagcagctgcaggcgggtgacaatccgtacctgcggtataaccacgccgacgccgagtttcaggagcgtctgcaagaagatacgtcttttgggggcaacctcgggcgagcagtcttccaggccaagaagcgggttctcgaacctctcggtctggttgaggaaggcgctaagacggctcctggaaagaagagaccggtagagccatcaccccagcgttctccagactcctctacgggcatcggcaagaaaggccaacagcccgccagaaaaagactcaattttggtcagactggcgactcagagtcagttccagaccctcaacctctcggagaacctccagcagcgccctctggtgtgggacctaatacaatggctgcaggcggtggcgcaccaatggcagacaataacgaaggcgccgacggagtgggtagttcctcgggaaattggcattgcgattccacatggctgggcgacagagtcatcaccaccagcacccgaacctgggccctgcccacctacaacaaccacctctacaagcaaatctccaacgggacatcgggaggagccaccaacgacaacacctacttcggctacagcaccccctgggggtattttgactttaacagattccactgccacttttcaccacgtgactggcagcgactcatcaacaacaactggggattccggcccaagagactcagcttcaagctcttcaacatccaggtcaaggaggtcacgcagaatgaaggcaccaagaccatcgccaataacctcaccagcaccatccaggtgtttacggactcggagtaccagctgccgtacgttctcggctctgcccaccagggctgcctgcctccgttcccggcggacgtgttcatgattccccagtacggctacctaacactcaacaacggtagtcaggccgtgggacgctcctccttctactgcctggaatactttccttcgcagatgctgagaaccggcaacaacttccagtttacttacaccttcgaggacgtgcctttccacagcagctacgcccacagccagagcttggaccggctgatgaatcctctgattgaccagtacctgtactacttgtctcggactcaaacaacaggaggcacggcaaatacgcagactctgggcttcagccaaggtgggcctaatacaatggccaatcaggcaaagaactggctgccaggaccctgttaccgccaacaacgcgtctcaacgacaaccgggcaaaacaacaatagcaactttgcctggactgctgggaccaaataccatctgaatggaagaaattcattggctaatcctggcatcgctatggcaacacacaaagacgacgaggagcgtttttttcccagtaacgggatcctgatttttggcaaacaaaatgctgccagagacaatgcggattacagcgatgtcatgctcaccagcgaggaagaaatcaaaaccactaaccctgtggctacagaggaatacggtatcgtggcagataacttgagttttagtcgtgcggttctttgtgatggaactgtcaacagccagggggccttacccggtatggtctggcagaaccgggacgtgtacctgcagggtcccatctgggccaagattcctcacacggacggcaacttccacccgtctccgctgatgggcggctttggcctgaaacatcctccgcctcagatcctgatcaagaacacgcctgtacctgcggatcctccgaccaccttcaaccagtcaaagctgaactctttcatcacgcaatacagcaccggacaggtcagcgtggaaattgaatgggagctgcagaaggaaaacagcaagcgctggaaccccgagatccagtacacctccaactactacaaatctacaagtgtggactttgctgttaatacagaaggcgtgtactctgaaccccgccccattggcacccgttacctcacccgtaatctg

SEQ ID NO: 5219 - protein, 738 aa, synthetic construct
  REGION 1..738: note = Description of Artificial Sequence: Synthetic polypeptide
MAADGYLPDWLEDNLSEGIREWWALKPGAPKPKANQQKQDDGRGLVLPGYKYLGPFNGLDKGEPVNAADAAALEHDKAYDQQLQAGDNPYLRYNHADAEFQERLQEDTSFGGNLGRAVFQAKKRVLEPLGLVEEGAKTAPGKKRPVEPSPQRSPDSSTGIGKKGQQPARKRLNFGQTGDSESVPDPQPLGEPPAAPSGVGPNTMAAGGGAPMADNNEGADGVGSSSGNWHCDSTWLGDRVITTSTRTWALPTYNNHLYKQISNGTSGGATNDNTYFGYSTPWGYFDFNRFHCHFSPRDWQRLINNNWGFRPKRLSFKLFNIQVKEVTQNEGTKTIANNLTSTIQVFTDSEYQLPYVLGSAHQGCLPPFPADVFMIPQYGYLTLNNGSQAVGRSSFYCLEYFPSQMLRTGNNFQFTYTFEDVPFHSSYAHSQSLDRLMNPLIDQYLYYLSRTQTTGGTANTQTLGFSQGGPNTMANQAKNWLPGPCYRQQRVSTTTGQNNNSNFAWTAGTKYHLNGRNSLANPGIAMATHKDDEERFFPSNGILIFGKQNAARDNADYSDVMLTSEEEIKTTNPVATEEYGIVADNLSFSRAVLCDGTVNSQGALPGMVWQNRDVYLQGPIWAKIPHTDGNFHPSPLMGGFGLKHPPPQILIKNTPVPADPPTTFNQSKLNSFITQYSTGQVSVEIEWELQKENSKRWNPEIQYTSNYYKSTSVDFAVNTEGVYSEPRPIGTRYLTRNL

SEQ ID NO: 5220 - DNA, 2215 bp, synthetic construct
  misc_feature 1..2215: note = Description of Artificial Sequence: Synthetic polynucleotide
  source 1..2215: mol_type = other DNA
atggctgccgatggttatcttccagattggctcgaggacactctctctgaaggaataagacagtggtggaagctcaaacctggcccaccaccaccaaagcccgcagagcggcataaggacgacagcaggggtcttgtgcttcctgggtacaagtacctcggacccttcaacggactcgacaagggagagccggtcaacgaggcagacgccgcggccctcgagcacgacaaagcctacgaccggcagctcgacagcggagacaacccgtacctcaagtacaaccacgccgacgccgagttccaggagcggctcaaagaagatacgtcttttgggggcaacctcgggcgagcagtcttccaggccaaaaagaggcttcttgaacctcttggtctggttgaggaagcggctaagacggctcctggaaagaagaggcctgtagagcactctcctgtggagccagactcctcctcgggaaccggaaaggcgggccagcagcctgcaagaaaaagattgaattttggtcagactggagacgcagactcagtcccagaccctcaaccaatcggagaacctcccgcagccccctcaggtgtgggatctcttacaatggctgcaggcggtggcgcaccaatggcagacaataacgagggcgccgacggagtgggtaattcctcgggaaattggcattgcgattccacatggatgggcgacagagtcatcaccaccagcacccgaacctgggccctgcccacctacaacaaccacctctacaagcaaatctccaacagcacatctggaggatcttcaaatgacaacgcctacttcggctacagcaccccctgggggtattttgactttaacagattccactgccacttttcaccacgtgactggcagcgactcatcaacaacaactggggattccggcccaagagactcagcttcaagctcttcaacatccaggtcaaggaggtcacgcagaatgaaggcaccaagaccatcgccaataacctcaccagcaccatccaggtgtttacggactcggagtaccagctgccgtacgttctcggctctgcccaccagggctgcctgcctccgttcccggcggacgtgttcatgattccccagtacggctacctaacactcaacaacggtagtcaggccgtgggacgctcctccttctactgcctggaatactttccttcgcagatgctgagaaccggcaacaacttccagtttacttacaccttcgaggacgtgcctttccacagcagctacgcccacagccagagcttggaccggctgatgaatcctctgattgaccagtacctgtactacttgtctcggactcaaacaacaggaggcacgacaaatacgcagactctgggcttcagccaaggtgggcctaatacaatggccaatcaggcaaagaactggctgccaggaccctgttaccgccagcagcgagtatcaaagacatctgcggataacaacaacagtgaatactcgtggactggagctaccaagtaccacctcaatggcagagactctctggtgaatccgggcccggccatggcaagccacaaggacgatgaagaaaagtttttttcctcagagcggggttctcatctttgggaagcaaggctcagagaaaacaaatgtggacattgaaaaggtcatgattacagacgaagaggaaatcaggacaaccaatcccgtggctacggagcagtatggttctgtatctaccaacctccagagaggcaacagacaagcagctaccgcagatgtcaacacacaaggcgttcttccaggcatggtctggcaggacagagatgtgtaccttcaggggcccatctgggcaaagattccacacacggacggacattttcacccctctcccctcatgggtggattcggacttaaacaccctccgcctcagatcctgatcaagaacacgcctgtacctgcggatcctccgaccaccttcaaccagtcaaagctgaactctttcatcacccagtattctactggccaagtcagcgtggagatcgagtgggagctgcagaaggaaaacagcaagcgctggaaccccgagatccagtacacctccaactactacaaatctacaagtgtggactttgctgttaatacagaaggcgtgtactctgaaccccgccccattggcacccgttacctcacccgtaatctgtaa

SEQ ID NO: 5221 - protein, 737 aa, synthetic construct
  REGION 1..737: note = Description of Artificial Sequence: Synthetic polypeptide
MAADGYLPDWLEDTLSEGIRQWWKLKPGPPPPKPAERHKDDSRGLVLPGYKYLGPFNGLDKGEPVNEADAAALEHDKAYDRQLDSGDNPYLKYNHADAEFQERLKEDTSFGGNLGRAVFQAKKRLLEPLGLVEEAAKTAPGKKRPVEHSPVEPDSSSGTGKAGQQPARKRLNFGQTGDADSVPDPQPIGEPPAAPSGVGSLTMAAGGGAPMADNNEGADGVGNSSGNWHCDSTWMGDRVITTSTRTWALPTYNNHLYKQISNSTSGGSSNDNAYFGYSTPWGYFDFNRFHCHFSPRDWQRLINNNWGFRPKRLSFKLFNIQVKEVTQNEGTKTIANNLTSTIQVFTDSEYQLPYVLGSAHQGCLPPFPADVFMIPQYGYLTLNNGSQAVGRSSFYCLEYFPSQMLKTGNNFQFTYTFEDVPFHSSYAHSQSLDRLMNPLIDQYLYYLSRTQTTGGTTNTQTLGFSQGGPNTMANQAKNWLPGPCYRQQRVSKTSADNNNSEYSWTGATKYHLNGRDSLVNPGPAMASHKDDEEKFFPQSGVLIFGKQGSEKTNVDIEKVMITDEEEIRTTNPVATEQYGSVSTNLQRGNRQAATADVNTQGVLPGMVWQDRDVYLQGPIWAKIPHTDGHFHPSPLMGGFGLKHPPPQILIKNTPVPADPPTTFNQSKLNSFITQYSTGQVSVEIEWELQKENSKRWNPEIQYTSNYYKSTSVDFAVNTEGVYSEPRPIGTRYLTRNL

SEQ ID NO: 5222 - protein, 737 aa, synthetic construct
  REGION 1..737: note = Description of Artificial Sequence: Synthetic polypeptide
MAADGYLPDWLEDTLSEGIRQWWKLKPGPPPPKPAERHKDDSRGLVLPGYKYLGPFNGLDKGEPVNEADAAALEHDKAYDRQLDSGDNPYLKYNHADAEFQERLKEDTSFGGNLGRAVFQAKKRLLEPLGLVEEAAKTAPGKKRPVEHSPVEPDSSSGTGKAGQQPARKRLNFGQTGDADSVPDPQPIGEPPAAPSGVGSLTMAAGGGAPMADNNEGADGVGNSSGNWHCDSTWMGDRVITTSTRTWALPTYNNHLYKQISNSTSGGSSNDNAYFGYSTPWGYFDFNRFHCHFSPRDWQRLINNNWGFRPKRLSFKLFNIQVKEVTQNEGTKTIANNLTSTIQVFTDSEYQLPYVLGSAHQGCLPPFPADVFMIPQYGYLTLNNGSQAVGRSSFYCLEYFPSQMLKTGNNFQFTYTFEDVPFHSSYAHSQSLDRLMNPLIDQYLYYLSRTQTTGGTTNTQTLGFSQGGPNTMANQAKNWLPGPCYRQQRVSKTSADNNNSEYSWTGATKYHLNGRDSLVNPGPAMASHKDDEEKFFPQSGVLIFGKQGSEKTNVDIEKVMITDEEEIRTTNPVATEQYGSVSTNLQQGNTQAATADVNTQGVLPGMVWQDRDVYLQGPIWAKIPHTDGHFHPSPLMGGFGLKHPPPQILIKNTPVPADPPTTFNQSKLNSFITQYSTGQVSVEIEWELQKENSKRWNPEIQYTSNYYKSTSVDFAVNTEGVYSEPRPIGTRYLTRNL

SEQ ID NO: 5223 - protein, 737 aa, synthetic construct
  REGION 1..737: note = Description of Artificial Sequence: Synthetic polypeptide
MAADGYLPDWLEDTLSEGIRQWWKLKPGPPPPKPAERHKDDSRGLVLPGYKYLGPFNGLDKGEPVNEADAAALEHDKAYDRQLDSGDNPYLKYNHADAEFQERLKEDTSFGGNLGRAVFQAKKRLLEPLGLVEEAAKTAPGKKRPVEHSPVEPDSSSGTGKAGQQPARKRLNFGQTGDADSVPDPQPIGEPPAAPSGVGSLTMAAGGGAPMADNNEGADGVGNSSGNWHCDSTWMGDRVITTSTRTWALPTYNNHLYKQISNSTSGGSSNDNAYFGYSTPWGYFDFNRFHCHFSPRDWQRLINNNWGFRPKRLSFKLFNIQVKEVTQNEGTKTIANNLTSTIQVFTDSEYQLPYVLGSAHQGCLPPFPADVFMIPQYGYLTLNNGSQAVGRSSFYCLEYFPSQMLRTGNNFQFTYTFEDVPFHSSYAHSQSLDRLMNPLIDQYLYYLSRTQTTGGTTNTQTLGFSQGGPNTMANQAKNWLPGPCYRQQRVSKTSADNNNSEYSWTGATKYHLNGRDSLVNPGPAMASHKDDEEKFFPQSGVLIFGKQGSEKTNVDIEKVMITDEEEIRTTNPVATEQYGSVSTNLQQGNTQAATADVNTQGVLPGMVWQDRDVYLQGPIWAKIPHTDGHFHPSPLMGGFGLKHPPPQILIKNTPVPADPPTTFNQSKLNSFITQYSTGQVSVEIEWELQKENSKRWNPEIQYTSNYYKSTSVDFAVNTEGVYSEPRPIGTRYLTRNL

SEQ ID NO: 5224 - DNA, 2214 bp, synthetic construct
  misc_feature 1..2214: note = Description of Artificial Sequence: Synthetic polynucleotide
  source 1..2214: mol_type = other DNA
atggctgccgatggttatcttccagattggctcgaggacaaccttagtgaaggaattcgcgagtggtgggctttgaaacctggagcccctcaacccaaggcaaatcaacaacatcaagacaacgctcgaggtcttgtgcttccgggttacaaataccttggacccggcaacggactcgacaagggggagccggtcaacgcagcagacgcggcggccctcgagcacgacaaggcctacgaccagcagctgcaggcgggtgacaatccgtacctgcggtataaccacgccgacgccgagtttcaggagcgtctgcaagaagatacgtcttttgggggcaaccttggcagagcagtcttccaggccaaaaagaggatccttgagcctcttggtctggttgaggaagcagctaaaacggctcctggaaagaagaggcctgtagatcagtctcctcaggaaccggactcatcatctggtgttggcaaatcgggcaaacagcctgccagaaaaagactaaatttcggtcagactggcgactcagagtcagtcccagaccctcaacctctcggagaaccaccagcagcccccacaagtttgggatctaatacaatggcttcaggcggtggcgcaccaatggcagacaataacgagggtgccgatggggtgggtagttcctcgggaaattggcattgcgattcccaatggctgggggacagagtcatcaccaccagcacccgaacctgggccctgcccacctacaacaatcacctctacaagcaaatctccaacgggacatcgggaggagccaccaacgacaacacctacttcggctacagcaccccctgggggtattttgactttaacagattccactgccacttttcaccacgtgactggcagcgactcatcaacaacaactggggattccggcccaagagactcagcttcaagctcttcaacatccaggtcaaggaggtcacgcagaatgaaggcaccaagaccatcgccaataacctcaccagcaccatccaggtgtttacggactcggagtaccagctgccgtacgttctcggctctgcgcaccagggctgcctccctccgttcccggcggacgtgttcatgattccgcaatacggctacctgacgctcaacaatggcagccaagccgtgggacgttcatccttttactgcctggaatatttcccttctcagatgctgagaacgggcaacaactttaccttcagctacacctttgaggaagtgcctttccacagcagctacgcgcacagccagagcttggaccggctgatgaatcctctgattgaccagtacctgtactacttgtctcggactcaaacaacaggaggcacggcaaatacgcagactctgggcttcagccaaggtgggcctaatacaatggccaatcaggcaaagaactggctgccaggaccctgttaccgccaacaacgcgtctcaacgacaaccgggcaaaacaacaatagcaactttgcctggactgctgggaccaaataccatctgaatggaagaaattcattggctaatcctggcatcgctatggcaacacacaaagacgacgaggagcgtttttttcccagtaacgggatcctgatttttggcaaacaaaatgctgccagagacaatgcggattacagcgatgtcatgctcaccagcgaggaagaaatcaaaaccactaaccctgtggctacagaggaatacggtatcgtggcagataacttgcagcagcaaaacacggctcctcaaattggaactgtcaacagccagggggccttacccggtatggtctggcagaaccgggacgtgtacctgcagggtcccatctgggccaagattcctcacacggacggcaacttccacccgtctccgctgatgggcggctttggcctgaaacatcctccgcctcagatcctgatcaagaacacgcctgtacctgcggatcctccgaccaccttcaaccagtcaaagctgaactctttcatcacgcaatacagcaccggacaggtcagcgtggagatcgagtgggagctgcagaaggaaaacagcaagcgctggaacccggagatccagtacacttccaactattacaagtctaataatgttgaatttgctgttaatactgaaggtgtatatagtgaaccccgccccattggcaccagatacctgactcgtaatctgtaa

SEQ ID NO: 5225 - protein, 737 aa, synthetic construct
  REGION 1..737: note = Description of Artificial Sequence: Synthetic polypeptide
MAADGYLPDWLEDNLSEGIREWWALKPGAPQPKANQQHQDNARGLVLPGYKYLGPGNGLDKGEPVNAADAAALEHDKAYDQQLQAGDNPYLRYNHADAEFQERLQEDTSFGGNLGRAVFQAKKRILEPLGLVEEAAKTAPGKKRPVDQSPQEPDSSSGVGKSGKQPARKRLNFGQTGDSESVPDPQPLGEPPAAPTSLGSNTMASGGGAPMADNNEGADGVGSSSGNWHCDSQWLGDRVITTSTRTWALPTYNNHLYKQISNGTSGGATNDNTYFGYSTPWGYFDFNRFHCHFSPRDWQRLINNNWGFRPKRLSFKLFNIQVKEVTQNEGTKTIANNLTSTIQVFTDSEYQLPYVLGSAHQGCLPPFPADVFMIPQYGYLTLNNGSQAVGRSSFYCLEYFPSQMLRTGNNFTFSYTFEEVPFHSSYAHSQSLDRLMNPLIDQYLYYLSRTQTTGGTANTQTLGFSQGGPNTMANQAKNWLPGPCYRQQRVSTTTGQNNNSNFAWTAGTKYHLNGRNSLANPGIAMATHKDDEERFFPSNGILIFGKQNAARDNADYSDVMLTSEEEIKTTNPVATEEYGIVADNLQQQNTAPQIGTVNSQGALPGMVWQNRDVYLQGPIWAKIPHTDGNFHPSPLMGGFGLKHPPPQILIKNTPVPADPPTTFNQSKLNSFITQYSTGQVSVEIEWELQKENSKRWNPEIQYTSNYYKSNNVEFAVNTEGVYSEPRPIGTRYLTRNL

SEQ ID NO: 5226 - DNA, 2211 bp, synthetic construct
  misc_feature 1..2211: note = Description of Artificial Sequence: Synthetic polynucleotide
  source 1..2211: mol_type = other DNA
atggctgccgatggttatcttccagattggctcgaggacaacctctctgagggcattcgcgagtggtgggacttgaaacctggagccccgaagcccaaagccaaccagcaaaagcaggacgacggccggggtctggtgcttcctggctacaagtacctcggacccttcaacggactcgacaagggggagcccgtcaacgcggcggacgcagcggccctcgagcacgacaaggcctacgaccagcagctcaaagcgggtgacaatccgtacctgcggtataaccacgccgacgccgagtttcaggagcgtctgcaagaagatacgtcttttgggggcaacctcgggcgagcagtcttccaggccaagaagcgggttctcgaacctctcggtctggttgaggaaggcgctaagacggctcctggaaagaaacgtccggtagagcagtcgccacaagagccagactcctcctcgggcatcggcaagacaggccagcagcccgctaaaaagagactcaattttggtcagactggcgactcagagtcagtccccgacccacaacctctcggagaacctccagcaacccccgctgctgtgggacctactacaatggcttcaggcggtggcgcaccaatggcagacaataacgaaggcgccgacggagtgggtaatgcctcaggaaattggcattgcgattccacatggctgggcgacagagtcatcaccaccagcacccgaacatgggccttgcccacctataacaaccacctctacaagcaaatctccagtgcttcaacgggggccagcaacgacaaccactacttcggctacagcaccccctgggggtattttgatttcaacagattccactgccatttctcaccacgtgactggcagcgactcatcaacaacaattggggattccggcccaagagactcaacttcaagctcttcaacatccaagtcaaggaggtcacgacgaatgatggcgtcacgaccatcgctaataaccttaccagcacggttcaagtcttctcggactcggagtaccagctgccgtacgttctcggctctgcccaccagggctgcctgcctccgttcccggcggacgtgttcatgattccccagtacggctacctaacactcaacaacggtagtcaggccgtgggacgctcctccttctactgcctggaatactttccttcgcagatgctgagaaccggcaacaacttccagtttacttacaccttcgaggacgtgcctttccacagcagctacgcccacagccagagcttggaccggctgatgaatcctctgattgaccagtacctgtactacttgtctcggactcaaacaacaggaggcacggcaaatacgcagactctgggcttcagccaaggtgggcctaatacaatggccaatcaggcaaagaactggctgccaggaccctgttaccgccaacaacgcgtctcaacgacaaccgggcaaaacaacaatagcaattttacctggactggtgcttcaaaatataacctcaatgggcgtgaatccatcatcaaccctggcactgctatggcctcacacaaagacgacgaagacaagttctttcccatgagcggtgtcatgatttttggaaaagagagcgccggagcttcaaacactgcattggacaatgtcatgattacagacgaagaggaaattaaagccactaaccctgtggccaccgaaagatttgggaccgtggcagtcaatttccagagcagcagcacagaccctgcgaccggagatgtgcatgctatgggagcattacctggcatggtgtggcaagatagagacgtgtacctgcagggtcccatttgggccaaaattcctcacacagatggacactttcacccgtctcctcttatgggcggctttggactcaagaacccgcctcctcagatcctcatcaaaaacacgcctgttcctgcgaatcctccggcggagttttcagctacaaagtttgcttcattcatcacccaatactccacaggacaagtgagtgtggaaattgaatgggagctgcagaaagaaaacagcaagcgctggaatcccgaagtgcagtacacatccaattatgcaaaatctgccaacgttgattttactgtggacaacaatggactttatactgagcctcgccccattggcacccgttacctcacccgtcccctgtaa

SEQ ID NO: 5227 - protein, 736 aa, synthetic construct
  REGION 1..736: note = Description of Artificial Sequence: Synthetic polypeptide
MAADGYLPDWLEDNLSEGIREWWDLKPGAPKPKANQQKQDDGRGLVLPGYKYLGPFNGLDKGEPVNAADAAALEHDKAYDQQLKAGDNPYLRYNHADAEFQERLQEDTSFGGNLGRAVFQAKKRVLEPLGLVEEGAKTAPGKKRPVEQSPQEPDSSSGIGKTGQQPAKKRLNFGQTGDSESVPDPQPLGEPPATPAAVGPTTMASGGGAPMADNNEGADGVGNASGNWHCDSTWLGDRVITTSTRTWALPTYNNHLYKQISSASTGASNDNHYFGYSTPWGYFDFNRFHCHFSPRDWQRLINNNWGFRPKRLNFKLFNIQVKEVTTNDGVTTIANNLTSTVQVFSDSEYQLPYVLGSAHQGCLPPFPADVFMIPQYGYLTLNNGSQAVGRSSFYCLEYFPSQMLRTGNNFQFTYTFEDVPFHSSYAHSQSLDRLMNPLIDQYLYYLSRTQTTGGTANTQTLGFSQGGPNTMANQAKNWLPGPCYRQQRVSTTTGQNNNSNFTWTGASKYNLNGRESIINPGTAMASHKDDEDKFFPMSGVMIFGKESAGASNTALDNVMITDEEEIKATNPVATERFGTVAVNFQSSSTDPATGDVHAMGALPGMVWQDRDVYLQGPIWAKIPHTDGHFHPSPLMGGFGLKNPPPQILIKNTPVPANPPAEFSATKFASFITQYSTGQVSVEIEWELQKENSKRWNPEVQYTSNYAKSANVDFTVDNNGLYTEPRPIGTRYLTRPL

SEQ ID NO: 5228 - DNA, 2211 bp, synthetic construct
  misc_feature 1..2211: note = Description of Artificial Sequence: Synthetic polynucleotide
  source 1..2211: mol_type = other DNA
atggctgctgacggttatcttccagattggctcgaggacaacctttctgaaggcattcgagagtggtgggcgctgcaacctggagcccctaaacccaaggcaaatcaacaacatcaggacaacgctcggggtcttgtgcttccgggttacaaatacctcggacccggcaacggactcgacaagggggaacccgtcaacgcagcggacgcggcagccctcgagcacgacaaggcctacgaccagcagctcaaggccggtgacaacccctacctcaagtacaaccacgccgacgccgagttccaggagcggctcaaagaagatacgtcttttgggggcaacctcgggcgagcagtcttccaggccaaaaagaggcttcttgaacctcttggtctggttgaggaagcggctaagacggctcctggaaagaagaggcctgtagatcagtctcctcaggaaccggactcatcatctggtgttggcaaatcgggcaaacagcctgccagaaaaagactaaatttcggtcagactggcgactcagagtcagtcccagaccctcaacctctcggagaaccaccagcagcccccacaagtttgggatctaatacaatggcttcaggcggtggcgcaccaatggcagacaataacgagggtgccgatggagtgggtaattcctcaggaaattggcattgcgattcccaatggctgggcgacagagtcatcaccaccagcaccagaacctgggccctgcccacttacaacaaccatctctacaagcaaatctccagccaatcaggagcttcaaacgacaaccactactttggctacagcaccccttgggggtattttgactttaacagattccactgccacttctcaccacgtgactggcagcgactcattaacaacaactggggattccggcccaagaaactcagcttcaagctcttcaacatccaagttaaagaggtcacgcagaacgatggcacgacgactattgccaataaccttaccagcacggttcaagtgtttacggactcggagtatcagctcccgtacgtgctcgggtcggcgcaccaaggctgtctcccgccgtttccagcggacgtcttcatggtccctcagtatggatacctcaccctgaacaacggaagtcaagcggtgggacgctcatccttttactgcctggagtacttcccttcgcagatgctaaggactggaaataacttccaattcagctataccttcgaggatgtaccttttcacagcagctacgctcacagccagagtttggatcgcttgatgaatcctcttattgatcagtatctgtactacctgaacagaacgcaaggaacaacctctggaacaaccaaccaatcacggctgctttttagccaggctgggcctcagtctatgtctttgcaggccagaaattggctacctgggccctgctaccggcaacagagactttcaaagactgctaacgacaacaacaacagtaactttccttggacagcggccagcaaatatcatctcaatggccgcgactcgctggtgaatccaggaccagctatggccagtcacaaggacgatgaagaaaaatttttccctatgcacggcaatctaatatttggcaaagaagggacaacggcaagtaacgcagaattagataatgtaatgattacggatgaagaagagattcgtaccaccaatcctgtggcaacagagcagtatggaactgtggcaaataacttgcagagctcaaatacagctcccacgactagaactgtcaatgatcagggggccttacctggcatggtgtggcaagatcgtgacgtgtaccttcaaggacctatctgggcaaagattcctcacacggatggacactttcatccttctcctctgatgggaggctttggactgaaacatccgcctcctcaaatcatgatcaaaaatactccggtaccggcaaatcctccgacgactttcagcccggccaagtttgcttcatttatcactcagtactccactggacaggtcagcgtggaaattgagtgggagctacagaaagaaaacagcaaacgttggaatccagagattcagtacacttccaactacaacaagtctgttaatgtggactttactgtagacactaatggtgtttatagtgaacctcgccccattggcacccgttaccttacccgtcccctgtaa

SEQ ID NO: 5229 - protein, 736 aa, synthetic construct
  REGION 1..736: note = Description of Artificial Sequence: Synthetic polypeptide
MAADGYLPDWLEDNLSEGIREWWALQPGAPKPKANQQHQDNARGLVLPGYKYLGPGNGLDKGEPVNAADAAALEHDKAYDQQLKAGDNPYLKYNHADAEFQERLKEDTSFGGNLGRAVFQAKKRLLEPLGLVEEAAKTAPGKKRPVDQSPQEPDSSSGVGKSGKQPARKRLNFGQTGDSESVPDPQPLGEPPAAPTSLGSNTMASGGGAPMADNNEGADGVGNSSGNWHCDSQWLGDRVITTSTRTWALPTYNNHLYKQISSQSGASNDNHYFGYSTPWGYFDFNRFHCHFSPRDWQRLINNNWGFRPKKLSFKLFNIQVKEVTQNDGTTTIANNLTSTVQVFTDSEYQLPYVLGSAHQGCLPPFPADVFMVPQYGYLTLNNGSQAVGRSSFYCLEYFPSQMLRTGNNFQFSYTFEDVPFHSSYAHSQSLDRLMNPLIDQYLYYLNRTQGTTSGTTNQSRLLFSQAGPQSMSLQARNWLPGPCYRQQRLSKTANDNNNSNFPWTAASKYHLNGRDSLVNPGPAMASHKDDEEKFFPMHGNLIFGKEGTTASNAELDNVMITDEEEIRTTNPVATEQYGTVANNLQSSNTAPTTRTVNDQGALPGMVWQDRDVYLQGPIWAKIPHTDGHFHPSPLMGGFGLKHPPPQIMIKNTPVPANPPTTFSPAKFASFITQYSTGQVSVEIEWELQKENSKRWNPEIQYTSNYNKSVNVDFTVDTNGVYSEPRPIGTRYLTRPL

SEQ ID NO: 5230 - DNA, 2211 bp, synthetic construct
  misc_feature 1..2211: note = Description of Artificial Sequence: Synthetic polynucleotide
  source 1..2211: mol_type = other DNA
atggctgccgatggttatcttccagattggctcgaggacaaccttagtgaaggaattcgcgagtggtgggctttgaaacctggagcccctcaacccaaggcaaatcaacaacatcaagacaacgctcgaggtcttgtgcttccgggttacaaataccttggacccggcaacggactcgacaagggggagccggtcaacgcagcagacgcggcggccctcgagcacgacaaggcctacgaccagcagctcaaggccggagacaacccgtacctcaagtacaaccacgccgacgccgagttccaggagcggctcaaagaagatacgtcttttgggggcaacctcgggcgagcagtcttccaggccaaaaagaggcttcttgaacctcttggtctggttgaggaagcggctaagacggctcctggaaagaagagaccggtagagccatcaccccagcgttctccagactcctctacgggcatcggcaagaaaggccaacagcccgctaaaaagagactcaattttggtcagactggcgactcagagtcagtccccgacccacaacctctcggagaacctccagcaacccccgctgctgtgggacctactacaatggcttcaggcggtggcgcaccaatggcagacaataacgagggtgccgatggagtgggtaattcctcaggaaattggcattgcgattcccaatggctgggcgacagagtcatcaccaccagcaccagaacctgggccctgcccacttacaacaaccatctctacaagcaaatctccagccaatcaggagcttcaaacgacaaccactactttggctacagcaccccttgggggtattttgactttaacagattccactgccacttttcaccacgtgactggcaaagactcatcaacaacaactggggattccgacccaagagactcaacttcaagctcttcaacatccaagtcaaggaggtcacgacgaatgatggcgtcacgaccatcgctaataaccttaccagcacggttcaagtcttctcggactcggagtaccagttgccgtacgtcctcggctctgcgcaccagggctgcctccctccgttcccggcggacgtgttcatgattccgcagtacggctacctaacgctcaacaatggcagccaagccgtgggacgttcatccttttactgcctggaatatttcccttctcagatgctgagaacgggcaacaactttaccttcagctacacttttgaggacgttcctttccacagcagctacgctcacagccagagtctggaccgtctcatgaatcctctcatcgaccagtacctgtattacttgagcagaacaaacactccaagtggaaccaccacgcagtcaaggcttcagttttctcaggccggagcgagtgacattcgggaccagtctaggaactggcttcctggaccctgttaccgccagcagcgcgtttctaaaacaaaaacagacaacaacaacagcaattttacctggactggtgcttcaaaatataaccttaatgggcgtgaatctataatcaaccctggcactgctatggcctcacacaaagacgacgaagacaagttctttcccatgagcggtgtcatgatttttggaaaagagagcgccggagcttcaaacactgcattggacaatgtcatgattacagacgaagaggaaattaaagccactaaccctgtggccaccgaaagatttgggaccgtggcagtcaatttccagagcagcagcacagaccctgcgaccggagatgtgcatgttatgggagccttacctggaatggtgtggcaagacagagacgtatacctgcagggtcctatttgggccaaaattcctcacacggatggacactttcacccgtctcctcttatgggcggctttggactcaagaacccgcctcctcagatcctcatcaaaaacacgcctgttcctgcgaatcctccggcggagttttcagctacaaagtttgcttcattcatcacccaatactccacaggacaagtgagtgtggaaattgaatgggagctgcagaaagaaaacagcaagcgctggaatcccgaagtgcagtacacatccaattatgcaaaatctgccaacgttgattttactgtggacaacaatggactttatactgagcctcgccccattggcacccgttaccttacccgtcccctgtaa

SEQ ID NO: 5231 - protein, 736 aa, synthetic construct
  REGION 1..736: note = Description of Artificial Sequence: Synthetic polypeptide
MAADGYLPDWLEDNLSEGIREWWALKPGAPQPKANQQHQDNARGLVLPGYKYLGPGNGLDKGEPVNAADAAALEHDKAYDQQLKAGDNPYLKYNHADAEFQERLKEDTSFGGNLGRAVFQAKKRLLEPLGLVEEAAKTAPGKKRPVEPSPQRSPDSSTGIGKKGQQPAKKRLNFGQTGDSESVPDPQPLGEPPATPAAVGPTTMASGGGAPMADNNEGADGVGNSSGNWHCDSQWLGDRVITTSTRTWALPTYNNHLYKQISSQSGASNDNHYFGYSTPWGYFDFNRFHCHFSPRDWQRLINNNWGFRPKRLNFKLFNIQVKEVTTNDGVTTIANNLTSTVQVFSDSEYQLPYVLGSAHQGCLPPFPADVFMIPQYGYLTLNNGSQAVGRSSFYCLEYFPSQMLRTGNNFTFSYTFEDVPFHSSYAHSQSLDRLMNPLIDQYLYYLSRTNTPSGTTTQSRLQFSQAGASDIRDQSRNWLPGPCYRQQRVSKTKTDNNNSNFTWTGASKYNLNGRESIINPGTAMASHKDDEDKFFPMSGVMIFGKESAGASNTALDNVMITDEEEIKATNPVATERFGTVAVNFQSSSTDPATGDVHVMGALPGMVWQDRDVYLQGPIWAKIPHTDGHFHPSPLMGGFGLKNPPPQILIKNTPVPANPPAEFSATKFASFITQYSTGQVSVEIEWELQKENSKRWNPEVQYTSNYAKSANVDFTVDNNGLYTEPRPIGTRYLTRPL

SEQ ID NO: 5232 - DNA, 2211 bp, synthetic construct
  misc_feature 1..2211: note = Description of Artificial Sequence: Synthetic polynucleotide
  source 1..2211: mol_type = other DNA
atggctgccgatggttatcttccagattggctcgaggacaacctctctgagggcattcgcgagtggtgggacttgaaacctggagcccctaaacccaaggcaaatcaacaacatcaggacaacgctcgaggtcttgtgcttccgggttacaaataccttggacccggcaacggactcgacaagggggagccggtcaacgcagcagacgcggcggccctcgagcacgacaaggcctacgaccagcagctcaaggccggagacaacccgtacctcaagtacaaccacgccgacgccgagttccaggagcggctcaaagaagatacgtcttttgggggcaacctcgggcgagcagtcttccaggccaaaaagaggcttcttgaacctcttggtctggttgaggaagcggctaagacggctcctggaaagaagagaccggtagagccatcaccccagcgttctccagactcctctacgggcatcggcaagaaaggccaacagcccgctaaaaagagactcaattttggtcagactggcgactcagagtcagtccccgacccacaacctctcggagaacctccagcaacccccgctgctgtgggacctactacaatggcttcaggcggtggcgcaccaatggcagacaataacgagggtgccgatggagtgggtaattcctcaggaaattggcattgcgattcccaatggctgggcgacagagtcatcaccaccagcaccagaacctgggccctgcccacttacaacaaccatctctacaagcaaatctccagccaatcaggagcttcaaacgacaaccactactttggctacagcaccccttgggggtattttgactttaacagattccactgccacttttcaccacgtgactggcaaagactcatcaacaacaactggggattccgacccaagagactcaacttcaagctcttcaacatccaagtcaaggaggtcacgacgaatgatggcgtcacgaccatcgctaataaccttaccagcacggttcaagtcttctcggactcggagtaccagttgccgtacgtcctcggctctgcgcaccagggctgcctccctccgttcccggcggacgtgttcatgattccgcagtacggctacctaacgctcaacaatggcagccaagccgtgggacgttcatccttttactgcctggaatatttcccttctcagatgctgagaacgggcaacaactttaccttcagctacacttttgaggacgttcctttccacagcagctacgctcacagccagagtctggaccgtctcatgaatcccctcatcgaccagtacctgtattacttgagcagaacaaacactccaagtggaaccaccacgcagtcaaggcttcagttttctcaggccggagcgagtgacattcgggaccagtctaggaactggcttcctggaccctgttaccggcagcagcgcgtttctaaaacaaaaacagacaacaacaacagcaactttacctggactggtgcttcaaaatataaccttaatgggcgtgaatctataatcaaccctggcactgctatggcctcacacaaagacgacgaagacaagttctttcccatgagcggtgtcatgatttttggaaaggagagcgccggagcttcaaacactgcattggacaatgtcatgatcacagacgaagaggaaatcaaagccactaaccccgtggccaccgaaagatttgggactgtggcagtcaatctccagagcagcagcacagaccctgcgaccggagatgtgcatgttatgggagccttacctggaatggtgtggcaagacagagacgtgtacctgcagggtcctatttgggccaaaattcctcacacggatggacactttcacccgtctcctctcatgggcggctttggacttaagcacccgcctcctcagatcctcatcaaaaacacgcctgttcctgcgaatcctccggcagagttttcggctacaaagtttgcttcattcatcacccagtattccacaggacaagtgagtgtggaaattgaatgggagctgcagaaagaaaacagcaagcgctggaatcccgaagtgcagtacacatccaattatgcaaaatctgccaacgttgattttactgtggacaacaatggactttatactgagcctcgccccattggcacccgttacctcacccgtcccctgtaa

SEQ ID NO: 5233 - protein, 736 aa, synthetic construct
  REGION 1..736: note = Description of Artificial Sequence: Synthetic polypeptide
MAADGYLPDWLEDNLSEGIREWWDLKPGAPKPKANQQHQDNARGLVLPGYKYLGPGNGLDKGEPVNAADAAALEHDKAYDQQLKAGDNPYLKYNHADAEFQERLKEDTSFGGNLGRAVFQAKKRLLEPLGLVEEAAKTAPGKKRPVEPSPQRSPDSSTGIGKKGQQPAKKRLNFGQTGDSESVPDPQPLGEPPATPAAVGPTTMASGGGAPMADNNEGADGVGNSSGNWHCDSQWLGDRVITTSTRTWALPTYNNHLYKQISSQSGASNDNHYFGYSTPWGYFDFNRFHCHFSPRDWQRLINNNWGFRPKRLNFKLFNIQVKEVTTNDGVTTIANNLTSTVQVFSDSEYQLPYVLGSAHQGCLPPFPADVFMIPQYGYLTLNNGSQAVGRSSFYCLEYFPSQMLRTGNNFTFSYTFEDVPFHSSYAHSQSLDRLMNPLIDQYLYYLSRTNTPSGTTTQSRLQFSQAGASDIRDQSRNWLPGPCYRQQRVSKTKTDNNNSNFTWTGASKYNLNGRESIINPGTAMASHKDDEDKFFPMSGVMIFGKESAGASNTALDNVMITDEEEIKATNPVATERFGTVAVNLQSSSTDPATGDVHVMGALPGMVWQDRDVYLQGPIWAKIPHTDGHFHPSPLMGGFGLKHPPPQILIKNTPVPANPPAEFSATKFASFITQYSTGQVSVEIEWELQKENSKRWNPEVQYTSNYAKSANVDFTVDNNGLYTEPRPIGTRYLTRPL

SEQ ID NO: 5234 - DNA, 2214 bp, synthetic construct
  misc_feature 1..2214: note = Description of Artificial Sequence: Synthetic polynucleotide
  source 1..2214: mol_type = other DNA
atggctgccgatggttatcttccagattggctcgaggacaaccttagtgaaggaattcgcgagtggtgggctttgaaacctggagcccctcaacccaaggcaaatcaacaacatcaagacaacgctcgaggtcttgtgcttccgggttacaaataccttggacccggcaacggactcgacaagggggagccggtcaacgcagcagacgcggcggccctcgagcacgacaaggcctacgaccagcagctgcaggcgggtgacaatccgtacctgcggtataaccacgccgacgccgagtttcaggagcgtctgcaagaagatacgtcttttgggggcaaccttggcagagcagtcttccaggccaaaaagaggatccttgagcctcttggtctggttgaggaagcagctaaaacggctcctggaaagaagaggcctgtagatcagtctcctcaggaaccggactcatcatctggtgttggcaaatcgggcaaacagcctgccagaaaaagactaaatttcggtcagactggcgactcagagtcagtcccagaccctcaacctctcggagaaccaccagcagcccccacaagtttgggatctaatacaatggcttcaggcggtggcgcaccaatggcagacaataacgagggtgccgatggggtgggtagttcctcgggaaattggcattgcgattcccaatgactgggggacagagtcatcaccaccagcacccgaacctgggccctgcccacctacaacaatcacctctacaagcaaatctccaacgggacatcgggaggagccaccaacgacaacacctacttcggctacagcaccccctgggggtattttgactttaacagattccactgccacttttcaccacgtgactggcagcgactcatcaacaacaactggggattccggcccaagagactcagcttcaagctcttcaacatccaggtcaaggaggtcacgcagaatgaaggcaccaagaccatcgccaataacctcaccagcaccatccaggtgtttacggactcggagtaccagctgccgtacgttctcggctctgcgcaccagggctgcctccctccgttcccggcggacgtgttcatgattccgcaatacggctacctgacgctcaacaatggcagccaagccgtgggacgttcatccttttactgcctggaatatttcccttctcagatgctgagaacgggcaacaactttaccttcagctacacctttgaggaagtgcctttccacagcagctacgcgcacagccagagcttggaccggctgatgaatcctctgattgaccagtacctgtactacttgtctcggactcaaacaacaggaggcacggcaaatacgcagactctgggcttcagccaaggtgggcctaatacaatggccaatcaggcaaagaactggctgccaggaccctgttaccgccaacaacgcgtctcaacgacaaccgggcaaaacaacaatagcaactttgcctggactgctgggaccaaataccatctgaatggaagaaattcattggctaatcctggcatcgctatggcaacacacaaagacgacgaggagcgtttttttcccagtaacgggatcctgatttttggcaaacaaaatgctgccagagacaatgcggattacagcgatgtcatgctcaccagcgaggaagaaatcaaaaccactaaccctgtggctacagaggaatacggtatcgtggcagataacttgcagcagcaaaacacggctcctcaaattggaactgtcaacagccagggggccttacccggtatggtctggcagaaccgggacgtgtacctgcagggtcccatctgggccaagattcctcacacggacggcaacttccacccgtctccgctgatgggcggctttggcctgaaacatcctccgcctcagatcctgatcaagaacacgcctgtacctgcggatcctccgaccaccttcaaccagtcaaagctgaactctttcatcacgcaatacagcaccggacaggtcagcgtggagatcgagtgggagctgcagaaggaaaacagcaagcgctggaacccggagatccagtacacttccaactattacaagtctaataatgttgaatttgctgttaatactgaaggtgtatatagtgaaccccgccccattggcaccagatacctgactcgtaatctgtaa

SEQ ID NO: 5235 - protein, 736 aa, synthetic construct
  REGION 1..736: note = Description of Artificial Sequence: Synthetic polypeptide
MAADGYLPDWLEDNLSEGIREWWALKPGAPQPKANQQHQDNARGLVLPGYKYLGPGNGLDKGEPVNAADAAALEHDKAYDQQLQAGDNPYLRYNHADAEFQERLQEDTSFGGNLGRAVFQAKKRILEPLGLVEEAAKTAPGKKRPVDQSPQEPDSSSGVGKSGKQPARKRLNFGQTGDSESVPDPQPLGEPPAAPTSLGSNTMASGGGAPMADNNEGADGVGSSSGNWHCDSQLGDRVITTSTRTWALPTYNNHLYKQISNGTSGGATNDNTYFGYSTPWGYFDFNRFHCHFSPRDWQRLINNNWGFRPKRLSFKLFNIQVKEVTQNEGTKTIANNLTSTIQVFTDSEYQLPYVLGSAHQGCLPPFPADVFMIPQYGYLTLNNGSQAVGRSSFYCLEYFPSQMLRTGNNFTFSYTFEEVPFHSSYAHSQSLDRLMNPLIDQYLYYLSRTQTTGGTANTQTLGFSQGGPNTMANQAKNWLPGPCYRQQRVSTTTGQNNNSNFAWTAGTKYHLNGRNSLANPGIAMATHKDDEERFFPSNGILIFGKQNAARDNADYSDVMLTSEEEIKTTNPVATEEYGIVADNLQQQNTAPQIGTVNSQGALPGMVWQNRDVYLQGPIWAKIPHTDGNFHPSPLMGGFGLKHPPPQILIKNTPVPADPPTTFNQSKLNSFITQYSTGQVSVEIEWELQKENSKRWNPEIQYTSNYYKSNNVEFAVNTEGVYSEPRPIGTRYLTRNL

SEQ ID NO: 5236 - DNA, 2214 bp, synthetic construct
  misc_feature 1..2214: note = Description of Artificial Sequence: Synthetic polynucleotide
  source 1..2214: mol_type = other DNA
atggctgccgatggttatcttccagattggctcgaggacaaccttagtgaaggaattcgcgagtggtgggctttgaaacctggagcccctcaacccaaggcaaatcaacaacatcaagacaacgctcgaggtcttgtgcttccgggttacaaataccttggacccggcaacggactcgacaagggggagccggtcaacgcagcagacgcggcggccctcgagcacgacaaggcctacgaccagcagctgcaggcgggtgacaatccgtacctgcggtataaccacgccgacgccgagtttcaggagcgtctgcaagaagatacgtcttttgggggcaaccttggcagagcagtcttccaggccaaaaagaggatccttgagcctcttggtctggttgaggaagcagctaaaacggctcctggaaagaagaggcctgtagatcagtctcctcaggaaccggactcatcatctggtgttggcaaatcgggcaaacagcctgccagaaaaagactaaatttcggtcagactggcgactcagagtcagtcccagaccctcaacctctcggagaaccaccagcagcccccacaagtttgggatctaatacaatggcttcaggcggtggcgcaccaatggcagacaataacgagggtgccgatggggtgggtagttcctcgggaaattggcattgcgattcccaatggctgggggacagagtcatcaccaccagcacccgaacctgggccctgcccacctacaacaatcacctctacaagcaaatctccaacgggacatcgggaggagccaccaacgacaacacctacttcggctacagcaccccctgggggtattttgactttaacagattccactgccacttttcaccacgtgactggcagcgactcatcaacaacaactggggattccggcccaagagactcagcttcaagctcttcaacatccaggtcaaggaggtcacgcagaatgaaggcaccaagaccatcgccaataacctcaccagcaccatccaggtgtttacggactcggagtaccagctgccgtacgttctcggctctgcgcaccagggctgcctccctccgttcccggcggacgtgttcatgattccgcaatacggctacctgacgctcaacaatggcagccaagccgtgggacgttcatccttttactgcctggaatatttcccttctcagatgctgagaacgggcaacaactttaccttcagctacacctttgaggaagtgccttttcacagcagctacgcgcacagccagagcttggaccggctgatgaatcctctgattgaccagtacctgtactacttgtctcggactcaaacaacaggaggcacggcaaatacgcagactctgggcttcagccaaggtgggcctaatacaatggccaatcaggcaaagaactggctgccaggaccctgttaccgccaacaacgcgtctcaacgacaaccgggcaaaacaacaatagcaactttgcctggactgctgggaccaaataccatctgaatggaagaaattcattggctaatcctggcatcgctatggcaacacacaaagacgacgaggagcgtttttttcccagtaacgggatcctgatttttggcaaacaaaatgctgccagagacaatgcggattacagcgatgtcatgctcaccagcgaggaagaaatcaaaaccactaaccctgtggctacagaggaatacggtatcgtggcagataacttgcagcagcaaaacacggctcctcaaattggaactgtcaacagccagggggccttacccggtatggtctggcagaaccgggacgtgtacctgcagggtcccatctgggccaagattcctcacacggacggcaacttccacccgtctccgctgatgggcggctttggcctgaaacatcctccgcctcagatcctgatcaagaacacgcctgtacctgcggatcctccgaccaccttcaaccagtcaaagctgaactctttcatcacgcaatacagcaccggacaggtcagcgtggagatcgagtgggagctgcagaaggaaaacagcaagcgctggaacccggagatccagtacacttccaactattacaagtctaataatgttgaatttgctgttaatactgaaggtgtatatagtgaaccccgccccattggcaccagatacctgactcgtaatctgtaa

SEQ ID NO: 5237 - protein, 737 aa, synthetic construct; identical to SEQ ID NO: 5225
  REGION 1..737: note = Description of Artificial Sequence: Synthetic polypeptide

SEQ ID NO: 5238 - DNA, 2211 bp, synthetic construct
  misc_feature 1..2211: note = Description of Artificial Sequence: Synthetic polynucleotide
  source 1..2211: mol_type = other DNA
atggctgccgatggttatcttccagattggctcgaggacaacctctctgagggcattcgcgagtggtgggacttgaaacctggagcccctaaacccaaggcaaatcaacaacatcaggacaacgctcgaggtcttgtgcttccgggttacaaataccttggacccggcaacggactcgacaagggggagccggtcaacgcagcagacgcggcggccctcgagcacgacaaggcctacgaccagcagctcaaggccggagacaacccgtacctcaagtacaaccacgccgacgccgagttccaggagcggctcaaagaagatacgtcttttgggggcaacctcgggcgagcagtcttccaggccaaaaagaggcttcttgaacctcttggtctggttgaggaagcggctaagacggctcctggaaagaagagaccggtagagccatcaccccagcgttctccagactcctctacgggcatcggcaagaaaggccaacagcccgctaaaaagagactcaattttggtcagactggcgactcagagtcagtccccgacccacaacctctcggagaacctccagcaacccccgctgctgtgggacctactacaatggcttcaggcggtggcgcaccaatggcagacaataacgagggtgccgatggagtgggtaattcctcaggaaattggcattgcgattcccaatggctgggcgacagagtcatcaccaccagcaccagaacctgggccctgcccacttacaacaaccatctctacaagcaaatctccagccaatcaggagcttcaaacgacaaccactactttggctacagcaccccttgggggtattttgactttaacagattccactgccacttttcaccacgtgactggcaaagactcatcaacaacaactggggattccgacccaagagactcaacttcaagctcttcaacatccaagtcaaggaggtcacgacgaatgatggcgtcacgaccatcgctaataaccttaccagcacggttcaagtcttctcggactcggagtaccagttgccgtacgtcctcggctctgcgcaccagggctgcctccctccgttcccggcggacgtgttcatgattccgcagtacggctacctaacgctcaacaatggcagccaagccgtgggacgttcatccttttactgcctggaatatttcccttctcagatgctgagaacgggcaacaactttaccttcagctacacttttgaggacgttcctttccacagcagctacgctcacagccagagtctggaccgtctcatgaatcctctcatcgaccagtacctgtattacttgagcagaacaaacactccaagtggaaccaccacgcagtcaaggcttcagttttctcaggccggagcgagtgacattcgggaccagtctaggaactggcttcctggaccctgttaccgccagcagcgcgtttctaaaacaaaaacagacaacaacaacagcaattttacctggactggtgcttcaaaatataaccttaatgggcgtgaatctataatcaaccctggcactgctatggcctcacacaaagacgacgaagacaagttctttcccatgagcggtgtcatgatttttggaaaagagagcgccggagcttcaaacactgcattggacaatgtcatgattacagacgaagaggaaattaaagccactaaccctgtggccaccgaaagatttgggaccgtggcagtcaatttccagagcagcagcacagaccctgcgaccggagatgtgcatgctatgggagcattacctggcatggtgtggcaagatagagacgtgtacctgcagggtcccatttgggccaaaattcctcacacagatggacactttcacccgtctcctcttatgggcggctttggactcaagaacccgcctcctcagatcctcatcaaaaacacgcctgttcctgcgaatcctccggcggagttttcagctacaaagtttgcttcattcatcacccaatactccacaggacaagtgagtgtggaaattgaatgggagctgcagaaagaaaacagcaagcgctggaatcccgaagtgcagtacacatccaattatgcaaaatctgccaacgttgattttactgtggacaacaatggactttatactgagcctcgccccattggcacccgttaccttacccgtcccctgtaa

SEQ ID NO: 5239 - protein, 736 aa, synthetic construct
  REGION 1..736: note = Description of Artificial Sequence: Synthetic polypeptide
MAADGYLPDWLEDNLSEGIREWWDLKPGAPKPKANQQHQDNARGLVLPGYKYLGPGNGLDKGEPVNAADAAALEHDKAYDQQLKAGDNPYLKYNHADAEFQERLKEDTSFGGNLGRAVFQAKKRLLEPLGLVEEAAKTAPGKKRPVEPSPQRSPDSSTGIGKKGQQPAKKRLNFGQTGDSESVPDPQPLGEPPATPAAVGPTTMASGGGAPMADNNEGADGVGNSSGNWHCDSQWLGDRVITTSTRTWALPTYNNHLYKQISSQSGASNDNHYFGYSTPWGYFDFNRFHCHFSPRDWQRLINNNWGFRPKRLNFKLFNIQVKEVTTNDGVTTIANNLTSTVQVFSDSEYQLPYVLGSAHQGCLPPFPADVFMIPQYGYLTLNNGSQAVGRSSFYCLEYFPSQMLRTGNNFTFSYTFEDVPFHSSYAHSQSLDRLMNPLIDQYLYYLSRTNTPSGTTTQSRLQFSQAGASDIRDQSRNWLPGPCYRQQRVSKTKTDNNNSNFTWTGASKYNLNGRESIINPGTAMASHKDDEDKFFPMSGVMIFGKESAGASNTALDNVMITDEEEIKATNPVATERFGTVAVNFQSSSTDPATGDVHAMGALPGMVWQDRDVYLQGPIWAKIPHTDGHFHPSPLMGGFGLKNPPPQILIKNTPVPANPPAEFSATKFASFITQYSTGQVSVEIEWELQKENSKRWNPEVQYTSNYAKSANVDFTVDNNGLYTEPRPIGTRYLTRPL

SEQ ID NO: 5240 - DNA, 2211 bp, synthetic construct
  misc_feature 1..2211: note = Description of Artificial Sequence: Synthetic polynucleotide
  source 1..2211: mol_type = other DNA
atggctgccgatggttatcttccagattggctcgaggacaaccttagtgaaggaattcgcgagtggtgggcgctgaaacctggagccccgaagcccaaagccaaccagcaaaagcaggacgacggccggggtctggtgcttccgggttacaaatacctcggacccggtaacggactcgacaaaggagagccggtcaacgaggcggacgcggcagccctcgagcacgacaaggcctacgaccagcagctcaaagcgggtgacaatccgtacctgcggtataaccacgccgacgccgagtttcaggagcgtctgcaagaagatacgtcttttgggggcaacctcgggcgagcagtcttccaggccaagaagcgggttctcgaacctctcggtctggttgaggaaggcgctaagacggctcccggaaagaaacgtccggtagagcagtcgccacaagagccagactcctctacgggcatcggcaagaaaggccaacagcccgccagaaaaagactcaatttcggtcagactggcgactcagagtcagttccagaccctcaacctctcggagaacctccagcagcgccctctggtgtgggacctactacaatggcttcaggcggtggcgcaccaatggcagacaataacgaaggcgccgacggagtgggtaatgcctcaggaaattggcattgcgattccacatggctgggcgacagagtcatcaccaccagcacccgaacatgggccttgcccacctataacaaccacctctacaagcaaatctccagtgcttcaacgggggccagcaacgacaacacctacttcggctacagcaccccctgggggtattttgatttcaacagattccactgccatttctcaccacgtgactggcagcgactcatcaacaacaattggggattccggcccaagagactcaacttcaaactcttcaacatccaagtcaaggaggtcacgacgaatgatggcgtcacgaccatcgctaataaccttaccagcacggttcaagtcttctcggactcggagtaccagttgccgtacgtcctcggctctgcgcaccagggctgcctccctccgttcccggcggacgtgttcatgattccgcagtacggctacctaacgctcaacaatggcagccaggcagtgggacggtcatccttttactgcctggaatatttcccatcgcagatgctgagaacgggcaataactttaccttcagctacaccttcgaggacgtgcctttccacagcagctacgcgcacagccagagcctggaccggctgatgaatcctctcatcgaccagtacctgtattacctgaacagaactcagaatcagtccggaagtgcccaaaacaaggacttgctgtttagccgggggtctccagctggcatgtctgttcagcccaaaaactggctacctggaccctgttatcggcagcagcgcgtttctaaaacaaaaacagacaacaacaacagcaattttacctggactggtgcttcaaaatataacctcaatgggcgtgaatccatcatcaaccctggcactgctatggcctcacacaaagacgacgaagacaagttctttcccatgagcggtgtcatgatttttggaaaagagagcgccggagcttcaaacactgcattggacaatgtcatgattacagacgaagaggaaattaaagccactaaccctgtggccaccgaaagatttgggaccgtggcagtcaatttccagagcagcagcacagaccctgcgaccggagatgtgcatgttatgggagccttacctggaatggtgtggcaagacagagacgtatacctgcagggtcctatttgggccaaaattcctcacacagatggacactttcacccgtctcctcttatgggcggctttggactcaagaacccgcctcctcagatcctcatcaaaaacacgcctgttcctgcgaatcctccggcagagttttcggctacaaagtttgcttcattcatcacccagtattccacaggacaagtgagcgtggagattgaatgggagctgcagaaagaaaacagcaaacgctggaatcccgaagtgcagtatacatctaactatgcaaaatctgccaacgttgatttcactgtggacaacaatggactttatactgagcctcgccccattggcacccgttacctcacccgtcccctgtaa

SEQ ID NO: 5241 - protein, 736 aa, synthetic construct
  REGION 1..736: note = Description of Artificial Sequence: Synthetic polypeptide
MAADGYLPDWLEDNLSEGIREWWALKPGAPKPKANQQKQDDGRGLVLPGYKYLGPGNGLDKGEPVNEADAAALEHDKAYDQQLKAGDNPYLRYNHADAEFQERLQEDTSFGGNLGRAVFQAKKRVLEPLGLVEEGAKTAPGKKRPVEQSPQEPDSSTGIGKKGQQPARKRLNFGQTGDSESVPDPQPLGEPPAAPSGVGPTTMASGGGAPMADNNEGADGVGNASGNWHCDSTWLGDRVITTSTRTWALPTYNNHLYKQISSASTGASNDNTYFGYSTPWGYFDFNRFHCHFSPRDWQRLINNNWGFRPKRLNFKLFNIQVKEVTTNDGVTTIANNLTSTVQVFSDSEYQLPYVLGSAHQGCLPPFPADVFMIPQYGYLTLNNGSQAVGRSSFYCLEYFPSQMLRTGNNFTFSYTFEDVPFHSSYAHSQSLDRLMNPLIDQYLYYLNRTQNQSGSAQNKDLLFSRGSPAGMSVQPKNWLPGPCYRQQRVSKTKTDNNNSNFTWTGASKYNLNGRESIINPGTAMASHKDDEDKFFPMSGVMIFGKESAGASNTALDNVMITDEEEIKATNPVATERFGTVAVNFQSSSTDPATGDVHVMGALPGMVWQDRDVYLQGPIWAKIPHTDGHFHPSPLMGGFGLKNPPPQILIKNTPVPANPPAEFSATKFASFITQYSTGQVSVEIEWELQKENSKRWNPEVQYTSNYAKSANVDFTVDNNGLYTEPRPIGTRYLTRPL

SEQ ID NO: 5242 - DNA, 2205 bp, synthetic construct
  misc_feature 1..2205: note = Description of Artificial Sequence: Synthetic polynucleotide
  source 1..2205: mol_type = other DNA
atggctgctgacggttatcttccagattggctcgaggacaacctttctgaaggcattcgtgagtggtgggctctgaaacctggagtccctcaacccaaagcgaaccaacaacaccaggacaaccgtcggggtcttgtgcttccgggttacaaatacctcggacccggtaacggactcgacaaaggagagccggtcaacgaggcggacgcggcagccctcgaacacgacaaggcctacgaccagcagctcaaggccggagacaacccgtacctcaagtacaaccacgccgacgccgagttccaggagcggctcaaagaagatacgtcttttgggggcaacctcgggcgagcagtcttccaggccaaaaagaggcttcttgaacctcttggtctggttgaggaagcggctaagacggctcctggaaagaagaggcctgtagagcagtctcctcaggaaccggactcctccgcgggtattggcaaatcgggtgcacagcccgctaaaaagagactcaatttcggtcagactggcgacacagagtcagtcccagaccctcaaccaatcggagaacctcccgcagccccctcaggtgtgggatctcttacaatggcttcaggtggtggcgcaccagtggcagacaataacgaaggtgccgatggagtgggtagttcctcgggaaattggcattgcgattcccaatggctgggggacagagtcatcaccaccagcacccgaacctgggccctgcccacctacaacaaccacctctacaaacaaatttccagccaatcaggagcctcgaacgacaatcactactttggctacagcaccccttgggggtattttgacttcaacagattccactgccacttttcaccacgtgactggcagcgactcatcaacaacaactggggattccggcccaagagactcagcttcaagctcttcaacatccaggtcaaagaggttacggacaacaatggagtcaagaccatcgccaataaccttaccagcacggtccaggtcttcacggactcagactatcagctcccgtacgtgctcgggtcggctcacgagggctgcctcccgccgttcccagcggacgttttcatgattcctcagtacgggtatctgacgcttaatgatggaagccaggccgtgggtcgttcgtccttttactgcctggaatatttcccgtcgcaaatgctaagaacgggtaacaacttccagttcagctacgagtttgagaacgtacctttccatagcagctacgctcacagccaaagcctggaccgactaatgaatccactcatcgaccaatacttgtactatctctcaaagactattaacggttctggacagaatcaacaaacgctaaaattcagtgtggccggacccagcaacatggctgtccagggaagaaactacatacctggacccagctaccgacaacaacgtgtctcaaccactgtgactcaaaacaacaacagcgaatttgcttggcctggagcttcttcttgggctctcaatggacgtaatagcttgatgaatcctggacctgctatggccagccacaaagaaggagaggaccgtttctttcctttgtctggatctttaatttttggcaaacaaggaactggaagagacaacgtggatgcggacaaagtcatgataaccaacgaagaagaaattaaaactactaacccggtagcaacggagtcctatggacaagtggccacaaaccaccagagtgcccaagcacaggcgcagaccggctgggttcaaaaccaaggaatacttccgggtatggtttggcaggacagagatgtgtacctgcaaggacccatctgggccaagattcctcacacggacggcaacttccacccgtctccgctgatgggcggctttggcctgaaacatcctccgcctcagatcctgatcaagaacacgcctgtacctgcggatcctccgaccaccttcaaccagtcaaagctgaactctttcatcacgcaatacagcaccggacaggtcagcgtggaaattgaatgggagctgcagaaggaaaacagcaagcgctggaatcccgaagtgcagtatacatctaactatgcaaaatctgccaacgttgatttcactgtggacaacaatggactttatactgagcctcgccccattggcacccgttacctcacccgtcccctgtaa

SEQ ID NO: 5243 - protein, 734 aa, synthetic construct
  REGION 1..734: note = Description of Artificial Sequence: Synthetic polypeptide
MAADGYLPDWLEDNLSEGIREWWALKPGVPQPKANQQHQDNRRGLVLPGYKYLGPGNGLDKGEPVNEADAAALEHDKAYDQQLKAGDNPYLKYNHADAEFQERLKEDTSFGGNLGRAVFQAKKRLLEPLGLVEEAAKTAPGKKRPVEQSPQEPDSSAGIGKSGAQPAKKRLNFGQTGDTESVPDPQPIGEPPAAPSGVGSLTMASGGGAPVADNNEGADGVGSSSGNWHCDSQWLGDRVITTSTRTWALPTYNNHLYKQISSQSGASNDNHYFGYSTPWGYFDFNRFHCHFSPRDWQRLINNNWGFRPKRLSFKLFNIQVKEVTDNNGVKTIANNLTSTVQVFTDSDYQLPYVLGSAHEGCLPPFPADVFMIPQYGYLTLNDGSQAVGRSSFYCLEYFPSQMLRTGNNFQFSYEFENVPFHSSYAHSQSLDRLMNPLIDQYLYYLSKTINGSGQNQQTLKFSVAGPSNMAVQGRNYIPGPSYRQQRVSTTVTQNNNSEFAWPGASSWALNGRNSLMNPGPAMASHKEGEDRFFPLSGSLIFGKQGTGRDNVDADKVMITNEEEIKTTNPVATESYGQVATNHQSAQAQAQTGWVQNQGILPGMVWQDRDVYLQGPIWAKIPHTDGNFHPSPLMGGFGLKHPPPQILIKNTPVPADPPTTFNQSKLNSFITQYSTGQVSVEIEWELQKENSKRWNPEVQYTSNYAKSANVDFTVDNNGLYTEPRPIGTRYLTRPL

SEQ ID NO: 5244 - DNA, 2211 bp, synthetic construct
  misc_feature 1..2211: note = Description of Artificial Sequence: Synthetic polynucleotide
  source 1..2211: mol_type = other DNA
atggctgccgatggttatcttccagattggctcgaggacaacctctctgagggcattcgcgagtggtgggcgctgaaacctggagccccgaagcccaaagccaaccagcaaaagcaggacgacggccggggtctggtgcttcctggctacaagtacctcggacccttcaacggactcgacaagggggagcccgtcaacgcggcggacgcagcggccctcgagcacgacaaggcctacgaccagcagctgcaggcgggtgacaatccgtacctgcggtataaccacgccgacgccgagtttcaggagcgtctgcaagaagatacgtcttttgggggcaacctcgggcgagcagtcttccaggccaagaagtgggttctcgaacctctcggtctggttgaggaaggcgctaagacggctcctggaaagaaacgtccggtagagcagtcgccacaagagccagactcctcctcgggcatcggcaagacaggccagcagcccgctaaaaagagactcaattttggtcagactggcgactcagagtcagtccccgacccacaacctctcggagaacctccagcaacccccgctgctgtgggacctactacaatggcttcaggcggtggcgcaccaatggcagacaataacgaaggcgccgacggagtgggtaatgcctcaggaaattggcattgcgattccacatggctgggcgacagagtcatcaccaccagcacccgcacctgggccttgcccacctacaataaccacctctacaagcaaatctccagtgcttcaacgggggccagcaacgacaaccactacttcggctacagcaccccctgggggtattttgatttcaacagattccactgccatttctcaccacgtgactggcagcgactcatcaacaacaattggggattccggcccaagagactcaacttcaagctcttcaacatccaagtcaaggaggtcacgacgaatgatggcgtcacaaccatcgctaataaccttaccagcacggttcaagtcttctcggactcggagtaccagcttccgtacgtcctcggctctgcgcaccagggctgcctccctccgttcccggcggacgtgttcatgattccgcaatacggctacctgacgctcaacaatggcagccaagccgtgggacgttcatccttttactgcctggaatatttcccttctcagatgctgagaacgggcaacaactttaccttcagctacacctttgaggaagtgcctttccacagcagctacgcgcacagccagagcctggaccggctgatgaatcctctcatcgaccaatacctgtattacctgaacagaactcaaaatcagtccggaagtgcccaaaacaaggacttgctgtttagccgtgggtctccagctggcatgtctgttcagcccaaaaactggctacctggaccctgttatcggcagcagcgcgtttctaaaacaaaaacagacaacaacaacagcaattttacctggactggtgcttcaaaatataacctcaatgggcgtgaatccatcatcaaccctggcactgctatggcctcacacaaagacgacgaagacaagttctttcccatgagcggtgtcatgatttttggaaaggagagcgccggagcttcaaacactgcattggacaatgtcatgatcaccgacgaagaggaaatcaaagccactaaccccgtggccaccgaaagatttgggactgtggcagtcaatctccagagcagcagcacagaccctgcgaccggagatgtgcatgttatgggagccttacctggcatggtgtggcaagatagagacgtgtacctgcagggtcccatttgggccaaaattcctcacacagatggacactttcacccgtctcctcttatgggcggctttggactcaagaacccgcctcctcagatcctcatcaaaaacacgcctgttcctgcgaatcctccggcggagttttcagctacaaagtttgcttcattcatcacccaatactccacaggacaagtgagtgtggaaattgaatgggagctgcagaaagaaaacagcaagcgctggaatcccgaagtgcagtacacatccaattatgcaaaatctgccaacgttgattttactgtggacaacaatggactttatactgagcctcgccccattggcacccgttacctcacccgtcccctgtaa

SEQ ID NO: 5245 - protein, 736 aa, synthetic construct
  REGION 1..736: note = Description of Artificial Sequence: Synthetic polypeptide
MAADGYLPDWLEDNLSEGIREWWALKPGAPKPKANQQKQDDGRGLVLPGYKYLGPFNGLDKGEPVNAADAAALEHDKAYDQQLQAGDNPYLRYNHADAEFQERLQEDTSFGGNLGRAVFQAKKWVLEPLGLVEEGAKTAPGKKRPVEQSPQEPDSSSGIGKTGQQPAKKRLNFGQTGDSESVPDPQPLGEPPATPAAVGPTTMASGGGAPMADNNEGADGVGNASGNWHCDSTWLGDRVITTSTRTWALPTYNNHLYKQISSASTGASNDNHYFGYSTPWGYFDFNRFHCHFSPRDWQRLINNNWGFRPKRLNFKLFNIQVKEVTTNDGVTTIANNLTSTVQVFSDSEYQLPYVLGSAHQGCLPPFPADVFMIPQYGYLTLNNGSQAVGRSSFYCLEYFPSQMLRTGNNFTFSYTFEEVPFHSSYAHSQSLDRLMNPLIDQYLYYLNRTQNQSGSAQNKDLLFSRGSPAGMSVQPKNWLPGPCYRQQRVSKTKTDNNNSNFTWTGASKYNLNGRESIINPGTAMASHKDDEDKFFPMSGVMIFGKESAGASNTALDNVMITDEEEIKATNPVATERFGTVAVNLQSSSTDPATGDVHVMGALPGMVWQDRDVYLQGPIWAKIPHTDGHFHPSPLMGGFGLKNPPPQILIKNTPVPANPPAEFSATKFASFITQYSTGQVSVEIEWELQKENSKRWNPEVQYTSNYAKSANVDFTVDNNGLYTEPRPIGTRYLTRPL

SEQ ID NO: 5246 - DNA, 2214 bp, synthetic construct
  misc_feature 1..2214: note = Description of Artificial Sequence: Synthetic polynucleotide
  source 1..2214: mol_type = other DNA
atggctgccgatggttatcttccagattggctcgaggacaaccttagtgaaggaattcgcgagtggtgggctttgaaacctggagcccctcaacccaaggcaaatcaacaacatcaagacaacgctcgaggtcttgtgcttccgggttacaaataccttggacccggcaacggactcgacaagggggagccggtcaacgcagcagacgcggcggccctcgagcacgacaaggcctacgaccagcagctgcaggcgggtgacaatccgtacctgcggtataaccacgccgacgccgagtttcaggagcgtctgcaagaagatacgtcttttgggggcaaccttggcagagcagtcttccaggccaaaaagaggatccttgagcctcttggtctggttgaggaagcagctaaaacggctcctggaaagaagaggcctgtagatcagtctcctcaggaaccggactcatcatctggtgttggcaaatcgggcaaacagcctgccagaaaaagactaaatttcggtcagactggcgactcagagtcagtcccagaccctcaacctctcggagaaccaccagcagcccccacaagtttgggatctaatacaatggcttcaggcggtggcgcaccaatggcagacaataacgagggtgccgatggggtgggtagttcctcgggaaattggcattgcgattcccaatggctgggggacagagtcatcaccaccagcacccgaacctgggccctgcccacctacaacaatcacctctacaagcaaatctccaacgggacatcgggaggagccaccaacgacaacacctacttcggctacagcaccccctgggggtattttgactttaacagattccactgccacttttcaccacgtgactggcagcgactcatcaacaacaactggggattccggcccaagagactcagcttcaagctcttcaacatccaggtcaaggaggtcacgcagaatgaaggcaccaagaccatcgccaataacctcaccagcaccatccaggtgtttacggactcggagtaccagctgccgtacgttctcggctcggcgcaccagggctgcctccctccgttcccggcggacgtcttcatggtgccacagtatggatacctgacgctcaacaatggcagccaagccgtgggacgttcatccttttactgcctggaatatttcccttctcagatgctgagaacgggcaacaactttaccttcagctacacctttgaggaagtgcctttccacagcagctacgcgcacagccagagcttggaccggctgatgaatcctctgattgaccagtacctgtactacttgtctcggactcaaacaacaggaggcacggcaaatacgcagactctgggcttcagccaaggtgggcctaatacaatggccaatcaggcaaagaactggctgccaggaccctgttaccgccaacaacgcgtctcaacgacaaccgggcaaaacaacaatagcaactttgcctggactgctgggaccaaataccatctgaatggaagaaattcattggctaatcctggcatcgctatggcaacacacaaagacgacgaggagcgtttttttcccagtaacgggatcctgatttttggcaaacaaaatgctgccagagacaatgcggattacagcgatgtcatgctcaccagcgaggaagaaatcaaaaccactaaccctgtggctacagaggaatacggtatcgtggcagataacttgcagcagcaaaacacggctcctcaaattggaactgtcaacagccagggggacttacccggtatggtctggcagaaccgggacgtgtacctgcagggtcccatctgggccaagattcctcacacggacggcaacttccacccgtctccgctgatgggcggctttggcctgaaacatcctccgcctcagatcctgatcaagaacacgcctgtacctgcggatcctccgaccaccttcaaccagtcaaagctgaactctttcatcacgcaatacagcaccggacaggtcagcgtggagatcgagtgggagctgcagaaggaaaacagcaagcgctggaacccggagatccagtacacttccaactattacaagtctaataatgttgaatttgctgttaatactgaaggtgtatatagtgaaccccgccccattggcaccagatacctgactcgtaatctgtaa

SEQ ID NO: 5247 - protein, 737 aa, synthetic construct
  REGION 1..737: note = Description of Artificial Sequence: Synthetic polypeptide
MAADGYLPDWLEDNLSEGIREWWALKPGAPQPKANQQHQDNARGLVLPGYKYLGPGNGLDKGEPVNAADAAALEHDKAYDQQLQAGDNPYLRYNHADAEFQERLQEDTSFGGNLGRAVFQAKKRILEPLGLVEEAAKTAPGKKRPVDQSPQEPDSSSGVGKSGKQPARKRLNFGQTGDSESVPDPQPLGEPPAAPTSLGSNTMASGGGAPMADNNEGADGVGSSSGNWHCDSQWLGDRVITTSTRTWALPTYNNHLYKQISNGTSGGATNDNTYFGYSTPWGYFDFNRFHCHFSPRDWQRLINNNWGFRPKRLSFKLFNIQVKEVTQNEGTKTIANNLTSTIQVFTDSEYQLPYVLGSAHQGCLPPFPADVFMVPQYGYLTLNNGSQAVGRSSFYCLEYFPSQMLRTGNNFTFSYTFEEVPFHSSYAHSQSLDRLMNPLIDQYLYYLSRTQTTGGTANTQTLGFSQGGPNTMANQAKNWLPGPCYRQQRVSTTTGQNNNSNFAWTAGTKYHLNGRNSLANPGIAMATHKDDEERFFPSNGILIFGKQNAARDNADYSDVMLTSEEEIKTTNPVATEEYGIVADNLQQQNTAPQIGTVNSQGDLPGMVWQNRDVYLQGPIWAKIPHTDGNFHPSPLMGGFGLKHPPPQILIKNTPVPADPPTTFNQSKLNSFITQYSTGQVSVEIEWELQKENSKRWNPEIQYTSNYYKSNNVEFAVNTEGVYSEPRPIGTRYLTRNL

SEQ ID NO: 5248 - DNA, 2205 bp, synthetic construct
  misc_feature 1..2205: note = Description of Artificial Sequence: Synthetic polynucleotide
  source 1..2205: mol_type = other DNA
atggctgctgacggttatcttccagattggctcgaggacaacctttctgaaggcattcgtgagtggtgggctctgaaacctggagtccctcaacccaaagcgaaccaacaacaccaggacaactgtcggggtcttgtgcttccgggttacaaatacctcggacccggtaacggactcgacaaaggagagccggtcaacgaggcggacgcggcagccctcgaacacgacaaggcctacgaccagcagctcaaggccggagacaacccgtacctcaagtacaaccacgccgacgccgagttccaggagcggctcaaagaagatacgtcttttgggggcaacctcgggcgagcagtcttccagaccaaaaagaggcttcttgaacctcttggtctggttgaggaagcggctaagacggctcctggaaagaagaggcctgtagagcagtctcctcaggaaccggactcctccgcgggtattggcaaatcgggtgcacagcccgctaaaaagagactcaatttcggtcagactggcgacacagagtcagtcccagaccctcaaccaatcggagaacctcccgcagccccctcaggtgtgggatctcttacaatggcttcaggtggtggcgcaccagtggcagacaataacgaaggtgccgatggagtgggtagttcctcgggaaattggcattgcgattcccaatggctgggggacagagtcatcaccaccagcacccgaacctgggccctgcccacctacaacaaccacctctacaaacaaatttccagccaatcaggagcctcgaacgacaatcactactttggctacagcaccccttgggggtattttgacttcaacagattccactgccacttttcaccacgtgactggcagcgactcatcaacaacaactggggattccggcccaagagactcagcttcaagctcttcaacatccaggtcaaagaggttacggacaacaatggagtcaagaccatcgccaataaccttaccagcacggtccaggtcttcacggactcagactatcagctcccgtacgtgctcgggtcggctcacgagggctgcctcccgccgttcccagcggacgttttcatgattcctcagtacgggtatctgacgcttaatgatggaagccaggccgtgggtcgttcgtccttttactgcctggaatatttcccgtcgcaaatgctaagaacgggtaacaacttccagttcagctacgagtttgagaacgtacctttccatagcagctacgctcacagccaaagcctggaccgactaatgaatccactcatcgaccaatacttgtactatctctcaaagactattaacggttctggacagaatcaacaaacgctaaaattcagtgtggccggacccagcaacatggctgtccagggaagaaactacatacctggacccagctaccgacaacaacgtgtctcaaccactgtgactcaaaacaacaacagcgaatttgcttggcctggagcttcttcttgggctctcaatggacgtaatagcttgatgaatcctggacctgctatggccagccacaaagaaggagaggaccgtttctttcctttgtctggatctttaatttttggcaaacaaggaactggaagagacaacgtggatgcggacaaagtcatgataaccaacgaagaagaaattaaaactactaacccggtagcaacggagtcctatggacaagtggccacaaaccaccagagtgcccaagcacaggcgcagaccggctgggttcaaaaccaaggaatacttccgggtatggtttggcaggacagagatgtgtacctgcaaggacccatctgggccaagattcctcacacggacggcaacttccacccgtctccgctgatgggcggctttggcctgaaacatcctccgcctcagatcctgatcaagaacacgcctgttcctgcgaatcctccggcggagttttcagctacaaagtttgcttcattcatcacccagtactccacaggacaagtgagtgtggaaattgaatgggagctgcagaaagaaaacagcaagcgctggaatcccgaagtgcagtacacatccaattatgcaaaatctgccaacgttgattttactgtggacaacaatggactttatactgagcctcgccccattggcacccgttaccttaccaaacctctgtaa

SEQ ID NO: 5249 - protein, 734 aa, synthetic construct
  REGION 1..734: note = Description of Artificial Sequence: Synthetic polypeptide
MAADGYLPDWLEDNLSEGIREWWALKPGVPQPKANQQHQDNCRGLVLPGYKYLGPGNGLDKGEPVNEADAAALEHDKAYDQQLKAGDNPYLKYNHADAEFQERLKEDTSFGGNLGRAVFQTKKRLLEPLGLVEEAAKTAPGKKRPVEQSPQEPDSSAGIGKSGAQPAKKRLNFGQTGDTESVPDPQPIGEPPAAPSGVGSLTMASGGGAPVADNNEGADGVGSSSGNWHCDSQWLGDRVITTSTRTWALPTYNNHLYKQISSQSGASNDNHYFGYSTPWGYFDFNRFHCHFSPRDWQRLINNNWGFRPKRLSFKLFNIQVKEVTDNNGVKTIANNLTSTVQVFTDSDYQLPYVLGSAHEGCLPPFPADVFMIPQYGYLTLNDGSQAVGRSSFYCLEYFPSQMLRTGNNFQFSYEFENVPFHSSYAHSQSLDRLMNPLIDQYLYYLSKTINGSGQNQQTLKFSVAGPSNMAVQGRNYIPGPSYRQQRVSTTVTQNNNSEFAWPGASSWALNGRNSLMNPGPAMASHKEGEDRFFPLSGSLIFGKQGTGRDNVDADKVMITNEEEIKTTNPVATESYGQVATNHQSAQAQAQTGWVQNQGILPGMVWQDRDVYLQGPIWAKIPHTDGNFHPSPLMGGFGLKHPPPQILIKNTPVPANPPAEFSATKFASFITQYSTGQVSVEIEWELQKENSKRWNPEVQYTSNYAKSANVDFTVDNNGLYTEPRPIGTRYLTKPL

SEQ ID NO: 5250 - DNA, 2211 bp, synthetic construct
  misc_feature 1..2211: note = Description of Artificial Sequence: Synthetic polynucleotide
  source 1..2211: mol_type = other DNA
atggctgccgatggttatcttccagattggctcgaggacaacctctctgagggcattcgcgagtggtgggacttgaaacctggagcccctaaacccaaggcaaatcaacaacatcaggacaacgctcgaggtcttgtgcttccgggttacaaataccttggacccggcaacggactcgacaagggggagccggtcaacgcagcagacgcggcggccctcgagcacgacaaggcctacgaccagcagctcaaggccggagacaacccgtacctcaagtacaaccacgccgacgccgagttccaggagcggctcaaagaagatacgtcttttgggggcaacctcgggcgagcagtcttccaggccaaaaagaggcttcttgaacctcttggtctggttgaggaagcggctaagacggctcctggaaagaagagaccggtagagccatcaccccagcgttctccagactcctctacgggcatcggcaagaaaggccaacagcccgctaaaaagagactcaattttggtcagactggcgactcagagtcagtccccgacccacaacctctcggagaacctccagcaacccccgctgctgtgggacctactacaatggcttcaggcggtggcgcaccaatggcagacaataacgagggtgccgatggagtgggtaattcctcaggaaattggcattgcgattcccaatggctgggcgacagagtcatcaccaccagcaccagaacctgggccctgcccacttacaacaaccatctctacaagcaaatctccagccaatcaggagcttcaaacgacaaccactactttggctacagcaccccttgggggtattttgactttaacagattccactgccacttttcaccacgtgactggcaaagactcatcaacaacaactggggattccgacccaagagactcaacttcaagctcttcaacatccaagtcaaggaggtcacgacgaatgatggcgtcacgaccatcgctaataaccttaccagcacggttcaagtcttctcggactcggagtaccagttgccgtacgtcctcggctctgcgcaccagggctgcctccctccgttcccggcggacgtgttcatgattccgcagtacggctacctaacgctcaacaatggcagccaagccgtgggacgttcatccttttactgcctggaatatttcccttctcagatgctgagaacgggcaacaactttaccttcagctacacttttgaggacgttcctttccacagcagctacgctcacagccagagtctggaccgtctcatgaatcctctcatcgaccagtacctgtattacttgagcagaacaaacactccaagtggaaccaccacgcagtcaaggcttcagttttctcaggccggagcgagtgacattcgggaccagtctaggaactggcttcctggaccctgttaccgccagcagcgcgtttctaaaacaaaaacagacaacaacaacagcaattttacctggactggtgcttcaaaatataaccttaatgggcgtgaatctataatcaaccctggcactgctatggcctcacacaaagacgacgaagacaagttctttcccatgagcggtgtcatgatttttggaaaagagagcgccggagcttcaaacactgcattggacaatgtcatgatcacagacgaagaggaaatcaaagccactaaccccgtggccaccgaaagatttgggactgtggcagtcaatctccagagcagcagcacagaccctgcgaccggagatgtgcatgttatgggagcattacctggcatggtgtggcaagatagagacgtgtacctgcagggtcccatttgggccaaaattcctcacacagatggacactttcacccgtctcctcttatgggcggctttggactcaagaacccgcctcctcagatcctcatcaaaaacacgcctgttcctgcgaatcctccggcggagttttcagctacaaagtttgcttcattcatcacccaatactccacaggacaagtgagtgtggaaattgaatgggagctgcagaaagaaaacagcaagcgctggaatcccgaagtgcagtacacatccaattatgcaaaatctgccaacgttgattttactgtggacaacaatggactttatactgagcctcgccccattggcacccgttaccttacccgtcccctgtaa

SEQ ID NO: 5251 - protein, 736 aa, synthetic construct
  REGION 1..736: note = Description of Artificial Sequence: Synthetic polypeptide
MAADGYLPDWLEDNLSEGIREWWDLKPGAPKPKANQQHQDNARGLVLPGYKYLGPGNGLDKGEPVNAADAAALEHDKAYDQQLKAGDNPYLKYNHADAEFQERLKEDTSFGGNLGRAVFQAKKRLLEPLGLVEEAAKTAPGKKRPVEPSPQRSPDSSTGIGKKGQQPAKKRLNFGQTGDSESVPDPQPLGEPPATPAAVGPTTMASGGGAPMADNNEGADGVGNSSGNWHCDSQWLGDRVITTSTRTWALPTYNNHLYKQISSQSGASNDNHYFGYSTPWGYFDFNRFHCHFSPRDWQRLINNNWGFRPKRLNFKLFNIQVKEVTTNDGVTTIANNLTSTVQVFSDSEYQLPYVLGSAHQGCLPPFPADVFMIPQYGYLTLNNGSQAVGRSSFYCLEYFPSQMLRTGNNFTFSYTFEDVPFHSSYAHSQSLDRLMNPLIDQYLYYLSRTNTPSGTTTQSRLQFSQAGASDIRDQSRNWLPGPCYRQQRVSKTKTDNNNSNFTWTGASKYNLNGRESIINPGTAMASHKDDEDKFFPMSGVMIFGKESAGASNTALDNVMITDEEEIKATNPVATERFGTVAVNLQSSSTDPATGDVHVMGALPGMVWQDRDVYLQGPIWAKIPHTDGHFHPSPLMGGFGLKNPPPQILIKNTPVPANPPAEFSATKFASFITQYSTGQVSVEIEWELQKENSKRWNPEVQYTSNYAKSANVDFTVDNNGLYTEPRPIGTRYLTRPL

SEQ ID NO: 5252 - DNA, 2214 bp, synthetic construct; identical to SEQ ID NO: 5224
  misc_feature 1..2214: note = Description of Artificial Sequence: Synthetic polynucleotide
  source 1..2214: mol_type = other DNA

SEQ ID NO: 5253 - protein, 737 aa, synthetic construct; identical to SEQ ID NO: 5225
  REGION 1..737: note = Description of Artificial Sequence: Synthetic polypeptide

SEQ ID NO: 5254 - DNA, 2205 bp, synthetic construct
  misc_feature 1..2205: note = Description of Artificial Sequence: Synthetic polynucleotide
  source 1..2205: mol_type = other DNA
atggctgctgacggttatcttccagattggctcgaggacaacctttctgaaggcattcgtgagtggtgggctctgaaacctggagtccctcaacccaaagcgaaccaacaacaccaggacaaccgtcggggtcttgtgcttccgggttacaaatacctcggacccggtaacggactcgacaaaggagagccggtcaacgaggcggacgcggcagccctcgaacacgacaaggcctacgaccagcagctcaaggccggagacaacccgtacctcaagtacaaccacgccgacgccgagttccaggagcggctcaaagaagatacgtcttttgggggcaacctcgggcgagcagtcttccaggccaaaaagaggcttcttgaacctcttggtctggttgaggaagcggctaagacggctcctggaaagaagaggcctgtagagcagtctcctcaggaaccggactcctccgcgggtattggcaaatcgggtgcacagcccgctaaaaagagactcaatttcggtcagactggcgacacagagtcagtcccagaccctcaaccaatcggagaacctcccgcagccccctcaggtgtgggatctcttacaatggcttcaggtggtggcgcaccagtggcagacaataacgaaggtgccgatggagtgggtagttcctcgggaaattggcattgcgattcccaatggctgggggacagagtcatcaccaccagcacccgaacctgggccctgcccacctacaacaaccacctctacaaacaaatttccagccaatcaggagcctcgaacgacaatcactactttggctacagcaccccttgggggtattttgacttcaacagattccactgccacttttcaccacgtgactggcagcgactcatcaacaacaactggggattccggcccaagagactcagcttcaagctcttcaacatccaggtcaaagaggttacggacaacaatggagtcaagaccatcgccaataaccttaccagcacggtccaggtcttcacggactcagactatcagctcccgtacgtgctcgggtcggctcacgagggctgcctcccgccgttcccagcggacgttttcatgattcctcagtacgggtatctgacgcttaatgatggaagccaggccgtgggtcgttcgtccttttactgcctggaatatttcccgtcgcaaatgctaagaacgggtaacaacttccagttcagctacgagtttgagaacgtacctttccatagcagctacgctcacagccaaagcctggaccgactaatgaatccactcatcgaccaatacttgtactatctctcaaagactattaacggttctggacagaatcaacaaacgctaaaattcagtgtggccggacccagcaacatggctgtccagggaagaaactacatacctggacccagctaccgacaacaacgtgtctcaaccactgtgactcaaaacaacaacagcgaatttgcttggcctggagcttcttcttgggctctcaatggacgtaatagcttgatgaatcctggacctgctatggccagccacaaagaaggagaggaccgtttctttcctttgtctggatctttaatttttggcaaacaaggaactggaagagacaacgtggatgcggacaaagtcatgataaccaacgaagaagaaattaaaactactaacccggtagcaacggagtcctatggacaagtggccacaaaccaccagagtgcccaagcacaggcgcagaccggctgggttcaaaaccaaggaatacttccgggtatggtttggcaggacagagatgtgtacctgcaaggacccatttgggccaaaattcctcacacggacggcaactttcacccttctccgctgatgggagggtttggaatgaaacacccgcctcctcagatcctcatcaaaaacacacctgtacctgcggatcctccaacggccttcaacaaggacaagctgaactctttcatcacccagtattctactggccaagtcagcgtggagatcgagtgggagctgcagaaggaaaacagcaagcgctggaaccccgagatccagtacacctccaactactacaaatctacaagtgtggactttgctgttaatacagaaggcgtgtactctgaaccccgccccattggcacccgttacctcacccgtaatctgtaa

SEQ ID NO: 5255 - protein, 734 aa, synthetic construct
  REGION 1..734: note = Description of Artificial Sequence: Synthetic polypeptide
MAADGYLPDWLEDNLSEGIREWWALKPGVPQPKANQQHQDNRRGLVLPGYKYLGPGNGLDKGEPVNEADAAALEHDKAYDQQLKAGDNPYLKYNHADAEFQERLKEDTSFGGNLGRAVFQAKKRLLEPLGLVEEAAKTAPGKKRPVEQSPQEPDSSAGIGKSGAQPAKKRLNFGQTGDTESVPDPQPIGEPPAAPSGVGSLTMASGGGAPVADNNEGADGVGSSSGNWHCDSQWLGDRVITTSTRTWALPTYNNHLYKQISSQSGASNDNHYFGYSTPWGYFDFNRFHCHFSPRDWQRLINNNWGFRPKRLSFKLFNIQVKEVTDNNGVKTIANNLTSTVQVFTDSDYQLPYVLGSAHEGCLPPFPADVFMIPQYGYLTLNDGSQAVGRSSFYCLEYFPSQMLRTGNNFQFSYEFENVPFHSSYAHSQSLDRLMNPLIDQYLYYLSKTINGSGQNQQTLKFSVAGPSNMAVQGRNYIPGPSYRQQRVSTTVTQNNNSEFAWPGASSWALNGRNSLMNPGPAMASHKEGEDRFFPLSGSLIFGKQGTGRDNVDADKVMITNEEEIKTTNPVATESYGQVATNHQSAQAQAQTGWVQNQGILPGMVWQDRDVYLQGPIWAKIPHTDGNFHPSPLMGGFGMKHPPPQILIKNTPVPADPPTAFNKDKLNSFITQYSTGQVSVEIEWELQKENSKRWNPEIQYTSNYYKSTSVDFAVNTEGVYSEPRPIGTRYLTRNL

SEQ ID NO: 5256 - DNA, 2217 bp, synthetic construct
  misc_feature 1..2217: note = Description of Artificial Sequence: Synthetic polynucleotide
  source 1..2217: mol_type = other DNA
atggctgccgatggttatcttccagattggctcgaggacaacctctctgagggcattcgcgagtggtgggcgctgaaacctggagccccgaagcccaaagccaaccagcaaaagcaggacgacggccggggtctggtgcttcctggctacaagtacctcggacccttcaacggactcgacaagggggagcccgtcaacgcggcggacgcagcggccctcgagcacgacaaggcctacgaccagcagctgcaggcgggtgacaatccgtacctgcggtataaccacgccgacgccgagtttcaggagcgtctgcaagaagatacgtcttttgggggcaacctcgggcgagcagtcttccaggccaagaagcgggttctcgaacctctcggtctggttgaggaaggcgctaagacggctcctggaaagaagagaccggtagagccatcaccccagcgttctccagactcctctacgggcatcggcaagaaaggccaacagcccgccagaaaaagactcaattttggtcagactggcgactcagagtcagttccagaccctcaacctctcggagaacctccagcagcgccctctggtgtgggacctaatacaatggctgcaggcggtggcgcaccaatggcagacaataacgaaggcgccgacggagtgggtagttcctcgggaaattggcattgcgattccacatggctgggcgacagagtcatcaccaccagcacccgaacctgggccctgcccacctacaacaaccacctctacaagcaaatctccaacgggacatcgggaggagccaccaacgacaacacctacttcggctacagcaccccctgggggtattttgactttaacagattccactgccacttttcaccacgtgactggcagcgactcatcaacaacaactggggattccggcccaagagactcagcttcaagctcttcaacatccaggtcaaggaggtcacgcagaatgaaggcaccaagaccatcgccaataacctcaccagcaccatccaggtgtttacggactcggagtaccagctgccgtacgttctcggctctgcccaccagggctgcctgcctccgttcccggcggacgtgttcatgattccccagtacggctacctaacactcaacaacggtagtcaggccgtgggacgctcctccttctactgcctggaatactttccttcgcagatgctgagaaccggcaacaacttccagtttacttacaccttcgaggacgtgcctttccacagcagctacgcccacagccagagcttggaccggctgatgaatcctctgattgaccagtacctgtactacttgtctcggactcaaacaacaggaggcacggcaaatacgcagactctgggcttcagccaaggtgggcctaatacaatggccaatcaggcaaagaactggctgccaggaccctgttaccgccaacaacgcgtctcaacgacaaccgggcaaaacaacaatagcaactttgcctggactgctgggaccaaataccatctgaatggaagaaattcattggctaatcctggcatcgctatggcaacacacaaagacgacgaggagcgtttttttcccagtaacgggatcctgatttttggcaaacaaaatgctgccagagacaatgcggattacagcgatgtcatgctcaccagcgaggaagaaatcaaaaccactaaccctgtggctacagaggaatacggtatcgtggcagataacttgcagcagcaaaacacggctcctcaaattggaactgtcaacagccagggggccttacccggtatggtctggcagaaccgggacgtgtacctgcagggtcccatctgggccaagattcctcacacggacggcaacttccacccctctcccctcatgggtggattcggacttaaacatcctccgcctcagatcctgatcaagaacacgcctgtacctgcggatcctccgaccaccttcaaccagtcaaagctgaactctttcatcacgcaatacagcaccggacaggtcagcgtggaaattgaatgggagctgcagaaggaaaacagcaagcgctggaaccccgagatccagtacacctccaactactacaaatctacaagtgtggactttgctgttaatacagaaggcgtgtactctgaaccccgccccattggcacccgttacctcacccgtaatctgtaa

SEQ ID NO: 5257 - protein, 738 aa, synthetic construct; identical to SEQ ID NO: 5159
  REGION 1..738: note = Description of Artificial Sequence: Synthetic polypeptide

SEQ ID NO: 5258 - DNA, 2211 bp, synthetic construct
  misc_feature 1..2211: note = Description of Artificial Sequence: Synthetic polynucleotide
  source 1..2211: mol_type = other DNA
atggctgctgacggttatcttccagattggctcgaggacaacctttctgaaggcattcgagagtggtgggcgctgcaacctggagcccctaaacccaaggcaaatcaacaacatcaggacaacgctcggggtcttgtgcttccgggttacaaatacctcggacccggcaacggactcgacaagggggaacccgtcaacgcagcggacgcggcagccctcgagcacgacaaggcctacgaccagcagctcaaggccggtgacaacccctacctcaagtacaaccacgccgacgccgagttccaggagcggctcaaagaagatacgtcttttgggggcaacctcgggcgagcagtcttccaggccaaaaagaggcttcttgaacctcttggtctggttgaggaagcggctaagacggctcctggaaagaagaggcctgtagatcagtctcctcaggaaccggactcatcatctggtgttggcaaatcgggcaaacagcctgccagaaaaagactaaatttcggtcagactggcgactcagagtcagtcccagaccctcaacctctcggagaaccaccagcagcccccacaagtttgggatctaatacaatggcttcaggcggtggcgcaccaatggcagacaataacgagggtgccgatggagtgggtaattcctcaggaaattggcattgcgattcccaatggctgggcgacagagtcatcaccaccagcaccagaacctgggccctgcccacttacaacaaccatctctacaagcaaatctccagccaatcaggagcttcaaacgacaaccactactttggctacagcaccccttgggggtattttgactttaacagattccactgccacttctcaccacgtgactggcagcgactcattaacaacaactggggattccggcccaagaaactcagcttcaagctcttcaacatccaagttaaagaggtcacgcagaacgatggcacgacgactattgccaataaccttaccagcacggttcaggtgtttacggactcggagtatcagctcccgtacgtgctcgggtcggcgcaccaaggctgtctcccgccgtttccagcggacgtcttcatggtccctcagtatggatacctcaccctgaacaacggaagtcaagcggtgggacgctcatccttttactgcctggagtacttcccttcgcagatgctaaggactggaaataacttccaattcagctataccttcgaggatgtaccttttcacagcagctacgctcacagccagagtttggatcgcttgatgaatcctcttattgatcagtatctgtactacctgaacagaacgcaaggaacaacctctggaacaaccaaccaatcacggctgctttttagccaggctgggcctcagtctatgtctttgcaggccagaaattggctacctgggccctgctaccggcaacagagactttcaaagactgctaacgacaacaacaacagtaactttccttggacagcggccagcaaatatcatctcaatggccgcgactcgctggtgaatccaggaccagctatggccagtcacaaggacgatgaagaaaaatttttccctatgcacggcaatctaatatttggcaaagaagggacaacggcaagtaacgcagaattagataatgtaatgattacggatgaagaagagattcgtaccaccaatcctgtggcaacagagcagtatggaactgtggcaaataacttgcagagctcaaatacagctcccacgactagaactgtcaatgatcagggggccttacctggcatggtgtggcaagatcgtgacgtgtaccttcaaggacctatctgggcaaagattcctcacacggatggacactttcatccttctcctctgatgggaggctttggactgaaacatccgcctcctcaaatcatgatcaaaaatactccggtaccggcaaatcctccgacgactttcagcccggccaagtttgcttcatttatcactcagtactccactggacaggtcagcgtggaaattgagtgggagctacagaaagaaaacagcaaacgttggaatccagagattcagtacacttccaactacaacaagtctgttaatgtggactttactgtagacactaatggtgtttatagtgaacctcgccccattggcacccgttaccttacccgtcccctgtaa

SEQ ID NO: 5259 - protein, 736 aa, synthetic construct; identical to SEQ ID NO: 5229
  REGION 1..736: note = Description of Artificial Sequence: Synthetic polypeptide

SEQ ID NO: 5260 - DNA, 2211 bp, synthetic construct; identical to SEQ ID NO: 5228
  misc_feature 1..2211: note = Description of Artificial Sequence: Synthetic polynucleotide
  source 1..2211: mol_type = other DNA

SEQ ID NO: 5261 - protein, 736 aa, synthetic construct; identical to SEQ ID NO: 5229
  REGION 1..736: note = Description of Artificial Sequence: Synthetic polypeptide

SEQ ID NO: 5262 - DNA, 2211 bp, synthetic construct
  misc_feature 1..2211: note = Description of Artificial Sequence: Synthetic polynucleotide
  source 1..2211: mol_type = other DNA
atggctgctgacggttatcttccagattggctcgaggacaacctttctgaaggcattcgtgagtggtgggctctgaaacctggagtccctcaacccaaagcgaaccaacaacaccaggacaaccgtcggggtcttgtgcttccgggttacaaatacctcggacccggtaacggactcgacaaaggagagcccgtcaacgcggcggatgcagcggccctcgagcacgacaaggcctacgaccagcagctcaaagcgggtgacaatccgtacctgcggtataaccacgccgacgccgagtttcaggagcgtctgcaagaagatacgtcttttgggggcaacctcgggcgagcagtcttccaggccaagaagagggttctcgaaccttttggtctggttgaggaaggtgctaagacggctcctggaaagaaacgtccggtagagcagtcgccacaagagccagactcctcctcgggcatcggcaagacaggccagcagcccgctaaaaagagactcaattttggtcagactggcgactcagagtcagtccccgacccacaacctctcggagaacctccagcaacccccgctgctgtgggacctactacaatggcttcaggcggtggcgcaccaatggcagacaataacgaaggcgccgacggagtgggtaatgcctcaggaaattggcattgcgattccacatggctgggcgacagagtcatcaccaccagcacccgcacctgggccttgcccacctacaataaccacctctacaagcaaatctccagtgcttcaacgggggccagcaacgacaaccactacttcggctacagcaccccctgggggtattttgatttcaacagattccactgccatttctcaccacgtgactggcagcgactcatcaacaacaattggggattccggcccaagagactcaacttcaagctcttcaacatccaagtcaaggaggtcacgacgaatgatggcgtcacgaccatcgctaataaccttaccagcacggttcaagtcttctcggactcggagtaccagcttccgtacgtcctcggctctgcgcaccagggctgcctccctccgttcccggcggacgtgttcatgattccgcaatacggctacctgacgctcaacaatggcagccaagccgtgggacgttcatccttttactgcctggaatatttcccttctcagatgctgagaacgggcaacaactttaccttcagctacacctttgaggaagtgcctttccacagcagctacgcgcacagccagagcctggaccggctgatgaatcctctcatcgaccaatacctgtattacctgaacagaactcaaaatcagtccggaagtgcccaaaacaaggacttgctgtttagccgtgggtctccagctggcatgtctgttcagcccaaaaactggctacctggaccctgttatcggcagcagcgcgtttctaaaacaaaaacagacaacaacaacagcaattttacctggactggtgcttcaaaatataacctcaatgggcgtgaatccatcatcaaccctggcactgctatggcctcacacaaagacgacgaagacaagttctttcccatgagcggtgtcatgatttttggaaaagagagcgccggagcttcaaacactgcattggacaatgtcatgattacagacgaagaggaaattaaagccactaaccctgtggccaccgaaagatttgggaccgtggcagtcaatttccagagcagcagcacagaccctgcgaccggagatgtgcatgttatgggagccttacctggaatggtgtggcaagacagagacgtatacctgcagggtcctatttgggccaaaattcctcacacggatggacactttcacccgtctcctctcatgggcggctttggacttaagcacccgcctcctcagatcctcatcaaaaacacgcctgttcctgcgaatcctccggcagagttttcggctacaaagtttgcttcattcatcacccagtattccacaggacaagtgagcgtggagattgaatgggagctgcagaaagaaaacagcaaacgctggaatcccgaagtgcagtatacatctaactatgcaaaatctgccaacgttgatttcactgtggacaacaatggactttatactgagcctcgccccattggcacccgttacctcacccgtcccctgtaa

SEQ ID NO: 5263 - protein, 736 aa, synthetic construct
  REGION 1..736: note = Description of Artificial Sequence: Synthetic polypeptide
MAADGYLPDWLEDNLSEGIREWWALKPGVPQPKANQQHQDNRRGLVLPGYKYLGPGNGLDKGEPVNAADAAALEHDKAYDQQLKAGDNPYLRYNHADAEFQERLQEDTSFGGNLGRAVFQAKKRVLEPFGLVEEGAKTAPGKKRPVEQSPQEPDSSSGIGKTGQQPAKKRLNFGQTGDSESVPDPQPLGEPPATPAAVGPTTMASGGGAPMADNNEGADGVGNASGNWHCDSTWLGDRVITTSTRTWALPTYNNHLYKQISSASTGASNDNHYFGYSTPWGYFDFNRFHCHFSPRDWQRLINNNWGFRPKRLNFKLFNIQVKEVTTNDGVTTIANNLTSTVQVFSDSEYQLPYVLGSAHQGCLPPFPADVFMIPQYGYLTLNNGSQAVGRSSFYCLEYFPSQMLRTGNNFTFSYTFEEVPFHSSYAHSQSLDRLMNPLIDQYLYYLNRTQNQSGSAQNKDLLFSRGSPAGMSVQPKNWLPGPCYRQQRVSKTKTDNNNSNFTWTGASKYNLNGRESIINPGTAMASHKDDEDKFFPMSGVMIFGKESAGASNTALDNVMITDEEEIKATNPVATERFGTVAVNFQSSSTDPATGDVHVMGALPGMVWQDRDVYLQGPIWAKIPHTDGHFHPSPLMGGFGLKHPPPQILIKNTPVPANPPAEFSATKFASFITQYSTGQVSVEIEWELQKENSKRWNPEVQYTSNYAKSANVDFTVDNNGLYTEPRPIGTRYLTRPL

SEQ ID NO: 5264 - DNA, 2217 bp, synthetic construct
  misc_feature 1..2217: note = Description of Artificial Sequence: Synthetic polynucleotide
  source 1..2217: mol_type = other DNA
atggctgccgatggttatcttccagattggctcgaggacaacctctctgagggcattcgcgagtggtgggacttgaaacctggagccccgaaacccaaagccaaccagcaaaagcaggacgacggccggggtctggtgcttcctggctacaagtacctcggacccttcaacggactcgacaagggggagcccgtcaacgcggcggatgcaacggccctcgagcacgacaaggcctacgaccagcagctgcaggcgggtgacaatccgtacctgcggtataaccacgccgacgccgagtttcaggagcgtctgcaagaagatacgtcttttgggggcaacctcgggcgagcagtcttccaggccaagaagcgggttctcgaacctctcggtctggttgaggaaggcgctaagacggctcctggaaagaagagaccggtagagccatcaccccagcgttctccagactcctctacgggcatcggcaagaaaggccaacagcccgccagaaaaagactcaattttggtcagactggcgactcagagtcagttccagaccctcaacctctcggagaaccaccagcagcccccacaagtttgggatctaatacaatggcttcaggcggtggcgcaccaatggcagacaataacgagggtgccgatggagtgggtaattcctcaggaaattggcattgcgattcccaatggctgggcgacagagtcatcaccaccagcacccgcacctgggccttgcccacctacaataaccacctctacaagcaaatctccagtgcttcaacgggggccagcaacgacaaccactacttcggctacagcaccccctgggggtattttgactttaaccgcttccactgccacttctcgccaagagactggcaaagactcatcaacaacaattggggattccggcccaagagactcaacttcaaactcttcaacatccaagtcaaggaggtcacgacgaatgatggcgtcacgaccatcgccaataacctcaccagcaccatccaggtgtttacggactcggagtaccagctgccgtacgttctcggctctgcccaccagggctgcctgcctccgttcccggcggacgtgttcatgattccccagtatggatacctcaccctgaacaacggaagtcaagcggtgggacgctcatccttttactgcctggagtacttcccttcgcagatgctaaggactggaaataacttccaattcagctataccttcgaggatgtaccttttcacagcagctacgctcacagccagagtttggatcgcttgatgaatcctcttattgatcagtatctgtactacctgaacagaacgcaaggaacaacctctggaacaaccaaccaatcacggctgctttttagccaggctgggcctcagtctatgtctttgcaggccagaaattggctacctgggccctgctaccggcaacagagactttcaaagactgctaacgacaacaacaacagtaactttccttggacagcagccagcaaatatcatctcaatggccgcgactcgctggtgaatccaggaccagctatggccagtcacaaggacgatgaagaaaaatttttccctatgcacggcaatctaatatttggcaaagaagggacaacggcaagtaacgcagaattagataatgtaatgattacggatgaagaagagattcgtaccaccaatcctgtggcaacagagcagtatggaactgtggcaaataacttgcagagctcaaatacagctcccacgactagaactgtcaatgatcagggggccttacctggcatggtgtggcaagatcgtgacgtgtaccttcaggggcccatctgggcaaagattccacacacggacggacattttcacccctctcccctcatgggtggattcggacttaaacaccctcctccgcagattctcatcaagaacaccccggtacctgcgaatccttcgaccaccttcagtgcggcaaagtttgcttccttcatcacacagtactccacgggacaggtcagcgtggagatcgagtgggagctgcagaaggaaaacagcaagcgctggaacccggagatccagtacacttccaactattacaagtctaataatgttgaatttgctgttaatactgaaggtgtatatagtgaaccccgccccattggcaccagatacctgactcgtaatctgtaa

SEQ ID NO: 5265 - protein, 738 aa, synthetic construct
  REGION 1..738: note = Description of Artificial Sequence: Synthetic polypeptide
MAADGYLPDWLEDNLSEGIREWWDLKPGAPKPKANQQKQDDGRGLVLPGYKYLGPFNGLDKGEPVNAADATALEHDKAYDQQLQAGDNPYLRYNHADAEFQERLQEDTSFGGNLGRAVFQAKKRVLEPLGLVEEGAKTAPGKKRPVEPSPQRSPDSSTGIGKKGQQPARKRLNFGQTGDSESVPDPQPLGEPPAAPTSLGSNTMASGGGAPMADNNEGADGVGNSSGNWHCDSQWLGDRVITTSTRTWALPTYNNHLYKQISSASTGASNDNHYFGYSTPWGYFDFNRFHCHFSPRDWQRLINNNWGFRPKRLNFKLFNIQVKEVTTNDGVTTIANNLTSTIQVFTDSEYQLPYVLGSAHQGCLPPFPADVFMIPQYGYLTLNNGSQAVGRSSFYCLEYFPSQMLRTGNNFQFSYTFEDVPFHSSYAHSQSLDRLMNPLIDQYLYYLNRTQGTTSGTTNQSRLLFSQAGPQSMSLQARNWLPGPCYRQQRLSKTANDNNNSNFPWTAASKYHLNGRDSLVNPGPAMASHKDDEEKFFPMHGNLIFGKEGTTASNAELDNVMITDEEEIRTTNPVATEQYGTVANNLQSSNTAPTTRTVNDQGALPGMVWQDRDVYLQGPIWAKIPHTDGHFHPSPLMGGFGLKHPPPQILIKNTPVPANPSTTFSAAKFASFITQYSTGQVSVEIEWELQKENSKRWNPEIQYTSNYYKSNNVEFAVNTEGVYSEPRPIGTRYLTRNL

SEQ ID NO: 5266 - DNA, 2208 bp, synthetic construct
  misc_feature 1..2208: note = Description of Artificial Sequence: Synthetic polynucleotide
  source 1..2208: mol_type = other DNA
atggctgccgatggttatcttccagattggctcgaggacaaccttagtgaaggaattcgcgagtggtgggacttgaaacctggagccccgaagcccaaagccaaccagcaaaagcaggacgacggccggggtctggtgcttcctggctacaagtacctcggacccttcaacggactcgacaagggggagcccgtcaacgcggcggacgcagcggccctcgagcacgacaaggcctacgaccagcagctcaaagcgggtgacaatccgtacctgcggtataaccacgccgacgccgagtttcaggagcgtctgcaagaagatacgtcttttgggggcaacctcgggcgagcagtcttccaggccaagaagcgggttctcgaacctctcggtctggttgaggaaggtgctaagacggctcctggaaagaaacgtccggtagagcagtcgccacaagagccagactcctcctcgggcattggcaagacaggccagcagcccgctaaaaagagactcaattttggtcagactggcgactcagagtcagtccccgacccacaacctctcggagaacctccagcaacccccgctgctgtgggacctactacaatggcttcaggcggtggcgcaccaatggcagacaataacgaaggcgccgacggagtgggtaatgcctcaggaaattggcattgcgattccacatggctgggcgacagagtcatcaccaccagcacccgaacctgggccctgcccacctacaacaaccacctctacaaacaaatttccagccaatcaggagcctcgaacgacaatcactactttggctacagcaccccttgggggtattttgatttcaacagattccactgccacttttcaccacgtgactggcagcgactcatcaacaacaattggggattccggcccaagagactcagcttcaagctcttcaacatccaggtcaaggaggtcacgcagaatgaaggcaccaagaccatcgccaataaccttaccagcacggttcaagtgtttacggactcggagtatcagctcccgtacgtgctcggctcggcgcatcaaggatgcctcccgccgttcccagcagacgtcttcatggtgccacagtatggatacctcaccctgaacaacgggagtcaggcagtaggacgctcttcattttactgcctggagtactttccttctcagatgctgcgtaccggaaacaactttaccttcagctacacttttgaggacgttcctttccacagcagctacgctcacagccagagtctggaccgtctcatgaatcctctgattgaccagtacctgtattacttgagcagaacaaacactccaagtggaaccaccacgcagtcaaggcttcagttttctcaggccggagcgagtgacattcgggaccagtctaggaactggcttcctggaccctgttaccgccagcagcgagtatcaaagacatctgcggataacaacaacagtgaatactcgtggactggagctaccaagtaccacctcaatggcagagactctctggtgaatccgggcccggccatggcaagccacaaggactatgaagaaaagttttttcctcagagcggggttctcatctttgggaagcaaggctcagagaaaacaaatgtggacattgaaaaggtcatgattacagacgaagaggaaatcaggacaaccaatcccgtggctacggagcagtatggttctgtatctaccaacctccagagaggcaacagacaagcagctaccgcagatgtcaacacacaaggcgttcttccaggcatggtctggcaggacagagatgtgtaccttcaggggcccatctgggcaaagattccacacacggacggacattttcacccgtctccgctgatgggcggctttggcctgaaacatcctccgcctcagatcctgatcaagaacacgcctgtacctgcggatcctccgaccaccttcaaccagtcaaagctgaactctttcatcactcagtattctactggccaagtcagcgtggagatcgagtgggagctgcagaaggaaaacagcaagcgctggaaccccgagatccagtacacctccaactactacaaatctacaagtgtggactttgctgttaatacagaaggcgtgtactctgaaccccgccccattggcacccgttacctcacccgtaatctgtaa

SEQ ID NO: 5267 - protein, 735 aa, synthetic construct
  REGION 1..735: note = Description of Artificial Sequence: Synthetic polypeptide
MAADGYLPDWLEDNLSEGIREWWDLKPGAPKPKANQQKQDDGRGLVLPGYKYLGPFNGLDKGEPVNAADAAALEHDKAYDQQLKAGDNPYLRYNHADAEFQERLQEDTSFGGNLGRAVFQAKKRVLEPLGLVEEGAKTAPGKKRPVEQSPQEPDSSSGIGKTGQQPAKKRLNFGQTGDSESVPDPQPLGEPPATPAAVGPTTMASGGGAPMADNNEGADGVGNASGNWHCDSTWLGDRVITTSTRTWALPTYNNHLYKQISSQSGASNDNHYFGYSTPWGYFDFNRFHCHFSPRDWQRLINNNWGFRPKRLSFKLFNIQVKEVTQNEGTKTIANNLTSTVQVFTDSEYQLPYVLGSAHQGCLPPFPADVFMVPQYGYLTLNNGSQAVGRSSFYCLEYFPSQMLRTGNNFTFSYTFEDVPFHSSYAHSQSLDRLMNPLIDQYLYYLSRTNTPSGTTTQSRLQFSQAGASDIRDQSRNWLPGPCYRQQRVSKTSADNNNSEYSWTGATKYHLNGRDSLVNPGPAMASHKDYEEKFFPQSGVLIFGKQGSEKTNVDIEKVMITDEEEIRTTNPVATEQYGSVSTNLQRGNRQAATADVNTQGVLPGMVWQDRDVYLQGPIWAKIPHTDGHFHPSPLMGGFGLKHPPPQILIKNTPVPADPPTTFNQSKLNSFITQYSTGQVSVEIEWELQKENSKRWNPEIQYTSNYYKSTSVDFAVNTEGVYSEPRPIGTRYLTRNL

SEQ ID NO: 5268 - DNA, 2214 bp, synthetic construct
  misc_feature 1..2214: note = Description of Artificial Sequence: Synthetic polynucleotide
  source 1..2214: mol_type = other DNA
atggctgccgatggttatcttccagattggctcgaggacaacctctctgagggcattcgcgagtggtgggacttgaaacctggagccccgaaacccaaagccaaccagcaaaagcaggacgacggccggggtctggtgcttcctggctacaagtacctcggacccttcaacggactcgacaagggggagcccgtcaacgcggcggatgcagcggccctcgagcacgacaaggcctacgaccagcagctcaaagcgggtgacaatccgtacctgcggtataaccacgccgacgccgagtttcaggagcgtctgcaagaagatacgtcttttgggggcaacctcgggcgagcagtcttccaggccaagaagagggttctcgaaccttttggtctggttgaggaaggtgctaagacggctcctggaaagaaacgtccggtagagcagtcgccacaagagccagactcctcctcgggcattggcaagacaggccagcagcctgcaagaaaaagattgaattttggtcagactggagacgcagactcagtacctgacccccagcctctcggacagccaccagcagccccctctggtctgggaactaatacgatggctacaggcagtggcgcaccaatggcagacaataacgagggcgccgacggagtgggtaattcctcgggaaattggcattgcgattcccaatggctgggggacagagtcatcaccaccagcacccgaacctgggccctgcccacctacaacaatcacctctacaagcaaatctccaacagcacatctggaggatcttcaaatgacaacgcctacttcggctacagcaccccctgggggtattttgatttcaacagattccactgccatttctcaccacgtgactggcagcgactcatcaacaacaattggggattccggcccaagagactcaacttcaagctcttcaacatccaggtcaaggaggtcacgcagaatgaaggcaccaagaccatcgccaataacctcaccagcaccatccaggtgtttacggactcggagtaccagctgccgtacgttctcggctctgcccaccagggctgcctgcctccgttcccggcggacgtgttcatgattccccagtacggctacctaacactcaacaacggtagtcaggccgtgggacgctcctccttctactgcctggaatactttccttcgcagatgctgagaaccggcaacaacttccagtttacttacaccttcgaggacgtgcctttccacagcagctacgcccacagccagagcttggaccggctgatgaatcctctgattgaccagtacctgtactacttgtctcggactcaaacaacaggaggcacgacaaatacgcagactctgggcttcagccaaggtgggcctaatacaatggccaatcaggcaaagaactggctgccaggaccctgttaccgccagcagcgagtatcaaagacatttgcggataacaacaacagtgaatactcgtggactggagctaccaagtaccacctcaatggcagagactctctggtgaatccgggcccggccatggcaagccacaaggacgatgaagaaaagttttttcctcagagcggggttctcatctttgggaagcaaggctcagagaaaacaaatgtggacattgaaaaggtcatgattacagacgaagaggaaatcaggacaaccaatcccgtggctacggagcagtatggttctgtatctaccaacctccagagaggcaacagacaagcagctaccgcagatgtcaacacacaaggcgttcttccaggcatggtctggcaggacagagatgtgtaccttcaggggcccatctgggcaaagattccacacacggacggacattttcacccctctcccctcatgggtggattcggacttaaacaccctccgcctcagatcctgatcaagaacacgcctgtacccgcggatcctccgaccaccttcaaccagtcaaagctgaactctttcatcacccagtattctactggccaagtcagcgtggagatcgagtgggagctgcagaaggaaaacagcaagcgctggaaccccgagatccagtacacctccaactactacaaatctacaagtgtggactttgctgttaatacagaaggcgtgtactctgaaccccgccccattggcacccgttacctcacccgtaatctgtaa

SEQ ID NO: 5269 - protein, 737 aa, synthetic construct
  REGION 1..737: note = Description of Artificial Sequence: Synthetic polypeptide
MAADGYLPDWLEDNLSEGIREWWDLKPGAPKPKANQQKQDDGRGLVLPGYKYLGPFNGLDKGEPVNAADAAALEHDKAYDQQLKAGDNPYLRYNHADAEFQERLQEDTSFGGNLGRAVFQAKKRVLEPFGLVEEGAKTAPGKKRPVEQSPQEPDSSSGIGKTGQQPARKRLNFGQTGDADSVPDPQPLGQPPAAPSGLGTNTMATGSGAPMADNNEGADGVGNSSGNWHCDSQWLGDRVITTSTRTWALPTYNNHLYKQISNSTSGGSSNDNAYFGYSTPWGYFDFNRFHCHFSPRDWQRLINNNWGFRPKRLNFKLFNIQVKEVTQNEGTKTIANNLTSTIQVFTDSEYQLPYVLGSAHQGCLPPFPADVFMIPQYGYLTLNNGSQAVGRSSFYCLEYFPSQMLRTGNNFQFTYTFEDVPFHSSYAHSQSLDRLMNPLIDQYLYYLSRTQTTGGTTNTQTLGFSQGGPNTMANQAKNWLPGPCYRQQRVSKTFADNNNSEYSWTGATKYHLNGRDSLVNPGPAMASHKDDEEKFFPQSGVLIFGKQGSEKTNVDIEKVMITDEEEIRTTNPVATEQYGSVSTNLQRGNRQAATADVNTQGVLPGMVWQDRDVYLQGPIWAKIPHTDGHFHPSPLMGGFGLKHPPPQILIKNTPVPADPPTTFNQSKLNSFITQYSTGQVSVEIEWELQKENSKRWNPEIQYTSNYYKSTSVDFAVNTEGVYSEPRPIGTRYLTRNL

SEQ ID NO: 5270 - DNA, 2217 bp, synthetic construct
  misc_feature 1..2217: note = Description of Artificial Sequence: Synthetic polynucleotide
  source 1..2217: mol_type = other DNA
atggctgccgatggttatcttccagattggctcgaggacactctctctgaaggaataagacagtggtgggcgctgaaacctggagccccgaagcccaaagccaaccagcaaaagcaggacgacggccggggtctggtgcttcctggctacaagtacctcggacccttcaacggactcgacaagggggagcccgtcaacgcggcggatgcagcggccctcgagcacgacaaggcctacgaccagcagctcaaagcgggtgacaatccgtacctgcggtataaccacgccgacgccgagtttcaggagcgtctgcaagaagatacgtcttttgggggcaacctcgggcgagcagtcttccaggccaagaagcgggttctcgaacctctcggtctggttgaggaaggcgctaagacggctcctggaaagaagagaccggtagagccatcaccccagcgttctccagactcctctacgggcatcggcaagaaaggccaacagcccgccagaaaaagactcaattttggtcagactggcgactcagagtcagttccagaccctcaacctctcggagaaccaccagcagcccccacaagtttgggatctaatacaatggcttcaggcggtggcgcaccaatggcagacaataacgagggtgccgatggagtgggtaattcctcaggaaattggcattgcgattcccaatggctgggcgacagagtcatcaccaccagcacccgcacctgggccttgcccacctacaataaccacctctacaagcaaatctccagtgcttcaacgggggccagcaacgacaaccactacttcggctacagcaccccctgggggtattttgactttaaccgcttccactgccacttctcgccaagagactggcaaagactcatcaacaacaattggggattccggcccaagagactcaacttcaaactcttcaacatccaagtcaaggaggtcacgacgaatgatggcgtcacgaccatcgccaataacctcaccagcaccatccaggtgtttacggactcggagtaccagctgccgtacgttctcggctctgcccaccagggctgcctgcctccgttcccggcggacgtgttcatgattccccagtatggatacctcaccctgaacaacggaagtcaagcggtgggacgctcatccttttactgcctggagtacttcccttcgcagatgctaaggactggaaataacttccaattcagctataccttcgaggatgtaccttttcacagcagctacgctcacagccagagtttggatcgcttgatgaatcctcttattgatcagtatctgtactacctgaacagaacgcaaggaacaacctctggaacaaccaaccaatcacggctgctttttagccaggctgggcctcagtctatgtctttgcaggccagaaattggctacctgggccctgctaccggcaacagagactttcaaagactgctaacgacaacaacaacagtaactttccttggacagcagccagcaaatatcatctcaatggccgcgactcgctggtgaatccaggaccagctatggccagtcacaaggacgatgaagaaaaatttttccctatgcacggcaatctaatatttggcaaagaagggacaacggcaagtaacgcagaattagataatgtaatgattacggatgaagaagagattcgtaccaccaatcctgtggcaacagagcagtatggaactgtggcaaataacttgcagagctcaaatacagctcccacgactagaactgtcaatgatcagggggccttacctggcatggtgtggcaagatcgtgacgtgtaccttcaggggcccatctgggcaaagattccacacacggacggacattttcacccctctcccctcatgggtggattcggacttaaacaccctcctccgcagattctcatcaagaacaccccggtacctgcgaatccttcgaccaccttcagtgcggcaaagtttgcttccttcatcacacagtactccacgggacaggtcagcgtggagatcgagtgggagctgcagaaggaaaacagcaagcgctggaacccggagatccagtacacttccaactattacaagtctaataatgttgaatttgctgttaatactgaaggtgtatatagtgaaccccgccccattggcaccagatacctgactcgtaatctgtaa

SEQ ID NO: 5271 - protein, 738 aa, synthetic construct
  REGION 1..738: note = Description of Artificial Sequence: Synthetic polypeptide
MAADGYLPDWLEDTLSEGIRQWWALKPGAPKPKANQQKQDDGRGLVLPGYKYLGPFNGLDKGEPVNAADAAALEHDKAYDQQLKAGDNPYLRYNHADAEFQERLQEDTSFGGNLGRAVFQAKKRVLEPLGLVEEGAKTAPGKKRPVEPSPQRSPDSSTGIGKKGQQPARKRLNFGQTGDSESVPDPQPLGEPPAAPTSLGSNTMASGGGAPMADNNEGADGVGNSSGNWHCDSQWLGDRVITTSTRTWALPTYNNHLYKQISSASTGASNDNHYFGYSTPWGYFDFNRFHCHFSPRDWQRLINNNWGFRPKRLNFKLFNIQVKEVTTNDGVTTIANNLTSTIQVFTDSEYQLPYVLGSAHQGCLPPFPADVFMIPQYGYLTLNNGSQAVGRSSFYCLEYFPSQMLRTGNNFQFSYTFEDVPFHSSYAHSQSLDRLMNPLIDQYLYYLNRTQGTTSGTTNQSRLLFSQAGPQSMSLQARNWLPGPCYRQQRLSKTANDNNNSNFPWTAASKYHLNGRDSLVNPGPAMASHKDDEEKFFPMHGNLIFGKEGTTASNAELDNVMITDEEEIRTTNPVATEQYGTVANNLQSSNTAPTTRTVNDQGALPGMVWQDRDVYLQGPIWAKIPHTDGHFHPSPLMGGFGLKHPPPQILIKNTPVPANPSTTFSAAKFASFITQYSTGQVSVEIEWELQKENSKRWNPEIQYTSNYYKSNNVEFAVNTEGVYSEPRPIGTRYLTRNL

SEQ ID NO: 5272 - DNA, 2208 bp, synthetic construct; identical to SEQ ID NO: 5102
  misc_feature 1..2208: note = Description of Artificial Sequence: Synthetic polynucleotide
  source 1..2208: mol_type = other DNA

SEQ ID NO: 5273 - protein, 735 aa, synthetic construct [sequence omitted]

SEQ ID NO: 5274 - DNA, 2208 bp, synthetic construct
  misc_feature 1..2208: note = Description of Artificial Sequence: Synthetic polynucleotide
  source 1..2208: mol_type = other DNA
atggctgccgatggttatcttccagattggctcgaggacaacctctctgagggcattcgcgagtggtgggcgctgaaacctggagccccgaagcccaaagccaaccagcaaaagcaggacgacggccggggtctggtgcttcctggctacaagtacctcggacccttcaacggactcgacaagggggagcccgtcaacgcggcggacgccgcggccctcgagcacgacaaggcctacgaccagcagctgcaggcgggtgacaatccgtacctgcggtataaccacgccgacgccgagtttcaggagcgtctgcaagaagatacgtcttttgggggcaacctcgggcgagcagtcttccaggccaaaaagaggcttcttgaacctcttggtctggttgaggaagcagctaaaacggctcctggaaagaagaggcctgtagagcagtctcctcaggaaccggactcctccgcgggtattggcaaatcgggtgcacagcccgccaaaaagagactcaatttcggtcagactggcgactcagagtcagtcccagaccctcaacctctcggagaaccaccagcagcccccacaagtttgggatctaatacaatggcttcaggcggtggcgcaccaatggcagacaataacgaaggcgccgacggagtgggtaatgcctcaggaaattggcattgcgattccacatggctgggcgacagagtcatcaccaccagcacccgcacctgggccttgcccacctacagcaaccatctctacaagcaaatctccagccaatcaggagcttcaaacgacaacgactactttggctacagcaccccttgggggtattttgatttcaacagattccactgccacttttcaccacgtgactggcaaagactcatcaacaacaactggggattccgacccaagagactcaacttcaagctctttaacattcaagtcaaagaggtcacgcagaatgacggtacgacgacgattgccaataaccttaccagcacggttcaggtgtttactgactcggagtaccagctcccgtacgtcctcggctcggcgcatcaaggatgcctcccgccgttcccagcagacgtcttcatggtgccacagtatggatacctcaccctgaacaacgggagtcaggcagtaggacgctcttcattttactgcctggagtactttccttctcagatgctgcgtaccggaaacaactttaccttcagctacacttttgaggacgttcctttccacagcagctacgctcacagccagagtctggaccgtctcatgaatcctctcatcgaccagtacctgtattacttgagcagaacaaacactccaagtggaaccaccacgcagtcaaggcttcagttttctcaggccggagcgagtgacattcgggaccagtctaggaactggcttcctggaccctgttaccgccagcagcgagtatcaaagacatctgaggataacaacaacagtgaatactcgtggactggagctaccaagtaccacctcaatggcagagactctctggtgaatccgggcccggccatggcaagccacaaggacgatgaagaaaagttttttcctcagagcggggttctcatctttgggaagcaaggctcagagaaaacaaatgtggacattgaaaaggtcatgattacagacgaagaggaaatcaggacaaccaatcccgtggctacggagcagtatggttctgtatctaccaacctccagagaggcaacagacaagcagctaccgcagatgtcaacacacaaggcgttcttccaggcatggtctggcaggacagagatgtgtaccttcaggggcccatctgggcaaagattccacacacggacggacattttcacccctctcccctcatgggtggattcggacttaaacaccctcctccacagattctcatcaagaacaccccggtacctgcgaatccttcgaccaccttcagtgcggcaaagtttgcttccttcatcacacagtactccacgggacaggtcagcgtggagatcgagtgggagctgcagaaggaaaacagcaaacgctggaatcccgaaattcagtacacttccaactacaacaagtctgttaatgtggactttactgtggacactaatggcgtgtattcagagcctcgccccattggcaccagatacctgactcgtaatctgtaa

SEQ ID NO: 5275 - protein, 735 aa, synthetic construct
  REGION 1..735: note = Description of Artificial Sequence: Synthetic polypeptide
MAADGYLPDWLEDNLSEGIREWWALKPGAPKPKANQQKQDDGRGLVLPGYKYLGPFNGLDKGEPVNAADAAALEHDKAYDQQLQAGDNPYLRYNHADAEFQERLQEDTSFGGNLGRAVFQAKKRLLEPLGLVEEAAKTAPGKKRPVEQSPQEPDSSAGIGKSGAQPAKKRLNFGQTGDSESVPDPQPLGEPPAAPTSLGSNTMASGGGAPMADNNEGADGVGNASGNWHCDSTWLGDRVITTSTRTWALPTYSNHLYKQISSQSGASNDNDYFGYSTPWGYFDFNRFHCHFSPRDWQRLINNNWGFRPKRLNFKLFNIQVKEVTQNDGTTTIANNLTSTVQVFTDSEYQLPYVLGSAHQGCLPPFPADVFMVPQYGYLTLNNGSQAVGRSSFYCLEYFPSQMLRTGNNFTFSYTFEDVPFHSSYAHSQSLDRLMNPLIDQYLYYLSRTNTPSGTTTQSRLQFSQAGASDIRDQSRNWLPGPCYRQQRVSKTSEDNNNSEYSWTGATKYHLNGRDSLVNPGPAMASHKDDEEKFFPQSGVLIFGKQGSEKTNVDIEKVMITDEEEIRTTNPVATEQYGSVSTNLQRGNRQAATADVNTQGVLPGMVWQDRDVYLQGPIWAKIPHTDGHFHPSPLMGGFGLKHPPPQILIKNTPVPANPSTTFSAAKFASFITQYSTGQVSVEIEWELQKENSKRWNPEIQYTSNYNKSVNVDFTVDTNGVYSEPRPIGTRYLTRNL

SEQ ID NO: 5276 - DNA, 2208 bp, synthetic construct
  misc_feature 1..2208: note = Description of Artificial Sequence: Synthetic polynucleotide
  source 1..2208: mol_type = other DNA
atggctgccgatggttatcttccagattggctcgaggacaacctctctgagggcattcgcgagtggtgggcgctgaaacctggagccccgaagcccaaagccaaccagcaaaagcaggacgacggccggggtctggtgcttcctggctacaagtacctcggacccttcaacggactcgacaagggggagcccgtcaacgcggcggacgcagcggccctcgagcacgacaaggcctacgaccagcagctgcaggcgggtgacaatccgtacctgcggtataaccacgccgacgccgagttccaggagcgtctgcaagaagatacgtcttttgggggcaacctcgggcgagcagtcttccaggccaagaagagggttctcgaaccttttggtctggttgaggaaggtgctaagacggctcctggaaagaaacgtccggtagagcagtcgccacaagagccagactcctcctcgggcattggcaagacaggccagcagcccgctaaaaagagactcaattttggtcagactggcgactcagagtcagtcccagaccctcaacctctcggagaaccaccagcagcccccacaagtttgggatctaatacaatggcttcaggcggtggcgcaccaatggcagacaataacgagggcgccgacggagtgggtaattcctcgggaaattggcattgcgattccacatggatgggcgacagagtcatcaccaccagcacccgaacctgggccctgcccacctacaacaaccacctctacaaacaaatttccagccaatcaggagcttcaaacgacaaccactactttggctacagcaccccttgggggtattttgactttaacagattccactgccacttttcaccacgtgactggcagcgactcattaacaacaactggggattccggcccaagaaactcaacttcaagctctttaacatccaggtcaaggaggtcacgcagaatgaaggcaccaagaccatcgccaataacctcaccagcaccatccaggtgtttacggactcggagtaccagctgccgtacgttctcggctctgcccaccagggctgcctgcctccgttcccggcggacgtgttcatgattccccagtacggctacctaacactcaacaacggtagtcaggccgtgggacgctcctccttctactgcctggaatactttccttcgcagatgctgagaaccggcaacaacttccagtttacttacaccttcgaggacgtgcctttccacagcagctacgcccacagccagagcttggaccggctgatgaatcctctgattgaccagtacctgtattacttgtctcggactcaaacaacaggaggcacgacaaatacgcagactctgggcttcagccaaggtgggcctaatacaatggccaatcaggcaaagaactggctgcctggaccctgttaccgccagcagcgagtatcaaagacatctgcggataacaacaacagtgaatactcgtggactggagctaccaagtaccacctcaatggcagagactctctggtgaatccgggcccggccatggcaagccacaaggacgatgaagaaaagttttttcctcagagcggggttctcatctttgggaagcaaggctcagagaaaacaaatgtggacattgaaaaggttatgattacagacgaagaggaaatcaggacaaccaatcccgtggctacggagcagtatggttctgtatctaccaacctccagagaggcaacagacaagcagctaccgcagatgtcaacacacagggcgttcttccaggcatggtctggcaggacagagatgtgtaccttcagggtcccatttgggccaaaattcctcacacagatggacactttcacccgtcccctcttatgggcggctttggactcaagaacccgcctcctcagatcctcatcaaaaacacgcctgttcctgcgaatcctccggcagagttttcagctacaaagtttgcttcattcatcacccaatactccacaggacaagtgagtgtggaaattgaatgggagctgcagaaagaaaacagcaagcgctggaatcccgaagtgcagtacacatccaattatgcaaaatctgccaacgttgattttactgtggacactaatggcgtgtattcagagcctcgccccattggcaccagatacctcacccgtaatctgtaa

SEQ ID NO: 5277 - protein, 735 aa, synthetic construct
  REGION 1..735: note = Description of Artificial Sequence: Synthetic polypeptide
MAADGYLPDWLEDNLSEGIREWWALKPGAPKPKANQQKQDDGRGLVLPGYKYLGPFNGLDKGEPVNAADAAALEHDKAYDQQLQAGDNPYLRYNHADAEFQERLQEDTSFGGNLGRAVFQAKKRVLEPFGLVEEGAKTAPGKKRPVEQSPQEPDSSSGIGKTGQQPAKKRLNFGQTGDSESVPDPQPLGEPPAAPTSLGSNTMASGGGAPMADNNEGADGVGNSSGNWHCDSTWMGDRVITTSTRTWALPTYNNHLYKQISSQSGASNDNHYFGYSTPWGYFDFNRFHCHFSPRDWQRLINNNWGFRPKKLNFKLFNIQVKEVTQNEGTKTIANNLTSTIQVFTDSEYQLPYVLGSAHQGCLPPFPADVFMIPQYGYLTLNNGSQAVGRSSFYCLEYFPSQMLRTGNNFQFTYTFEDVPFHSSYAHSQSLDRLMNPLIDQYLYYLSRTQTTGGTTNTQTLGFSQGGPNTMANQAKNWLPGPCYRQQRVSKTSADNNNSEYSWTGATKYHLNGRDSLVNPGPAMASHKDDEEKFFPQSGVLIFGKQGSEKTNVDIEKVMITDEEEIRTTNPVATEQYGSVSTNLQRGNRQAATADVNTQGVLPGMVWQDRDVYLQGPIWAKIPHTDGHFHPSPLMGGFGLKNPPPQILIKNTPVPANPPAEFSATKFASFITQYSTGQVSVEIEWELQKENSKRWNPEVQYTSNYAKSANVDFTVDTNGVYSEPRPIGTRYLTRNL

SEQ ID NO: 5278 - DNA, 2214 bp, synthetic construct; identical to SEQ ID NO: 5268
  misc_feature 1..2214: note = Description of Artificial Sequence: Synthetic polynucleotide
  source 1..2214: mol_type = other DNA

SEQ ID NO: 5279 - protein, 737 aa, synthetic construct; identical to SEQ ID NO: 5269
  REGION 1..737: note = Description of Artificial Sequence: Synthetic polypeptide

SEQ ID NO: 5280 - protein, 736 aa, synthetic construct; identical to SEQ ID NO: 5093
  REGION 1..736: note = Description of Artificial Sequence: Synthetic polypeptide

SEQ ID NO: 5281 - protein, 736 aa, synthetic construct
  REGION 1..736: note = Description of Artificial Sequence: Synthetic polypeptide
MAADGYLPDWLEDNLSEGIREWWDLKPGAPKPKANQQKQDDGRGLVLPGYKYLGPFNGLDKGEPVNAADAAALEHDKAYDQQLKAGDNPYLRYNHADAEFQERLQEDTSFGGNLGRAVFQAKKRVLEPLGLVEEGAKTAPGKKRPVEQSPQEPDSSSGIGKTGQQPAKKRLNFGQTGDSESVPDPQPLGEPPAAPSGLGPNTMASGGGAPMADNNEGADGVGNSSGNWHCDSTWLGDRVITTSTRTWALPTYNNHLYKQISNGTSGGSTNDNTYFGYSTPWGYFDFNRFHCHFSPRDWQRLINNNWGFRPKRLNFKLFNIQVKEVTTNEGTKTIANNLTSTVQVFTDSEYQLPYVLGSAHQGCLPPFPADVFMVPQYGYLTLNNGSQALGRSSFYCLEYFPSQMLRTGNNFQFSYTFEDVPFHSSYAHSQSLDRLMNPLIDQYLYYLVRTQTTGTGGTQTLAFSQAGPSSMANQARNWVPGPCYRQQRVSTTTNQNNNSNFAWTGAAKFKLNGRDSLMNPGVAMASHKDDEDRFFPSSGVLIFGKQGAGNDGVDYSQVLITDEEEIKATNPVATEEYGAVAINNQRANTQAQTGLVHNQGVIPGMVWQNRDVYLQGPIWAKIPHTDGNFHPSPLMGGFGLKHPPPQILIKNTPVPADPPLTFNQAKLNSFITQYSTGQVSVEIEWELQKENSKRWNPEIQYTSNYYKSTNVDFAVNTEGVYSEPRPIGTRYLTRNL

SEQ ID NO: 5282 - protein, 736 aa, synthetic construct
  REGION 1..736: note = Description of Artificial Sequence: Synthetic polypeptide
MAADGYLPDWLEDNLSEGIREWWDLKPGAPKPKANQQKQDDGRGLVLPGYKYLGPFNGLDKGEPVNAADAAALEHDKAYDQQLKAGDNPYLRYNHADAEFQERLQEDTSFGGNLGRAVFQAKKRVLEPLGLVEEGAKTAPGKKRPVEQSPQEPDSSSGIGKTGQQPAKKRLNFGQTGDSESVPDPQPLGEPPAAPSGLGPNTMASGGGAPMADNNEGADGVGNSSGNWHCDSTWLGDRVITTSTRTWALPTYNNHLYKQISNGTSGGSTNDNTYFGYSTPWGYFDFNRFHCHFSPRDWQRLINNNWGFRPKRLNFKLFNIQVKEVTTNEGTKTIANNLTSTVQVFTDSEYQLPYVLGSAHQGCLPPFPADVFMVPQYGYLTLNNGSQALGRSSFYCLEYFPSQMLRTGNNFQFSYTFEDVPFHSSYAHSQSLDRLMNPLIDQYLYYLVRTQTTGTGGTQTLAFSQAGPSSMANQARNWVPGPCYRQQRVSTTTNQNNNSNFAWTGAAKFKLNGRDSLMNPGVAMASHKDDEDAFFPSSGVLIFGKQGAGNDGVDYSQVLITDEEEIKATNPVATEEYGAVAINNQAANTQAQTGLVHNQGVIPGMVWQNRDVYLQGPIWAKIPHTDGNFHPSPLMGGFGLKHPPPQILIKNTPVPADPPLTFNQAKLNSFITQYSTGQVSVEIEWELQKENSKRWNPEIQYTSNYYKSTNVDFAVNTEGVYSEPRPIGTRYLTRNL

SEQ ID NO: 5283 - protein, 538 aa, synthetic construct
  REGION 1..538: note = Description of Artificial Sequence: Synthetic polypeptide
MRAAAGGNGGDAGQGAEGVGNASGDWHCDSTWSESHVTTTSTRTWVLPTYNNHLYLRLGSSNASDTFNGFSTPWGYFDFNRFHCHFSPRDWQRLINNHWGLRPKSMQVRIFNIQVKEVTTSNGETTVSNNLTSTVQIFADSTYELPYVMDAGQEGSLPPFPNDVFMVPQYGYCGLVTGGSSQNQTDRNAFYCLEYFPSQMLRTGNNFEMVYKFENVPFHSMYAHSQSLDRLMNPLLDQYLWELQSTTSGGTLNQGNSATNFAKLTKTNFSGYRKNWLPGPMMKQQRFSKTASQNYKIPQGRNNSLLHYETRTTLDGRWSNFAPGTAMATAANDATDFSQAQLIFAGPNITGNTTTDANNLMFTSEDELRATNPRDTDLFGHLATNQQNATTVPTVDDVDGVGVYPGMVWQDRDIYYQGPIWAKIPHTDGHFHPSPLIGGFGLKSPPPQIFIKNTPVPANPATTFSPARINSFITQYSTGQVAVKIEWEIQKERSKRWNPEVQFTSNYGAQDSLLWAPDNAGAYKEPRAIGSRYLTNHL

SEQ ID NO: 5284 - protein, 736 aa, synthetic construct
  REGION 1..736: note = Description of Artificial Sequence: Synthetic polypeptide
MSFVDHPPDWLESIGDGFREFLGLEAGPPKPKANQQKQDNARGLVLPGYKYLGPGNGLDKGDPVNFADEVAREHDLSYQKQLEAGDNPYLKYNHADAEFQEKLASDTSFGGNLGKAVFQAKKRILEPLGLVETPDKTAPAAKKRPLEQSPQEPDSSSGVGKKGKQPARKRLNFDDEPGAGDGPPPEGPSSGAMSTETEMRAAAGGNGGDAGQGAEGVGNASGDWHCDSTWSESHVTTTSTRTWVLPTYNNHLYLRLGSSNASDTFNGFSTPWGYFDFNRFHCHFSPRDWQRLINNHWGLRPKSMQVRIFNIQVKEVTTSNGETTVSNNLTSTVHIFADSTYELPYVMDAGQEGSLPPFPNDVFMVPQYGYCGLVTGGSSQNQTDRNAFYCLEYFPSQMLRTGNNFEMVYKFENVPFHSMYAHSQSLDRLMNPLLDQYLWELQSTTSGGTLNQGNSATNFAKLTNKNFSGYRKNWLPGPMMKQQRFSKTASQNYKIPQGGNNSLLHYETRTTLDRRWSNFAPGTAMATAANDATDFSQAQLIFAGPNITGNTTTDANNLMFTSEDELRATNPRDTDLFGHLATNQQNATTVPTVDDVDGVGVYPGMVWQDRDIYYQGPIWAKIPHTDGHFHPSPLIGGFGLKSPPPQIFIKNTPVPANPATTFSPARINSFITQYSTGQVAVKIEWEIQKERSKRWNPEVQFTSNYGAQDSLLWAPDNAGAYKEPRAIGSRYLTNHL

SEQ ID NO: 5285 - protein, 736 aa, synthetic construct
  REGION 1..736: note = Description of Artificial Sequence: Synthetic polypeptide
MSFVDHPPDWLESIGDGFREFLGLEAGPPKPKANQQKQDNARGLVLPGYKYLGPGNGLDKGDPVNFADEVAREHDLSYQKQLEAGDNPYLKYNHADAEFQEKLASDTSFGGNLGKAVFQAKKRILEPLGLVETPDKTAPAAKKRPLEQSPQEPDSSSGVGKKGKQPARKRLNFDDEPGAGDGPPPEGPSSGAMSTETEMRAAAGGNGGDAGQGAEGVGNASGDWHCDSTWSESHVTTTSTRTWVLPTYNNHLYLRLGSSNASDTFNGFSTPWGYFDFNRFHCHFSPRDWQRLINNHWGLRPKSMQVRIFNIQVKEVTTSNGETTVSNNLTSTVQIFADSTYELPYVMDAGQEGSLPPFPNDVFMVPQYGYCGLVTGGSSQNQTDRNAFYCLEYFPSQMLRTGNNFEMVYKFENVPFHSMYAHSQSLDRLMNPLLDQYLWELQSTTSGGTLNQGNSATNFAKLTKTNFSGYRKNWLPGPMMKQQRFSKTASQNYKIPQGRNNSLLHYETRTTLDGRWSNFAPGTAMATAANDATDFSQAQLIFAGPNITGNTTTDANNLMFTSEDELRATNPRDTDLFGHLATNQQNATTVPTVDDVDGVGVYPGMVWQDRDIYYQGPIWAKIPHTDGHFHPSPLIGGFGLKSPPPQIFIKNTPVPANPATTFSPARINSFITQYSTGQVAVKIEWEIQKERSKRWNPEVQFTSNYGAQDSLLWAPDNAGAYKEPRAIGSRYLTNHL

SEQ ID NO: 5286 - DNA, 2214 bp, synthetic construct
  misc_feature 1..2214: note = Description of Artificial Sequence: Synthetic polynucleotide
  source 1..2214: mol_type = other DNA
atggctgccgatggttatcttccagattggctcgaggacactctctctgaaggaataagacagtggtggaagctcaaacctggcccaccaccaccaaagcccgcagagcggcataaggacgacagcaggggtcttgtgcttcctgggtacaagtacctcggacccttcaacggactcgacaagggagagccggtcaacgaggcagacgccgcggccctcgagcacgacaaagcctacgaccggcagctcgacagcggagacaacccgtacctcaagtacaaccacgccgacgcggagtttcaggagcgccttaaagaagatacgtcttttgggggcaacctcgggcgagcagtcttccaggccaaaaagaggcttcttgaacctcttggtctggttgaggaagcggctaagacggctcctggaaagaagaggcctgtagagcagtctcctcaggaaccggactcctcctcgggcatcggcaagacaggccagcagcccgctaaaaagagactcaatttcggtcagactggcgacacagagtcagtcccagaccctcaaccaatcggagaacctcccgcagccccctcaggtgtgggatctcttacaatggcttcaggtggtggcgcaccagtggcagacaataacgaaggtgccgatggagtgggtagttcctcgggaaattggcattgcgattcccaatggctgggggacagagtcatcaccaccagcacccgaacctgggccctgcccacctacaacaatcacctctacaagcaaatctccaacgggacatcgggaggagccaccaacgacaacacctacttcggctacagcaccccctgggggtattttgactttaacagattccactgccacttttcaccacgtgactggcagcgactcatcaacaacaactggggattccggcccaagagactcagcttcaagctcttcaacatccaggtcaaggaggtcacgcagaatgaaggcaccaagaccatcgccaataaccttaccagcacggtccaggtcttcacggactcggagtaccagctgccgtacgttctcggctctgcccaccagggctgcctgcctccgttcccggcggacgtgttcatgattccccagtacggctacctaacactcaacaacggtagtcaggccgtgggacgctcctccttctactgcctggaatactttccttcgcagatgctgagaaccggcaacaacttccagtttacttacaccttcgaggacgtgcctttccacagcagctacgcccacagccagagcttggaccggctgatgaatcctctgattgaccagtacctgtactacttgtctcggactcaaacaacaggaggcacggcaaatacgcagactctgggcttcagccaaggtgggcctaatacaatggccaatcaggcaaagaactggctgccaggaccctgttaccgccaacaacgcgtctcaacgacaaccgggcaaaacaacaatagcaactttgcctggactgctgggaccaaataccatctgaatggaagaaattcattggctaatcctggcatcgctatggcaacacacaaagacgacaaggagcgtttttttcccagtaacgggatcctgatttttggcaaacaaaatgctgccagagacaatgcggattacagcgatgtcatgctcaccagcgaggaagaaatcaaaaccactaaccctgtggctacagaggaatacggtatcgtggcagataacttgcagcagcaaaacacggctcctcaaattggaactgtcaacagccagggggccttacccggtatggtttggcagaaccgggacgtgtacctgcagggtcccatctgggccaagattcctcacacggacggcaacttccacccgtctccgctgatgggcggctttggcctgaaacatcctccgcctcagatcctgatcaagaacacgcctgtacctgcggatcctccgaccaccttcaaccagtcaaagctgaactctttcatcacgcaatacagcaccggacaggtcagcgtggaaattgaatgggagctgcagaaggaaaacagcaagcgctggaaccccgagatccagtacacctccaactactacaaatctacaagtgtggactttgctgttaatacagaaggcgtgtactctgaaccccaccccattggcacccgttacctcacccgtcccctgtaa

SEQ ID NO: 5287 - protein, 737 aa, synthetic construct
  REGION 1..737: note = Description of Artificial Sequence: Synthetic polypeptide
MAADGYLPDWLEDTLSEGIRQWWKLKPGPPPPKPAERHKDDSRGLVLPGYKYLGPFNGLDKGEPVNEADAAALEHDKAYDRQLDSGDNPYLKYNHADAEFQERLKEDTSFGGNLGRAVFQAKKRLLEPLGLVEEAAKTAPGKKRPVEQSPQEPDSSSGIGKTGQQPAKKRLNFGQTGDTESVPDPQPIGEPPAAPSGVGSLTMASGGGAPVADNNEGADGVGSSSGNWHCDSQWLGDRVITTSTRTWALPTYNNHLYKQISNGTSGGATNDNTYFGYSTPWGYFDFNRFHCHFSPRDWQRLINNNWGFRPKRLSFKLFNIQVKEVTQNEGTKTIANNLTSTVQVFTDSEYQLPYVLGSAHQGCLPPFPADVFMIPQYGYLTLNNGSQAVGRSSFYCLEYFPSQMLRTGNNFQFTYTFEDVPFHSSYAHSQSLDRLMNPLIDQYLYYLSRTQTTGGTANTQTLGFSQGGPNTMANQAKNWLPGPCYRQQRVSTTTGQNNNSNFAWTAGTKYHLNGRNSLANPGIAMATHKDDKERFFPSNGILIFGKQNAARDNADYSDVMLTSEEEIKTTNPVATEEYGIVADNLQQQNTAPQIGTVNSQGALPGMVWQNRDVYLQGPIWAKIPHTDGNFHPSPLMGGFGLKHPPPQILIKNTPVPADPPTTFNQSKLNSFITQYSTGQVSVEIEWELQKENSKRWNPEIQYTSNYYKSTSVDFAVNTEGVYSEPHPIGTRYLTRPL

SEQ ID NO: 5288 - protein, 736 aa, synthetic construct
  REGION 1..736: note = Description of Artificial Sequence: Synthetic polypeptide
MAADGYLPDWLEDNLSEGIREWWDLKPGAPKPKANQQKQDDGRGLVLPGYKYLGPFNGLDKGEPVNAADAAALEHDKAYDQQLKAGDNPYLRYNHADAEFQERLQEDTSFGGNLGRAVFQAKKRVLEPLGLVEEGAKTAPGKKRPVEQSPQEPDSSSGIGKTGQQPAKKRLNFGQTGDTESVPDPQPIGEPPAAPSGVGSLTMASGGGAPVADNNEGADGVGSSSGNWHCDSQWLGDRVITTSTRTWALPTYNNHLYKQISSASTGASNDNHYFGYSTPWGYFDFNRFHCHFSPRDWQRLINNNWGFRPKRLNFKLFNIQVKEVTDNNGVKTIANNLTSTVQVFTDSDYQLPYVLGSAHQGCLPPFPADVFMIPQYGYLTLNNGSQAVGRSSFYCLEYFPSQMLRTGNNFQFTYTFEDVPFHSSYAHSQSLDRLMNPLIDQYLYYLSRTQTTGGTANTQTLGFSQGGPNTMANQAKNWLPGPCYRQQRVSTTTGQNNNSNFAWTAGTKYHLNGRNSLANPGIAMATHKDDKERFFPSNGILIFGKQNAARDNADYSDVMLTSEEEIKTTNPVATEEYGIVADNLQQQNTAPQIGTVNSQGALPGMVWQNRDVYLQGPIWAKIPHTDGNFHPSPLMGGFGLKHPPPQILIKNTPVPADPPTTFNQSKLNSFITQYSTGQVSVEIEWELQKENSKRWNPEIQYTSNYYKSTSVDFAVNTEGVYSEPHPIGTRYLTRPL

SEQ ID NO: 5289 - protein, 736 aa, synthetic construct
  REGION 1..736: note = Description of Artificial Sequence: Synthetic polypeptide
MAADGYLPDWLEDTLSEGIRQWWKLKPGPPPPKPAERHKDDSRGLVLPGYKYLGPFNGLDKGEPVNEADAAALEHDKAYDRQLDSGDNPYLKYNHADAEFQERLQGDTSFGGNLGRAVFQAKKRVLEPLGLVEEGAKTAPGKKRPVEQSPQEPDSSSGIGETGQQPAKKRLNFGQTGDSESVPDPQPLGEPPATPAAVGPTTMASGGGAPMADNNEGADGVGSSSGNWHCDSQWLGDRVITTSTRTWALPTYNNHLYKQISSASTGASNDNHYFGYSTPWGYFDFNRFHCHFSPRDWQRLINNNWGFRPKRLSFKLFNIQVKEVTDNNGVKTIANNLTSTVQVFTDSEYQLPYVLGSAHQGCLPPFPADVFMIPQYGYLTLNNGSQAVGRSSFYCLEYFPSQMLRTGNNFTFSYTFEDVPFHSSYAHSQSLDRLMNPLIDQYLYYLSRTQTTGGTANTQTLGFSQGGPNTMANQAKNWLPGPCYRQQRVSTTTGQNNNSNFAWTAGTKYHLNGRNSLANPGIAMATHKDDKERFFPSNGILIFGKQNAARDNADYSDVMLTSEEEIKTTNPVATEEYGIVADNLQQQNTAPQIGTVNSQGALPGMVWQNRDVYLQGPIWAKIPHTDGNFHPSPLMGGFGLKHPPPQILIKNTPVPADPPTTFNQSKLNSFITQYSTGQVSVEIEWELQKENSKRWNPEIQYTSNYYKSTSVDFAVNTEGVYSEPHPIGTRYLTRPL

SEQ ID NO: 5290 - DNA, 2181 bp, synthetic construct
  misc_feature 1..2181: note = Description of Artificial Sequence: Synthetic polynucleotide
  source 1..2181: mol_type = other DNA
atgtcttttgttgatcaccctccagattggttggaagaagttggtgaaggtcttcgcgagtttttgggccttgaagcgggcccaccgaaaccaaaacccaatcagcagcatcaagatcaagcccgtggtcttgtgctgcctggttataactatctcggacccggaaacggtctcgatcgaggagagcctgtcaacagggcagacgaggtcgcgcgagagcacgacatctcgtacaacgagcagcttgaggcgggagacaacccctacctcaagtacaaccacgcggacgccgagtttcaggagaagctcgccgacgacacatccttcgggggaaacctcggaaaggcagtctttcaggccaagaaaagggttctcgaaccttttggcctggttgaagagggtgctaagacggcccctaccggaaagcggatagacgaccactttccaaaaagaaagaaggctcggaccgaagaggactccaagccttccacctcgtcagacgccgaagctggacccagcggatcccagcagctgcaaatcccagcacaaccagcctcaagtttgggagctgatacaatgtctgcgggaggtggcggcccattgggcgacaataaccaaggtgccgatggagtgggcaatgcctcgggagattggcattgcgattccacgtggatgggggacagagtcgtcaccaagtccacccgcacctgggtgctgcccagctacaacaaccaccagtaccgagagatcaaaagcggctccgtcgacggaagcaacgccaacgcctactttggatacagcaccccctgggggtactttgactttaaccgcttccacagccactggagcccccgagactggcaaagactcatcaacaactattggggcttcagaccccggtctctcagagtcaaaatcttcaacatccaagtcaaagaggtcacggtgcaggactccaccaccaccatcgccaacaacctcacctccaccgtccaagtgtttacggacgacgactaccaactcccgtacgtcgtcggcaacgggaccgagggatgcctgccggccttccccccgcaggtctttacgctgccgcagtacggctacgcgacgctgaaccgagacaacggagacaacccgacagagcggagcagcttcttttgcctagagtactttcccagcaagatgctgaggacgggcaacaactttgagtttacctacagctttgaagaggtgcccttccactgcagcttcgccccgagccagaacctctttaagctggccaacccgctggtggaccagtacctgtaccgcttcgtgagcacctcggccacgggcgccatccagttccaaaagaacctggcgggcagatacgccaacacctacaaaaactggttcccggggcccatgggccgaacccagggctggaacacgagctctggggtcagcagcaccaacagagtcagcgtcaacaacttttccgtctcaaaccggatgaacctggagggggccagctaccaagtgaacccccagcccaacgggatgacaaacacgctccaaggcagcaaccgctacgcgctggaaaacaccatgatcttcaacgctcaaaacgccacgccgggaactacctcggtgtacccagaggacaatctactgctgaccagcgagagcgagactcagcccgtcaaccgggtggcttacaacacgggcggtcagatggccaccaacgcccagaacgccaccacggctcccacggtcgggacctacaacctccaggaagtgcttcctggcagcgtatggatggagagggacgtgtacctccaaggacccatctgggccaagatcccagagacgggggcgcactttcacccctctccggccatgggcggattcggactcaaacacccgccgcccatgatgctcatcaaaaacacgccggtgcccggcaacatcaccagcttctcggacgtgcccgtcagcagcttcatcacccagtacagcaccgggcaggtcaccgtggagatggaatgggagctcaaaaaggaaaactccaagaggtggaacccagagatccagtacaccaacaactacaacgacccccagtttgtggactttgctccagacggctccggcgaatacagaaccaccagagccatcggaacccgatacctcacccgacccctt

SEQ ID NO: 5291 - protein, 726 aa, synthetic construct
  REGION 1..726: note = Description of Artificial Sequence: Synthetic polypeptide
MSFVDHPPDWLEEVGEGLREFLGLEAGPPKPKPNQQHQDQARGLVLPGYNYLGPGNGLDRGEPVNRADEVAREHDISYNEQLEAGDNPYLKYNHADAEFQEKLADDTSFGGNLGKAVFQAKKRVLEPFGLVEEGAKTAPTGKRIDDHFPKRKKARTEEDSKPSTSSDAEAGPSGSQQLQIPAQPASSLGADTMSAGGGGPLGDNNQGADGVGNASGDWHCDSTWMGDRVVTKSTRTWVLPSYNNHQYREIKSGSVDGSNANAYFGYSTPWGYFDFNRFHSHWSPRDWQRLINNYWGFRPRSLRVKIFNIQVKEVTVQDSTTTIANNLTSTVQVFTDDDYQLPYVVGNGTEGCLPAFPPQVFTLPQYGYATLNRDNGDNPTERSSFFCLEYFPSKMLRTGNNFEFTYSFEEVPFHCSFAPSQNLFKLANPLVDQYLYRFVSTSATGAIQFQKNLAGRYANTYKNWFPGPMGRTQGWNTSSGSSTNRVSVNNFSVSNRMNLEGASYQVNPQPNGMTNTLQGSNRYALENTMIFNAQNATPGTTSVYPEDNLLLTSESETQPVNRVAYNTGGQMATNAQNATTAPTVGTYNLQEVLPGSVWMERDVYLQGPIWAKIPETGAHFHPSPAMGGFGLKHPPPMMLIKNTPVPGNITSFSDVPVSSFITQYSTGQVTVEMEWELKKENSKRWNPEIQYTNNYNDPQFVDFAPDGSGEYRTTRAIGTRYLTRPL

SEQ ID NO: 5292 - protein, 735 aa, synthetic construct
  REGION 1..735: note = Description of Artificial Sequence: Synthetic polypeptide
MAADGYLPDWLEDTLSEGIRQWWKLKPGPPPPKPAERHKDDSRGLVLPGYKYLGPFNGLDKGEPVNEADAAALEHDKAYDRQLDSGDNPYLKYNHADAEFQERLKEDTSFGGNLGRAVFQAKKRILEPLGLVEEPVKTAPGKKRPVEHSPAEPDSSSGTGKSGQQPARKRLNFGQTGDADSVPDPQPLGQPPAAPSGLGTNTMASGSGAPMADNNEGADGVGNSSGNWHCDSTWMGDRVITTSTRTWALPTYNNHLYKQISSQSGASNDNHYFGYSTPWGYFDFNRFHCHFSPRDWQRLINNNWGFRPKRLSFKLFNIQVKEVTQNDGTTTIANNLTSTVQVFTDSEYQLPYVLGSAHQGCLPPFPADVFMVPQYGYLTLNNGSQAVGRSSFYCLEYFPSQMLRTGNNFTFSYTFEDVPFHSSYAHSQSLDRLMNPLIDQYLYYLSRTNTPSGTTTMSRLQFSQAGASDIRDQSRNWLPGPCYRQQRVSKTAADNNNSDYSWTGATKYHLNGRDSLVNPGPAMASHKDDEEKYFPQSGVLIFGKQDSGKTNVDIEKVMITDEEEIRTTNPVATEQYGSVSTNLQSGNTQAATSDVNTQGVLPGMVWQDRDVYLQGPIWAKIPHTDGHFHPSPLMGGFGLKHPPPQILIKNTPVPANPSTTFSAAKFASFITQYSTGQVSVEIEWELQKENSKRWNPEIQYTSNYNKSVNVDFTVDTNGVYSEPRPIGTRYLTRNL

SEQ ID NO: 5293 - DNA, 1803 bp, Bovine adeno-associated virus
  source 1..1803: mol_type = genomic DNA
acggcgcctgcggcaaaaaagaggcctctagagcagagtcctcaagagccagactcctcgagcggagttggcaagaaaggcaaacagcctgccagaaagagactcaactttgacgacgaacctggagccggagacgggcctcccccagaaggaccatcttccggagctatgtctactgagactgaaatgcgtgcagcagctggcggaaatggtggcgatgcgggacaaggtgccgagggagtgggtaatgcctccggtgattggcattgcgattccacttggtcagagagccacgtcaccaccacctcaacccgcacctgggtcctgccgacctacaacaaccacctgtacctgcggctcggctcgagcaacgccagcgacaccttcaacggattctccaccccctggggatactttgactttaaccgcttccactgccacttctcgccaagagactggcaaaggctcatcaacaaccactggggactgcgccccaaaagcatgcaagtccgcatcttcaacatccaagttaaggaggtcacgacgtctaacggggagacgaccgtatccaacaacctcaccagcacggtccagatctttgcggacagcacgtacgagctcccgtacgtgatggatgcaggtcaggagggcagcttgcctcctttccccaacgacgtgttcatggtgcctcagtacgggtactgcggactggtaaccggaggcagctctcaaaaccagacagacagaaatgccttctactgtctggagtactttcccagccagatgctgagaaccggaaacaactttgagatggtgtacaagtttgaaaacgtgcccttccactccatgtacgctcacagccagagcctggataggctgatgaacccgctgctggaccagtacctgtgggagctccagtctaccacctctggaggaactctcaaccagggcaattcagccaccaactttgccaagctgaccaaaacaaacttttctggctaccgcaaaaactggctcccggggcccatgatgaagcagcagagattctccaagactgccagtcaaaactacaagattccccagggaagaaacaacagtctgctccattatgagaccagaactaccctcgacggaagatggagcaattttgccccgggaacggccatggcaaccgcagccaacgacgccaccgacttctctcaggcccagctcatctttgcggggcccaacatcaccggcaacaccaccacagatgccaataacctgatgttcacttcagaagatgaacttagggccaccaacccccgggacactgacctgtttggccacctggcaaccaaccagcaaaacgccaccaccgttcctaccgtagacgacgtggacggagtcggcgtgtacccgggaatggtgtggcaggacagagacatttactaccaagggcccatttgggccaaaattccacacacggatggacactttcacccgtctcctctcattggcggatttggactgaaaagcccgcctccacaaatattcatcaaaaacactcctgtacccgccaatcccgcaacgaccttctctccggccagaatcaacagcttcatcacccagtacagcaccggacaggtggctgtcaaaatagaatgggaaatccagaaggagcggtccaagagatggaacccagaggtccagttcacgtccaactacggagcacaggactcgcttctctgggctcccgacaacgccggagcctacaaagagcccagggccattggatcccgatacctcaccaaccacctctag

SEQ ID NO: 5294 - DNA, 1617 bp, Bovine adeno-associated virus
  source 1..1617: mol_type = genomic DNA
atgcgtgcagcagctggcggaaatggtggcgatgcgggacaaggtgccgagggagtgggtaatgcctccggtgattggcattgcgattccacttggtcagagagccacgtcaccaccacctcaacccgcacctgggtcctgccgacctacaacaaccacctgtacctgcggctcggctcgagcaacgccagcgacaccttcaacggattctccaccccctggggatactttgactttaaccgcttccactgccacttctcgccaagagactggcaaaggctcatcaacaaccactggggactgcgccccaaaagcatgcaagtccgcatcttcaacatccaagttaaggaggtcacgacgtctaacggggagacgaccgtatccaacaacctcaccagcacggtccagatctttgcggacagcacgtacgagctcccgtacgtgatggatgcaggtcaggagggcagcttgcctcctttccccaacgacgtgttcatggtgcctcagtacgggtactgcggactggtaaccggaggcagctctcaaaaccagacagacagaaatgccttctactgtctggagtactttcccagccagatgctgagaaccggaaacaactttgagatggtgtacaagtttgaaaacgtgcccttccactccatgtacgctcacagccagagcctggataggctgatgaacccgctgctggaccagtacctgtgggagctccagtctaccacctctggaggaactctcaaccagggcaattcagccaccaactttgccaagctgaccaaaacaaacttttctggctaccgcaaaaactggctcccggggcccatgatgaagcagcagagattctccaagactgccagtcaaaactacaagattccccagggaagaaacaacagtctgctccattatgagaccagaactaccctcgacggaagatggagcaattttgccccgggaacggccatggcaaccgcagccaacgacgccaccgacttctctcaggcccagctcatctttgcggggcccaacatcaccggcaacaccaccacagatgccaataacctgatgttcacttcagaagatgaacttagggccaccaacccccgggacactgacctgtttggccacctggcaaccaaccagcaaaacgccaccaccgttcctaccgtagacgacgtggacggagtcggcgtgtacccgggaatggtgtggcaggacagagacatttactaccaagggcccatttgggccaaaattccacacacggatggacactttcacccgtctcctctcattggcggatttggactgaaaagcccgcctccacaaatattcatcaaaaacactcctgtacccgccaatcccgcaacgaccttctctccggccagaatcaacagcttcatcacccagtacagcaccggacaggtggctgtcaaaatagaatgggaaatccagaaggagcggtccaagagatggaacccagaggtccagttcacgtccaactacggagcacaggactcgcttctctgggctcccgacaacgccggagcctacaaagagcccagggccattggatcccgatacctcaccaaccacctctag

SEQ ID NO: 5295 - DNA, 1173 bp, Bovine adeno-associated virus
  source 1..1173: mol_type = genomic DNA
atggcgctggtaagctggctggtggaacatggcatcacttccgagaagcagtggattcaggagaatcaggagagctacctgtccttcaactccacgggaaactctcggagccagattaaagccgcgcttgacaacgcgtcaaaaattatgagtctgaccaaatctgcctcagactatctcgtgggacagactgttccagaggacatttctgaaaacagaatctggcagatttttgatctcaacggctacgacccggcatacgcgggctctgttctctacggctggtgcactcgcgcctttggaaagaggaacaccgtctggctgtatggacccgcgaccaccggaaagaccaacatcgcggaagccatctctcacaccgtgcccttttatggctgtgtgaactggactaatgagaactttccctttaatgactgtgtggaaaaaatgttgatctggtgggaggagggaaagatgaccagcaaggtggtggaacccgccaaggccatcttgggggggtctagagtacgagtggatcaaaaatgtaaatcctctgtacaagtagactctaccccggtgattatcacctccaatactaacatgtgtgtggtggtggatgggaactccacgacctttgaacaccagcagccgctggaagaccgcatgttcagatttgaactcatgcggcggctcccgccagattttggcaagattaccaagcaggaagtcaaagacttttttgcttgggcaaaggtcaaccaggtgccggtgactcacgagtttatggttcccaagaaagtggcgggaactgagagggcggagacttctagaaaacgcccactggatgacgtcaccaataccaactataaaagtccggagaagcgggcccggctctcagttgttcctgagacgcctcgcagttcagacgtgcctgtagagcccgctcctctgcgacctctcaactggtcttccaggtatgaatgcagatgtgactatcatgctaaatttgactctgtaacgggggaatgtgacgagtgtgaatatttgaatcggggcaaaaatggctgtatctttcataatgctacacattgtcaaatttgtcacgctgttcctccatgggaaaaggaaaatgtgtcagattttaatgattttgatgactgtaataaagagcagtaa

SEQ ID NO: 5296 - DNA, 1833 bp, Bovine adeno-associated virus
  source 1..1833: mol_type = genomic DNA
atggctaccttctatgaagtcattgttcgcgttccatttgatgtggaagagcacctgcctggaatttctgacaactttgtagactgggtaactggtcaaatttgggagctgcctcccgagtcagatttgaatttgactctgattgagcagcctcagctgacggtggctgacagaattcgccgcgtgttcctgtacgagtggaacaaattttccaagcaggagagcaaattctttgtgcagtttgaaaagggatctgaatattttcatctgcacacgctcgtggagacctccggcatctcttctatggtccttggccgctacgtgagtcagattcgcgcccagctggtgaaggtggtgttccagaacattgagccgcggattaacgactgggtcgccatcaccaaggtaaagaagggcggagccaataaggtggtggattctgggtatattcccgcctacctgctgccgaaggtccaaccagagcttcagtgggcgtggactaacctcgaagagtataaattggccgccctcaatctggaggagcgcaaacggctcgtcgctcagtttcagcttgagtcctcgcagcgctcgcaagaggcatcttcccagagggacgtttcggctgacccggtcatcaagagcaagacttcccagaaatacatggcgctggtaagctggctggtggaacatggcatcacttccgagaagcagtggattcaggagaatcaggagagctacctgtccttcaactccacgggaaactctcggagccagattaaagccgcgcttgacaacgcgtcaaaaattatgagtctgaccaaatctgcctcagactatctcgtgggacagactgttccagaggacatttctgaaaacagaatctggcagatttttgatctcaacggctacgacccggcatacgcgggctctgttctctacggctggtgcactcgcgcctttggaaagaggaacaccgtctggctgtatggacccgcgaccaccggaaagaccaacatcgcggaagccatctctcacaccgtgcccttttatggctgtgtgaactggactaatgagaactttccctttaatgactgtgtggaaaaaatgttgatctggtgggaggagggaaagatgaccagcaaggtggtggaacccgccaaggccatcttgggggggtctagagtacgagtggatcaaaaatgtaaatcctctgtacaagtagactctaccccggtgattatcacctccaatactaacatgtgtgtggtggtggatgggaactccacgacctttgaacaccagcagccgctggaagaccgcatgttcagatttgaactcatgcggcggctcccgccagattttggcaagattaccaagcaggaagtcaaagacttttttgcttgggcaaaggtcaaccaggtgccggtgactcacgagtttatggttcccaagaaagtggcgggaactgagagggcggagacttctagaaaacgcccactggatgacgtcaccaataccaactataaaagtccggagaagcgggcccggctctcagttgttcctgagacgcctcgcagttcagacgtgcctgtagagcccgctcctctgcgacctctcaactggtcttccaggtatgaatgcagatgtgactatcatgctaaatttgactctgtaacgggggaatgtgacgagtgtgaatatttgaatcggggcaaaaatggctgtatctttcataatgctacacattgtcaaatttgtcacgctgttcctccatgggaaaaggaaaatgtgtcagattttaatgattttgatgactgtaataaagagcagtaa

SEQ ID NO: 5297 - DNA, 2211 bp, Bovine adeno-associated virus
  source 1..2211: mol_type = genomic DNA
atgtcttttgttgaccaccctccagattggttggaatcgatcggcgacggctttcgtgaatttctcggccttgaggcgggtcccccgaaacccaaggccaatcaacagaagcaagataacgctcgaggtcttgtgcttcctgggtacaagtatcttggtcctgggaacggccttgataagggcgatcctgtcaattttgctgacgaggttgcccgagagcacgacctctcctaccagaaacagcttgaggcgggcgataacccttacctcaagtacaaccacgcggacgcagagtttcaggagaaactcgcttctgacacttcttttgggggaaaccttgggaaggctgttttccaggctaaaaagaggattctcgaacctcttggcctggttgagacgccggataaaacggcgcctgcggcaaaaaagaggcctctagagcagagtcctcaagagccagactcctcgagcggagttggcaagaaaggcaaacagcctgccagaaagagactcaactttgacgacgaacctggagccggagacgggcctcccccagaaggaccatcttccggagctatgtctactgagactgaaatgcgtgcagcagctggcggaaatggtggcgatgcgggacaaggtgccgagggagtgggtaatgcctccggtgattggcattgcgattccacttggtcagagagccacgtcaccaccacctcaacccgcacctgggtcctgccgacctacaacaaccacctgtacctgcggctcggctcgagcaacgccagcgacaccttcaacggattctccaccccctggggatactttgactttaaccgcttccactgccacttctcgccaagagactggcaaaggctcatcaacaaccactggggactgcgccccaaaagcatgcaagtccgcatcttcaacatccaagttaaggaggtcacgacgtctaacggggagacgaccgtatccaacaacctcaccagcacggtccagatctttgcggacagcacgtacgagctcccgtacgtgatggatgcaggtcaggagggcagcttgcctcctttccccaacgacgtgttcatggtgcctcagtacgggtactgcggactggtaaccggaggcagctctcaaaaccagacagacagaaatgccttctactgtctggagtactttcccagccagatgctgagaaccggaaacaactttgagatggtgtacaagtttgaaaacgtgcccttccactccatgtacgctcacagccagagcctggataggctgatgaacccgctgctggaccagtacctgtgggagctccagtctaccacctctggaggaactctcaaccagggcaattcagccaccaactttgccaagctgaccaaaacaaacttttctggctaccgcaaaaactggctcccggggcccatgatgaagcagcagagattctccaagactgccagtcaaaactacaagattccccagggaagaaacaacagtctgctccattatgagaccagaactaccctcgacggaagatggagcaattttgccccgggaacggccatggcaaccgcagccaacgacgccaccgacttctctcaggcccagctcatctttgcggggcccaacatcaccggcaacaccaccacagatgccaataacctgatgttcacttcagaagatgaacttagggccaccaacccccgggacactgacctgtttggccacctggcaaccaaccagcaaaacgccaccaccgttcctaccgtagacgacgtggacggagtcggcgtgtacccgggaatggtgtggcaggacagagacatttactaccaagggcccatttgggccaaaattccacacacggatggacactttcacccgtctcctctcattggcggatttggactgaaaagcccgcctccacaaatattcatcaaaaacactcctgtacccgccaatcccgcaacgaccttctctccggccagaatcaacagcttcatcacccagtacagcaccggacaggtggctgtcaaaatagaatgggaaatccagaaggagcggtccaagagatggaacccagaggtccagttcacgtccaactacggagcacaggactcgcttctctgggctcccgacaacgccggagcctacaaagagcccagggccattggatcccgatacctcaccaaccacctctag

SEQ ID NO: 5298 - DNA, 4694 bp, Bovine adeno-associated virus
  source 1..4694: mol_type = genomic DNA
gtggcactcccccccctgtcgcgttcgctcgttcgctggctcgattgggggggtggcagctcaaagagctgccagacgacggccctctgggccgtcgcccccccaatcgagccagcgaacgagcgaacgcgacaggggggggagtgccacactctctagcaagggggttttgtaggtggtgatgtcattgttgatgtcattatagttgtcacgcgatagttaatgattaacagtcatgtgatgtgtgttatccaataggatgaaagcgcgcgaatgagatctcgcgagacttccggggtataaaaggggtgagtgaacgagcccgccgccattctctgctctggactgctagaggaccctcgctgccatggctaccttctatgaagtcattgttcgcgttccatttgatgtggaagagcacctgcctggaatttctgacaactttgtagactgggtaactggtcaaatttgggagctgcctcccgagtcagatttgaatttgactctgattgagcagcctcagctgacggtggctgacagaattcgccgcgtgttcctgtacgagtggaacaaattttccaagcaggagagcaaattctttgtgcagtttgaaaagggatctgaatattttcatctgcacacgctcgtggagacctccggcatctcttctatggtccttggccgctacgtgagtcagattcgcgcccagctggtgaaggtggtgttccagaacattgagccgcggattaacgactgggtcgccatcaccaaggtaaagaagggcggagccaataaggtggtggattctgggtatattcccgcctacctgctgccgaaggtccaaccagagcttcagtgggcgtggactaacctcgaagagtataaattggccgccctcaatctggaggagcgcaaacggctcgtcgctcagtttcagcttgagtcctcgcagcgctcgcaagaggcatcttcccagagggacgtttcggctgacccggtcatcaagagcaagacttcccagaaatacatggcgctggtaagctggctggtggaacatggcatcacttccgagaagcagtggattcaggagaatcaggagagctacctgtccttcaactccacgggaaactctcggagccagattaaagccgcgcttgacaacgcgtcaaaaattatgagtctgaccaaatctgcctcagactatctcgtgggacagactgttccagaggacatttctgaaaacagaatctggcagatttttgatctcaacggctacgacccggcatacgcgggctctgttctctacggctggtgcactcgcgcctttggaaagaggaacaccgtctggctgtatggacccgcgaccaccggaaagaccaacatcgcggaagccatctctcacaccgtgcccttttatggctgtgtgaactggactaatgagaactttccctttaatgactgtgtggaaaaaatgttgatctggtgggaggagggaaagatgaccagcaaggtggtggaacccgccaaggccatcttgggggggtctagagtacgagtggatcaaaaatgtaaatcctctgtacaagtagactctaccccggtgattatcacctccaatactaacatgtgtgtggtggtggatgggaactccacgacctttgaacaccagcagccgctggaagaccgcatgttcagatttgaactcatgcggcggctcccgccagattttggcaagattaccaagcaggaagtcaaagacttttttgcttgggcaaaggtcaaccaggtgccggtgactcacgagtttatggttcccaagaaagtggcgggaactgagagggcggagacttctagaaaacgcccactggatgacgtcaccaataccaactataaaagtccggagaagcgggcccggctctcagttgttcctgagacgcctcgcagttcagacgtgcctgtagagcccgctcctctgcgacctctcaactggtcttccaggtatgaatgcagatgtgactatcatgctaaatttgactctgtaacgggggaatgtgacgagtgtgaatatttgaatcggggcaaaaatggctgtatctttcataatgctacacattgtcaaatttgtcacgctgttcctccatgggaaaaggaaaatgtgtcagattttaatgattttgatgactgtaataaagagcagtaaataaagtgagtagtcatgtcttttgttgaccaccctccagattggttggaatcgatcggcgacggctttcgtgaatttctcggccttgaggcgggtcccccgaaacccaaggccaatcaacagaagcaagataacgctcgaggtcttgtgcttcctgggtacaagtatcttggtcctgggaacggccttgataagggcgatcctgtcaattttgctgacgaggttgcccgagagcacgacctctcctaccagaaacagcttgaggcgggcgataacccttacctcaagtacaaccacgcggacgcagagtttcaggagaaactcgcttctgacacttcttttgggggaaaccttgggaaggctgttttccaggctaaaaagaggattctcgaacctcttggcctggttgagacgccggataaaacggcgcctgcggcaaaaaagaggcctctagagcagagtcctcaagagccagactcctcgagcggagttggcaagaaaggcaaacagcctgccagaaagagactcaactttgacgacgaacctggagccggagacgggcctcccccagaaggaccatcttccggagctatgtctactgagactgaaatgcgtgcagcagctggcggaaatggtggcgatgcgggacaaggtgccgagggagtgggtaatgcctccggtgattggcattgcgattccacttggtcagagagccacgtcaccaccacctcaacccgcacctgggtcctgccgacctacaacaaccacctgtacctgcggctcggctcgagcaacgccagcgacaccttcaacggattctccaccccctggggatactttgactttaaccgcttccactgccacttctcgccaagagactggcaaaggctcatcaacaaccactggggactgcgccccaaaagcatgcaagtccgcatcttcaacatccaagttaaggaggtcacgacgtctaacggggagacgaccgtatccaacaacctcaccagcacggtccagatctttgcggacagcacgtacgagctcccgtacgtgatggatgcaggtcaggagggcagcttgcctcctttccccaacgacgtgttcatggtgcctcagtacgggtactgcggactggtaaccggaggcagctctcaaaaccagacagacagaaatgccttctactgtctggagtactttcccagccagatgctgagaaccggaaacaactttgagatggtgtacaagtttgaaaacgtgcccttccactccatgtacgctcacagccagagcctggataggctgatgaacccgctgctggaccagtacctgtgggagctccagtctaccacctctggaggaactctcaaccagggcaattcagccaccaactttgccaagctgaccaaaacaaacttttctggctaccgcaaaaactggctcccggggcccatgatgaagcagcagagattctccaagactgccagtcaaaactacaagattccccagggaagaaacaacagtctgctccattatgagaccagaactaccctcgacggaagatggagcaattttgccccgggaacggccatggcaaccgcagccaacgacgccaccgacttctctcaggcccagctcatctttgcggggcccaacatcaccggcaacaccaccacagatgccaataacctgatgttcacttcagaagatgaacttagggccaccaacccccgggacactgacctgtttggccacctggcaaccaaccagcaaaacgccaccaccgttcctaccgtagacgacgtggacggagtcggcgtgtacccgggaatggtgtggcaggacagagacatttactaccaagggcccatttgggccaaaattccacacacggatggacactttcacccgtctcctctcattggcggatttggactgaaaagcccgcctccacaaatattcatcaaaaacactcctgtacccgccaatcccgcaacgaccttctctccggccagaatcaacagcttcatcacccagtacagcaccggacaggtggctgtcaaaatagaatgggaaatccagaaggagcggtccaagagatggaacccagaggtccagttcacgtccaactacggagcacaggactcgcttctctgggctcccgacaacgccggagcctacaaagagcccagggccattggatcccgatacctcaccaaccacctctagcccaattctgttgcataccctcaataaaccgtgtattcgtttcagtaaaatactgcctcttgtggtcattcggcgtacaacagcttacaacaacaacaaaacccccttgctagagagtgtggcactcccccccctgtcgcgttcgctcgttcgctggctcgattgggggggtggcagctcaaagagctgccagacgacggccctctgggccgtcgcccccccaatcgagccagcgaacgagcgaacgcgacaggggggggagtgccac

SEQ ID NO: 5299 - protein, 390 aa, Bovine adeno-associated virus
MALVSWLVEHGITSEKQWIQENQESYLSFNSTGNSRSQIKAALDNASKIMSLTKSASDYLVGQTVPEDISENRIWQIFDLNGYDPAYAGSVLYGWCTRAFGKRNTVWLYGPATTGKTNIAEAISHTVPFYGCVNWTNENFPFNDCVEKMLIWWEEGKMTSKVVEPAKAILGGSRVRVDQKCKSSVQVDSTPVIITSNTNMCVVVDGNSTTFEHQQPLEDRMFRFELMRRLPPDFGKITKQEVKDFFAWAKVNQVPVTHEFMVPKKVAGTERAETSRKRPLDDVTNTNYKSPEKRARLSVVPETPRSSDVPVEPAPLRPLNWSSRYECRCDYHAKFDSVTGECDECEYLNRGKNGCIFHNATHCQICHAVPPWEKENVSDFNDFDDCNKEQ

SEQ ID NO: 5300 - protein, 610 aa, Bovine adeno-associated virus
MATFYEVIVRVPFDVEEHLPGISDNFVDWVTGQIWELPPESDLNLTLIEQPQLTVADRIRRVFLYEWNKFSKQESKFFVQFEKGSEYFHLHTLVETSGISSMVLGRYVSQIRAQLVKVVFQNIEPRINDWVAITKVKKGGANKVVDSGYIPAYLLPKVQPELQWAWTNLEEYKLAALNLEERKRLVAQFQLESSQRSQEASSQRDVSADPVIKSKTSQKYMALVSWLVEHGITSEKQWIQENQESYLSFNSTGNSRSQIKAALDNASKIMSLTKSASDYLVGQTVPEDISENRIWQIFDLNGYDPAYAGSVLYGWCTRAFGKRNTVWLYGPATTGKTNIAEAISHTVPFYGCVNWTNENFPFNDCVEKMLIWWEEGKMTSKVVEPAKAILGGSRVRVDQKCKSSVQVDSTPVIITSNTNMCVVVDGNSTTFEHQQPLEDRMFRFELMRRLPPDFGKITKQEVKDFFAWAKVNQVPVTHEFMVPKKVAGTERAETSRKRPLDDVTNTNYKSPEKRARLSVVPETPRSSDVPVEPAPLRPLNWSSRYECRCDYHAKFDSVTGECDECEYLNRGKNGCIFHNATHCQICHAVPPWEKENVSDFNDFDDCNKEQ

SEQ ID NO: 5301 - protein, 736 aa, Bovine adeno-associated virus; identical to SEQ ID NO: 5285

SEQ ID NO: 5302 - protein, 600 aa, Bovine adeno-associated virus
TAPAAKKRPLEQSPQEPDSSSGVGKKGKQPARKRLNFDDEPGAGDGPPPEGPSSGAMSTETEMRAAAGGNGGDAGQGAEGVGNASGDWHCDSTWSESHVTTTSTRTWVLPTYNNHLYLRLGSSNASDTFNGFSTPWGYFDFNRFHCHFSPRDWQRLINNHWGLRPKSMQVRIFNIQVKEVTTSNGETTVSNNLTSTVQIFADSTYELPYVMDAGQEGSLPPFPNDVFMVPQYGYCGLVTGGSSQNQTDRNAFYCLEYFPSQMLRTGNNFEMVYKFENVPFHSMYAHSQSLDRLMNPLLDQYLWELQSTTSGGTLNQGNSATNFAKLTKTNFSGYRKNWLPGPMMKQQRFSKTASQNYKIPQGRNNSLLHYETRTTLDGRWSNFAPGTAMATAANDATDFSQAQLIFAGPNITGNTTTDANNLMFTSEDELRATNPRDTDLFGHLATNQQNATTVPTVDDVDGVGVYPGMVWQDRDIYYQGPIWAKIPHTDGHFHPSPLIGGFGLKSPPPQIFIKNTPVPANPATTFSPARINSFITQYSTGQVAVKIEWEIQKERSKRWNPEVQFTSNYGAQDSLLWAPDNAGAYKEPRAIGSRYLTNHL

SEQ ID NO: 5303 - DNA, 64920 bp, Homo sapiens
  source 1..64920: mol_type = genomic DNA
tttacagggcttaactcattttatccttaccacaatcctatgaagtaggaacttttataaaacgcattttataaacaaggcacagagaggttaattaacttgccctctggtcacacagctaggaagtgggcagagtacagatttacacaaggcatccgtctcctggccccacatacccaactgctgtaaacccataccggcggccaagcagcctcaatttgtgcatgcacccacttcccagcaagacagcagctcccaagttcctcctgtttagaattttagaagcggcgggccaccaggctgcagtctcccttgggtcaggggtcctggttgcactccgtgctttgcacaaagcaggctctccatttttgttaaatgcacgaatagtgctaagctgggaagttcttcctgaggtctaacctctagctgctcccccacagaagagtgcctgcggccagtggccaccaggggtcgccgcagcacccagcgctggagggcggagcgggcggcagacccggagcagcatgtggactctcgggcgccgcgcagtagccggcctcctggcgtcacccagcccagcccaggcccagaccctcacccgggtcccgcggccggcagagttggccccactctgcggccgccgtggcctgcgcaccgacatcgatgcgacctgcacgccccgccgcgcagtaagtatccgcgccgggaacagccgcgggccgcacgccgcgggccgcacgccgcacgcctgcgcagggaggcgccgcgcacgccggggtcgctccgggtacgcgcgctggactagctcaccccgctccttctcagggcggcccggcggaagcggccttgcaactcccttctctggttctcccggttgcatttacactggcttctgctttccgaaggaaaaggggacattttgtcctgcggtgcgactgcgggtcaaggcacgggcgaaggcagggcaggctggtggaggggaccggttccgaggggtgtgcggctgtctccatgcttgtcacttctctgcgataacttgtttcagtaatattaatagatggtatctgctagtatatacatacacataatgtgtgtgtctgtgtgtatctgtatatagcgtgtgtgttgtgtgtgtgtgtttgcgcgcacgggcgcgcgcacacctaatattttcaaggctggatttttttgaacgaaatgctttcctggaacgaggtgaaactttcagagctgcagaatagctagagcagcaggggccctggcttttggaaactgacccgacctttattccagattctgccccactccgcagagctgtgtgaccttgggggattcccctaacctctctgagacgtggctttgttttctgtagggagaagataaaggtgacgcccattttgcggacctggtgtgaggattaaatgggaataacatagataaagtcttcagaacttcaaattagttcccctttcttcctttggggggtacaaagaaatatctgacccagttacgccacggcttgaaaggaggaaacccaaagaatggctgtggggatgaggaagattcctcaaggggaggacatggtatttaatgagggtcttgaagatgccaaggaagtggtagagggtgtttcacgaggagggaaccgtctgggcaaaggccaggaaggcggaaggggatcccttcagagtggctggtacgccgcatgtattaggggagatgaaagaggcaggccacgtccaagccatatttgtgttgctctccggagtttgtactttaggcttgaacttcccacacgtgttatttggcccacattgtgtttgaagaaactttgggattggttgccagtgcttaaaagttaggacttagaaaatggatttcctggcaggacgcggtggctcatgcccataatctcagcactttgggaggcctaggaaggtggatcacctgaggtccggagttcaagactaacctggccaacatggtgaaacccagtatctactaaaaaatacaaaaaaaaaaaaaaaagaagaagaagaagaagaaaataaagaaaagttagccgggcgtggtgtcgcgcgcctgtaatcccagctactccagaggctgcggcaggagaatcgcttgagcccgggaggcagaggttgcattaagccaagatcgcccaatgcactccggcctgggcgacagagcaagactccgtctcaaaaaataataataataaataaaaataaaaaataaaatggatttcccagcatctctggaaaaataggcaagtgtggccatgatggtccttagatctcctctaggaaagcagacatttattacttggcttctgtgcactatctgagctgccacgtattgggcttccacccctgcctgtgtggacagcatgggttgtcagcagagttgtgttttgttttgtttttttgagacagagtttccctcttgttgcccaggctggagtgcagtggctcagtctcagctcactgcaacctctgcctcctgggttcaagtgattctcctgcctcagcctcccgagtagctgggattatcggctaattttgtatttttagtagagacagatttctccatgttggtcaggctggtctcgaactcccaacctcaggtgatccgcccacctcgccctcccaaagtgctggaattacaggcgtgagccaccgcgtctggccatcagcagagtttttaatttaggagaatgacaagaggtggtacagttttttagatggtacctggtggctgttaagggctattgactgacaaacacacccaacttggcgctgccgcccaggaggtggacactgggtttctggatagatggttagcaacctctgtcaccagctgggcctctttttttctatactgaattaatcacatttgtttaacctgtctgttccatagttcccttgcacatcttgggtatttgaggagttgggtgggtggcagtggcaactggggccaccatcctgtttaattattttaaagccctgactgtcctggattgaccctaagctccccctggtctccaaaattcatcagaaactgagttcacttgaaggcctcttccccacccttttctccaccccttgcatctacttctaaagcagctgttcaacagaaacagaatgggagccacacacataattctacattttctagttaaaaagaaaaaaaaatcattttcaacaatatatttattcaacctagtacatacaaaatattatcattccaacatgtaatcagtattttaaaaatcagtaatgagaccaggcacggtggctcacgactgtaatcccaggactttgggaggccgaggcgagtggatcatctgagatcaggagttcaagaccagcctggccaacatggtgaaaccccatctctactaaaaactagctcagcatggtggtgggtgcctgtagtcccagctactcgggaggctgaggcatgagaatcacttgagcccaggaggcagaggttgcagtgagccaagattttgggggattctgtgacatacaaaaaaaatcagtaataagatatcttgcatactcttttcgtactcatatacttccagcatatctcaattcacaatttctaagtaaatgctctatctgtatttacttttataaaattcacaattaaaaatgaaggttcacatagtcaagttgttccaaacacacttaaatgtctcctaggctgggtgtggttgctcacacctgtaatcccagcactttgggaggctgagatgggcggatcacctgaggtcaggagtttgagaccagcctggccaacatggtgaaaccccgtctctactaaaaatacaaaaattagctggatgtggtggcactcacctgtaatcccagctactcaggaggctgaggcaggataattgcttgaacccgggaggtggtggaggttgcagtgagccgagatcgcaccactgccttccaacctgggcgacagagcgagactccgtctcaaaaaaaaaaaaaaggctcctaataactttattactttattatcacctcaaataattaaaattaaatgaagttgaaaatccaggtcctcagtcccattagccacatttctagtgctcagtagccacgggggctggtgaccaccacatgggacagcatatttagtacctgatcattggttctcagatctggctactcagcagaaccaagaatccacagaaacggcttttaaaagcacagccccacagcccccagccccagccttacctacctggaggctgggaaggactctgattccacgaggcagcctatgttttttgatggagggatgtgacaggggctgcatctttaacgtttcctcttaaatactggagacagcttcgaggaggagataactggatgtgtcttagtccatttgatggagggatgtgacggggctgcgtctttaacgtttcctcttaaataccggagacagcttcgagaaggagataactggatgtttcttagtccattttctgttgcttgtgacagaatacctgaaactgggcaatttatatggtaaaaaattttcttcttactgctctggaggctgagaagtccaaagtcaagtcccttcttgctggtggggactttgcagagtattgaggcggcaccgggcgtcatatggtaaggggctgagtgtgctacctcaggtgtctttttcttttcttataaagcctaactagtttcactcccatgataacccattaatctatgaatggattaatccattattgagggaagaaccttcatgacccagtcaccgcttaaaggccccacctctcaatactgccacatcgggaattaagtttcaacatgagtttcggaggtgacaaacattcaaaccatagcatgctgtctcttaaatgactcaataagctcctgtggcatccacttctgcatgccttgggcagcttttagacatctgtccattttcctagagggacaagaccaccacctgtgatcctatgaccttttggctttaggcctaacaagcaggttataccctcactcactttcaaatcatttttattgtcttgcagacaatttacacaagtttacacatagaaaaggatatgtaaatatttatacgctgccgggcgcggtggctcacgcctgtaatcccagcactttgggaggccgaggcaggtggatcacgagttcaggagatggagaccatcctggctaatacgatgaaaccccatctctactaaaaatacaaaaaattagccgggcgtggtgacgggtgcctgtagtccccactactcgggacgctgaggcaggagaatggcgtgaacccgggaggcagagcttgcagtgatccgagatcgtgccactgcactccagcctgggtgacagagcgagactgcatctcaaagaaaaaaataaataaataaataaatatttatactgcttataaactaataataaatgctatggtctgcatgtttgtgtcaccccaccattcatatgttaaaacctaatcaccaaagtgatattaggaggtggggcccttgggaggtgatgaggtatgagggtggagcccatatgattgggattagtgcccttctaaaatagcccaacggagcccagtgacaaggcatcatctatgaaccaggaaactggccctcaccagacaccaaagctgttggtgcattgatcttggatttcccaccctccaggactctaagaaacacatttctattgtttataagccacccagtggctggtattttgttataacatcccagactaagacaaataacaaatacttgtatccctgacaccaggttaagagatagaatttgtttgttcctctggaggcccttgtcttcaccccatcactgccctgtcctccctggaggaatctgccagcccgaattctgttcatcgtaccctccttttcttagagtttgacctcctctgtatctcccccaatccatgtattgcttatatacaaggtattctgctgtatctgttctgctatggcttgccccttttgttcaacactgtttttgtgcgtcatctgcattgatgcatgcagttgtcctttatttgttctcactgctggatagtatctggttgggtaaatatatcacactgtaaatcacactatccaggttcctttaggtgacatttggttgattgcagtgttctgttgttacgatggtgctgctgtgactgttcttgtgcatggacagaagttcctttcaggtgaatttctcagaatggaattgctgggcaaaggggcagccaataatcaactcatttgatgccaaaagtggtggtgccagttcatcctcccctgcgaggtatgggtcctgattcactcttcaagtgctgtggtttgacagggccgggggtgacaaggggacacctgggaaggaaagctgggctccctgctggccatccaggccagtccttaccagggggtaggcaatgattgggtcaagtggttcctgaccactgggcctgagacttcaggcccagaaactatctaatatttcctcaaatgcatcccatgagcaggcactgtgtgagtgagcacacacatctgaagcctcaagctaggcaagcctaccatgacttgtggtccaagggctcacgggtgacctggagttagagggagacatggctgccaggtggctttagaaagaacactcatcatggccaggtgcggtggcttacgcctgtaatcccagcactttgggaggccaaggtgggtggatcatgaggtcaggagtgagaccagcctgaccaacatgctgaaacctgtctctcctaaaaacacaaaaattagctgggcatggaggtgcacgcctgtaatcccagctactcaggaggctgaggcaggagaatcacttgaacccgggaggcggaggttgcaataagcctagattgtgccactgcattccagcctgggcaacagagcaagactccgtctcagaaaaaaaaaaaaaaaggaagaacactcatcctatgaccttgacctccaagctttgcctccctcaagcagaacagaatggagcctcccttaggcagaggcggaagtttgcctctcacctagttctccattcttttgttcagagcctgaataccctcaggctctgtacttggggtatttctgttctcttgttttatgctcacggttgtgaggtttgttgtgagtaccacgatcccttccttcagaggagtaaactgaggttccaaaaggtttagcagttgcccgaggaatattaaattggcaaaagcaggtagaatataaagcaaggagtatttggcaacggttcttttttatgattaaaaacagccgaagaaagacttctacttgtgcctttgaaggagtaactgcatttgaccttcccaccagtaacaaccatcaaatctctattaaattaaacacacacacacacaaacaaaaacagctattgtgaaggtatcagcgactaagacaactaaggtttgaggggccaggatcctggagagatggaaacttccctgaggtgagccccacattctcagacacttttccttggatgttttgagcactgctttaattcctgggaaaacaattccttccactgtgcacagactctggggccagacagcttgggttcaatcccagctctgccacttaatgtctgtgtatctgtgtaggcaagttaccctttggtgcgtcagtttcctcatctgtaaaacacaactatagttgatcctcattcgttaagagtctgtacttgttaatttgctcacttgctaaaatttgttaccccaaaatcagtacccctagccttttggggtcgtttcaaagatgtgtgcagagcggcaaaaaaatgtgagctcctccaggctcatgttcccagccaaggtccaacaaagtgctgccctgccttcttatttcagctgtcatagtgtaaactgtgtccttttcacagtctgattagtgccatgtttttcagatttttatgcttttttcttggttatttctctgttaaaattgtctccaagtgtagtgcaaagtttagcacgaggaggctgtgatgttccttacagagaaaatgcatgtgttagagaagctttgtcaggcatgagttaaggtgctgttgtcctgagatcaattaatttgttgttgttgttgtttgagacagggtctccctctgttgcccaggctgctggagtgcaatggtgtaatcatagctcactgcagcctctacctctctggctcaagcaatcctcccacctcggcctcctgagtagctgggactacaggtacaccccaccacacccagataatgtttttgatatttttttaggtggaattttgctcatcacccaggctggagtgcaatggtgcgatcctggctcactgcaacctccacctcccggattcaagcaattcttctgcctcagcctcctgagtagcacagattacaggcacatgtcatcacgccttgctaatttttgtgtttttagtagaggcggggtttcaccatgttggccaggctagtcttgaactcctgacctcaggtgatccacccgcctccgcctcccaaactgcagagattataggcacgaaccacaatgcccggcctcatgttttttatttttcaagttgaaatgaggtctctctatgttgcccaggttggtctcaaactcttgagctcaagtaatcctcccaccttggcctcccaaagtgcggggattacaggtgtgagctaccatgcccagccaagatcagtgttaatgaatcaactatatatattacataaggtgtctttaaacagaaataaggttatatattgatcgattggtaacaatgttgtgaccagcagcttacagggtacctagccttgtatttctcctataaataatttgctcgttgagtgtttgtggcaactttgtagcacataactaccaagaataaggactgtaataagagtacgtccctcacaggattgtaatgaagactgagtccatttacataaaggctgagagcagtgtcaagcagatggagaacactgtagaatgtgcgatagctctaacagtggttatcatggctgccctctcacttcttcagagacatgtgtttctaaggtctgcactctgccccaccctccccatccactgtcccccagcccgtttcctcctccacttacttcccagccctgtgccttctgccttctcttttctgagtttgctaagggcactgctggctcaagagcagtaactaacagtctctcgcctcttctctccatggcaaccagtgacctttggagaatgtaaaccttatcaccaatctcttaaagcccttcggtgccttcccaggatgacgtccagctgaggtccttggcaagacccagggcgccccctcctcgctccatcacctcccctgtcacctcccctgcatctccctactccagctgcaccactcttgtgccccagtggctcttgtctgattatttccttcatctccccagctggtcagcagagctggtggtaatcaactcagaccctgtcacctggatgtccagcagttagggactaaaaaaaatcaacaggtcacattctgtcctgcagatcatgataataagatctgtcagacagcagtcagcagtcagagccaaatcttctggacttcagcaggattctgcctcttgctatttcctgttgcctctcttagtgaccttttaagagcattgtggatgcctcccagcctcctgctaaccaccctgtaacctgaacagcctgcagcagccctgcccagtagaacttcctgatgtgatggaaatgctgtgtctgcaccactagccacatgtggccacaggattctcgaaactggtggtgcagttgaggagctgactttatattttatctcattaaatttaaatgtaaatagctacgtgtggcttgttggctagcctattggaaaacacgggcttagagagacacagggagaatcactgtaatgcactaaaagaaggtaaaaaaaaaaaaatcctaagaaatattcctaaaatactttaatatagggctgggtgcggtggctcacatccagcattttgggaagctgaggagggcagatcacttgaggccaggagttcaagaccagcctggccaacatggtgaaaccccgtctctactaaaaatacaaaaaatcgggtgcggtggcgggtgcctgtaatcccagctacgcgggaggctgaggcacgagaatcactcgaacccgggaggcgggggttgcagtgagccgagatcgtgccactgcactccagcctgggcgacagagcgagacttcatctcaaaaacaaaaaacaaaaaccaaaaaaaaaaacttcagcatgattatttaaccaaaatgcaggttagttgttcaccggatgcagagtccaattaacaagagcaaggcctggtaccaaaaaaagtgaatttactccgaaactagcttgggtgaggggtacaaagcatcctgcctttctttaaaagtgctgcttccccttggaagtagaaagtggacacttttataaggtaaggggggaagtgtgcaagggcaagtgggggggtccctctgctagttccgtgcatactctacaggacagttgacttggcaccttcctggttagtaataagctgtagcagtggccaagtgggcatgctttcagtatgccctcccagtgaatgaaagtcctgaggcaacccccaagggtggaagtgccaggccaccacccactggaggtgaaagttccgtgatgggtttgctttggtctgcgaatctactgtcatgtggagagatctgtgctctggaagagcatacagttagaaaagcttgccctgaagggaatgtatggtgaaggggaggtgaaaggttatatttgcatttctgaagggctaagtaggaaaccgggaaccaggggagaggagaagagaagagaggataattttttttaagaaaagcaacatattccctttttcttagaaaaaatggagcactcggttacaggcactcgaatgtagaagtagcaatatataaattatgcattaatgggttataattcactgaaaaatagtaacgtacttcttaactttggctttcagagttcgaaccaacgtggcctcaaccagatttggaatgtcaaaaagcagagtgtctatttgatgaatttgaggaaatctggaactttgggccacccagggtaagataaaacaccttccacgtcataggtatcttcctctctccttccctgcctctcccattagaacctggttttcttcctgagcagcaacaatcttaggcatctttccatgtgactgagtatccaccacattatttttaatgaaatagtattagattgcatggatgtgacataatccatttaacccatcccctactgttggacattcaggttgtttccagagtttcaatattattttatttaataccctaatagttagagcaggccatgctgctatcacaaatagacccaaatatttaatagctcaaaccaataacgtttgtgtcctcctctctgggcagtacagggttggcatacctcctgaagtgaattaggaactacactcattccagcttccagtttggtctttatctgtcagtgccttactgtcctctgcattgttgagtctcagtcaccttgtccaagttccattggccagaaagggctagaagcacagaagggctggaagtggcatttgttcctcactcacattctggtgggaagaacttagtggtgtggccttagctgactgtaagggaggctgggaaatatagtctagcgagtgccctggaaaaagccggcacggcattccccatggaaagctgtcaggcacggctacagtctaccccctgccaaccagtatctgcatggaccctccttccacactcagatgcatttacccccagccccaagagagccaaccgatgcccatgtggtcaccacagccacctccgagtccaagatttccaggtgacatgcagtctcctctctcccagctttaggaatggcttcttctgatctacacacagacacagacacacacacacagacacacacacacacacacacacacacacacgatggagaggggcaggataactgcaactgtaactccattcagaaaagaggcacagcactagctgcccgcagcactggagccctgctgggcagcactggatcaacctctgccctggcagaggagcatgttcctccacaaatccctgcttcagcctctcgagaggctcctccttgtctgttattttccttggccacaaggcaggcaggcagtgggaagtgtgccctcctccggggcaaggagccttcacagcccacttcctgctaataacagtttggggttccacagggtgttttaagactccagtcagctattttaggccagactcatttctctctctctctctctttttttttcttttatgaaatcacaccctgagacccaggctggagtgcagtggtgcgatctcggctcactgcagcctccgcctcccgggttcaagcaatcctcctgcctcagcctcctgagtagctgggactataggcgtgcagtgccacacctagctaatttttgtatttttagtaaagacggggtttcaccatgttggccaggctggtcttgaactcctgacctcagatgatccgcccgcctcggcctcccaaagtgctgggattactggcatgagccactgcgcccagcccagactcatttttctttgagagtaggcttttcccaaaagtaggcttctgagctattcactttcaggcagtcccatgtgccaggaaccacatccaaatttcctccgtggatgggagtctcaggctgccttatctccttgcatgtccccatgcccagctgtctcagcctaagggcaggtaccttgaagtcaagttaaacaataagattggagaccagcaatgccctcagcctggtttttgcagcaggactgagtcccttgttttggctcaatgggaagtctttgctgttcaaagccttagcttctctggctgagtgcggtggctcacgcctgtcatcctagctctttgggaggccgaggtgagcagatcactgaggccaggagttcaagaccagcctggccaacatggtgaaaccctgtctctactaaaaatacaaaaagttagccaggcgtggtggcaggcacctgtaatcccagctactcgggagcctgaggcaggagaatcgcttaaacccaggagatggaggctgcagtgagctgagatcatgccattgcactccagcctgggtaacgagcgaaattccatctctaaaaaaaagaaaaaaaaaaggccttagattctccctttgactttccacgtttgtgcagccttttatctccaatgctccatttcattccatctcctggcttattcttttcttgtcacatctactaaaagcaacaagaagccaccggtattcaggaacattctacctgtccccagagctatatgctcagtaggcatacagttggccctccaggttatctgagactcagatttccagagggctttgcatggctcacaaggtctgaagaacctctgagcctcccgcctgcggtgtctgttcattgactttgccacagtctcaaagaggcactgcatgctgcatgtttgaggtttttgctttggtggcatccatttccagcctcggcttccggcattcctcccccagcagactctctgctgctttccccttactccttctggcagttctgggaggttgcatagggcccttgcaggatgccccaagtccagctgcctctggcctctgggaagcacacccttgacctgccatgtgtaggaagacagcccgcttctgccagggcccaactctgccggcaggtagcaccttccaacctcttcactttggactttataactgtcaggtataaagtcggttgtgtccttacgtttctcaaattcttcaagacacgtcaaccagcctctcctacgcattctctccagctcagtctcaaaacacaccctttctctccagctcactctcaaaacacaccctatcaggccaaccactctttttaaaggacagctcctcaccaatccagtcaggtagccttccccacattgtatcctggaagtgggtgatggactgggtggggaagagggtcatatggcaaatctgtatgtcttacagtaattgtctagcagcccctggtgtcttactttaggccccctggaaactttcagatagtggagttgtctgatacatatcttataacctacagatattaatatatcctcacaggggcacaaaagctcttacaaggatgtttattataataatatttttattgttataatttacatgccataaaactaaccattttaaaatgtataatgcaagggtttttagtatattcacaagattgtgcagctgtcactactaattccagaacattttcattattccagaaggaaaccctattcatattagcaatcactcccccattccgcctttccctaaaacccagcaatcactaatctactttctgtctctgtggatttaaagtaattttaaatttgaaaaatagtatctataaggaaatgtatctagtcacaagcatacagcttgatgaatttgtaaaaattgaacagtcctatgaacataccctgtaagctcaagacatagaatgttaccagcccctgcaagcaagctgcctgctcacttctagtcattaacccctccctcttttccttctagtcattaacccttcagagtaactattctgattaccaatagcatagattagttctgcctgttgttttactttatataaactgtctcattaagtataaacatgtttgtgtatacttgtgtatttctttctatcacaatgatgtttgtgagattcatccatgctgttcctatagacaattctattttgcagcgtagtattccattgcatgactataccacaatttatctgtgatattacaaaggaatacttgggcagtttccagtttggggctataggatagttgtgatacaaatattttagtatagtacatgtcttttggtgaacctgggtacacatttctgttgtgtataccccttaagagtggagctgatgatcctggctaacaaggtgaaaccccgtctctactaaaaatacaaaaaattagccgggcgtggtagcgggcgcctgtagtcccagctactcgggaggctgaggcaggagaatggcgtgaacccgggaggcggagcttgcttgcagtgagccgagatcgcgccactgcactccagcctgggcgacagagcgagactccgtctcaaaaaaaaaaaaaaaaaaagagtggagctgatgggtcatagcatgtaaatgcattcaactttagtagatactgtccaacagttttccaaagtgattgtccaacttacttgcctatcagcagtatctgaaaagtctagttgcttcttttcttggccaactctttttttttttttgagatggagttttgctcttgttgcccaggctggagcgcaatggcacgtcctctgctcactgcaacctccgcctcctgggttcaagcaattctcctgcctcagcctcccgagtagctgggattacaggcatgcgccactatgcccggctaattttgtatttttagtagagacagggtttctccatgttggtcaagctggtctcgaactcctaacctcaggtgatccgcccgcctcggcctcccgaagtgctgggattacaggcatgagccaccgcgccaggccggccaactcttttttattttattttattttactttaaagacagggtttcactttgtcacccaggatggaatgcaatggcacgatcacagctcactgcagccttgacctccctggctcgggtgatccctcccacctcaggctcctgaggagctagaactacaggcatgggccatgcccagctaattttttaatttttggtagagacggggtctctgttgtctcagattcctgggttcaagtgatccttctcccttggcctcccaaagttctggtattacaggcatgagccactgcacccagcccatggccagctcttgatacgatctgtctctttcttttctttttttttttttaatttgagaagtgttaaataatctttctttgatattatacataaaccacaccaaaatgtctttcagtaagtaaaatgaaccattttagatacagaaaattctaattagattggcatagttaaggccaaaaatataaagttgacattgctaccttatcttcagcccttgcctttaagaggcaaatgaacacaaaatacaggtgaatcttgcttggttctgagacagtgaaggactttcccccagtatttaaatatatttacataaccagttacataaatctaaatattaaaaaaatctccaatagattttagatggcattcaccatctttgtgaaaagttgaacattactaatgaaatctgatcatatctttagaaggataaacagtgatagcatttactgaatcagaataactgttttttggggttttctttgagacggagttttgctcttgttgcccaggctggagtgcagtggtgccacctcagctcactgcaacctccgccccctggattcaagagattatcctgcctcagcctcccgagtagctgggattacaggctcgccccaccatgcccagctaatttttgtatttttagtagaggcgaggtttcaccatgtcagccaggctggtcttgaactcctgacctcaggtgatccacccgcctcagcctcccaaaatgctaggattacaggcgtgagccaccaggcccagcctattttttttttttttctttttttgagacggagtctcactctgtcacccaggctggagtgcagtggcacaatgtcagctcattgcaacctccacctccggggtttcagtgattctcctgtctcagcctcccaagtagctgggaactacaggcgtgcaccacaagcccagctaatttttgtatttttagtagagacagggttttgccatattggcctggctagtttcaaactcctgacctcaggtgagccacctacctcggcctccgaaagtcctgggattacagacgtgagccactgcactgcctggcccagaaaggactattaattgtagttgcctctgggaatgggggctgcctgcttctttctgtaaccccttctgtgctgtttaaatttttttttttttttttttttttgagacagagtctcgctctgtcgcccaggctggagtgcagtggcgcaatctcggctcactgcaagctccgcctcccaggttcacgccattctcctgcctcagcctcctgagtagctgggactacaggcacccgtcaccacgcccggctaattttttgtattttcagtagagacggggtttcaccatgttagccaggatggtctcgatctcctgaccgtgttatctgcctgcctcggcctcccagagtgctgggattacaggcatgagctaccacgcccggcctttaaatttttactttgggccgggcacggtgccttacgcctgtaatcctaacatttcgagaagctgaggcacgtggtggatcacttgatgtcacgagttcagaccagccactgcactccagcctgggtgacagagtgagactctgtctcaaaaaaaaaaaaaaaagaaagaaaaacttttactttttacatgttattttcatcaatttaatgaatttaaataacaaatgtataaatttgatattaataaaatggaagcatttggtaatcatgttttgggttttgtgcttcctctgcagctctctagatgagaccacctatgaaagactagcagaggaaacgctggactctttagcagagttttttgaagaccttgcagacaagccatacacgtttgaggactatgatgtctcctttggggtacctcttgacttcttttatttttctgtttccccctctaagaattttagttcactaaaatgaagaatttccctccagcagagctaagcatcaagtagcatgtagttgtaggtaggattaaaagactagggttccgggaggtgaaggttgcagtgagccaaaatcacgccactgcactccagcctgggtgacagagcgagactctgtcatagatggatggatggatggatggatggatggatggatggatagatagatagatagatagatagatagctggatagatagataagatagataagacaagactaggcttcaagctgcagtccagctctaccaggcttgttgtgactctgggcaagtcactcagcctctctgagcctcattttccagcttcagtggatacccatgaaggcaaatcagagaggggcctgagtgtgtatttgtccagcaggcagatggagggaacaacaaactagacccgtagttcttcagtagggataagataactgcccaaaagttatttagattacaaagacttgagccctgctcctgtgagacagtgatggggtaggtcgggtgcattcctgggaagcatatttttgaaaagctcacctgggattctaatgtgtatccctaggtcttattcctagagattttgattacttggtctggggtgtggcatgacctgggcagggcactgggatttttaagctccacagatgattccaatatgcagctagtatgagaacttgtttttttttgaaggagtctcactctgtcacccaggctggagtgcagtggcgcaatctcggctcactgctccgcttcctgggttcaagcagttctcctgcctcagcctcccgagtagctgggattataggcatctgccaccatgcccagctaatttttgcattttagtaaagacggggtttcaccatgttggttaggctggtctcgatctcctgacctcaaatggtccacccccatcagccttccaaagttttgggataacaggcgtgagccaccaggtccggcctggtgtgagaacttctgagttggatgaaacattagccccagatcctagaagccagggaagtgctggtctttatcgactggccaccaggtggcagatttgggcaagggtctgcctttgggtttagaattattgcttaggccttaaagtagttcttttttgccagtgggagaaaatccctcaaagatggttttctgggttggttggtttgtttgtctgtttgtttgttttttgagacagagtctccctctgttattcagcctggagtgcagtggcatgatctcactgcaacctctgcctctcgggttcaagcagttctcctgcctcaacctcccaagtagctggaattataggcacacgcccccacacccagctaatttttgtatttttagtagagacagtgtttcaccacgttggccaggctggttttgaactcctgaactcaagtaatcctcccacctcagcctcccaaagtgctaggattacaggtgtgagccaccgcgcctggctcctcaaagatgttaatcctcttgatggcaattgactaataccagaaaatgtcacgaagcgtgcattttggattcaatcatggaattgttgaggacaatcagccatcagactaaagcgatagaaatagtattggaaattgcagcgggagcactgaatggagaaggcactccacataatggaggaggcaaccaagtcttagagaaggtatcaagcctgactataaggacagtgagggaattgaaaaaacaaaaaaggagcaatggagcagggaaggattgaatgcctttcaagtagattcagtaattgctgttagcagcaaaaaatgcagtagtgcctgggcagggctttaaagtgcttgcacaggcagccctagagggccgggctgcttgggaactcttacaaactgacctaccaacttgagcatccacagcctgatcagaggtgggggagttaagggccttctctcccctagcctctactagagcctgtaactgcagggaaaccaagttgcaggctaaactctgcccacacatgcagacattgattagcaagctacaaaaacagtcatgaaacctgtttttataggattagtgaagccccagtttgaccagagtactttgcatgaatgttttgttagaagcaaatgtgccaatattctagcagctgcgtttggtttacttcttcttcttctttttttttttttttgagttgaagcctagctctgtcacccaggctggagtgcagttgtgtgatctcagctcactgcaacctctgcctcccaggttcaagcgattctcccgcctcaacctcctgagtagctgggattacagacatgtaccacaatacagggctaagttttgtatttttagtagaaatggggtttcaccatgttggccaggctggtctcaaactcctgatctcaagtgatccacccgcctcagcctcctaaagtgctgggttaacaggcatgagccacggcacctggcaaaagtcatcttttggtttacttctattgaactgaaaaagtcacaaatatatttatatttaattaaatatatttatataaaaatatggtatttagtattattatttttagagacagggcctcgctctgtcacccaggctggagtgcagtggcacaatcatagctcactgcagcctcaagcttctgggctcaagtgatcgttccacctcagcctccctagtagctgggactacaggcacatgccaccatactcggctaattattttattttatttatgggtctcgctatgtttcccaggctggtctcaaactcctggcctcaagcgattctctcacctcggcctcccaaagcaccgggattacaggtgtgtgccagcacacccagccacaaatctataaatttagaaaggaggactatttctaaagagggtcccactacctgtaggcaggaagcagagcctctggccataactgaaaaacaagcacttccaagaaggggcaaagggaacatgaatttatgctgagaggcgtagctaagcatacatattcaacagattatgggaggatctatgaatattcacaaagggaggatctatgaatatgcacacatgtggagtaagctaacgtgtgcagcatgtctcccatgttcaccttaggcagaaacttaacactaacatgtattacagggcaacaaaatgagactgcatatctacataacctagctatttggtaggctgaagcaggagcatcacttaagactgggagttcgaggcagctgtgagccatgatcgcaccactgttctccagccaggatgacagggcaagaccctgtcttagaccactctgtggtcagtggttatcaggaaggaatgctagtcagttgtgctgaaaccactaaaaaggaagggcagaattaggtgatgagttgataccagtggtgaagtgagtcttttttttttttttctttttgagatggagtcttgctctgttgcccaggctggagtgtagtggtgtgatctcagctcatcgcaacctccacctcctgggttcaagtgattctcttgcctcagcctcccgagtagctgggattacaggcgcctgccaccacgcctggctaatttttttatatttttagtagagactgggttttgccatgttgtcaggctagtcttgaactcctgacctcaggtaatccaactgctttggcctcccaaagtgctgggattacaggcagctccaaagtgctgggattacaggcatgagccaccatgcatggcctgaaataatttttttgaaagggctagtttctatttagcccttaggggaaaaaaaactaatggcagttagggagggaatagaacgagtcctgtttgaactcctttcccatcatggccaaaacttaaaattttttttagatatctctgggctccccttggccaaaagatagtttgttgagtcagttgggagcttagaattttgtttttatttctcacatcattgaatcaatttgaaccaggcgacaaaaccttctgctcccagtagtgggtcagagaaccttcctgattcctgccctgagattgtctctctgaagacaacattaggctagtaggctttccagattctgtaacccattctttcaaaggaagagatgcctatatttttctagccaattcatataccttgagtatcactcaagggcaaaattatttctaacaaatcatttactaattagcaaatgcttaagtgtagatttagaaagctaaagctatacagtggctgccatctatagtttggacttgtgattaactacattgaaatgctaactctgtaccctagagtatgaattcctgattagagtccttcaggtgctaactaatttatgtatttcatgtttgataatattattacttgagctttgtgggagagcagtcttttcctcccctgagatatagctagaagttacctcctttgtgaagccttcctagatactccaagcagacacggtccttcctttctcccttgcccagcactctgaggttgactctgtggagcactgatccctctgtgttataattgtctatttacacgtcagctaccacctataacacactgagttcctcaacagcagggacactgtccattctttgatcccagtgtctggaacagtgccaagtacatagtagggacttaataaatattgattcatatgtaaatgagacttttccaaaacatgctttcgttgatgcctctcagcatttatacaccttttaccaactcgctactggccacatagacaaatgaaagcagtaatccagatacacccaagaggacatctgttcttttttctctctgtggagtgggagacttaagtggcttcttaactggtgtgtcgtctgatcaagtggtccaggtaacaggtggatgccaatgtctggcccaggcatcaccccttactggcactggtcattacagaagacactctaccagagctgaaaggacctcttgtcactaggcagctgtggagtccgctctacttgacctagtaaaatctgcctggagactgttagagtcaccccactacctgaagttacctccaggctgacctcttttttttcccaggtggagtcctggcatcttagatattttaataaggatttgcttgttgacatgttctttattcactaaggtgtcagcatattactgtcttagaactgagggttcttcatcttttttggatcaggacctccctctaagaatctgatgactgctctggtccctctcccaataaaaacttccatactcacctgttaaaaaaaaaaaaaactttaaacaaattaacagagttttattcagcaaagaatgattcataaatcgggaaggctgcaaccagaataggttcagagagactccacggtgtgccacgtggttggagaggatttaggatttatgcacagaaaaaggaaagtgacatgcagaaaatgaaagtgagggcctggtgctggtgcggtgcctcacgcctgtaatcccagcactttgggaggccgaggcgggcagatcatgaggtcaggagatcgagaccatcctggctaacacggtgaaaccctgtctctactaaaaatgcaaaaacttagccgggcgtggtggcaggcacctgtagtcccagctacttgggaggctgaggcaggagaatggtgtgaacctgggaggcggagcttgcagtgagccaggatcccgccactgcactccagcctgggcgacagagcgagacttcatcttaaaaaaaaagaaaagaaaaaggaaaatgaaagtgaggtacagaaacagccaggttggttacagcttggtgtttgccttaaacttggtttgaacagttggccgcctttgattagccaaaactcggtgattggtacaagagtagattgcagttcactatgtacagagaagcccttagatccgaactcaaaataggtaaggaggcagttttagctacacttaagttaacatactcaggagtaccattccagcttcaagctggaagtgtctgcagccccctgagaccacttaatcccaagttaaaaacccctgctcagaggcagcatctttttttttttttttttttttttttttgagagagatctcactctgtcacccaggctggagtgcagtggcacgatctcagctcactgcaaccaccacctcctgggctcaagggattctcttgcctcagtctcccgagtaactgggattacaggcgcgtgccactatgtccagctaatttttttttttgtatttttagtagagatggggtttcaccatgttggcctggctggtcttgaactcttgacctcaagtgatccactggcctcagcctcccaaagtgctggcattagaggtgtgagtcactgttcctggcccagtgaggcaccatctcattggatatggagacaaaggatctggcttagcatcctggatttgtattttctttccaagagtccttaagtgatatctaacttttgcgagctgcagtttcctcagctatgagatgagtgacattaacctcctctcttcagatttataagaggatcaattaaaatggcataggtaaaagtgcatcctagcaagttggtatctactttagaaatgaaggaggtcatatgtatgtgaagtctccagacccaacatgccatcttatatgtgtctatttctacaagtgagctagtgacaacagtaattgctatttttgctcctacatgggtagggctgatcttgactaggaggagtcaataagactcaccagccgggcgtggtggctcacgcctgtaatcccagcactttgggaggccaaggcgggcggatcacgaggtcaggagatcgagaccattctggctaacacggtgaaaccccgtctctactaaaaaaatacaaaaaaattagctgggcgtggtggtgggcgcctgtagtcccagctactcgggaagctgaggcaggagaatggcgtgaacccgggaggcagagcttgcagtgaaccaagatcgagccactgcactctagcctgggtgacagagcgagactccatctcaaaaaaaaaaaaaagactcaccagctgtggccactgtctgtgctaattggctagtgcctgcatctcagaaactgctacatattttgactattccccctgcacttaagggcatgcacactcccaaaatagactcagattgtctaaggaataatgatgatgatgaagagaaagccctctttatctggtctatttgtagtcagttccaaaagcattaagaatttctgctgaactaatgcagctagtttctttcctgtcaccactttccttccaaaatagtttcaagatctgtgggggaaaaaatctatttacagtgaacagactggtgggaggaagttgagcattggggttttctgccctgtgtaaccttgccctaagttgggcagatggtatcacactacctggacatcatctgctcattcactatttgaccagttggtcattcattcacaaatgtcctttttgcaggagggatggaggtgctagacctgcagatgctagcatgaaaagacagatctcctgctgctaaggtgcttaaagtagtggaggtcaggggacaagcaagcagtcaggcagctctgaatgcagaggcaggaagcaccacgaggcaatgggacccacagaggggtagcagggtagaggtgagtgggtctcatgtggggagggaggaagttgactgcagagaaggtgccagggggtgaaaatagcttgagagctgtggagctagaagggctctcacatttgcttattaatatgccctttgaaaaagagtggcctgatacctggagtcactcaaaagatttccaattccgataggaaaaagtcaattttggcttcagtggttgcatgtgcaccccctgatttgctgtatgctgaggcattgtggtgatggacgcaagtgcggagaccttgagcacgcatctgcccctagttcttgccctgagtcctcgaaggaggcaggagagacatcaaggcagacaggcgccgctcatcagtgatgagaccagacctggaactcgcgtcttatactcagtcctctgccctttctgctggattgtggccccccagtatagggtgcaacacacaactggagcatttaagggccacaaagagaacaaattaccaatgattgtgtgttgattctttgagctctttttttttattattatactttaagtgttagggtacatgtgcacaatgtgcaggttagttacatatgtatacatgtgccatgctggtgtgctgcacccattaactcgtcatttagcattaggtatagctcctaaagctatccctccccccttccccctccctccaccccacaacagtccccagagtgtgatgttccccttcctgtgaccatgtgttctcattgttcagttcccacctatgagtgagaatatgcagtgtttgattttttgttcttgcgatagtttactgagaatgatgatttccagtttcatccatgtccctacaaaggacatgaactcatcattttttattgctgcatagtattccatggtgtatatgtgccacattttcttaatccagtctatcattgttggatgagctctttatctcatggaaaaataatttataaaactctgtatgagaggagtgggaaatagtattaacgggtgcggggtttctttttgggacaatggaaatagctggaattagatagtggtgatgtttgcacactttgtgaaatactaaaaactcctgaattatacagttttaagaaacttttatttatttgtttttgagagaagttctctgtgtcacccaggctgaagtgtggtggcgtgatcaccggttattgcagcctcaatctctgaggctcaagcgattctcccacctcagcctaccaagtagatgtgactataggtgcgcaccaccacacccagtgaatttgtaattttttgtaaaaacaaggttttaccatgttgcccagtctggtcttgaactcctgggcccaagcgatcctccctccttgggctcccgaagtgccaggatacaagcatgagtcaccacatgcagcctcagttttaagaaacttttaaataaatgaaatatagtcataccaaaacagtaaaaatgggtttcaggaaaaaaaatgtttttttaaacaaacttacgtattgtataatcccagcccttttaaaaaatgctttcaaaaactggcagtcaactcataaaaggacaaatacttatgattccactgatgaagtagtcaaaagtagtcaaaaatcacagaaacaccaccataaatgtataatttttattttcaattaaaaaaacatcttttttttagtcaaaatcatagaaatagaaagtagacaggtggttactaagggctatgggatggggaaattagtgtctaatgggcatagagtttcagtgttacaaggtgaaaagttctagagttatgctgcccagcagtgtgaatatactttattgttctgtacacttaacatggttaatatggtaaatttagcgttatgtgctttttactatagtaaaattaaaaaaaaaaaaaatggggccgagtgcagtagctcacacctgtaacataatcccagcactttgggaggccgaggtaggaggatcacttgaggccagaagtttgaaaccagcctggtcaatatagcgagacctcatctctacaaaagaaaaatgttaaaattagacaggtgtggtgtctgtagtcccagctctctggaggcagggactgagtcagaggatcacttgagcataggggtttgaggctgcagtgagccatgatcctgccactgctgcagcctgagcaacagagcaagaccctgttgtaaaaacaaacaaacaaaaactggcagctgatacctgagagtgaatatcttttatcgctggttaatgggattgagagaatgcttcatcttatagaaagaacagtgtctttggacccacagagacctggatttaagattagctctgccaattactgagtactctttactatgaacctctgttttcctcatctgtgaaactggaataatgaatcctaccgccaacaattgtagtcaagttggaaacaatttacacaaagtgccaaacaccaagcctggcacagtaggaaccgagtaaatagtggttaatatttttatcagtgtctgcattgctgacgtctccatcatttctatacatttgtttttgaatcagaaaaagatgttattttaaaaaaataacccagtagtgccccttgtcccattcctatcagttatattattattgttactaccctctggaatttcaataactctttgttttttgggttttttgttttgttttgctttgcttttgagacaggatctctgtcgcccagtctggtgtgtagtggtgtgatctcagctcactgcagcctcaacctcctgggctcaggtgatcctcccacttcagcctcccaagtagctgggaccacaggcgcatgccaccacacttggctaatttttgcatttttagtagagacagggttttgccatattgcctaggccggtctggaacttctgggctcaagccatctgcctgcctcggcctcccaaagtgctggaatttcaggcatgagccatgcctggcctaaatagctctctgtgtttgcaaaagtgtgttataagaatcattcagagcctctcgattggatggaggctctagaatgcacagaaaaaggctgccaccgtgtatctctgcaagtcatgcacaagatggggaacagcaggcttccccctgcttaccagttcaaatacagagaactagccctgtagctgtttctttcatatctcacccattctaaagagaccacaggccttagaagtaaaggactcttttgttgaaagagtgttttcaaatttaaatgagcatttattggtcaaagatgcaccaactagtcttttgaagaattcaaggctctttagagaaaaataaagccttggaggagtatctgagaagcttgttagatgcgtgggaagagtctggaaataaaaaacttcatctggagtttctgccttctaccaacagagctgaagctaatgctctcctaagacaagcaaagcagatggtttgcatacttccttaccttccttttacttcctctgtaatagacttgtcatgtctgatgtttgagttgacgtggtactctaatagagttagagtctgcattttttttatgtcctctagtatgttctggttgatggttgagggcaacaaaccagcagtcccagatgccagcaccaagacctgagacaggtcacttaactctccgagcttcaccaccattctcaccttgcagacctcacagggaacagggaaagctctatgagatacaacatcattatgattaatcctattctgattctgaaagcaaagctcttcctacacaaactcctatttctaaatactaaaagacatttctttatggtgtattttgtgtacttgtagaaatggaaagtgttgagataaaacatgaagcaatgatgacaaagtgctaactttttcttgttttaatttctttatgctttttttccacctaatcccctagagtggtgtcttaactgtcaaactgggtggagatctaggaacctatgtgatcaacaagcagacgccaaacaagcaaatctggctatcttctccatccaggtatgtaggtatgttcagaagtcaacatatgtaattcttaaagacttccgaaatgtgacattgtggaccatttaagaaatgtcggctgagcacagtggctgacacctgtaatcccaacactttgagaggctgaggtaggaggatcacttgaggacaggagttcagaaccatcctgggcaacatagtgagtccctgtctctgtaaagaaaataaaaataaagtcacagctgggtgcaggcttacacctgtaatcccagcactttgggaggccaaggcctgtggatcacttgagctcaggagtttgagaccagcctgggcaatgtcacaaagccccacctctactaaaaatataaaaattagccaggtgtggtggcacacgcctatagtcccaactacttggaaggctgaggttgagcctcagcctgagcccaggaggtggaggttgcagtgagccaagatcgcgccactgcactccagcctgggcaacagggccagaccctgtcccaaaaaaaaaaaaaaagtcatcgtcttatgttagcatccttgtaagtgagcctttcctgatattttgcagcctgtctcattctcagtagaaaagtttactctagttacataacttctccctgctgacaatttggatactgtaagcaggcatcaggatattaagatctgaagtgagtagcttataacttttccaaatccagcctagacagttttcctctattaaattattgccctgactttaaaagaagctacttttgaccttgtagcgtttgaacaagttgcactttgtcttcaaagcaagttaaagtttgacctctacttgttttgagcctctcaggtaaagggttatttgaattccctttgcaggttggggttgtgtaccctgtggaggtggtagagtgttatatattgctgctccagggcatttaatccctcctgccttttccattgatgtgctttcaatctagaggaataaaagattgtgttggagacacaatgtggcctgcatagcatctgaaagcctgagaacatgcagggagagacatccctcatccctcagcagcctggctgctgttgaagtggttgtaagaaagtaaaagagaaatgcccacaaaacgttctcagatccagtcattcattagcacttccaaagagagcatgttgactgtgaattgggaaagggccagataaaactagcatagaattctttgaaagactaacggtatttgcattttttaaaaattataaccttactctaccccctaacattgacatcatttttaggtaattaatattttcccatttattattctgtgatctctaatgctttgttcagaataaatagtgtgtttcctttccccacactttcatccaagaagtgtgctagagttcaacaaaaacagcactagaaatcactgtcattctaggaaggccctaattcacagattgtattggtttttagacccagttagtgtgctggaggttggaggattttaacctctgtgggccaactagcctctgtggcctcagtcattcttcctgaccctggctgtgcttgagcctgtgtgttcttatccttcatctccgggggaacgaagtggatcagctcggtccagcgatcacttttggggatcagtggctttgtagatatcgggcaggcacttaccccaaaagaactttccccatatctgaagactgaaaacgtccatatcgtatttggacacactgcccagcaatacgctctagctgtgttcagaagcatgggaatttggaaagatctgctgagcatgccgtttactgtcacagatactatcttcctcaaaaaaaaaaaatatatatatatatatgggggacggggcaggttgagactgggtgagactgaagaggtgccttggccagagcaggccacacccagagaccacaggctccccggtccacctcaggcccctccccttcctgcgccgtttccggcagatccagagtggccaccgccggatgggagtcgggggaagggaggcagagaagcgggccctgaggacaagctctcagtgcttctgtgggaagtggcggcaagacggcagctcccagcgggggatggaggccgagtcagtctgctggtcactggaggccaggatgctgcctaacacagccgtcccgctccgggcctcaccaccagggcggctctccccactcccggcctgctgcccacacagactgcggggttccgggggagcaggacccaggccgttctgcgcctgtcttcttggaaggagcaggccggagcgcgggagcgccgtgtagctgtacctgcgaaggcacaggattccgcgggaagatcccgcagtttcgggccgtcgtcattgtttttatacctgtggcaaatggcatgaccagacacacggttatgtctggagaaacccctgtagaggagcaggaggttgtggacatgctgtggcccggacagtggctgccgagcagttggagcctgcacccgcccaacttggctaaagaagtccccatactctctgtggaaaagatttccagaagctgttgtgtcaatatcaaagcctcaaaacaacaacaacaacaacaaaaacatgaaattatcaacaataaagatcatccttgagtctgctttgaaaagtagggtgaaattctgcagaggcattcaactggcaagataccaccctcatagccagatctgcaggtctcagccatcatgccagggaaaatgctccattcaccactcctcagcttctgcttctggtttcagaggtctctgtattggaggggctttaaagcaagaagggtctttacccacttactcttattcacagatgtgaatatgcaggtccagtggggaaagtgacatgtcctaagtcagaatagagtcaacaagaaaacagggcccaaaatgacttagcctctagtgtataatgggcattgatgagctactggaaatacagagatgaagaaaacacagtcccatcttcaaggagctcaatctagcaagggagacagactctttgtaggtgggaccgggcttccctgcagcagaaggaagcttgaaattggtaacgagcctcagaagggacagaggcaggccaccatgctaccctgagaggatcgcatgtggacacggggctatgacctggccctgctttgacccactagctgtgctgtagggccaggtggagcctggagtggcctgtgctaaggggctactatgagctctttccactcccccaaggcattgcataaataatgtcactttctgtttgcacagcaaaatcagggacacaattttctagaacatggggtgcctcccctccccccagcccaacagaagttctacaatgactgatgggcccttgtttttgtttgagacggaacaccccacagggttccgagtggtgatttgtggcccacaggccactggcaagtggaggcagagctgcagagccctcgggagccacagagggcctgctggccgccacgacatgccaactcagctgctgctggccctcctgtgggcggcagtgctagtgatgtgcagaatcttaggactagtgccaaggaacctataaataccctgggtgacccaggcgtgcactgctgtggtggccttcacagtcagaagatgacaagctgagaaggggagaatcggcccaaggtgagatccacagaaaggccagggccaagatgcggccagcacctcaggctggtggtggtcttacgttgaccatgccagaggccagtccttgattgctccaaaccctctgttcgagggttccaaatgaaatgagcaggtcctcgtgtcaggacctaggttagtttctgaaaaagcatgaaaagcaggcctcctgaacttccccgagtgactgatgcaaagtgcgtcctgcatgcttcacagcaccatggagaggatcttcaggggcaaactgcagactatctgaatgacggcactgaccatcagcaaaccgcagagctgcctgaccaagaaattgcgagacagaagcaatgcttgcaggcgaagaagaaggggccagacacagtggctcacgcctgtaatcccagcactttgggaggccaaggcaggcggatcacttgaggtcaggagtttgagaccagcctgggcaacatagtgaaaccctgtctctactaaaaatacaaaaaattcgccaggcatggtggcaggcacctgtaatcccagctgcttgggagactgagacaggagaattgcttgaacccaggaggcgaaggttgtaacgaactgaaatcgtgccacagcactccatcctgggcgacagagtgagactgtctcaaaaaaaggaggagaagaaggaaaggccaaggcaggaatgaaacaggccatgaatgttggagtgaagcaactggcctcctcgtgctaagcggctactgtgagttctttccactcccccaagacattgcataaataatgtcactttctgacactcaccccgctgaatgtcctgcctctgctcaagggtggtatgatggggacttggcagtggaggggaacagggaaaccagacatggtggtctccccgcttcctggctacaagtccctctgaagaaatccaaaggagtaaagagcttggagagtaggcctctgtagggtgcaagggcacagctggagacggagctcctgaggctgcagctgatgctgcccgctctgcctgaactgcaccaaaaacgtgatgaggccatagcgggagtccacggaggaggatgcctactgcccgacctctagcagagactaagcaaggtgcatgaaaacttgaaccacatgtgtcacacccatgaccactacatgaagatggcccaaaacctggcccaggaattgaagaaagactcttccaatttgctgtaagaaaatggcccagggggcaagcacggtagctcacacctgtaatcctagcactttgggaagctgacgcaggcagatggcttgagctcaggagttccagaccagcctgggcaacatggtgaaaccccgtctctaccaaaaatacaaaaattagccgggtgtggtgatgcatgcctgtggtcccagctactcaggaggctgaggtggaaggattgcctgagtctgtggggcagaggttgcagtgagctgagatcacaccactgcactccagcctgggtgacacagtgagaccccatctcaaaaaaaaaaaaaagaaagaaaacggcccaggaaggctggagggccgccgtgtccattgagagagtgctccaggcactccaaaaagaaaatgaccacaatgggaagaaaccagctgaccatgagaccaagttccaaccttttacaagtggcctgtggctcctggcgccccgcccacagctgacaggggctcagaagtgctagggggaccatgggccaccagggccaccaggagggaggcaggtaacgatgcgagggcttggatgcagaacaccagctggtttgattctgttttccctgtacctgggtcctgaatgcccagaggctcagggaaacaccagccagtgctgctgcctttaaagcacttttgactgatctcttgttaatttagcaactgttattggttgatgctgcagttgctcttattgaagtttgattgatagcattaggatggtaaggcactatttttcaaataaaggttgtttaatataaaaaaaattttgtttttttttctctcagcctttcacattggttcaaaatatctttcatctggctgcatttctgatttttgttttgttttttttttcttaattttatttatttttaattaaaaataattttttttgtcaacatggggtctcactttgttgcctaggttggtctgaaactcgtggcttcaagcaatcctcccacatcagcctcccaaagtgctggggttatgggtgtgagccactgcagcagcctgttttttttgtttgtttgttttttttaatttgacaagttttcaggtcctgtgaaatcagcagtcttacctcccaccttgcgcaccctgaggaggttgcagaataaaggagaattctagggacacgtgggcatcagtgcctgtgctcagagcacctcaggcagtgtggaggggtctagaggttactcaggctctgcctggcaacccgatagcagtatcagagtatagggccaaggggacggtccttgggcttggtgtggtttattagtccttttcctgtgaccctgatggtttggttcactcatttttatctccatactgggaacaggttcaagccccagcatttggttgataatgcaggaatccttgatacttttattgcccaagcttcccttcctggtgacctcatcctagcctcagtctttggaaaagccctccttgagtgctcaggcagactcaggtgccctttcttctgggctcccatgcactctgttcttacctccatcagggtgccacatgcactagtgttatctgctgccgtggccaatcatccatgaggccatgaggaagtggaatgtacatctggtataagaagacatggcagaagccagcctccgatctgtccacacgaatacagcattcccaaagcaacgtgcatgtgccattattcactggatgagcttgaggtggatgaactagcccaccaggctctcaatgtcatgaatttaacactgaattaagaaaaatatgttttaaaaataatagtttaggtgattgctggggtgctaggagaggaaggaatggggaataactgtttaatgggtatagttggccttgtgtatctgtgggttccacatctgattcaaccaaccgtggatcaaaatatttgaaaataaaaaacaaaacaaaaatgatacaaataaaaaccaatataacaactattaacagcatttacattgtactaggcattataagtaatctggagatgacttaaagcatacagaaggatgtgcctaggttagatgcatgtatcgtaccatttcatatcagggacttgagtacccacggattttggtatctgcagatcctggaaccccttccctatggataccaaggaacaacagcactgggtctccttttggggtgatgcagatgttttgaagctaggcagaggtagtggttgcacaacattgtaaatgtactaaatgccaccaaattattcatttttaaatggttaatgtgttatgtgaatttcaccttaacaactaataatattataggtaaggcacaagttacatctgtagcacaaaaatggccctaatttttaaaacactgctccagcatagcaggtatcacatgtgaggtagcaaaagctggagatcaaagtgtgatacctggagacttatcagtaagggtcaaatgttttttcaggttttgagaatcattcttggaattgttccagaagatatatcgtataactcttcttagatgctaagataagaaggcagatatacactagctcattttgtgttattttctagagctttactccagtcaatttcttgggggcagcatttgtggaatcagtggttcatctgaagggctgtgctgtggaattactatgcatttgttttgtcttccagtggacctaagcgttatgactggactgggaaaaactgggtgtactcccacgacggcgtgtccctccatgagctgctggccgcagagctcactaaagccttaaaaaccaaactggacttgtcttccttggcctattccggaaaagatgcttgatgcccagccccgttttaaggacattaaaagctatcaggccaagaccccagcttcattatgcagctgaggtctgttttttgttgttgttgttgtttattttttttattcctgcttttgaggacagttgggctatgtgtcacagctctgtagaaagaatgtgttgcctcctaccttgcccccaagttctgatttttaatttctatggaagattttttggattgtcggatttcctccctcacatgataccccttatcttttataatgtcttatgcctatacctgaatataacaacctttaaaaaagcaaaataataagaaggaaaaattccaggagggaaaatgaattgtcttcactcttcattctttgaaggatttactgcaagaagtacatgaagagcagctggtcaacctgctcactgttctatctccaaatgagacacattaaagggtagcctacaaatgttttcaggcttctttcaaagtgtaagcacttctgagctctttagcattgaagtgtcgaaagcaactcacacgggaagatcatttcttatttgtgctctgtgactgccaaggtgtggcctgcactgggttgtccagggagacctagtgctgtttctcccacatattcacatacgtgtctgtgtgtatatatattttttcaatttaaaggttagtatggaatcagctgctacaagaatgcaaaaaatcttccaaagacaagaaaagaggaaaaaaagccgttttcatgagctgagtgatgtagcgtaacaaacaaaatcatggagctgaggaggtgccttgtaaacatgaaggggcagataaaggaaggagatactcatgttgataaagagagccctggtcctagacatagttcagccacaaagtagttgtccctttgtggacaagtttcccaaattccctggacctctgcttccccatctgttaaatgagagaatagagtatggttgattcccagcattcagtggtcctgtcaagcaacctaacaggctagttctaattccctattgggtagatgaggggatgacaaagaacagtttttaagctatataggaaacattgttattggtgttgccctatcgtgatttcagttgaattcatgtgaaaataatagccatccttggcctggcgcggtggctcacacctgtaatcccagcacttttggaggccaaggtgggtggatcacctgaggtcaggagttcaagaccagcctggccaacatgatgaaaccccgtctctactaaaaatacaaaaaattagccgggcatgatggcaggtgcctgtaatcccagctacttgggaggctgaagcggaagaatcgcttgaacccagaggtggaggttgcagtgagccgagatcgtgccattgcactgtaacctgggtgactgagcaaaactctgtctcaaaataataataacaatataataataataatagccatcctttattgtacccttactgggttaatcgtattataccacattacctcattttaatttttactgacctgcactttatacaaagcaacaagcctccaggacattaaaattcatgcaaagttatgctcatgttatattattttcttacttaaagaaggatttattagtggctgggcatggtggcgtgcacctgtaatcccaggtactcaggaggctgagacgggagaattgcttgaccccaggcggaggaggttacagtgagtcgagatcgtacctgagcgacagagcgagactccgtctcaaaaaaaaaaaaaaggagggtttattaatgagaagtttgtattaatatgtagcaaaggcttttccaatgggtgaataaaaacacattccattaagtcaagctgggagcagtggcatatacctatagtcccagctgcacaggaggctgagacaggaggattgcttgaagccaggaattggagatcagcctgggcaacacagcaagatcctatctcttaaaaaaagaaaaaaaaacctattaataataaaacagtataaacaaaagctaaataggtaaaatattttttctgaaataaaattattttttgagtctgatggaaatgtttaagtgcagtaggccagtgccagtgagaaaataaataacatcatacatgtttgtatgtgtttgcatcttgcttctactgaaagtttcagtgcaccccacttacttagaactcggtgacatgatgtactcctttatctgggacacagcacaaaagaggtatgcagtggggctgctctgacatgaaagtggaagttaaggaatctgggctcttatggggtccttgtgggccagcccttcaggcctattttactttcattttacatatagctctaattggtttgattatctcgttcccaaggcagtgggagatccccatttaaggaaagaaaaggggcctggcacagtggctcatgcctgtaatcccagcactttgggaggctgaggcaagtgtatcacctgaggtcaggagttcaagaccagcctggccaacatggcaaaatcccgtctctactaaaaatattaaaaaattggctgggcgtggtggttcgtgcctataatttcagctactcaggaggctgaggcaggagaatcgctgtaacctggggggtggaggttgcagtgagacgagatcatgccacttcactccagcctggccaacagagccatactccgtctcaaataaataaataaataaataaagggacttcaaacacatgaacagcagccaggggaagaatcaaaatcatattctgtcaagcaaactggaaaagtaccactgtgtgtaccaatagcctccccaccacagaccctgggagcatcgcctcatttatggtgtggtccagtcatccatgtgaaggatgagtttccaggaaaaggttattaaatattcactgtaacatactggaggaggtgaggaattgcataatacaatcttagaaaacttttttttcccctttctattttttgagacaggatctcactttggcactcaggctggaggacagtggtacaatcaaagctcatggcagcctcgacctccctgggcttgggcaatcctcccacaggtgtgcacctccatagctggctaatttgtgtattttttgtagagatggggtttcaccatgttgcccaggctggtctctaacacttaggctcaagtgatccacctgcctcgtcctcccaagatgctgggattacaggtgtgtgccacaggtgttcatcagaaagctttttctattatttttaccttcttgagtgggtagaacctcagccacatagaaaataaaatgttctggcatgacttatttagctctctggaattacaaagaaggaatgaggtgtgtaaaagagaacctgggtttttgaatcacaaatttagaatttaatcgaaactctgcctcttacttgtttgtagacactgacagtggcctcatgttttttttttttttaatctataaaatggagatatctaacatgttgagcctgggcccacaggcaaagcacaatcctgatgtgagaagtactcagttcatgacaactgttgttctcacatgcatagcataatttcatattcacattggaggacttctcccaaaatatggatgacgttccctactcaaccttgaacttaatcaaaatactcagtttacttaacttcgtattagattctgattccctggaaccatttatcgtgtgccttaccatgcttatattttacttgatcttttgcataccttctaaaactattttagccaatttaaaatttgacagtttgcattaaattataggtttacaatatgctttatccagctatacctgccccaaattctgacagatgcttttgccacctctaaaggaagacccatgttcatagtgatggagtttgtgtggactaaccatgcaaggttgccaaggaaaaatcgctttacgcttccaaggtacacactaagatgaaagtaattttagtccgtgtccagttggattcttggcacatagttatcttctgctagaacaaactaaaacagctacatgccagcaagggagaaaggggaaggaggggcaaagttttgaaatttcatgtaaatttatgctgttcaaaacgacgagttcatgactttgtgtatagagtaagaaatgccttttcttttttgagacagagtcttgctctgtcacccaggctggagtgcagtggcacgatctgggctcactacaacctccgcctcctgggttcaagcaattctctgcctcagcctcccgagtagctgggattacaggtgcctgccaccacacccggctaatttttgtatttttagtagagacggggtttcaccatcatggccaggctggtcttgaactcctgacctagtaatccacctgcctccgcctcccaaagtgctgggattacaggcgtgagccactgcacccagccagaaatgccttctaatctttggtttatcttaattagccaggacacttggagtgcatcccgaagtacctgatcagtggcccctttggaatgtgtaaaactcagctcacttatatccctgcatccgctacagagacagaatccaagctcatatgttccatcttctctggctgtatagtttaaggaatggaaggcaccagaacagatttattgaaatgtttattagctgaagatttatttagacagttgaggaaaacatcagcacccagcagtaaaattggctctcaaagattttcttctcctgtggaaagtcagacctctgaggccccatccaggtagaagtactagtgcaagaagggcctctgctgtccacttgtgtttctgtgatctgtgggaacattgttaacgccacatcttgacctcaaattgtttagctcctggccagacacggtggctcacacctgtaatcccagcactttgagaggctgaggcaggtggatcacctgaggttaggagttcgaggccagcctggtcaacatggtaaaaccccgcctctactaaaaatacaaaaattagctggccgtagtggcgcacgcctgttatcccagctactcgggaggctgaggcaggagaattgcttgaacctgggtggtggaggttgcagtgagccgagattacaccactgcactccagcctgggtgacaagagggaaactccattaaaaaaatgtaattcccgtgtctgccatcttaagtgtaaaggtggctaaattatatagaaaaataagacaatatcatttcccaattacattcctttcctaccgcactctatgatgctagctgagatttttccaaaagaaaatggcttaaataaaaccctaagagaaagaaaaactttaaatccctccaaagctcaaaagtaatagaaacagatgagtttggagtcaggatttctctgtaagattgcctaggctgtgtactgcacatctccaggtgccactgttgacagagattataactacaatgtgaagtgaatggtgccactgacagttatgcaaaccgtccagagcatagccacctgatcctgctgggattcctcttgccagtccatcagcagttccccttgaaagtttcaccaaacatcccttaaatctgccctctcctgcccgtccccagtggaggtcctcatcatttttcacctgcatttttgcaggagctttcttatatccaccttcctccttttctctcagcccatcatctagctacacagtctccagggtaagctttcagaaaggcaatctcttgtctgtaaaacctaagcaggaccaaggccaagtttcttagcctgaaaaatgtgcttttctgactgaactgttcaggcactgactctacatataattatgcttttctaccccctcacactcaacactttgactccagcaatcccaaatccccagatccctaagtgtgctgtgctattttcacgtggctctcagacttggccagtgctgtttccattttggtctttattccccacatctctgcctggggggtagattctaccctgaaaaatgttcttggcacagccttgcaaactcctcctccactcagcctctgcctggatgcccttgattgttccatgtcctcagcataccatgtttgtctttcccagcactgacctaccatgtgtcacccctgcttggctgtaccttccatgaggctaggactatgtgtctcctttgttgactgctgttgccctagcatcttgcacagttccttgcacacaattagagctctataaatgtcaaataaatgtgttataattatatgtttaagatagttgttcaaataaactctaaataaccccaactccaagagtgttagcaagaaatataaattttacagaagaatggttggaggtggggagggtgtccacggagtgagttacctcacacaggcacggaaaaacttgaacctcctaaggacatttttaagctctctttcccattttctctcctggattcccattgcctggtctcatttctctcttctccaccacaccacttcctcaaaaattcctttagggtttgttcttaagcttagataggtttcccattctgaaatacaaaggcctgataattagccaacttaccttgttggggatgtggaaggcaagactctcagactccatgactcaggtatattgcaacaattaggctgaaagttccttgagagtaagtgtccaaatcttttcatgtttggttcccagggctcactacagttgttggtatatcataggcactctaatatcttcttaaagaatcaatatcattaaaatggccataactgcccatagcaatttacagattcaatgctatttctatcaaactatcaaggtcatttttgttttattttttttctttgagatagaatctcgctattgtcacccaggctggagtgcagtggcgcgatctcgactcactgcaacctccgcctcccgggttcaagtaattctcctgcctcagcctcccgagtagctgggattacacgtgcctgccaccacacctggctaatttttgtatttttagtagagacaaggcttcaacatgttggccaggctggtcttgaactcctgacctcaggtgatccacctgccttggcctcccaaagtgcagggattacagcatgagccactgtgcccggcccatggtaatttttcacagaatcagaagaaactattctaaaattcatatagcggccaggcgaggtggctcacgcctgtaatcccagcactttgggagacagaggcaggaggatcatctgaggtcaggagttcgagaccagcctgtccaacatggtgaaaccctgtctctactaaaaatacaaaaatttgccagtcgtgatggcgggcacctgtagtcccagctactcgagaggctgaggcaggagaattgcttgaacccgggaggtggaggttgcagtgagccgagatcacgccactgcactccagcctgggcaacagagtgagactccatctcaaaaaaataaataaaataaaataaaataaaattcatatagaaccaaaaaagagcccaaatagccaaagtaatcctgagcaaaaagaacaaagctggaagcatcacattacccaacttcaaactctactacaaggctatagcaactaaaacagcatggcactgctacaaaaacagacaggtagactaacggaacagaatagacaactcagaaataaagccacacacctacagccatctgaacttggacaaactcaacaatattaagtaatggggaaaggactccctattcaaaaagtagtgctgggataactggctatccatatacagaagaatgaaactagactgctacctatccccatatacaaaaattaaatcaagatggattaaagacttaaatgtaagatctcaaactaaaaaatcctagaagagccaggcgcggtggctcatgcctgtaatcccagcactctgggaggctgaggcggatggatcacctgaggataggagttcgaggccaggctggccaacatggtgaaaccctgtctctactaaaaatacaaaaattagctgggcatggtagtgtgtgcctgtaatctcagctactcgggaggctgagacaggagaatcgcttgagcctgggaggcagagtgagcccagatcgcaccattacactccagcctgggtgacaggagcaagattccatctcaaaaaaagaaaaagaaaaaaaaaatcctagaagaaaacctagtaaatgcccttcttatatcagccttgacaaagaagttatgactaaatcctagaaagcaattgcaacaaaaacaaaaatttacaagtgggatctaattaaactaaagagattctgcacagcaagagaagctatcaagggagtaaacagacagcctacagaatgggagaaaatattcacaaattatgcatctgacaaaggtctaatatccagaatctataaggaacttaaatcaacaagcaaaaaccaaataaccccattaaaaagtaggcaaaggacacgaacagacatgtctcaaaagaagaaatacaagtgaccaacgaacatgaaaaaatcctcatcatcactaatcatgagagaaatgcaaatcaaaagcacagtgagatatcatttcataccagcaagaatgactattaaaaaagtcaaaaaataacagatgttgcaagactgcagagaaaagagaacgtttatacactgttggtaggaatgtaaatacattcaaccactgtggagaacagtttggagatttctcaaagaactgaattgaactaccagtcgacccagcaatgccattattgagtatatgcccaaaggaaaataaattgttctatcaaaaagacaaatacacccatgtgttcatcacagcactattcacaatggcaaagacatgaaaccaaaccaggtgctcatcaatggtggattagattgtgtacatatataccaccatatggtacatatacactgtggaatactatgctgccataaaaaagaatgtaatcatgtattttgcagcaatatggatgtagctagaggccattattctaaacaaactaacacagaaacagaaaccaaataatgcatgttctgacttaaaagtgggagctaaacactgaatacacatgggcataaagatgggaacaatagacagtgggggctattagagaggcaagggctgaaaaactacctattcggtgccctgctcactatctgggtgacagagtcattagcactccaaagctcagcatcacacagtatacctttgtaacaaacctgcacatgtaccccctgattctaaaataaaagtcgaaggaaaacaacaaaaacaaaaagaaataactcctgagttggggtctccatctcttagttcagcctattggcagtcccctttttcaagttctaaggagcctgtactagactactcttcatttagtcccataataatccctctttcaattattttgccttcaaacctatagggaagggattggaaatgaagtttcagtcattccctaagtaaaatgtatatacatattttaattgaaacaggatttcactctgttgcccaggctggagtgcagtggtgtggtcatggctcactgcagcctcaacctcctgggctcaagcaatgcttccatctcatcctcccaagtagctgggactacaggctcgtaaattttttagagaacaaaaacacagtctttagatttaaacatgtgaaagcagaaattttaaaaatacaatgaaagagttggaagacagagttgaaattgttcagaaattacagtaaaaatactaagagataggaaatagtcaacttccaaatgagaagaatcacgaaagagagaacagaaaagatagaaaaaaaattatcaaagaaataattcaagaacatttccttaaagtgaagggcatgagattccaggtatattccacatatagaaaaatatcccatacaaaatcacattgttatgaattttcataacatgagggacaaaaaaagataatataagtaaccagagagggaaaaaataaataaacaaaacaagacaaataggtcatatacaaagtaatattcatcacaatagcttcatagttctcaataataacaaaaagcctttaaaattctggttgaagcagttcagacaatgccatcacccaaaaatatgccattttggcatactgattattattagctgaaagcacttgagaaacagcagactgtacaggaagggctttccaacctcctcttttctacctaaaaacaggctagaaaatttcccatgataaaggtgccctccctctactagaaagagaaaaacatccttatcaccagagatagggaatcaatgccaaaatggatctgaacaaacttattggaataacccttgtcttccactacttatccccaatatagctcttagtaatttccccaagcccctttgtcttgtcatttcttcacaaatttatcatttctttgtctaaaacatatataaacttgtctgctatggtgacttcttcgggtctacatttgcttgtgaggactcccaggtacatgtaaaattgtaataagacttgcgtgcttttctactgttaatctttcctgtgtcagtttaattcttaggcctagctggaaacttaagagggtagaacagaaatttttcctttcctacatggtgaagggacattctgtaataaaactagcctcaacattaaaaaaatgtgatgtaataaaaaacaaaggaaaaagaaaacaaaacagaaaagcaattaataacactaggaaacacgaggcattgtacaggataggaaacgtcctgttatgttacacaatgcaacagtgggtattgttttcatcattattataatgaaaatgctaaatagtgatttgaccaacaatccagtttaaaacatttggaggaatgtgaatgtttatggccagaaaatggggagaaaaatggttaaggaaacaaaatctcatcatctagagtgggaaggagactgataattcctaatatgaaccaaaaactcaaacttttttttttttttttgagatggggtctcgctctgtcgcccaggctggagtacagtggcacgatctcagctcactgcaacctctgcctcccaggttcaagagattctcctgcctcagcctcttcagtatttgggactacagttgcacactatgatgtctggctaatttttgtatttttagtagagatggggtttcgccatgttggccaggctggtctcgaactcctgacctcagatgatcagtccgccttggccccccaaagtgctgggattacagacatgagccattgcacctggcctgaaaactcattttatttagatatgttaagggaaatctcaaaataatcagctagaaaaattgaaaatggttgcccatgaggaggggagaactgttattatttatgtcaaataaaatttgtaggaagccattgatttggactgtgctcctgcactaggccccaatagaccaaaccacatggagtcactcttgctaaagttccacgtcaccaaaccaaagctaagtagtttatcttaccttctgggaaattaggggagagaaataatagacaaatccccaaacaggccagttttagctggcatataaggaagtcctctctgttttaaccgtattaggagagtaactttgaaaagaccgtccactttttggtccctgtttctgttttcttctgccttttctgcctataaagctaacttcctctgcccagctcactggagtaccttctctgaatttttagaagacaggctgccctgatccatgaattgcaaatgaaagccaattagatcatttaactaaattcattgtaattttgtcttttgacatttgtaaacaagccttgtagtacttgctaaacaatgggctgggcgcagtagctcacacctgtaatcctagcactttgggaggctgaggtgggtggatcacctgaggtcaggagttcgagaccagcctggtcaacatggtgaaactccgtctctactaaaaattcaaaagttagatgggcatggtagcatgtgcctgtagtcccagctactcaggaagctgaggcaggagaattgcttgaatctgggaggcagaggttgcagtgagctgagatagtgccactgtactccagcctgggcagcagagcaacactctgtctcaaaaaaaaaaacaaaaacaaaaacaaaaaaacaacttgctaaacaacatatgtttattatttggtaaattataaacaataaattcaaaactttaaaaagaaaacattttattgatagctcactgaatacaaatttataaaatattatttatgcattaagtttcagttacacattttcacccatcattacagatgtcatatggagttgctagagtatgagaagagcttcttcatcccaacagctttcaaagtgaagaggcgactcatgcctgtaatcccagcactttgggaggctgaggcgggtggttcacttgaggtcaggagtttgagaccagcctggccaacatggtgaaacctcgtctctactaaaaatacaaaaattagctgggcgtggtggcgcacacctgtaatcccagctactcaggaggctgaggcaggagaatcacttgagcccgtgaggtggaggttgaagtgagccaagatcatgccactgcactccagcctgggtaacaaagcaagattctgtctcaaaaaaaaaaaaaaaaaaaaagtgaacatctgggtcccccagatctcttcagagatatgtaatgttctcctttttccaactacataactctttaagctgggttttcttcatatactccaatgaaaacaacatattgcaacagatggaatgaagaggcaagtagaagaatccagctgttttctattaagccaaacattacaattgtcagctgaagaattctgagattcataaatttggaaagaaaagcttcatttctcataaaagattgcagcctgcagggtggccattctgacaggctaagaaatgtagtctctggccagaagccaaaaacagacactgagggtcagaagaataagatgggcatttatgctgaataggatggccaaatatacatattcaataaactacagtcatgaatattcatgaaaggagaaacatgcacatgctcaattgagcttcatgcctctccatgggacgcgtgtgcaaaaaatggcagcattagcatgatcagagggtggagttttctgtcctctgatatcaaaaggtgaaacagaggacacagaaaccctcactgcacatcctctgtaaactggccagaaccactccattgtgggcagtctgttatcaggaaggaatgctggttagttgtgcagaaactgcaaaaggaaggggcagtgtcagaccattggttgatatcagcggtgcagctcgtctttccaaagggctggtttctgtttaacctgtaggaaggaaatcctaatggcgtttagcaatggagagggtataacaacacatcatggcaagaactcagttttcaaggtttctctggggtccccttggccaagaggtggtgcatccgtttagtcagctgggggacttaggatttcatttttatttctcagagttttataaaactctaaaataattatttgacagccaggtgggagggggtccctggagaaactccaaccagcctgcctactagggtggagccttgggagtttgcagcagggaggagcctggcgcctcctcttcctatgtgaacctgggattctagcagcctggtgggaagcactgtagcaggagactctggccttgcagaggatccctgttcccctcatccctttatttccccttttcacttaataaaaccctgctttactcaccctttaaaccatctgcaagcctaaatttttgtggctgtgggatagacaagaaccttctctttagctgaactaaggaaaagtcctgcaatgatcccattcttcacaccaaatatgttttgtttcaaaagtatagttatttatcataaatatgtcattaatattgttaaatcaaatttagcctaaagctgcctccttatatagtttaagcttgacctaaaggtttctctgtacttagtgaattgtagcctacccagatgtgtaaacaagactgtgaactactcttgtgacaaacattggattttggccaatcaaaggaggtcaactcttgacactgctttcaaataaggcaaatattgagctgtaaacaatctggctgtttctatacctcacttctgttttctgtacgccacttttctgtctctgtccataaatgttcttccaccacgtggctgtgctggagtctctgaacctactctggctgaggaggctgcccaattctcaaactgttcaattaaactcggttaaatttaatttgtctaaggttttcttttaaccatataaacaagtgagtttatgattgttatgtcttttttcttttcttttttgagacaaggtcccactctgtcccccaggctggaatacagtggcatgatcacggctcactgtagtctcgcactcccaggctcaagcgatcctccatctcagcctcctgagtagttgggagtacaagtgcatgcaaccatgcctggctaattttttttttttttgtattttttgtagagatagggttttgctacattgcccaggttgatctcgaactcctgagctcaagtgatcctcttgcctcagccttccaaagtgctgggaccacaggcatgagtcaccacacccagctattatttctaaattaatgaacagatgaacattttcaaaatttctcagttttaattttaaatatgattaaaaggatagatataacacacaaacaaaagctctatggagtcctctataactcaagaatataaagggtcctgagatttttctttaaagagaaccactgcactctcctggcctactagctctccgcaatccatcctgcttctccccttggcaggagagacctgttctagaccctcaaggacccctcataacatcacctagctattatctaaggaatctttctccatttggacttcccatttttttcttccccctttaaggtccccttattcttttcatctaattttgtgtgccacctgcagagtccttcttcttcttcttctccttctccttctccttcttcttctcagagtcttgttctgttgcccaggctggattgcagtggcacgatctcggctcacttcagcctctgccttctgggttccagtgattctcctgcctcaggctcctgggtagctgggactacaggtacccaccatcatgactggctaatttttttgtatttttagtagagacggggtttcacaatgttagccaggatggtctctatctcctgacctcgtgatccggccgcctcggccttccaaagtgctgggattacaggcatgagccaccgcacccggcgactaatttttttttttttttttttttttgagacggagtctcactctgtcgcccaggccggactgcggactgcagtggcacaatctcggctcactgcaagctccgcttcccgggttcacgccattctcctgcctcagcctcccgagtagctgggactacaggcacccgccaccgcgcctggctaattttttgtatttttagtagagacggggtttcaccttgttagccaggatggtctcgatctcctgacctcatgatccacccgcctcggcctcccaaagtgctgggattacaggcgtgagccaccgcgcccggccggcgactaatttttatatttttagtagagacggggtttcgccatgttggctgggctggtcttgaactcctgacctcaggtgatccgcccgccttggcctcccaaagtgttgggattacaggcatgagccaacgcacccggcctgagtcctgcttcttccagatctggtgcccagtcctgacgccagaaagggggtcttgttccagaccccaagagtgttcttggatcttgcctgggaaagaattcagggtaagtcgcagagtataatgaagttaagatagttaattagaggctactcaattacagagtagggcatcctcagaaaacaagaggaggaaggcgctaccttaaatgtagtgcttgcttatgtaggttgtataagaattgtgtactttattacaaaggcttgtgatcagcttgtgacaggctattggtactgttattttcctgttactattgatttcagcaagaatttatgagtacactattatatttaaggcaaaacctattccttaagaatgctttttgttcttaaaatactgggacatttccataagttctgagtctttagttagcaacattaactcattccctcaatcataaacatctcatgaccaagagtgcccagttcctggggaatgtaacccagcaggtttggctttattcggcctttattcaagatggagtcactctggttaggacacctctgacagtccctggaaatccaaaggaacccttctgtgtggcacagggaatggaagaaagaaagagatgaggcaggaaaatagggtctggaggcagaaaacataagccgattcacacttcagctatgacaggaaatatcctctccatagggcgtatgcctgtaactttacttcatcctcttcatttacataggacgtatcctaagtaaccaatggaatcgtctagagggtatttaaactcccaaaaattctgtaacagggcctttgagcccctatgctcgggcccgctcccacactgtggagtgtactttcattttcaataaatcccttcattccttccttgctttctttgtgctttgtgcattttatctaattctttgttcaagacgccaggaacctggacgccctcccctggtaatagagagatgagcctttcaaatgacctgactcctttatcccagccaggtgtgtgcccgaccctgaaaggaggaatagggagggggacgttcaacccggcctcccgctctgtgttagcagcgtctggatgggtcagggtggaggtgggggtgttctaccctgctatttgctcctagagaagcttctctgcttcactagtctcacagttctaaaggcaagaacagccctagtgggatcttccaaggattttagaaaagaatgaataagggaaaaattaaaatattgcagggtgccataaaaacatcccagtaaaacaaacacctttctagatgctcattggaacgtaaatggagctcagcccccatcccttcacaccagatccagtcttcatctttgtggttcactgccccctcaccactcaggaggaaaaccccagcttctgttctggctccccttctctcacttagaatttttcaccagagtttcagaaagatttgtcaggaccactccatgcccaaggtaaaaagtgtaagtggtacaaaaaggtagaaactcatcagacccccaaagagtgtcatttaaccatacaaagccctgataaactccagggcagaagaaaaagctgcatccttgactccactggggcattcttatgtaaactaagatccaagaactgcatcaggagagaaatcaagagccctggggatgttaggatgagccctagaggtgctaagacaggttatttgaaaaaccaaaaagtagactgagattcccttccttttcagggaagaattgagacctttcctttcttactgttcagagtgggggctgataagggtaattatttcctggagccactggctactgccctgggaaggaaatccgctgggttgggggagggaggaaggcagaaccaggcattaactctccctccactacatccctttcccgtacccctcccctcctctccttccccccactccctgcccccgccctccgaaaatgacacttggcctgagaaaggaggaaggtagaataggtggacacttcccttgtcctgctccaggggtgtctcagtgacaaggagatgtgaaaaaagaaggaatcccaaggctccccttggaaagaagggagatctccaggggctttgggaagtcaggttagtactgggaaggctgaagactcccagtagatagcgttcagggctgcatttggctgcaatcctataaaatacattcttctctaaggttggatacaagcatttagaagactggccattaaaaaaataaacagtattaataatattaataatcatgagtgtcagtagtgttgaattttttctggaatcctttcccaagttgcctaatgcccagagaaggaaaataacagtgtttagtagacataaattataggattagtgcaagtagctattgagatgatgagccaaggcttgtaaattggttttgttttggttttcctaattagatgtttgcgcctatctgtgtatgtgtgtgtgtgtttgtgcgtgtgcatgctcgcatgtggttaatttcatgacttttgcctctggctcttcctgattaaaaaaaatacttaaaatggtaggaagtggcacacacccttgatggacctgtgtttatattaaagaattggcttagtaaatttaactgggacaaggaaactgtgaaggactgtatttttgccattatttaataattcatatattcaaccgttactgattgcctattttgaaccaggccacgtgctaggatacaatggttaacaaacacattccctcccctcaaggaattcatggtctagtgaaatacagagatagaaaagaaatagaaaagtatatcaataaaatgcattgtggaaagagttatggtcatagtgtgtactatatgcttatagaggctgcctttgtataaacatacataagactgctttttaaattataaaaggcagtacataggccaggcgtggtggctcacacctgtaatcccagcactttgggaggccgaggcgggtggatcatctgaggccacgagttcgagaccagcctggccaacatggtgaaaccccatttctactaaaaatacaaaaaaaaaaaaaaaattagccaggtgtggtggtgggcgcctcatcccagctatcaggaggctgaggcgggagaatcacttaaacccagacggaggttacagtgagctgaggtggagccattgcactccagcctaggcaacaagagcaaaactccatctcaaaaaaaaaaaaaaaaaaaaaaaggcagtacatagtacaaactgcttgggttttgttgttgttgttttactgtaccatataggttggagatcattccacctagtagctgaacattttaagcagatcatctggctacaggcagtgagtaggatgaactgggagagtgatgagtgagttagagagttagggagggagggtgctgtcggagtgttaccggaaaggggtcccgatccacaccctaagagagggttcttggatctcgcacaagaaagaattcagggcgagtccatacagtaaagtgaaagcaagtttattaagaaagtagagaaataaaagaatggctactccatagacagagcagccccgagggctgctgttgcccatttttatggttattccttgatgatatgctaaacaaggggtggattattcatgcctccctttttagaccatatagggtaacttcctgacgttgccatggcatttgtaaactgtcatggcgctggtgggggcgtagtagtgaggatgaccagaggtcactctcgtggccatcttagtgttggtaggttttggccggctccaacaccggcttgttgttttatcagcaaggtctttatgacccatattctatgcccacctcctgtctcatcctgtgacttagaatgccttaactgtctgggaatgcagcccagtaggtttcagccttattttacccagctcctatttaagataaagttgctctggttcacacgcctctgacaagaacatcttcatgcctgtgcctggttgagagagggaggcctctgcgctgctgctggatctagtgaagattcactcagtctctcaaattcctctacagtttctctaatggaagagaaaagtggtgttattgctgctagggagcaacctagaagttattttatttatgccatagatatggtgggctaagcactgtgccaacgttcaataagtcactgcagattctccataaattattgtgacaagtacaattgtttgtaaggcttagatctaggtgtgtaagtccaaagaagggtgtgaagcatctgtatttctgttatgtagttattaggaaaaaggatgttggggccttaaaatggccatttttaacatttccaaacttgtgttgaattctaagattttataattgtatgtttccagttgagaagagctttgatattggtagctctaaataaataaataccgttgacctggaagagaaggtaaagtttagggagaggcctttttttagctttatatttaaacattttttataaatgtgattcatgggccaggcctggtggctcacacctgtaatcccagcacttttggaggccaatgcaggtggatcacttgaggctaggagttcgagagcagcctggccaacatggtaaaaccccatctctactaaaaattagccaggtgtggtagcacacacctgtaatcccagctactcaggaggctgaggcaggggaatcacttgaacccaggaggcgaaggttgcagtgagccgagattgtgccactgcactccagcctgggtgacagagtcagactccgtctcaaaagcaaaacaaaacaaaatgttattcataatgctcgggttgtaactatagtacttatctagcaaaagcttgcttttttttttttggctttgactaattgaaactgcaagagcttactggcagagtggtgtactggtcaatatttaaccaattctccaaaggggaaaaaccctgatttgtatgtaggatttgtcagtttccatggtataaatagtcttcccacagctggtagggtgaccaacttgttctggtttgccaggggctttcccatttttaggcctgaaagtcctgaatcccagaaaattcctcattccccaggaaatagcttgattggtcaccctaatggctggttgcaagctcccgatatgacagaactggacgagaagttgggcagagatgtgcacatggtaccagcctatgccaggagcagcggcctccagcaccccactgtcagggagtccttggcccagtagaggatggttagcagggcccggctgttgttcatattagctctcaaatttaccaccaaccctgtattagtttcctggagctgctgtaacaaagttccacaaacgggggtcttaaacacagaaatctattatctcacagttctggagggcagaaatagaaaattaaggtatgagcaggactctgctcttttgatggctctagataatccgttgtatgtcttttcctcagcttctggtttcacaggtaatctttggcgatccttgacttgcatctgtgtaactccagtctctacctccatcatcctgtggcattcttctttatttttctttctttttttcttttcgagacagagtttcgctctgttacccaggctggagtgcagtggcgtgatctcggctcactgcaacctctgcctcccaggttcaagcgattctcttgcctctggctcccgagtagctgagattacaggtgtgcgccaccacacccagctaatttttgcatttttagtagaggcggggtttcaccatgctggccaggctggtctcgggctcccgacctcaggtcatctccctgccttggccttctaaagtgctgggattacaagcgtgagccactgcactcggcccatggcattcttcttttggtgcctttgtcttcactgacttcttgtaaggaaatcagtcgtattggattagaggcctaccttattccagtatgatctcattgtcttaatttaactaaaacatctgcaacaaccttatttctaaatgaggtcacattctgaggtattagggtttagtacttcaacatatcttttttttttttttgagacagggtctcattctgtcactcaggctggagtgcagtggtgcaatcacacagctcactgtaactttgaactcctgggctcgagcagtcctcctatctcagcctcccagataggtaagattacaggtacatatcaccatgcctagctaatttttcaaattttttataggggctgggcccagtggctcacaccttgtaatccctgtaatcccaacactttggtaggctgaggcgggcggatcacttgaggtcaagagtttgagaccagcctggccaacatggtaaaatcccatctctactaaaaaaaatacaaaaattagccggatgtggtggtgggtacctatcataccagctactcacaaggctgaggccggaaaatccctggaacccgaggggcggagatcgcagtgaaccgagatcacgccatgcactccagcctgggtgacagagcaagacataaccttaaaaaagaaaaaaaaaaatgtagagatgaagtcttgctgtgttgcccaggctagtctcaaatgcctgggctcaagcaatccttctgcctcagtatcccaaagtgctaggattacaggcatgaggcactgcaccaggcctacatcctcttttttttttttttttttttttttttttgagatagagtcttgctctgtctcccaggctggagtgcagtggcacgacctcggctcactgcaacttccacctcctgggttcaagtgattcttctgcctcagcctccagagtagctaagactacaggcataatatctctcttagatatgacaaataatatcacagagtgtacacccactgtgatgttaggagtaatacctccctatgatattacaagtaatactgcctttagatactacaaataatatcacagggtgtacatctactgtgatattaggagtaatacctcccttagatattacaaataatatcacagggtatacacccacggtgatattaggagtaatatctctcttaagcgatcctcccatctcagcctcacagaattaaaggaattacaggaagagctgctatacctggctggatctatgttttaaaaatataacccagataaccctgtggtcagtgtctaagatgaattggattagaccaagggagaaaaactaaagatgggaatactagtttgggactttgcttgcttgcttgctctcatttagaaaacatttagtagttctacaatgctcaggcactgttctgggagtcacaaatataggattgaataaagtaaataaagcacttgctctcctggagctcacttttcactgggggaatgcagatagtagacacatacatctatagtatcagtaagtgctaatagaaaaatgaagcaggtgagatggatcatgctgagtagaatgtatcttcttttccttccttccttccttccctccctccttccttctttccttccttctttctttccttcctttcttcttttctctttcttcctttctctctctttctttgctttttattgtcttaaaatgtacataacataaaatttaccctcttaaccatttttaagaatacaattcaaggccgggcatggtggctcacacctataatcccagcattttgggaggctgaggcaggcggatcatgaggtcaggagtttgaggccagtctggccaatatgatgaaaccccatctctactaaaaaatacaaaaattagccaggcttggtggcacatgcctgtagtcccagctacccgggaggctgaggcaggagaatagctggaacctgggaggcagaggttgcagtgagctgagatcgcaccactgcactcctgcctggacaagagagcaagactctgtctcaaaaataaataaataaataaataataataataataataatacaattcagtagccttaagtacatttgcattgttatgcagccatcaccaccatccatctccagaatttttttgagtggagctctttttaatagagtagttgaaggcctctgtgacacagtagcatctgagcagaagcttgaatgaagtgagaaaagaatccttttgcatagtttaggggaagtatgttccattcctggtcctggaaatagttaagactatcacaatagtgcaggagaaagatgatacaatacagtttgtgtagctgaaaccccgtcttcagaatgtaaaggagaacagatgggaagtcatgttcctcccagaagtaattcatgtagcagagaagccaatgcagatccacgagacagacaattcagtgctctgcacaagaactgtgctttaagcatggagaggatttttgtatctgtcctgggatcctacatcaaacagcatgtggtgattgtgaacacaaacgtacaagactgtgaaccctaccaagtttccttcttccattagatatgaataaggagtcatgagtttcctttggaatgtcctttagcctgttggtacatgttttgcctgtgacgaatgcagttactcataaatcattgagcacattgggtacagagggcaaaagataaattcctgtatttcctctattcggtcaacagaaatacctctaggccataatccattcatccaatctaataattttgccatccataaaaccttcaggtgttctgaattcaacatctttttttttttttttttttttttttgagacagagtcttgctctgtcacccaggctggagtgcaatggcaggatctcggcttactgcaacctccgcctcccagattcaagcgattctcctgcctcagcctcccgagtagctgggattacaggtgcccgccaccacgcccagctaattttttgtattttcagtagagacggggtgtcaccatgttggccaggctggtctcgaactcttgacctcaggcaatccacccgcctcagcctcccaaagtgctgggattacaggcgtgagccaccatgcctggctgaattcgacatcttgcacctaattcctgttcagttaaagacccaaatcatgatctctgacttacctggatatttgaaagattaacttgctgtggtgataccatactagagtcacaaaatcaagccctaccctgccacagccacctaaaggaaattaggtgatatacaaaagaaattgaccatattgttgtccttttagtgactctcctaattttcttcccctgaaaacttacagagaaatttgagtatgtttgccttaggtggatgcttgtttttttattgatatgaaaagcagtaagaggaaatggagttttttggcctgttaaggaagggcagccactgtaaacacagttgagtgcaaattcacagtgttagaatgttgaagtgtatataatgattttgcaaaattttctacaaggctgatacagtatccaatcaggactaggattagatatattgtcatgtatgtttgcgcaggaaatgcagagactctaaggtgctacaactgcaatttgacatgtgggatagttcactggtaactgttgatctccctgaggtttaagtttacagttccacagctctttatctgaaactcttgggctatgtgttatggaatttagaattttttccgaaatacgttgcatatattgtatattatgacatgatacctccaagaaagacttggagtcacatcctataaacaaacacatgaatatatcccagtgaaatgtatgactatttttactaaaacaaatgagaatcataaatagacttacattacttcaggtcagattttgctgccgaattagtttgggcatcgaacttttggtttcagagacaaaactgtgaaattttagattatattatggggttgtggacccatgtaaccctcctctccgtaattcctaaaagcaagcaattgcatcaaccagtctcatgagtagctgcgattctagaaatcaagaatccggatctgaaattagccgggcatggtggcaggcacttgtaatcccagctactggggaggctgaggcaggagaatcgcttgaacccaggaggaaactgcagtgagctgagatcgtgctgctgcactccagcctgggcaacagagtgagactctgtctcaaaaaaaaaaaaaaaaaaaaaaaaagaatccagatctgggcaggaccgaattgctgacatgcccccggtatagcagagacgttttgcctacatgttacacacctgagtaatagttgtcagcagctgatgaagaagatgaatgtgctcttaatgtccatctttgatttccagtcattttgcttctgggtcttggcttcctgaggaaagaagtctccagtaggtgaatgcagtgatatggagaatactttcttctggctgcatgcagtaactcacacctgtaatcccagcacattgggaggctgaggtgggcagtgcacttgaggttgggagttcgagaccagcctggccaacatggcaaaaccccgtctctactgaaaatacaaaaattagctgggcgtggtgacagacacctgtcatcccagctactcggtaggctgaggcatgagaatcacttgaacttgggaggtagaggttgcagtgagccgagatcgtgcctctgcactccagctgggcaacacagcgagactctgtctcaaaaaaaaaaaagtgtgtgagagagagtactttcttcctgtttcctcataggccagttctctctggcatgtgagtttaacatcagtcacctccttcacacacagcgggtgcattcgtaataggaggtccttagctgggagtttttatggcacatcagtggggcgtgaaaacaccacataggagctaatatatctttgctggctgctttctccggctccgcagcagacagaaaccctatgaatcatatccaggggtcaggtgcaggcaacagacaactaatatctcccaagtgagttgaaaaggatcttgttacccagcatcctaaggaggttgtagccttgggaaccacaggcaagaataattaactcagctcctcggttagtgcctcttcagttcgagatggaatttatttgcaggcatggctccttaatatgccaaacccatgctcaagacatactccttctcctggaaggttaacgtggctcctgtggctgttccatccctgaggaaaagtgaggaccatgctctccaaacaggccatgtgctggactacctctgtttctgtctcctgggattccaatcagcaagtgagcaacgaagcaacccagacagtgtggttcataggatggctgggtaagtggctgtttgttttttccttactgtggatatgtatcagtgaaggaatctgtagaacattcttgatgggaacatttagtcatatcaagtcaataaattaatgtttaggctggg

SEQ ID NO: 5304 - DNA, 48955 bp, Homo sapiens
  source 1..48955: mol_type = genomic DNA
attcttgcttcaaagtgaaactatacactaaattcctcccacagttagcttggcgtggcctttgttatatgcccaggaataagtgaggacagccagcctatgagactagaagcaagatggagtcagccaagctaaatttctctcactgtcataacctttacaaaggtggtttcattaggcatattaatgcaaattccttagttaaaacaagaatgactctctaaaggctatatttcagatacatcacatgcttctttcctcttgtcccctcaacagtaagcaagaagagtatttttgtacaagagagaggcctctgcctgaagctcccttaatctgtcagatcacagatcaaaagctatcacacactgcccaagggaccctaaagggagccactctcagaaaataaatccaaacctccttttttctggccactgaaacgttcaataattagttcattatctacatcattcacatgtttaatatttattgactttggaattattgattactttgctgagtatcttatgaatttaatctatattaatattaaggtgatgtatcaaattgcattccagagtgtggatttgactctagtgccataatcagtctcctgggacaaacagctgtttctcttccctcattatagaaaaaaattgcccttggcaaatgtcaaagaacatccttttatcaatctctcttaccaatcaatccaagcaaatgcagtgggatttcttttccccagagttgaagtcacctcctgacaggaagttaagtctttaggcactgaatcatagcactgagctgaagcccaggactaagcaagaatgagtgagaatttggagacttaaggtttggtcatctgtagaggattgggttttgtcttgttttgtttttgttttggtgtcctgcaaggtttctcactgcccttcatcaggtaatatgccctgtccctgaactggccaattgtgttaccccattcccttagcaacagtgattgctactgaagaaacaggaggccaacaaagaatatcactcattcaccagtagagtgtctatgtcagagatattagataaacaggaaaactaacaattacattgcaggctgtggaaacagagagaggtacctaaggcacacctgtgggaatatgaaagtttggtttcataaaaggattctggaggaagtcacctctgacatttgagttgagtcctacaggatatgaagaaagtagccccatgttccggttactatggctgtgtaataaattacctaaaacatactggattaaagctatgaaaacatcttttctgcccagagattctgtgggcctgaaattcacatggaacacataaggcataccttgtttctgctccatgatgtctaaggattcagctggaagactgggaggctgggggctggaatttatctgaagaatgactcatttacatgtctactggttgaccctggctgttggctgagggggcctcagctctctctacattgtttctctactttggctagtttggatttcctcaaaacatgatggctggtcctcagtgtcagcatcccaaaaagagaatgccggacacagtggctcacacctgtaacctcagcaatttgggaggctgaggtgggaggttgcttgagttcaggagttcaagaccagcctgggcaacatagtgagactctgtctctaccaaaaatttttaaaattttaaaaatcagccaggtgtggttatgcacacctatagtcccagttacttaggaggctgaggcaggaggatcacttgattccaggaggtcaaggctgctgtgagctatgaccacaccactgcatttcagcctgggtaacagaatgagactctgtttcaaacaaacaaaaacccaaaaaaaaaaaaaagagagagagagggagttagaaggaagatgcatcatttttatgacctggacttggaagtcaccaagcagcacttctgcagtaccctgttggttggaatagttgtagcccaaacccgaattcgaagggaggagaatagataacatccctgggtgacaggaatgtcaaagtcccaaacagcatatgacatgtgacaaatattggtgtggccttctttggaagatccaatcttccataccaggcaaagggatggaagactaaggaacaacatgagggatagccagagagggaaaaagcatcacttgttctaggaactacaaatagcttgaagaagcaaagatgtctagatgcctcccaatatgcagagtggggtgtacagaagagagtggtaagggcgctgggagagctaaggtgggcaagagagcttcctctgtcatgctaagaaagttggaatttatcttgatggtggtgaaagcagagggctatggttagattcacatttgagatttagatttttagatttaaaatgatcaccctggtgacactggcttaactcacaattttgcccaaggcctatgctaccacagtgcttctgaaactttaaagcacattagaatcacctggaggtcttgttaaaccatggattgctgggccttgaaaccccagagattctgattcagtagatcgagaatagggcctgagaatttgtatttctaacaagtttccaggtgatgctgaggctgctggcccagcgaccacatttgataatcatagccctctgataaatcctatcaaaatatcctaatggcagagcaagggaattctggtgatatcctcccctacccataacctgacagctattaggatctgcctacttgaggctaaaagcaaccaagagaggaacagctacagtgtaccacagagtccctcaacatctttgcccacgccacggtgccccagcttcttaccaagtgtgcctgattcctcttgactacctccaaggaagtggagaaagacaagttcttgcgaagccttcgtcttctctgatatgctattctatgtctatttctttggccaaaaagatggggcaatgatatcaactttgcagggagctggagcatttgctagtgacctttctatgccagaacttgctaagcatgctagctaataatgatgtagcacagggtgcggtggctcacgcctgtaatctcagcactttgggcggccgaggcgggcggatcacctgaggtcaggagttcgagaccagcctggccaacatgatgaaaccccatctctactaaaaatacaaaaattagccaggcgtggtggtgggcacctgcaatcccagctactctggaggctgagacagaatctcttgaacccaggaggtggagattgcagtgagcagagatggcaccactgcattccagcctgggcaacaaagcaagactctgtctcaaataataataataataataactaatgatgcagctttctctctctgagtatataatgcagttctgatgatgtgaggaagggcctcactgttggtgtggcagagtctgagaccatggctggcaatgaaaacactaccctttgatgcctatgggctctccctttatggtttcaaggagggcttctcaatcttggcagaattttggactggatagttctttgttgcacaggtggggggctgtcctgcacatcacaggatgtttcatccctggcctctacctactagatgccagtagaacatacccaccccacagctgcctgttgtgacaatcaaaagcatctccagatactttgcagggggaaaatgatttctccaggcctggcatatacataacagtatttaagcagctgcctagaattaattaaacacagaaggatgtctctcatccagaatgccctggaccacctctttgataggcaatcagatcccacctcctccaccctatttttgaaggccctgtgccaacaccacttcttccatgaatacttccttgattcccccatccctagctctatataaatctcccactcaacactcacacctgttagtttacattcctcttgacacttgtcatttagcatcctaagtatgtaaacatgtctctcttcacgattcacaaagtggctttggaagaactttagtaccttcccatcttctctgccatggaaagtgtacacaactgacattttctttttttttaagacagtatcttgctatgatggccgggctggaatgctgtggctattcacaggcacaatcatagctcactgcagccttgagctcccaggctcaagtgatcctcccgcctcagcctcctgagtagctgagatcacaggcatgcactaccacactcggctcacatttgacatcctctaaagcatatataaaatgtgaagaaaactttcacaatttgcatccctttgtaatatgtaacagaaataaaattctcttttaaaatctatcaacaataggcaaggcacggtggctcacgcctgtcgtctcagcactttgtgaggcccaggcgggcagatcgtttgagcctagaagttcaagaccaccctgggcaacatagcgaaaccccctttctacaaaaaatacaaaaactagctgggtgtggtggtgcacacctgtagtcccagctacttggaaggctgaaatgggaagactgcttgagcccgggagggagaagttgcagtaagccaggaccacaccactgcactccagcctgggcaacagagtgagactctgtctcaaacaaacaaataaatgaggcgggtggatcacgaggtcagtagatcgagaccatcctggctaacacggtgaaacccgtctctactaaaaaaaaaaaaaaatacaaaaaattagccaggcatggtggcgggcgcctgtagtcccagttactcgggaggctgaggcaggagaatggcgtgaaaccgggaggcagagcttgcagtgagccgagatcgcaccactgccctccagcctgggcgacagagcgagactccgtctcaatcaatcaatcaatcaataaaatctattaacaatatttattgtgcacttaacaggaacatgccctgtccaaaaaaaactttacagggcttaactcattttatccttaccacaatcctatgaagtaggaacttttataaaacgcattttataaacaaggcacagagaggttaattaacttgccctctggtcacacagctaggaagtgggcagagtacagatttacacaaggcatccgtctcctggccccacatacccaactgctgtaaacccataccggcggccaagcagcctcaatttgtgcatgcacccacttcccagcaagacagcagctcccaagttcctcctgtttagaattttagaagcggcgggccaccaggctgcagtctcccttgggtcaggggtcctggttgcactccgtgctttgcacaaagcaggctctccatttttgttaaatgcacgaatagtgctaagctgggaagttcttcctgaggtctaacctctagctgctcccccacagaagagtgcctgcggccagtggccaccaggggtcgccgcagcacccagcgctggagggcggagcgggcggcagacccggagcagcatgtggactctcgggcgccgcgcagtagccggcctcctggcgtcacccagcccagcccaggcccagaccctcacccgggtcccgcggccggcagagttggccccactctgcggccgccgtggcctgcgcaccgacatcgatgcgacctgcacgccccgccgcgcagtaagtatccgcgccgggaacagccgcgggccgcacgccgcgggccgcacgccgcacgcctgcgcagggaggcgccgcgcacgccggggtcgctccgggtacgcgcgctggactagctcaccccgctccttctcagggcggcccggcggaagcggccttgcaactcccttctctggttctcccggttgcatttacactggcttctgctttccgaaggaaaaggggacattttgtcctgcggtgcgactgcgggtcaaggcacgggcgaaggcagggcaggctggtggaggggaccggttccgaggggtgtgcggctgtctccatgcttgtcacttctctgcgataacttgtttcagtaatattaatagatggtatctgctagtatatacatacacataatgtgtgtgtctgtgtgtatctgtatatagcgtgtgtgttgtgtgtgtgtgtttgcgcgcacgggcgcgcgcacacctaatattttcaaggctggatttttttgaacgaaatgctttcctggaacgaggtgaaactttcagagctgcagaatagctagagcagcaggggccctggcttttggaaactgacccgacctttattccagattctgccccactccgcagagctgtgtgaccttgggggattcccctaacctctctgagacgtggctttgttttctgtagggagaagataaaggtgacgcccattttgcggacctggtgtgaggattaaatgggaataacatagataaagtcttcagaacttcaaattagttcccctttcttcctttggggggtacaaagaaatatctgacccagttacgccacggcttgaaaggaggaaacccaaagaatggctgtggggatgaggaagattcctcaaggggaggacatggtatttaatgagggtcttgaagatgccaaggaagtggtagagggtgtttcacgaggagggaaccgtctgggcaaaggccaggaaggcggaaggggatcccttcagagtggctggtacgccgcatgtattaggggagatgaaagaggcaggccacgtccaagccatatttgtgttgctctccggagtttgtactttaggcttgaacttcccacacgtgttatttggcccacattgtgtttgaagaaactttgggattggttgccagtgcttaaaagttaggacttagaaaatggatttcctggcaggacgcggtggctcatgcccataatctcagcactttgggaggcctaggaaggtggatcacctgaggtccggagttcaagactaacctggccaacatggtgaaacccagtatctactaaaaaatacaaaaaaaaaaaaaaaagaagaagaagaagaagaaaataaagaaaagttagccgggcgtggtgtcgcgcgcctgtaatcccagctactccagaggctgcggcaggagaatcgcttgagcccgggaggcagaggttgcattaagccaagatcgcccaatgcactccggcctgggcgacagagcaagactccgtctcaaaaaataataataataaataaaaataaaaaataaaatggatttcccagcatctctggaaaaataggcaagtgtggccatgatggtccttagatctcctctaggaaagcagacatttattacttggcttctgtgcactatctgagctgccacgtattgggcttccacccctgcctgtgtggacagcatgggttgtcagcagagttgtgttttgttttgtttttttgagacagagtttccctcttgttgcccaggctggagtgcagtggctcagtctcagctcactgcaacctctgcctcctgggttcaagtgattctcctgcctcagcctcccgagtagctgggattatcggctaattttgtatttttagtagagacagatttctccatgttggtcaggctggtctcgaactcccaacctcaggtgatccgcccacctcgccctcccaaagtgctggaattacaggcgtgagccaccgcgtctggccatcagcagagtttttaatttaggagaatgacaagaggtggtacagttttttagatggtacctggtggctgttaagggctattgactgacaaacacacccaacttggcgctgccgcccaggaggtggacactgggtttctggatagatggttagcaacctctgtcaccagctgggcctctttttttctatactgaattaatcacatttgtttaacctgtctgttccatagttcccttgcacatcttgggtatttgaggagttgggtgggtggcagtggcaactggggccaccatcctgtttaattattttaaagccctgactgtcctggattgaccctaagctccccctggtctccaaaattcatcagaaactgagttcacttgaaggcctcttccccacccttttctccaccccttgcatctacttctaaagcagctgttcaacagaaacagaatgggagccacacacataattctacattttctagttaaaaagaaaaaaaaatcattttcaacaatatatttattcaacctagtacatacaaaatattatcattccaacatgtaatcagtattttaaaaatcagtaatgagaccaggcacggtggctcacgactgtaatcccaggactttgggaggccgaggcgagtggatcatctgagatcaggagttcaagaccagcctggccaacatggtgaaaccccatctctactaaaaactagctcagcatggtggtgggtgcctgtagtcccagctactcgggaggctgaggcatgagaatcacttgagcccaggaggcagaggttgcagtgagccaagattttgggggattctgtgacatacaaaaaaaatcagtaataagatatcttgcatactcttttcgtactcatatacttccagcatatctcaattcacaatttctaagtaaatgctctatctgtatttacttttataaaattcacaattaaaaatgaaggttcacatagtcaagttgttccaaacacacttaaatgtctcctaggctgggtgtggttgctcacacctgtaatcccagcactttgggaggctgagatgggcggatcacctgaggtcaggagtttgagaccagcctggccaacatggtgaaaccccgtctctactaaaaatacaaaaattagctggatgtggtggcactcacctgtaatcccagctactcaggaggctgaggcaggataattgcttgaacccgggaggtggtggaggttgcagtgagccgagatcgcaccactgccttccaacctgggcgacagagcgagactccgtctcaaaaaaaaaaaaaaggctcctaataactttattactttattatcacctcaaataattaaaattaaatgaagttgaaaatccaggtcctcagtcccattagccacatttctagtgctcagtagccacgggggctggtgaccaccacatgggacagcatatttagtacctgatcattggttctcagatctggctactcagcagaaccaagaatccacagaaacggcttttaaaagcacagccccacagcccccagccccagccttacctacctggaggctgggaaggactctgattccacgaggcagcctatgttttttgatggagggatgtgacaggggctgcatctttaacgtttcctcttaaatactggagacagcttcgaggaggagataactggatgtgtcttagtccatttgatggagggatgtgacggggctgcgtctttaacgtttcctcttaaataccggagacagcttcgagaaggagataactggatgtttcttagtccattttctgttgcttgtgacagaatacctgaaactgggcaatttatatggtaaaaaattttcttcttactgctctggaggctgagaagtccaaagtcaagtcccttcttgctggtggggactttgcagagtattgaggcggcaccgggcgtcatatggtaaggggctgagtgtgctacctcaggtgtctttttcttttcttataaagcctaactagtttcactcccatgataacccattaatctatgaatggattaatccattattgagggaagaaccttcatgacccagtcaccgcttaaaggccccacctctcaatactgccacatcgggaattaagtttcaacatgagtttcggaggtgacaaacattcaaaccatagcatgctgtctcttaaatgactcaataagctcctgtggcatccacttctgcatgccttgggcagcttttagacatctgtccattttcctagagggacaagaccaccacctgtgatcctatgaccttttggctttaggcctaacaagcaggttataccctcactcactttcaaatcatttttattgtcttgcagacaatttacacaagtttacacatagaaaaggatatgtaaatatttatacgctgccgggcgcggtggctcacgcctgtaatcccagcactttgggaggccgaggcaggtggatcacgagttcaggagatggagaccatcctggctaatacgatgaaaccccatctctactaaaaatacaaaaaattagccgggcgtggtgacgggtgcctgtagtccccactactcgggacgctgaggcaggagaatggcgtgaacccgggaggcagagcttgcagtgatccgagatcgtgccactgcactccagcctgggtgacagagcgagactgcatctcaaagaaaaaaataaataaataaataaatatttatactgcttataaactaataataaatgctatggtctgcatgtttgtgtcaccccaccattcatatgttaaaacctaatcaccaaagtgatattaggaggtggggcccttgggaggtgatgaggtatgagggtggagcccatatgattgggattagtgcccttctaaaatagcccaacggagcccagtgacaaggcatcatctatgaaccaggaaactggccctcaccagacaccaaagctgttggtgcattgatcttggatttcccaccctccaggactctaagaaacacatttctattgtttataagccacccagtggctggtattttgttataacatcccagactaagacaaataacaaatacttgtatccctgacaccaggttaagagatagaatttgtttgttcctctggaggcccttgtcttcaccccatcactgccctgtcctccctggaggaatctgccagcccgaattctgttcatcgtaccctccttttcttagagtttgacctcctctgtatctcccccaatccatgtattgcttatatacaaggtattctgctgtatctgttctgctatggcttgccccttttgttcaacactgtttttgtgcgtcatctgcattgatgcatgcagttgtcctttatttgttctcactgctggatagtatctggttgggtaaatatatcacactgtaaatcacactatccaggttcctttaggtgacatttggttgattgcagtgttctgttgttacgatggtgctgctgtgactgttcttgtgcatggacagaagttcctttcaggtgaatttctcagaatggaattgctgggcaaaggggcagccaataatcaactcatttgatgccaaaagtggtggtgccagttcatcctcccctgcgaggtatgggtcctgattcactcttcaagtgctgtggtttgacagggccgggggtgacaaggggacacctgggaaggaaagctgggctccctgctggccatccaggccagtccttaccagggggtaggcaatgattgggtcaagtggttcctgaccactgggcctgagacttcaggcccagaaactatctaatatttcctcaaatgcatcccatgagcaggcactgtgtgagtgagcacacacatctgaagcctcaagctaggcaagcctaccatgacttgtggtccaagggctcacgggtgacctggagttagagggagacatggctgccaggtggctttagaaagaacactcatcatggccaggtgcggtggcttacgcctgtaatcccagcactttgggaggccaaggtgggtggatcatgaggtcaggagtgagaccagcctgaccaacatgctgaaacctgtctctcctaaaaacacaaaaattagctgggcatggaggtgcacgcctgtaatcccagctactcaggaggctgaggcaggagaatcacttgaacccgggaggcggaggttgcaataagcctagattgtgccactgcattccagcctgggcaacagagcaagactccgtctcagaaaaaaaaaaaaaaaggaagaacactcatcctatgaccttgacctccaagctttgcctccctcaagcagaacagaatggagcctcccttaggcagaggcggaagtttgcctctcacctagttctccattcttttgttcagagcctgaataccctcaggctctgtacttggggtatttctgttctcttgttttatgctcacggttgtgaggtttgttgtgagtaccacgatcccttccttcagaggagtaaactgaggttccaaaaggtttagcagttgcccgaggaatattaaattggcaaaagcaggtagaatataaagcaaggagtatttggcaacggttcttttttatgattaaaaacagccgaagaaagacttctacttgtgcctttgaaggagtaactgcatttgaccttcccaccagtaacaaccatcaaatctctattaaattaaacacacacacacacaaacaaaaacagctattgtgaaggtatcagcgactaagacaactaaggtttgaggggccaggatcctggagagatggaaacttccctgaggtgagccccacattctcagacacttttccttggatgttttgagcactgctttaattcctgggaaaacaattccttccactgtgcacagactctggggccagacagcttgggttcaatcccagctctgccacttaatgtctgtgtatctgtgtaggcaagttaccctttggtgcgtcagtttcctcatctgtaaaacacaactatagttgatcctcattcgttaagagtctgtacttgttaatttgctcacttgctaaaatttgttaccccaaaatcagtacccctagccttttggggtcgtttcaaagatgtgtgcagagcggcaaaaaaatgtgagctcctccaggctcatgttcccagccaaggtccaacaaagtgctgccctgccttcttatttcagctgtcatagtgtaaactgtgtccttttcacagtctgattagtgccatgtttttcagatttttatgcttttttcttggttatttctctgttaaaattgtctccaagtgtagtgcaaagtttagcacgaggaggctgtgatgttccttacagagaaaatgcatgtgttagagaagctttgtcaggcatgagttaaggtgctgttgtcctgagatcaattaatttgttgttgttgttgtttgagacagggtctccctctgttgcccaggctgctggagtgcaatggtgtaatcatagctcactgcagcctctacctctctggctcaagcaatcctcccacctcggcctcctgagtagctgggactacaggtacaccccaccacacccagataatgtttttgatatttttttaggtggaattttgctcatcacccaggctggagtgcaatggtgcgatcctggctcactgcaacctccacctcccggattcaagcaattcttctgcctcagcctcctgagtagcacagattacaggcacatgtcatcacgccttgctaatttttgtgtttttagtagaggcggggtttcaccatgttggccaggctagtcttgaactcctgacctcaggtgatccacccgcctccgcctcccaaactgcagagattataggcacgaaccacaatgcccggcctcatgttttttatttttcaagttgaaatgaggtctctctatgttgcccaggttggtctcaaactcttgagctcaagtaatcctcccaccttggcctcccaaagtgcggggattacaggtgtgagctaccatgcccagccaagatcagtgttaatgaatcaactatatatattacataaggtgtctttaaacagaaataaggttatatattgatcgattggtaacaatgttgtgaccagcagcttacagggtacctagccttgtatttctcctataaataatttgctcgttgagtgtttgtggcaactttgtagcacataactaccaagaataaggactgtaataagagtacgtccctcacaggattgtaatgaagactgagtccatttacataaaggctgagagcagtgtcaagcagatggagaacactgtagaatgtgcgatagctctaacagtggttatcatggctgccctctcacttcttcagagacatgtgtttctaaggtctgcactctgccccaccctccccatccactgtcccccagcccgtttcctcctccacttacttcccagccctgtgccttctgccttctcttttctgagtttgctaagggcactgctggctcaagagcagtaactaacagtctctcgcctcttctctccatggcaaccagtgacctttggagaatgtaaaccttatcaccaatctcttaaagcccttcggtgccttcccaggatgacgtccagctgaggtccttggcaagacccagggcgccccctcctcgctccatcacctcccctgtcacctcccctgcatctccctactccagctgcaccactcttgtgccccagtggctcttgtctgattatttccttcatctccccagctggtcagcagagctggtggtaatcaactcagaccctgtcacctggatgtccagcagttagggactaaaaaaaatcaacaggtcacattctgtcctgcagatcatgataataagatctgtcagacagcagtcagcagtcagagccaaatcttctggacttcagcaggattctgcctcttgctatttcctgttgcctctcttagtgaccttttaagagcattgtggatgcctcccagcctcctgctaaccaccctgtaacctgaacagcctgcagcagccctgcccagtagaacttcctgatgtgatggaaatgctgtgtctgcaccactagccacatgtggccacaggattctcgaaactggtggtgcagttgaggagctgactttatattttatctcattaaatttaaatgtaaatagctacgtgtggcttgttggctagcctattggaaaacacgggcttagagagacacagggagaatcactgtaatgcactaaaagaaggtaaaaaaaaaaaaatcctaagaaatattcctaaaatactttaatatagggctgggtgcggtggctcacatccagcattttgggaagctgaggagggcagatcacttgaggccaggagttcaagaccagcctggccaacatggtgaaaccccgtctctactaaaaatacaaaaaatcgggtgcggtggcgggtgcctgtaatcccagctacgcgggaggctgaggcacgagaatcactcgaacccgggaggcgggggttgcagtgagccgagatcgtgccactgcactccagcctgggcgacagagcgagacttcatctcaaaaacaaaaaacaaaaaccaaaaaaaaaaacttcagcatgattatttaaccaaaatgcaggttagttgttcaccggatgcagagtccaattaacaagagcaaggcctggtaccaaaaaaagtgaatttactccgaaactagcttgggtgaggggtacaaagcatcctgcctttctttaaaagtgctgcttccccttggaagtagaaagtggacacttttataaggtaaggggggaagtgtgcaagggcaagtgggggggtccctctgctagttccgtgcatactctacaggacagttgacttggcaccttcctggttagtaataagctgtagcagtggccaagtgggcatgctttcagtatgccctcccagtgaatgaaagtcctgaggcaacccccaagggtggaagtgccaggccaccacccactggaggtgaaagttccgtgatgggtttgctttggtctgcgaatctactgtcatgtggagagatctgtgctctggaagagcatacagttagaaaagcttgccctgaagggaatgtatggtgaaggggaggtgaaaggttatatttgcatttctgaagggctaagtaggaaaccgggaaccaggggagaggagaagagaagagaggataattttttttaagaaaagcaacatattccctttttcttagaaaaaatggagcactcggttacaggcactcgaatgtagaagtagcaatatataaattatgcattaatgggttataattcactgaaaaatagtaacgtacttcttaactttggctttcagagttcgaaccaacgtggcctcaaccagatttggaatgtcaaaaagcagagtgtctatttgatgaatttgaggaaatctggaactttgggccacccagggtaagataaaacaccttccacgtcataggtatcttcctctctccttccctgcctctcccattagaacctggttttcttcctgagcagcaacaatcttaggcatctttccatgtgactgagtatccaccacattatttttaatgaaatagtattagattgcatggatgtgacataatccatttaacccatcccctactgttggacattcaggttgtttccagagtttcaatattattttatttaataccctaatagttagagcaggccatgctgctatcacaaatagacccaaatatttaatagctcaaaccaataacgtttgtgtcctcctctctgggcagtacagggttggcatacctcctgaagtgaattaggaactacactcattccagcttccagtttggtctttatctgtcagtgccttactgtcctctgcattgttgagtctcagtcaccttgtccaagttccattggccagaaagggctagaagcacagaagggctggaagtggcatttgttcctcactcacattctggtgggaagaacttagtggtgtggccttagctgactgtaagggaggctgggaaatatagtctagcgagtgccctggaaaaagccggcacggcattccccatggaaagctgtcaggcacggctacagtctaccccctgccaaccagtatctgcatggaccctccttccacactcagatgcatttacccccagccccaagagagccaaccgatgcccatgtggtcaccacagccacctccgagtccaagatttccaggtgacatgcagtctcctctctcccagctttaggaatggcttcttctgatctacacacagacacagacacacacacacagacacacacacacacacacacacacacacacgatggagaggggcaggataactgcaactgtaactccattcagaaaagaggcacagcactagctgcccgcagcactggagccctgctgggcagcactggatcaacctctgccctggcagaggagcatgttcctccacaaatccctgcttcagcctctcgagaggctcctccttgtctgttattttccttggccacaaggcaggcaggcagtgggaagtgtgccctcctccggggcaaggagccttcacagcccacttcctgctaataacagtttggggttccacagggtgttttaagactccagtcagctattttaggccagactcatttctctctctctctctctttttttttcttttatgaaatcacaccctgagacccaggctggagtgcagtggtgcgatctcggctcactgcagcctccgcctcccgggttcaagcaatcctcctgcctcagcctcctgagtagctgggactataggcgtgcagtgccacacctagctaatttttgtatttttagtaaagacggggtttcaccatgttggccaggctggtcttgaactcctgacctcagatgatccgcccgcctcggcctcccaaagtgctgggattactggcatgagccactgcgcccagcccagactcatttttctttgagagtaggcttttcccaaaagtaggcttctgagctattcactttcaggcagtcccatgtgccaggaaccacatccaaatttcctccgtggatgggagtctcaggctgccttatctccttgcatgtccccatgcccagctgtctcagcctaagggcaggtaccttgaagtcaagttaaacaataagattggagaccagcaatgccctcagcctggtttttgcagcaggactgagtcccttgttttggctcaatgggaagtctttgctgttcaaagccttagcttctctggctgagtgcggtggctcacgcctgtcatcctagctctttgggaggccgaggtgagcagatcactgaggccaggagttcaagaccagcctggccaacatggtgaaaccctgtctctactaaaaatacaaaaagttagccaggcgtggtggcaggcacctgtaatcccagctactcgggagcctgaggcaggagaatcgcttaaacccaggagatggaggctgcagtgagctgagatcatgccattgcactccagcctgggtaacgagcgaaattccatctctaaaaaaaagaaaaaaaaaaggccttagattctccctttgactttccacgtttgtgcagccttttatctccaatgctccatttcattccatctcctggcttattcttttcttgtcacatctactaaaagcaacaagaagccaccggtattcaggaacattctacctgtccccagagctatatgctcagtaggcatacagttggccctccaggttatctgagactcagatttccagagggctttgcatggctcacaaggtctgaagaacctctgagcctcccgcctgcggtgtctgttcattgactttgccacagtctcaaagaggcactgcatgctgcatgtttgaggtttttgctttggtggcatccatttccagcctcggcttccggcattcctcccccagcagactctctgctgctttccccttactccttctggcagttctgggaggttgcatagggcccttgcaggatgccccaagtccagctgcctctggcctctgggaagcacacccttgacctgccatgtgtaggaagacagcccgcttctgccagggcccaactctgccggcaggtagcaccttccaacctcttcactttggactttataactgtcaggtataaagtcggttgtgtccttacgtttctcaaattcttcaagacacgtcaaccagcctctcctacgcattctctccagctcagtctcaaaacacaccctttctctccagctcactctcaaaacacaccctatcaggccaaccactctttttaaaggacagctcctcaccaatccagtcaggtagccttccccacattgtatcctggaagtgggtgatggactgggtggggaagagggtcatatggcaaatctgtatgtcttacagtaattgtctagcagcccctggtgtcttactttaggccccctggaaactttcagatagtggagttgtctgatacatatcttataacctacagatattaatatatcctcacaggggcacaaaagctcttacaaggatgtttattataataatatttttattgttataatttacatgccataaaactaaccattttaaaatgtataatgcaagggtttttagtatattcacaagattgtgcagctgtcactactaattccagaacattttcattattccagaaggaaaccctattcatattagcaatcactcccccattccgcctttccctaaaacccagcaatcactaatctactttctgtctctgtggatttaaagtaattttaaatttgaaaaatagtatctataaggaaatgtatctagtcacaagcatacagcttgatgaatttgtaaaaattgaacagtcctatgaacataccctgtaagctcaagacatagaatgttaccagcccctgcaagcaagctgcctgctcacttctagtcattaacccctccctcttttccttctagtcattaacccttcagagtaactattctgattaccaatagcatagattagttctgcctgttgttttactttatataaactgtctcattaagtataaacatgtttgtgtatacttgtgtatttctttctatcacaatgatgtttgtgagattcatccatgctgttcctatagacaattctattttgcagcgtagtattccattgcatgactataccacaatttatctgtgatattacaaaggaatacttgggcagtttccagtttggggctataggatagttgtgatacaaatattttagtatagtacatgtcttttggtgaacctgggtacacatttctgttgtgtataccccttaagagtggagctgatgatcctggctaacaaggtgaaaccccgtctctactaaaaatacaaaaaattagccgggcgtggtagcgggcgcctgtagtcccagctactcgggaggctgaggcaggagaatggcgtgaacccgggaggcggagcttgcttgcagtgagccgagatcgcgccactgcactccagcctgggcgacagagcgagactccgtctcaaaaaaaaaaaaaaaaaaagagtggagctgatgggtcatagcatgtaaatgcattcaactttagtagatactgtccaacagttttccaaagtgattgtccaacttacttgcctatcagcagtatctgaaaagtctagttgcttcttttcttggccaactctttttttttttttgagatggagttttgctcttgttgcccaggctggagcgcaatggcacgtcctctgctcactgcaacctccgcctcctgggttcaagcaattctcctgcctcagcctcccgagtagctgggattacaggcatgcgccactatgcccggctaattttgtatttttagtagagacagggtttctccatgttggtcaagctggtctcgaactcctaacctcaggtgatccgcccgcctcggcctcccgaagtgctgggattacaggcatgagccaccgcgccaggccggccaactcttttttattttattttattttactttaaagacagggtttcactttgtcacccaggatggaatgcaatggcacgatcacagctcactgcagccttgacctccctggctcgggtgatccctcccacctcaggctcctgaggagctagaactacaggcatgggccatgcccagctaattttttaatttttggtagagacggggtctctgttgtctcagattcctgggttcaagtgatccttctcccttggcctcccaaagttctggtattacaggcatgagccactgcacccagcccatggccagctcttgatacgatctgtctctttcttttctttttttttttttaatttgagaagtgttaaataatctttctttgatattatacataaaccacaccaaaatgtctttcagtaagtaaaatgaaccattttagatacagaaaattctaattagattggcatagttaaggccaaaaatataaagttgacattgctaccttatcttcagcccttgcctttaagaggcaaatgaacacaaaatacaggtgaatcttgcttggttctgagacagtgaaggactttcccccagtatttaaatatatttacataaccagttacataaatctaaatattaaaaaaatctccaatagattttagatggcattcaccatctttgtgaaaagttgaacattactaatgaaatctgatcatatctttagaaggataaacagtgatagcatttactgaatcagaataactgttttttggggttttctttgagacggagttttgctcttgttgcccaggctggagtgcagtggtgccacctcagctcactgcaacctccgccccctggattcaagagattatcctgcctcagcctcccgagtagctgggattacaggctcgccccaccatgcccagctaatttttgtatttttagtagaggcgaggtttcaccatgtcagccaggctggtcttgaactcctgacctcaggtgatccacccgcctcagcctcccaaaatgctaggattacaggcgtgagccaccaggcccagcctattttttttttttttctttttttgagacggagtctcactctgtcacccaggctggagtgcagtggcacaatgtcagctcattgcaacctccacctccggggtttcagtgattctcctgtctcagcctcccaagtagctgggaactacaggcgtgcaccacaagcccagctaatttttgtatttttagtagagacagggttttgccatattggcctggctagtttcaaactcctgacctcaggtgagccacctacctcggcctccgaaagtcctgggattacagacgtgagccactgcactgcctggcccagaaaggactattaattgtagttgcctctgggaatgggggctgcctgcttctttctgtaaccccttctgtgctgtttaaatttttttttttttttttttttttgagacagagtctcgctctgtcgcccaggctggagtgcagtggcgcaatctcggctcactgcaagctccgcctcccaggttcacgccattctcctgcctcagcctcctgagtagctgggactacaggcacccgtcaccacgcccggctaattttttgtattttcagtagagacggggtttcaccatgttagccaggatggtctcgatctcctgaccgtgttatctgcctgcctcggcctcccagagtgctgggattacaggcatgagctaccacgcccggcctttaaatttttactttgggccgggcacggtgccttacgcctgtaatcctaacatttcgagaagctgaggcacgtggtggatcacttgatgtcacgagttcagaccagccactgcactccagcctgggtgacagagtgagactctgtctcaaaaaaaaaaaaaaaagaaagaaaaacttttactttttacatgttattttcatcaatttaatgaatttaaataacaaatgtataaatttgatattaataaaatggaagcatttggtaatcatgttttgggttttgtgcttcctctgcagctctctagatgagaccacctatgaaagactagcagaggaaacgctggactctttagcagagttttttgaagaccttgcagacaagccatacacgtttgaggactatgatgtctcctttggggtacctcttgacttcttttatttttctgtttccccctctaagaattttagttcactaaaatgaagaatttccctccagcagagctaagcatcaagtagcatgtagttgtaggtaggattaaaagactagggttccgggaggtgaaggttgcagtgagccaaaatcacgccactgcactccagcctgggtgacagagcgagactctgtcatagatggatggatggatggatggatggatggatggatggatagatagatagatagatagatagatagctggatagatagataagatagataagacaagactaggcttcaagctgcagtccagctctaccaggcttgttgtgactctgggcaagtcactcagcctctctgagcctcattttccagcttcagtggatacccatgaaggcaaatcagagaggggcctgagtgtgtatttgtccagcaggcagatggagggaacaacaaactagacccgtagttcttcagtagggataagataactgcccaaaagttatttagattacaaagacttgagccctgctcctgtgagacagtgatggggtaggtcgggtgcattcctgggaagcatatttttgaaaagctcacctgggattctaatgtgtatccctaggtcttattcctagagattttgattacttggtctggggtgtggcatgacctgggcagggcactgggatttttaagctccacagatgattccaatatgcagctagtatgagaacttgtttttttttgaaggagtctcactctgtcacccaggctggagtgcagtggcgcaatctcggctcactgctccgcttcctgggttcaagcagttctcctgcctcagcctcccgagtagctgggattataggcatctgccaccatgcccagctaatttttgcattttagtaaagacggggtttcaccatgttggttaggctggtctcgatctcctgacctcaaatggtccacccccatcagccttccaaagttttgggataacaggcgtgagccaccaggtccggcctggtgtgagaacttctgagttggatgaaacattagccccagatcctagaagccagggaagtgctggtctttatcgactggccaccaggtggcagatttgggcaagggtctgcctttgggtttagaattattgcttaggccttaaagtagttcttttttgccagtgggagaaaatccctcaaagatggttttctgggttggttggtttgtttgtctgtttgtttgttttttgagacagagtctccctctgttattcagcctggagtgcagtggcatgatctcactgcaacctctgcctctcgggttcaagcagttctcctgcctcaacctcccaagtagctggaattataggcacacgcccccacacccagctaatttttgtatttttagtagagacagtgtttcaccacgttggccaggctggttttgaactcctgaactcaagtaatcctcccacctcagcctcccaaagtgctaggattacaggtgtgagccaccgcgcctggctcctcaaagatgttaatcctcttgatggcaattgactaataccagaaaatgtcacgaagcgtgcattttggattcaatcatggaattgttgaggacaatcagccatcagactaaagcgatagaaatagtattggaaattgcagcgggagcactgaatggagaaggcactccacataatggaggaggcaaccaagtcttagagaaggtatcaagcctgactataaggacagtgagggaattgaaaaaacaaaaaaggagcaatggagcagggaaggattgaatgcctttcaagtagattcagtaattgctgttagcagcaaaaaatgcagtagtgcctgggcagggctttaaagtgcttgcacaggcagccctagagggccgggctgcttgggaactcttacaaactgacctaccaacttgagcatccacagcctgatcagaggtgggggagttaagggccttctctcccctagcctctactagagcctgtaactgcagggaaaccaagttgcaggctaaactctgcccacacatgcagacattgattagcaagctacaaaaacagtcatgaaacctgtttttataggattagtgaagccccagtttgaccagagtactttgcatgaatgttttgttagaagcaaatgtgccaatattctagcagctgcgtttggtttacttcttcttcttctttttttttttttttgagttgaagcctagctctgtcacccaggctggagtgcagttgtgtgatctcagctcactgcaacctctgcctcccaggttcaagcgattctcccgcctcaacctcctgagtagctgggattacagacatgtaccacaatacagggctaagttttgtatttttagtagaaatggggtttcaccatgttggccaggctggtctcaaactcctgatctcaagtgatccacccgcctcagcctcctaaagtgctgggttaacaggcatgagccacggcacctggcaaaagtcatcttttggtttacttctattgaactgaaaaagtcacaaatatatttatatttaattaaatatatttatataaaaatatggtatttagtattattatttttagagacagggcctcgctctgtcacccaggctggagtgcagtggcacaatcatagctcactgcagcctcaagcttctgggctcaagtgatcgttccacctcagcctccctagtagctgggactacaggcacatgccaccatactcggctaattattttattttatttatgggtctcgctatgtttcccaggctggtctcaaactcctggcctcaagcgattctctcacctcggcctcccaaagcaccgggattacaggtgtgtgccagcacacccagccacaaatctataaatttagaaaggaggactatttctaaagagggtcccactacctgtaggcaggaagcagagcctctggccataactgaaaaacaagcacttccaagaaggggcaaagggaacatgaatttatgctgagaggcgtagctaagcatacatattcaacagattatgggaggatctatgaatattcacaaagggaggatctatgaatatgcacacatgtggagtaagctaacgtgtgcagcatgtctcccatgttcaccttaggcagaaacttaacactaacatgtattacagggcaacaaaatgagactgcatatctacataacctagctatttggtaggctgaagcaggagcatcacttaagactgggagttcgaggcagctgtgagccatgatcgcaccactgttctccagccaggatgacagggcaagaccctgtcttagaccactctgtggtcagtggttatcaggaaggaatgctagtcagttgtgctgaaaccactaaaaaggaagggcagaattaggtgatgagttgataccagtggtgaagtgagtcttttttttttttttctttttgagatggagtcttgctctgttgcccaggctggagtgtagtggtgtgatctcagctcatcgcaacctccacctcctgggttcaagtgattctcttgcctcagcctcccgagtagctgggattacaggcgcctgccaccacgcctggctaatttttttatatttttagtagagactgggttttgccatgttgtcaggctagtcttgaactcctgacctcaggtaatccaactgctttggcctcccaaagtgctgggattacaggcagctccaaagtgctgggattacaggcatgagccaccatgcatggcctgaaataatttttttgaaagggctagtttctatttagcccttaggggaaaaaaaactaatggcagttagggagggaatagaacgagtcctgtttgaactcctttcccatcatggccaaaacttaaaattttttttagatatctctgggctccccttggccaaaagatagtttgttgagtcagttgggagcttagaattttgtttttatttctcacatcattgaatcaatttgaaccaggcgacaaaaccttctgctcccagtagtgggtcagagaaccttcctgattcctgccctgagattgtctctctgaagacaacattaggctagtaggctttccagattctgtaacccattctttcaaaggaagagatgcctatatttttctagccaattcatataccttgagtatcactcaagggcaaaattatttctaacaaatcatttactaattagcaaatgcttaagtgtagatttagaaagctaaagctatacagtggctgccatctatagtttggacttgtgattaactacattgaaatgctaactctgtaccctagagtatgaattcctgattagagtccttcaggtgctaactaatttatgtatttcatgtttgataatattattacttgagctttgtgggagagcagtcttttcctcccctgagatatagctagaagttacctcctttgtgaagccttcctagatactccaagcagacacggtccttcctttctcccttgcccagcactctgaggttgactctgtggagcactgatccctctgtgttataattgtctatttacacgtcagctaccacctataacacactgagttcctcaacagcagggacactgtccattctttgatcccagtgtctggaacagtgccaagtacatagtagggacttaataaatattgattcatatgtaaatgagacttttccaaaacatgctttcgttgatgcctctcagcatttatacaccttttaccaactcgctactggccacatagacaaatgaaagcagtaatccagatacacccaagaggacatctgttcttttttctctctgtggagtgggagacttaagtggcttcttaactggtgtgtcgtctgatcaagtggtccaggtaacaggtggatgccaatgtctggcccaggcatcaccccttactggcactggtcattacagaagacactctaccagagctgaaaggacctcttgtcactaggcagctgtggagtccgctctacttgacctagtaaaatctgcctggagactgttagagtcaccccactacctgaagttacctccaggctgacctcttttttttcccaggtggagtcctggcatcttagatattttaataaggatttgcttgttgacatgttctttattcactaaggtgtcagcatattactgtcttagaactgagggttcttcatcttttttggatcaggacctccctctaagaatctgatgactgctctggtccctctcccaataaaaacttccatactcacctgttaaaaaaaaaaaaaactttaaacaaattaacagagttttattcagcaaagaatgattcataaatcgggaaggctgcaaccagaataggttcagagagactccacggtgtgccacgtggttggagaggatttaggatttatgcacagaaaaaggaaagtgacatgcagaaaatgaaagtgagggcctggtgctggtgcggtgcctcacgcctgtaatcccagcactttgggaggccgaggcgggcagatcatgaggtcaggagatcgagaccatcctggctaacacggtgaaaccctgtctctactaaaaatgcaaaaacttagccgggcgtggtggcaggcacctgtagtcccagctacttgggaggctgaggcaggagaatggtgtgaacctgggaggcggagcttgcagtgagccaggatcccgccactgcactccagcctgggcgacagagcgagacttcatcttaaaaaaaaagaaaagaaaaaggaaaatgaaagtgaggtacagaaacagccaggttggttacagcttggtgtttgccttaaacttggtttgaacagttggccgcctttgattagccaaaactcggtgattggtacaagagtagattgcagttcactatgtacagagaagcccttagatccgaactcaaaataggtaaggaggcagttttagctacacttaagttaacatactcaggagtaccattccagcttcaagctggaagtgtctgcagccccctgagaccacttaatcccaagttaaaaacccctgctcagaggcagcatctttttttttttttttttttttttttttgagagagatctcactctgtcacccaggctggagtgcagtggcacgatctcagctcactgcaaccaccacctcctgggctcaagggattctcttgcctcagtctcccgagtaactgggattacaggcgcgtgccactatgtccagctaatttttttttttgtatttttagtagagatggggtttcaccatgttggcctggctggtcttgaactcttgacctcaagtgatccactggcctcagcctcccaaagtgctggcattagaggtgtgagtcactgttcctggcccagtgaggcaccatctcattggatatggagacaaaggatctggcttagcatcctggatttgtattttctttccaagagtccttaagtgatatctaacttttgcgagctgcagtttcctcagctatgagatgagtgacattaacctcctctcttcagatttataagaggatcaattaaaatggcataggtaaaagtgcatcctagcaagttggtatctactttagaaatgaaggaggtcatatgtatgtgaagtctccagacccaacatgccatcttatatgtgtctatttctacaagtgagctagtgacaacagtaattgctatttttgctcctacatgggtagggctgatcttgactaggaggagtcaataagactcaccagccgggcgtggtggctcacgcctgtaatcccagcactttgggaggccaaggcgggcggatcacgaggtcaggagatcgagaccattctggctaacacggtgaaaccccgtctctactaaaaaaatacaaaaaaattagctgggcgtggtggtgggcgcctgtagtcccagctactcgggaagctgaggcaggagaatggcgtgaacccgggaggcagagcttgcagtgaaccaagatcgagccactgcactctagcctgggtgacagagcgagactccatctcaaaaaaaaaaaaaagactcaccagctgtggccactgtctgtgctaattggctagtgcctgcatctcagaaactgctacatattttgactattccccctgcacttaagggcatgcacactcccaaaatagactcagattgtctaaggaataatgatgatgatgaagagaaagccctctttatctggtctatttgtagtcagttccaaaagcattaagaatttctgctgaactaatgcagctagtttctttcctgtcaccactttccttccaaaatagtttcaagatctgtgggggaaaaaatctatttacagtgaacagactggtgggaggaagttgagcattggggttttctgccctgtgtaaccttgccctaagttgggcagatggtatcacactacctggacatcatctgctcattcactatttgaccagttggtcattcattcacaaatgtcctttttgcaggagggatggaggtgctagacctgcagatgctagcatgaaaagacagatctcctgctgctaaggtgcttaaagtagtggaggtcaggggacaagcaagcagtcaggcagctctgaatgcagaggcaggaagcaccacgaggcaatgggacccacagaggggtagcagggtagaggtgagtgggtctcatgtggggagggaggaagttgactgcagagaaggtgccagggggtgaaaatagcttgagagctgtggagctagaagggctctcacatttgcttattaatatgccctttgaaaaagagtggcctgatacctggagtcactcaaaagatttccaattccgataggaaaaagtcaattttggcttcagtggttgcatgtgcaccccctgatttgctgtatgctgaggcattgtggtgatggacgcaagtgcggagaccttgagcacgcatctgcccctagttcttgccctgagtcctcgaaggaggcaggagagacatcaaggcagacaggcgccgctcatcagtgatgagaccagacctggaactcgcgtcttatactcagtcctctgccctttctgctggattgtggccccccagtatagggtgcaacacacaactggagcatttaagggccacaaagagaacaaattaccaatgattgtgtgttgattctttgagctctttttttttattattatactttaagtgttagggtacatgtgcacaatgtgcaggttagttacatatgtatacatgtgccatgctggtgtgctgcacccattaactcgtcatttagcattaggtatagctcctaaagctatccctccccccttccccctccctccaccccacaacagtccccagagtgtgatgttccccttcctgtgaccatgtgttctcattgttcagttcccacctatgagtgagaatatgcagtgtttgattttttgttcttgcgatagtttactgagaatgatgatttccagtttcatccatgtccctacaaaggacatgaactcatcattttttattgctgcatagtattccatggtgtatatgtgccacattttcttaatccagtctatcattgttggatgagctctttatctcatggaaaaataatttataaaactctgtatgagaggagtgggaaatagtattaacgggtgcggggtttctttttgggacaatggaaatagctggaattagatagtggtgatgtttgcacactttgtgaaatactaaaaactcctgaattatacagttttaagaaacttttatttatttgtttttgagagaagttctctgtgtcacccaggctgaagtgtggtggcgtgatcaccggttattgcagcctcaatctctgaggctcaagcgattctcccacctcagcctaccaagtagatgtgactataggtgcgcaccaccacacccagtgaatttgtaattttttgtaaaaacaaggttttaccatgttgcccagtctggtcttgaactcctgggcccaagcgatcctccctccttgggctcccgaagtgccaggatacaagcatgagtcaccacatgcagcctcagttttaagaaacttttaaataaatgaaatatagtcataccaaaacagtaaaaatgggtttcaggaaaaaaaatgtttttttaaacaaacttacgtattgtataatcccagcccttttaaaaaatgctttcaaaaactggcagtcaactcataaaaggacaaatacttatgattccactgatgaagtagtcaaaagtagtcaaaaatcacagaaacaccaccataaatgtataatttttattttcaattaaaaaaacatcttttttttagtcaaaatcatagaaatagaaagtagacaggtggttactaagggctatgggatggggaaattagtgtctaatgggcatagagtttcagtgttacaaggtgaaaagttctagagttatgctgcccagcagtgtgaatatactttattgttctgtacacttaacatggttaatatggtaaatttagcgttatgtgctttttactatagtaaaattaaaaaaaaaaaaaatggggccgagtgcagtagctcacacctgtaacataatcccagcactttgggaggccgaggtaggaggatcacttgaggccagaagtttgaaaccagcctggtcaatatagcgagacctcatctctacaaaagaaaaatgttaaaattagacaggtgtggtgtctgtagtcccagctctctggaggcagggactgagtcagaggatcacttgagcataggggtttgaggctgcagtgagccatgatcctgccactgctgcagcctgagcaacagagcaagaccctgttgtaaaaacaaacaaacaaaaactggcagctgatacctgagagtgaatatcttttatcgctggttaatgggattgagagaatgcttcatcttatagaaagaacagtgtctttggacccacagagacctggatttaagattagctctgccaattactgagtactctttactatgaacctctgttttcctcatctgtgaaactggaataatgaatcctaccgccaacaattgtagtcaagttggaaacaatttacacaaagtgccaaacaccaagcctggcacagtaggaaccgagtaaatagtggttaatatttttatcagtgtctgcattgctgacgtctccatcatttctatacatttgtttttgaatcagaaaaagatgttattttaaaaaaataacccagtagtgccccttgtcccattcctatcagttatattattattgttactaccctctggaatttcaataactctttgttttttgggttttttgttttgttttgctttgcttttgagacaggatctctgtcgcccagtctggtgtgtagtggtgtgatctcagctcactgcagcctcaacctcctgggctcaggtgatcctcccacttcagcctcccaagtagctgggaccacaggcgcatgccaccacacttggctaatttttgcatttttagtagagacagggttttgccatattgcctaggccggtctggaacttctgggctcaagccatctgcctgcctcggcctcccaaagtgctggaatttcaggcatgagccatgcctggcctaaatagctctctgtgtttgcaaaagtgtgttataagaatcattcagagcctctcgattggatggaggctctagaatgcacagaaaaaggctgccaccgtgtatctctgcaagtcatgcacaagatggggaacagcaggcttccccctgcttaccagttcaaatacagagaactagccctgtagctgtttctttcatatctcacccattctaaagagaccacaggccttagaagtaaaggactcttttgttgaaagagtgttttcaaatttaaatgagcatttattggtcaaagatgcaccaactagtcttttgaagaattcaaggctctttagagaaaaataaagccttggaggagtatctgagaagcttgttagatgcgtgggaagagtctggaaataaaaaacttcatctggagtttctgccttctaccaacagagctgaagctaatgctctcctaagacaagcaaagcagatggtttgcatacttccttaccttccttttacttcctctgtaatagacttgtcatgtctgatgtttgagttgacgtggtactctaatagagttagagtctgcattttttttatgtcctctagtatgttctggttgatggttgagggcaacaaaccagcagtcccagatgccagcaccaagacctgagacaggtcacttaactctccgagcttcaccaccattctcaccttgcagacctcacagggaacagggaaagctctatgagatacaacatcattatgattaatcctattctgattctgaaagcaaagctcttcctacacaaactcctatttctaaatactaaaagacatttctttatggtgtattttgtgtacttgtagaaatggaaagtgttgagataaaacatgaagcaatgatgacaaagtgctaactttttcttgttttaatttctttatgctttttttccacctaatcccctagagtggtgtcttaactgtcaaactgggtggagatctaggaacctatgtgatcaacaagcagacgccaaacaagcaaatctggctatcttctccatccaggtatgtaggtatgttcagaagtcaacatatgtaattcttaaagacttccgaaatgtgacattgtggaccatttaagaaatgtcggctgagcacagtggctgacacctgtaatcccaacactttgagaggctgaggtaggaggatcacttgaggacaggagttcagaaccatcctgggcaacatagtgagtccctgtctctgtaaagaaaataaaaataaagtcacagctgggtgcaggcttacacctgtaatcccagcactttgggaggccaaggcctgtggatcacttgagctcaggagtttgagaccagcctgggcaatgtcacaaagccccacctctactaaaaatataaaaattagccaggtgtggtggcacacgcctatagtcccaactacttggaaggctgaggttgagcctcagcctgagcccaggaggtggaggttgcagtgagccaagatcgcgccactgcactccagcctgggcaacagggccagaccctgtcccaaaaaaaaaaaaaaagtcatcgtcttatgttagcatccttgtaagtgagcctttcctgatattttgcagcctgtctcattctcagtagaaaagtttactctagttacataacttctccctgctgacaatttggatactgtaagcaggcatcaggatattaagatctgaagtgagtagcttataacttttccaaatccagcctagacagttttcctctattaaattattgccctgactttaaaagaagctacttttgaccttgtagcgtttgaacaagttgcactttgtcttcaaagcaagttaaagtttgacctctacttgttttgagcctctcaggtaaagggttatttgaattccctttgcaggttggggttgtgtaccctgtggaggtggtagagtgttatatattgctgctccagggcatttaatccctcctgccttttccattgatgtgctttcaatctagaggaataaaagattgtgttggagacacaatgtggcctgcatagcatctgaaagcctgagaacatgcagggagagacatccctcatccctcagcagcctggctgctgttgaagtggttgtaagaaagtaaaagagaaatgcccacaaaacgttctcagatccagtcattcattagcacttccaaagagagcatgttgactgtgaattgggaaagggccagataaaactagcatagaattctttgaaagactaacggtatttgcattttttaaaaattataaccttactctaccccctaacattgacatcatttttaggtaattaatattttcccatttattattctgtgatctctaatgctttgttcagaataaatagtgtgtttcctttccccacactttcatccaagaagtgtgctagagttcaacaaaaacagcactagaaatcactgtcattctaggaaggccctaattcacagattgtattggtttttagacccagttagtgtgctggaggttggaggattttaacctctgtgggccaactagcctctgtggcctcagtcattcttcctgaccctggctgtgcttgagcctgtgtgttcttatccttcatctccgggggaacgaagtggatcagctcggtccagcgatcacttttggggatcagtggctttgtagatatcgggcaggcacttaccccaaaagaactttccccatatctgaagactgaaaacgtccatatcgtatttggacacactgcccagcaatacgctctagctgtgttcagaagcatgggaatttggaaagatctgctgagcatgccgtttactgtcacagatactatcttcctcaaaaaaaaaaaatatatatatatatatgggggacggggcaggttgagactgggtgagactgaagaggtgccttggccagagcaggccacacccagagaccacaggctccccggtccacctcaggcccctccccttcctgcgccgtttccggcagatccagagtggccaccgccggatgggagtcgggggaagggaggcagagaagcgggccctgaggacaagctctcagtgcttctgtgggaagtggcggcaagacggcagctcccagcgggggatggaggccgagtcagtctgctggtcactggaggccaggatgctgcctaacacagccgtcccgctccgggcctcaccaccagggcggctctccccactcccggcctgctgcccacacagactgcggggttccgggggagcaggacccaggccgttctgcgcctgtcttcttggaaggagcaggccggagcgcgggagcgccgtgtagctgtacctgcgaaggcacaggattccgcgggaagatcccgcagtttcgggccgtcgtcattgtttttatacctgtggcaaatggcatgaccagacacacggttatgtctggagaaacccctgtagaggagcaggaggttgtggacatgctgtggcccggacagtggctgccgagcagttggagcctgcacccgcccaacttggctaaagaagtccccatactctctgtggaaaagatttccagaagctgttgtgtcaatatcaaagcctcaaaacaacaacaacaacaacaaaaacatgaaattatcaacaataaagatcatccttgagtctgctttgaaaagtagggtgaaattctgcagaggcattcaactggcaagataccaccctcatagccagatctgcaggtctcagccatcatgccagggaaaatgctccattcaccactcctcagcttctgcttctggtttcagaggtctctgtattggaggggctttaaagcaagaagggtctttacccacttactcttattcacagatgtgaatatgcaggtccagtggggaaagtgacatgtcctaagtcagaatagagtcaacaagaaaacagggcccaaaatgacttagcctctagtgtataatgggcattgatgagctactggaaatacagagatgaagaaaacacagtcccatcttcaaggagctcaatctagcaagggagacagactctttgtaggtgggaccgggcttccctgcagcagaaggaagcttgaaattggtaacgagcctcagaagggacagaggcaggccaccatgctaccctgagaggatcgcatgtggacacggggctatgacctggccctgctttgacccactagctgtgctgtagggccaggtggagcctggagtggcctgtgctaaggggctactatgagctctttccactcccccaaggcattgcataaataatgtcactttctgtttgcacagcaaaatcagggacacaattttctagaacatggggtgcctcccctccccccagcccaacagaagttctacaatgactgatgggcccttgtttttgtttgagacggaacaccccacagggttccgagtggtgatttgtggcccacaggccactggcaagtggaggcagagctgcagagccctcgggagccacagagggcctgctggccgccacgacatgccaactcagctgctgctggccctcctgtgggcggcagtgctagtgatgtgcagaatcttaggactagtgccaaggaacctataaataccctgggtgacccaggcgtgcactgctgtggtggccttcacagtcagaagatgacaagctgagaaggggagaatcggcccaaggtgagatccacagaaaggccagggccaagatgcggccagcacctcaggctggtggtggtcttacgttgaccatgccagaggccagtccttgattgctccaaaccctctgttcgagggttccaaatgaaatgagcaggtcctcgtgtcaggacctaggttagtttctgaaaaagcatgaaaagcaggcctcctgaacttccccgagtgactgatgcaaagtgcgtcctgcatgcttcacagcaccatggagaggatcttcaggggcaaactgcagactatctgaatgacggcactgaccatcagcaaaccgcagagctgcctgaccaagaaattgcgagacagaagcaatgcttgcaggcgaagaagaaggggccagacacagtggctcacgcctgtaatcccagcactttgggaggccaaggcaggcggatcacttgaggtcaggagtttgagaccagcctgggcaacatagtgaaaccctgtctctactaaaaatacaaaaaattcgccaggcatggtggcaggcacctgtaatcccagctgcttgggagactgagacaggagaattgcttgaacccaggaggcgaaggttgtaacgaactgaaatcgtgccacagcactccatcctgggcgacagagtgagactgtctcaaaaaaaggaggagaagaaggaaaggccaaggcaggaatgaaacaggccatgaatgttggagtgaagcaactggcctcctcgtgctaagcggctactgtgagttctttccactcccccaagacattgcataaataatgtcactttctgacactcaccccgctgaatgtcctgcctctgctcaagggtggtatgatggggacttggcagtggaggggaacagggaaaccagacatggtggtctccccgcttcctggctacaagtccctctgaagaaatccaaaggagtaaagagcttggagagtaggcctctgtagggtgcaagggcacagctggagacggagctcctgaggctgcagctgatgctgcccgctctgcctgaactgcaccaaaaacgtgatgaggccatagcgggagtccacggaggaggatgcctactgcccgacctctagcagagactaagcaaggtgcatgaaaacttgaaccacatgtgtcacacccatgaccactacatgaagatggcccaaaacctggcccaggaattgaagaaagactcttccaatttgctgtaagaaaatggcccagggggcaagcacggtagctcacacctgtaatcctagcactttgggaagctgacgcaggcagatggcttgagctcaggagttccagaccagcctgggcaacatggtgaaaccccgtctctaccaaaaatacaaaaattagccgggtgtggtgatgcatgcctgtggtcccagctactcaggaggctgaggtggaaggattgcctgagtctgtggggcagaggttgcagtgagctgagatcacaccactgcactccagcctgggtgacacagtgagaccccatctcaaaaaaaaaaaaaagaaagaaaacggcccaggaaggctggagggccgccgtgtccattgagagagtgctccaggcactccaaaaagaaaatgaccacaatgggaagaaaccagctgaccatgagaccaagttccaaccttttacaagtggcctgtggctcctggcgccccgcccacagctgacaggggctcagaagtgctagggggaccatgggccaccagggccaccaggagggaggcaggtaacgatgcgagggcttggatgcagaacaccagctggtttgattctgttttccctgtacctgggtcctgaatgcccagaggctcagggaaacaccagccagtgctgctgcctttaaagcacttttgactgatctcttgttaatttagcaactgttattggttgatgctgcagttgctcttattgaagtttgattgatagcattaggatggtaaggcactatttttcaaataaaggttgtttaatataaaaaaaattttgtttttttttctctcagcctttcacattggttcaaaatatctttcatctggctgcatttctgatttttgttttgttttttttttcttaattttatttatttttaattaaaaataattttttttgtcaacatggggtctcactttgttgcctaggttggtctgaaactcgtggcttcaagcaatcctcccacatcagcctcccaaagtgctggggttatgggtgtgagccactgcagcagcctgttttttttgtttgtttgttttttttaatttgacaagttttcaggtcctgtgaaatcagcagtcttacctcccaccttgcgcaccctgaggaggttgcagaataaaggagaattctagggacacgtgggcatcagtgcctgtgctcagagcacctcaggcagtgtggaggggtctagaggttactcaggctctgcctggcaacccgatagcagtatcagagtatagggccaaggggacggtccttgggcttggtgtggtttattagtccttttcctgtgaccctgatggtttggttcactcatttttatctccatactgggaacaggttcaagccccagcatttggttgataatgcaggaatccttgatacttttattgcccaagcttcccttcctggtgacctcatcctagcctcagtctttggaaaagccctccttgagtgctcaggcagactcaggtgccctttcttctgggctcccatgcactctgttcttacctccatcagggtgccacatgcactagtgttatctgctgccgtggccaatcatccatgaggccatgaggaagtggaatgtacatctggtataagaagacatggcagaagccagcctccgatctgtccacacgaatacagcattcccaaagcaacgtgcatgtgccattattcactggatgagcttgaggtggatgaactagcccaccaggctctcaatgtcatgaatttaacactgaattaagaaaaatatgttttaaaaataatagtttaggtgattgctggggtgctaggagaggaaggaatggggaataactgtttaatgggtatagttggccttgtgtatctgtgggttccacatctgattcaaccaaccgtggatcaaaatatttgaaaataaaaaacaaaacaaaaatgatacaaataaaaaccaatataacaactattaacagcatttacattgtactaggcattataagtaatctggagatgacttaaagcatacagaaggatgtgcctaggttagatgcatgtatcgtaccatttcatatcagggacttgagtacccacggattttggtatctgcagatcctggaaccccttccctatggataccaaggaacaacagcactgggtctccttttggggtgatgcagatgttttgaagctaggcagaggtagtggttgcacaacattgtaaatgtactaaatgccaccaaattattcatttttaaatggttaatgtgttatgtgaatttcaccttaacaactaataatattataggtaaggcacaagttacatctgtagcacaaaaatggccctaatttttaaaacactgctccagcatagcaggtatcacatgtgaggtagcaaaagctggagatcaaagtgtgatacctggagacttatcagtaagggtcaaatgttttttcaggttttgagaatcattcttggaattgttccagaagatatatcgtataactcttcttagatgctaagataagaaggcagatatacactagctcattttgtgttattttctagagctttactccagtcaatttcttgggggcagcatttgtggaatcagtggttcatctgaagggctgtgctgtggaattactatgcatttgttttgtcttccagtggacctaagcgttatgactggactgggaaaaactgggtgtactcccacgacggcgtgtccctccatgagctgctggccgcagagctcactaaagccttaaaaaccaaactggacttgtcttccttggcctattccggaaaagatgcttgatgcccagccccgttttaaggacattaaaagctatcaggccaagaccccagcttcattatgcagctgaggtctgttttttgttgttgttgttgtttattttttttattcctgcttttgaggacagttgggctatgtgtcacagctctgtagaaagaatgtgttgcctcctaccttgcccccaagttctgatttttaatttctatggaagattttttggattgtcggatttcctccctcacatgataccccttatcttttataatgtcttatgcctatacctgaatataacaacctttaaaaaagcaaaataataagaaggaaaaattccaggagggaaaatgaattgtcttcactcttcattctttgaaggatttactgcaagaagtacatgaagagcagctggtcaacctgctcactgttctatctccaaatgagacacattaaagggtagcctacaaatgttttcaggcttctttcaaagtgtaagcacttctgagctctttagcattgaagtgtcgaaagcaactcacacgggaagatcatttcttatttgtgctctgtgactgccaaggtgtggcctgcactgggttgtccagggagacctagtgctgtttctcccacatattcacatacgtgtctgtgtgtatatatattttttcaatttaaaggttagtatggaatcagctgctacaagaatgcaaaaaatcttccaaagacaagaaaagaggaaaaaaagccgttttcatgagctgagtgatgtagcgtaacaaacaaaatcatggagctgaggaggtgccttgtaaacatgaaggggcagataaaggaaggagatactcatgttgataaagagagccctggtcctagacatagttcagccacaaagtagttgtccctttgtggacaagtttcccaaattccctggacctctgcttccccatctgttaaatgagagaatagagtatggttgattcccagcattcagtggtcctgtcaagcaacctaacaggctagttctaattccctattgggtagatgaggggatgacaaagaacagtttttaagctatataggaaacattgttattggtgttgccctatcgtgatttcagttgaattcatgtgaaaataatagccatccttggcctggcgcggtggctcacacctgtaatcccagcacttttggaggccaaggtgggtggatcacctgaggtcaggagttcaagaccagcctggccaacatgatgaaaccccgtctctactaaaaatacaaaaaattagccgggcatgatggcaggtgcctgtaatcccagctacttgggaggctgaagcggaagaatcgcttgaacccagaggtggaggttgcagtgagccgagatcgtgccattgcactgtaacctgggtgactgagcaaaactctgtctcaaaataataataacaatataataataataatagccatcctttattgtacccttactgggttaatcgtattataccacattacctcattttaatttttactgacctgcactttatacaaagcaacaagcctccaggacattaaaattcatgcaaagttatgctcatgttatattattttcttacttaaagaaggatttattagtggctgggcatggtggcgtgcacctgtaatcccaggtactcaggaggctgagacgggagaattgcttgaccccaggcggaggaggttacagtgagtcgagatcgtacctgagcgacagagcgagactccgtctcaaaaaaaaaaaaaaggagggtttattaatgagaagtttgtattaatatgtagcaaaggcttttccaatgggtgaataaaaacacattccattaagtcaagctgggagcagtggcatatacctatagtcccagctgcacaggaggctgagacaggaggattgcttgaagccaggaattggagatcagcctgggcaacacagcaagatcctatctcttaaaaaaagaaaaaaaaacctattaataataaaacagtataaacaaaagctaaataggtaaaatattttttctgaaataaaattattttttgagtctgatggaaatgtttaagtgcagtaggccagtgccagtgagaaaataaataacatcatacatgtttgtatgtgtttgcatcttgcttctactgaaagtttcagtgcaccccacttacttagaactcggtgacatgatgtactcctttatctgggacacagcacaaaagaggtatgcagtggggctgctctgacatgaaagtggaagttaaggaatctgggctcttatggggtccttgtgggccagcccttcaggcctattttactttcattttacatatagctctaattggtttgattatctcgttcccaaggcagtgggagatccccatttaaggaaagaaaaggggcctggcacagtggctcatgcctgtaatcccagcactttgggaggctgaggcaagtgtatcacctgaggtcaggagttcaagaccagcctggccaacatggcaaaatcccgtctctactaaaaatattaaaaaattggctgggcgtggtggttcgtgcctataatttcagctactcaggaggctgaggcaggagaatcgctgtaacctggggggtggaggttgcagtgagacgagatcatgccacttcactccagcctggccaacagagccatactccgtctcaaataaataaataaataaataaagggacttcaaacacatgaacagcagccaggggaagaatcaaaatcatattctgtcaagcaaactggaaaagtaccactgtgtgtaccaatagcctccccaccacagaccctgggagcatcgcctcatttatggtgtggtccagtcatccatgtgaaggatgagtttccaggaaaaggttattaaatattcactgtaacatactggaggaggtgaggaattgcataatacaatcttagaaaacttttttttcccctttctattttttgagacaggatctcactttggcactcaggctggaggacagtggtacaatcaaagctcatggcagcctcgacctccctgggcttgggcaatcctcccacaggtgtgcacctccatagctggctaatttgtgtattttttgtagagatggggtttcaccatgttgcccaggctggtctctaacacttaggctcaagtgatccacctgcctcgtcctcccaagatgctgggattacaggtgtgtgccacaggtgttcatcagaaagctttttctattatttttaccttcttgagtgggtagaacctcagccacatagaaaataaaatgttctggcatgacttatttagctctctggaattacaaagaaggaatgaggtgtgtaaaagagaacctgggtttttgaatcacaaatttagaatttaatcgaaactctgcctcttacttgtttgtagacactgacagtggcctcatgttttttttttttttaatctataaaatggagatatctaacatgttgagcctgggcccacaggcaaagcacaatcctgatgtgagaagtactcagttcatgacaactgttgttctcacatgcatagcataatttcatattcacattggaggacttctcccaaaatatggatgacgttccctactcaaccttgaacttaatcaaaatactcagtttacttaacttcgtattagattctgattccctggaaccatttatcgtgtgccttaccatgcttatattttacttgatcttttgcataccttctaaaactattttagccaatttaaaatttgacagtttgcattaaattataggtttacaatatgctttatccagctatacctgccccaaattctgacagatgcttttgccacctctaaaggaagacccatgttcatagtgatggagtttgtgtggactaaccatgcaaggttgccaaggaaaaatcgctttacgcttccaaggtacacactaagatgaaagtaattttagtccgtgtccagttggattcttggcacatagttatcttctgctagaacaaactaaaacagctacatgccagcaagggagaaaggggaaggaggggcaaagttttgaaatttcatgtaaatttatgctgttcaaaacgacgagttcatgactttgtgtatagagtaagaaatgccttttcttttttgagacagagtcttgctctgtcacccaggctggagtgcagtggcacgatctgggctcactacaacctccgcctcctgggttcaagcaattctctgcctcagcctcccgagtagctgggattacaggtgcctgccaccacacccggctaatttttgtatttttagtagagacggggtttcaccatcatggccaggctggtcttgaactcctgacctagtaatccacctgcctccgcctcccaaagtgctgggattacaggcgtgagccactgcacccagccagaaatgccttctaatctttggtttatcttaattagccaggacacttggagtgcatcccgaagtacctgatcagtggcccctttggaatgtgtaaaactcagctcacttatatccctgcatccgctacagagacagaatccaagctcatatgttccatcttctctggctgtatagtttaaggaatggaaggcaccagaacagatttattgaaatgtttattagctgaagatttatttagacagttgaggaaaacatcagcacccagcagtaaaattggctctcaaagattttcttctcctgtggaaagtcagacctctgaggccccatccaggtagaagtactagtgcaagaagggcctctgctgtccacttgtgtttctgtgatctgtgggaacattgttaacgccacatcttgacctcaaattgtttagctcctggccagacacggtggctcacacctgtaatcccagcactttgagaggctgaggcaggtggatcacctgaggttaggagttcgaggccagcctggtcaacatggtaaaaccccgcctctactaaaaatacaaaaattagctggccgtagtggcgcacgcctgttatcccagctactcgggaggctgaggcaggagaattgcttgaacctgggtggtggaggttgcagtgagccgagattacaccactgcactccagcctgggtgacaagagggaaactccattaaaaaaatgtaattcccgtgtctgccatcttaagtgtaaaggtggctaaattatatagaaaaataagacaatatcatttcccaattacattcctttcctaccgcactctatgatgctagctgagatttttccaaaagaaaatggcttaaataaaaccctaagagaaagaaaaactttaaatccctccaaagctcaaaagtaatagaaacagatgagtttggagtcaggatttctctgtaagattgcctaggctgtgtactgcacatctccaggtgccactgttgacagagattataactacaatgtgaagtgaatggtgccactgacagttatgcaaaccgtccagagcatagccacctgatcctgctgggattcctcttgccagtccatcagcagttccccttgaaagtttcaccaaacatcccttaaatctgccctctcctgcccgtccccagtggaggtcctcatcatttttcacctgcatttttgcaggagctttcttatatccaccttcctccttttctctcagcccatcatctagctacacagtctccagggtaagctttcagaaaggcaatctcttgtctgtaaaacctaagcaggaccaaggccaagtttcttagcctgaaaaatgtgcttttctgactgaactgttcaggcactgactctacatataattatgcttttctaccccctcacactcaacactttgactccagcaatcccaaatccccagatccctaagtgtgctgtgctattttcacgtggctctcagacttggccagtgctgtttccattttggtctttattccccacatctctgcctggggggtagattctaccctgaaaaatgttcttggcacagccttgcaaactcctcctccactcagcctctgcctggatgcccttgattgttccatgtcctcagcataccatgtttgtctttcccagcactgacctaccatgtgtcacccctgcttggctgtaccttccatgaggctaggactatgtgtctcctttgttgactgctgttgccctagcatcttgcacagttccttgcacacaattagagctctataaatgtcaaataaatgtgttataattatatgtttaagatagttgttcaaataaactctaaataaccccaactccaagagtgttagcaagaaatataaattttacagaagaatggttggaggtggggagggtgtccacggagtgagttacctcacacaggcacggaaaaacttgaacctcctaaggacatttttaagctctctttccc

SEQ ID NO: 5305 - DNA, 20 bp, synthetic construct
  misc_feature 1..20: note = Description of Artificial Sequence: Synthetic oligonucleotide
  misc_feature 1..20: note = Target: FXN; (-) strand; PAM type: NAAAAC; PAM sequence: CAAAAC
  source 1..20: mol_type = other DNA
aaaacaaaaacaaaacaaga

SEQ ID NO: 5306 - DNA, 20 bp, synthetic construct
  misc_feature 1..20: note = Description of Artificial Sequence: Synthetic oligonucleotide
  misc_feature 1..20: note = Target: FXN; (-) strand; PAM type: NAAAAC; PAM sequence: CAAAAC
  source 1..20: mol_type = other DNA
gcaggacaccaaaacaaaaa

SEQ ID NO: 5307 - DNA, 20 bp, synthetic construct
  misc_feature 1..20: note = Description of Artificial Sequence: Synthetic oligonucleotide
  misc_feature 1..20: note = Target: FXN; (-) strand; PAM type: NAAAAC; PAM sequence: AAAAAC
  source 1..20: mol_type = other DNA
accttgcaggacaccaaaac

SEQ ID NO: 5308 - DNA, 20 bp, synthetic construct
  misc_feature 1..20: note = Description of Artificial Sequence: Synthetic oligonucleotide
  misc_feature 1..20: note = Target: FXN; (-) strand; PAM type: NAAAAC; PAM sequence: CAAAAC
  source 1..20: mol_type = other DNA
tgagaaaccttgcaggacac

SEQ ID NO: 5309 - DNA, 20 bp, synthetic construct
  misc_feature 1..20: note = Description of Artificial Sequence: Synthetic oligonucleotide
  misc_feature 1..20: note = Target: FXN; (-) strand; PAM type: NAAAAC; PAM sequence: GAAAAC
  source 1..20: mol_type = other DNA
acctttatcttctccctaca

SEQ ID NO: 5310 - DNA, 20 bp, synthetic construct
  misc_feature 1..20: note = Description of Artificial Sequence: Synthetic oligonucleotide
  misc_feature 1..20: note = Target: FXN; (-) strand; PAM type: NAAAAC; PAM sequence: CAAAAC
  source 1..20: mol_type = other DNA
tctgtctcaaaaaaacaaaa

SEQ ID NO: 5311 - DNA, 20 bp, synthetic construct
  misc_feature 1..20: note = Description of Artificial Sequence: Synthetic oligonucleotide
  misc_feature 1..20: note = Target: FXN; (-) strand; PAM type: NAAAAC; PAM sequence: CAAAAC
  source 1..20: mol_type = other DNA
gaaactctgtctcaaaaaaa

SEQ ID NO: 5312 - DNA, 20 bp, synthetic construct
  misc_feature 1..20: note = Description of Artificial Sequence: Synthetic oligonucleotide
  misc_feature 1..20: note = Target: FXN; (-) strand; PAM type: NAAAAC; PAM sequence: AAAAAC
  source 1..20: mol_type = other DNA
agagggaaactctgtctcaa

SEQ ID NO: 5313 - DNA, 20 bp, synthetic construct
  misc_feature 1..20: note = Description of Artificial Sequence: Synthetic oligonucleotide
  misc_feature 1..20: note = Target: FXN; (-) strand; PAM type: NAAAAC; PAM sequence: AAAAAC
  source 1..20: mol_type = other DNA
tcttgtcattctcctaaatt

SEQ ID NO: 5314 - DNA, 20 bp, synthetic construct
  misc_feature 1..20: note = Description of Artificial Sequence: Synthetic oligonucleotide
  misc_feature 1..20: note = Target: FXN; (-) strand; PAM type: NAAAAC; PAM sequence: AAAAAC
  source 1..20: mol_type = other DNA
cagccaccaggtaccatcta

SEQ ID NO: 5315 - DNA, 20 bp, synthetic construct
  misc_feature 1..20: note = Description of Artificial Sequence: Synthetic oligonucleotide
  misc_feature 1..20: note = Target: FXN; (-) strand; PAM type: NAAAAC; PAM sequence: AAAAAC
  source 1..20: mol_type = other DNA
cctgtcacatccctccatca

SEQ ID NO: 5316 - DNA, 20 bp, synthetic construct
  misc_feature 1..20: note = Description of Artificial Sequence: Synthetic oligonucleotide
  misc_feature 1..20: note = Target: FXN; (-) strand; PAM type: NAAAAC; PAM sequence: AAAAAC
  source 1..20: mol_type = other DNA
catcaatgcagatgacgcac

SEQ ID NO: 5317 - DNA, 20 bp, synthetic construct
  misc_feature 1..20: note = Description of Artificial Sequence: Synthetic oligonucleotide
  misc_feature 1..20: note = Target: FXN; (-) strand; PAM type: NAAAAC; PAM sequence: TAAAAC
  source 1..20: mol_type = other DNA
aaacctcacaaccgtgagca

SEQ ID NO: 5318 - DNA, 20 bp, synthetic construct
  misc_feature 1..20: note = Description of Artificial Sequence: Synthetic oligonucleotide
  misc_feature 1..20: note = Target: FXN; (-) strand; PAM type: NAAAAC; PAM sequence: CAAAAC
  source 1..20: mol_type = other DNA
ccaggaattaaagcagtgct

SEQ ID NO: 5319 - DNA, 20 bp, synthetic construct
  misc_feature 1..20: note = Description of Artificial Sequence: Synthetic oligonucleotide
  misc_feature 1..20: note = Target: FXN; (-) strand; PAM type: NAAAAC; PAM sequence: AAAAAC
  source 1..20: mol_type = other DNA
gaaaaaagcataaaaatctg

SEQ ID NO: 5320 - DNA, 20 bp, synthetic construct
  misc_feature 1..20: note = Description of Artificial Sequence: Synthetic oligonucleotide
  misc_feature 1..20: note = Target: FXN; (-) strand; PAM type: NAAAAC; PAM sequence: AAAAAC
  source 1..20: mol_type = other DNA
attccacctaaaaaaatatc

SEQ ID NO: 5321 - DNA, 20 bp, synthetic construct
  misc_feature 1..20: note = Description of Artificial Sequence: Synthetic oligonucleotide
  misc_feature 1..20: note = Target: FXN; (-) strand; PAM type: NAAAAC; PAM sequence: AAAAAC
  source 1..20: mol_type = other DNA
ggtgaaaccccgcctctact

SEQ ID NO: 5322 - DNA, 20 bp, synthetic construct
  misc_feature 1..20: note = Description of Artificial Sequence: Synthetic oligonucleotide
  misc_feature 1..20: note = Target: FXN; (-) strand; PAM type: NAAAAC; PAM sequence: AAAAAC
  source 1..20: mol_type = other DNA
tcatttcaacttgaaaaata

SEQ ID NO: 5323 - DNA, 20 bp, synthetic construct
  misc_feature 1..20: note = Description of Artificial Sequence: Synthetic oligonucleotide
  misc_feature 1..20: note = Target: FXN; (-) strand; PAM type: NAAAAC; PAM sequence: GAAAAC
  source 1..20: mol_type = other DNA
agattgttgctgctcaggaa

SEQ ID NO: 5324 - DNA, 20 bp, synthetic construct
  misc_feature 1..20: note = Description of Artificial Sequence: Synthetic oligonucleotide
  misc_feature 1..20: note = Target: FXN; (-) strand; PAM type: NAAAAC; PAM sequence: TAAAAC
  source 1..20: mol_type = other DNA
aaaatagctgactggagtct

SEQ ID NO: 5325 - DNA, 20 bp, synthetic construct
  misc_feature 1..20: note = Description of Artificial Sequence: Synthetic oligonucleotide
  misc_feature 1..20: note = Target: FXN; (-) strand; PAM type: NAAAAC; PAM sequence: AAAAAC
  source 1..20: mol_type = other DNA
aagggactcagtcctgctgc

SEQ ID NO: 5326 - DNA, 20 bp, synthetic construct
  misc_feature 1..20: note = Description of Artificial Sequence: Synthetic oligonucleotide
  misc_feature 1..20: note = Target: FXN; (-) strand; PAM type: NAAAAC; PAM sequence: CAAAAC
  source 1..20: mol_type = other DNA
gcaaagacttcccattgagc

SEQ ID NO: 5327 - DNA, 20 bp, synthetic construct
  misc_feature 1..20: note = Description of Artificial Sequence: Synthetic oligonucleotide
  misc_feature 1..20: note = Target: FXN; (-) strand; PAM type: NAAAAC; PAM sequence: AAAAAC
  source 1..20: mol_type = other DNA
gaaatggatgccaccaaagc

SEQ ID NO: 5328 - DNA, 20 bp, synthetic construct
  misc_feature 1..20: note = Description of Artificial Sequence: Synthetic oligonucleotide
  misc_feature 1..20: note = Target: FXN; (-) strand; PAM type: NAAAAC; PAM sequence: AAAAAC
  source 1..20: mol_type = other DNA
cacaatcttgtgaatatact

SEQ ID NO: 5329 - DNA, 20 bp, synthetic construct
  misc_feature 1..20: note = Description of Artificial Sequence: Synthetic oligonucleotide
  misc_feature 1..20: note = Target: FXN; (-) strand; PAM type: NAAAAC; PAM sequence: TAAAAC
  source 1..20: mol_type = other DNA
atgagacagtttatataaag

SEQ ID NO: 5330 - DNA, 20 bp, synthetic construct
  misc_feature 1..20: note = Description of Artificial Sequence: Synthetic oligonucleotide
  misc_feature 1..20: note = Target: FXN; (-) strand; PAM type: NAAAAC; PAM sequence: GAAAAC
  source 1..20: mol_type = other DNA
taagttggacaatcactttg

SEQ ID NO: 5331 - DNA, 20 bp, synthetic construct
  misc_feature 1..20: note = Description of Artificial Sequence: Synthetic oligonucleotide
  misc_feature 1..20: note = Target: FXN; (-) strand; PAM type: NAAAAC; PAM sequence: CAAAAC
  source 1..20: mol_type = other DNA
tccagcctgggcaacaagag

SEQ ID NO: 5332 - DNA, 20 bp, synthetic construct
  misc_feature 1..20: note = Description of Artificial Sequence: Synthetic oligonucleotide
  misc_feature 1..20: note = Target: FXN; (-) strand; PAM type: NAAAAC; PAM sequence: AAAAAC
  source 1..20: mol_type = other DNA
ccgtctcaaagaaaacccca

SEQ ID NO: 5333 - DNA, 20 bp, synthetic construct
  misc_feature 1..20: note = Description of Artificial Sequence: Synthetic oligonucleotide
  misc_feature 1..20: note = Target: FXN; (-) strand; PAM type: NAAAAC; PAM sequence: GAAAAC
  source 1..20: mol_type = other DNA
gagcaaaactccgtctcaaa

SEQ ID NO: 5334 - DNA, 20 bp, synthetic construct
  misc_feature 1..20: note = Description of Artificial Sequence: Synthetic oligonucleotide
  misc_feature 1..20: note = Target: FXN; (-) strand; PAM type: NAAAAC; PAM sequence: CAAAAC
  source 1..20: mol_type = other DNA
tccagcctgggcaacaagag

SEQ ID NO: 5335 - DNA, 20 bp, synthetic construct
  misc_feature 1..20: note = Description of Artificial Sequence: Synthetic oligonucleotide
  misc_feature 1..20: note = Target: FXN; (-) strand; PAM type: NAAAAC; PAM sequence: CAAAAC
  source 1..20: mol_type = other DNA
aactagccaggccaatatgg

SEQ ID NO: 5336 - DNA, 20 bp, synthetic construct
  misc_feature 1..20: note = Description of Artificial Sequence: Synthetic oligonucleotide
  misc_feature 1..20: note = Target: FXN; (-) strand; PAM type: NAAAAC; PAM sequence: CAAAAC
  source 1..20: mol_type = other DNA
tgcagaggaagcacaaaacc

SEQ ID NO: 5337 - DNA, 20 bp, synthetic construct
  misc_feature 1..20: note = Description of Artificial Sequence: Synthetic oligonucleotide
  misc_feature 1..20: note = Target: FXN; (-) strand; PAM type: NAAAAC; PAM sequence: CAAAAC
  source 1..20: mol_type = other DNA
agagagctgcagaggaagca

SEQ ID NO: 5338 - DNA, 20 bp, synthetic construct
  misc_feature 1..20: note = Description of Artificial Sequence: Synthetic oligonucleotide
  misc_feature 1..20: note = Target: FXN; (-) strand; PAM type: NAAAAC; PAM sequence: AAAAAC
  source 1..20: mol_type = other DNA
gcttgtctgcaaggtcttca

SEQ ID NO: 5339 - DNA, 20 bp, synthetic construct
  misc_feature 1..20: note = Description of Artificial Sequence: Synthetic oligonucleotide
  misc_feature 1..20: note = Target: FXN; (-) strand; PAM type: NAAAAC; PAM sequence: AAAAAC
  source 1..20: mol_type = other DNA
agagtgagactccttcaaaa

SEQ ID NO: 5340 - DNA, 20 bp, synthetic construct
  misc_feature 1..20: note = Description of Artificial Sequence: Synthetic oligonucleotide
  misc_feature 1..20: note = Target: FXN; (-) strand; PAM type: NAAAAC; PAM sequence: CAAAAC
  source 1..20: mol_type = other DNA
gtggctcacgcctgttatcc

SEQ ID NO: 5341 - DNA, 20 bp, synthetic construct
  misc_feature 1..20: note = Description of Artificial Sequence: Synthetic oligonucleotide
  misc_feature 1..20: note = Target: FXN; (-) strand; PAM type: NAAAAC; PAM sequence: GAAAAC
  source 1..20: mol_type = other DNA
caaacaaaccaaccaaccca

SEQ ID NO: 5342 - DNA, 20 bp, synthetic construct
  misc_feature 1..20: note = Description of Artificial Sequence: Synthetic oligonucleotide
  misc_feature 1..20: note = Target: FXN; (-) strand; PAM type: NAAAAC; PAM sequence: AAAAAC
  source 1..20: mol_type = other DNA
cagagggagactctgtctca

SEQ ID NO: 5343 - DNA, 20 bp, synthetic construct
  misc_feature 1..20: note = Description of Artificial Sequence: Synthetic oligonucleotide
  misc_feature 1..20: note = Target: FXN; (-) strand; PAM type: NAAAAC; PAM sequence: CAAAAC
  source 1..20: mol_type = other DNA
attacttgagttcaggagtt

SEQ ID NO: 5344 - DNA, 20 bp, synthetic construct
  misc_feature 1..20: note = Description of Artificial Sequence: Synthetic oligonucleotide
  misc_feature 1..20: note = Target: FXN; (-) strand; PAM type: NAAAAC; PAM sequence: AAAAAC
  source 1..20: mol_type = other DNA
tggggcttcactaatcctat

SEQ ID NO: 5345 - DNA, 20 bp, synthetic construct
  misc_feature 1..20: note = Description of Artificial Sequence: Synthetic oligonucleotide
  misc_feature 1..20: note = Target: FXN; (-) strand; PAM type: NAAAAC; PAM sequence: CAAAAC
  source 1..20: mol_type = other DNA
attggcacatttgcttctaa

SEQ ID NO: 5346 - DNA, 20 bp, synthetic construct
  misc_feature 1..20: note = Description of Artificial Sequence: Synthetic oligonucleotide
  misc_feature 1..20: note = Target: FXN; (-) strand; PAM type: NAAAAC; PAM sequence: CAAAAC
  source 1..20: mol_type = other DNA
ccccatttctactaaaaata

SEQ ID NO: 5347 - DNA, 20 bp, synthetic construct
  misc_feature 1..20: note = Description of Artificial Sequence: Synthetic oligonucleotide
  misc_feature 1..20: note = Target: FXN; (-) strand; PAM type: NAAAAC; PAM sequence: CAAAAC
  source 1..20: mol_type = other DNA
agactagcctgacaacatgg

SEQ ID NO: 5348 - DNA, 20 bp, synthetic construct
  misc_feature 1..20: note = Description of Artificial Sequence: Synthetic oligonucleotide
  misc_feature 1..20: note = Target: FXN; (-) strand; PAM type: NAAAAC; PAM sequence: AAAAAC
  source 1..20: mol_type = other DNA
gattcaatgatgtgagaaat

SEQ ID NO: 5349 - DNA, 20 bp, synthetic construct
  misc_feature 1..20: note = Description of Artificial Sequence: Synthetic oligonucleotide
  misc_feature 1..20: note = Target: FXN; (-) strand; PAM type: NAAAAC; PAM sequence: TAAAAC
  source 1..20: mol_type = other DNA
atgaatcattctttgctgaa

SEQ ID NO: 5350 - DNA, 20 bp, synthetic construct
  misc_feature 1..20: note = Description of Artificial Sequence: Synthetic oligonucleotide
  misc_feature 1..20: note = Target: FXN; (-) strand; PAM type: NAAAAC; PAM sequence: TAAAAC
  source 1..20: mol_type = other DNA
tatgttaacttaagtgtagc

SEQ ID NO: 5351 - DNA, 20 bp, synthetic construct
  misc_feature 1..20: note = Description of Artificial Sequence: Synthetic oligonucleotide
  misc_feature 1..20: note = Target: FXN; (-) strand; PAM type: NAAAAC; PAM sequence: GAAAAC
  source 1..20: mol_type = other DNA
gggcaaggttacacagggca

SEQ ID NO: 5352 - DNA, 20 bp, synthetic construct
  misc_feature 1..20: note = Description of Artificial Sequence: Synthetic oligonucleotide
  misc_feature 1..20: note = Target: FXN; (-) strand; PAM type: NAAAAC; PAM sequence: TAAAAC
  source 1..20: mol_type = other DNA
acaaataaataaaagtttct

SEQ ID NO: 5353 - DNA, 20 bp, synthetic construct
  misc_feature 1..20: note = Description of Artificial Sequence: Synthetic oligonucleotide
  misc_feature 1..20: note = Target: FXN; (-) strand; PAM type: NAAAAC; PAM sequence: AAAAAC
  source 1..20: mol_type = other DNA
tgacacagagaacttctctc

SEQ ID NO: 5354 - DNA, 20 bp, synthetic construct
  misc_feature 1..20: note = Description of Artificial Sequence: Synthetic oligonucleotide
  misc_feature 1..20: note = Target: FXN; (-) strand; PAM type: NAAAAC; PAM sequence: TAAAAC
  source 1..20: mol_type = other DNA
gaccagactgggcaacatgg

SEQ ID NO: 5355 - DNA, 20 bp, synthetic construct
  misc_feature 1..20: note = Description of Artificial Sequence: Synthetic oligonucleotide
  misc_feature 1..20: note = Target: FXN; (-) strand; PAM type: NAAAAC; PAM sequence: TAAAAC
  source 1..20: mol_type = other DNA
tcatttatttaaaagtttct

SEQ ID NO: 5356 - DNA, 20 bp, synthetic construct
  misc_feature 1..20: note = Description of Artificial Sequence: Synthetic oligonucleotide
  misc_feature 1..20: note = Target: FXN; (-) strand; PAM type: NAAAAC; PAM sequence: AAAAAC
  source 1..20: mol_type = other DNA
caatacgtaagtttgtttaa

SEQ ID NO: 5357 - DNA, 20 bp, synthetic construct
  misc_feature 1..20: note = Description of Artificial Sequence: Synthetic oligonucleotide
  misc_feature 1..20: note = Target: FXN; (-) strand; PAM type: NAAAAC; PAM sequence: GAAAAC
  source 1..20: mol_type = other DNA
attccagtttcacagatgag

SEQ ID NO: 5358 - DNA, 20 bp, synthetic construct
  misc_feature 1..20: note = Description of Artificial Sequence: Synthetic oligonucleotide
  misc_feature 1..20: note = Target: FXN; (-) strand; PAM type: NAAAAC; PAM sequence: AAAAAC
  source 1..20: mol_type = other DNA
ataacatctttttctgattc

SEQ ID NO: 5359 - DNA, 20 bp, synthetic construct
  misc_feature 1..20: note = Description of Artificial Sequence: Synthetic oligonucleotide
  misc_feature 1..20: note = Target: FXN; (-) strand; PAM type: NAAAAC; PAM sequence: AAAAAC
  source 1..20: mol_type = other DNA
aaaacaaaacaaaaaaccca

SEQ ID NO: 5360 - DNA, 20 bp, synthetic construct
  misc_feature 1..20: note = Description of Artificial Sequence: Synthetic oligonucleotide
  misc_feature 1..20: note = Target: FXN; (-) strand; PAM type: NAAAAC; PAM sequence: AAAAAC
  source 1..20: mol_type = other DNA
aagcaaagcaaaacaaaaca

SEQ ID NO: 5361 - DNA, 20 bp, synthetic construct
  misc_feature 1..20: note = Description of Artificial Sequence: Synthetic oligonucleotide
  misc_feature 1..20: note = Target: FXN; (-) strand; PAM type: NAAAAC; PAM sequence: CAAAAC
  source 1..20: mol_type = other DNA
gtctcaaaagcaaagcaaaa

SEQ ID NO: 5362 - DNA, 20 bp, synthetic construct
  misc_feature 1..20: note = Description of Artificial Sequence: Synthetic oligonucleotide
  misc_feature 1..20: note = Target: FXN; (-) strand; PAM type: NAAAAC; PAM sequence: CAAAAC
  source 1..20: mol_type = other DNA
atcctgtctcaaaagcaaag

SEQ ID NO: 5363 - DNA, 20 bp, synthetic construct
  misc_feature 1..20: note = Description of Artificial Sequence: Synthetic oligonucleotide
  misc_feature 1..20: note = Target: FXN; (-) strand; PAM type: NAAAAC; PAM sequence: CAAAAC
  source 1..20: mol_type = other DNA
gaccggcctaggcaatatgg

SEQ ID NO: 5364 - DNA, 20 bp, synthetic construct
  misc_feature 1..20: note = Description of Artificial Sequence: Synthetic oligonucleotide
  misc_feature 1..20: note = Target: FXN; (-) strand; PAM type: NAAAAC; PAM sequence: GAAAAC
  source 1..20: mol_type = other DNA
ataaatgctcatttaaattt

SEQ ID NO: 5365 - DNA, 20 bp, synthetic construct
  misc_feature 1..20: note = Description of Artificial Sequence: Synthetic oligonucleotide
  misc_feature 1..20: note = Target: FXN; (-) strand; PAM type: NAAAAC; PAM sequence: TAAAAC
  source 1..20: mol_type = other DNA
gaaaaaaagcataaagaaat

SEQ ID NO: 5366 - DNA, 20 bp, synthetic construct
  misc_feature 1..20: note = Description of Artificial Sequence: Synthetic oligonucleotide
  misc_feature 1..20: note = Target: FXN; (-) strand; PAM type: NAAAAC; PAM sequence: GAAAAC
  source 1..20: mol_type = other DNA
agggcaataatttaatagag

SEQ ID NO: 5367 - DNA, 20 bp, synthetic construct
  misc_feature 1..20: note = Description of Artificial Sequence: Synthetic oligonucleotide
  misc_feature 1..20: note = Target: FXN; (-) strand; PAM type: NAAAAC; PAM sequence: CAAAAC
  source 1..20: mol_type = other DNA
aaccctttacctgagaggct

SEQ ID NO: 5368 - DNA, 20 bp, synthetic construct
  misc_feature 1..20: note = Description of Artificial Sequence: Synthetic oligonucleotide
  misc_feature 1..20: note = Target: FXN; (-) strand; PAM type: NAAAAC; PAM sequence: AAAAAC
  source 1..20: mol_type = other DNA
ccagcacactaactgggtct

SEQ ID NO: 5369 - DNA, 20 bp, synthetic construct
  misc_feature 1..20: note = Description of Artificial Sequence: Synthetic oligonucleotide
  misc_feature 1..20: note = Target: FXN; (-) strand; PAM type: NAAAAC; PAM sequence: AAAAAC
  source 1..20: mol_type = other DNA
atgccatttgccacaggtat

SEQ ID NO: 5370 - DNA, 20 bp, synthetic construct
  misc_feature 1..20: note = Description of Artificial Sequence: Synthetic oligonucleotide
  misc_feature 1..20: note = Target: FXN; (-) strand; PAM type: NAAAAC; PAM sequence: AAAAAC
  source 1..20: mol_type = other DNA
tggggtgttccgtctcaaac

SEQ ID NO: 5371 - DNA, 20 bp, synthetic construct
  misc_feature 1..20: note = Description of Artificial Sequence: Synthetic oligonucleotide
  misc_feature 1..20: note = Target: FXN; (-) strand; PAM type: NAAAAC; PAM sequence: GAAAAC
  source 1..20: mol_type = other DNA
attcaggacccaggtacagg

SEQ ID NO: 5372 - DNA, 20 bp, synthetic construct
  misc_feature 1..20: note = Description of Artificial Sequence: Synthetic oligonucleotide
  misc_feature 1..20: note = Target: FXN; (-) strand; PAM type: NAAAAC; PAM sequence: AAAAAC
  source 1..20: mol_type = other DNA
tgtgaaaggctgagagaaaa

SEQ ID NO: 5373 - DNA, 20 bp, synthetic construct
  misc_feature 1..20: note = Description of Artificial Sequence: Synthetic oligonucleotide
  misc_feature 1..20: note = Target: FXN; (-) strand; PAM type: NAAAAC; PAM sequence: CAAAAC
  source 1..20: mol_type = other DNA
taaaattaagaaaaaaaaaa

SEQ ID NO: 5374 - DNA, 20 bp, synthetic construct
  misc_feature 1..20: note = Description of Artificial Sequence: Synthetic oligonucleotide
  misc_feature 1..20: note = Target: FXN; (-) strand; PAM type: NAAAAC; PAM sequence: AAAAAC
  source 1..20: mol_type = other DNA
ataaataaaattaagaaaaa

SEQ ID NO: 5375 - DNA, 20 bp, synthetic construct
  misc_feature 1..20: note = Description of Artificial Sequence: Synthetic oligonucleotide
  misc_feature 1..20: note = Target: FXN; (-) strand; PAM type: NAAAAC; PAM sequence: AAAAAC
  source 1..20: mol_type = other DNA
aaaaaaaacaaacaaacaaa

SEQ ID NO: 5376 - DNA, 20 bp, synthetic construct
  misc_feature 1..20: note = Description of Artificial Sequence: Synthetic oligonucleotide
  misc_feature 1..20: note = Target: FXN; (-) strand; PAM type: NAAAAC; PAM sequence: AAAAAC
  source 1..20: mol_type = other DNA
tgaaaacttgtcaaattaaa

SEQ ID NO: 5377 - DNA, 20 bp, synthetic construct
  misc_feature 1..20: note = Description of Artificial Sequence: Synthetic oligonucleotide
  misc_feature 1..20: note = Target: FXN; (-) strand; PAM type: NAAAAC; PAM sequence: GAAAAC
  source 1..20: mol_type = other DNA
ctgctgatttcacaggacct

SEQ ID NO: 5378 - DNA, 20 bp, synthetic construct
  misc_feature 1..20: note = Description of Artificial Sequence: Synthetic oligonucleotide
  misc_feature 1..20: note = Target: FXN; (-) strand; PAM type: NAAAAC; PAM sequence: TAAAAC
  source 1..20: mol_type = other DNA
atcacctaaactattatttt

SEQ ID NO: 5379 - DNA, 20 bp, synthetic construct
  misc_feature 1..20: note = Description of Artificial Sequence: Synthetic oligonucleotide
  misc_feature 1..20: note = Target: FXN; (-) strand; PAM type: NAAAAC; PAM sequence: CAAAAC
  source 1..20: mol_type = other DNA
ccactacctctgcctagctt

SEQ ID NO: 5380 - DNA, 20 bp, synthetic construct
  misc_feature 1..20: note = Description of Artificial Sequence: Synthetic oligonucleotide
  misc_feature 1..20: note = Target: FXN; (-) strand; PAM type: NAAAAC; PAM sequence: AAAAAC
  source 1..20: mol_type = other DNA
gaatgattctcaaaacctga

SEQ ID NO: 5381 - DNA, 20 bp, synthetic construct
  misc_feature 1..20: note = Description of Artificial Sequence: Synthetic oligonucleotide
  misc_feature 1..20: note = Target: FXN; (-) strand; PAM type: NAAAAC; PAM sequence: CAAAAC
  source 1..20: mol_type = other DNA
acaattccaagaatgattct

SEQ ID NO: 5382 - DNA, 20 bp, synthetic construct
  misc_feature 1..20: note = Description of Artificial Sequence: Synthetic oligonucleotide
  misc_feature 1..20: note = Target: FXN; (-) strand; PAM type: NAAAAC; PAM sequence: CAAAAC
  source 1..20: mol_type = other DNA
cgcttaggtccactggaaga

SEQ ID NO: 5383 - DNA, 20 bp, synthetic construct
  misc_feature 1..20: note = Description of Artificial Sequence: Synthetic oligonucleotide
  misc_feature 1..20: note = Target: FXN; (-) strand; PAM type: NAAAAC; PAM sequence: TAAAAC
  source 1..20: mol_type = other DNA
ctgatagcttttaatgtcct

SEQ ID NO: 5384 - DNA, 20 bp, synthetic construct
  misc_feature 1..20: note = Description of Artificial Sequence: Synthetic oligonucleotide
  misc_feature 1..20: note = Target: FXN; (-) strand; PAM type: NAAAAC; PAM sequence: AAAAAC
  source 1..20: mol_type = other DNA
aataaacaacaacaacaaca

SEQ ID NO: 5385 - DNA, 20 bp, synthetic construct
  misc_feature 1..20: note = Description of Artificial Sequence: Synthetic oligonucleotide
  misc_feature 1..20: note = Target: FXN; (-) strand; PAM type: NAAAAC; PAM sequence: GAAAAC
  source 1..20: mol_type = other DNA
ttacactttgaaagaagcct

SEQ ID NO: 5386 - DNA, 20 bp, synthetic construct
  misc_feature 1..20: note = Description of Artificial Sequence: Synthetic oligonucleotide
  misc_feature 1..20: note = Target: FXN; (-) strand; PAM type: NAAAAC; PAM sequence: GAAAAC
  source 1..20: mol_type = other DNA
cgctacatcactcagctcat

SEQ ID NO: 5387 - DNA, 20 bp, synthetic construct
  misc_feature 1..20: note = Description of Artificial Sequence: Synthetic oligonucleotide
  misc_feature 1..20: note = Target: FXN; (-) strand; PAM type: NAAAAC; PAM sequence: AAAAAC
  source 1..20: mol_type = other DNA
caatgtttcctatatagctt

SEQ ID NO: 5388 - DNA, 20 bp, synthetic construct
  misc_feature 1..20: note = Description of Artificial Sequence: Synthetic oligonucleotide
  misc_feature 1..20: note = Target: FXN; (-) strand; PAM type: NAAAAC; PAM sequence: AAAAAC
  source 1..20: mol_type = other DNA
aaattctaaatttgtgattc

SEQ ID NO: 5389 - DNA, 20 bp, synthetic construct
  misc_feature 1..20: note = Description of Artificial Sequence: Synthetic oligonucleotide
  misc_feature 1..20: note = Target: FXN; (-) strand; PAM type: NAAAAC; PAM sequence: AAAAAC
  source 1..20: mol_type = other DNA
ttttatagattaaaaaaaaa

SEQ ID NO: 5390 - DNA, 20 bp, synthetic construct
  misc_feature 1..20: note = Description of Artificial Sequence: Synthetic oligonucleotide
  misc_feature 1..20: note = Target: FXN; (-) strand; PAM type: NAAAAC; PAM sequence: CAAAAC
  source 1..20: mol_type = other DNA
cataaatttacatgaaattt

SEQ ID NO: 5391 - DNA, 20 bp, synthetic construct
  misc_feature 1..20: note = Description of Artificial Sequence: Synthetic oligonucleotide
  misc_feature 1..20: note = Target: FXN; (+) strand; PAM type: NAAAAC; PAM sequence: TAAAAC
  source 1..20: mol_type = other DNA
attaatgcaaattccttagt

SEQ ID NO: 5392 - DNA, 20 bp, synthetic construct
  misc_feature 1..20: note = Description of Artificial Sequence: Synthetic oligonucleotide
  misc_feature 1..20: note = Target: FXN; (+) strand; PAM type: NAAAAC; PAM sequence: GAAAAC
  source 1..20: mol_type = other DNA
cagagatattagataaacag

SEQ ID NO: 5393 - DNA, 20 bp, synthetic construct
  misc_feature 1..20: note = Description of Artificial Sequence: Synthetic oligonucleotide
  misc_feature 1..20: note = Target: FXN; (+) strand; PAM type: NAAAAC; PAM sequence: TAAAAC
  source 1..20: mol_type = other DNA
tggctgtgtaataaattacc

SEQ ID NO: 5394 - DNA, 20 bp, synthetic construct
  misc_feature 1..20: note = Description of Artificial Sequence: Synthetic oligonucleotide
  misc_feature 1..20: note = Target: FXN; (+) strand; PAM type: NAAAAC; PAM sequence: GAAAAC
  source 1..20: mol_type = other DNA
acatactggattaaagctat

SEQ ID NO: 5395 - DNA, 20 bp, synthetic construct
  misc_feature 1..20: note = Description of Artificial Sequence: Synthetic oligonucleotide
  misc_feature 1..20: note = Target: FXN; (+) strand; PAM type: NAAAAC; PAM sequence: CAAAAC
  source 1..20: mol_type = other DNA
ttggctagtttggatttcct

SEQ ID NO: 5396 - DNA, 20 bp, synthetic construct
  misc_feature 1..20: note = Description of Artificial Sequence: Synthetic oligonucleotide
  misc_feature 1..20: note = Target: FXN; (+) strand; PAM type: NAAAAC; PAM sequence: AAAAAC
  source 1..20: mol_type = other DNA
agactctgtttcaaacaaac

SEQ ID NO: 5397 - DNA, 20 bp, synthetic construct
  misc_feature 1..20: note = Description of Artificial Sequence: Synthetic oligonucleotide
  misc_feature 1..20: note = Target: FXN; (+) strand; PAM type: NAAAAC; PAM sequence: GAAAAC
  source 1..20: mol_type = other DNA
ctgagaccatggctggcaat

SEQ ID NO: 5398 - DNA, 20 bp, synthetic construct
  misc_feature 1..20: note = Description of Artificial Sequence: Synthetic oligonucleotide
  misc_feature 1..20: note = Target: FXN; (+) strand; PAM type: NAAAAC; PAM sequence: GAAAAC
  source 1..20: mol_type = other DNA
aagcatatataaaatgtgaa

SEQ ID NO: 5399 - DNA, 20 bp, synthetic construct
  misc_feature 1..20: note = Description of Artificial Sequence: Synthetic oligonucleotide
  misc_feature 1..20: note = Target: FXN; (+) strand; PAM type: NAAAAC; PAM sequence: AAAAAC
  source 1..20: mol_type = other DNA
cccctttctacaaaaaatac

SEQ ID NO: 5400 - DNA, 20 bp, synthetic construct
  misc_feature 1..20: note = Description of Artificial Sequence: Synthetic oligonucleotide
  misc_feature 1..20: note = Target: FXN; (+) strand; PAM type: NAAAAC; PAM sequence: AAAAAC
  source 1..20: mol_type = other DNA
aggaacatgccctgtccaaa

SEQ ID NO: 5401 - DNA, 20 bp, synthetic construct
  misc_feature 1..20: note = Description of Artificial Sequence: Synthetic oligonucleotide
  misc_feature 1..20: note = Target: FXN; (+) strand; PAM type: NAAAAC; PAM sequence: TAAAAC
  source 1..20: mol_type = other DNA
ctatgaagtaggaactttta

SEQ ID NO: 5402 - DNA, 20 bp, synthetic construct
  misc_feature 1..20: note = Description of Artificial Sequence: Synthetic oligonucleotide
  misc_feature 1..20: note = Target: FXN; (+) strand; PAM type: NAAAAC; PAM sequence: AAAAAC
  source 1..20: mol_type = other DNA
ggtgaaaccccatctctact

SEQ ID NO: 5403 - DNA, 20 bp, synthetic construct
  misc_feature 1..20: note = Description of Artificial Sequence: Synthetic oligonucleotide
  misc_feature 1..20: note = Target: FXN; (+) strand; PAM type: NAAAAC; PAM sequence: TAAAAC
  source 1..20: mol_type = other DNA
tcaccccaccattcatatgt

SEQ ID NO: 5404 - DNA, 20 bp, synthetic construct
  misc_feature 1..20: note = Description of Artificial Sequence: Synthetic oligonucleotide
  misc_feature 1..20: note = Target: FXN; (+) strand; PAM type: NAAAAC; PAM sequence: AAAAAC
  source 1..20: mol_type = other DNA
tgctgaaacctgtctctcct

SEQ ID NO: 5405 - DNA, 20 bp, synthetic construct
  misc_feature 1..20: note = Description of Artificial Sequence: Synthetic oligonucleotide
  misc_feature 1..20: note = Target: FXN; (+) strand; PAM type: NAAAAC; PAM sequence: AAAAAC
  source 1..20: mol_type = other DNA
aacggttcttttttatgatt

SEQ ID NO: 5406 - DNA, 20 bp, synthetic construct
  misc_feature 1..20: note = Description of Artificial Sequence: Synthetic oligonucleotide
  misc_feature 1..20: note = Target: FXN; (+) strand; PAM type: NAAAAC; PAM sequence: AAAAAC
  source 1..20: mol_type = other DNA
aaacacacacacacacaaac

SEQ ID NO: 5407 - DNA, 20 bp, synthetic construct
  misc_feature 1..20: note = Description of Artificial Sequence: Synthetic oligonucleotide
  misc_feature 1..20: note = Target: FXN; (+) strand; PAM type: NAAAAC; PAM sequence: GAAAAC
  source 1..20: mol_type = other DNA
agcactgctttaattcctgg

SEQ ID NO: 5408 - DNA, 20 bp, synthetic construct
  misc_feature 1..20: note = Description of Artificial Sequence: Synthetic oligonucleotide
  misc_feature 1..20: note = Target: FXN; (+) strand; PAM type: NAAAAC; PAM sequence: TAAAAC
  source 1..20: mol_type = other DNA
tgcgtcagtttcctcatctg

SEQ ID NO: 5409 - DNA, 20 bp, synthetic construct
  misc_feature 1..20: note = Description of Artificial Sequence: Synthetic oligonucleotide
  misc_feature 1..20: note = Target: FXN; (+) strand; PAM type: NAAAAC; PAM sequence: GAAAAC
  source 1..20: mol_type = other DNA
gcttgttggctagcctattg

SEQ ID NO: 5410 - DNA, 20 bp, synthetic construct
  misc_feature 1..20: note = Description of Artificial Sequence: Synthetic oligonucleotide
  misc_feature 1..20: note = Target: FXN; (+) strand; PAM type: NAAAAC; PAM sequence: AAAAAC
  source 1..20: mol_type = other DNA
acagagcgagacttcatctc

SEQ ID NO: 5411 - DNA, 20 bp, synthetic construct
  misc_feature 1..20: note = Description of Artificial Sequence: Synthetic oligonucleotide
  misc_feature 1..20: note = Target: FXN; (+) strand; PAM type: NAAAAC; PAM sequence: AAAAAC
  source 1..20: mol_type = other DNA
gagacttcatctcaaaaaca

SEQ ID NO: 5412 - DNA, 20 bp, synthetic construct
  misc_feature 1..20: note = Description of Artificial Sequence: Synthetic oligonucleotide
  misc_feature 1..20: note = Target: FXN; (+) strand; PAM type: NAAAAC; PAM sequence: AAAAAC
  source 1..20: mol_type = other DNA
tcatctcaaaaacaaaaaac

SEQ ID NO: 5413 - DNA, 20 bp, synthetic construct
  misc_feature 1..20: note = Description of Artificial Sequence: Synthetic oligonucleotide
  misc_feature 1..20: note = Target: FXN; (+) strand; PAM type: NAAAAC; PAM sequence: AAAAAC
  source 1..20: mol_type = other DNA
aaaaaacaaaaaccaaaaaa

SEQ ID NO: 5414 - DNA, 20 bp, synthetic construct
  misc_feature 1..20: note = Description of Artificial Sequence: Synthetic oligonucleotide
  misc_feature 1..20: note = Target: FXN; (+) strand; PAM type: NAAAAC; PAM sequence: TAAAAC
  source 1..20: mol_type = other DNA
ttgggccacccagggtaaga

SEQ ID NO: 5415 - DNA, 20 bp, synthetic construct
  misc_feature 1..20: note = Description of Artificial Sequence: Synthetic oligonucleotide
  misc_feature 1..20: note = Target: FXN; (+) strand; PAM type: NAAAAC; PAM sequence: CAAAAC
  source 1..20: mol_type = other DNA
cattctctccagctcagtct

SEQ ID NO: 5416 - DNA, 20 bp, synthetic construct
  misc_feature 1..20: note = Description of Artificial Sequence: Synthetic oligonucleotide
  misc_feature 1..20: note = Target: FXN; (+) strand; PAM type: NAAAAC; PAM sequence: CAAAAC
  source 1..20: mol_type = other DNA
ctttctctccagctcactct

SEQ ID NO: 5417 - DNA, 20 bp, synthetic construct
  misc_feature 1..20: note = Description of Artificial Sequence: Synthetic oligonucleotide
  misc_feature 1..20: note = Target: FXN; (+) strand; PAM type: NAAAAC; PAM sequence: TAAAAC
  source 1..20: mol_type = other DNA
ttgttataatttacatgcca

SEQ ID NO: 5418 - DNA, 20 bp, synthetic construct
  misc_feature 1..20: note = Description of Artificial Sequence: Synthetic oligonucleotide
  misc_feature 1..20: note = Target: FXN; (+) strand; PAM type: NAAAAC; PAM sequence: TAAAAC
  source 1..20: mol_type = other DNA
tcccccattccgcctttccc

SEQ ID NO: 5419 - DNA, 20 bp, synthetic construct
  misc_feature 1..20: note = Description of Artificial Sequence: Synthetic oligonucleotide
  misc_feature 1..20: note = Target: FXN; (+) strand; PAM type: NAAAAC; PAM sequence: AAAAAC
  source 1..20: mol_type = other DNA
aaaaaaaaaaaaaaagaaag

SEQ ID NO: 5420 - DNA, 20 bp, synthetic construct
  misc_feature 1..20: note = Description of Artificial Sequence: Synthetic oligonucleotide
  misc_feature 1..20: note = Target: FXN; (+) strand; PAM type: NAAAAC; PAM sequence: AAAAAC
  source 1..20: mol_type = other DNA
aaggacagtgagggaattga

SEQ ID NO: 5421 - DNA, 20 bp, synthetic construct
  misc_feature 1..20: note = Description of Artificial Sequence: Synthetic oligonucleotide
  misc_feature 1..20: note = Target: FXN; (+) strand; PAM type: NAAAAC; PAM sequence: AAAAAC
  source 1..20: mol_type = other DNA
gacattgattagcaagctac

SEQ ID NO: 5422 - DNA, 20 bp, synthetic construct
  misc_feature 1..20: note = Description of Artificial Sequence: Synthetic oligonucleotide
  misc_feature 1..20: note = Target: FXN; (+) strand; PAM type: NAAAAC; PAM sequence: AAAAAC
  source 1..20: mol_type = other DNA
agagcctctggccataactg

SEQ ID NO: 5423 - DNA, 20 bp, synthetic construct
  misc_feature 1..20: note = Description of Artificial Sequence: Synthetic oligonucleotide
  misc_feature 1..20: note = Target: FXN; (+) strand; PAM type: NAAAAC; PAM sequence: AAAAAC
  source 1..20: mol_type = other DNA
tatttagcccttaggggaaa

SEQ ID NO: 5424 - DNA, 20 bp, synthetic construct
  misc_feature 1..20: note = Description of Artificial Sequence: Synthetic oligonucleotide
  misc_feature 1..20: note = Target: FXN; (+) strand; PAM type: NAAAAC; PAM sequence: CAAAAC
  source 1..20: mol_type = other DNA
aactcctttcccatcatggc

SEQ ID NO: 5425 - DNA, 20 bp, synthetic construct
  misc_feature 1..20: note = Description of Artificial Sequence: Synthetic oligonucleotide
  misc_feature 1..20: note = Target: FXN; (+) strand; PAM type: NAAAAC; PAM sequence: CAAAAC
  source 1..20: mol_type = other DNA
aatcaatttgaaccaggcga

SEQ ID NO: 5426 - DNA, 20 bp, synthetic construct
  misc_feature 1..20: note = Description of Artificial Sequence: Synthetic oligonucleotide
  misc_feature 1..20: note = Target: FXN; (+) strand; PAM type: NAAAAC; PAM sequence: CAAAAC
  source 1..20: mol_type = other DNA
atatgtaaatgagacttttc

SEQ ID NO: 5427 - DNA, 20 bp, synthetic construct
  misc_feature 1..20: note = Description of Artificial Sequence: Synthetic oligonucleotide
  misc_feature 1..20: note = Target: FXN; (+) strand; PAM type: NAAAAC; PAM sequence: AAAAAC
  source 1..20: mol_type = other DNA
gctctggtccctctcccaat

SEQ ID NO: 5428 - DNA, 20 bp, synthetic construct
  misc_feature 1..20: note = Description of Artificial Sequence: Synthetic oligonucleotide
  misc_feature 1..20: note = Target: FXN; (+) strand; PAM type: NAAAAC; PAM sequence: AAAAAC
  source 1..20: mol_type = other DNA
actcacctgttaaaaaaaaa

SEQ ID NO: 5429 - DNA, 20 bp, synthetic construct
  misc_feature 1..20: note = Description of Artificial Sequence: Synthetic oligonucleotide
  misc_feature 1..20: note = Target: FXN; (+) strand; PAM type: NAAAAC; PAM sequence: AAAAAC
  source 1..20: mol_type = other DNA
cctgtctctactaaaaatgc

SEQ ID NO: 5430 - DNA, 20 bp, synthetic construct
  misc_feature 1..20: note = Description of Artificial Sequence: Synthetic oligonucleotide
  misc_feature 1..20: note = Target: FXN; (+) strand; PAM type: NAAAAC; PAM sequence: CAAAAC
  source 1..20: mol_type = other DNA
gttggccgcctttgattagc

SEQ ID NO: 5431 - DNA, 20 bp, synthetic construct
  misc_feature 1..20: note = Description of Artificial Sequence: Synthetic oligonucleotide
  misc_feature 1..20: note = Target: FXN; (+) strand; PAM type: NAAAAC; PAM sequence: AAAAAC
  source 1..20: mol_type = other DNA
agaccacttaatcccaagtt

SEQ ID NO: 5432 - DNA, 20 bp, synthetic construct
  misc_feature 1..20: note = Description of Artificial Sequence: Synthetic oligonucleotide
  misc_feature 1..20: note = Target: FXN; (+) strand; PAM type: NAAAAC; PAM sequence: TAAAAC
  source 1..20: mol_type = other DNA
tctcatggaaaaataattta

SEQ ID NO: 5433 - DNA, 20 bp, synthetic construct
  misc_feature 1..20: note = Description of Artificial Sequence: Synthetic oligonucleotide
  misc_feature 1..20: note = Target: FXN; (+) strand; PAM type: NAAAAC; PAM sequence: AAAAAC
  source 1..20: mol_type = other DNA
tgcacactttgtgaaatact

SEQ ID NO: 5434 - DNA, 20 bp, synthetic construct
  misc_feature 1..20: note = Description of Artificial Sequence: Synthetic oligonucleotide
  misc_feature 1..20: note = Target: FXN; (+) strand; PAM type: NAAAAC; PAM sequence: AAAAAC
  source 1..20: mol_type = other DNA
gtgaatttgtaattttttgt

SEQ ID NO: 5435 - DNA, 20 bp, synthetic construct
  misc_feature 1..20: note = Description of Artificial Sequence: Synthetic oligonucleotide
  misc_feature 1..20: note = Target: FXN; (+) strand; PAM type: NAAAAC; PAM sequence: CAAAAC
  source 1..20: mol_type = other DNA
taaatgaaatatagtcatac

SEQ ID NO: 5436 - DNA, 20 bp, synthetic construct
  misc_feature 1..20: note = Description of Artificial Sequence: Synthetic oligonucleotide
  misc_feature 1..20: note = Target: FXN; (+) strand; PAM type: NAAAAC; PAM sequence: AAAAAC
  source 1..20: mol_type = other DNA
cccttttaaaaaatgctttc

SEQ ID NO: 5437 - DNA, 20 bp, synthetic construct
  misc_feature 1..20: note = Description of Artificial Sequence: Synthetic oligonucleotide
  misc_feature 1..20: note = Target: FXN; (+) strand; PAM type: NAAAAC; PAM sequence: AAAAAC
  source 1..20: mol_type = other DNA
taatttttattttcaattaa

SEQ ID NO: 5438 - DNA, 20 bp, synthetic construct
  misc_feature 1..20: note = Description of Artificial Sequence: Synthetic oligonucleotide
  misc_feature 1..20: note = Target: FXN; (+) strand; PAM type: NAAAAC; PAM sequence: AAAAAC
  source 1..20: mol_type = other DNA
acagagcaagaccctgttgt

SEQ ID NO: 5439 - DNA, 20 bp, synthetic construct
  misc_feature 1..20: note = Description of Artificial Sequence: Synthetic oligonucleotide
  misc_feature 1..20: note = Target: FXN; (+) strand; PAM type: NAAAAC; PAM sequence: AAAAAC
  source 1..20: mol_type = other DNA
tgttgtaaaaacaaacaaac

SEQ ID NO: 5440 - DNA, 20 bp, synthetic construct
  misc_feature 1..20: note = Description of Artificial Sequence: Synthetic oligonucleotide
  misc_feature 1..20: note = Target: FXN; (+) strand; PAM type: NAAAAC; PAM sequence: AAAAAC
  source 1..20: mol_type = other DNA
gtgggaagagtctggaaata

SEQ ID NO: 5441 - DNA, 20 bp, synthetic construct
  misc_feature 1..20: note = Description of Artificial Sequence: Synthetic oligonucleotide
  misc_feature 1..20: note = Target: FXN; (+) strand; PAM type: NAAAAC; PAM sequence: TAAAAC
  source 1..20: mol_type = other DNA
agaaatggaaagtgttgaga

SEQ ID NO: 5442 - DNA, 20 bp, synthetic construct
  misc_feature 1..20: note = Description of Artificial Sequence: Synthetic oligonucleotide
  misc_feature 1..20: note = Target: FXN; (+) strand; PAM type: NAAAAC; PAM sequence: CAAAAC
  source 1..20: mol_type = other DNA
aagtaaaagagaaatgccca

SEQ ID NO: 5443 - DNA, 20 bp, synthetic construct
  misc_feature 1..20: note = Description of Artificial Sequence: Synthetic oligonucleotide
  misc_feature 1..20: note = Target: FXN; (+) strand; PAM type: NAAAAC; PAM sequence: TAAAAC
  source 1..20: mol_type = other DNA
tgaattgggaaagggccaga

SEQ ID NO: 5444 - DNA, 20 bp, synthetic construct
  misc_feature 1..20: note = Description of Artificial Sequence: Synthetic oligonucleotide
  misc_feature 1..20: note = Target: FXN; (+) strand; PAM type: NAAAAC; PAM sequence: AAAAAC
  source 1..20: mol_type = other DNA
gaagtgtgctagagttcaac

SEQ ID NO: 5445 - DNA, 20 bp, synthetic construct
  misc_feature 1..20: note = Description of Artificial Sequence: Synthetic oligonucleotide
  misc_feature 1..20: note = Target: FXN; (+) strand; PAM type: NAAAAC; PAM sequence: GAAAAC
  source 1..20: mol_type = other DNA
tttccccatatctgaagact

SEQ ID NO: 5446 - DNA, 20 bp, synthetic construct
  misc_feature 1..20: note = Description of Artificial Sequence: Synthetic oligonucleotide
  misc_feature 1..20: note = Target: FXN; (+) strand; PAM type: NAAAAC; PAM sequence: CAAAAC
  source 1..20: mol_type = other DNA
ttgtgtcaatatcaaagcct

SEQ ID NO: 5447 - DNA, 20 bp, synthetic construct
  misc_feature 1..20: note = Description of Artificial Sequence: Synthetic oligonucleotide
  misc_feature 1..20: note = Target: FXN; (+) strand; PAM type: NAAAAC; PAM sequence: AAAAAC
  source 1..20: mol_type = other DNA
aaaacaacaacaacaacaac

SEQ ID NO: 5448 - DNA, 20 bp, synthetic construct
  misc_feature 1..20: note = Description of Artificial Sequence: Synthetic oligonucleotide
  misc_feature 1..20: note = Target: FXN; (+) strand; PAM type: NAAAAC; PAM sequence: GAAAAC
  source 1..20: mol_type = other DNA
agtcagaatagagtcaacaa

SEQ ID NO: 5449 - DNA, 20 bp, synthetic construct
  misc_feature 1..20: note = Description of Artificial Sequence: Synthetic oligonucleotide
  misc_feature 1..20: note = Target: FXN; (+) strand; PAM type: NAAAAC; PAM sequence: GAAAAC
  source 1..20: mol_type = other DNA
actggaaatacagagatgaa

SEQ ID NO: 5450 - DNA, 20 bp, synthetic construct
  misc_feature 1..20: note = Description of Artificial Sequence: Synthetic oligonucleotide
  misc_feature 1..20: note = Target: FXN; (+) strand; PAM type: NAAAAC; PAM sequence: AAAAAC
  source 1..20: mol_type = other DNA
cgctctgcctgaactgcacc

SEQ ID NO: 5451 - DNA, 20 bp, synthetic construct
  misc_feature 1..20: note = Description of Artificial Sequence: Synthetic oligonucleotide
  misc_feature 1..20: note = Target: FXN; (+) strand; PAM type: NAAAAC; PAM sequence: GAAAAC
  source 1..20: mol_type = other DNA
agagactaagcaaggtgcat

SEQ ID NO: 5452 - DNA, 20 bp, synthetic construct
  misc_feature 1..20: note = Description of Artificial Sequence: Synthetic oligonucleotide
  misc_feature 1..20: note = Target: FXN; (+) strand; PAM type: NAAAAC; PAM sequence: CAAAAC
  source 1..20: mol_type = other DNA
accactacatgaagatggcc

SEQ ID NO: 5453 - DNA, 20 bp, synthetic construct
  misc_feature 1..20: note = Description of Artificial Sequence: Synthetic oligonucleotide
  misc_feature 1..20: note = Target: FXN; (+) strand; PAM type: NAAAAC; PAM sequence: GAAAAC
  source 1..20: mol_type = other DNA
tcaaaaaaaaaaaaaagaaa

SEQ ID NO: 5454 - DNA, 20 bp, synthetic construct
  misc_feature 1..20: note = Description of Artificial Sequence: Synthetic oligonucleotide
  misc_feature 1..20: note = Target: FXN; (+) strand; PAM type: NAAAAC; PAM sequence: AAAAAC
  source 1..20: mol_type = other DNA
gatcaaaatatttgaaaata

SEQ ID NO: 5455 - DNA, 20 bp, synthetic construct
  misc_feature 1..20: note = Description of Artificial Sequence: Synthetic oligonucleotide
  misc_feature 1..20: note = Target: FXN; (+) strand; PAM type: NAAAAC; PAM sequence: CAAAAC
  source 1..20: mol_type = other DNA
aaatatttgaaaataaaaaa

SEQ ID NO: 5456 - DNA, 20 bp, synthetic construct
  misc_feature 1..20: note = Description of Artificial Sequence: Synthetic oligonucleotide
  misc_feature 1..20: note = Target: FXN; (+) strand; PAM type: NAAAAC; PAM sequence: AAAAAC
  source 1..20: mol_type = other DNA
aaaacaaaaatgatacaaat

SEQ ID NO: 5457 - DNA, 20 bp, synthetic construct
  misc_feature 1..20: note = Description of Artificial Sequence: Synthetic oligonucleotide
  misc_feature 1..20: note = Target: FXN; (+) strand; PAM type: NAAAAC; PAM sequence: TAAAAC
  source 1..20: mol_type = other DNA
acaaaaatggccctaatttt

SEQ ID NO: 5458 - DNA, 20 bp, synthetic construct
  misc_feature 1..20: note = Description of Artificial Sequence: Synthetic oligonucleotide
  misc_feature 1..20: note = Target: FXN; (+) strand; PAM type: NAAAAC; PAM sequence: AAAAAC
  source 1..20: mol_type = other DNA
agcgttatgactggactggg

SEQ ID NO: 5459 - DNA, 20 bp, synthetic construct
  misc_feature 1..20: note = Description of Artificial Sequence: Synthetic oligonucleotide
  misc_feature 1..20: note = Target: FXN; (+) strand; PAM type: NAAAAC; PAM sequence: AAAAAC
  source 1..20: mol_type = other DNA
gcagagctcactaaagcctt

SEQ ID NO: 5460 - DNA, 20 bp, synthetic construct
  misc_feature 1..20: note = Description of Artificial Sequence: Synthetic oligonucleotide
  misc_feature 1..20: note = Target: FXN; (+) strand; PAM type: NAAAAC; PAM sequence: CAAAAC
  source 1..20: mol_type = other DNA
ctgtaacctgggtgactgag

SEQ ID NO: 5461 - DNA, 20 bp, synthetic construct
  misc_feature 1..20: note = Description of Artificial Sequence: Synthetic oligonucleotide
  misc_feature 1..20: note = Target: FXN; (+) strand; PAM type: NAAAAC; PAM sequence: AAAAAC
  source 1..20: mol_type = other DNA
ggcttttccaatgggtgaat

SEQ ID NO: 5462 - DNA, 20 bp, synthetic construct
  misc_feature 1..20: note = Description of Artificial Sequence: Synthetic oligonucleotide
  misc_feature 1..20: note = Target: FXN; (+) strand; PAM type: NAAAAC; PAM sequence: AAAAAC
  source 1..20: mol_type = other DNA
tatctcttaaaaaaagaaaa

SEQ ID NO: 5463 - DNA, 20 bp, synthetic construct
  misc_feature 1..20: note = Description of Artificial Sequence: Synthetic oligonucleotide
  misc_feature 1..20: note = Target: FXN; (+) strand; PAM type: NAAAAC; PAM sequence: TAAAAC
  source 1..20: mol_type = other DNA
aaaaaaaaacctattaataa

SEQ ID NO: 5464 - DNA, 20 bp, synthetic construct
  misc_feature 1..20: note = Description of Artificial Sequence: Synthetic oligonucleotide
  misc_feature 1..20: note = Target: FXN; (+) strand; PAM type: NAAAAC; PAM sequence: GAAAAC
  source 1..20: mol_type = other DNA
aattgcataatacaatctta

SEQ ID NO: 5465 - DNA, 20 bp, synthetic construct
  misc_feature 1..20: note = Description of Artificial Sequence: Synthetic oligonucleotide
  misc_feature 1..20: note = Target: FXN; (+) strand; PAM type: NAAAAC; PAM sequence: TAAAAC
  source 1..20: mol_type = other DNA
ttgatcttttgcataccttc

SEQ ID NO: 5466 - DNA, 20 bp, synthetic construct
  misc_feature 1..20: note = Description of Artificial Sequence: Synthetic oligonucleotide
  misc_feature 1..20: note = Target: FXN; (+) strand; PAM type: NAAAAC; PAM sequence: TAAAAC
  source 1..20: mol_type = other DNA
tatcttctgctagaacaaac

SEQ ID NO: 5467 - DNA, 20 bp, synthetic construct
  misc_feature 1..20: note = Description of Artificial Sequence: Synthetic oligonucleotide
  misc_feature 1..20: note = Target: FXN; (+) strand; PAM type: NAAAAC; PAM sequence: CAAAAC
  source 1..20: mol_type = other DNA
tcatgtaaatttatgctgtt

SEQ ID NO: 5468 - DNA, 20 bp, synthetic construct
  misc_feature 1..20: note = Description of Artificial Sequence: Synthetic oligonucleotide
  misc_feature 1..20: note = Target: FXN; (+) strand; PAM type: NAAAAC; PAM sequence: TAAAAC
  source 1..20: mol_type = other DNA
agtggcccctttggaatgtg

SEQ ID NO: 5469 - DNA, 20 bp, synthetic construct
  misc_feature 1..20: note = Description of Artificial Sequence: Synthetic oligonucleotide
  misc_feature 1..20: note = Target: FXN; (+) strand; PAM type: NAAAAC; PAM sequence: GAAAAC
  source 1..20: mol_type = other DNA
gatttatttagacagttgag

SEQ ID NO: 5470 - DNA, 20 bp, synthetic construct
  misc_feature 1..20: note = Description of Artificial Sequence: Synthetic oligonucleotide
  misc_feature 1..20: note = Target: FXN; (+) strand; PAM type: NAAAAC; PAM sequence: TAAAAC
  source 1..20: mol_type = other DNA
ggccagcctggtcaacatgg

SEQ ID NO: 5471 - DNA, 20 bp, synthetic construct
  misc_feature 1..20: note = Description of Artificial Sequence: Synthetic oligonucleotide
  misc_feature 1..20: note = Target: FXN; (+) strand; PAM type: NAAAAC; PAM sequence: TAAAAC
  source 1..20: mol_type = other DNA
ccaaaagaaaatggcttaaa

SEQ ID NO: 5472 - DNA, 20 bp, synthetic construct
  misc_feature 1..20: note = Description of Artificial Sequence: Synthetic oligonucleotide
  misc_feature 1..20: note = Target: FXN; (+) strand; PAM type: NAAAAC; PAM sequence: AAAAAC
  source 1..20: mol_type = other DNA
aataaaaccctaagagaaag

SEQ ID NO: 5473 - DNA, 20 bp, synthetic construct
  misc_feature 1..20: note = Description of Artificial Sequence: Synthetic oligonucleotide
  misc_feature 1..20: note = Target: FXN; (+) strand; PAM type: NAAAAC; PAM sequence: TAAAAC
  source 1..20: mol_type = other DNA
gaaaggcaatctcttgtctg

SEQ ID NO: 5474 - DNA, 20 bp, synthetic construct
  misc_feature 1..20: note = Description of Artificial Sequence: Synthetic oligonucleotide
  misc_feature 1..20: note = Target: FXN; (+) strand; PAM type: NAAAAC; PAM sequence: AAAAAC
  source 1..20: mol_type = other DNA
gttacctcacacaggcacgg

SEQ ID NO: 5475 - DNA, 20 bp, synthetic construct
  misc_feature 1..20: note = Description of Artificial Sequence: Synthetic oligonucleotide
  misc_feature 1..20: note = Target: FXN; (-) strand; PAM type: NNAGAAW; PAM sequence: CAAGAAT
  source 1..20: mol_type = other DNA
tgtatagtttcactttgaag

SEQ ID NO: 5476 - DNA, 20 bp, synthetic construct
  misc_feature 1..20: note = Description of Artificial Sequence: Synthetic oligonucleotide
  misc_feature 1..20: note = Target: FXN; (-) strand; PAM type: NNAGAAW; PAM sequence: AGAGAAA
  source 1..20: mol_type = other DNA
ttgtaaaggttatgacagtg

SEQ ID NO: 5477 - DNA, 20 bp, synthetic construct
  misc_feature 1..20: note = Description of Artificial Sequence: Synthetic oligonucleotide
  misc_feature 1..20: note = Target: FXN; (-) strand; PAM type: NNAGAAW; PAM sequence: CCAGAAA
  source 1..20: mol_type = other DNA
attattgaacgtttcagtgg

SEQ ID NO: 5478 - DNA, 20 bp, synthetic construct
  misc_feature 1..20: note = Description of Artificial Sequence: Synthetic oligonucleotide
  misc_feature 1..20: note = Target: FXN; (-) strand; PAM type: NNAGAAW; PAM sequence: AGAGAAA
  source 1..20: mol_type = other DNA
tttttttctataatgaggga

SEQ ID NO: 5479 - DNA, 20 bp, synthetic construct
  misc_feature 1..20: note = Description of Artificial Sequence: Synthetic oligonucleotide
  misc_feature 1..20: note = Target: FXN; (-) strand; PAM type: NNAGAAW; PAM sequence: AAAGAAA
  source 1..20: mol_type = other DNA
ggtgacttcaactctgggga

SEQ ID NO: 5480 - DNA, 20 bp, synthetic construct
  misc_feature 1..20: note = Description of Artificial Sequence: Synthetic oligonucleotide
  misc_feature 1..20: note = Target: FXN; (-) strand; PAM type: NNAGAAW; PAM sequence: TGAGAAA
  source 1..20: mol_type = other DNA
tattacctgatgaagggcag

SEQ ID NO: 5481 - DNA, 20 bp, synthetic construct
  misc_feature 1..20: note = Description of Artificial Sequence: Synthetic oligonucleotide
  misc_feature 1..20: note = Target: FXN; (-) strand; PAM type: NNAGAAW; PAM sequence: CCAGAAT
  source 1..20: mol_type = other DNA
aatgtcagaggtgacttcct

SEQ ID NO: 5482 - DNA, 20 bp, synthetic construct
  misc_feature 1..20: note = Description of Artificial Sequence: Synthetic oligonucleotide
  misc_feature 1..20: note = Target: FXN; (-) strand; PAM type: NNAGAAW; PAM sequence: GCAGAAA
  source 1..20: mol_type = other DNA
caggcccacagaatctctgg

SEQ ID NO: 5483 - DNA, 20 bp, synthetic construct
  misc_feature 1..20: note = Description of Artificial Sequence: Synthetic oligonucleotide
  misc_feature 1..20: note = Target: FXN; (-) strand; PAM type: NNAGAAW; PAM sequence: ACAGAAT
  source 1..20: mol_type = other DNA
tccatgtgaatttcaggccc

SEQ ID NO: 5484 - DNA, 20 bp, synthetic construct
  misc_feature 1..20: note = Description of Artificial Sequence: Synthetic oligonucleotide
  misc_feature 1..20: note = Target: FXN; (-) strand; PAM type: NNAGAAW; PAM sequence: GCAGAAA
  source 1..20: mol_type = other DNA
gaatccttagacatcatgga

SEQ ID NO: 5485 - DNA, 20 bp, synthetic construct
  misc_feature 1..20: note = Description of Artificial Sequence: Synthetic oligonucleotide
  misc_feature 1..20: note = Target: FXN; (-) strand; PAM type: NNAGAAW; PAM sequence: AGAGAAA
  source 1..20: mol_type = other DNA
aaatccaaactagccaaagt

SEQ ID NO: 5486 - DNA, 20 bp, synthetic construct
  misc_feature 1..20: note = Description of Artificial Sequence: Synthetic oligonucleotide
  misc_feature 1..20: note = Target: FXN; (-) strand; PAM type: NNAGAAW; PAM sequence: TCAGAAT
  source 1..20: mol_type = other DNA
cctattctcgatctactgaa

SEQ ID NO: 5487 - DNA, 20 bp, synthetic construct
  misc_feature 1..20: note = Description of Artificial Sequence: Synthetic oligonucleotide
  misc_feature 1..20: note = Target: FXN; (-) strand; PAM type: NNAGAAW; PAM sequence: TTAGAAA
  source 1..20: mol_type = other DNA
cagcatcacctggaaacttg

SEQ ID NO: 5488 - DNA, 20 bp, synthetic construct
  misc_feature 1..20: note = Description of Artificial Sequence: Synthetic oligonucleotide
  misc_feature 1..20: note = Target: FXN; (-) strand; PAM type: NNAGAAW; PAM sequence: CCAGAAT
  source 1..20: mol_type = other DNA
atgggtaggggaggatatca

SEQ ID NO: 5489 - DNA, 20 bp, synthetic construct
  misc_feature 1..20: note = Description of Artificial Sequence: Synthetic oligonucleotide
  misc_feature 1..20: note = Target: FXN; (-) strand; PAM type: NNAGAAW; PAM sequence: ATAGAAT
  source 1..20: mol_type = other DNA
ttttggccaaagaaatagac

SEQ ID NO: 5490 - DNA, 20 bp, synthetic construct
  misc_feature 1..20: note = Description of Artificial Sequence: Synthetic oligonucleotide
  misc_feature 1..20: note = Target: FXN; (-) strand; PAM type: NNAGAAW; PAM sequence: AAAGAAA
  source 1..20: mol_type = other DNA
attgccccatctttttggcc

SEQ ID NO: 5491 - DNA, 20 bp, synthetic construct
  misc_feature 1..20: note = Description of Artificial Sequence: Synthetic oligonucleotide
  misc_feature 1..20: note = Target: FXN; (-) strand; PAM type: NNAGAAW; PAM sequence: ATAGAAA
  source 1..20: mol_type = other DNA
catgcttagcaagttctggc

SEQ ID NO: 5492 - DNA, 20 bp, synthetic construct
  misc_feature 1..20: note = Description of Artificial Sequence: Synthetic oligonucleotide
  misc_feature 1..20: note = Target: FXN; (-) strand; PAM type: NNAGAAW; PAM sequence: AGAGAAA
  source 1..20: mol_type = other DNA
actgcattatatactcagag

SEQ ID NO: 5493 - DNA, 20 bp, synthetic construct
  misc_feature 1..20: note = Description of Artificial Sequence: Synthetic oligonucleotide
  misc_feature 1..20: note = Target: FXN; (-) strand; PAM type: NNAGAAW; PAM sequence: GGAGAAA
  source 1..20: mol_type = other DNA
gttatgtatatgccaggcct

SEQ ID NO: 5494 - DNA, 20 bp, synthetic construct
  misc_feature 1..20: note = Description of Artificial Sequence: Synthetic oligonucleotide
  misc_feature 1..20: note = Target: FXN; (-) strand; PAM type: NNAGAAW; PAM sequence: AAAGAAA
  source 1..20: mol_type = other DNA
caagatactgtcttaaaaaa

SEQ ID NO: 5495 - DNA, 20 bp, synthetic construct
  misc_feature 1..20: note = Description of Artificial Sequence: Synthetic oligonucleotide
  misc_feature 1..20: note = Target: FXN; (-) strand; PAM type: NNAGAAW; PAM sequence: AGAGAAT
  source 1..20: mol_type = other DNA
tattgttgatagattttaaa

SEQ ID NO: 5496 - DNA, 20 bp, synthetic construct
  misc_feature 1..20: note = Description of Artificial Sequence: Synthetic oligonucleotide
  misc_feature 1..20: note = Target: FXN; (-) strand; PAM type: NNAGAAW; PAM sequence: GTAGAAA
  source 1..20: mol_type = other DNA
agctagtttttgtatttttt

SEQ ID NO: 5497 - DNA, 20 bp, synthetic construct
  misc_feature 1..20: note = Description of Artificial Sequence: Synthetic oligonucleotide
  misc_feature 1..20: note = Target: FXN; (-) strand; PAM type: NNAGAAW; PAM sequence: GCAGAAT
  source 1..20: mol_type = other DNA
acacagctctgcggagtggg

SEQ ID NO: 5498 - DNA, 20 bp, synthetic construct
  misc_feature 1..20: note = Description of Artificial Sequence: Synthetic oligonucleotide
  misc_feature 1..20: note = Target: FXN; (-) strand; PAM type: NNAGAAW; PAM sequence: ACAGAAA
  source 1..20: mol_type = other DNA
gtcacctttatcttctccct

SEQ ID NO: 5499 - DNA, 20 bp, synthetic construct
  misc_feature 1..20: note = Description of Artificial Sequence: Synthetic oligonucleotide
  misc_feature 1..20: note = Target: FXN; (-) strand; PAM type: NNAGAAW; PAM sequence: GAAGAAA
  source 1..20: mol_type = other DNA
tttctttgtaccccccaaag

SEQ ID NO: 5500 - DNA, 20 bp, synthetic construct
  misc_feature 1..20: note = Description of Artificial Sequence: Synthetic oligonucleotide
  misc_feature 1..20: note = Target: FXN; (-) strand; PAM type: NNAGAAW; PAM sequence: GGAGAAT
  source 1..20: mol_type = other DNA
ctactcgggaggctgaggca

SEQ ID NO: 5501 - DNA, 20 bp, synthetic construct
  misc_feature 1..20: note = Description of Artificial Sequence: Synthetic oligonucleotide
  misc_feature 1..20: note = Target: FXN; (-) strand; PAM type: NNAGAAW; PAM sequence: GGAGAAA
  source 1..20: mol_type = other DNA
gagaccagcctgaccaacat

SEQ ID NO: 5502 - DNA, 20 bp, synthetic construct
  misc_feature 1..20: note = Description of Artificial Sequence: Synthetic oligonucleotide
  misc_feature 1..20: note = Target: FXN; (-) strand; PAM type: NNAGAAW; PAM sequence: CCAGAAA
  source 1..20: mol_type = other DNA
agaggttgctaaccatctat

SEQ ID NO: 5503 - DNA, 20 bp, synthetic construct
  misc_feature 1..20: note = Description of Artificial Sequence: Synthetic oligonucleotide
  misc_feature 1..20: note = Target: FXN; (-) strand; PAM type: NNAGAAW; PAM sequence: ATAGAAA
  source 1..20: mol_type = other DNA
acaaatgtgattaattcagt

SEQ ID NO: 5504 - DNA, 20 bp, synthetic construct
  misc_feature 1..20: note = Description of Artificial Sequence: Synthetic oligonucleotide
  misc_feature 1..20: note = Target: FXN; (-) strand; PAM type: NNAGAAW; PAM sequence: GGAGAAA
  source 1..20: mol_type = other DNA
tagaagtagatgcaaggggt

SEQ ID NO: 5505 - DNA, 20 bp, synthetic construct
  misc_feature 1..20: note = Description of Artificial Sequence: Synthetic oligonucleotide
  misc_feature 1..20: note = Target: FXN; (-) strand; PAM type: NNAGAAW; PAM sequence: GTAGAAT
  source 1..20: mol_type = other DNA
tttctttttaactagaaaat

SEQ ID NO: 5506 - DNA, 20 bp, synthetic construct
  misc_feature 1..20: note = Description of Artificial Sequence: Synthetic oligonucleotide
  misc_feature 1..20: note = Target: FXN; (-) strand; PAM type: NNAGAAW; PAM sequence: CTAGAAA
  source 1..20: mol_type = other DNA
tgatttttttttctttttaa

SEQ ID NO: 5507 - DNA, 20 bp, synthetic construct
  misc_feature 1..20: note = Description of Artificial Sequence: Synthetic oligonucleotide
  misc_feature 1..20: note = Target: FXN; (-) strand; PAM type: NNAGAAW; PAM sequence: ACAGAAT
  source 1..20: mol_type = other DNA
actgattttttttgtatgtc

SEQ ID NO: 5508 - DNA, 20 bp, synthetic construct
  misc_feature 1..20: note = Description of Artificial Sequence: Synthetic oligonucleotide
  misc_feature 1..20: note = Target: FXN; (-) strand; PAM type: NNAGAAW; PAM sequence: TTAGAAA
  source 1..20: mol_type = other DNA
aatacagatagagcatttac

SEQ ID NO: 5509 - DNA, 20 bp, synthetic construct
  misc_feature 1..20: note = Description of Artificial Sequence: Synthetic oligonucleotide
  misc_feature 1..20: note = Target: FXN; (-) strand; PAM type: NNAGAAW; PAM sequence: CTAGAAA
  source 1..20: mol_type = other DNA
gcccccgtggctactgagca

SEQ ID NO: 5510 - DNA, 20 bp, synthetic construct
  misc_feature 1..20: note = Description of Artificial Sequence: Synthetic oligonucleotide
  misc_feature 1..20: note = Target: FXN; (-) strand; PAM type: NNAGAAW; PAM sequence: TAAGAAA
  source 1..20: mol_type = other DNA
acaagcaacagaaaatggac

SEQ ID NO: 5511 - DNA, 20 bp, synthetic construct
  misc_feature 1..20: note = Description of Artificial Sequence: Synthetic oligonucleotide
  misc_feature 1..20: note = Target: FXN; (-) strand; PAM type: NNAGAAW; PAM sequence: ACAGAAA
  source 1..20: mol_type = other DNA
caggtattctgtcacaagca

SEQ ID NO: 5512 - DNA, 20 bp, synthetic construct
  misc_feature 1..20: note = Description of Artificial Sequence: Synthetic oligonucleotide
  misc_feature 1..20: note = Target: FXN; (-) strand; PAM type: NNAGAAW; PAM sequence: GAAGAAA
  source 1..20: mol_type = other DNA
ctcagcctccagagcagtaa

SEQ ID NO: 5513 - DNA, 20 bp, synthetic construct
  misc_feature 1..20: note = Description of Artificial Sequence: Synthetic oligonucleotide
  misc_feature 1..20: note = Target: FXN; (-) strand; PAM type: NNAGAAW; PAM sequence: AAAGAAA
  source 1..20: mol_type = other DNA
actagttaggctttataaga

SEQ ID NO: 5514 - DNA, 20 bp, synthetic construct
  misc_feature 1..20: note = Description of Artificial Sequence: Synthetic oligonucleotide
  misc_feature 1..20: note = Target: FXN; (-) strand; PAM type: NNAGAAW; PAM sequence: TAAGAAA
  source 1..20: mol_type = other DNA
gtgaaactagttaggcttta

SEQ ID NO: 5515 - DNA, 20 bp, synthetic construct
  misc_feature 1..20: note = Description of Artificial Sequence: Synthetic oligonucleotide
  misc_feature 1..20: note = Target: FXN; (-) strand; PAM type: NNAGAAW; PAM sequence: ATAGAAA
  source 1..20: mol_type = other DNA
cactgggtggcttataaaca

SEQ ID NO: 5516 - DNA, 20 bp, synthetic construct
  misc_feature 1..20: note = Description of Artificial Sequence: Synthetic oligonucleotide
  misc_feature 1..20: note = Target: FXN; (-) strand; PAM type: NNAGAAW; PAM sequence: ACAGAAT
  source 1..20: mol_type = other DNA
agaaaaggagggtacgatga

SEQ ID NO: 5517 - DNA, 20 bp, synthetic construct
  misc_feature 1..20: note = Description of Artificial Sequence: Synthetic oligonucleotide
  misc_feature 1..20: note = Target: FXN; (-) strand; PAM type: NNAGAAW; PAM sequence: TAAGAAA
  source 1..20: mol_type = other DNA
atacagaggaggtcaaactc

SEQ ID NO: 5518 - DNA, 20 bp, synthetic construct
  misc_feature 1..20: note = Description of Artificial Sequence: Synthetic oligonucleotide
  misc_feature 1..20: note = Target: FXN; (-) strand; PAM type: NNAGAAW; PAM sequence: GCAGAAT
  source 1..20: mol_type = other DNA
gccatagcagaacagataca

SEQ ID NO: 5519 - DNA, 20 bp, synthetic construct
  misc_feature 1..20: note = Description of Artificial Sequence: Synthetic oligonucleotide
  misc_feature 1..20: note = Target: FXN; (-) strand; PAM type: NNAGAAW; PAM sequence: TGAGAAA
  source 1..20: mol_type = other DNA
tttgcccagcaattccattc

SEQ ID NO: 5520 - DNA, 20 bp, synthetic construct
  misc_feature 1..20: note = Description of Artificial Sequence: Synthetic oligonucleotide
  misc_feature 1..20: note = Target: FXN; (-) strand; PAM type: NNAGAAW; PAM sequence: AAAGAAT
  source 1..20: mol_type = other DNA
gggtattcaggctctgaaca

SEQ ID NO: 5521 - DNA, 20 bp, synthetic construct
  misc_feature 1..20: note = Description of Artificial Sequence: Synthetic oligonucleotide
  misc_feature 1..20: note = Target: FXN; (-) strand; PAM type: NNAGAAW; PAM sequence: ACAGAAA
  source 1..20: mol_type = other DNA
cgtgagcataaaacaagaga

SEQ ID NO: 5522 - DNA, 20 bp, synthetic construct
  misc_feature 1..20: note = Description of Artificial Sequence: Synthetic oligonucleotide
  misc_feature 1..20: note = Target: FXN; (-) strand; PAM type: NNAGAAW; PAM sequence: TGAGAAT
  source 1..20: mol_type = other DNA
aacatccaaggaaaagtgtc

SEQ ID NO: 5523 - DNA, 20 bp, synthetic construct
  misc_feature 1..20: note = Description of Artificial Sequence: Synthetic oligonucleotide
  misc_feature 1..20: note = Target: FXN; (-) strand; PAM type: NNAGAAW; PAM sequence: CAAGAAA
  source 1..20: mol_type = other DNA
aattttaacagagaaataac

SEQ ID NO: 5524 - DNA, 20 bp, synthetic construct
  misc_feature 1..20: note = Description of Artificial Sequence: Synthetic oligonucleotide
  misc_feature 1..20: note = Target: FXN; (-) strand; PAM type: NNAGAAW; PAM sequence: AGAGAAA
  source 1..20: mol_type = other DNA
cacttggagacaattttaac

SEQ ID NO: 5525 - DNA, 20 bp, synthetic construct
  misc_feature 1..20: note = Description of Artificial Sequence: Synthetic oligonucleotide
  misc_feature 1..20: note = Target: FXN; (-) strand; PAM type: NNAGAAW; PAM sequence: GAAGAAT
  source 1..20: mol_type = other DNA
ctactcaggaggctgaggca

SEQ ID NO: 5526 - DNA, 20 bp, synthetic construct
  misc_feature 1..20: note = Description of Artificial Sequence: Synthetic oligonucleotide
  misc_feature 1..20: note = Target: FXN; (-) strand; PAM type: NNAGAAW; PAM sequence: GGAGAAA
  source 1..20: mol_type = other DNA
caacgagcaaattatttata

SEQ ID NO: 5527 - DNA, 20 bp, synthetic construct
  misc_feature 1..20: note = Description of Artificial Sequence: Synthetic oligonucleotide
  misc_feature 1..20: note = Target: FXN; (-) strand; PAM type: NNAGAAW; PAM sequence: TTAGAAA
  source 1..20: mol_type = other DNA
ggtggggcagagtgcagacc

SEQ ID NO: 5528 - DNA, 20 bp, synthetic construct
  misc_feature 1..20: note = Description of Artificial Sequence: Synthetic oligonucleotide
  misc_feature 1..20: note = Target: FXN; (-) strand; PAM type: NNAGAAW; PAM sequence: TCAGAAA
  source 1..20: mol_type = other DNA
cagcagtgcccttagcaaac

SEQ ID NO: 5529 - DNA, 20 bp, synthetic construct
  misc_feature 1..20: note = Description of Artificial Sequence: Synthetic oligonucleotide
  misc_feature 1..20: note = Target: FXN; (-) strand; PAM type: NNAGAAW; PAM sequence: ACAGAAT
  source 1..20: mol_type = other DNA
ttattatcatgatctgcagg

SEQ ID NO: 5530 - DNA, 20 bp, synthetic construct
  misc_feature 1..20: note = Description of Artificial Sequence: Synthetic oligonucleotide
  misc_feature 1..20: note = Target: FXN; (-) strand; PAM type: NNAGAAW; PAM sequence: GCAGAAT
  source 1..20: mol_type = other DNA
gcaacaggaaatagcaagag

SEQ ID NO: 5531 - DNA, 20 bp, synthetic construct
  misc_feature 1..20: note = Description of Artificial Sequence: Synthetic oligonucleotide
  misc_feature 1..20: note = Target: FXN; (-) strand; PAM type: NNAGAAW; PAM sequence: CGAGAAT
  source 1..20: mol_type = other DNA
ctcaactgcaccaccagttt

SEQ ID NO: 5532 - DNA, 20 bp, synthetic construct
  misc_feature 1..20: note = Description of Artificial Sequence: Synthetic oligonucleotide
  misc_feature 1..20: note = Target: FXN; (-) strand; PAM type: NNAGAAW; PAM sequence: AAAGAAA
  source 1..20: mol_type = other DNA
caaggggaagcagcactttt

SEQ ID NO: 5533 - DNA, 20 bp, synthetic construct
  misc_feature 1..20: note = Description of Artificial Sequence: Synthetic oligonucleotide
  misc_feature 1..20: note = Target: FXN; (-) strand; PAM type: NNAGAAW; PAM sequence: TCAGAAA
  source 1..20: mol_type = other DNA
ccggtttcctacttagccct

SEQ ID NO: 5534 - DNA, 20 bp, synthetic construct
  misc_feature 1..20: note = Description of Artificial Sequence: Synthetic oligonucleotide
  misc_feature 1..20: note = Target: FXN; (-) strand; PAM type: NNAGAAW; PAM sequence: TAAGAAA
  source 1..20: mol_type = other DNA
accgagtgctccattttttc

SEQ ID NO: 5535 - DNA, 20 bp, synthetic construct
  misc_feature 1..20: note = Description of Artificial Sequence: Synthetic oligonucleotide
  misc_feature 1..20: note = Target: FXN; (-) strand; PAM type: NNAGAAW; PAM sequence: GAAGAAA
  source 1..20: mol_type = other DNA
ctaagattgttgctgctcag

SEQ ID NO: 5536 - DNA, 20 bp, synthetic construct
  misc_feature 1..20: note = Description of Artificial Sequence: Synthetic oligonucleotide
  misc_feature 1..20: note = Target: FXN; (-) strand; PAM type: NNAGAAW; PAM sequence: CCAGAAT
  source 1..20: mol_type = other DNA
acaccactaagttcttccca

SEQ ID NO: 5537 - DNA, 20 bp, synthetic construct
  misc_feature 1..20: note = Description of Artificial Sequence: Synthetic oligonucleotide
  misc_feature 1..20: note = Target: FXN; (-) strand; PAM type: NNAGAAW; PAM sequence: AGAGAAA
  source 1..20: mol_type = other DNA
aaaaaaaaagagagagagag

SEQ ID NO: 5538 - DNA, 20 bp, synthetic construct
  misc_feature 1..20: note = Description of Artificial Sequence: Synthetic oligonucleotide
  misc_feature 1..20: note = Target: FXN; (-) strand; PAM type: NNAGAAW; PAM sequence: AAAGAAA
  source 1..20: mol_type = other DNA
tctcagggtgtgatttcata

SEQ ID NO: 5539 - DNA, 20 bp, synthetic construct
  misc_feature 1..20: note = Description of Artificial Sequence: Synthetic oligonucleotide
  misc_feature 1..20: note = Target: FXN; (-) strand; PAM type: NNAGAAW; PAM sequence: AAAGAAA
  source 1..20: mol_type = other DNA
tttgggaaaagcctactctc

SEQ ID NO: 5540 - DNA, 20 bp, synthetic construct
  misc_feature 1..20: note = Description of Artificial Sequence: Synthetic oligonucleotide
  misc_feature 1..20: note = Target: FXN; (-) strand; PAM type: NNAGAAW; PAM sequence: GGAGAAT
  source 1..20: mol_type = other DNA
acaaacgtggaaagtcaaag

SEQ ID NO: 5541 - DNA, 20 bp, synthetic construct
  misc_feature 1..20: note = Description of Artificial Sequence: Synthetic oligonucleotide
  misc_feature 1..20: note = Target: FXN; (-) strand; PAM type: NNAGAAW; PAM sequence: AAAGAAT
  source 1..20: mol_type = other DNA
ttttagtagatgtgacaaga

SEQ ID NO: 5542 - DNA, 20 bp, synthetic construct
  misc_feature 1..20: note = Description of Artificial Sequence: Synthetic oligonucleotide
  misc_feature 1..20: note = Target: FXN; (-) strand; PAM type: NNAGAAW; PAM sequence: CAAGAAA
  source 1..20: mol_type = other DNA
gttgcttttagtagatgtga

SEQ ID NO: 5543 - DNA, 20 bp, synthetic construct
  misc_feature 1..20: note = Description of Artificial Sequence: Synthetic oligonucleotide
  misc_feature 1..20: note = Target: FXN; (-) strand; PAM type: NNAGAAW; PAM sequence: GTAGAAT
  source 1..20: mol_type = other DNA
gcatatagctctggggacag

SEQ ID NO: 5544 - DNA, 20 bp, synthetic construct
  misc_feature 1..20: note = Description of Artificial Sequence: Synthetic oligonucleotide
  misc_feature 1..20: note = Target: FXN; (-) strand; PAM type: NNAGAAW; PAM sequence: TGAGAAA
  source 1..20: mol_type = other DNA
ttgacgtgtcttgaagaatt

SEQ ID NO: 5545 - DNA, 20 bp, synthetic construct
  misc_feature 1..20: note = Description of Artificial Sequence: Synthetic oligonucleotide
  misc_feature 1..20: note = Target: FXN; (-) strand; PAM type: NNAGAAW; PAM sequence: GAAGAAT
  source 1..20: mol_type = other DNA
gaggctggttgacgtgtctt

SEQ ID NO: 5546 - DNA, 20 bp, synthetic construct
  misc_feature 1..20: note = Description of Artificial Sequence: Synthetic oligonucleotide
  misc_feature 1..20: note = Target: FXN; (-) strand; PAM type: NNAGAAW; PAM sequence: AGAGAAT
  source 1..20: mol_type = other DNA
gtgttttgagactgagctgg

SEQ ID NO: 5547 - DNA, 20 bp, synthetic construct
  misc_feature 1..20: note = Description of Artificial Sequence: Synthetic oligonucleotide
  misc_feature 1..20: note = Target: FXN; (-) strand; PAM type: NNAGAAW; PAM sequence: AGAGAAA
  source 1..20: mol_type = other DNA
gtgttttgagagtgagctgg

SEQ ID NO: 5548 - DNA, 20 bp, synthetic construct
  misc_feature 1..20: note = Description of Artificial Sequence: Synthetic oligonucleotide
  misc_feature 1..20: note = Target: FXN; (-) strand; PAM type: NNAGAAW; PAM sequence: ACAGAAA
  source 1..20: mol_type = other DNA
attactttaaatccacagag

SEQ ID NO: 5549 - DNA, 20 bp, synthetic construct
  misc_feature 1..20: note = Description of Artificial Sequence: Synthetic oligonucleotide
  misc_feature 1..20: note = Target: FXN; (-) strand; PAM type: NNAGAAW; PAM sequence: TCAGAAT
  source 1..20: mol_type = other DNA
ctaatctatgctattggtaa

SEQ ID NO: 5550 - DNA, 20 bp, synthetic construct
  misc_feature 1..20: note = Description of Artificial Sequence: Synthetic oligonucleotide
  misc_feature 1..20: note = Target: FXN; (-) strand; PAM type: NNAGAAW; PAM sequence: AAAGAAA
  source 1..20: mol_type = other DNA
cacaaacatcattgtgatag

SEQ ID NO: 5551 - DNA, 20 bp, synthetic construct
  misc_feature 1..20: note = Description of Artificial Sequence: Synthetic oligonucleotide
  misc_feature 1..20: note = Target: FXN; (-) strand; PAM type: NNAGAAW; PAM sequence: ATAGAAA
  source 1..20: mol_type = other DNA
atctcacaaacatcattgtg

SEQ ID NO: 5552 - DNA, 20 bp, synthetic construct
  misc_feature 1..20: note = Description of Artificial Sequence: Synthetic oligonucleotide
  misc_feature 1..20: note = Target: FXN; (-) strand; PAM type: NNAGAAW; PAM sequence: ATAGAAT
  source 1..20: mol_type = other DNA
atggaatactacgctgcaaa

SEQ ID NO: 5553 - DNA, 20 bp, synthetic construct
  misc_feature 1..20: note = Description of Artificial Sequence: Synthetic oligonucleotide
  misc_feature 1..20: note = Target: FXN; (-) strand; PAM type: NNAGAAW; PAM sequence: ACAGAAA
  source 1..20: mol_type = other DNA
actcttaaggggtatacaca

SEQ ID NO: 5554 - DNA, 20 bp, synthetic construct
  misc_feature 1..20: note = Description of Artificial Sequence: Synthetic oligonucleotide
  misc_feature 1..20: note = Target: FXN; (-) strand; PAM type: NNAGAAW; PAM sequence: CAAGAAA
  source 1..20: mol_type = other DNA
aaaaaaaaaaaagagttggc

SEQ ID NO: 5555 - DNA, 20 bp, synthetic construct
  misc_feature 1..20: note = Description of Artificial Sequence: Synthetic oligonucleotide
  misc_feature 1..20: note = Target: FXN; (-) strand; PAM type: NNAGAAW; PAM sequence: GGAGAAT
  source 1..20: mol_type = other DNA
ctactcgggaggctgaggca

SEQ ID NO: 5556 - DNA, 20 bp, synthetic construct
  misc_feature 1..20: note = Description of Artificial Sequence: Synthetic oligonucleotide
  misc_feature 1..20: note = Target: FXN; (-) strand; PAM type: NNAGAAW; PAM sequence: GGAGAAA
  source 1..20: mol_type = other DNA
gagaccagcttgaccaacat

SEQ ID NO: 5557 - DNA, 20 bp, synthetic construct
  misc_feature 1..20: note = Description of Artificial Sequence: Synthetic oligonucleotide
  misc_feature 1..20: note = Target: FXN; (-) strand; PAM type: NNAGAAW; PAM sequence: AAAGAAA
  source 1..20: mol_type = other DNA
aaattaaaaaaaaaaaaaga

SEQ ID NO: 5558 - DNA, 20 bp, synthetic construct
  misc_feature 1..20: note = Description of Artificial Sequence: Synthetic oligonucleotide
  misc_feature 1..20: note = Target: FXN; (-) strand; PAM type: NNAGAAW; PAM sequence: AAAGAAA
  source 1..20: mol_type = other DNA
ttctcaaattaaaaaaaaaa

SEQ ID NO: 5559 - DNA, 20 bp, synthetic construct
  misc_feature 1..20: note = Description of Artificial Sequence: Synthetic oligonucleotide
  misc_feature 1..20: note = Target: FXN; (-) strand; PAM type: NNAGAAW; PAM sequence: AAAGAAA
  source 1..20: mol_type = other DNA
tgtggtttatgtataatatc

SEQ ID NO: 5560 - DNA, 20 bp, synthetic construct
  misc_feature 1..20: note = Description of Artificial Sequence: Synthetic oligonucleotide
  misc_feature 1..20: note = Target: FXN; (-) strand; PAM type: NNAGAAW; PAM sequence: TTAGAAT
  source 1..20: mol_type = other DNA
ccttaactatgccaatctaa

SEQ ID NO: 5561 - DNA, 20 bp, synthetic construct
  misc_feature 1..20: note = Description of Artificial Sequence: Synthetic oligonucleotide
  misc_feature 1..20: note = Target: FXN; (-) strand; PAM type: NNAGAAW; PAM sequence: AAAGAAA
  source 1..20: mol_type = other DNA
caagagcaaaactccgtctc

SEQ ID NO: 5562 - DNA, 20 bp, synthetic construct
  misc_feature 1..20: note = Description of Artificial Sequence: Synthetic oligonucleotide
  misc_feature 1..20: note = Target: FXN; (-) strand; PAM type: NNAGAAW; PAM sequence: AAAGAAA
  source 1..20: mol_type = other DNA
agtgagactccgtctcaaaa

SEQ ID NO: 5563 - DNA, 20 bp, synthetic construct
  misc_feature 1..20: note = Description of Artificial Sequence: Synthetic oligonucleotide
  misc_feature 1..20: note = Target: FXN; (-) strand; PAM type: NNAGAAW; PAM sequence: GGAGAAT
  source 1..20: mol_type = other DNA
ctacttgggaggctgagaca

SEQ ID NO: 5564 - DNA, 20 bp, synthetic construct
  misc_feature 1..20: note = Description of Artificial Sequence: Synthetic oligonucleotide
  misc_feature 1..20: note = Target: FXN; (-) strand; PAM type: NNAGAAW; PAM sequence: ACAGAAA
  source 1..20: mol_type = other DNA
taaacagcacagaaggggtt

SEQ ID NO: 5565 - DNA, 20 bp, synthetic construct
  misc_feature 1..20: note = Description of Artificial Sequence: Synthetic oligonucleotide
  misc_feature 1..20: note = Target: FXN; (-) strand; PAM type: NNAGAAW; PAM sequence: GGAGAAT
  source 1..20: mol_type = other DNA
ctactcaggaggctgaggca

SEQ ID NO: 5566 - DNA, 20 bp, synthetic construct
  misc_feature 1..20: note = Description of Artificial Sequence: Synthetic oligonucleotide
  misc_feature 1..20: note = Target: FXN; (-) strand; PAM type: NNAGAAW; PAM sequence: ACAGAAA
  source 1..20: mol_type = other DNA
taaaattcttagagggggaa

SEQ ID NO: 5567 - DNA, 20 bp, synthetic construct
  misc_feature 1..20: note = Description of Artificial Sequence: Synthetic oligonucleotide
  misc_feature 1..20: note = Target: FXN; (-) strand; PAM type: NNAGAAW; PAM sequence: TTAGAAT
  source 1..20: mol_type = other DNA
ataagacctagggatacaca

SEQ ID NO: 5568 - DNA, 20 bp, synthetic construct
  misc_feature 1..20: note = Description of Artificial Sequence: Synthetic oligonucleotide
  misc_feature 1..20: note = Target: FXN; (-) strand; PAM type: NNAGAAW; PAM sequence: CCAGAAA
  source 1..20: mol_type = other DNA
agacaaacaaaccaaccaac

SEQ ID NO: 5569 - DNA, 20 bp, synthetic construct
  misc_feature 1..20: note = Description of Artificial Sequence: Synthetic oligonucleotide
  misc_feature 1..20: note = Target: FXN; (-) strand; PAM type: NNAGAAW; PAM sequence: CTAGAAT
  source 1..20: mol_type = other DNA
aagtaaaccaaacgcagctg

SEQ ID NO: 5570 - DNA, 20 bp, synthetic construct
  misc_feature 1..20: note = Description of Artificial Sequence: Synthetic oligonucleotide
  misc_feature 1..20: note = Target: FXN; (-) strand; PAM type: NNAGAAW; PAM sequence: GGAGAAT
  source 1..20: mol_type = other DNA
ctactcaggaggttgaggcg

SEQ ID NO: 5571 - DNA, 20 bp, synthetic construct
  misc_feature 1..20: note = Description of Artificial Sequence: Synthetic oligonucleotide
  misc_feature 1..20: note = Target: FXN; (-) strand; PAM type: NNAGAAW; PAM sequence: AGAGAAT
  source 1..20: mol_type = other DNA
tgctttgggaggccgaggtg

SEQ ID NO: 5572 - DNA, 20 bp, synthetic construct
  misc_feature 1..20: note = Description of Artificial Sequence: Synthetic oligonucleotide
  misc_feature 1..20: note = Target: FXN; (-) strand; PAM type: NNAGAAW; PAM sequence: TTAGAAA
  source 1..20: mol_type = other DNA
tacaggtagtgggaccctct

SEQ ID NO: 5573 - DNA, 20 bp, synthetic construct
  misc_feature 1..20: note = Description of Artificial Sequence: Synthetic oligonucleotide
  misc_feature 1..20: note = Target: FXN; (-) strand; PAM type: NNAGAAW; PAM sequence: AAAGAAA
  source 1..20: mol_type = other DNA
agagcaagactccatctcaa

SEQ ID NO: 5574 - DNA, 20 bp, synthetic construct
  misc_feature 1..20: note = Description of Artificial Sequence: Synthetic oligonucleotide
  misc_feature 1..20: note = Target: FXN; (-) strand; PAM type: NNAGAAW; PAM sequence: AGAGAAT
  source 1..20: mol_type = other DNA
ctactcgggaggctgaggca

SEQ ID NO: 5575 - DNA, 20 bp, synthetic construct
  misc_feature 1..20: note = Description of Artificial Sequence: Synthetic oligonucleotide
  misc_feature 1..20: note = Target: FXN; (-) strand; PAM type: NNAGAAW; PAM sequence: ATAGAAA
  source 1..20: mol_type = other DNA
ttttttcccctaagggctaa

SEQ ID NO: 5576 - DNA, 20 bp, synthetic construct
  misc_feature 1..20: note = Description of Artificial Sequence: Synthetic oligonucleotide
  misc_feature 1..20: note = Target: FXN; (-) strand; PAM type: NNAGAAW; PAM sequence: TGAGAAA
  source 1..20: mol_type = other DNA
ttcaaattgattcaatgatg

SEQ ID NO: 5577 - DNA, 20 bp, synthetic construct
  misc_feature 1..20: note = Description of Artificial Sequence: Synthetic oligonucleotide
  misc_feature 1..20: note = Target: FXN; (-) strand; PAM type: NNAGAAW; PAM sequence: ACAGAAT
  source 1..20: mol_type = other DNA
ttcctttgaaagaatgggtt

SEQ ID NO: 5578 - DNA, 20 bp, synthetic construct
  misc_feature 1..20: note = Description of Artificial Sequence: Synthetic oligonucleotide
  misc_feature 1..20: note = Target: FXN; (-) strand; PAM type: NNAGAAW; PAM sequence: AAAGAAT
  source 1..20: mol_type = other DNA
tataggcatctcttcctttg

SEQ ID NO: 5579 - DNA, 20 bp, synthetic construct
  misc_feature 1..20: note = Description of Artificial Sequence: Synthetic oligonucleotide
  misc_feature 1..20: note = Target: FXN; (-) strand; PAM type: NNAGAAW; PAM sequence: CTAGAAA
  source 1..20: mol_type = other DNA
actcaaggtatatgaattgg

SEQ ID NO: 5580 - DNA, 20 bp, synthetic construct
  misc_feature 1..20: note = Description of Artificial Sequence: Synthetic oligonucleotide
  misc_feature 1..20: note = Target: FXN; (-) strand; PAM type: NNAGAAW; PAM sequence: TTAGAAA
  source 1..20: mol_type = other DNA
gctaattagtaaatgatttg

SEQ ID NO: 5581 - DNA, 20 bp, synthetic construct
  misc_feature 1..20: note = Description of Artificial Sequence: Synthetic oligonucleotide
  misc_feature 1..20: note = Target: FXN; (-) strand; PAM type: NNAGAAW; PAM sequence: GGAGAAA
  source 1..20: mol_type = other DNA
acctcagagtgctgggcaag

SEQ ID NO: 5582 - DNA, 20 bp, synthetic construct
  misc_feature 1..20: note = Description of Artificial Sequence: Synthetic oligonucleotide
  misc_feature 1..20: note = Target: FXN; (-) strand; PAM type: NNAGAAW; PAM sequence: AAAGAAT
  source 1..20: mol_type = other DNA
ctgttccagacactgggatc

SEQ ID NO: 5583 - DNA, 20 bp, synthetic construct
  misc_feature 1..20: note = Description of Artificial Sequence: Synthetic oligonucleotide
  misc_feature 1..20: note = Target: FXN; (-) strand; PAM type: NNAGAAW; PAM sequence: AGAGAAA
  source 1..20: mol_type = other DNA
ttaagtctcccactccacag

SEQ ID NO: 5584 - DNA, 20 bp, synthetic construct
  misc_feature 1..20: note = Description of Artificial Sequence: Synthetic oligonucleotide
  misc_feature 1..20: note = Target: FXN; (-) strand; PAM type: NNAGAAW; PAM sequence: AGAGAAT
  source 1..20: mol_type = other DNA
ttactcgggagactgaggca

SEQ ID NO: 5585 - DNA, 20 bp, synthetic construct
  misc_feature 1..20: note = Description of Artificial Sequence: Synthetic oligonucleotide
  misc_feature 1..20: note = Target: FXN; (-) strand; PAM type: NNAGAAW; PAM sequence: AAAGAAA
  source 1..20: mol_type = other DNA
tatcacttaaggactcttgg

SEQ ID NO: 5586 - DNA, 20 bp, synthetic construct
  misc_feature 1..20: note = Description of Artificial Sequence: Synthetic oligonucleotide
  misc_feature 1..20: note = Target: FXN; (-) strand; PAM type: NNAGAAW; PAM sequence: GTAGAAA
  source 1..20: mol_type = other DNA
ctgttgtcactagctcactt

SEQ ID NO: 5587 - DNA, 20 bp, synthetic construct
  misc_feature 1..20: note = Description of Artificial Sequence: Synthetic oligonucleotide
  misc_feature 1..20: note = Target: FXN; (-) strand; PAM type: NNAGAAW; PAM sequence: CCAGAAT
  source 1..20: mol_type = other DNA
acggggtttcaccgtgttag

SEQ ID NO: 5588 - DNA, 20 bp, synthetic construct
  misc_feature 1..20: note = Description of Artificial Sequence: Synthetic oligonucleotide
  misc_feature 1..20: note = Target: FXN; (-) strand; PAM type: NNAGAAW; PAM sequence: GCAGAAA
  source 1..20: mol_type = other DNA
aaactagctgcattagttca

SEQ ID NO: 5589 - DNA, 20 bp, synthetic construct
  misc_feature 1..20: note = Description of Artificial Sequence: Synthetic oligonucleotide
  misc_feature 1..20: note = Target: FXN; (-) strand; PAM type: NNAGAAW; PAM sequence: AAAGAAA
  source 1..20: mol_type = other DNA
ggaaggaaagtggtgacagg

SEQ ID NO: 5590 - DNA, 20 bp, synthetic construct
  misc_feature 1..20: note = Description of Artificial Sequence: Synthetic oligonucleotide
  misc_feature 1..20: note = Target: FXN; (-) strand; PAM type: NNAGAAW; PAM sequence: GCAGAAA
  source 1..20: mol_type = other DNA
ttagggcaaggttacacagg

SEQ ID NO: 5591 - DNA, 20 bp, synthetic construct
  misc_feature 1..20: note = Description of Artificial Sequence: Synthetic oligonucleotide
  misc_feature 1..20: note = Target: FXN; (-) strand; PAM type: NNAGAAW; PAM sequence: GCAGAAA
  source 1..20: mol_type = other DNA
tactggggggccacaatcca

SEQ ID NO: 5592 - DNA, 20 bp, synthetic construct
  misc_feature 1..20: note = Description of Artificial Sequence: Synthetic oligonucleotide
  misc_feature 1..20: note = Target: FXN; (-) strand; PAM type: NNAGAAW; PAM sequence: AAAGAAT
  source 1..20: mol_type = other DNA
ataataaaaaaaaagagctc

SEQ ID NO: 5593 - DNA, 20 bp, synthetic construct
  misc_feature 1..20: note = Description of Artificial Sequence: Synthetic oligonucleotide
  misc_feature 1..20: note = Target: FXN; (-) strand; PAM type: NNAGAAW; PAM sequence: TAAGAAA
  source 1..20: mol_type = other DNA
ccaacaatgatagactggat

SEQ ID NO: 5594 - DNA, 20 bp, synthetic construct
  misc_feature 1..20: note = Description of Artificial Sequence: Synthetic oligonucleotide
  misc_feature 1..20: note = Target: FXN; (-) strand; PAM type: NNAGAAW; PAM sequence: AAAGAAA
  source 1..20: mol_type = other DNA
agctatttccattgtcccaa

SEQ ID NO: 5595 - DNA, 20 bp, synthetic construct
  misc_feature 1..20: note = Description of Artificial Sequence: Synthetic oligonucleotide
  misc_feature 1..20: note = Target: FXN; (-) strand; PAM type: NNAGAAW; PAM sequence: GGAGAAT
  source 1..20: mol_type = other DNA
ctacttggtaggctgaggtg

SEQ ID NO: 5596 - DNA, 20 bp, synthetic construct
  misc_feature 1..20: note = Description of Artificial Sequence: Synthetic oligonucleotide
  misc_feature 1..20: note = Target: FXN; (-) strand; PAM type: NNAGAAW; PAM sequence: ATAGAAA
  source 1..20: mol_type = other DNA
tctgattcaaaaacaaatgt

SEQ ID NO: 5597 - DNA, 20 bp, synthetic construct
  misc_feature 1..20: note = Description of Artificial Sequence: Synthetic oligonucleotide
  misc_feature 1..20: note = Target: FXN; (-) strand; PAM type: NNAGAAW; PAM sequence: AAAGAAA
  source 1..20: mol_type = other DNA
tttagaatgggtgagatatg

SEQ ID NO: 5598 - DNA, 20 bp, synthetic construct
  misc_feature 1..20: note = Description of Artificial Sequence: Synthetic oligonucleotide
  misc_feature 1..20: note = Target: FXN; (-) strand; PAM type: NNAGAAW; PAM sequence: TTAGAAT
  source 1..20: mol_type = other DNA
ttctaaggcctgtggtctct

SEQ ID NO: 5599 - DNA, 20 bp, synthetic construct
  misc_feature 1..20: note = Description of Artificial Sequence: Synthetic oligonucleotide
  misc_feature 1..20: note = Target: FXN; (-) strand; PAM type: NNAGAAW; PAM sequence: GCAGAAA
  source 1..20: mol_type = other DNA
ttcagctctgttggtagaag

SEQ ID NO: 5600 - DNA, 20 bp, synthetic construct
  misc_feature 1..20: note = Description of Artificial Sequence: Synthetic oligonucleotide
  misc_feature 1..20: note = Target: FXN; (-) strand; PAM type: NNAGAAW; PAM sequence: TGAGAAT
  source 1..20: mol_type = other DNA
tccctgtgaggtctgcaagg

SEQ ID NO: 5601 - DNA, 20 bp, synthetic construct
  misc_feature 1..20: note = Description of Artificial Sequence: Synthetic oligonucleotide
  misc_feature 1..20: note = Target: FXN; (-) strand; PAM type: NNAGAAW; PAM sequence: TCAGAAT
  source 1..20: mol_type = other DNA
gaagagctttgctttcagaa

SEQ ID NO: 5602 - DNA, 20 bp, synthetic construct
  misc_feature 1..20: note = Description of Artificial Sequence: Synthetic oligonucleotide
  misc_feature 1..20: note = Target: FXN; (-) strand; PAM type: NNAGAAW; PAM sequence: TCAGAAT
  source 1..20: mol_type = other DNA
gtgtaggaagagctttgctt

SEQ ID NO: 5603 - DNA, 20 bp, synthetic construct
  misc_feature 1..20: note = Description of Artificial Sequence: Synthetic oligonucleotide
  misc_feature 1..20: note = Target: FXN; (-) strand; PAM type: NNAGAAW; PAM sequence: TTAGAAA
  source 1..20: mol_type = other DNA
aaagaaatgtcttttagtat

SEQ ID NO: 5604 - DNA, 20 bp, synthetic construct
  misc_feature 1..20: note = Description of Artificial Sequence: Synthetic oligonucleotide
  misc_feature 1..20: note = Target: FXN; (-) strand; PAM type: NNAGAAW; PAM sequence: AAAGAAA
  source 1..20: mol_type = other DNA
aagtacacaaaatacaccat

SEQ ID NO: 5605 - DNA, 20 bp, synthetic construct
  misc_feature 1..20: note = Description of Artificial Sequence: Synthetic oligonucleotide
  misc_feature 1..20: note = Target: FXN; (-) strand; PAM type: NNAGAAW; PAM sequence: CAAGAAA
  source 1..20: mol_type = other DNA
aaagcataaagaaattaaaa

SEQ ID NO: 5606 - DNA, 20 bp, synthetic construct
  misc_feature 1..20: note = Description of Artificial Sequence: Synthetic oligonucleotide
  misc_feature 1..20: note = Target: FXN; (-) strand; PAM type: NNAGAAW; PAM sequence: AAAGAAA
  source 1..20: mol_type = other DNA
attaggtggaaaaaaagcat

SEQ ID NO: 5607 - DNA, 20 bp, synthetic construct
  misc_feature 1..20: note = Description of Artificial Sequence: Synthetic oligonucleotide
  misc_feature 1..20: note = Target: FXN; (-) strand; PAM type: NNAGAAW; PAM sequence: TAAGAAT
  source 1..20: mol_type = other DNA
tgtcacatttcggaagtctt

SEQ ID NO: 5608 - DNA, 20 bp, synthetic construct
  misc_feature 1..20: note = Description of Artificial Sequence: Synthetic oligonucleotide
  misc_feature 1..20: note = Target: FXN; (-) strand; PAM type: NNAGAAW; PAM sequence: TGAGAAT
  source 1..20: mol_type = other DNA
actagagtaaacttttctac

SEQ ID NO: 5609 - DNA, 20 bp, synthetic construct
  misc_feature 1..20: note = Description of Artificial Sequence: Synthetic oligonucleotide
  misc_feature 1..20: note = Target: FXN; (-) strand; PAM type: NNAGAAW; PAM sequence: AAAGAAT
  source 1..20: mol_type = other DNA
gcaaataccgttagtctttc

SEQ ID NO: 5610 - DNA, 20 bp, synthetic construct
  misc_feature 1..20: note = Description of Artificial Sequence: Synthetic oligonucleotide
  misc_feature 1..20: note = Target: FXN; (-) strand; PAM type: NNAGAAW; PAM sequence: ACAGAAT
  source 1..20: mol_type = other DNA
tgaacaaagcattagagatc

SEQ ID NO: 5611 - DNA, 20 bp, synthetic construct
  misc_feature 1..20: note = Description of Artificial Sequence: Synthetic oligonucleotide
  misc_feature 1..20: note = Target: FXN; (-) strand; PAM type: NNAGAAW; PAM sequence: CTAGAAT
  source 1..20: mol_type = other DNA
atctgtgaattagggccttc

SEQ ID NO: 5612 - DNA, 20 bp, synthetic construct
  misc_feature 1..20: note = Description of Artificial Sequence: Synthetic oligonucleotide
  misc_feature 1..20: note = Target: FXN; (-) strand; PAM type: NNAGAAW; PAM sequence: GAAGAAT
  source 1..20: mol_type = other DNA
tcaagcacagccagggtcag

SEQ ID NO: 5613 - DNA, 20 bp, synthetic construct
  misc_feature 1..20: note = Description of Artificial Sequence: Synthetic oligonucleotide
  misc_feature 1..20: note = Target: FXN; (-) strand; PAM type: NNAGAAW; PAM sequence: GCAGAAT
  source 1..20: mol_type = other DNA
cttgccagttgaatgcctct

SEQ ID NO: 5614 - DNA, 20 bp, synthetic construct
  misc_feature 1..20: note = Description of Artificial Sequence: Synthetic oligonucleotide
  misc_feature 1..20: note = Target: FXN; (-) strand; PAM type: NNAGAAW; PAM sequence: ACAGAAA
  source 1..20: mol_type = other DNA
tccctgattttgctgtgcaa

SEQ ID NO: 5615 - DNA, 20 bp, synthetic construct
  misc_feature 1..20: note = Description of Artificial Sequence: Synthetic oligonucleotide
  misc_feature 1..20: note = Target: FXN; (-) strand; PAM type: NNAGAAW; PAM sequence: CTAGAAA
  source 1..20: mol_type = other DNA
gaggggaggcaccccatgtt

SEQ ID NO: 5616 - DNA, 20 bp, synthetic construct
  misc_feature 1..20: note = Description of Artificial Sequence: Synthetic oligonucleotide
  misc_feature 1..20: note = Target: FXN; (-) strand; PAM type: NNAGAAW; PAM sequence: TCAGAAA
  source 1..20: mol_type = other DNA
ggcctgcttttcatgctttt

SEQ ID NO: 5617 - DNA, 20 bp, synthetic construct
  misc_feature 1..20: note = Description of Artificial Sequence: Synthetic oligonucleotide
  misc_feature 1..20: note = Target: FXN; (-) strand; PAM type: NNAGAAW; PAM sequence: TCAGAAA
  source 1..20: mol_type = other DNA
gacattcagcggggtgagtg

SEQ ID NO: 5618 - DNA, 20 bp, synthetic construct
  misc_feature 1..20: note = Description of Artificial Sequence: Synthetic oligonucleotide
  misc_feature 1..20: note = Target: FXN; (-) strand; PAM type: NNAGAAW; PAM sequence: ACAGAAT
  source 1..20: mol_type = other DNA
aggacccaggtacagggaaa

SEQ ID NO: 5619 - DNA, 20 bp, synthetic construct
  misc_feature 1..20: note = Description of Artificial Sequence: Synthetic oligonucleotide
  misc_feature 1..20: note = Target: FXN; (-) strand; PAM type: NNAGAAW; PAM sequence: AGAGAAA
  source 1..20: mol_type = other DNA
tgaaccaatgtgaaaggctg

SEQ ID NO: 5620 - DNA, 20 bp, synthetic construct
  misc_feature 1..20: note = Description of Artificial Sequence: Synthetic oligonucleotide
  misc_feature 1..20: note = Target: FXN; (-) strand; PAM type: NNAGAAW; PAM sequence: TCAGAAA
  source 1..20: mol_type = other DNA
aaaaaaaaacaaaacaaaaa

SEQ ID NO: 5621 - DNA, 20 bp, synthetic construct
  misc_feature 1..20: note = Description of Artificial Sequence: Synthetic oligonucleotide
  misc_feature 1..20: note = Target: FXN; (-) strand; PAM type: NNAGAAW; PAM sequence: TAAGAAA
  source 1..20: mol_type = other DNA
taattaaaaataaataaaat

SEQ ID NO: 5622 - DNA, 20 bp, synthetic construct
  misc_feature 1..20: note = Description of Artificial Sequence: Synthetic oligonucleotide
  misc_feature 1..20: note = Target: FXN; (-) strand; PAM type: NNAGAAW; PAM sequence: CTAGAAT
  source 1..20: mol_type = other DNA
gcactgatgcccacgtgtcc

SEQ ID NO: 5623 - DNA, 20 bp, synthetic construct
  misc_feature 1..20: note = Description of Artificial Sequence: Synthetic oligonucleotide
  misc_feature 1..20: note = Target: FXN; (-) strand; PAM type: NNAGAAW; PAM sequence: GAAGAAA
  source 1..20: mol_type = other DNA
acagagtgcatgggagccca

SEQ ID NO: 5624 - DNA, 20 bp, synthetic construct
  misc_feature 1..20: note = Description of Artificial Sequence: Synthetic oligonucleotide
  misc_feature 1..20: note = Target: FXN; (-) strand; PAM type: NNAGAAW; PAM sequence: CAAGAAT
  source 1..20: mol_type = other DNA
tatatcttctggaacaattc

SEQ ID NO: 5625 - DNA, 20 bp, synthetic construct
  misc_feature 1..20: note = Description of Artificial Sequence: Synthetic oligonucleotide
  misc_feature 1..20: note = Target: FXN; (-) strand; PAM type: NNAGAAW; PAM sequence: CTAGAAA
  source 1..20: mol_type = other DNA
aaattgactggagtaaagct

SEQ ID NO: 5626 - DNA, 20 bp, synthetic construct
  misc_feature 1..20: note = Description of Artificial Sequence: Synthetic oligonucleotide
  misc_feature 1..20: note = Target: FXN; (-) strand; PAM type: NNAGAAW; PAM sequence: CAAGAAA
  source 1..20: mol_type = other DNA
gattccacaaatgctgcccc

SEQ ID NO: 5627 - DNA, 20 bp, synthetic construct
  misc_feature 1..20: note = Description of Artificial Sequence: Synthetic oligonucleotide
  misc_feature 1..20: note = Target: FXN; (-) strand; PAM type: NNAGAAW; PAM sequence: ATAGAAA
  source 1..20: mol_type = other DNA
gacaatccaaaaaatcttcc

SEQ ID NO: 5628 - DNA, 20 bp, synthetic construct
  misc_feature 1..20: note = Description of Artificial Sequence: Synthetic oligonucleotide
  misc_feature 1..20: note = Target: FXN; (-) strand; PAM type: NNAGAAW; PAM sequence: AAAGAAT
  source 1..20: mol_type = other DNA
cttcttgcagtaaatccttc

SEQ ID NO: 5629 - DNA, 20 bp, synthetic construct
  misc_feature 1..20: note = Description of Artificial Sequence: Synthetic oligonucleotide
  misc_feature 1..20: note = Target: FXN; (-) strand; PAM type: NNAGAAW; PAM sequence: TAAGAAA
  source 1..20: mol_type = other DNA
tggcagtcacagagcacaaa

SEQ ID NO: 5630 - DNA, 20 bp, synthetic construct
  misc_feature 1..20: note = Description of Artificial Sequence: Synthetic oligonucleotide
  misc_feature 1..20: note = Target: FXN; (-) strand; PAM type: NNAGAAW; PAM sequence: GGAGAAA
  source 1..20: mol_type = other DNA
gacacgtatgtgaatatgtg

SEQ ID NO: 5631 - DNA, 20 bp, synthetic construct
  misc_feature 1..20: note = Description of Artificial Sequence: Synthetic oligonucleotide
  misc_feature 1..20: note = Target: FXN; (-) strand; PAM type: NNAGAAW; PAM sequence: TAAGAAA
  source 1..20: mol_type = other DNA
ctaataaatccttctttaag

SEQ ID NO: 5632 - DNA, 20 bp, synthetic construct
  misc_feature 1..20: note = Description of Artificial Sequence: Synthetic oligonucleotide
  misc_feature 1..20: note = Target: FXN; (-) strand; PAM type: NNAGAAW; PAM sequence: TCAGAAA
  source 1..20: mol_type = other DNA
actcaaaaaataattttatt

SEQ ID NO: 5633 - DNA, 20 bp, synthetic construct
  misc_feature 1..20: note = Description of Artificial Sequence: Synthetic oligonucleotide
  misc_feature 1..20: note = Target: FXN; (-) strand; PAM type: NNAGAAW; PAM sequence: ACAGAAT
  source 1..20: mol_type = other DNA
gtacttttccagtttgcttg

SEQ ID NO: 5634 - DNA, 20 bp, synthetic construct
  misc_feature 1..20: note = Description of Artificial Sequence: Synthetic oligonucleotide
  misc_feature 1..20: note = Target: FXN; (-) strand; PAM type: NNAGAAW; PAM sequence: ATAGAAA
  source 1..20: mol_type = other DNA
gtgagatcctgtctcaaaaa

SEQ ID NO: 5635 - DNA, 20 bp, synthetic construct
  misc_feature 1..20: note = Description of Artificial Sequence: Synthetic oligonucleotide
  misc_feature 1..20: note = Target: FXN; (-) strand; PAM type: NNAGAAW; PAM sequence: ATAGAAA
  source 1..20: mol_type = other DNA
cactcaagaaggtaaaaata

SEQ ID NO: 5636 - DNA, 20 bp, synthetic construct
  misc_feature 1..20: note = Description of Artificial Sequence: Synthetic oligonucleotide
  misc_feature 1..20: note = Target: FXN; (-) strand; PAM type: NNAGAAW; PAM sequence: TCAGAAT
  source 1..20: mol_type = other DNA
cgataaatggttccagggaa

SEQ ID NO: 5637 - DNA, 20 bp, synthetic construct
  misc_feature 1..20: note = Description of Artificial Sequence: Synthetic oligonucleotide
  misc_feature 1..20: note = Target: FXN; (-) strand; PAM type: NNAGAAW; PAM sequence: TCAGAAT
  source 1..20: mol_type = other DNA
agaggtggcaaaagcatctg

SEQ ID NO: 5638 - DNA, 20 bp, synthetic construct
  misc_feature 1..20: note = Description of Artificial Sequence: Synthetic oligonucleotide
  misc_feature 1..20: note = Target: FXN; (-) strand; PAM type: NNAGAAW; PAM sequence: CAAGAAT
  source 1..20: mol_type = other DNA
agcagaagataactatgtgc

SEQ ID NO: 5639 - DNA, 20 bp, synthetic construct
  misc_feature 1..20: note = Description of Artificial Sequence: Synthetic oligonucleotide
  misc_feature 1..20: note = Target: FXN; (-) strand; PAM type: NNAGAAW; PAM sequence: AAAGAAA
  source 1..20: mol_type = other DNA
gagcaagactctgtctcaaa

SEQ ID NO: 5640 - DNA, 20 bp, synthetic construct
  misc_feature 1..20: note = Description of Artificial Sequence: Synthetic oligonucleotide
  misc_feature 1..20: note = Target: FXN; (-) strand; PAM type: NNAGAAW; PAM sequence: AGAGAAT
  source 1..20: mol_type = other DNA
gctactcgggaggctgaggc

SEQ ID NO: 5641 - DNA, 20 bp, synthetic construct
  misc_feature 1..20: note = Description of Artificial Sequence: Synthetic oligonucleotide
  misc_feature 1..20: note = Target: FXN; (-) strand; PAM type: NNAGAAW; PAM sequence: GAAGAAA
  source 1..20: mol_type = other DNA
aggtctgactttccacagga

SEQ ID NO: 5642 - DNA, 20 bp, synthetic construct
  misc_feature 1..20: note = Description of Artificial Sequence: Synthetic oligonucleotide
  misc_feature 1..20: note = Target: FXN; (-) strand; PAM type: NNAGAAW; PAM sequence: ACAGAAA
  source 1..20: mol_type = other DNA
taacaatgttcccacagatc

SEQ ID NO: 5643 - DNA, 20 bp, synthetic construct
  misc_feature 1..20: note = Description of Artificial Sequence: Synthetic oligonucleotide
  misc_feature 1..20: note = Target: FXN; (-) strand; PAM type: NNAGAAW; PAM sequence: AGAGAAA
  source 1..20: mol_type = other DNA
cacagcctaggcaatcttac

SEQ ID NO: 5644 - DNA, 20 bp, synthetic construct
  misc_feature 1..20: note = Description of Artificial Sequence: Synthetic oligonucleotide
  misc_feature 1..20: note = Target: FXN; (-) strand; PAM type: NNAGAAW; PAM sequence: TAAGAAA
  source 1..20: mol_type = other DNA
gaaaaggaggaaggtggata

SEQ ID NO: 5645 - DNA, 20 bp, synthetic construct
  misc_feature 1..20: note = Description of Artificial Sequence: Synthetic oligonucleotide
  misc_feature 1..20: note = Target: FXN; (-) strand; PAM type: NNAGAAW; PAM sequence: AGAGAAA
  source 1..20: mol_type = other DNA
tgtagctagatgatgggctg

SEQ ID NO: 5646 - DNA, 20 bp, synthetic construct
  misc_feature 1..20: note = Description of Artificial Sequence: Synthetic oligonucleotide
  misc_feature 1..20: note = Target: FXN; (-) strand; PAM type: NNAGAAW; PAM sequence: TAAGAAA
  source 1..20: mol_type = other DNA
gaaaagcacatttttcaggc

SEQ ID NO: 5647 - DNA, 20 bp, synthetic construct
  misc_feature 1..20: note = Description of Artificial Sequence: Synthetic oligonucleotide
  misc_feature 1..20: note = Target: FXN; (-) strand; PAM type: NNAGAAW; PAM sequence: TCAGAAA
  source 1..20: mol_type = other DNA
tcagtgcctgaacagttcag

SEQ ID NO: 5648 - DNA, 20 bp, synthetic construct
  misc_feature 1..20: note = Description of Artificial Sequence: Synthetic oligonucleotide
  misc_feature 1..20: note = Target: FXN; (-) strand; PAM type: NNAGAAW; PAM sequence: GTAGAAA
  source 1..20: mol_type = other DNA
aaagtgttgagtgtgagggg

SEQ ID NO: 5649 - DNA, 20 bp, synthetic construct
  misc_feature 1..20: note = Description of Artificial Sequence: Synthetic oligonucleotide
  misc_feature 1..20: note = Target: FXN; (-) strand; PAM type: NNAGAAW; PAM sequence: GTAGAAT
  source 1..20: mol_type = other DNA
tgccaagaacatttttcagg

SEQ ID NO: 5650 - DNA, 20 bp, synthetic construct
  misc_feature 1..20: note = Description of Artificial Sequence: Synthetic oligonucleotide
  misc_feature 1..20: note = Target: FXN; (+) strand; PAM type: NNAGAAW; PAM sequence: CAAGAAT
  source 1..20: mol_type = other DNA
tgcaaattccttagttaaaa

SEQ ID NO: 5651 - DNA, 20 bp, synthetic construct
  misc_feature 1..20: note = Description of Artificial Sequence: Synthetic oligonucleotide
  misc_feature 1..20: note = Target: FXN; (+) strand; PAM type: NNAGAAW; PAM sequence: TCAGAAA
  source 1..20: mol_type = other DNA
gaccctaaagggagccactc

SEQ ID NO: 5652 - DNA, 20 bp, synthetic construct
  misc_feature 1..20: note = Description of Artificial Sequence: Synthetic oligonucleotide
  misc_feature 1..20: note = Target: FXN; (+) strand; PAM type: NNAGAAW; PAM sequence: ATAGAAA
  source 1..20: mol_type = other DNA
gctgtttctcttccctcatt

SEQ ID NO: 5653 - DNA, 20 bp, synthetic construct
  misc_feature 1..20: note = Description of Artificial Sequence: Synthetic oligonucleotide
  misc_feature 1..20: note = Target: FXN; (+) strand; PAM type: NNAGAAW; PAM sequence: CAAGAAT
  source 1..20: mol_type = other DNA
agctgaagcccaggactaag

SEQ ID NO: 5654 - DNA, 20 bp, synthetic construct
  misc_feature 1..20: note = Description of Artificial Sequence: Synthetic oligonucleotide
  misc_feature 1..20: note = Target: FXN; (+) strand; PAM type: NNAGAAW; PAM sequence: TGAGAAT
  source 1..20: mol_type = other DNA
caggactaagcaagaatgag

SEQ ID NO: 5655 - DNA, 20 bp, synthetic construct
  misc_feature 1..20: note = Description of Artificial Sequence: Synthetic oligonucleotide
  misc_feature 1..20: note = Target: FXN; (+) strand; PAM type: NNAGAAW; PAM sequence: GAAGAAA
  source 1..20: mol_type = other DNA
tagcaacagtgattgctact

SEQ ID NO: 5656 - DNA, 20 bp, synthetic construct
  misc_feature 1..20: note = Description of Artificial Sequence: Synthetic oligonucleotide
  misc_feature 1..20: note = Target: FXN; (+) strand; PAM type: NNAGAAW; PAM sequence: AAAGAAT
  source 1..20: mol_type = other DNA
tgaagaaacaggaggccaac

SEQ ID NO: 5657 - DNA, 20 bp, synthetic construct
  misc_feature 1..20: note = Description of Artificial Sequence: Synthetic oligonucleotide
  misc_feature 1..20: note = Target: FXN; (+) strand; PAM type: NNAGAAW; PAM sequence: GAAGAAA
  source 1..20: mol_type = other DNA
agttgagtcctacaggatat

SEQ ID NO: 5658 - DNA, 20 bp, synthetic construct
  misc_feature 1..20: note = Description of Artificial Sequence: Synthetic oligonucleotide
  misc_feature 1..20: note = Target: FXN; (+) strand; PAM type: NNAGAAW; PAM sequence: GAAGAAT
  source 1..20: mol_type = other DNA
ctgggggctggaatttatct

SEQ ID NO: 5659 - DNA, 20 bp, synthetic construct
  misc_feature 1..20: note = Description of Artificial Sequence: Synthetic oligonucleotide
  misc_feature 1..20: note = Target: FXN; (+) strand; PAM type: NNAGAAW; PAM sequence: AGAGAAT
  source 1..20: mol_type = other DNA
tcagtgtcagcatcccaaaa

SEQ ID NO: 5660 - DNA, 20 bp, synthetic construct
  misc_feature 1..20: note = Description of Artificial Sequence: Synthetic oligonucleotide
  misc_feature 1..20: note = Target: FXN; (+) strand; PAM type: NNAGAAW; PAM sequence: ACAGAAT
  source 1..20: mol_type = other DNA
actgcatttcagcctgggta

SEQ ID NO: 5661 - DNA, 20 bp, synthetic construct
  misc_feature 1..20: note = Description of Artificial Sequence: Synthetic oligonucleotide
  misc_feature 1..20: note = Target: FXN; (+) strand; PAM type: NNAGAAW; PAM sequence: GGAGAAT
  source 1..20: mol_type = other DNA
caaacccgaattcgaaggga

SEQ ID NO: 5662 - DNA, 20 bp, synthetic construct
  misc_feature 1..20: note = Description of Artificial Sequence: Synthetic oligonucleotide
  misc_feature 1..20: note = Target: FXN; (+) strand; PAM type: NNAGAAW; PAM sequence: TAAGAAA
  source 1..20: mol_type = other DNA
gagagcttcctctgtcatgc

SEQ ID NO: 5663 - DNA, 20 bp, synthetic construct
  misc_feature 1..20: note = Description of Artificial Sequence: Synthetic oligonucleotide
  misc_feature 1..20: note = Target: FXN; (+) strand; PAM type: NNAGAAW; PAM sequence: TTAGAAT
  source 1..20: mol_type = other DNA
ttctgaaactttaaagcaca

SEQ ID NO: 5664 - DNA, 20 bp, synthetic construct
  misc_feature 1..20: note = Description of Artificial Sequence: Synthetic oligonucleotide
  misc_feature 1..20: note = Target: FXN; (+) strand; PAM type: NNAGAAW; PAM sequence: CGAGAAT
  source 1..20: mol_type = other DNA
gagattctgattcagtagat

SEQ ID NO: 5665 - DNA, 20 bp, synthetic construct
  misc_feature 1..20: note = Description of Artificial Sequence: Synthetic oligonucleotide
  misc_feature 1..20: note = Target: FXN; (+) strand; PAM type: NNAGAAW; PAM sequence: TGAGAAT
  source 1..20: mol_type = other DNA
agtagatcgagaatagggcc

SEQ ID NO: 5666 - DNA, 20 bp, synthetic construct
  misc_feature 1..20: note = Description of Artificial Sequence: Synthetic oligonucleotide
  misc_feature 1..20: note = Target: FXN; (+) strand; PAM type: NNAGAAW; PAM sequence: GGAGAAA
  source 1..20: mol_type = other DNA
ttgactacctccaaggaagt

SEQ ID NO: 5667 - DNA, 20 bp, synthetic construct
  misc_feature 1..20: note = Description of Artificial Sequence: Synthetic oligonucleotide
  misc_feature 1..20: note = Target: FXN; (+) strand; PAM type: NNAGAAW; PAM sequence: ACAGAAT
  source 1..20: mol_type = other DNA
cagctactctggaggctgag

SEQ ID NO: 5668 - DNA, 20 bp, synthetic construct
  misc_feature 1..20: note = Description of Artificial Sequence: Synthetic oligonucleotide
  misc_feature 1..20: note = Target: FXN; (+) strand; PAM type: NNAGAAW; PAM sequence: GCAGAAT
  source 1..20: mol_type = other DNA
aggagggcttctcaatcttg

SEQ ID NO: 5669 - DNA, 20 bp, synthetic construct
  misc_feature 1..20: note = Description of Artificial Sequence: Synthetic oligonucleotide
  misc_feature 1..20: note = Target: FXN; (+) strand; PAM type: NNAGAAW; PAM sequence: CTAGAAT
  source 1..20: mol_type = other DNA
aacagtatttaagcagctgc

SEQ ID NO: 5670 - DNA, 20 bp, synthetic construct
  misc_feature 1..20: note = Description of Artificial Sequence: Synthetic oligonucleotide
  misc_feature 1..20: note = Target: FXN; (+) strand; PAM type: NNAGAAW; PAM sequence: CCAGAAT
  source 1..20: mol_type = other DNA
cacagaaggatgtctctcat

SEQ ID NO: 5671 - DNA, 20 bp, synthetic construct
  misc_feature 1..20: note = Description of Artificial Sequence: Synthetic oligonucleotide
  misc_feature 1..20: note = Target: FXN; (+) strand; PAM type: NNAGAAW; PAM sequence: GAAGAAA
  source 1..20: mol_type = other DNA
ctaaagcatatataaaatgt

SEQ ID NO: 5672 - DNA, 20 bp, synthetic construct
  misc_feature 1..20: note = Description of Artificial Sequence: Synthetic oligonucleotide
  misc_feature 1..20: note = Target: FXN; (+) strand; PAM type: NNAGAAW; PAM sequence: ACAGAAA
  source 1..20: mol_type = other DNA
gcatccctttgtaatatgta

SEQ ID NO: 5673 - DNA, 20 bp, synthetic construct
  misc_feature 1..20: note = Description of Artificial Sequence: Synthetic oligonucleotide
  misc_feature 1..20: note = Target: FXN; (+) strand; PAM type: NNAGAAW; PAM sequence: GGAGAAT
  source 1..20: mol_type = other DNA
ttactcgggaggctgaggca

SEQ ID NO: 5674 - DNA, 20 bp, synthetic construct
  misc_feature 1..20: note = Description of Artificial Sequence: Synthetic oligonucleotide
  misc_feature 1..20: note = Target: FXN; (+) strand; PAM type: NNAGAAW; PAM sequence: TTAGAAT
  source 1..20: mol_type = other DNA
agctcccaagttcctcctgt

SEQ ID NO: 5675 - DNA, 20 bp, synthetic construct
  misc_feature 1..20: note = Description of Artificial Sequence: Synthetic oligonucleotide
  misc_feature 1..20: note = Target: FXN; (+) strand; PAM type: NNAGAAW; PAM sequence: GCAGAAT
  source 1..20: mol_type = other DNA
gaggtgaaactttcagagct

SEQ ID NO: 5676 - DNA, 20 bp, synthetic construct
  misc_feature 1..20: note = Description of Artificial Sequence: Synthetic oligonucleotide
  misc_feature 1..20: note = Target: FXN; (+) strand; PAM type: NNAGAAW; PAM sequence: AAAGAAA
  source 1..20: mol_type = other DNA
tttcttcctttggggggtac

SEQ ID NO: 5677 - DNA, 20 bp, synthetic construct
  misc_feature 1..20: note = Description of Artificial Sequence: Synthetic oligonucleotide
  misc_feature 1..20: note = Target: FXN; (+) strand; PAM type: NNAGAAW; PAM sequence: AAAGAAT
  source 1..20: mol_type = other DNA
ggcttgaaaggaggaaaccc

SEQ ID NO: 5678 - DNA, 20 bp, synthetic construct
  misc_feature 1..20: note = Description of Artificial Sequence: Synthetic oligonucleotide
  misc_feature 1..20: note = Target: FXN; (+) strand; PAM type: NNAGAAW; PAM sequence: GAAGAAA
  source 1..20: mol_type = other DNA
atttggcccacattgtgttt

SEQ ID NO: 5679 - DNA, 20 bp, synthetic construct
  misc_feature 1..20: note = Description of Artificial Sequence: Synthetic oligonucleotide
  misc_feature 1..20: note = Target: FXN; (+) strand; PAM type: NNAGAAW; PAM sequence: TTAGAAA
  source 1..20: mol_type = other DNA
cagtgcttaaaagttaggac

SEQ ID NO: 5680 - DNA, 20 bp, synthetic construct
  misc_feature 1..20: note = Description of Artificial Sequence: Synthetic oligonucleotide
  misc_feature 1..20: note = Target: FXN; (+) strand; PAM type: NNAGAAW; PAM sequence: GAAGAAA
  source 1..20: mol_type = other DNA
aaaaaaaagaagaagaagaa

SEQ ID NO: 5681 - DNA, 20 bp, synthetic construct
  misc_feature 1..20: note = Description of Artificial Sequence: Synthetic oligonucleotide
  misc_feature 1..20: note = Target: FXN; (+) strand; PAM type: NNAGAAW; PAM sequence: AAAGAAA
  source 1..20: mol_type = other DNA
aagaagaagaagaagaaaat

SEQ ID NO: 5682 - DNA, 20 bp, synthetic construct
  misc_feature 1..20: note = Description of Artificial Sequence: Synthetic oligonucleotide
  misc_feature 1..20: note = Target: FXN; (+) strand; PAM type: NNAGAAW; PAM sequence: GGAGAAT
  source 1..20: mol_type = other DNA
ctactccagaggctgcggca

SEQ ID NO: 5683 - DNA, 20 bp, synthetic construct
  misc_feature 1..20: note = Description of Artificial Sequence: Synthetic oligonucleotide
  misc_feature 1..20: note = Target: FXN; (+) strand; PAM type: NNAGAAW; PAM sequence: GGAGAAT
  source 1..20: mol_type = other DNA
tcagcagagtttttaattta

SEQ ID NO: 5684 - DNA, 20 bp, synthetic construct
  misc_feature 1..20: note = Description of Artificial Sequence: Synthetic oligonucleotide
  misc_feature 1..20: note = Target: FXN; (+) strand; PAM type: NNAGAAW; PAM sequence: TCAGAAA
  source 1..20: mol_type = other DNA
cccctggtctccaaaattca

SEQ ID NO: 5685 - DNA, 20 bp, synthetic construct
  misc_feature 1..20: note = Description of Artificial Sequence: Synthetic oligonucleotide
  misc_feature 1..20: note = Target: FXN; (+) strand; PAM type: NNAGAAW; PAM sequence: ACAGAAA
  source 1..20: mol_type = other DNA
acttctaaagcagctgttca

SEQ ID NO: 5686 - DNA, 20 bp, synthetic construct
  misc_feature 1..20: note = Description of Artificial Sequence: Synthetic oligonucleotide
  misc_feature 1..20: note = Target: FXN; (+) strand; PAM type: NNAGAAW; PAM sequence: ACAGAAT
  source 1..20: mol_type = other DNA
aaagcagctgttcaacagaa

SEQ ID NO: 5687 - DNA, 20 bp, synthetic construct
  misc_feature 1..20: note = Description of Artificial Sequence: Synthetic oligonucleotide
  misc_feature 1..20: note = Target: FXN; (+) strand; PAM type: NNAGAAW; PAM sequence: AAAGAAA
  source 1..20: mol_type = other DNA
attctacattttctagttaa

SEQ ID NO: 5688 - DNA, 20 bp, synthetic construct
  misc_feature 1..20: note = Description of Artificial Sequence: Synthetic oligonucleotide
  misc_feature 1..20: note = Target: FXN; (+) strand; PAM type: NNAGAAW; PAM sequence: TGAGAAT
  source 1..20: mol_type = other DNA
ctactcgggaggctgaggca

SEQ ID NO: 5689 - DNA, 20 bp, synthetic construct
  misc_feature 1..20: note = Description of Artificial Sequence: Synthetic oligonucleotide
  misc_feature 1..20: note = Target: FXN; (+) strand; PAM type: NNAGAAW; PAM sequence: CAAGAAT
  source 1..20: mol_type = other DNA
atctggctactcagcagaac

SEQ ID NO: 5690 - DNA, 20 bp, synthetic construct
  misc_feature 1..20: note = Description of Artificial Sequence: Synthetic oligonucleotide
  misc_feature 1..20: note = Target: FXN; (+) strand; PAM type: NNAGAAW; PAM sequence: ACAGAAA
  source 1..20: mol_type = other DNA
ctcagcagaaccaagaatcc

SEQ ID NO: 5691 - DNA, 20 bp, synthetic construct
  misc_feature 1..20: note = Description of Artificial Sequence: Synthetic oligonucleotide
  misc_feature 1..20: note = Target: FXN; (+) strand; PAM type: NNAGAAW; PAM sequence: ACAGAAT
  source 1..20: mol_type = other DNA
tccattttctgttgcttgtg

SEQ ID NO: 5692 - DNA, 20 bp, synthetic construct
  misc_feature 1..20: note = Description of Artificial Sequence: Synthetic oligonucleotide
  misc_feature 1..20: note = Target: FXN; (+) strand; PAM type: NNAGAAW; PAM sequence: ATAGAAA
  source 1..20: mol_type = other DNA
caatttacacaagtttacac

SEQ ID NO: 5693 - DNA, 20 bp, synthetic construct
  misc_feature 1..20: note = Description of Artificial Sequence: Synthetic oligonucleotide
  misc_feature 1..20: note = Target: FXN; (+) strand; PAM type: NNAGAAW; PAM sequence: GGAGAAT
  source 1..20: mol_type = other DNA
ctactcgggacgctgaggca

SEQ ID NO: 5694 - DNA, 20 bp, synthetic construct
  misc_feature 1..20: note = Description of Artificial Sequence: Synthetic oligonucleotide
  misc_feature 1..20: note = Target: FXN; (+) strand; PAM type: NNAGAAW; PAM sequence: AAAGAAA
  source 1..20: mol_type = other DNA
acagagcgagactgcatctc

SEQ ID NO: 5695 - DNA, 20 bp, synthetic construct
  misc_feature 1..20: note = Description of Artificial Sequence: Synthetic oligonucleotide
  misc_feature 1..20: note = Target: FXN; (+) strand; PAM type: NNAGAAW; PAM sequence: TAAGAAA
  source 1..20: mol_type = other DNA
tttcccaccctccaggactc

SEQ ID NO: 5696 - DNA, 20 bp, synthetic construct
  misc_feature 1..20: note = Description of Artificial Sequence: Synthetic oligonucleotide
  misc_feature 1..20: note = Target: FXN; (+) strand; PAM type: NNAGAAW; PAM sequence: ATAGAAT
  source 1..20: mol_type = other DNA
ccctgacaccaggttaagag

SEQ ID NO: 5697 - DNA, 20 bp, synthetic construct
  misc_feature 1..20: note = Description of Artificial Sequence: Synthetic oligonucleotide
  misc_feature 1..20: note = Target: FXN; (+) strand; PAM type: NNAGAAW; PAM sequence: TCAGAAT
  source 1..20: mol_type = other DNA
gttcctttcaggtgaatttc

SEQ ID NO: 5698 - DNA, 20 bp, synthetic construct
  misc_feature 1..20: note = Description of Artificial Sequence: Synthetic oligonucleotide
  misc_feature 1..20: note = Target: FXN; (+) strand; PAM type: NNAGAAW; PAM sequence: CCAGAAA
  source 1..20: mol_type = other DNA
ctgggcctgagacttcaggc

SEQ ID NO: 5699 - DNA, 20 bp, synthetic construct
  misc_feature 1..20: note = Description of Artificial Sequence: Synthetic oligonucleotide
  misc_feature 1..20: note = Target: FXN; (+) strand; PAM type: NNAGAAW; PAM sequence: TTAGAAA
  source 1..20: mol_type = other DNA
gacatggctgccaggtggct

SEQ ID NO: 5700 - DNA, 20 bp, synthetic construct
  misc_feature 1..20: note = Description of Artificial Sequence: Synthetic oligonucleotide
  misc_feature 1..20: note = Target: FXN; (+) strand; PAM type: NNAGAAW; PAM sequence: GGAGAAT
  source 1..20: mol_type = other DNA
ctactcaggaggctgaggca

SEQ ID NO: 5701 - DNA, 20 bp, synthetic construct
  misc_feature 1..20: note = Description of Artificial Sequence: Synthetic oligonucleotide
  misc_feature 1..20: note = Target: FXN; (+) strand; PAM type: NNAGAAW; PAM sequence: TCAGAAA
  source 1..20: mol_type = other DNA
caacagagcaagactccgtc

SEQ ID NO: 5702 - DNA, 20 bp, synthetic construct
  misc_feature 1..20: note = Description of Artificial Sequence: Synthetic oligonucleotide
  misc_feature 1..20: note = Target: FXN; (+) strand; PAM type: NNAGAAW; PAM sequence: ACAGAAT
  source 1..20: mol_type = other DNA
ctttgcctccctcaagcaga

SEQ ID NO: 5703 - DNA, 20 bp, synthetic construct
  misc_feature 1..20: note = Description of Artificial Sequence: Synthetic oligonucleotide
  misc_feature 1..20: note = Target: FXN; (+) strand; PAM type: NNAGAAW; PAM sequence: GTAGAAT
  source 1..20: mol_type = other DNA
tattaaattggcaaaagcag

SEQ ID NO: 5704 - DNA, 20 bp, synthetic construct
  misc_feature 1..20: note = Description of Artificial Sequence: Synthetic oligonucleotide
  misc_feature 1..20: note = Target: FXN; (+) strand; PAM type: NNAGAAW; PAM sequence: GAAGAAA
  source 1..20: mol_type = other DNA
ttttatgattaaaaacagcc

SEQ ID NO: 5705 - DNA, 20 bp, synthetic construct
  misc_feature 1..20: note = Description of Artificial Sequence: Synthetic oligonucleotide
  misc_feature 1..20: note = Target: FXN; (+) strand; PAM type: NNAGAAW; PAM sequence: AGAGAAA
  source 1..20: mol_type = other DNA
gaggctgtgatgttccttac

SEQ ID NO: 5706 - DNA, 20 bp, synthetic construct
  misc_feature 1..20: note = Description of Artificial Sequence: Synthetic oligonucleotide
  misc_feature 1..20: note = Target: FXN; (+) strand; PAM type: NNAGAAW; PAM sequence: ACAGAAA
  source 1..20: mol_type = other DNA
attacataaggtgtctttaa

SEQ ID NO: 5707 - DNA, 20 bp, synthetic construct
  misc_feature 1..20: note = Description of Artificial Sequence: Synthetic oligonucleotide
  misc_feature 1..20: note = Target: FXN; (+) strand; PAM type: NNAGAAW; PAM sequence: CAAGAAT
  source 1..20: mol_type = other DNA
actttgtagcacataactac

SEQ ID NO: 5708 - DNA, 20 bp, synthetic construct
  misc_feature 1..20: note = Description of Artificial Sequence: Synthetic oligonucleotide
  misc_feature 1..20: note = Target: FXN; (+) strand; PAM type: NNAGAAW; PAM sequence: GTAGAAT
  source 1..20: mol_type = other DNA
tcaagcagatggagaacact

SEQ ID NO: 5709 - DNA, 20 bp, synthetic construct
  misc_feature 1..20: note = Description of Artificial Sequence: Synthetic oligonucleotide
  misc_feature 1..20: note = Target: FXN; (+) strand; PAM type: NNAGAAW; PAM sequence: GGAGAAT
  source 1..20: mol_type = other DNA
catggcaaccagtgaccttt

SEQ ID NO: 5710 - DNA, 20 bp, synthetic construct
  misc_feature 1..20: note = Description of Artificial Sequence: Synthetic oligonucleotide
  misc_feature 1..20: note = Target: FXN; (+) strand; PAM type: NNAGAAW; PAM sequence: GGAGAAT
  source 1..20: mol_type = other DNA
acgggcttagagagacacag

SEQ ID NO: 5711 - DNA, 20 bp, synthetic construct
  misc_feature 1..20: note = Description of Artificial Sequence: Synthetic oligonucleotide
  misc_feature 1..20: note = Target: FXN; (+) strand; PAM type: NNAGAAW; PAM sequence: TAAGAAA
  source 1..20: mol_type = other DNA
aggtaaaaaaaaaaaaatcc

SEQ ID NO: 5712 - DNA, 20 bp, synthetic construct
  misc_feature 1..20: note = Description of Artificial Sequence: Synthetic oligonucleotide
  misc_feature 1..20: note = Target: FXN; (+) strand; PAM type: NNAGAAW; PAM sequence: CGAGAAT
  source 1..20: mol_type = other DNA
ctacgcgggaggctgaggca

SEQ ID NO: 5713 - DNA, 20 bp, synthetic construct
  misc_feature 1..20: note = Description of Artificial Sequence: Synthetic oligonucleotide
  misc_feature 1..20: note = Target: FXN; (+) strand; PAM type: NNAGAAW; PAM sequence: GTAGAAA
  source 1..20: mol_type = other DNA
agtgctgcttccccttggaa

SEQ ID NO: 5714 - DNA, 20 bp, synthetic construct
  misc_feature 1..20: note = Description of Artificial Sequence: Synthetic oligonucleotide
  misc_feature 1..20: note = Target: FXN; (+) strand; PAM type: NNAGAAW; PAM sequence: TTAGAAA
  source 1..20: mol_type = other DNA
tgctctggaagagcatacag

SEQ ID NO: 5715 - DNA, 20 bp, synthetic construct
  misc_feature 1..20: note = Description of Artificial Sequence: Synthetic oligonucleotide
  misc_feature 1..20: note = Target: FXN; (+) strand; PAM type: NNAGAAW; PAM sequence: TAAGAAA
  source 1..20: mol_type = other DNA
gaagagaggataattttttt

SEQ ID NO: 5716 - DNA, 20 bp, synthetic construct
  misc_feature 1..20: note = Description of Artificial Sequence: Synthetic oligonucleotide
  misc_feature 1..20: note = Target: FXN; (+) strand; PAM type: NNAGAAW; PAM sequence: TTAGAAA
  source 1..20: mol_type = other DNA
agcaacatattccctttttc

SEQ ID NO: 5717 - DNA, 20 bp, synthetic construct
  misc_feature 1..20: note = Description of Artificial Sequence: Synthetic oligonucleotide
  misc_feature 1..20: note = Target: FXN; (+) strand; PAM type: NNAGAAW; PAM sequence: CCAGAAA
  source 1..20: mol_type = other DNA
ccttgtccaagttccattgg

SEQ ID NO: 5718 - DNA, 20 bp, synthetic construct
  misc_feature 1..20: note = Description of Artificial Sequence: Synthetic oligonucleotide
  misc_feature 1..20: note = Target: FXN; (+) strand; PAM type: NNAGAAW; PAM sequence: TCAGAAA
  source 1..20: mol_type = other DNA
aactgcaactgtaactccat

SEQ ID NO: 5719 - DNA, 20 bp, synthetic construct
  misc_feature 1..20: note = Description of Artificial Sequence: Synthetic oligonucleotide
  misc_feature 1..20: note = Target: FXN; (+) strand; PAM type: NNAGAAW; PAM sequence: GGAGAAT
  source 1..20: mol_type = other DNA
ctactcgggagcctgaggca

SEQ ID NO: 5720 - DNA, 20 bp, synthetic construct
  misc_feature 1..20: note = Description of Artificial Sequence: Synthetic oligonucleotide
  misc_feature 1..20: note = Target: FXN; (+) strand; PAM type: NNAGAAW; PAM sequence: AAAGAAA
  source 1..20: mol_type = other DNA
cgaaattccatctctaaaaa

SEQ ID NO: 5721 - DNA, 20 bp, synthetic construct
  misc_feature 1..20: note = Description of Artificial Sequence: Synthetic oligonucleotide
  misc_feature 1..20: note = Target: FXN; (+) strand; PAM type: NNAGAAW; PAM sequence: ATAGAAT
  source 1..20: mol_type = other DNA
ataccctgtaagctcaagac

SEQ ID NO: 5722 - DNA, 20 bp, synthetic construct
  misc_feature 1..20: note = Description of Artificial Sequence: Synthetic oligonucleotide
  misc_feature 1..20: note = Target: FXN; (+) strand; PAM type: NNAGAAW; PAM sequence: GGAGAAT
  source 1..20: mol_type = other DNA
ctactcgggaggctgaggca

SEQ ID NO: 5723 - DNA, 20 bp, synthetic construct
  misc_feature 1..20: note = Description of Artificial Sequence: Synthetic oligonucleotide
  misc_feature 1..20: note = Target: FXN; (+) strand; PAM type: NNAGAAW; PAM sequence: ACAGAAA
  source 1..20: mol_type = other DNA
taaaatgaaccattttagat

SEQ ID NO: 5724 - DNA, 20 bp, synthetic construct
  misc_feature 1..20: note = Description of Artificial Sequence: Synthetic oligonucleotide
  misc_feature 1..20: note = Target: FXN; (+) strand; PAM type: NNAGAAW; PAM sequence: TCAGAAT
  source 1..20: mol_type = other DNA
cagtgatagcatttactgaa

SEQ ID NO: 5725 - DNA, 20 bp, synthetic construct
  misc_feature 1..20: note = Description of Artificial Sequence: Synthetic oligonucleotide
  misc_feature 1..20: note = Target: FXN; (+) strand; PAM type: NNAGAAW; PAM sequence: CCAGAAA
  source 1..20: mol_type = other DNA
gagccactgcactgcctggc

SEQ ID NO: 5726 - DNA, 20 bp, synthetic construct
  misc_feature 1..20: note = Description of Artificial Sequence: Synthetic oligonucleotide
  misc_feature 1..20: note = Target: FXN; (+) strand; PAM type: NNAGAAW; PAM sequence: AAAGAAA
  source 1..20: mol_type = other DNA
ctgtctcaaaaaaaaaaaaa

SEQ ID NO: 5727 - DNA, 20 bp, synthetic construct
  misc_feature 1..20: note = Description of Artificial Sequence: Synthetic oligonucleotide
  misc_feature 1..20: note = Target: FXN; (+) strand; PAM type: NNAGAAW; PAM sequence: AAAGAAA
  source 1..20: mol_type = other DNA
ctcaaaaaaaaaaaaaaaag

SEQ ID NO: 5728 - DNA, 20 bp, synthetic construct
  misc_feature 1..20: note = Description of Artificial Sequence: Synthetic oligonucleotide
  misc_feature 1..20: note = Target: FXN; (+) strand; PAM type: NNAGAAW; PAM sequence: TAAGAAT
  source 1..20: mol_type = other DNA
tatttttctgtttccccctc

SEQ ID NO: 5729 - DNA, 20 bp, synthetic construct
  misc_feature 1..20: note = Description of Artificial Sequence: Synthetic oligonucleotide
  misc_feature 1..20: note = Target: FXN; (+) strand; PAM type: NNAGAAW; PAM sequence: GAAGAAT
  source 1..20: mol_type = other DNA
gaattttagttcactaaaat

SEQ ID NO: 5730 - DNA, 20 bp, synthetic construct
  misc_feature 1..20: note = Description of Artificial Sequence: Synthetic oligonucleotide
  misc_feature 1..20: note = Target: FXN; (+) strand; PAM type: NNAGAAW; PAM sequence: TTAGAAT
  source 1..20: mol_type = other DNA
gcaagggtctgcctttgggt

SEQ ID NO: 5731 - DNA, 20 bp, synthetic construct
  misc_feature 1..20: note = Description of Artificial Sequence: Synthetic oligonucleotide
  misc_feature 1..20: note = Target: FXN; (+) strand; PAM type: NNAGAAW; PAM sequence: GGAGAAA
  source 1..20: mol_type = other DNA
gtagttcttttttgccagtg

SEQ ID NO: 5732 - DNA, 20 bp, synthetic construct
  misc_feature 1..20: note = Description of Artificial Sequence: Synthetic oligonucleotide
  misc_feature 1..20: note = Target: FXN; (+) strand; PAM type: NNAGAAW; PAM sequence: CCAGAAA
  source 1..20: mol_type = other DNA
ttgatggcaattgactaata

SEQ ID NO: 5733 - DNA, 20 bp, synthetic construct
  misc_feature 1..20: note = Description of Artificial Sequence: Synthetic oligonucleotide
  misc_feature 1..20: note = Target: FXN; (+) strand; PAM type: NNAGAAW; PAM sequence: ATAGAAA
  source 1..20: mol_type = other DNA
tcagccatcagactaaagcg

SEQ ID NO: 5734 - DNA, 20 bp, synthetic construct
  misc_feature 1..20: note = Description of Artificial Sequence: Synthetic oligonucleotide
  misc_feature 1..20: note = Target: FXN; (+) strand; PAM type: NNAGAAW; PAM sequence: GTAGAAA
  source 1..20: mol_type = other DNA
ggctaagttttgtattttta

SEQ ID NO: 5735 - DNA, 20 bp, synthetic construct
  misc_feature 1..20: note = Description of Artificial Sequence: Synthetic oligonucleotide
  misc_feature 1..20: note = Target: FXN; (+) strand; PAM type: NNAGAAW; PAM sequence: TTAGAAA
  source 1..20: mol_type = other DNA
ccagccacaaatctataaat

SEQ ID NO: 5736 - DNA, 20 bp, synthetic construct
  misc_feature 1..20: note = Description of Artificial Sequence: Synthetic oligonucleotide
  misc_feature 1..20: note = Target: FXN; (+) strand; PAM type: NNAGAAW; PAM sequence: GCAGAAA
  source 1..20: mol_type = other DNA
gtctcccatgttcaccttag

SEQ ID NO: 5737 - DNA, 20 bp, synthetic construct
  misc_feature 1..20: note = Description of Artificial Sequence: Synthetic oligonucleotide
  misc_feature 1..20: note = Target: FXN; (+) strand; PAM type: NNAGAAW; PAM sequence: GCAGAAT
  source 1..20: mol_type = other DNA
gaaaccactaaaaaggaagg

SEQ ID NO: 5738 - DNA, 20 bp, synthetic construct
  misc_feature 1..20: note = Description of Artificial Sequence: Synthetic oligonucleotide
  misc_feature 1..20: note = Target: FXN; (+) strand; PAM type: NNAGAAW; PAM sequence: TTAGAAT
  source 1..20: mol_type = other DNA
ttgttgagtcagttgggagc

SEQ ID NO: 5739 - DNA, 20 bp, synthetic construct
  misc_feature 1..20: note = Description of Artificial Sequence: Synthetic oligonucleotide
  misc_feature 1..20: note = Target: FXN; (+) strand; PAM type: NNAGAAW; PAM sequence: TTAGAAA
  source 1..20: mol_type = other DNA
gcaaatgcttaagtgtagat

SEQ ID NO: 5740 - DNA, 20 bp, synthetic construct
  misc_feature 1..20: note = Description of Artificial Sequence: Synthetic oligonucleotide
  misc_feature 1..20: note = Target: FXN; (+) strand; PAM type: NNAGAAW; PAM sequence: TAAGAAT
  source 1..20: mol_type = other DNA
tttggatcaggacctccctc

SEQ ID NO: 5741 - DNA, 20 bp, synthetic construct
  misc_feature 1..20: note = Description of Artificial Sequence: Synthetic oligonucleotide
  misc_feature 1..20: note = Target: FXN; (+) strand; PAM type: NNAGAAW; PAM sequence: AAAGAAT
  source 1..20: mol_type = other DNA
ttaacagagttttattcagc

SEQ ID NO: 5742 - DNA, 20 bp, synthetic construct
  misc_feature 1..20: note = Description of Artificial Sequence: Synthetic oligonucleotide
  misc_feature 1..20: note = Target: FXN; (+) strand; PAM type: NNAGAAW; PAM sequence: CCAGAAT
  source 1..20: mol_type = other DNA
ataaatcgggaaggctgcaa

SEQ ID NO: 5743 - DNA, 20 bp, synthetic construct
  misc_feature 1..20: note = Description of Artificial Sequence: Synthetic oligonucleotide
  misc_feature 1..20: note = Target: FXN; (+) strand; PAM type: NNAGAAW; PAM sequence: ACAGAAA
  source 1..20: mol_type = other DNA
agaggatttaggatttatgc

SEQ ID NO: 5744 - DNA, 20 bp, synthetic construct
  misc_feature 1..20: note = Description of Artificial Sequence: Synthetic oligonucleotide
  misc_feature 1..20: note = Target: FXN; (+) strand; PAM type: NNAGAAW; PAM sequence: GCAGAAA
  source 1..20: mol_type = other DNA
cagaaaaaggaaagtgacat

SEQ ID NO: 5745 - DNA, 20 bp, synthetic construct
  misc_feature 1..20: note = Description of Artificial Sequence: Synthetic oligonucleotide
  misc_feature 1..20: note = Target: FXN; (+) strand; PAM type: NNAGAAW; PAM sequence: GGAGAAT
  source 1..20: mol_type = other DNA
ctacttgggaggctgaggca

SEQ ID NO: 5746 - DNA, 20 bp, synthetic construct
  misc_feature 1..20: note = Description of Artificial Sequence: Synthetic oligonucleotide
  misc_feature 1..20: note = Target: FXN; (+) strand; PAM type: NNAGAAW; PAM sequence: AAAGAAA
  source 1..20: mol_type = other DNA
cgagacttcatcttaaaaaa

SEQ ID NO: 5747 - DNA, 20 bp, synthetic construct
  misc_feature 1..20: note = Description of Artificial Sequence: Synthetic oligonucleotide
  misc_feature 1..20: note = Target: FXN; (+) strand; PAM type: NNAGAAW; PAM sequence: AAAGAAA
  source 1..20: mol_type = other DNA
cttcatcttaaaaaaaaaga

SEQ ID NO: 5748 - DNA, 20 bp, synthetic construct
  misc_feature 1..20: note = Description of Artificial Sequence: Synthetic oligonucleotide
  misc_feature 1..20: note = Target: FXN; (+) strand; PAM type: NNAGAAW; PAM sequence: ACAGAAA
  source 1..20: mol_type = other DNA
aaggaaaatgaaagtgaggt

SEQ ID NO: 5749 - DNA, 20 bp, synthetic construct
  misc_feature 1..20: note = Description of Artificial Sequence: Synthetic oligonucleotide
  misc_feature 1..20: note = Target: FXN; (+) strand; PAM type: NNAGAAW; PAM sequence: TTAGAAA
  source 1..20: mol_type = other DNA
ctagcaagttggtatctact

SEQ ID NO: 5750 - DNA, 20 bp, synthetic construct
  misc_feature 1..20: note = Description of Artificial Sequence: Synthetic oligonucleotide
  misc_feature 1..20: note = Target: FXN; (+) strand; PAM type: NNAGAAW; PAM sequence: GGAGAAT
  source 1..20: mol_type = other DNA
ctactcgggaagctgaggca

SEQ ID NO: 5751 - DNA, 20 bp, synthetic construct
  misc_feature 1..20: note = Description of Artificial Sequence: Synthetic oligonucleotide
  misc_feature 1..20: note = Target: FXN; (+) strand; PAM type: NNAGAAW; PAM sequence: TCAGAAA
  source 1..20: mol_type = other DNA
aattggctagtgcctgcatc

SEQ ID NO: 5752 - DNA, 20 bp, synthetic construct
  misc_feature 1..20: note = Description of Artificial Sequence: Synthetic oligonucleotide
  misc_feature 1..20: note = Target: FXN; (+) strand; PAM type: NNAGAAW; PAM sequence: AGAGAAA
  source 1..20: mol_type = other DNA
aggaataatgatgatgatga

SEQ ID NO: 5753 - DNA, 20 bp, synthetic construct
  misc_feature 1..20: note = Description of Artificial Sequence: Synthetic oligonucleotide
  misc_feature 1..20: note = Target: FXN; (+) strand; PAM type: NNAGAAW; PAM sequence: TAAGAAT
  source 1..20: mol_type = other DNA
gtagtcagttccaaaagcat

SEQ ID NO: 5754 - DNA, 20 bp, synthetic construct
  misc_feature 1..20: note = Description of Artificial Sequence: Synthetic oligonucleotide
  misc_feature 1..20: note = Target: FXN; (+) strand; PAM type: NNAGAAW; PAM sequence: TGAGAAT
  source 1..20: mol_type = other DNA
gttcagttcccacctatgag

SEQ ID NO: 5755 - DNA, 20 bp, synthetic construct
  misc_feature 1..20: note = Description of Artificial Sequence: Synthetic oligonucleotide
  misc_feature 1..20: note = Target: FXN; (+) strand; PAM type: NNAGAAW; PAM sequence: TGAGAAT
  source 1..20: mol_type = other DNA
ttgttcttgcgatagtttac

SEQ ID NO: 5756 - DNA, 20 bp, synthetic construct
  misc_feature 1..20: note = Description of Artificial Sequence: Synthetic oligonucleotide
  misc_feature 1..20: note = Target: FXN; (+) strand; PAM type: NNAGAAW; PAM sequence: TAAGAAA
  source 1..20: mol_type = other DNA
actcctgaattatacagttt

SEQ ID NO: 5757 - DNA, 20 bp, synthetic construct
  misc_feature 1..20: note = Description of Artificial Sequence: Synthetic oligonucleotide
  misc_feature 1..20: note = Target: FXN; (+) strand; PAM type: NNAGAAW; PAM sequence: TAAGAAA
  source 1..20: mol_type = other DNA
accacatgcagcctcagttt

SEQ ID NO: 5758 - DNA, 20 bp, synthetic construct
  misc_feature 1..20: note = Description of Artificial Sequence: Synthetic oligonucleotide
  misc_feature 1..20: note = Target: FXN; (+) strand; PAM type: NNAGAAW; PAM sequence: ACAGAAA
  source 1..20: mol_type = other DNA
gtcaaaagtagtcaaaaatc

SEQ ID NO: 5759 - DNA, 20 bp, synthetic construct
  misc_feature 1..20: note = Description of Artificial Sequence: Synthetic oligonucleotide
  misc_feature 1..20: note = Target: FXN; (+) strand; PAM type: NNAGAAW; PAM sequence: ATAGAAA
  source 1..20: mol_type = other DNA
tcttttttttagtcaaaatc

SEQ ID NO: 5760 - DNA, 20 bp, synthetic construct
  misc_feature 1..20: note = Description of Artificial Sequence: Synthetic oligonucleotide
  misc_feature 1..20: note = Target: FXN; (+) strand; PAM type: NNAGAAW; PAM sequence: ATAGAAA
  source 1..20: mol_type = other DNA
ttttagtcaaaatcatagaa

SEQ ID NO: 5761 - DNA, 20 bp, synthetic construct
  misc_feature 1..20: note = Description of Artificial Sequence: Synthetic oligonucleotide
  misc_feature 1..20: note = Target: FXN; (+) strand; PAM type: NNAGAAW; PAM sequence: AAAGAAA
  source 1..20: mol_type = other DNA
agcgagacctcatctctaca

SEQ ID NO: 5762 - DNA, 20 bp, synthetic construct
  misc_feature 1..20: note = Description of Artificial Sequence: Synthetic oligonucleotide
  misc_feature 1..20: note = Target: FXN; (+) strand; PAM type: NNAGAAW; PAM sequence: AGAGAAT
  source 1..20: mol_type = other DNA
atcgctggttaatgggattg

SEQ ID NO: 5763 - DNA, 20 bp, synthetic construct
  misc_feature 1..20: note = Description of Artificial Sequence: Synthetic oligonucleotide
  misc_feature 1..20: note = Target: FXN; (+) strand; PAM type: NNAGAAW; PAM sequence: ATAGAAA
  source 1..20: mol_type = other DNA
ttgagagaatgcttcatctt

SEQ ID NO: 5764 - DNA, 20 bp, synthetic construct
  misc_feature 1..20: note = Description of Artificial Sequence: Synthetic oligonucleotide
  misc_feature 1..20: note = Target: FXN; (+) strand; PAM type: NNAGAAW; PAM sequence: TCAGAAA
  source 1..20: mol_type = other DNA
tctatacatttgtttttgaa

SEQ ID NO: 5765 - DNA, 20 bp, synthetic construct
  misc_feature 1..20: note = Description of Artificial Sequence: Synthetic oligonucleotide
  misc_feature 1..20: note = Target: FXN; (+) strand; PAM type: NNAGAAW; PAM sequence: TAAGAAT
  source 1..20: mol_type = other DNA
gtgtttgcaaaagtgtgtta

SEQ ID NO: 5766 - DNA, 20 bp, synthetic construct
  misc_feature 1..20: note = Description of Artificial Sequence: Synthetic oligonucleotide
  misc_feature 1..20: note = Target: FXN; (+) strand; PAM type: NNAGAAW; PAM sequence: CTAGAAT
  source 1..20: mol_type = other DNA
ctctcgattggatggaggct

SEQ ID NO: 5767 - DNA, 20 bp, synthetic construct
  misc_feature 1..20: note = Description of Artificial Sequence: Synthetic oligonucleotide
  misc_feature 1..20: note = Target: FXN; (+) strand; PAM type: NNAGAAW; PAM sequence: ACAGAAA
  source 1..20: mol_type = other DNA
ggatggaggctctagaatgc

SEQ ID NO: 5768 - DNA, 20 bp, synthetic construct
  misc_feature 1..20: note = Description of Artificial Sequence: Synthetic oligonucleotide
  misc_feature 1..20: note = Target: FXN; (+) strand; PAM type: NNAGAAW; PAM sequence: GAAGAAT
  source 1..20: mol_type = other DNA
gatgcaccaactagtctttt

SEQ ID NO: 5769 - DNA, 20 bp, synthetic construct
  misc_feature 1..20: note = Description of Artificial Sequence: Synthetic oligonucleotide
  misc_feature 1..20: note = Target: FXN; (+) strand; PAM type: NNAGAAW; PAM sequence: AGAGAAA
  source 1..20: mol_type = other DNA
tgaagaattcaaggctcttt

SEQ ID NO: 5770 - DNA, 20 bp, synthetic construct
  misc_feature 1..20: note = Description of Artificial Sequence: Synthetic oligonucleotide
  misc_feature 1..20: note = Target: FXN; (+) strand; PAM type: NNAGAAW; PAM sequence: GTAGAAA
  source 1..20: mol_type = other DNA
atggtgtattttgtgtactt

SEQ ID NO: 5771 - DNA, 20 bp, synthetic construct
  misc_feature 1..20: note = Description of Artificial Sequence: Synthetic oligonucleotide
  misc_feature 1..20: note = Target: FXN; (+) strand; PAM type: NNAGAAW; PAM sequence: TAAGAAA
  source 1..20: mol_type = other DNA
atgtgacattgtggaccatt

SEQ ID NO: 5772 - DNA, 20 bp, synthetic construct
  misc_feature 1..20: note = Description of Artificial Sequence: Synthetic oligonucleotide
  misc_feature 1..20: note = Target: FXN; (+) strand; PAM type: NNAGAAW; PAM sequence: AAAGAAA
  source 1..20: mol_type = other DNA
tagtgagtccctgtctctgt

SEQ ID NO: 5773 - DNA, 20 bp, synthetic construct
  misc_feature 1..20: note = Description of Artificial Sequence: Synthetic oligonucleotide
  misc_feature 1..20: note = Target: FXN; (+) strand; PAM type: NNAGAAW; PAM sequence: GTAGAAA
  source 1..20: mol_type = other DNA
tgcagcctgtctcattctca

SEQ ID NO: 5774 - DNA, 20 bp, synthetic construct
  misc_feature 1..20: note = Description of Artificial Sequence: Synthetic oligonucleotide
  misc_feature 1..20: note = Target: FXN; (+) strand; PAM type: NNAGAAW; PAM sequence: TAAGAAA
  source 1..20: mol_type = other DNA
ggctgctgttgaagtggttg

SEQ ID NO: 5775 - DNA, 20 bp, synthetic construct
  misc_feature 1..20: note = Description of Artificial Sequence: Synthetic oligonucleotide
  misc_feature 1..20: note = Target: FXN; (+) strand; PAM type: NNAGAAW; PAM sequence: AGAGAAA
  source 1..20: mol_type = other DNA
agtggttgtaagaaagtaaa

SEQ ID NO: 5776 - DNA, 20 bp, synthetic construct
  misc_feature 1..20: note = Description of Artificial Sequence: Synthetic oligonucleotide
  misc_feature 1..20: note = Target: FXN; (+) strand; PAM type: NNAGAAW; PAM sequence: ATAGAAT
  source 1..20: mol_type = other DNA
aagggccagataaaactagc

SEQ ID NO: 5777 - DNA, 20 bp, synthetic construct
  misc_feature 1..20: note = Description of Artificial Sequence: Synthetic oligonucleotide
  misc_feature 1..20: note = Target: FXN; (+) strand; PAM type: NNAGAAW; PAM sequence: TCAGAAT
  source 1..20: mol_type = other DNA
tgtgatctctaatgctttgt

SEQ ID NO: 5778 - DNA, 20 bp, synthetic construct
  misc_feature 1..20: note = Description of Artificial Sequence: Synthetic oligonucleotide
  misc_feature 1..20: note = Target: FXN; (+) strand; PAM type: NNAGAAW; PAM sequence: CTAGAAA
  source 1..20: mol_type = other DNA
agagttcaacaaaaacagca

SEQ ID NO: 5779 - DNA, 20 bp, synthetic construct
  misc_feature 1..20: note = Description of Artificial Sequence: Synthetic oligonucleotide
  misc_feature 1..20: note = Target: FXN; (+) strand; PAM type: NNAGAAW; PAM sequence: GGAGAAA
  source 1..20: mol_type = other DNA
ccagacacacggttatgtct

SEQ ID NO: 5780 - DNA, 20 bp, synthetic construct
  misc_feature 1..20: note = Description of Artificial Sequence: Synthetic oligonucleotide
  misc_feature 1..20: note = Target: FXN; (+) strand; PAM type: NNAGAAW; PAM sequence: TCAGAAT
  source 1..20: mol_type = other DNA
ggaaagtgacatgtcctaag

SEQ ID NO: 5781 - DNA, 20 bp, synthetic construct
  misc_feature 1..20: note = Description of Artificial Sequence: Synthetic oligonucleotide
  misc_feature 1..20: note = Target: FXN; (+) strand; PAM type: NNAGAAW; PAM sequence: CAAGAAA
  source 1..20: mol_type = other DNA
ctaagtcagaatagagtcaa

SEQ ID NO: 5782 - DNA, 20 bp, synthetic construct
  misc_feature 1..20: note = Description of Artificial Sequence: Synthetic oligonucleotide
  misc_feature 1..20: note = Target: FXN; (+) strand; PAM type: NNAGAAW; PAM sequence: GAAGAAA
  source 1..20: mol_type = other DNA
gctactggaaatacagagat

SEQ ID NO: 5783 - DNA, 20 bp, synthetic construct
  misc_feature 1..20: note = Description of Artificial Sequence: Synthetic oligonucleotide
  misc_feature 1..20: note = Target: FXN; (+) strand; PAM type: NNAGAAW; PAM sequence: GCAGAAT
  source 1..20: mol_type = other DNA
ggcggcagtgctagtgatgt

SEQ ID NO: 5784 - DNA, 20 bp, synthetic construct
  misc_feature 1..20: note = Description of Artificial Sequence: Synthetic oligonucleotide
  misc_feature 1..20: note = Target: FXN; (+) strand; PAM type: NNAGAAW; PAM sequence: GGAGAAT
  source 1..20: mol_type = other DNA
aagatgacaagctgagaagg

SEQ ID NO: 5785 - DNA, 20 bp, synthetic construct
  misc_feature 1..20: note = Description of Artificial Sequence: Synthetic oligonucleotide
  misc_feature 1..20: note = Target: FXN; (+) strand; PAM type: NNAGAAW; PAM sequence: ACAGAAA
  source 1..20: mol_type = other DNA
atcggcccaaggtgagatcc

SEQ ID NO: 5786 - DNA, 20 bp, synthetic construct
  misc_feature 1..20: note = Description of Artificial Sequence: Synthetic oligonucleotide
  misc_feature 1..20: note = Target: FXN; (+) strand; PAM type: NNAGAAW; PAM sequence: CAAGAAA
  source 1..20: mol_type = other DNA
aaaccgcagagctgcctgac

SEQ ID NO: 5787 - DNA, 20 bp, synthetic construct
  misc_feature 1..20: note = Description of Artificial Sequence: Synthetic oligonucleotide
  misc_feature 1..20: note = Target: FXN; (+) strand; PAM type: NNAGAAW; PAM sequence: GGAGAAT
  source 1..20: mol_type = other DNA
ctgcttgggagactgagaca

SEQ ID NO: 5788 - DNA, 20 bp, synthetic construct
  misc_feature 1..20: note = Description of Artificial Sequence: Synthetic oligonucleotide
  misc_feature 1..20: note = Target: FXN; (+) strand; PAM type: NNAGAAW; PAM sequence: GAAGAAA
  source 1..20: mol_type = other DNA
tcctggctacaagtccctct

SEQ ID NO: 5789 - DNA, 20 bp, synthetic construct
  misc_feature 1..20: note = Description of Artificial Sequence: Synthetic oligonucleotide
  misc_feature 1..20: note = Target: FXN; (+) strand; PAM type: NNAGAAW; PAM sequence: GAAGAAA
  source 1..20: mol_type = other DNA
caaaacctggcccaggaatt

SEQ ID NO: 5790 - DNA, 20 bp, synthetic construct
  misc_feature 1..20: note = Description of Artificial Sequence: Synthetic oligonucleotide
  misc_feature 1..20: note = Target: FXN; (+) strand; PAM type: NNAGAAW; PAM sequence: TAAGAAA
  source 1..20: mol_type = other DNA
aagactcttccaatttgctg

SEQ ID NO: 5791 - DNA, 20 bp, synthetic construct
  misc_feature 1..20: note = Description of Artificial Sequence: Synthetic oligonucleotide
  misc_feature 1..20: note = Target: FXN; (+) strand; PAM type: NNAGAAW; PAM sequence: AAAGAAA
  source 1..20: mol_type = other DNA
ccccatctcaaaaaaaaaaa

SEQ ID NO: 5792 - DNA, 20 bp, synthetic construct
  misc_feature 1..20: note = Description of Artificial Sequence: Synthetic oligonucleotide
  misc_feature 1..20: note = Target: FXN; (+) strand; PAM type: NNAGAAW; PAM sequence: AAAGAAA
  source 1..20: mol_type = other DNA
atctcaaaaaaaaaaaaaag

SEQ ID NO: 5793 - DNA, 20 bp, synthetic construct
  misc_feature 1..20: note = Description of Artificial Sequence: Synthetic oligonucleotide
  misc_feature 1..20: note = Target: FXN; (+) strand; PAM type: NNAGAAW; PAM sequence: AAAGAAA
  source 1..20: mol_type = other DNA
gagtgctccaggcactccaa

SEQ ID NO: 5794 - DNA, 20 bp, synthetic construct
  misc_feature 1..20: note = Description of Artificial Sequence: Synthetic oligonucleotide
  misc_feature 1..20: note = Target: FXN; (+) strand; PAM type: NNAGAAW; PAM sequence: GAAGAAA
  source 1..20: mol_type = other DNA
aaagaaaatgaccacaatgg

SEQ ID NO: 5795 - DNA, 20 bp, synthetic construct
  misc_feature 1..20: note = Description of Artificial Sequence: Synthetic oligonucleotide
  misc_feature 1..20: note = Target: FXN; (+) strand; PAM type: NNAGAAW; PAM sequence: GCAGAAT
  source 1..20: mol_type = other DNA
ttgcgcaccctgaggaggtt

SEQ ID NO: 5796 - DNA, 20 bp, synthetic construct
  misc_feature 1..20: note = Description of Artificial Sequence: Synthetic oligonucleotide
  misc_feature 1..20: note = Target: FXN; (+) strand; PAM type: NNAGAAW; PAM sequence: GGAGAAT
  source 1..20: mol_type = other DNA
tgaggaggttgcagaataaa

SEQ ID NO: 5797 - DNA, 20 bp, synthetic construct
  misc_feature 1..20: note = Description of Artificial Sequence: Synthetic oligonucleotide
  misc_feature 1..20: note = Target: FXN; (+) strand; PAM type: NNAGAAW; PAM sequence: TAAGAAA
  source 1..20: mol_type = other DNA
tcatgaatttaacactgaat

SEQ ID NO: 5798 - DNA, 20 bp, synthetic construct
  misc_feature 1..20: note = Description of Artificial Sequence: Synthetic oligonucleotide
  misc_feature 1..20: note = Target: FXN; (+) strand; PAM type: NNAGAAW; PAM sequence: TGAGAAT
  source 1..20: mol_type = other DNA
tcaaatgttttttcaggttt

SEQ ID NO: 5799 - DNA, 20 bp, synthetic construct
  misc_feature 1..20: note = Description of Artificial Sequence: Synthetic oligonucleotide
  misc_feature 1..20: note = Target: FXN; (+) strand; PAM type: NNAGAAW; PAM sequence: GTAGAAA
  source 1..20: mol_type = other DNA
gggctatgtgtcacagctct

SEQ ID NO: 5800 - DNA, 20 bp, synthetic construct
  misc_feature 1..20: note = Description of Artificial Sequence: Synthetic oligonucleotide
  misc_feature 1..20: note = Target: FXN; (+) strand; PAM type: NNAGAAW; PAM sequence: AAAGAAT
  source 1..20: mol_type = other DNA
tatgtgtcacagctctgtag

SEQ ID NO: 5801 - DNA, 20 bp, synthetic construct
  misc_feature 1..20: note = Description of Artificial Sequence: Synthetic oligonucleotide
  misc_feature 1..20: note = Target: FXN; (+) strand; PAM type: NNAGAAW; PAM sequence: CAAGAAT
  source 1..20: mol_type = other DNA
tagtatggaatcagctgcta

SEQ ID NO: 5802 - DNA, 20 bp, synthetic construct
  misc_feature 1..20: note = Description of Artificial Sequence: Synthetic oligonucleotide
  misc_feature 1..20: note = Target: FXN; (+) strand; PAM type: NNAGAAW; PAM sequence: CAAGAAA
  source 1..20: mol_type = other DNA
tgcaaaaaatcttccaaaga

SEQ ID NO: 5803 - DNA, 20 bp, synthetic construct
  misc_feature 1..20: note = Description of Artificial Sequence: Synthetic oligonucleotide
  misc_feature 1..20: note = Target: FXN; (+) strand; PAM type: NNAGAAW; PAM sequence: AGAGAAT
  source 1..20: mol_type = other DNA
gcttccccatctgttaaatg

SEQ ID NO: 5804 - DNA, 20 bp, synthetic construct
  misc_feature 1..20: note = Description of Artificial Sequence: Synthetic oligonucleotide
  misc_feature 1..20: note = Target: FXN; (+) strand; PAM type: NNAGAAW; PAM sequence: GAAGAAT
  source 1..20: mol_type = other DNA
ctacttgggaggctgaagcg

SEQ ID NO: 5805 - DNA, 20 bp, synthetic construct
  misc_feature 1..20: note = Description of Artificial Sequence: Synthetic oligonucleotide
  misc_feature 1..20: note = Target: FXN; (+) strand; PAM type: NNAGAAW; PAM sequence: GGAGAAT
  source 1..20: mol_type = other DNA
gtactcaggaggctgagacg

SEQ ID NO: 5806 - DNA, 20 bp, synthetic construct
  misc_feature 1..20: note = Description of Artificial Sequence: Synthetic oligonucleotide
  misc_feature 1..20: note = Target: FXN; (+) strand; PAM type: NNAGAAW; PAM sequence: AAAGAAA
  source 1..20: mol_type = other DNA
caagatcctatctcttaaaa

SEQ ID NO: 5807 - DNA, 20 bp, synthetic construct
  misc_feature 1..20: note = Description of Artificial Sequence: Synthetic oligonucleotide
  misc_feature 1..20: note = Target: FXN; (+) strand; PAM type: NNAGAAW; PAM sequence: TGAGAAA
  source 1..20: mol_type = other DNA
gtgcagtaggccagtgccag

SEQ ID NO: 5808 - DNA, 20 bp, synthetic construct
  misc_feature 1..20: note = Description of Artificial Sequence: Synthetic oligonucleotide
  misc_feature 1..20: note = Target: FXN; (+) strand; PAM type: NNAGAAW; PAM sequence: AAAGAAA
  source 1..20: mol_type = other DNA
tgggagatccccatttaagg

SEQ ID NO: 5809 - DNA, 20 bp, synthetic construct
  misc_feature 1..20: note = Description of Artificial Sequence: Synthetic oligonucleotide
  misc_feature 1..20: note = Target: FXN; (+) strand; PAM type: NNAGAAW; PAM sequence: GGAGAAT
  source 1..20: mol_type = other DNA
ctactcaggaggctgaggca

SEQ ID NO: 5810 - DNA, 20 bp, synthetic construct
  misc_feature 1..20: note = Description of Artificial Sequence: Synthetic oligonucleotide
  misc_feature 1..20: note = Target: FXN; (+) strand; PAM type: NNAGAAW; PAM sequence: GAAGAAT
  source 1..20: mol_type = other DNA
cacatgaacagcagccaggg

SEQ ID NO: 5811 - DNA, 20 bp, synthetic construct
  misc_feature 1..20: note = Description of Artificial Sequence: Synthetic oligonucleotide
  misc_feature 1..20: note = Target: FXN; (+) strand; PAM type: NNAGAAW; PAM sequence: TTAGAAA
  source 1..20: mol_type = other DNA
aggaattgcataatacaatc

SEQ ID NO: 5812 - DNA, 20 bp, synthetic construct
  misc_feature 1..20: note = Description of Artificial Sequence: Synthetic oligonucleotide
  misc_feature 1..20: note = Target: FXN; (+) strand; PAM type: NNAGAAW; PAM sequence: TCAGAAA
  source 1..20: mol_type = other DNA
gtgtgtgccacaggtgttca

SEQ ID NO: 5813 - DNA, 20 bp, synthetic construct
  misc_feature 1..20: note = Description of Artificial Sequence: Synthetic oligonucleotide
  misc_feature 1..20: note = Target: FXN; (+) strand; PAM type: NNAGAAW; PAM sequence: ATAGAAA
  source 1..20: mol_type = other DNA
gtgggtagaacctcagccac

SEQ ID NO: 5814 - DNA, 20 bp, synthetic construct
  misc_feature 1..20: note = Description of Artificial Sequence: Synthetic oligonucleotide
  misc_feature 1..20: note = Target: FXN; (+) strand; PAM type: NNAGAAW; PAM sequence: TTAGAAT
  source 1..20: mol_type = other DNA
tgggtttttgaatcacaaat

SEQ ID NO: 5815 - DNA, 20 bp, synthetic construct
  misc_feature 1..20: note = Description of Artificial Sequence: Synthetic oligonucleotide
  misc_feature 1..20: note = Target: FXN; (+) strand; PAM type: NNAGAAW; PAM sequence: GGAGAAA
  source 1..20: mol_type = other DNA
aacagctacatgccagcaag

SEQ ID NO: 5816 - DNA, 20 bp, synthetic construct
  misc_feature 1..20: note = Description of Artificial Sequence: Synthetic oligonucleotide
  misc_feature 1..20: note = Target: FXN; (+) strand; PAM type: NNAGAAW; PAM sequence: TAAGAAA
  source 1..20: mol_type = other DNA
tcatgactttgtgtatagag

SEQ ID NO: 5817 - DNA, 20 bp, synthetic construct
  misc_feature 1..20: note = Description of Artificial Sequence: Synthetic oligonucleotide
  misc_feature 1..20: note = Target: FXN; (+) strand; PAM type: NNAGAAW; PAM sequence: CCAGAAA
  source 1..20: mol_type = other DNA
gcgtgagccactgcacccag

SEQ ID NO: 5818 - DNA, 20 bp, synthetic construct
  misc_feature 1..20: note = Description of Artificial Sequence: Synthetic oligonucleotide
  misc_feature 1..20: note = Target: FXN; (+) strand; PAM type: NNAGAAW; PAM sequence: ACAGAAT
  source 1..20: mol_type = other DNA
tccctgcatccgctacagag

SEQ ID NO: 5819 - DNA, 20 bp, synthetic construct
  misc_feature 1..20: note = Description of Artificial Sequence: Synthetic oligonucleotide
  misc_feature 1..20: note = Target: FXN; (+) strand; PAM type: NNAGAAW; PAM sequence: GGAGAAT
  source 1..20: mol_type = other DNA
ctactcgggaggctgaggca

SEQ ID NO: 5820 - DNA, 20 bp, synthetic construct
  misc_feature 1..20: note = Description of Artificial Sequence: Synthetic oligonucleotide
  misc_feature 1..20: note = Target: FXN; (+) strand; PAM type: NNAGAAW; PAM sequence: ATAGAAA
  source 1..20: mol_type = other DNA
tgtaaaggtggctaaattat

SEQ ID NO: 5821 - DNA, 20 bp, synthetic construct
  misc_feature 1..20: note = Description of Artificial Sequence: Synthetic oligonucleotide
  misc_feature 1..20: note = Target: FXN; (+) strand; PAM type: NNAGAAW; PAM sequence: AAAGAAA
  source 1..20: mol_type = other DNA
tgctagctgagatttttcca

SEQ ID NO: 5822 - DNA, 20 bp, synthetic construct
  misc_feature 1..20: note = Description of Artificial Sequence: Synthetic oligonucleotide
  misc_feature 1..20: note = Target: FXN; (+) strand; PAM type: NNAGAAW; PAM sequence: AGAGAAA
  source 1..20: mol_type = other DNA
atggcttaaataaaacccta

SEQ ID NO: 5823 - DNA, 20 bp, synthetic construct
  misc_feature 1..20: note = Description of Artificial Sequence: Synthetic oligonucleotide
  misc_feature 1..20: note = Target: FXN; (+) strand; PAM type: NNAGAAW; PAM sequence: AAAGAAA
  source 1..20: mol_type = other DNA
cttaaataaaaccctaagag

SEQ ID NO: 5824 - DNA, 20 bp, synthetic construct
  misc_feature 1..20: note = Description of Artificial Sequence: Synthetic oligonucleotide
  misc_feature 1..20: note = Target: FXN; (+) strand; PAM type: NNAGAAW; PAM sequence: ATAGAAA
  source 1..20: mol_type = other DNA
ccctccaaagctcaaaagta

SEQ ID NO: 5825 - DNA, 20 bp, synthetic construct
  misc_feature 1..20: note = Description of Artificial Sequence: Synthetic oligonucleotide
  misc_feature 1..20: note = Target: FXN; (+) strand; PAM type: NNAGAAW; PAM sequence: TCAGAAA
  source 1..20: mol_type = other DNA
acagtctccagggtaagctt

SEQ ID NO: 5826 - DNA, 20 bp, synthetic construct
  misc_feature 1..20: note = Description of Artificial Sequence: Synthetic oligonucleotide
  misc_feature 1..20: note = Target: FXN; (+) strand; PAM type: NNAGAAW; PAM sequence: CAAGAAA
  source 1..20: mol_type = other DNA
cccaactccaagagtgttag

SEQ ID NO: 5827 - DNA, 20 bp, synthetic construct
  misc_feature 1..20: note = Description of Artificial Sequence: Synthetic oligonucleotide
  misc_feature 1..20: note = Target: FXN; (+) strand; PAM type: NNAGAAW; PAM sequence: GAAGAAT
  source 1..20: mol_type = other DNA
caagaaatataaattttaca

SEQ ID NO: 5828 - DNA, 20 bp, synthetic construct
  misc_feature 1..20: note = Description of Artificial Sequence: Synthetic oligonucleotide
  misc_feature 1..20: note = Target: FXN; (-) strand; PAM type: NNGRRT; PAM sequence: AAGAAT
  source 1..20: mol_type = other DNA
gtatagtttcactttgaagc

SEQ ID NO: 5829 - DNA, 20 bp, synthetic construct
  misc_feature 1..20: note = Description of Artificial Sequence: Synthetic oligonucleotide
  misc_feature 1..20: note = Target: FXN; (-) strand; PAM type: NNGRRT; PAM sequence: AGGAAT
  source 1..20: mol_type = other DNA
cacgccaagctaactgtggg

SEQ ID NO: 5830 - DNA, 20 bp, synthetic construct
  misc_feature 1..20: note = Description of Artificial Sequence: Synthetic oligonucleotide
  misc_feature 1..20: note = Target: FXN; (-) strand; PAM type: NNGRRT; PAM sequence: AGGAAT
  source 1..20: mol_type = other DNA
agtcattcttgttttaacta

SEQ ID NO: 5831 - DNA, 20 bp, synthetic construct
  misc_feature 1..20: note = Description of Artificial Sequence: Synthetic oligonucleotide
  misc_feature 1..20: note = Target: FXN; (-) strand; PAM type: NNGRRT; PAM sequence: GAGAGT
  source 1..20: mol_type = other DNA
tatctgaaatatagccttta

SEQ ID NO: 5832 - DNA, 20 bp, synthetic construct
  misc_feature 1..20: note = Description of Artificial Sequence: Synthetic oligonucleotide
  misc_feature 1..20: note = Target: FXN; (-) strand; PAM type: NNGRRT; PAM sequence: TAGGGT
  source 1..20: mol_type = other DNA
tttctgagagtggctccctt

SEQ ID NO: 5833 - DNA, 20 bp, synthetic construct
  misc_feature 1..20: note = Description of Artificial Sequence: Synthetic oligonucleotide
  misc_feature 1..20: note = Target: FXN; (-) strand; PAM type: NNGRRT; PAM sequence: GAGAGT
  source 1..20: mol_type = other DNA
gaggtttggatttattttct

SEQ ID NO: 5834 - DNA, 20 bp, synthetic construct
  misc_feature 1..20: note = Description of Artificial Sequence: Synthetic oligonucleotide
  misc_feature 1..20: note = Target: FXN; (-) strand; PAM type: NNGRRT; PAM sequence: TTGGAT
  source 1..20: mol_type = other DNA
gtggccagaaaaaaggaggt

SEQ ID NO: 5835 - DNA, 20 bp, synthetic construct
  misc_feature 1..20: note = Description of Artificial Sequence: Synthetic oligonucleotide
  misc_feature 1..20: note = Target: FXN; (-) strand; PAM type: NNGRRT; PAM sequence: GTGAAT
  source 1..20: mol_type = other DNA
agtcaataaatattaaacat

SEQ ID NO: 5836 - DNA, 20 bp, synthetic construct
  misc_feature 1..20: note = Description of Artificial Sequence: Synthetic oligonucleotide
  misc_feature 1..20: note = Target: FXN; (-) strand; PAM type: NNGRRT; PAM sequence: TGGAAT
  source 1..20: mol_type = other DNA
ctagagtcaaatccacactc

SEQ ID NO: 5837 - DNA, 20 bp, synthetic construct
  misc_feature 1..20: note = Description of Artificial Sequence: Synthetic oligonucleotide
  misc_feature 1..20: note = Target: FXN; (-) strand; PAM type: NNGRRT; PAM sequence: TAGAGT
  source 1..20: mol_type = other DNA
caggagactgattatggcac

SEQ ID NO: 5838 - DNA, 20 bp, synthetic construct
  misc_feature 1..20: note = Description of Artificial Sequence: Synthetic oligonucleotide
  misc_feature 1..20: note = Target: FXN; (-) strand; PAM type: NNGRRT; PAM sequence: AAGGAT
  source 1..20: mol_type = other DNA
ttggtaagagagattgataa

SEQ ID NO: 5839 - DNA, 20 bp, synthetic construct
  misc_feature 1..20: note = Description of Artificial Sequence: Synthetic oligonucleotide
  misc_feature 1..20: note = Target: FXN; (-) strand; PAM type: NNGRRT; PAM sequence: TTGGAT
  source 1..20: mol_type = other DNA
agaaatcccactgcatttgc

SEQ ID NO: 5840 - DNA, 20 bp, synthetic construct
  misc_feature 1..20: note = Description of Artificial Sequence: Synthetic oligonucleotide
  misc_feature 1..20: note = Target: FXN; (-) strand; PAM type: NNGRRT; PAM sequence: TGGGGT
  source 1..20: mol_type = other DNA
aatcactgttgctaagggaa

SEQ ID NO: 5841 - DNA, 20 bp, synthetic construct
  misc_feature 1..20: note = Description of Artificial Sequence: Synthetic oligonucleotide
  misc_feature 1..20: note = Target: FXN; (-) strand; PAM type: NNGRRT; PAM sequence: GGGAAT
  source 1..20: mol_type = other DNA
gtagcaatcactgttgctaa

SEQ ID NO: 5842 - DNA, 20 bp, synthetic construct
  misc_feature 1..20: note = Description of Artificial Sequence: Synthetic oligonucleotide
  misc_feature 1..20: note = Target: FXN; (-) strand; PAM type: NNGRRT; PAM sequence: ATGAGT
  source 1..20: mol_type = other DNA
catagacactctactggtga

SEQ ID NO: 5843 - DNA, 20 bp, synthetic construct
  misc_feature 1..20: note = Description of Artificial Sequence: Synthetic oligonucleotide
  misc_feature 1..20: note = Target: FXN; (-) strand; PAM type: NNGRRT; PAM sequence: GTGAAT
  source 1..20: mol_type = other DNA
ctgacatagacactctactg

SEQ ID NO: 5844 - DNA, 20 bp, synthetic construct
  misc_feature 1..20: note = Description of Artificial Sequence: Synthetic oligonucleotide
  misc_feature 1..20: note = Target: FXN; (-) strand; PAM type: NNGRRT; PAM sequence: CAGAAT
  source 1..20: mol_type = other DNA
atgtcagaggtgacttcctc

SEQ ID NO: 5845 - DNA, 20 bp, synthetic construct
  misc_feature 1..20: note = Description of Artificial Sequence: Synthetic oligonucleotide
  misc_feature 1..20: note = Target: FXN; (-) strand; PAM type: NNGRRT; PAM sequence: CAGAAT
  source 1..20: mol_type = other DNA
ccatgtgaatttcaggccca

SEQ ID NO: 5846 - DNA, 20 bp, synthetic construct
  misc_feature 1..20: note = Description of Artificial Sequence: Synthetic oligonucleotide
  misc_feature 1..20: note = Target: FXN; (-) strand; PAM type: NNGRRT; PAM sequence: GTGAAT
  source 1..20: mol_type = other DNA
gtatgccttatgtgttccat

SEQ ID NO: 5847 - DNA, 20 bp, synthetic construct
  misc_feature 1..20: note = Description of Artificial Sequence: Synthetic oligonucleotide
  misc_feature 1..20: note = Target: FXN; (-) strand; PAM type: NNGRRT; PAM sequence: CTGAAT
  source 1..20: mol_type = other DNA
ccagcctcccagtcttccag

SEQ ID NO: 5848 - DNA, 20 bp, synthetic construct
  misc_feature 1..20: note = Description of Artificial Sequence: Synthetic oligonucleotide
  misc_feature 1..20: note = Target: FXN; (-) strand; PAM type: NNGRRT; PAM sequence: ATGAGT
  source 1..20: mol_type = other DNA
gtcaaccagtagacatgtaa

SEQ ID NO: 5849 - DNA, 20 bp, synthetic construct
  misc_feature 1..20: note = Description of Artificial Sequence: Synthetic oligonucleotide
  misc_feature 1..20: note = Target: FXN; (-) strand; PAM type: NNGRRT; PAM sequence: CAGGGT
  source 1..20: mol_type = other DNA
aggccccctcagccaacagc

SEQ ID NO: 5850 - DNA, 20 bp, synthetic construct
  misc_feature 1..20: note = Description of Artificial Sequence: Synthetic oligonucleotide
  misc_feature 1..20: note = Target: FXN; (-) strand; PAM type: NNGRRT; PAM sequence: TGGGAT
  source 1..20: mol_type = other DNA
tgtgtccggcattctctttt

SEQ ID NO: 5851 - DNA, 20 bp, synthetic construct
  misc_feature 1..20: note = Description of Artificial Sequence: Synthetic oligonucleotide
  misc_feature 1..20: note = Target: FXN; (-) strand; PAM type: NNGRRT; PAM sequence: CAGAGT
  source 1..20: mol_type = other DNA
ttaaaaatttttggtagaga

SEQ ID NO: 5852 - DNA, 20 bp, synthetic construct
  misc_feature 1..20: note = Description of Artificial Sequence: Synthetic oligonucleotide
  misc_feature 1..20: note = Target: FXN; (-) strand; PAM type: NNGRRT; PAM sequence: TGGAAT
  source 1..20: mol_type = other DNA
tcacagcagccttgacctcc

SEQ ID NO: 5853 - DNA, 20 bp, synthetic construct
  misc_feature 1..20: note = Description of Artificial Sequence: Synthetic oligonucleotide
  misc_feature 1..20: note = Target: FXN; (-) strand; PAM type: NNGRRT; PAM sequence: CAGAGT
  source 1..20: mol_type = other DNA
gggtttttgtttgtttgaaa

SEQ ID NO: 5854 - DNA, 20 bp, synthetic construct
  misc_feature 1..20: note = Description of Artificial Sequence: Synthetic oligonucleotide
  misc_feature 1..20: note = Target: FXN; (-) strand; PAM type: NNGRRT; PAM sequence: TTGGGT
  source 1..20: mol_type = other DNA
tctctctctttttttttttt

SEQ ID NO: 5855 - DNA, 20 bp, synthetic construct
  misc_feature 1..20: note = Description of Artificial Sequence: Synthetic oligonucleotide
  misc_feature 1..20: note = Target: FXN; (-) strand; PAM type: NNGRRT; PAM sequence: CAGGGT
  source 1..20: mol_type = other DNA
gctacaactattccaaccaa

SEQ ID NO: 5856 - DNA, 20 bp, synthetic construct
  misc_feature 1..20: note = Description of Artificial Sequence: Synthetic oligonucleotide
  misc_feature 1..20: note = Target: FXN; (-) strand; PAM type: NNGRRT; PAM sequence: TCGGGT
  source 1..20: mol_type = other DNA
ctattctcctcccttcgaat

SEQ ID NO: 5857 - DNA, 20 bp, synthetic construct
  misc_feature 1..20: note = Description of Artificial Sequence: Synthetic oligonucleotide
  misc_feature 1..20: note = Target: FXN; (-) strand; PAM type: NNGRRT; PAM sequence: TCGAAT
  source 1..20: mol_type = other DNA
tgttatctattctcctccct

SEQ ID NO: 5858 - DNA, 20 bp, synthetic construct
  misc_feature 1..20: note = Description of Artificial Sequence: Synthetic oligonucleotide
  misc_feature 1..20: note = Target: FXN; (-) strand; PAM type: NNGRRT; PAM sequence: AGGGAT
  source 1..20: mol_type = other DNA
ctttgacattcctgtcaccc

SEQ ID NO: 5859 - DNA, 20 bp, synthetic construct
  misc_feature 1..20: note = Description of Artificial Sequence: Synthetic oligonucleotide
  misc_feature 1..20: note = Target: FXN; (-) strand; PAM type: NNGRRT; PAM sequence: TTGGAT
  source 1..20: mol_type = other DNA
cctttgcctggtatggaaga

SEQ ID NO: 5860 - DNA, 20 bp, synthetic construct
  misc_feature 1..20: note = Description of Artificial Sequence: Synthetic oligonucleotide
  misc_feature 1..20: note = Target: FXN; (-) strand; PAM type: NNGRRT; PAM sequence: GTGAAT
  source 1..20: mol_type = other DNA
taaaaatctaaatctcaaat

SEQ ID NO: 5861 - DNA, 20 bp, synthetic construct
  misc_feature 1..20: note = Description of Artificial Sequence: Synthetic oligonucleotide
  misc_feature 1..20: note = Target: FXN; (-) strand; PAM type: NNGRRT; PAM sequence: CAGGGT
  source 1..20: mol_type = other DNA
gtgagttaagccagtgtcac

SEQ ID NO: 5862 - DNA, 20 bp, synthetic construct
  misc_feature 1..20: note = Description of Artificial Sequence: Synthetic oligonucleotide
  misc_feature 1..20: note = Target: FXN; (-) strand; PAM type: NNGRRT; PAM sequence: GTGAGT
  source 1..20: mol_type = other DNA
cataggccttgggcaaaatt

SEQ ID NO: 5863 - DNA, 20 bp, synthetic construct
  misc_feature 1..20: note = Description of Artificial Sequence: Synthetic oligonucleotide
  misc_feature 1..20: note = Target: FXN; (-) strand; PAM type: NNGRRT; PAM sequence: TGGGGT
  source 1..20: mol_type = other DNA
atctactgaatcagaatctc

SEQ ID NO: 5864 - DNA, 20 bp, synthetic construct
  misc_feature 1..20: note = Description of Artificial Sequence: Synthetic oligonucleotide
  misc_feature 1..20: note = Target: FXN; (-) strand; PAM type: NNGRRT; PAM sequence: CAGAAT
  source 1..20: mol_type = other DNA
ctattctcgatctactgaat

SEQ ID NO: 5865 - DNA, 20 bp, synthetic construct
  misc_feature 1..20: note = Description of Artificial Sequence: Synthetic oligonucleotide
  misc_feature 1..20: note = Target: FXN; (-) strand; PAM type: NNGRRT; PAM sequence: CTGAAT
  source 1..20: mol_type = other DNA
caggccctattctcgatcta

SEQ ID NO: 5866 - DNA, 20 bp, synthetic construct
  misc_feature 1..20: note = Description of Artificial Sequence: Synthetic oligonucleotide
  misc_feature 1..20: note = Target: FXN; (-) strand; PAM type: NNGRRT; PAM sequence: TAGGAT
  source 1..20: mol_type = other DNA
ctgccattaggatattttga

SEQ ID NO: 5867 - DNA, 20 bp, synthetic construct
  misc_feature 1..20: note = Description of Artificial Sequence: Synthetic oligonucleotide
  misc_feature 1..20: note = Target: FXN; (-) strand; PAM type: NNGRRT; PAM sequence: TAGGAT
  source 1..20: mol_type = other DNA
gaattcccttgctctgccat

SEQ ID NO: 5868 - DNA, 20 bp, synthetic construct
  misc_feature 1..20: note = Description of Artificial Sequence: Synthetic oligonucleotide
  misc_feature 1..20: note = Target: FXN; (-) strand; PAM type: NNGRRT; PAM sequence: CAGAAT
  source 1..20: mol_type = other DNA
tgggtaggggaggatatcac

SEQ ID NO: 5869 - DNA, 20 bp, synthetic construct
  misc_feature 1..20: note = Description of Artificial Sequence: Synthetic oligonucleotide
  misc_feature 1..20: note = Target: FXN; (-) strand; PAM type: NNGRRT; PAM sequence: GAGGAT
  source 1..20: mol_type = other DNA
ctgtcaggttatgggtaggg

SEQ ID NO: 5870 - DNA, 20 bp, synthetic construct
  misc_feature 1..20: note = Description of Artificial Sequence: Synthetic oligonucleotide
  misc_feature 1..20: note = Target: FXN; (-) strand; PAM type: NNGRRT; PAM sequence: ATGGGT
  source 1..20: mol_type = other DNA
atcctaatagctgtcaggtt

SEQ ID NO: 5871 - DNA, 20 bp, synthetic construct
  misc_feature 1..20: note = Description of Artificial Sequence: Synthetic oligonucleotide
  misc_feature 1..20: note = Target: FXN; (-) strand; PAM type: NNGRRT; PAM sequence: AGGAAT
  source 1..20: mol_type = other DNA
cttccttggaggtagtcaag

SEQ ID NO: 5872 - DNA, 20 bp, synthetic construct
  misc_feature 1..20: note = Description of Artificial Sequence: Synthetic oligonucleotide
  misc_feature 1..20: note = Target: FXN; (-) strand; PAM type: NNGRRT; PAM sequence: TAGAAT
  source 1..20: mol_type = other DNA
tttggccaaagaaatagaca

SEQ ID NO: 5873 - DNA, 20 bp, synthetic construct
  misc_feature 1..20: note = Description of Artificial Sequence: Synthetic oligonucleotide
  misc_feature 1..20: note = Target: FXN; (-) strand; PAM type: NNGRRT; PAM sequence: TGGGGT
  source 1..20: mol_type = other DNA
ttttgtatttttagtagaga

SEQ ID NO: 5874 - DNA, 20 bp, synthetic construct
  misc_feature 1..20: note = Description of Artificial Sequence: Synthetic oligonucleotide
  misc_feature 1..20: note = Target: FXN; (-) strand; PAM type: NNGRRT; PAM sequence: TGGGAT
  source 1..20: mol_type = other DNA
gtctcagcctccagagtagc

SEQ ID NO: 5875 - DNA, 20 bp, synthetic construct
  misc_feature 1..20: note = Description of Artificial Sequence: Synthetic oligonucleotide
  misc_feature 1..20: note = Target: FXN; (-) strand; PAM type: NNGRRT; PAM sequence: CAGAGT
  source 1..20: mol_type = other DNA
agagattctgtctcagcctc

SEQ ID NO: 5876 - DNA, 20 bp, synthetic construct
  misc_feature 1..20: note = Description of Artificial Sequence: Synthetic oligonucleotide
  misc_feature 1..20: note = Target: FXN; (-) strand; PAM type: NNGRRT; PAM sequence: CTGGGT
  source 1..20: mol_type = other DNA
ctcactgcaatctccacctc

SEQ ID NO: 5877 - DNA, 20 bp, synthetic construct
  misc_feature 1..20: note = Description of Artificial Sequence: Synthetic oligonucleotide
  misc_feature 1..20: note = Target: FXN; (-) strand; PAM type: NNGRRT; PAM sequence: TGGAAT
  source 1..20: mol_type = other DNA
tcttgctttgttgcccaggc

SEQ ID NO: 5878 - DNA, 20 bp, synthetic construct
  misc_feature 1..20: note = Description of Artificial Sequence: Synthetic oligonucleotide
  misc_feature 1..20: note = Target: FXN; (-) strand; PAM type: NNGRRT; PAM sequence: CAGAGT
  source 1..20: mol_type = other DNA
attattattattatttgaga

SEQ ID NO: 5879 - DNA, 20 bp, synthetic construct
  misc_feature 1..20: note = Description of Artificial Sequence: Synthetic oligonucleotide
  misc_feature 1..20: note = Target: FXN; (-) strand; PAM type: NNGRRT; PAM sequence: AAGGGT
  source 1..20: mol_type = other DNA
gggagagcccataggcatca

SEQ ID NO: 5880 - DNA, 20 bp, synthetic construct
  misc_feature 1..20: note = Description of Artificial Sequence: Synthetic oligonucleotide
  misc_feature 1..20: note = Target: FXN; (-) strand; PAM type: NNGRRT; PAM sequence: AGGGAT
  source 1..20: mol_type = other DNA
gcatctagtaggtagaggcc

SEQ ID NO: 5881 - DNA, 20 bp, synthetic construct
  misc_feature 1..20: note = Description of Artificial Sequence: Synthetic oligonucleotide
  misc_feature 1..20: note = Target: FXN; (-) strand; PAM type: NNGRRT; PAM sequence: GTGGGT
  source 1..20: mol_type = other DNA
tcacaacaggcagctgtggg

SEQ ID NO: 5882 - DNA, 20 bp, synthetic construct
  misc_feature 1..20: note = Description of Artificial Sequence: Synthetic oligonucleotide
  misc_feature 1..20: note = Target: FXN; (-) strand; PAM type: NNGRRT; PAM sequence: TGGGGT
  source 1..20: mol_type = other DNA
attgtcacaacaggcagctg

SEQ ID NO: 5883 - DNA, 20 bp, synthetic construct
  misc_feature 1..20: note = Description of Artificial Sequence: Synthetic oligonucleotide
  misc_feature 1..20: note = Target: FXN; (-) strand; PAM type: NNGRRT; PAM sequence: CTGGAT
  source 1..20: mol_type = other DNA
aagaggtggtccagggcatt

SEQ ID NO: 5884 - DNA, 20 bp, synthetic construct
  misc_feature 1..20: note = Description of Artificial Sequence: Synthetic oligonucleotide
  misc_feature 1..20: note = Target: FXN; (-) strand; PAM type: NNGRRT; PAM sequence: TGGGAT
  source 1..20: mol_type = other DNA
caaaaatagggtggaggagg

SEQ ID NO: 5885 - DNA, 20 bp, synthetic construct
  misc_feature 1..20: note = Description of Artificial Sequence: Synthetic oligonucleotide
  misc_feature 1..20: note = Target: FXN; (-) strand; PAM type: NNGRRT; PAM sequence: TAGGGT
  source 1..20: mol_type = other DNA
tggcacagggccttcaaaaa

SEQ ID NO: 5886 - DNA, 20 bp, synthetic construct
  misc_feature 1..20: note = Description of Artificial Sequence: Synthetic oligonucleotide
  misc_feature 1..20: note = Target: FXN; (-) strand; PAM type: NNGRRT; PAM sequence: GGGAAT
  source 1..20: mol_type = other DNA
ttatatagagctagggatgg

SEQ ID NO: 5887 - DNA, 20 bp, synthetic construct
  misc_feature 1..20: note = Description of Artificial Sequence: Synthetic oligonucleotide
  misc_feature 1..20: note = Target: FXN; (-) strand; PAM type: NNGRRT; PAM sequence: AGGGAT
  source 1..20: mol_type = other DNA
tgggagatttatatagagct

SEQ ID NO: 5888 - DNA, 20 bp, synthetic construct
  misc_feature 1..20: note = Description of Artificial Sequence: Synthetic oligonucleotide
  misc_feature 1..20: note = Target: FXN; (-) strand; PAM type: NNGRRT; PAM sequence: TTGAGT
  source 1..20: mol_type = other DNA
taaactaacaggtgtgagtg

SEQ ID NO: 5889 - DNA, 20 bp, synthetic construct
  misc_feature 1..20: note = Description of Artificial Sequence: Synthetic oligonucleotide
  misc_feature 1..20: note = Target: FXN; (-) strand; PAM type: NNGRRT; PAM sequence: GTGAGT
  source 1..20: mol_type = other DNA
aggaatgtaaactaacaggt

SEQ ID NO: 5890 - DNA, 20 bp, synthetic construct
  misc_feature 1..20: note = Description of Artificial Sequence: Synthetic oligonucleotide
  misc_feature 1..20: note = Target: FXN; (-) strand; PAM type: NNGRRT; PAM sequence: AGGAAT
  source 1..20: mol_type = other DNA
gctaaatgacaagtgtcaag

SEQ ID NO: 5891 - DNA, 20 bp, synthetic construct
  misc_feature 1..20: note = Description of Artificial Sequence: Synthetic oligonucleotide
  misc_feature 1..20: note = Target: FXN; (-) strand; PAM type: NNGRRT; PAM sequence: TAGGAT
  source 1..20: mol_type = other DNA
gagagacatgtttacatact

SEQ ID NO: 5892 - DNA, 20 bp, synthetic construct
  misc_feature 1..20: note = Description of Artificial Sequence: Synthetic oligonucleotide
  misc_feature 1..20: note = Target: FXN; (-) strand; PAM type: NNGRRT; PAM sequence: GTGAAT
  source 1..20: mol_type = other DNA
agttcttccaaagccacttt

SEQ ID NO: 5893 - DNA, 20 bp, synthetic construct
  misc_feature 1..20: note = Description of Artificial Sequence: Synthetic oligonucleotide
  misc_feature 1..20: note = Target: FXN; (-) strand; PAM type: NNGRRT; PAM sequence: GTGAAT
  source 1..20: mol_type = other DNA
agtgagctatgattgtgcct

SEQ ID NO: 5894 - DNA, 20 bp, synthetic construct
  misc_feature 1..20: note = Description of Artificial Sequence: Synthetic oligonucleotide
  misc_feature 1..20: note = Target: FXN; (-) strand; PAM type: NNGRRT; PAM sequence: GAGGAT
  source 1..20: mol_type = other DNA
tactcaggaggctgaggcgg

SEQ ID NO: 5895 - DNA, 20 bp, synthetic construct
  misc_feature 1..20: note = Description of Artificial Sequence: Synthetic oligonucleotide
  misc_feature 1..20: note = Target: FXN; (-) strand; PAM type: NNGRRT; PAM sequence: CCGAGT
  source 1..20: mol_type = other DNA
tagaggatgtcaaatgtgag

SEQ ID NO: 5896 - DNA, 20 bp, synthetic construct
  misc_feature 1..20: note = Description of Artificial Sequence: Synthetic oligonucleotide
  misc_feature 1..20: note = Target: FXN; (-) strand; PAM type: NNGRRT; PAM sequence: GAGGAT
  source 1..20: mol_type = other DNA
cacattttatatatgcttta

SEQ ID NO: 5897 - DNA, 20 bp, synthetic construct
  misc_feature 1..20: note = Description of Artificial Sequence: Synthetic oligonucleotide
  misc_feature 1..20: note = Target: FXN; (-) strand; PAM type: NNGRRT; PAM sequence: AGGGAT
  source 1..20: mol_type = other DNA
atttctgttacatattacaa

SEQ ID NO: 5898 - DNA, 20 bp, synthetic construct
  misc_feature 1..20: note = Description of Artificial Sequence: Synthetic oligonucleotide
  misc_feature 1..20: note = Target: FXN; (-) strand; PAM type: NNGRRT; PAM sequence: GAGAAT
  source 1..20: mol_type = other DNA
attgttgatagattttaaaa

SEQ ID NO: 5899 - DNA, 20 bp, synthetic construct
  misc_feature 1..20: note = Description of Artificial Sequence: Synthetic oligonucleotide
  misc_feature 1..20: note = Target: FXN; (-) strand; PAM type: NNGRRT; PAM sequence: CAGGGT
  source 1..20: mol_type = other DNA
gggggtttcgctatgttgcc

SEQ ID NO: 5900 - DNA, 20 bp, synthetic construct
  misc_feature 1..20: note = Description of Artificial Sequence: Synthetic oligonucleotide
  misc_feature 1..20: note = Target: FXN; (-) strand; PAM type: NNGRRT; PAM sequence: GGGGGT
  source 1..20: mol_type = other DNA
ttttgtattttttgtagaaa

SEQ ID NO: 5901 - DNA, 20 bp, synthetic construct
  misc_feature 1..20: note = Description of Artificial Sequence: Synthetic oligonucleotide
  misc_feature 1..20: note = Target: FXN; (-) strand; PAM type: NNGRRT; PAM sequence: TGGAGT
  source 1..20: mol_type = other DNA
tctcactctgttgcccaggc

SEQ ID NO: 5902 - DNA, 20 bp, synthetic construct
  misc_feature 1..20: note = Description of Artificial Sequence: Synthetic oligonucleotide
  misc_feature 1..20: note = Target: FXN; (-) strand; PAM type: NNGRRT; PAM sequence: CAGAGT
  source 1..20: mol_type = other DNA
atttatttgtttgtttgaga

SEQ ID NO: 5903 - DNA, 20 bp, synthetic construct
  misc_feature 1..20: note = Description of Artificial Sequence: Synthetic oligonucleotide
  misc_feature 1..20: note = Target: FXN; (-) strand; PAM type: NNGRRT; PAM sequence: CAGGAT
  source 1..20: mol_type = other DNA
acgggtttcaccgtgttagc

SEQ ID NO: 5904 - DNA, 20 bp, synthetic construct
  misc_feature 1..20: note = Description of Artificial Sequence: Synthetic oligonucleotide
  misc_feature 1..20: note = Target: FXN; (-) strand; PAM type: NNGRRT; PAM sequence: ACGGGT
  source 1..20: mol_type = other DNA
tttttttttttttagtagag

SEQ ID NO: 5905 - DNA, 20 bp, synthetic construct
  misc_feature 1..20: note = Description of Artificial Sequence: Synthetic oligonucleotide
  misc_feature 1..20: note = Target: FXN; (-) strand; PAM type: NNGRRT; PAM sequence: CCGAGT
  source 1..20: mol_type = other DNA
cattctcctgcctcagcctc

SEQ ID NO: 5906 - DNA, 20 bp, synthetic construct
  misc_feature 1..20: note = Description of Artificial Sequence: Synthetic oligonucleotide
  misc_feature 1..20: note = Target: FXN; (-) strand; PAM type: NNGRRT; PAM sequence: CGGAGT
  source 1..20: mol_type = other DNA
gattgattgattgattgaga

SEQ ID NO: 5907 - DNA, 20 bp, synthetic construct
  misc_feature 1..20: note = Description of Artificial Sequence: Synthetic oligonucleotide
  misc_feature 1..20: note = Target: FXN; (-) strand; PAM type: NNGRRT; PAM sequence: ATGAGT
  source 1..20: mol_type = other DNA
aggattgtggtaaggataaa

SEQ ID NO: 5908 - DNA, 20 bp, synthetic construct
  misc_feature 1..20: note = Description of Artificial Sequence: Synthetic oligonucleotide
  misc_feature 1..20: note = Target: FXN; (-) strand; PAM type: NNGRRT; PAM sequence: AAGGAT
  source 1..20: mol_type = other DNA
ctacttcataggattgtggt

SEQ ID NO: 5909 - DNA, 20 bp, synthetic construct
  misc_feature 1..20: note = Description of Artificial Sequence: Synthetic oligonucleotide
  misc_feature 1..20: note = Target: FXN; (-) strand; PAM type: NNGRRT; PAM sequence: TAGGAT
  source 1..20: mol_type = other DNA
ttataaaagttcctacttca

SEQ ID NO: 5910 - DNA, 20 bp, synthetic construct
  misc_feature 1..20: note = Description of Artificial Sequence: Synthetic oligonucleotide
  misc_feature 1..20: note = Target: FXN; (-) strand; PAM type: NNGRRT; PAM sequence: ACGGAT
  source 1..20: mol_type = other DNA
tgggtatgtggggccaggag

SEQ ID NO: 5911 - DNA, 20 bp, synthetic construct
  misc_feature 1..20: note = Description of Artificial Sequence: Synthetic oligonucleotide
  misc_feature 1..20: note = Target: FXN; (-) strand; PAM type: NNGRRT; PAM sequence: TTGGGT
  source 1..20: mol_type = other DNA
ccggtatgggtttacagcag

SEQ ID NO: 5912 - DNA, 20 bp, synthetic construct
  misc_feature 1..20: note = Description of Artificial Sequence: Synthetic oligonucleotide
  misc_feature 1..20: note = Target: FXN; (-) strand; PAM type: NNGRRT; PAM sequence: ATGGGT
  source 1..20: mol_type = other DNA
gaggctgcttggccgccggt

SEQ ID NO: 5913 - DNA, 20 bp, synthetic construct
  misc_feature 1..20: note = Description of Artificial Sequence: Synthetic oligonucleotide
  misc_feature 1..20: note = Target: FXN; (-) strand; PAM type: NNGRRT; PAM sequence: GTGGGT
  source 1..20: mol_type = other DNA
agctgctgtcttgctgggaa

SEQ ID NO: 5914 - DNA, 20 bp, synthetic construct
  misc_feature 1..20: note = Description of Artificial Sequence: Synthetic oligonucleotide
  misc_feature 1..20: note = Target: FXN; (-) strand; PAM type: NNGRRT; PAM sequence: CGGAGT
  source 1..20: mol_type = other DNA
agcctgctttgtgcaaagca

SEQ ID NO: 5915 - DNA, 20 bp, synthetic construct
  misc_feature 1..20: note = Description of Artificial Sequence: Synthetic oligonucleotide
  misc_feature 1..20: note = Target: FXN; (-) strand; PAM type: NNGRRT; PAM sequence: CTGGGT
  source 1..20: mol_type = other DNA
gcccgctccgccctccagcg

SEQ ID NO: 5916 - DNA, 20 bp, synthetic construct
  misc_feature 1..20: note = Description of Artificial Sequence: Synthetic oligonucleotide
  misc_feature 1..20: note = Target: FXN; (-) strand; PAM type: NNGRRT; PAM sequence: CCGGGT
  source 1..20: mol_type = other DNA
ccgagagtccacatgctgct

SEQ ID NO: 5917 - DNA, 20 bp, synthetic construct
  misc_feature 1..20: note = Description of Artificial Sequence: Synthetic oligonucleotide
  misc_feature 1..20: note = Target: FXN; (-) strand; PAM type: NNGRRT; PAM sequence: GAGAGT
  source 1..20: mol_type = other DNA
ccggctactgcgcggcgccc

SEQ ID NO: 5918 - DNA, 20 bp, synthetic construct
  misc_feature 1..20: note = Description of Artificial Sequence: Synthetic oligonucleotide
  misc_feature 1..20: note = Target: FXN; (-) strand; PAM type: NNGRRT; PAM sequence: CTGGGT
  source 1..20: mol_type = other DNA
gggtctgggcctgggctggg

SEQ ID NO: 5919 - DNA, 20 bp, synthetic construct
  misc_feature 1..20: note = Description of Artificial Sequence: Synthetic oligonucleotide
  misc_feature 1..20: note = Target: FXN; (-) strand; PAM type: NNGRRT; PAM sequence: GAGGGT
  source 1..20: mol_type = other DNA
gccggccgcgggacccgggt

SEQ ID NO: 5920 - DNA, 20 bp, synthetic construct
  misc_feature 1..20: note = Description of Artificial Sequence: Synthetic oligonucleotide
  misc_feature 1..20: note = Target: FXN; (-) strand; PAM type: NNGRRT; PAM sequence: CCGGGT
  source 1..20: mol_type = other DNA
aactctgccggccgcgggac

SEQ ID NO: 5921 - DNA, 20 bp, synthetic construct
  misc_feature 1..20: note = Description of Artificial Sequence: Synthetic oligonucleotide
  misc_feature 1..20: note = Target: FXN; (-) strand; PAM type: NNGRRT; PAM sequence: CAGAGT
  source 1..20: mol_type = other DNA
tgcgcaggccacggcggccg

SEQ ID NO: 5922 - DNA, 20 bp, synthetic construct
  misc_feature 1..20: note = Description of Artificial Sequence: Synthetic oligonucleotide
  misc_feature 1..20: note = Target: FXN; (-) strand; PAM type: NNGRRT; PAM sequence: GCGGAT
  source 1..20: mol_type = other DNA
ggcccgcggctgttcccggc

SEQ ID NO: 5923 - DNA, 20 bp, synthetic construct
  misc_feature 1..20: note = Description of Artificial Sequence: Synthetic oligonucleotide
  misc_feature 1..20: note = Target: FXN; (-) strand; PAM type: NNGRRT; PAM sequence: CGGGGT
  source 1..20: mol_type = other DNA
cgggccgccctgagaaggag

SEQ ID NO: 5924 - DNA, 20 bp, synthetic construct
  misc_feature 1..20: note = Description of Artificial Sequence: Synthetic oligonucleotide
  misc_feature 1..20: note = Target: FXN; (-) strand; PAM type: NNGRRT; PAM sequence: GGGAGT
  source 1..20: mol_type = other DNA
caaccgggagaaccagagaa

SEQ ID NO: 5925 - DNA, 20 bp, synthetic construct
  misc_feature 1..20: note = Description of Artificial Sequence: Synthetic oligonucleotide
  misc_feature 1..20: note = Target: FXN; (-) strand; PAM type: NNGRRT; PAM sequence: TCGGGT
  source 1..20: mol_type = other DNA
ggcagaatctggaataaagg

SEQ ID NO: 5926 - DNA, 20 bp, synthetic construct
  misc_feature 1..20: note = Description of Artificial Sequence: Synthetic oligonucleotide
  misc_feature 1..20: note = Target: FXN; (-) strand; PAM type: NNGRRT; PAM sequence: TGGAAT
  source 1..20: mol_type = other DNA
ctgcggagtggggcagaatc

SEQ ID NO: 5927 - DNA, 20 bp, synthetic construct
  misc_feature 1..20: note = Description of Artificial Sequence: Synthetic oligonucleotide
  misc_feature 1..20: note = Target: FXN; (-) strand; PAM type: NNGRRT; PAM sequence: CAGAAT
  source 1..20: mol_type = other DNA
cacagctctgcggagtgggg

SEQ ID NO: 5928 - DNA, 20 bp, synthetic construct
  misc_feature 1..20: note = Description of Artificial Sequence: Synthetic oligonucleotide
  misc_feature 1..20: note = Target: FXN; (-) strand; PAM type: NNGRRT; PAM sequence: CGGAGT
  source 1..20: mol_type = other DNA
cccaaggtcacacagctctg

SEQ ID NO: 5929 - DNA, 20 bp, synthetic construct
  misc_feature 1..20: note = Description of Artificial Sequence: Synthetic oligonucleotide
  misc_feature 1..20: note = Target: FXN; (-) strand; PAM type: NNGRRT; PAM sequence: GGGAAT
  source 1..20: mol_type = other DNA
ccacgtctcagagaggttag

SEQ ID NO: 5930 - DNA, 20 bp, synthetic construct
  misc_feature 1..20: note = Description of Artificial Sequence: Synthetic oligonucleotide
  misc_feature 1..20: note = Target: FXN; (-) strand; PAM type: NNGRRT; PAM sequence: CTGGGT
  source 1..20: mol_type = other DNA
cctttcaagccgtggcgtaa

SEQ ID NO: 5931 - DNA, 20 bp, synthetic construct
  misc_feature 1..20: note = Description of Artificial Sequence: Synthetic oligonucleotide
  misc_feature 1..20: note = Target: FXN; (-) strand; PAM type: NNGRRT; PAM sequence: TTGGGT
  source 1..20: mol_type = other DNA
ctcatccccacagccattct

SEQ ID NO: 5932 - DNA, 20 bp, synthetic construct
  misc_feature 1..20: note = Description of Artificial Sequence: Synthetic oligonucleotide
  misc_feature 1..20: note = Target: FXN; (-) strand; PAM type: NNGRRT; PAM sequence: AGGAAT
  source 1..20: mol_type = other DNA
aataccatgtcctccccttg

SEQ ID NO: 5933 - DNA, 20 bp, synthetic construct
  misc_feature 1..20: note = Description of Artificial Sequence: Synthetic oligonucleotide
  misc_feature 1..20: note = Target: FXN; (-) strand; PAM type: NNGRRT; PAM sequence: AGGGAT
  source 1..20: mol_type = other DNA
cggcgtaccagccactctga

SEQ ID NO: 5934 - DNA, 20 bp, synthetic construct
  misc_feature 1..20: note = Description of Artificial Sequence: Synthetic oligonucleotide
  misc_feature 1..20: note = Target: FXN; (-) strand; PAM type: NNGRRT; PAM sequence: CTGGGT
  source 1..20: mol_type = other DNA
tttgtattttttagtagata

SEQ ID NO: 5935 - DNA, 20 bp, synthetic construct
  misc_feature 1..20: note = Description of Artificial Sequence: Synthetic oligonucleotide
  misc_feature 1..20: note = Target: FXN; (-) strand; PAM type: NNGRRT; PAM sequence: TGGGAT
  source 1..20: mol_type = other DNA
gccgcagcctctggagtagc

SEQ ID NO: 5936 - DNA, 20 bp, synthetic construct
  misc_feature 1..20: note = Description of Artificial Sequence: Synthetic oligonucleotide
  misc_feature 1..20: note = Target: FXN; (-) strand; PAM type: NNGRRT; PAM sequence: TGGAGT
  source 1..20: mol_type = other DNA
gattctcctgccgcagcctc

SEQ ID NO: 5937 - DNA, 20 bp, synthetic construct
  misc_feature 1..20: note = Description of Artificial Sequence: Synthetic oligonucleotide
  misc_feature 1..20: note = Target: FXN; (-) strand; PAM type: NNGRRT; PAM sequence: CGGAGT
  source 1..20: mol_type = other DNA
tcttgctctgtcgcccaggc

SEQ ID NO: 5938 - DNA, 20 bp, synthetic construct
  misc_feature 1..20: note = Description of Artificial Sequence: Synthetic oligonucleotide
  misc_feature 1..20: note = Target: FXN; (-) strand; PAM type: NNGRRT; PAM sequence: CGGAGT
  source 1..20: mol_type = other DNA
attattattattttttgaga

SEQ ID NO: 5939 - DNA, 20 bp, synthetic construct
  misc_feature 1..20: note = Description of Artificial Sequence: Synthetic oligonucleotide
  misc_feature 1..20: note = Target: FXN; (-) strand; PAM type: NNGRRT; PAM sequence: AGGGGT
  source 1..20: mol_type = other DNA
cccatgctgtccacacaggc

SEQ ID NO: 5940 - DNA, 20 bp, synthetic construct
  misc_feature 1..20: note = Description of Artificial Sequence: Synthetic oligonucleotide
  misc_feature 1..20: note = Target: FXN; (-) strand; PAM type: NNGRRT; PAM sequence: GAGAAT
  source 1..20: mol_type = other DNA
tactcgggaggctgaggcag

SEQ ID NO: 5941 - DNA, 20 bp, synthetic construct
  misc_feature 1..20: note = Description of Artificial Sequence: Synthetic oligonucleotide
  misc_feature 1..20: note = Target: FXN; (-) strand; PAM type: NNGRRT; PAM sequence: GGGAGT
  source 1..20: mol_type = other DNA
tgggcggatcacctgaggtt

SEQ ID NO: 5942 - DNA, 20 bp, synthetic construct
  misc_feature 1..20: note = Description of Artificial Sequence: Synthetic oligonucleotide
  misc_feature 1..20: note = Target: FXN; (-) strand; PAM type: NNGRRT; PAM sequence: GCGGAT
  source 1..20: mol_type = other DNA
actttgggagggcgaggtgg

SEQ ID NO: 5943 - DNA, 20 bp, synthetic construct
  misc_feature 1..20: note = Description of Artificial Sequence: Synthetic oligonucleotide
  misc_feature 1..20: note = Target: FXN; (-) strand; PAM type: NNGRRT; PAM sequence: TTGGGT
  source 1..20: mol_type = other DNA
tcctgggcggcagcgccaag

SEQ ID NO: 5944 - DNA, 20 bp, synthetic construct
  misc_feature 1..20: note = Description of Artificial Sequence: Synthetic oligonucleotide
  misc_feature 1..20: note = Target: FXN; (-) strand; PAM type: NNGRRT; PAM sequence: CAGGAT
  source 1..20: mol_type = other DNA
agggctttaaaataattaaa

SEQ ID NO: 5945 - DNA, 20 bp, synthetic construct
  misc_feature 1..20: note = Description of Artificial Sequence: Synthetic oligonucleotide
  misc_feature 1..20: note = Target: FXN; (-) strand; PAM type: NNGRRT; PAM sequence: TAGGGT
  source 1..20: mol_type = other DNA
tttggagaccagggggagct

SEQ ID NO: 5946 - DNA, 20 bp, synthetic construct
  misc_feature 1..20: note = Description of Artificial Sequence: Synthetic oligonucleotide
  misc_feature 1..20: note = Target: FXN; (-) strand; PAM type: NNGRRT; PAM sequence: ATGAAT
  source 1..20: mol_type = other DNA
tcaagtgaactcagtttctg

SEQ ID NO: 5947 - DNA, 20 bp, synthetic construct
  misc_feature 1..20: note = Description of Artificial Sequence: Synthetic oligonucleotide
  misc_feature 1..20: note = Target: FXN; (-) strand; PAM type: NNGRRT; PAM sequence: AAGGGT
  source 1..20: mol_type = other DNA
tagatgcaaggggtggagaa

SEQ ID NO: 5948 - DNA, 20 bp, synthetic construct
  misc_feature 1..20: note = Description of Artificial Sequence: Synthetic oligonucleotide
  misc_feature 1..20: note = Target: FXN; (-) strand; PAM type: NNGRRT; PAM sequence: AGGGGT
  source 1..20: mol_type = other DNA
ctgctttagaagtagatgca

SEQ ID NO: 5949 - DNA, 20 bp, synthetic construct
  misc_feature 1..20: note = Description of Artificial Sequence: Synthetic oligonucleotide
  misc_feature 1..20: note = Target: FXN; (-) strand; PAM type: NNGRRT; PAM sequence: TAGAAT
  source 1..20: mol_type = other DNA
ttctttttaactagaaaatg

SEQ ID NO: 5950 - DNA, 20 bp, synthetic construct
  misc_feature 1..20: note = Description of Artificial Sequence: Synthetic oligonucleotide
  misc_feature 1..20: note = Target: FXN; (-) strand; PAM type: NNGRRT; PAM sequence: TTGAAT
  source 1..20: mol_type = other DNA
aatattttgtatgtactagg

SEQ ID NO: 5951 - DNA, 20 bp, synthetic construct
  misc_feature 1..20: note = Description of Artificial Sequence: Synthetic oligonucleotide
  misc_feature 1..20: note = Target: FXN; (-) strand; PAM type: NNGRRT; PAM sequence: TGGAAT
  source 1..20: mol_type = other DNA
ttaaaatactgattacatgt

SEQ ID NO: 5952 - DNA, 20 bp, synthetic construct
  misc_feature 1..20: note = Description of Artificial Sequence: Synthetic oligonucleotide
  misc_feature 1..20: note = Target: FXN; (-) strand; PAM type: NNGRRT; PAM sequence: TGGGAT
  source 1..20: mol_type = other DNA
gcctcggcctcccaaagtcc

SEQ ID NO: 5953 - DNA, 20 bp, synthetic construct
  misc_feature 1..20: note = Description of Artificial Sequence: Synthetic oligonucleotide
  misc_feature 1..20: note = Target: FXN; (-) strand; PAM type: NNGRRT; PAM sequence: TGGGGT
  source 1..20: mol_type = other DNA
gagctagtttttagtagaga

SEQ ID NO: 5954 - DNA, 20 bp, synthetic construct
  misc_feature 1..20: note = Description of Artificial Sequence: Synthetic oligonucleotide
  misc_feature 1..20: note = Target: FXN; (-) strand; PAM type: NNGRRT; PAM sequence: CCGAGT
  source 1..20: mol_type = other DNA
gattctcatgcctcagcctc

SEQ ID NO: 5955 - DNA, 20 bp, synthetic construct
  misc_feature 1..20: note = Description of Artificial Sequence: Synthetic oligonucleotide
  misc_feature 1..20: note = Target: FXN; (-) strand; PAM type: NNGRRT; PAM sequence: CAGAAT
  source 1..20: mol_type = other DNA
ctgattttttttgtatgtca

SEQ ID NO: 5956 - DNA, 20 bp, synthetic construct
  misc_feature 1..20: note = Description of Artificial Sequence: Synthetic oligonucleotide
  misc_feature 1..20: note = Target: FXN; (-) strand; PAM type: NNGRRT; PAM sequence: AAGAGT
  source 1..20: mol_type = other DNA
tggaagtatatgagtacgaa

SEQ ID NO: 5957 - DNA, 20 bp, synthetic construct
  misc_feature 1..20: note = Description of Artificial Sequence: Synthetic oligonucleotide
  misc_feature 1..20: note = Target: FXN; (-) strand; PAM type: NNGRRT; PAM sequence: ATGAGT
  source 1..20: mol_type = other DNA
ttgagatatgctggaagtat

SEQ ID NO: 5958 - DNA, 20 bp, synthetic construct
  misc_feature 1..20: note = Description of Artificial Sequence: Synthetic oligonucleotide
  misc_feature 1..20: note = Target: FXN; (-) strand; PAM type: NNGRRT; PAM sequence: GTGAAT
  source 1..20: mol_type = other DNA
agagcatttacttagaaatt

SEQ ID NO: 5959 - DNA, 20 bp, synthetic construct
  misc_feature 1..20: note = Description of Artificial Sequence: Synthetic oligonucleotide
  misc_feature 1..20: note = Target: FXN; (-) strand; PAM type: NNGRRT; PAM sequence: GTGAAT
  source 1..20: mol_type = other DNA
gtgaaccttcatttttaatt

SEQ ID NO: 5960 - DNA, 20 bp, synthetic construct
  misc_feature 1..20: note = Description of Artificial Sequence: Synthetic oligonucleotide
  misc_feature 1..20: note = Target: FXN; (-) strand; PAM type: NNGRRT; PAM sequence: TGGGAT
  source 1..20: mol_type = other DNA
atctcagcctcccaaagtgc

SEQ ID NO: 5961 - DNA, 20 bp, synthetic construct
  misc_feature 1..20: note = Description of Artificial Sequence: Synthetic oligonucleotide
  misc_feature 1..20: note = Target: FXN; (-) strand; PAM type: NNGRRT; PAM sequence: CGGGGT
  source 1..20: mol_type = other DNA
ttttgtatttttagtagaga

SEQ ID NO: 5962 - DNA, 20 bp, synthetic construct
  misc_feature 1..20: note = Description of Artificial Sequence: Synthetic oligonucleotide
  misc_feature 1..20: note = Target: FXN; (-) strand; PAM type: NNGRRT; PAM sequence: GTGAGT
  source 1..20: mol_type = other DNA
ctgagtagctgggattacag

SEQ ID NO: 5963 - DNA, 20 bp, synthetic construct
  misc_feature 1..20: note = Description of Artificial Sequence: Synthetic oligonucleotide
  misc_feature 1..20: note = Target: FXN; (-) strand; PAM type: NNGRRT; PAM sequence: TGGGAT
  source 1..20: mol_type = other DNA
gcctcagcctcctgagtagc

SEQ ID NO: 5964 - DNA, 20 bp, synthetic construct
  misc_feature 1..20: note = Description of Artificial Sequence: Synthetic oligonucleotide
  misc_feature 1..20: note = Target: FXN; (-) strand; PAM type: NNGRRT; PAM sequence: CTGAGT
  source 1..20: mol_type = other DNA
aattatcctgcctcagcctc

SEQ ID NO: 5965 - DNA, 20 bp, synthetic construct
  misc_feature 1..20: note = Description of Artificial Sequence: Synthetic oligonucleotide
  misc_feature 1..20: note = Target: FXN; (-) strand; PAM type: NNGRRT; PAM sequence: CCGGGT
  source 1..20: mol_type = other DNA
actgcaacctccaccacctc

SEQ ID NO: 5966 - DNA, 20 bp, synthetic construct
  misc_feature 1..20: note = Description of Artificial Sequence: Synthetic oligonucleotide
  misc_feature 1..20: note = Target: FXN; (-) strand; PAM type: NNGRRT; PAM sequence: CGGAGT
  source 1..20: mol_type = other DNA
ccttttttttttttttgaga

SEQ ID NO: 5967 - DNA, 20 bp, synthetic construct
  misc_feature 1..20: note = Description of Artificial Sequence: Synthetic oligonucleotide
  misc_feature 1..20: note = Target: FXN; (-) strand; PAM type: NNGRRT; PAM sequence: CTGGAT
  source 1..20: mol_type = other DNA
tggctaatgggactgaggac

SEQ ID NO: 5968 - DNA, 20 bp, synthetic construct
  misc_feature 1..20: note = Description of Artificial Sequence: Synthetic oligonucleotide
  misc_feature 1..20: note = Target: FXN; (-) strand; PAM type: NNGRRT; PAM sequence: CTGAGT
  source 1..20: mol_type = other DNA
tctgtggattcttggttctg

SEQ ID NO: 5969 - DNA, 20 bp, synthetic construct
  misc_feature 1..20: note = Description of Artificial Sequence: Synthetic oligonucleotide
  misc_feature 1..20: note = Target: FXN; (-) strand; PAM type: NNGRRT; PAM sequence: GTGGAT
  source 1..20: mol_type = other DNA
tgcttttaaaagccgtttct

SEQ ID NO: 5970 - DNA, 20 bp, synthetic construct
  misc_feature 1..20: note = Description of Artificial Sequence: Synthetic oligonucleotide
  misc_feature 1..20: note = Target: FXN; (-) strand; PAM type: NNGRRT; PAM sequence: CAGAGT
  source 1..20: mol_type = other DNA
cataggctgcctcgtggaat

SEQ ID NO: 5971 - DNA, 20 bp, synthetic construct
  misc_feature 1..20: note = Description of Artificial Sequence: Synthetic oligonucleotide
  misc_feature 1..20: note = Target: FXN; (-) strand; PAM type: NNGRRT; PAM sequence: TGGAAT
  source 1..20: mol_type = other DNA
aaaaaacataggctgcctcg

SEQ ID NO: 5972 - DNA, 20 bp, synthetic construct
  misc_feature 1..20: note = Description of Artificial Sequence: Synthetic oligonucleotide
  misc_feature 1..20: note = Target: FXN; (-) strand; PAM type: NNGRRT; PAM sequence: GGGAGT
  source 1..20: mol_type = other DNA
atagattaatgggttatcat

SEQ ID NO: 5973 - DNA, 20 bp, synthetic construct
  misc_feature 1..20: note = Description of Artificial Sequence: Synthetic oligonucleotide
  misc_feature 1..20: note = Target: FXN; (-) strand; PAM type: NNGRRT; PAM sequence: ATGGGT
  source 1..20: mol_type = other DNA
attaatccattcatagatta

SEQ ID NO: 5974 - DNA, 20 bp, synthetic construct
  misc_feature 1..20: note = Description of Artificial Sequence: Synthetic oligonucleotide
  misc_feature 1..20: note = Target: FXN; (-) strand; PAM type: NNGRRT; PAM sequence: ATGGAT
  source 1..20: mol_type = other DNA
tgaaggttcttccctcaata

SEQ ID NO: 5975 - DNA, 20 bp, synthetic construct
  misc_feature 1..20: note = Description of Artificial Sequence: Synthetic oligonucleotide
  misc_feature 1..20: note = Target: FXN; (-) strand; PAM type: NNGRRT; PAM sequence: CTGGGT
  source 1..20: mol_type = other DNA
gtggggcctttaagcggtga

SEQ ID NO: 5976 - DNA, 20 bp, synthetic construct
  misc_feature 1..20: note = Description of Artificial Sequence: Synthetic oligonucleotide
  misc_feature 1..20: note = Target: FXN; (-) strand; PAM type: NNGRRT; PAM sequence: TTGAAT
  source 1..20: mol_type = other DNA
aagagacagcatgctatggt

SEQ ID NO: 5977 - DNA, 20 bp, synthetic construct
  misc_feature 1..20: note = Description of Artificial Sequence: Synthetic oligonucleotide
  misc_feature 1..20: note = Target: FXN; (-) strand; PAM type: NNGRRT; PAM sequence: TTGAGT
  source 1..20: mol_type = other DNA
gtggatgccacaggagctta

SEQ ID NO: 5978 - DNA, 20 bp, synthetic construct
  misc_feature 1..20: note = Description of Artificial Sequence: Synthetic oligonucleotide
  misc_feature 1..20: note = Target: FXN; (-) strand; PAM type: NNGRRT; PAM sequence: GTGGAT
  source 1..20: mol_type = other DNA
gctgcccaaggcatgcagaa

SEQ ID NO: 5979 - DNA, 20 bp, synthetic construct
  misc_feature 1..20: note = Description of Artificial Sequence: Synthetic oligonucleotide
  misc_feature 1..20: note = Target: FXN; (-) strand; PAM type: NNGRRT; PAM sequence: TAGGAT
  source 1..20: mol_type = other DNA
ggcctaaagccaaaaggtca

SEQ ID NO: 5980 - DNA, 20 bp, synthetic construct
  misc_feature 1..20: note = Description of Artificial Sequence: Synthetic oligonucleotide
  misc_feature 1..20: note = Target: FXN; (-) strand; PAM type: NNGRRT; PAM sequence: GAGGGT
  source 1..20: mol_type = other DNA
aaaatgatttgaaagtgagt

SEQ ID NO: 5981 - DNA, 20 bp, synthetic construct
  misc_feature 1..20: note = Description of Artificial Sequence: Synthetic oligonucleotide
  misc_feature 1..20: note = Target: FXN; (-) strand; PAM type: NNGRRT; PAM sequence: GTGAGT
  source 1..20: mol_type = other DNA
acaataaaaatgatttgaaa

SEQ ID NO: 5982 - DNA, 20 bp, synthetic construct
  misc_feature 1..20: note = Description of Artificial Sequence: Synthetic oligonucleotide
  misc_feature 1..20: note = Target: FXN; (-) strand; PAM type: NNGRRT; PAM sequence: TGGGAT
  source 1..20: mol_type = other DNA
gcctcggcctcccaaagtgc

SEQ ID NO: 5983 - DNA, 20 bp, synthetic construct
  misc_feature 1..20: note = Description of Artificial Sequence: Synthetic oligonucleotide
  misc_feature 1..20: note = Target: FXN; (-) strand; PAM type: NNGRRT; PAM sequence: CAGGAT
  source 1..20: mol_type = other DNA
tggggtttcatcgtattagc

SEQ ID NO: 5984 - DNA, 20 bp, synthetic construct
  misc_feature 1..20: note = Description of Artificial Sequence: Synthetic oligonucleotide
  misc_feature 1..20: note = Target: FXN; (-) strand; PAM type: NNGRRT; PAM sequence: TGGGGT
  source 1..20: mol_type = other DNA
ttttgtatttttagtagaga

SEQ ID NO: 5985 - DNA, 20 bp, synthetic construct
  misc_feature 1..20: note = Description of Artificial Sequence: Synthetic oligonucleotide
  misc_feature 1..20: note = Target: FXN; (-) strand; PAM type: NNGRRT; PAM sequence: CCGAGT
  source 1..20: mol_type = other DNA
cattctcctgcctcagcgtc

(The sequence listing continues in the following parts.)

1.-45. (canceled)

46. A single-molecule guide RNA comprising: at least a spacer sequence that is an RNA sequence corresponding to any one of SEQ ID NOs: 5911, 5916, 5917, 5923, 6625, 6627, 6651, 6664, 9174, 9193, 9194, 9195, 9201, 9203, 9204, 9206, 9207, 9211, 9212, 9214, 9224, 9227, 9228, 9232, 9233, 9234, 9237, 9241, 9248, 9250, 9251, 9252, 9253, 9255, 9257, 9258, 9260, 9264, 9268, 9271, 9272, 9282, 9283, 9289, 9293, 9311, 9321, 9327, 9328, 9329, 9333, 9345, 9346, 9353, 9356, 9359, 9360, 9361, 9363, 9364, 9366, 9369, 9372, 9373, 9374, 9377, 9378, 9379, 9380, 9387, 9388, 9513, 9516, 9521, 16064, 16072, 16081, 16084, 16091, 16094, 16096, 16100, 16109, 16112, 16120, 16122, 16123, 16128, 16129, 16131, 16132, 16133, 16134, 16137, 16138, 16141, 16143, 16144, 16155, 16157, 16161, 16163, 16164, 16175, 16176, 16177, 16178, 16185, 16187, 16201, 16221, 16224, 16238, 16240, 16242, 16245, 16246, 16252, 16253, 16254, 16256, 16257, 16259, 16260, 16263, 16271, 16273, 16274, 16275, 16276, 16278, 16290, 16294, 16295, 16307, 16311, 16315, 16450, 16451, 16453, 16454, 16457, 16459, and 37549.

47. The single-molecule guide RNA of claim 46, wherein the single-molecule guide RNA further comprises a spacer extension region.

48. The single-molecule guide RNA of claim 46, wherein the single-molecule guide RNA further comprises a tracrRNA extension region.

49. The single-molecule guide RNA of claim 4, wherein the single-molecule guide RNA is chemically modified.

50. The single-molecule guide RNA of claim 46, wherein the single-molecule guide RNA is pre-complexed with one or more RNA-guided endonucleases, or one or more polynucleotides encoding the one or more RNA-guided endonucleases.

51. The single-molecule guide RNA of claim 50, wherein the one or more RNA-guided endonucleases comprises a Cas9 or Cpf1 endonuclease.

52. The single-molecule guide RNA of claim 51, wherein the Cas9 or Cpf1 endonuclease is selected from the group consisting of: S. pyogenes Cas9, S. aureus Cas9, N. meningitides Cas9, S. thermophilus CRISPR1 Cas9, S. thermophilus CRISPR 3 Cas9, T. denticola Cas9, L. bacterium ND2006 Cpf1 and Acidaminococcus sp. BV3L6 Cpf1, and variants having at least 90% homology to said endonucleases.

53. The single-molecule guide RNA of claim 52, wherein the Cas9 or Cpf1 endonuclease comprises one or more nuclear localization signals (NLSs).

54. The single-molecule guide RNA of claim 53, wherein at least one NLS is at or within 50 amino acids of the amino-terminus of the Cas9 or Cpf1 endonuclease and/or at least one NLS is at or within 50 amino acids of the carboxy-terminus of the Cas9 or Cpf1 endonuclease.

55. A DNA encoding the single-molecule guide RNA of claim 46.

56. The single-molecule guide RNA of claim 50, wherein the one or more RNA-guided endonuclease is selected from any of those sequences in SEQ ID NOs: 1-620 and variants having at least 90% homology to any of the sequences set forth in SEQ ID NOs: 1-620.

57. The single-molecule guide RNA of claim 50, wherein the single-molecule guide RNA is pre-complexed with one or more RNA encoding the one or more RNA-guided endonuclease.

58. The single-molecule guide RNA of claim 57, wherein the one or more RNA is chemically modified.

59. The single-molecule guide RNA of claim 58, wherein the one or more RNA is chemically modified in the coding region.

60. The single-molecule guide RNA of claim 57, wherein the one or more RNA is codon optimized.

61. The single-molecule guide RNA of claim 46, wherein the spacer sequence is an RNA sequence corresponding to any one of SEQ ID NOs: 16178, 16295, 16240, 9521, 16177, 9373, 9257, 16201, 16094, 9210, 9232, 16187, 9194, 16084, 16133, 16253, 16278, 9364, 16141, 9359, 16315, 9294, 16271, 16164, 16311, 9203, 9258, 16224, 16163, 16238, 16159, 9327, 9264, 16274, 9237, 9282, 16161, 16091, 16260, 16293, 16294, 16450, 16100, 16138, 9387, 9249, 16131, 9214, 37549, 16123, 16126, 9271, 16176, 9260, 16128, 9388, 16096, 16259, 9212, 9516, 9224, 9369, 9206, 9333, 16242, 9293, 16252, 9211, 16275, 9234, 16129, 16254, 9174, 9363, 9251, 16144, 9372, 16263, 16290, 16143, 16273, and 16245.

62. The single-molecule guide RNA of claim 46, wherein the spacer sequence is an RNA sequence corresponding to any one of SEQ ID NOs: 5911, 5916, 5917, 5923, 6625, 6627, 6664, and 6651.

63. The single-molecule guide RNA of claim 49, wherein the single-molecule guide RNA comprises one or more 2′—O-methyl phosphorothioate nucleotides.

64. The single-molecule guide RNA of claim 50, wherein the pre-complexing comprises a covalent attachment of the single-molecule guide RNA to the one or more RNA-guided endonucleases.

65. The single-molecule guide RNA of claim 46, wherein the single-molecule guide RNA is encoded in an AAV vector particle.
